United States Patent Application Publication US 2016/0319361 A1 - sequence listing, part 9

SEQ ID NO: 220919 - DNA, 30 bp, Artificial Sequence
  Synthetic oligonucleotide
atagcattcttaaacctcgactgaaattcg

SEQ ID NO: 220920 - DNA, 30 bp, Artificial Sequence
  Synthetic oligonucleotide
gtatcgtacttacataggtaaaacaattcg

SEQ ID NO: 220921 - DNA, 30 bp, Artificial Sequence
  Synthetic oligonucleotide
gaaacacttttagcgctacgtaacaattcg

SEQ ID NO: 220922 - DNA, 30 bp, Artificial Sequence
  Synthetic oligonucleotide
aagcggaggtgcttccgtctttagaattcg

SEQ ID NO: 220923 - DNA, 30 bp, Artificial Sequence
  Synthetic oligonucleotide
gttttgaggcgcgacctagcgtcgaattcg

SEQ ID NO: 220924 - DNA, 30 bp, Artificial Sequence
  Synthetic oligonucleotide
gggatcgaaatagtaaatatttcgaattcg

SEQ ID NO: 220925 - DNA, 30 bp, Artificial Sequence
  Synthetic oligonucleotide
tatatgcacagtctatggcgtcggaattcg

SEQ ID NO: 220926 - DNA, 30 bp, Artificial Sequence
  Synthetic oligonucleotide
cctgttaagtgactgacggctcgtaattcg

SEQ ID NO: 220927 - DNA, 30 bp, Artificial Sequence
  Synthetic oligonucleotide
gagctgcagaccgggatcacgcaacattcg

SEQ ID NO: 220928 - DNA, 30 bp, Artificial Sequence
  Synthetic oligonucleotide
cgctataaatgtattctgccaagacattcg

SEQ ID NO: 220929 - DNA, 30 bp, Artificial Sequence
  Synthetic oligonucleotide
ccatgcgcggagtctcgttatcagcattcg

SEQ ID NO: 220930 - DNA, 30 bp, Artificial Sequence
  Synthetic oligonucleotide
acccgctaaaaggcaaagggttggcattcg

SEQ ID NO: 220931 - DNA, 30 bp, Artificial Sequence
  Synthetic oligonucleotide
atattacagataaacttgattcatcattcg

SEQ ID NO: 220932 - DNA, 30 bp, Artificial Sequence
  Synthetic oligonucleotide
attggcatttgccaaggtaaatgagattcg

SEQ ID NO: 220933 - DNA, 30 bp, Artificial Sequence
  Synthetic oligonucleotide
tcgtcttaggattgataggaggtggattcg

SEQ ID NO: 220934 - DNA, 30 bp, Artificial Sequence
  Synthetic oligonucleotide
gaggtccccgactagctactgcatgattcg

SEQ ID NO: 220935 - DNA, 30 bp, Artificial Sequence
  Synthetic oligonucleotide
cagaaccaaatctgtctgcatgctgattcg

SEQ ID NO: 220936 - DNA, 29 bp, Artificial Sequence
  Synthetic oligonucleotide
gaacacggctaagagcaatgttatattcg

SEQ ID NO: 220937 - DNA, 30 bp, Artificial Sequence
  Synthetic oligonucleotide
ggaagctgtttgcgtgctaagcgctattcg

SEQ ID NO: 220938 - DNA, 30 bp, Artificial Sequence
  Synthetic oligonucleotide
aggacaggttgtatggcttaactttattcg

SEQ ID NO: 220939 - DNA, 30 bp, Artificial Sequence
  Synthetic oligonucleotide
ctcctaaatgacatattgcgtggcacttcg

SEQ ID NO: 220940 - DNA, 30 bp, Artificial Sequence
  Synthetic oligonucleotide
atccggtataggcaaggacagtatacttcg

SEQ ID NO: 220941 - DNA, 30 bp, Artificial Sequence
  Synthetic oligonucleotide
actccacgcgcatgccgtgcgcctacttcg

SEQ ID NO: 220942 - DNA, 30 bp, Artificial Sequence
  Synthetic oligonucleotide
tttaaaagatccacagtgaacaatccttcg

SEQ ID NO: 220943 - DNA, 30 bp, Artificial Sequence
  Synthetic oligonucleotide
gctcaagtctacttttcagtgttcgcttcg

SEQ ID NO: 220944 - DNA, 30 bp, Artificial Sequence
  Synthetic oligonucleotide
aaagacaacgcacattggacggaggcttcg

SEQ ID NO: 220945 - DNA, 30 bp, Artificial Sequence
  Synthetic oligonucleotide
gtgtaagccagcgggtttacggggtcttcg

SEQ ID NO: 220946 - DNA, 30 bp, Artificial Sequence
  Synthetic oligonucleotide
tcgtataagtagatcgcctggtggtcttcg

SEQ ID NO: 220947 - DNA, 30 bp, Artificial Sequence
  Synthetic oligonucleotide
ggccgaaatcttattccagctatttcttcg

SEQ ID NO: 220948 - DNA, 30 bp, Artificial Sequence
  Synthetic oligonucleotide
cggacttagtcattcacagataaaagttcg

SEQ ID NO: 220949 - DNA, 30 bp, Artificial Sequence
  Synthetic oligonucleotide
taccctaaagtcgcatgaatcgacagttcg

SEQ ID NO: 220950 - DNA, 30 bp, Artificial Sequence
  Synthetic oligonucleotide
ccattcagtaaaaacttctcaagcagttcg

SEQ ID NO: 220951 - DNA, 30 bp, Artificial Sequence
  Synthetic oligonucleotide
ttaagccttaatggagaatggggcagttcg

SEQ ID NO: 220952 - DNA, 30 bp, Artificial Sequence
  Synthetic oligonucleotide
taaaggttaaggtccatgacttagagttcg

SEQ ID NO: 220953 - DNA, 30 bp, Artificial Sequence
  Synthetic oligonucleotide
cacctcggccgaagcaaactaaggagttcg

SEQ ID NO: 220954 - DNA, 30 bp, Artificial Sequence
  Synthetic oligonucleotide
cctagccttgaggcggactgaaatagttcg

SEQ ID NO: 220955 - DNA, 30 bp, Artificial Sequence
  Synthetic oligonucleotide
ctataactcttgcagctggtttatagttcg

SEQ ID NO: 220956 - DNA, 30 bp, Artificial Sequence
  Synthetic oligonucleotide
tacgggggctattctgtaatacttagttcg

SEQ ID NO: 220957 - DNA, 30 bp, Artificial Sequence
  Synthetic oligonucleotide
accgaaattgtggatcatccatcacgttcg

SEQ ID NO: 220958 - DNA, 30 bp, Artificial Sequence
  Synthetic oligonucleotide
agagcaccccgcttcactaataaccgttcg

SEQ ID NO: 220959 - DNA, 30 bp, Artificial Sequence
  Synthetic oligonucleotide
taccgattggcgcgctcattgagccgttcg

SEQ ID NO: 220960 - DNA, 30 bp, Artificial Sequence
  Synthetic oligonucleotide
gtgtttcccacagtgctgtttagccgttcg

SEQ ID NO: 220961 - DNA, 30 bp, Artificial Sequence
  Synthetic oligonucleotide
gtcatgattgtcgctcacagttggcgttcg

SEQ ID NO: 220962 - DNA, 30 bp, Artificial Sequence
  Synthetic oligonucleotide
ggaccgctaagggtggttgtgaatcgttcg

SEQ ID NO: 220963 - DNA, 30 bp, Artificial Sequence
  Synthetic oligonucleotide
accgtaaactcggcctacatacaaggttcg

SEQ ID NO: 220964 - DNA, 30 bp, Artificial Sequence
  Synthetic oligonucleotide
acccgtaagatcactggcgaccaaggttcg

SEQ ID NO: 220965 - DNA, 30 bp, Artificial Sequence
  Synthetic oligonucleotide
tgtgggtgggagtgcacctatataggttcg

SEQ ID NO: 220966 - DNA, 30 bp, Artificial Sequence
  Synthetic oligonucleotide
aagtaaaaattaaatgagtaacacggttcg

SEQ ID NO: 220967 - DNA, 30 bp, Artificial Sequence
  Synthetic oligonucleotide
ctacgtatattgtttcacacgagcggttcg

SEQ ID NO: 220968 - DNA, 30 bp, Artificial Sequence
  Synthetic oligonucleotide
tcgttctttacacaatcccaaaagggttcg

SEQ ID NO: 220969 - DNA, 30 bp, Artificial Sequence
  Synthetic oligonucleotide
attgattaacttcaagttatttagggttcg

SEQ ID NO: 220970 - DNA, 30 bp, Artificial Sequence
  Synthetic oligonucleotide
gtcgtgttggatcactagtacaggggttcg

SEQ ID NO: 220971 - DNA, 30 bp, Artificial Sequence
  Synthetic oligonucleotide
ctcagtgttatcaagcgcggacggggttcg

SEQ ID NO: 220972 - DNA, 30 bp, Artificial Sequence
  Synthetic oligonucleotide
tacgcgtactttcaacagttaatgggttcg

SEQ ID NO: 220973 - DNA, 30 bp, Artificial Sequence
  Synthetic oligonucleotide
ccgcctgagcgtcaatatgtctgtggttcg

SEQ ID NO: 220974 - DNA, 30 bp, Artificial Sequence
  Synthetic oligonucleotide
tgccggtacatgggggatttgggatgttcg

SEQ ID NO: 220975 - DNA, 30 bp, Artificial Sequence
  Synthetic oligonucleotide
aaagttcatccatcgggttcatagtgttcg

SEQ ID NO: 220976 - DNA, 30 bp, Artificial Sequence
  Synthetic oligonucleotide
ctaatcgccacccttgactggaggtgttcg

SEQ ID NO: 220977 - DNA, 30 bp, Artificial Sequence
  Synthetic oligonucleotide
agggattgactggggtgggcgcggtgttcg

SEQ ID NO: 220978 - DNA, 30 bp, Artificial Sequence
  Synthetic oligonucleotide
gtgtgctgactctgcagaatctggtgttcg

SEQ ID NO: 220979 - DNA, 30 bp, Artificial Sequence
  Synthetic oligonucleotide
cctgacacacgcgggttatgaatgtgttcg

SEQ ID NO: 220980 - DNA, 30 bp, Artificial Sequence
  Synthetic oligonucleotide
gctcgtaaacatcataaagcagtttgttcg

SEQ ID NO: 220981 - DNA, 30 bp, Artificial Sequence
  Synthetic oligonucleotide
ttgacataaagttctaaaaaggcaatttcg

SEQ ID NO: 220982 - DNA, 30 bp, Artificial Sequence
  Synthetic oligonucleotide
tgtgatcgcctctacatggtgcgcatttcg

SEQ ID NO: 220983 - DNA, 30 bp, Artificial Sequence
  Synthetic oligonucleotide
aatgccacacactagcactcgaagatttcg

SEQ ID NO: 220984 - DNA, 30 bp, Artificial Sequence
  Synthetic oligonucleotide
tggcgaacatggctttcctcgcagatttcg

SEQ ID NO: 220985 - DNA, 30 bp, Artificial Sequence
  Synthetic oligonucleotide
taactccaacgatgtacgcctgctatttcg

SEQ ID NO: 220986 - DNA, 30 bp, Artificial Sequence
  Synthetic oligonucleotide
tcgggtagtcatctgtgagatattatttcg

SEQ ID NO: 220987 - DNA, 30 bp, Artificial Sequence
  Synthetic oligonucleotide
accacagggattggtcggccacttatttcg

SEQ ID NO: 220988 - DNA, 30 bp, Artificial Sequence
  Synthetic oligonucleotide
ataaactaagggagttagacctcactttcg

SEQ ID NO: 220989 - DNA, 30 bp, Artificial Sequence
  Synthetic oligonucleotide
taacacacgtaatgtgcttcaagactttcg

SEQ ID NO: 220990 - DNA, 30 bp, Artificial Sequence
  Synthetic oligonucleotide
tacaacaccttcgtaccccctcggctttcg

SEQ ID NO: 220991 - DNA, 30 bp, Artificial Sequence
  Synthetic oligonucleotide
cacctgcacaccaatgaaaactggctttcg

SEQ ID NO: 220992 - DNA, 30 bp, Artificial Sequence
  Synthetic oligonucleotide
gatgggagttgaaatgtaatcctgctttcg

SEQ ID NO: 220993 - DNA, 30 bp, Artificial Sequence
  Synthetic oligonucleotide
ggtcccagcgacggagagagctatctttcg

SEQ ID NO: 220994 - DNA, 30 bp, Artificial Sequence
  Synthetic oligonucleotide
ctgacagcgcgagtcatattgcaagtttcg

SEQ ID NO: 220995 - DNA, 30 bp, Artificial Sequence
  Synthetic oligonucleotide
ccagaagaaactcgataacacagagtttcg

SEQ ID NO: 220996 - DNA, 30 bp, Artificial Sequence
  Synthetic oligonucleotide
tactccgtcatctggattaagaaggtttcg

SEQ ID NO: 220997 - DNA, 30 bp, Artificial Sequence
  Synthetic oligonucleotide
aactggtgttggaatgtggcgtcggtttcg

SEQ ID NO: 220998 - DNA, 30 bp, Artificial Sequence
  Synthetic oligonucleotide
cggagacgcgactctacagtgagattttcg

SEQ ID NO: 220999 - DNA, 30 bp, Artificial Sequence
  Synthetic oligonucleotide
aacggatttgcgaggtcagaacggttttcg

SEQ ID NO: 221000 - DNA, 30 bp, Artificial Sequence
  Synthetic oligonucleotide
ctttccaacgcggagtctgaccggttttcg

SEQ ID NO: 221001 - DNA, 30 bp, Artificial Sequence
  Synthetic oligonucleotide
cattcaatggaactagggatccgtttttcg

SEQ ID NO: 221002 - DNA, 30 bp, Artificial Sequence
  Synthetic oligonucleotide
gtcctgggactaaaggttgccgcaaaaagg

SEQ ID NO: 221003 - DNA, 30 bp, Artificial Sequence
  Synthetic oligonucleotide
taaccgggagtccaacaagctgagaaaagg

SEQ ID NO: 221004 - DNA, 30 bp, Artificial Sequence
  Synthetic oligonucleotide
ggcttacggcagctaaagtgaaaacaaagg

SEQ ID NO: 221005 - DNA, 30 bp, Artificial Sequence
  Synthetic oligonucleotide
agactgctaacgtggaggatcgcacaaagg

SEQ ID NO: 221006 - DNA, 30 bp, Artificial Sequence
  Synthetic oligonucleotide
atgttgcaatgtttagtaccatcacaaagg

SEQ ID NO: 221007 - DNA, 30 bp, Artificial Sequence
  Synthetic oligonucleotide
gtcattctcaacgtgagaataatacaaagg

SEQ ID NO: 221008 - DNA, 30 bp, Artificial Sequence
  Synthetic oligonucleotide
acgatttagcggccgactgcggaccaaagg

SEQ ID NO: 221009 - DNA, 30 bp, Artificial Sequence
  Synthetic oligonucleotide
gacaactggcgtgggggtcaatctcaaagg

SEQ ID NO: 221010 - DNA, 30 bp, Artificial Sequence
  Synthetic oligonucleotide
acttcgtgtaggagggtaagctgtcaaagg

SEQ ID NO: 221011 - DNA, 30 bp, Artificial Sequence
  Synthetic oligonucleotide
tagcatatactgggactggggtgtcaaagg

SEQ ID NO: 221012 - DNA, 30 bp, Artificial Sequence
  Synthetic oligonucleotide
tatggggctcaattgatcttactagaaagg

SEQ ID NO: 221013 - DNA, 30 bp, Artificial Sequence
  Synthetic oligonucleotide
tcagcggagttgcctggactagaataaagg

SEQ ID NO: 221014 - DNA, 30 bp, Artificial Sequence
  Synthetic oligonucleotide
acctaaaaatgttggcctccttcataaagg

SEQ ID NO: 221015 - DNA, 30 bp, Artificial Sequence
  Synthetic oligonucleotide
taatgaatcattagccaggtacgataaagg

SEQ ID NO: 221016 - DNA, 30 bp, Artificial Sequence
  Synthetic oligonucleotide
gagggaacaaccggccaaaaggactaaagg

SEQ ID NO: 221017 - DNA, 30 bp, Artificial Sequence
  Synthetic oligonucleotide
gcactgggacaggcggtacgctactaaagg

SEQ ID NO: 221018 - DNA, 30 bp, Artificial Sequence
  Synthetic oligonucleotide
attatgctcgtggtcaacaggggctaaagg

SEQ ID NO: 221019 - DNA, 30 bp, Artificial Sequence
  Synthetic oligonucleotide
gcgagattactgctgcgcatatcgtaaagg

SEQ ID NO: 221020 - DNA, 30 bp, Artificial Sequence
  Synthetic oligonucleotide
agtaattgtagctgagacacatgttaaagg

SEQ ID NO: 221021 - DNA, 30 bp, Artificial Sequence
  Synthetic oligonucleotide
agataatccgggtccgcaggtgcaacaagg

SEQ ID NO: 221022 - DNA, 30 bp, Artificial Sequence
  Synthetic oligonucleotide
gaattgtaacagctcatatcgcacacaagg

SEQ ID NO: 221023 - DNA, 30 bp, Artificial Sequence
  Synthetic oligonucleotide
tcaacaaccgtgctatcatcttagacaagg

SEQ ID NO: 221024 - DNA, 30 bp, Artificial Sequence
  Synthetic oligonucleotide
ggtttaagagaaccaggaaacaggacaagg

SEQ ID NO: 221025 - DNA, 30 bp, Artificial Sequence
  Synthetic oligonucleotide
taaggatcactcacagagctccgaccaagg

SEQ ID NO: 221026 - DNA, 30 bp, Artificial Sequence
  Synthetic oligonucleotide
cctatggttgcaccgaacatagacccaagg

SEQ ID NO: 221027 - DNA, 30 bp, Artificial Sequence
  Synthetic oligonucleotide
gagttttcacagagtattatctgcccaagg

SEQ ID NO: 221028 - DNA, 30 bp, Artificial Sequence
  Synthetic oligonucleotide
atccgccaatgtgtttgggtgtaagcaagg

SEQ ID NO: 221029 - DNA, 30 bp, Artificial Sequence
  Synthetic oligonucleotide
caatctagcctactatacagcatcgcaagg

SEQ ID NO: 221030 - DNA, 30 bp, Artificial Sequence
  Synthetic oligonucleotide
atgcgcgatggtggggaaacggcctcaagg

SEQ ID NO: 221031 - DNA, 30 bp, Artificial Sequence
  Synthetic oligonucleotide
caagcgcagcggtttgtatggaagtcaagg

SEQ ID NO: 221032 - DNA, 30 bp, Artificial Sequence
  Synthetic oligonucleotide
ctaggacttctcagtgctacgcaaagaagg

SEQ ID NO: 221033 - DNA, 30 bp, Artificial Sequence
  Synthetic oligonucleotide
taattgaggatgcttggtgtaagaagaagg

SEQ ID NO: 221034 - DNA, 30 bp, Artificial Sequence
  Synthetic oligonucleotide
tcatacggtcggtagcgccgattcagaagg

SEQ ID NO: 221035 - DNA, 30 bp, Artificial Sequence
  Synthetic oligonucleotide
gactgttcaggaccgccccgggtacgaagg

SEQ ID NO: 221036 - DNA, 30 bp, Artificial Sequence
  Synthetic oligonucleotide
ggtgaagaggagctaatagttttccgaagg

SEQ ID NO: 221037 - DNA, 30 bp, Artificial Sequence
  Synthetic oligonucleotide
tgtaatcttggaagggcggtacgtcgaagg

SEQ ID NO: 221038 - DNA, 30 bp, Artificial Sequence
  Synthetic oligonucleotide
cgactcatgactggacctgctcaaggaagg

SEQ ID NO: 221039 - DNA, 30 bp, Artificial Sequence
  Synthetic oligonucleotide
cgttctgtgcgtagggtattagaaggaagg

SEQ ID NO: 221040 - DNA, 30 bp, Artificial Sequence
  Synthetic oligonucleotide
taccactatagtatagatgatggaggaagg

SEQ ID NO: 221041 - DNA, 30 bp, Artificial Sequence
  Synthetic oligonucleotide
ccagaatagagacatgctctactgggaagg

SEQ ID NO: 221042 - DNA, 30 bp, Artificial Sequence
  Synthetic oligonucleotide
caaagcaatgacatgcatatatgtggaagg

SEQ ID NO: 221043 - DNA, 30 bp, Artificial Sequence
  Synthetic oligonucleotide
cgcattcacccgctttgatgtggatgaagg

SEQ ID NO: 221044 - DNA, 30 bp, Artificial Sequence
  Synthetic oligonucleotide
cccaccaaaggtgaggcccagatatgaagg

SEQ ID NO: 221045 - DNA, 30 bp, Artificial Sequence
  Synthetic oligonucleotide
ttacgacaccggtgcagtagattatgaagg

SEQ ID NO: 221046 - DNA, 30 bp, Artificial Sequence
  Synthetic oligonucleotide
cagatatcgttgtaatgccggctaataagg

SEQ ID NO: 221047 - DNA, 30 bp, Artificial Sequence
  Synthetic oligonucleotide
acagaaaccgggtctatgtcaagcataagg

SEQ ID NO: 221048 - DNA, 30 bp, Artificial Sequence
  Synthetic oligonucleotide
cgcccgctggcgaactatttggagataagg

SEQ ID NO: 221049 - DNA, 30 bp, Artificial Sequence
  Synthetic oligonucleotide
ggacgcagttctcggaaatggtagataagg

SEQ ID NO: 221050 - DNA, 30 bp, Artificial Sequence
  Synthetic oligonucleotide
aacccgattcgcatgggttgcgatataagg

SEQ ID NO: 221051 - DNA, 30 bp, Artificial Sequence
  Synthetic oligonucleotide
cggattacggacgatactggacgcctaagg

SEQ ID NO: 221052 - DNA, 30 bp, Artificial Sequence
  Synthetic oligonucleotide
agacgtgccatcgccaggcaatttctaagg

SEQ ID NO: 221053 - DNA, 30 bp, Artificial Sequence
  Synthetic oligonucleotide
gaaacgtactatgtactacgcggagtaagg

SEQ ID NO: 221054 - DNA, 30 bp, Artificial Sequence
  Synthetic oligonucleotide
atacatgtggaacctacgtttgtagtaagg

SEQ ID NO: 221055 - DNA, 30 bp, Artificial Sequence
  Synthetic oligonucleotide
gaagcgggagcttcgaagaatgtcgtaagg

SEQ ID NO: 221056 - DNA, 30 bp, Artificial Sequence
  Synthetic oligonucleotide
tccaatgttggatgtgtggacgaggtaagg

SEQ ID NO: 221057 - DNA, 30 bp, Artificial Sequence
  Synthetic oligonucleotide
tccaagtgggtattgtggtaaagtgtaagg

SEQ ID NO: 221058 - DNA, 30 bp, Artificial Sequence
  Synthetic oligonucleotide
cccaagggtctggaaccaagcagtgtaagg

SEQ ID NO: 221059 - DNA, 30 bp, Artificial Sequence
  Synthetic oligonucleotide
ataggccctgtggtcttctttaaattaagg

SEQ ID NO: 221060 - DNA, 30 bp, Artificial Sequence
  Synthetic oligonucleotide
tgactcttgtcctgacgagtggcattaagg

SEQ ID NO: 221061 - DNA, 30 bp, Artificial Sequence
  Synthetic oligonucleotide
cgcgattctatctatgataggagattaagg

SEQ ID NO: 221062 - DNA, 30 bp, Artificial Sequence
  Synthetic oligonucleotide
aagtgccgtgtcgagatattatacttaagg

SEQ ID NO: 221063 - DNA, 30 bp, Artificial Sequence
  Synthetic oligonucleotide
gcttgaccgaaatggacacgttagttaagg

SEQ ID NO: 221064 - DNA, 30 bp, Artificial Sequence
  Synthetic oligonucleotide
tagcattgtcgtgttaattctgttttaagg

SEQ ID NO: 221065 - DNA, 30 bp, Artificial Sequence
  Synthetic oligonucleotide
ttagggcgcatccgttattatcgaaacagg

SEQ ID NO: 221066 - DNA, 30 bp, Artificial Sequence
  Synthetic oligonucleotide
tcgtgtgttacctacatagtactaaacagg

SEQ ID NO: 221067 - DNA, 30 bp, Artificial Sequence
  Synthetic oligonucleotide
gaaaccgtaatgtagcgtttttgcaacagg

SEQ ID NO: 221068 - DNA, 30 bp, Artificial Sequence
  Synthetic oligonucleotide
atcgtgtactattcgtaaaggatcaacagg

SEQ ID NO: 221069 - DNA, 30 bp, Artificial Sequence
  Synthetic oligonucleotide
ggatagtaggtcagatgccagctcaacagg

SEQ ID NO: 221070 - DNA, 30 bp, Artificial Sequence
  Synthetic oligonucleotide
aatgtctataagaaacagttgttcaacagg

SEQ ID NO: 221071 - DNA, 30 bp, Artificial Sequence
  Synthetic oligonucleotide
ttcgagtttacagacagattatgtaacagg

SEQ ID NO: 221072 - DNA, 30 bp, Artificial Sequence
  Synthetic oligonucleotide
aaagagtatctcgatacaattattaacagg

SEQ ID NO: 221073 - DNA, 30 bp, Artificial Sequence
  Synthetic oligonucleotide
catgaatctggataccttaatgttaacagg

SEQ ID NO: 221074 - DNA, 30 bp, Artificial Sequence
  Synthetic oligonucleotide
ttcgactgacatgagagggtcccacacagg

SEQ ID NO: 221075 - DNA, 30 bp, Artificial Sequence
  Synthetic oligonucleotide
gccgggatgttgaggttctgatgccacagg

SEQ ID NO: 221076 - DNA, 30 bp, Artificial Sequence
  Synthetic oligonucleotide
tgaccagacaatgaggctagaatgcacagg

SEQ ID NO: 221077 - DNA, 30 bp, Artificial Sequence
  Synthetic oligonucleotide
acaagagggccctctaggtgtcttcacagg

SEQ ID NO: 221078 - DNA, 30 bp, Artificial Sequence
  Synthetic oligonucleotide
tagttccaggttttatgcatgtaggacagg

SEQ ID NO: 221079 - DNA, 30 bp, Artificial Sequence
  Synthetic oligonucleotide
ctcctcctacatgtttaaaagcgggacagg

SEQ ID NO: 221080 - DNA, 30 bp, Artificial Sequence
  Synthetic oligonucleotide
tgatttttaatggatgtagacgatgacagg

SEQ ID NO: 221081 - DNA, 30 bp, Artificial Sequence
  Synthetic oligonucleotide
ccccgaatactgctatctgcctgatacagg

SEQ ID NO: 221082 - DNA, 30 bp, Artificial Sequence
  Synthetic oligonucleotide
acgcttgtaacggacatctttgcctacagg

SEQ ID NO: 221083 - DNA, 30 bp, Artificial Sequence
  Synthetic oligonucleotide
tggtcagtatggggataccggtagtacagg

SEQ ID NO: 221084 - DNA, 30 bp, Artificial Sequence
  Synthetic oligonucleotide
ccatagctatcggccagattgtattacagg

SEQ ID NO: 221085 - DNA, 30 bp, Artificial Sequence
  Synthetic oligonucleotide
agatattgggttgagaactgctgttacagg

SEQ ID NO: 221086 - DNA, 30 bp, Artificial Sequence
  Synthetic oligonucleotide
cattcaaaaggaaacctgtgattaaccagg

SEQ ID NO: 221087 - DNA, 30 bp, Artificial Sequence
  Synthetic oligonucleotide
cacctgtcttcctacctcacccacaccagg

SEQ ID NO: 221088 - DNA, 30 bp, Artificial Sequence
  Synthetic oligonucleotide
ccactacccagagattaacctgataccagg

SEQ ID NO: 221089 - DNA, 30 bp, Artificial Sequence
  Synthetic oligonucleotide
cggagcattctacgcagattaacccccagg

SEQ ID NO: 221090 - DNA, 30 bp, Artificial Sequence
  Synthetic oligonucleotide
gcttatgttctgacgtagtcgagccccagg

SEQ ID NO: 221091 - DNA, 30 bp, Artificial Sequence
  Synthetic oligonucleotide
tctgtaggcgcattataagccgtccccagg

SEQ ID NO: 221092 - DNA, 30 bp, Artificial Sequence
  Synthetic oligonucleotide
ataaccggtccgatggagaaatatcccagg

SEQ ID NO: 221093 - DNA, 30 bp, Artificial Sequence
  Synthetic oligonucleotide
gctagcgtagaaaaacgttagttcgccagg

SEQ ID NO: 221094 - DNA, 30 bp, Artificial Sequence
  Synthetic oligonucleotide
agcatgtacgttaaacgtcatacggccagg

SEQ ID NO: 221095 - DNA, 30 bp, Artificial Sequence
  Synthetic oligonucleotide
cgtttgggttcggtttttcttagggccagg

SEQ ID NO: 221096 - DNA, 30 bp, Artificial Sequence
  Synthetic oligonucleotide
gagtcagcatcaatatccctctcctccagg

SEQ ID NO: 221097 - DNA, 30 bp, Artificial Sequence
  Synthetic oligonucleotide
ttctttgctcgaagggttcccctaagcagg

SEQ ID NO: 221098 - DNA, 30 bp, Artificial Sequence
  Synthetic oligonucleotide
gaacgtaacatgcctcgcggaacgagcagg

SEQ ID NO: 221099 - DNA, 30 bp, Artificial Sequence
  Synthetic oligonucleotide
ctggcgctccaagaggtttagacgagcagg

SEQ ID NO: 221100 - DNA, 30 bp, Artificial Sequence
  Synthetic oligonucleotide
ttaaattgataaagatccagcatgagcagg

SEQ ID NO: 221101 - DNA, 30 bp, Artificial Sequence
  Synthetic oligonucleotide
aaggtatcccggtatgcggatgttagcagg

SEQ ID NO: 221102 - DNA, 30 bp, Artificial Sequence
  Synthetic oligonucleotide
aacatattctgtcgtctaggaccccgcagg

SEQ ID NO: 221103 - DNA, 30 bp, Artificial Sequence
  Synthetic oligonucleotide
tctagcgtagaaggtaggggggtccgcagg

SEQ ID NO: 221104 - DNA, 30 bp, Artificial Sequence
  Synthetic oligonucleotide
agattgcagcgatggcgctacgatcgcagg

SEQ ID NO: 221105 - DNA, 30 bp, Artificial Sequence
  Synthetic oligonucleotide
tggcacataattaaaaattatcagggcagg

SEQ ID NO: 221106 - DNA, 30 bp, Artificial Sequence
  Synthetic oligonucleotide
atcacagggacactttttcggcggggcagg

SEQ ID NO: 221107 - DNA, 30 bp, Artificial Sequence
  Synthetic oligonucleotide
atgtatgtattaagaatgtctccatgcagg

SEQ ID NO: 221108 - DNA, 30 bp, Artificial Sequence
  Synthetic oligonucleotide
ataatttgattcggagttaattgctgcagg

SEQ ID NO: 221109 - DNA, 30 bp, Artificial Sequence
  Synthetic oligonucleotide
gttcctgtacagttcaagatacgttgcagg

SEQ ID NO: 221110 - DNA, 30 bp, Artificial Sequence
  Synthetic oligonucleotide
gcgagtttcggtttgttctcttaaatcagg

SEQ ID NO: 221111 - DNA, 30 bp, Artificial Sequence
  Synthetic oligonucleotide
tactacgtgaggattgctgtcttcatcagg

SEQ ID NO: 221112 - DNA, 30 bp, Artificial Sequence
  Synthetic oligonucleotide
ctcaaaggatgaagtcagggctggatcagg

SEQ ID NO: 221113 - DNA, 30 bp, Artificial Sequence
  Synthetic oligonucleotide
acgactttcgtcgacaccattgttatcagg

SEQ ID NO: 221114 - DNA, 30 bp, Artificial Sequence
  Synthetic oligonucleotide
gaagcaatgtttttaacaatgcagctcagg

SEQ ID NO: 221115 - DNA, 30 bp, Artificial Sequence
  Synthetic oligonucleotide
atttgtcaccaccgatggcaggtgctcagg

SEQ ID NO: 221116 - DNA, 30 bp, Artificial Sequence
  Synthetic oligonucleotide
aagttgggaaaccttgcagattgtctcagg

SEQ ID NO: 221117 - DNA, 30 bp, Artificial Sequence
  Synthetic oligonucleotide
tagatttcttgggagaatatacttctcagg

SEQ ID NO: 221118 - DNA, 30 bp, Artificial Sequence
  Synthetic oligonucleotide
cactacattaaattgtgaaagcacttcagg

SEQ ID NO: 221119 - DNA, 30 bp, Artificial Sequence
  Synthetic oligonucleotide
gggctatatgcccatactttgaccttcagg

SEQ ID NO: 221120 - DNA, 30 bp, Artificial Sequence
  Synthetic oligonucleotide
acggtaactatgagtcacctgttcttcagg

SEQ ID NO: 221121 - DNA, 30 bp, Artificial Sequence
  Synthetic oligonucleotide
cattatgagtgttaccccggatttttcagg

SEQ ID NO: 221122 - DNA, 30 bp, Artificial Sequence
  Synthetic oligonucleotide
atgaaggttagaacctaacctgaaaagagg

SEQ ID NO: 221123 - DNA, 30 bp, Artificial Sequence
  Synthetic oligonucleotide
aaactcagccattccttcagaacaaagagg

SEQ ID NO: 221124 - DNA, 30 bp, Artificial Sequence
  Synthetic oligonucleotide
gttcagggaataatggtaatcggaaagagg

SEQ ID NO: 221125 - DNA, 30 bp, Artificial Sequence
  Synthetic oligonucleotide
tgccagttcggacacgcgactgggaagagg

SEQ ID NO: 221126 - DNA, 30 bp, Artificial Sequence
  Synthetic oligonucleotide
cctccgatttgggcatcattcggccagagg

SEQ ID NO: 221127 - DNA, 30 bp, Artificial Sequence
  Synthetic oligonucleotide
atgtctcgcaggtttacaagtggccagagg

SEQ ID NO: 221128 - DNA, 30 bp, Artificial Sequence
  Synthetic oligonucleotide
ttggacctcacagatacaattgcgcagagg

SEQ ID NO: 221129 - DNA, 30 bp, Artificial Sequence
  Synthetic oligonucleotide
cttagactggatcagttatcggtgcagagg

SEQ ID NO: 221130 - DNA, 30 bp, Artificial Sequence
  Synthetic oligonucleotide
tagtaacatcgtgggttacctgatcagagg

SEQ ID NO: 221131 - DNA, 30 bp, Artificial Sequence
  Synthetic oligonucleotide
cgctacatcggtgcccagtatgcagagagg

SEQ ID NO: 221132 - DNA, 30 bp, Artificial Sequence
  Synthetic oligonucleotide
gcctgttgtggtgtcgtcggattagagagg

SEQ ID NO: 221133 - DNA, 30 bp, Artificial Sequence
  Synthetic oligonucleotide
attgataaagcattttcagcgggcgagagg

SEQ ID NO: 221134 - DNA, 30 bp, Artificial Sequence
  Synthetic oligonucleotide
tctacgataggcgagtccgccatcgagagg

SEQ ID NO: 221135 - DNA, 30 bp, Artificial Sequence
  Synthetic oligonucleotide
aacatacgtacgtatggagggccggagagg

SEQ ID NO: 221136 - DNA, 30 bp, Artificial Sequence
  Synthetic oligonucleotide
cgtggcacgacgctctggcggggggagagg

SEQ ID NO: 221137 - DNA, 30 bp, Artificial Sequence
  Synthetic oligonucleotide
gacgatcagtttagggtgctctgggagagg

SEQ ID NO: 221138 - DNA, 30 bp, Artificial Sequence
  Synthetic oligonucleotide
attgcacgaatggccgcaatgtgggagagg

SEQ ID NO: 221139 - DNA, 30 bp, Artificial Sequence
  Synthetic oligonucleotide
agaacctcctttcctacagccatggagagg

SEQ ID NO: 221140 - DNA, 30 bp, Artificial Sequence
  Synthetic oligonucleotide
gtcctattggcacgcaaattcgtggagagg

SEQ ID NO: 221141 - DNA, 30 bp, Artificial Sequence
  Synthetic oligonucleotide
caaggtgtggaagacagtggaaatgagagg

SEQ ID NO: 221142 - DNA, 30 bp, Artificial Sequence
  Synthetic oligonucleotide
gaagcggtagggggaggtagagttgagagg

SEQ ID NO: 221143 - DNA, 30 bp, Artificial Sequence
  Synthetic oligonucleotide
agtcgttatccacgactgtcatcatagagg

SEQ ID NO: 221144 - DNA, 30 bp, Artificial Sequence
  Synthetic oligonucleotide
agggacgagctgttgtgcagatcatagagg

SEQ ID NO: 221145 - DNA, 30 bp, Artificial Sequence
  Synthetic oligonucleotide
aattcagatcggatctctatgttctagagg

SEQ ID NO: 221146 - DNA, 30 bp, Artificial Sequence
  Synthetic oligonucleotide
cggtttctgatacttgagagttcgtagagg

SEQ ID NO: 221147 - DNA, 30 bp, Artificial Sequence
  Synthetic oligonucleotide
tcctctttcaaactgaggatgaggtagagg

SEQ ID NO: 221148 - DNA, 30 bp, Artificial Sequence
  Synthetic oligonucleotide
ttccgaaactaaggtacattctgttagagg

SEQ ID NO: 221149 - DNA, 30 bp, Artificial Sequence
  Synthetic oligonucleotide
taatgagtgctcgtgccagctttttagagg

SEQ ID NO: 221150 - DNA, 30 bp, Artificial Sequence
  Synthetic oligonucleotide
tctgtgcagacagcctatcgcataacgagg

SEQ ID NO: 221151 - DNA, 30 bp, Artificial Sequence
  Synthetic oligonucleotide
ctggcaaagccaaatccaggcaacacgagg

SEQ ID NO: 221152 - DNA, 30 bp, Artificial Sequence
  Synthetic oligonucleotide
cgaggtctgattctatcttgggcgacgagg

SEQ ID NO: 221153 - DNA, 30 bp, Artificial Sequence
  Synthetic oligonucleotide
tcttggatagacggattgtggctgacgagg

SEQ ID NO: 221154 - DNA, 30 bp, Artificial Sequence
  Synthetic oligonucleotide
attatggtcgagaatgcttgactcccgagg

SEQ ID NO: 221155 - DNA, 30 bp, Artificial Sequence
  Synthetic oligonucleotide
agctcgggaagagggaacatcgtcccgagg

SEQ ID NO: 221156 - DNA, 30 bp, Artificial Sequence
  Synthetic oligonucleotide
cagcacagcggaatgcgtactcgcgcgagg

SEQ ID NO: 221157 - DNA, 30 bp, Artificial Sequence
  Synthetic oligonucleotide
ctacccatgctaggtgtcacagaggcgagg

SEQ ID NO: 221158 - DNA, 30 bp, Artificial Sequence
  Synthetic oligonucleotide
accatagtgcctttaaggctatcggcgagg

SEQ ID NO: 221159 - DNA, 30 bp, Artificial Sequence
  Synthetic oligonucleotide
tttaacggaaacggacgctaatatgcgagg

SEQ ID NO: 221160 - DNA, 30 bp, Artificial Sequence
  Synthetic oligonucleotide
atgctcgaagagtagtggcggggatcgagg

SEQ ID NO: 221161 - DNA, 30 bp, Artificial Sequence
  Synthetic oligonucleotide
aaaattccgtgtaaagtaacgttatcgagg

SEQ ID NO: 221162 - DNA, 30 bp, Artificial Sequence
  Synthetic oligonucleotide
tctcttctgcaccagggcgccaagtcgagg

SEQ ID NO: 221163 - DNA, 30 bp, Artificial Sequence
  Synthetic oligonucleotide
aaatgttgtggggcgtcgcgagagtcgagg

SEQ ID NO: 221164 - DNA, 30 bp, Artificial Sequence
  Synthetic oligonucleotide
cgaatgagtaatggagcaataacgtcgagg

SEQ ID NO: 221165 - DNA, 30 bp, Artificial Sequence
  Synthetic oligonucleotide
aggttggaggacattgcatcgtcgtcgagg

SEQ ID NO: 221166 - DNA, 30 bp, Artificial Sequence
  Synthetic oligonucleotide
acttgatcaggggtccaaatctcttcgagg

SEQ ID NO: 221167 - DNA, 30 bp, Artificial Sequence
  Synthetic oligonucleotide
ttaattgaaacgtcacgttttcacaggagg

SEQ ID NO: 221168 - DNA, 30 bp, Artificial Sequence
  Synthetic oligonucleotide
ataagtagacagtgggctcgaaagaggagg

SEQ ID NO: 221169 - DNA, 30 bp, Artificial Sequence
  Synthetic oligonucleotide
aattacgcggacaaaactcagaggaggagg

SEQ ID NO: 221170 - DNA, 30 bp, Artificial Sequence
  Synthetic oligonucleotide
tctatactagttacctaaattaataggagg

SEQ ID NO: 221171 - DNA, 30 bp, Artificial Sequence
  Synthetic oligonucleotide
atgctagcaccgcagagtcgaggtaggagg

SEQ ID NO: 221172 - DNA, 30 bp, Artificial Sequence
  Synthetic oligonucleotide
tcaatccgcatcgctggaggccaacggagg

SEQ ID NO: 221173 - DNA, 30 bp, Artificial Sequence
  Synthetic oligonucleotide
ttttcgctaaagaacatgcgcaacgggagg

SEQ ID NO: 221174 - DNA, 30 bp, Artificial Sequence
  Synthetic oligonucleotide
acgctggagtgtgtggtgtagtgcgggagg

SEQ ID NO: 221175 - DNA, 30 bp, Artificial Sequence
  Synthetic oligonucleotide
tgaaaagagtaactgtggacggaggggagg

SEQ ID NO: 221176 - DNA, 30 bp, Artificial Sequence
  Synthetic oligonucleotide
ctccaggagcaaataggtagggcggggagg

SEQ ID NO: 221177 - DNA, 30 bp, Artificial Sequence
  Synthetic oligonucleotide
ggtcaacggctataatgagtcctggggagg

SEQ ID NO: 221178 - DNA, 30 bp, Artificial Sequence
  Synthetic oligonucleotide
ttatcgaggaactggcgggttaaatggagg

SEQ ID NO: 221179 - DNA, 30 bp, Artificial Sequence
  Synthetic oligonucleotide
atagtatcataggcccgtgtaagatggagg

SEQ ID NO: 221180 - DNA, 30 bp, Artificial Sequence
  Synthetic oligonucleotide
accccgaaacgagaaagacgacactggagg

SEQ ID NO: 221181 - DNA, 30 bp, Artificial Sequence
  Synthetic oligonucleotide
ctgaaactagggttggccctggactggagg

SEQ ID NO: 221182 - DNA, 30 bp, Artificial Sequence
  Synthetic oligonucleotide
acactctccgatattttatgctcaatgagg

SEQ ID NO: 221183 - DNA, 30 bp, Artificial Sequence
  Synthetic oligonucleotide
caaggcgtgaaacacgacgctgtaatgagg

SEQ ID NO: 221184 - DNA, 30 bp, Artificial Sequence
  Synthetic oligonucleotide
acgcataaaagcacgctgaacaccatgagg

SEQ ID NO: 221185 - DNA, 30 bp, Artificial Sequence
  Synthetic oligonucleotide
cagtcgcgttgctgacttggcacgatgagg

SEQ ID NO: 221186 - DNA, 31 bp, Artificial Sequence
  Synthetic oligonucleotide
gacagtgggtagtgcattgatagatatgagg

SEQ ID NO: 221187 - DNA, 30 bp, Artificial Sequence
  Synthetic oligonucleotide
gttagaacgaaacacgagtgctatatgagg

SEQ ID NO: 221188 - DNA, 30 bp, Artificial Sequence
  Synthetic oligonucleotide
gaaccttgaaaaggtcggcaataactgagg

SEQ ID NO: 221189 - DNA, 30 bp, Artificial Sequence
  Synthetic oligonucleotide
agtgtaaaagagatattctaggacctgagg

SEQ ID NO: 221190 - DNA, 30 bp, Artificial Sequence
  Synthetic oligonucleotide
gtaatatctcagggctgggtattgctgagg

SEQ ID NO: 221191 - DNA, 30 bp, Artificial Sequence
  Synthetic oligonucleotide
gggcacgagactacatctggctctctgagg

SEQ ID NO: 221192 - DNA, 30 bp, Artificial Sequence
  Synthetic oligonucleotide
gaagtcagttctggcgatacgggtctgagg

SEQ ID NO: 221193 - DNA, 31 bp, Artificial Sequence
  Synthetic oligonucleotide
cgcgtcgattcgactccgggggggtctgagg

SEQ ID NO: 221194 - DNA, 30 bp, Artificial Sequence
  Synthetic oligonucleotide
ccaccgtcagtcaatcgatataacgtgagg

SEQ ID NO: 221195 - DNA, 30 bp, Artificial Sequence
  Synthetic oligonucleotide
gaaagtgggcttttaccacggaaggtgagg

SEQ ID NO: 221196 - DNA, 30 bp, Artificial Sequence
  Synthetic oligonucleotide
ggaagtcgagcaccaataacacgggtgagg

SEQ ID NO: 221197 - DNA, 30 bp, Artificial Sequence
  Synthetic oligonucleotide
aataagcacgcaggcgcgatttgggtgagg

SEQ ID NO: 221198 - DNA, 30 bp, Artificial Sequence
  Synthetic oligonucleotide
ggaccgaatagctgtgaaatactggtgagg

SEQ ID NO: 221199 - DNA, 30 bp, Artificial Sequence
  Synthetic oligonucleotide
cgattagacaccctgggcataaaattgagg

SEQ ID NO: 221200 - DNA, 30 bp, Artificial Sequence
  Synthetic oligonucleotide
cgttatacagcatgcagaggtccattgagg

SEQ ID NO: 221201 - DNA, 30 bp, Artificial Sequence
  Synthetic oligonucleotide
ttcaggatagagtgatgttttgccttgagg

SEQ ID NO: 221202 - DNA, 30 bp, Artificial Sequence
  Synthetic oligonucleotide
tcaagccgtcatgtacgtatatagttgagg

SEQ ID NO: 221203 - DNA, 30 bp, Artificial Sequence
  Synthetic oligonucleotide
gctcagatgactacgtggacccggttgagg

SEQ ID NO: 221204 - DNA, 30 bp, Artificial Sequence
  Synthetic oligonucleotide
tcagacaggcctaaaagtatgagtttgagg

SEQ ID NO: 221205 - DNA, 30 bp, Artificial Sequence
  Synthetic oligonucleotide
gcacatagtgttttaatttagaaaaatagg

SEQ ID NO: 221206 - DNA, 30 bp, Artificial Sequence
  Synthetic oligonucleotide
tctactatcggcacgacgtgagaaaatagg

SEQ ID NO: 221207 - DNA, 30 bp, Artificial Sequence
  Synthetic oligonucleotide
ctcagggcgtcgatatagcatccaaatagg

SEQ ID NO: 221208 - DNA, 30 bp, Artificial Sequence
  Synthetic oligonucleotide
tcgggaaatacttattggagcgtaaatagg

SEQ ID NO: 221209 - DNA, 30 bp, Artificial Sequence
  Synthetic oligonucleotide
ctagccgggcactatggacatagcaatagg

SEQ ID NO: 221210 - DNA, 29 bp, Artificial Sequence
  Synthetic oligonucleotide
taatggttctcgggaatgctaggaatagg

SEQ ID NO: 221211 - DNA, 30 bp, Artificial Sequence
  Synthetic oligonucleotide
tcacgttcccgtcacgtgtagcgtaatagg

SEQ ID NO: 221212 - DNA, 30 bp, Artificial Sequence
  Synthetic oligonucleotide
gtagattacccgtcaacacgaggtaatagg

SEQ ID NO: 221213 - DNA, 30 bp, Artificial Sequence
  Synthetic oligonucleotide
ataactttaattctaaccttactgcatagg

SEQ ID NO: 221214 - DNA, 30 bp, Artificial Sequence
  Synthetic oligonucleotide
tggcagagattctatcttgttctagatagg

SEQ ID NO: 221215 - DNA, 30 bp, Artificial Sequence
  Synthetic oligonucleotide
acattttgcagcccgatacaccgcgatagg

SEQ ID NO: 221216 - DNA, 30 bp, Artificial Sequence
  Synthetic oligonucleotide
ttggccggggcatgccggtcttatgatagg

SEQ ID NO: 221217 - DNA, 30 bp, Artificial Sequence
  Synthetic oligonucleotide
catcggatggagttcaacgtgtttgatagg

SEQ ID NO: 221218 - DNA, 30 bp, Artificial Sequence
  Synthetic oligonucleotide
cgaccacgcgcgctaacgcacacatatagg

SEQ ID NO: 221219 - DNA, 30 bp, Artificial Sequence
  Synthetic oligonucleotide
gccatcgacggctaacagaaaggatatagg

SEQ ID NO: 221220 - DNA, 30 bp, Artificial Sequence
  Synthetic oligonucleotide
gaagtttagtaagaggggcggtcctatagg

SEQ ID NO: 221221 - DNA, 30 bp, Artificial Sequence
  Synthetic oligonucleotide
gaagaaggggatctaatttaaatctatagg

SEQ ID NO: 221222 - DNA, 30 bp, Artificial Sequence
  Synthetic oligonucleotide
ccgggcggtgggtaactatccaggtatagg

SEQ ID NO: 221223 - DNA, 30 bp, Artificial Sequence
  Synthetic oligonucleotide
tcttagggagattacggccttggttatagg

SEQ ID NO: 221224 - DNA, 30 bp, Artificial Sequence
  Synthetic oligonucleotide
catcgcaatagctgcgtaggatcaactagg

SEQ ID NO: 221225 - DNA, 30 bp, Artificial Sequence
  Synthetic oligonucleotide
gttggaatcctgtttatacagggcactagg

SEQ ID NO: 221226 - DNA, 30 bp, Artificial Sequence
  Synthetic oligonucleotide
actaagaagacaaagcttgtgtagactagg

SEQ ID NO: 221227 - DNA, 30 bp, Artificial Sequence
  Synthetic oligonucleotide
atgacggtttcggttccgtcaccgactagg

SEQ ID NO: 221228 - DNA, 30 bp, Artificial Sequence
  Synthetic oligonucleotide
agcgcaacgggactctacacgcgacctagg

SEQ ID NO: 221229 - DNA, 30 bp, Artificial Sequence
  Synthetic oligonucleotide
cagggaccctacaatgcgaagaaccctagg

SEQ ID NO: 221230 - DNA, 30 bp, Artificial Sequence
  Synthetic oligonucleotide
ctacggacgtcagtaaagagactgcctagg

SEQ ID NO: 221231 - DNA, 30 bp, Artificial Sequence
  Synthetic oligonucleotide
gacatacctatttccccaagtctgcctagg

SEQ ID NO: 221232 - DNA, 30 bp, Artificial Sequence
  Synthetic oligonucleotide
ttactcggtatagcacgtgtagatcctagg

SEQ ID NO: 221233 - DNA, 30 bp, Artificial Sequence
  Synthetic oligonucleotide
gcaaatagattagacccagactgtcctagg

SEQ ID NO: 221234 - DNA, 30 bp, Artificial Sequence
  Synthetic oligonucleotide
gctgtgtggaagtttaggcgggttcctagg

SEQ ID NO: 221235 - DNA, 30 bp, Artificial Sequence
  Synthetic oligonucleotide
agtaaccaagatatcacttgacaagctagg

SEQ ID NO: 221236 - DNA, 30 bp, Artificial Sequence
  Synthetic oligonucleotide
ttaagaccgtgctgggtgtccaacgctagg

SEQ ID NO: 221237 - DNA, 30 bp, Artificial Sequence
  Synthetic oligonucleotide
ggagtagtgggggactccagtacggctagg

SEQ ID NO: 221238 - DNA, 30 bp, Artificial Sequence
  Synthetic oligonucleotide
tgttacgccaacgagcatacgattgctagg

SEQ ID NO: 221239 - DNA, 30 bp, Artificial Sequence
  Synthetic oligonucleotide
tgattcgaagatactagtcaagaatctagg

SEQ ID NO: 221240 - DNA, 30 bp, Artificial Sequence
  Synthetic oligonucleotide
tcggcacctgtgattaacatacactctagg

SEQ ID NO: 221241 - DNA, 30 bp, Artificial Sequence
  Synthetic oligonucleotide
tacacacctggtcaatcactgaaaagtagg

SEQ ID NO: 221242 - DNA, 30 bp, Artificial Sequence
  Synthetic oligonucleotide
gtaagttcagtagactgagagtccagtagg

SEQ ID NO: 221243 - DNA, 30 bp, Artificial Sequence
  Synthetic oligonucleotide
taccactaagtacaactgacttagagtagg

SEQ ID NO: 221244 - DNA, 30 bp, Artificial Sequence
  Synthetic oligonucleotide
ttgggtagtcctaagctagcagggagtagg

SEQ ID NO: 221245 - DNA, 30 bp, Artificial Sequence
  Synthetic oligonucleotide
acggtgtcccaactaaggtcttctagtagg

SEQ ID NO: 221246 - DNA, 30 bp, Artificial Sequence
  Synthetic oligonucleotide
catggacgaggtgagtccatccgtagtagg

SEQ ID NO: 221247 - DNA, 30 bp, Artificial Sequence
  Synthetic oligonucleotide
ggacaaccttggggtacctttccacgtagg

SEQ ID NO: 221248 - DNA, 30 bp, Artificial Sequence
  Synthetic oligonucleotide
ttatgacgtcccggacaggttaaccgtagg

SEQ ID NO: 221249 - DNA, 30 bp, Artificial Sequence
  Synthetic oligonucleotide
gttgcgagaatccgggtcggtacgcgtagg

SEQ ID NO: 221250 - DNA, 30 bp, Artificial Sequence
  Synthetic oligonucleotide
tgatattgaaagagaaaatgcggtcgtagg

SEQ ID NO: 221251 - DNA, 30 bp, Artificial Sequence
  Synthetic oligonucleotide
agccgtgcagtaatgcttggcctaggtagg

SEQ ID NO: 221252 - DNA, 30 bp, Artificial Sequence
  Synthetic oligonucleotide
atactgtatatttatgaacaagtaggtagg

SEQ ID NO: 221253 - DNA, 30 bp, Artificial Sequence
  Synthetic oligonucleotide
cactattcactctgggctttaaagggtagg

SEQ ID NO: 221254 - DNA, 30 bp, Artificial Sequence
  Synthetic oligonucleotide
tcacacgactgcgcctgtggatcgggtagg

SEQ ID NO: 221255 - DNA, 30 bp, Artificial Sequence
  Synthetic oligonucleotide
aacgatggtttcctgtcaagtgggggtagg

SEQ ID NO: 221256 - DNA, 30 bp, Artificial Sequence
  Synthetic oligonucleotide
cgtaaacgaattggtcataggtggggtagg

SEQ ID NO: 221257 - DNA, 30 bp, Artificial Sequence
  Synthetic oligonucleotide
gggggcttgatacggggtaatactggtagg

SEQ ID NO: 221258 - DNA, 30 bp, Artificial Sequence
  Synthetic oligonucleotide
tcaccattacttcgtgtcactattggtagg

SEQ ID NO: 221259 - DNA, 30 bp, Artificial Sequence
  Synthetic oligonucleotide
cagttataggatcctgctgtttagtgtagg

SEQ ID NO: 221260 - DNA, 30 bp, Artificial Sequence
  Synthetic oligonucleotide
tcgatgagattatcgatgcttaaaattagg

SEQ ID NO: 221261 - DNA, 30 bp, Artificial Sequence
  Synthetic oligonucleotide
gtgtagttacgtcccaccgagagcattagg

SEQ ID NO: 221262 - DNA, 30 bp, Artificial Sequence
  Synthetic oligonucleotide
atcggagcagttttatcgcaaccgattagg

SEQ ID NO: 221263 - DNA, 30 bp, Artificial Sequence
  Synthetic oligonucleotide
gatgacgagttcgcgttaaggagccttagg

SEQ ID NO: 221264 - DNA, 30 bp, Artificial Sequence
  Synthetic oligonucleotide
actaaatggtgctaagctaaaactcttagg

SEQ ID NO: 221265 - DNA, 30 bp, Artificial Sequence
  Synthetic oligonucleotide
cgttaaagcacataataagaccgagttagg

SEQ ID NO: 221266 - DNA, 30 bp, Artificial Sequence
  Synthetic oligonucleotide
aaagcgaacacgtgtaggataaaggttagg

SEQ ID NO: 221267 - DNA, 30 bp, Artificial Sequence
  Synthetic oligonucleotide
agatagttgggaatcgtcaccgcggttagg

SEQ ID NO: 221268 - DNA, 30 bp, Artificial Sequence
  Synthetic oligonucleotide
aaggacacagttcaactgtgagactttagg

SEQ ID NO: 221269 - DNA, 30 bp, Artificial Sequence
  Synthetic oligonucleotide
tctggaacgaataagtctggatactttagg

SEQ ID NO: 221270 - DNA, 30 bp, Artificial Sequence
  Synthetic oligonucleotide
aagatgttgtaagtgtcgtgtgggtttagg

SEQ ID NO: 221271 - DNA, 30 bp, Artificial Sequence
  Synthetic oligonucleotide
ctggacgcccgagtaagctctccttttagg

SEQ ID NO: 221272 - DNA, 30 bp, Artificial Sequence
  Synthetic oligonucleotide
ttctaccccatggggatccaggcaaaacgg

SEQ ID NO: 221273 - DNA, 30 bp, Artificial Sequence
  Synthetic oligonucleotide
cctccagctctgtatcacgactcaaaacgg

SEQ ID NO: 221274 - DNA, 30 bp, Artificial Sequence
  Synthetic oligonucleotide
tatcgatcgcatgcgtccaataacaaacgg

SEQ ID NO: 221275 - DNA, 30 bp, Artificial Sequence
  Synthetic oligonucleotide
agataaattgatcgctaaataggtaaacgg

SEQ ID NO: 221276 - DNA, 30 bp, Artificial Sequence
  Synthetic oligonucleotide
gaacggtttgctcaatggacatgtaaacgg

SEQ ID NO: 221277 - DNA, 30 bp, Artificial Sequence
  Synthetic oligonucleotide
acagcgtggagatcggagatacttaaacgg

SEQ ID NO: 221278 - DNA, 30 bp, Artificial Sequence
  Synthetic oligonucleotide
caacctttgatcgtcaccttaccccaacgg

SEQ ID NO: 221279 - DNA, 30 bp, Artificial Sequence
  Synthetic oligonucleotide
gtttgcggatcaccccataaaagccaacgg

SEQ ID NO: 221280 - DNA, 30 bp, Artificial Sequence
  Synthetic oligonucleotide
ggaaactctgcggatgtgctgatccaacgg

SEQ ID NO: 221281 - DNA, 30 bp, Artificial Sequence
  Synthetic oligonucleotide
gggtcatgtacattacaatctttccaacgg

SEQ ID NO: 221282 - DNA, 30 bp, Artificial Sequence
  Synthetic oligonucleotide
cgcacgcgcagcaggccaaaatctcaacgg

SEQ ID NO: 221283 - DNA, 30 bp, Artificial Sequence
  Synthetic oligonucleotide
ccaaatccggataggatggaaagtcaacgg

SEQ ID NO: 221284 - DNA, 30 bp, Artificial Sequence
  Synthetic oligonucleotide
cacacgaaaaaatcaaaattcgttcaacgg

SEQ ID NO: 221285 - DNA, 30 bp, Artificial Sequence
  Synthetic oligonucleotide
ttctcattgtcaatacatcatctagaacgg

SEQ ID NO: 221286 - DNA, 30 bp, Artificial Sequence
  Synthetic oligonucleotide
ggaatagcgggtggaggtccatacgaacgg

SEQ ID NO: 221287 - DNA, 30 bp, Artificial Sequence
  Synthetic oligonucleotide
ctgtgccgtacgaaggtcgatccggaacgg

SEQ ID NO: 221288 - DNA, 30 bp, Artificial Sequence
  Synthetic oligonucleotide
cctagaggtggcacaggtattgctgaacgg

SEQ ID NO: 221289 - DNA, 30 bp, Artificial Sequence
  Synthetic oligonucleotide
caacttcgtcatattacccagaactaacgg

SEQ ID NO: 221290 - DNA, 30 bp, Artificial Sequence
  Synthetic oligonucleotide
tttcgatgccaggaaaacagaaagtaacgg

SEQ ID NO: 221291 - DNA, 30 bp, Artificial Sequence
  Synthetic oligonucleotide
tacgggggtctaactggaaattcgtaacgg

SEQ ID NO: 221292 - DNA, 30 bp, Artificial Sequence
  Synthetic oligonucleotide
ccgtaccacagtattagatatgattaacgg

SEQ ID NO: 221293 - DNA, 30 bp, Artificial Sequence
  Synthetic oligonucleotide
atgaattttcaagtatcggcaggttaacgg

SEQ ID NO: 221294 - DNA, 30 bp, Artificial Sequence
  Synthetic oligonucleotide
gtaatcggatgccccctaaatatttaacgg

SEQ ID NO: 221295 - DNA, 30 bp, Artificial Sequence
  Synthetic oligonucleotide
aggaaggatctccatgctgataaaacacgg

SEQ ID NO: 221296 - DNA, 30 bp, Artificial Sequence
  Synthetic oligonucleotide
acaccggagggctggctagaataaacacgg

SEQ ID NO: 221297 - DNA, 30 bp, Artificial Sequence
  Synthetic oligonucleotide
accaggctccccgtaaaccttcgcacacgg

SEQ ID NO: 221298 - DNA, 30 bp, Artificial Sequence
  Synthetic oligonucleotide
gaggactacggaaagacaccgttgacacgg

SEQ ID NO: 221299 - DNA, 30 bp, Artificial Sequence
  Synthetic oligonucleotide
gtaatggattcatatgaggtccgtacacgg

SEQ ID NO: 221300 - DNA, 30 bp, Artificial Sequence
  Synthetic oligonucleotide
agagcctaattctcggggtcacgaccacgg

SEQ ID NO: 221301 - DNA, 30 bp, Artificial Sequence
  Synthetic oligonucleotide
gatttgctagtataagggcaacacccacgg

SEQ ID NO: 221302 - DNA, 30 bp, Artificial Sequence
  Synthetic oligonucleotide
acgtggaagtaccgttcgtggcacccacgg

SEQ ID NO: 221303 - DNA, 30 bp, Artificial Sequence
  Synthetic oligonucleotide
tacttcacatcagcccggtgttccccacgg

SEQ ID NO: 221304 - DNA, 30 bp, Artificial Sequence
  Synthetic oligonucleotide
aatgcgggtgattcaacacgtgcagcacgg

SEQ ID NO: 221305 - DNA, 30 bp, Artificial Sequence
  Synthetic oligonucleotide
gtcagctgacgaaaaaattggcacgcacgg

SEQ ID NO: 221306 - DNA, 30 bp, Artificial Sequence
  Synthetic oligonucleotide
aaaggccaggcaaaagatgagagcgcacgg

SEQ ID NO: 221307 - DNA, 30 bp, Artificial Sequence
  Synthetic oligonucleotide
ggtgatatctgggccaaaaaaagtgcacgg

SEQ ID NO: 221308 - DNA, 30 bp, Artificial Sequence
  Synthetic oligonucleotide
tgaactcataaagattcgtaataaagacgg

SEQ ID NO: 221309 - DNA, 30 bp, Artificial Sequence
  Synthetic oligonucleotide
ggattcttgatgatgatccatgagagacgg

SEQ ID NO: 221310 - DNA, 30 bp, Artificial Sequence
  Synthetic oligonucleotide
gccgacaacttattgattttggcgagacgg

SEQ ID NO: 221311 - DNA, 30 bp, Artificial Sequence
  Synthetic oligonucleotide
tattaaacccatgtgtagtgctcgagacgg

SEQ ID NO: 221312 - DNA, 30 bp, Artificial Sequence
  Synthetic oligonucleotide
atcacgcagtctgagagtgcgaatagacgg

SEQ ID NO: 221313 - DNA, 30 bp, Artificial Sequence
  Synthetic oligonucleotide
taactgaattttgaacgagcatctagacgg

SEQ ID NO: 221314 - DNA, 30 bp, Artificial Sequence
  Synthetic oligonucleotide
gagatggatagtgttaatggggaacgacgg

SEQ ID NO: 221315 - DNA, 30 bp, Artificial Sequence
  Synthetic oligonucleotide
ggctcccagtcccatcttggtacacgacgg

SEQ ID NO: 221316 - DNA, 30 bp, Artificial Sequence
  Synthetic oligonucleotide
gcgtactactgagagccgaaaagacgacgg

SEQ ID NO: 221317 - DNA, 30 bp, Artificial Sequence
  Synthetic oligonucleotide
gggtaaatagctccgggacgtaggcgacgg

SEQ ID NO: 221318 - DNA, 30 bp, Artificial Sequence
  Synthetic oligonucleotide
aggatcggatcctgtccaccgctgcgacgg

SEQ ID NO: 221319 - DNA, 30 bp, Artificial Sequence
  Synthetic oligonucleotide
aaggacccaggtgattggcgaaatcgacgg

SEQ ID NO: 221320 - DNA, 30 bp, Artificial Sequence
  Synthetic oligonucleotide
tgaagacttcgcaccccacggattcgacgg

SEQ ID NO: 221321 - DNA, 30 bp, Artificial Sequence
  Synthetic oligonucleotide
ttcacccactcgtacaaggaaagcggacgg

SEQ ID NO: 221322 - DNA, 30 bp, Artificial Sequence
  Synthetic oligonucleotide
gcatagcagttacaagccgagcggggacgg

SEQ ID NO: 221323 - DNA, 30 bp, Artificial Sequence
  Synthetic oligonucleotide
tggactatgtgaggtacgtccacatgacgg

SEQ ID NO: 221324 - DNA, 30 bp, Artificial Sequence
  Synthetic oligonucleotide
atatagttgcggtagaatgatggatgacgg

SEQ ID NO: 221325 - DNA, 30 bp, Artificial Sequence
  Synthetic oligonucleotide
cttaggaccagcggatgtgatgactgacgg

SEQ ID NO: 221326 - DNA, 30 bp, Artificial Sequence
  Synthetic oligonucleotide
gattcacgcctcagtggtaggacgtgacgg

SEQ ID NO: 221327 - DNA, 30 bp, Artificial Sequence
  Synthetic oligonucleotide
tccaccgcggtgtcgaaccaccaaatacgg

SEQ ID NO: 221328 - DNA, 30 bp, Artificial Sequence
  Synthetic oligonucleotide
tatacggcatcatatagaaggcaaatacgg

SEQ ID NO: 221329 - DNA, 30 bp, Artificial Sequence
  Synthetic oligonucleotide
caccttggaaaacggagtattccaatacgg

SEQ ID NO: 221330 - DNA, 30 bp, Artificial Sequence
  Synthetic oligonucleotide
cgtcgacgattacgtgacgtaagaatacgg

SEQ ID NO: 221331 - DNA, 30 bp, Artificial Sequence
  Synthetic oligonucleotide
atacatcacaggcgttaatatgagatacgg

SEQ ID NO: 221332 - DNA, 30 bp, Artificial Sequence
  Synthetic oligonucleotide
acctgtatagccttccggggcgggatacgg

SEQ ID NO: 221333 - DNA, 30 bp, Artificial Sequence
  Synthetic oligonucleotide
gccaaccttaacgaacatatcgggatacgg

SEQ ID NO: 221334 - DNA, 30 bp, Artificial Sequence
  Synthetic oligonucleotide
taaccggtcttactgagaataatgatacgg

SEQ ID NO: 221335 - DNA, 30 bp, Artificial Sequence
  Synthetic oligonucleotide
tttagcaggggcactaccgctctgatacgg

SEQ ID NO: 221336 - DNA, 30 bp, Artificial Sequence
  Synthetic oligonucleotide
gtaatggtctactgtcggttgaatatacgg

SEQ ID NO: 221337 - DNA, 30 bp, Artificial Sequence
  Synthetic oligonucleotide
tgttgcgccagtgaaaaggagcctatacgg

SEQ ID NO: 221338 - DNA, 30 bp, Artificial Sequence
  Synthetic oligonucleotide
gggcgttgctgctatcttagaagtatacgg

SEQ ID NO: 221339 - DNA, 30 bp, Artificial Sequence
  Synthetic oligonucleotide
agaggttattatgctgacatacgactacgg

SEQ ID NO: 221340 - DNA, 30 bp, Artificial Sequence
  Synthetic oligonucleotide
gaagtaatcagtgctcggaagaacctacgg

SEQ ID NO: 221341 - DNA, 30 bp, Artificial Sequence
  Synthetic oligonucleotide
ggaaaagtttcaatagatgggaacctacgg

SEQ ID NO: 221342 - DNA, 30 bp, Artificial Sequence
  Synthetic oligonucleotide
gaaggctggtaaagatatccaaccctacgg

SEQ ID NO: 221343 - DNA, 30 bp, Artificial Sequence
  Synthetic oligonucleotide
acaaagtagagcggatcacgcgcgctacgg

SEQ ID NO: 221344 - DNA, 30 bp, Artificial Sequence
  Synthetic oligonucleotide
taaagtcaatacgttagagaagtgctacgg

SEQ ID NO: 221345 - DNA, 30 bp, Artificial Sequence
  Synthetic oligonucleotide
gtaggccagccataagcgaaagatctacgg

SEQ ID NO: 221346 - DNA, 31 bp, Artificial Sequence
  Synthetic oligonucleotide
tagccaaaagttaggcgggcggcttctacgg

SEQ ID NO: 221347 - DNA, 30 bp, Artificial Sequence
  Synthetic oligonucleotide
aatacctcttctcatcaattgcccgtacgg

SEQ ID NO: 221348 - DNA, 30 bp, Artificial Sequence
  Synthetic oligonucleotide
gcacagcgtgtcgaccgcactttcgtacgg

SEQ ID NO: 221349 - DNA, 30 bp, Artificial Sequence
  Synthetic oligonucleotide
gcgggacgactgggggtccgagatgtacgg

SEQ ID NO: 221350 - DNA, 30 bp, Artificial Sequence
  Synthetic oligonucleotide
taccctaaaggtaccaacaacgatgtacgg

SEQ ID NO: 221351 - DNA, 30 bp, Artificial Sequence
  Synthetic oligonucleotide
tgcgagcgcctgctccggcgtaacttacgg

SEQ ID NO: 221352 - DNA, 30 bp, Artificial Sequence
  Synthetic oligonucleotide
tgcgggggccaagtggttgtccacttacgg

SEQ ID NO: 221353 - DNA, 30 bp, Artificial Sequence
  Synthetic oligonucleotide
aaggagcgtatgtacaccgcgaccttacgg

SEQ ID NO: 221354 - DNA, 30 bp, Artificial Sequence
  Synthetic oligonucleotide
atcggtgggggacgaatcgcagtcttacgg

SEQ ID NO: 221355 - DNA, 30 bp, Artificial Sequence
  Synthetic oligonucleotide
tcacgacttaacggctgacataagttacgg

SEQ ID NO: 221356 - DNA, 31 bp, Artificial Sequence
  Synthetic oligonucleotide
cctccgtactgaagaggtgtactttttacgg

SEQ ID NO: 221357 - DNA, 30 bp, Artificial Sequence
  Synthetic oligonucleotide
ggacgaaacttttagggaaatgaaaaccgg

SEQ ID NO: 221358 - DNA, 30 bp, Artificial Sequence
  Synthetic oligonucleotide
ttgcctgcgccattgcaatttagaaaccgg

SEQ ID NO: 221359 - DNA, 30 bp, Artificial Sequence
  Synthetic oligonucleotide
gattgagtatgcgatacttgagccaaccgg

SEQ ID NO: 221360 - DNA, 30 bp, Artificial Sequence
  Synthetic oligonucleotide
tctggagttgcgcggttcaatgccaaccgg

SEQ ID NO: 221361 - DNA, 30 bp, Artificial Sequence
  Synthetic oligonucleotide
tccaacaccgaatcgttcggtgtcaaccgg

SEQ ID NO: 221362 - DNA, 30 bp, Artificial Sequence
  Synthetic oligonucleotide
atcaattttcacgggtagccactgaaccgg

SEQ ID NO: 221363 - DNA, 31 bp, Artificial Sequence
  Synthetic oligonucleotide
ccgcttcaggctgttagcgcaagataaccgg

SEQ ID NO: 221364 - DNA, 30 bp, Artificial Sequence
  Synthetic oligonucleotide
catccgtgtaccaaggaacgggcacaccgg

SEQ ID NO: 221365 - DNA, 30 bp, Artificial Sequence
  Synthetic oligonucleotide
cactggtgatatgagtgatgtgtccaccgg

SEQ ID NO: 221366 - DNA, 30 bp, Artificial Sequence
  Synthetic oligonucleotide
gacgtgagttcgataggttagtcgcaccgg

SEQ ID NO: 221367 - DNA, 30 bp, Artificial Sequence
  Synthetic oligonucleotide
caactcgaataggagatcagtttgcaccgg

SEQ ID NO: 221368 - DNA, 30 bp, Artificial Sequence
  Synthetic oligonucleotide
gcatcgtgagccagcctacgaagtcaccgg

SEQ ID NO: 221369 - DNA, 30 bp, Artificial Sequence
  Synthetic oligonucleotide
ctggataatggttaagccaatcaagaccgg

SEQ ID NO: 221370 - DNA, 28 bp, Artificial Sequence
  Synthetic oligonucleotide
ctgcgatatgaggcttatatgagaccgg

SEQ ID NO: 221371 - DNA, 30 bp, Artificial Sequence
  Synthetic oligonucleotide
taaaatgataacagtaggaggtgtgaccgg

SEQ ID NO: 221372 - DNA, 30 bp, Artificial Sequence
  Synthetic oligonucleotide
tatgccacagtgtacataagttttgaccgg

SEQ ID NO: 221373 - DNA, 30 bp, Artificial Sequence
  Synthetic oligonucleotide
gaagattaattatgcgaagcataataccgg

SEQ ID NO: 221374 - DNA, 30 bp, Artificial Sequence
  Synthetic oligonucleotide
acctcaactgaggatcagtgagaaacccgg

SEQ ID NO: 221375 - DNA, 30 bp, Artificial Sequence
  Synthetic oligonucleotide
aagggacgtaaccgcgaatcactaacccgg

SEQ ID NO: 221376 - DNA, 30 bp, Artificial Sequence
  Synthetic oligonucleotide
cggcctgagagaaaggtctaagtcacccgg

SEQ ID NO: 221377 - DNA, 30 bp, Artificial Sequence
  Synthetic oligonucleotide
tcgtacgcaaaataattaggacatacccgg

SEQ ID NO: 221378 - DNA, 30 bp, Artificial Sequence
  Synthetic oligonucleotide
agtgagtgaatagtacactggggtacccgg

SEQ ID NO: 221379 - DNA, 31 bp, Artificial Sequence
  Synthetic oligonucleotide
ctaggatgggttatcaaaagccaaaccccgg

SEQ ID NO: 221380 - DNA, 30 bp, Artificial Sequence
  Synthetic oligonucleotide
cggtatgtctttggatggcccgagccccgg

SEQ ID NO: 221381 - DNA, 30 bp, Artificial Sequence
  Synthetic oligonucleotide
caacgtcggtgccggttgctcagtccccgg

SEQ ID NO: 221382 - DNA, 30 bp, Artificial Sequence
  Synthetic oligonucleotide
atgcgctaacgcacctatgcgggtccccgg

SEQ ID NO: 221383 - DNA, 30 bp, Artificial Sequence
  Synthetic oligonucleotide
ggttatgcgaccgagacgatcggggcccgg

SEQ ID NO: 221384 - DNA, 30 bp, Artificial Sequence
  Synthetic oligonucleotide
ctggagagattgtcgagtaatgctgcccgg

SEQ ID NO: 221385 - DNA, 30 bp, Artificial Sequence
  Synthetic oligonucleotide
caatatggcgaggctagtgattcatcccgg

SEQ ID NO: 221386 - DNA, 30 bp, Artificial Sequence
  Synthetic oligonucleotide
cgagtagaggtgacgtttacgacctcccgg

SEQ ID NO: 221387 - DNA, 27 bp, Artificial Sequence
  Synthetic oligonucleotide
cgctgagggggaatccgcaagtcccgg

SEQ ID NO: 221388 - DNA, 30 bp, Artificial Sequence
  Synthetic oligonucleotide
caaaacgcagtagatgctatctcttcccgg

SEQ ID NO: 221389 - DNA, 30 bp, Artificial Sequence
  Synthetic oligonucleotide
aggttagtgcgacgtggtaccaagagccgg

SEQ ID NO: 221390 - DNA, 30 bp, Artificial Sequence
  Synthetic oligonucleotide
aatacagtctcaaggagctgaacgagccgg

SEQ ID NO: 221391 - DNA, 30 bp, Artificial Sequence
  Synthetic oligonucleotide
aggatcggcatgactgcgggaagtagccgg

SEQ ID NO: 221392 - DNA, 30 bp, Artificial Sequence
  Synthetic oligonucleotide
atgtttcagttcgtaatacaggttagccgg

SEQ ID NO: 221393 - DNA, 30 bp, Artificial Sequence
  Synthetic oligonucleotide
atagatgaggttccggccgaaagccgccgg

SEQ ID NO: 221394 - DNA, 30 bp, Artificial Sequence
  Synthetic oligonucleotide
ggttgcagttttgggcactacgagcgccgg

SEQ ID NO: 221395 - DNA, 30 bp, Artificial Sequence
  Synthetic oligonucleotide
tgtgtgcgtgcgttattgttagctcgccgg

SEQ ID NO: 221396 - DNA, 30 bp, Artificial Sequence
  Synthetic oligonucleotide
gacgggtttatgtgctatggccaaggccgg

SEQ ID NO: 221397 - DNA, 30 bp, Artificial Sequence
  Synthetic oligonucleotide
atcaccgtcatttatgcgctgaacggccgg

SEQ ID NO: 221398 - DNA, 30 bp, Artificial Sequence
  Synthetic oligonucleotide
agcgttaagcaaaaatagagggtcggccgg

SEQ ID NO: 221399 - DNA, 30 bp, Artificial Sequence
  Synthetic oligonucleotide
aattggtttgagatgaaccaaggtggccgg

SEQ ID NO: 221400 - DNA, 30 bp, Artificial Sequence
  Synthetic oligonucleotide
tctagccacttggcctaagtgacctgccgg

SEQ ID NO: 221401 - DNA, 30 bp, Artificial Sequence
  Synthetic oligonucleotide
tcgacccgcttgagagaagcatagtgccgg

SEQ ID NO: 221402 - DNA, 30 bp, Artificial Sequence
  Synthetic oligonucleotide
cggtactgatcgtgatgtgccagttgccgg

SEQ ID NO: 221403 - DNA, 30 bp, Artificial Sequence
  Synthetic oligonucleotide
tcaggtgatatccaccaagtcctttgccgg

SEQ ID NO: 221404 - DNA, 30 bp, Artificial Sequence
  Synthetic oligonucleotide
aaaggaccaagtgcataggatgaaatccgg

SEQ ID NO: 221405 - DNA, 30 bp, Artificial Sequence
  Synthetic oligonucleotide
ttcaatcggcaggggggtaccctaatccgg

SEQ ID NO: 221406 - DNA, 30 bp, Artificial Sequence
  Synthetic oligonucleotide
aagttaagggatagtttccacttaatccgg

SEQ ID NO: 221407 - DNA, 30 bp, Artificial Sequence
  Synthetic oligonucleotide
cgataaccacatagtggaggaaggatccgg

SEQ ID NO: 221408 - DNA, 30 bp, Artificial Sequence
  Synthetic oligonucleotide
agaataggtccatgtccccttgggatccgg

SEQ ID NO: 221409 - DNA, 30 bp, Artificial Sequence
  Synthetic oligonucleotide
ttgtggaaatgttgctacaaaacactccgg

SEQ ID NO: 221410 - DNA, 30 bp, Artificial Sequence
  Synthetic oligonucleotide
actcccattagtacaaataggcgcctccgg

SEQ ID NO: 221411 - DNA, 30 bp, Artificial Sequence
  Synthetic oligonucleotide
tggcgagaaatggagtccgggttcctccgg

SEQ ID NO: 221412 - DNA, 30 bp, Artificial Sequence
  Synthetic oligonucleotide
tgatcacatacaaccgctaaattgctccgg

SEQ ID NO: 221413 - DNA, 30 bp, Artificial Sequence
  Synthetic oligonucleotide
aacacggcaggtttgtagtcaagggtccgg

SEQ ID NO: 221414 - DNA, 30 bp, Artificial Sequence
  Synthetic oligonucleotide
ctaaatctgctaagtgtgacccgattccgg

SEQ ID NO: 221415 - DNA, 30 bp, Artificial Sequence
  Synthetic oligonucleotide
tgtgccgtaagacagtcgtcatgattccgg

SEQ ID NO: 221416 - DNA, 30 bp, Artificial Sequence
  Synthetic oligonucleotide
ccggaggggaaagccagtatccgcttccgg

SEQ ID NO: 221417 - DNA, 30 bp, Artificial Sequence
  Synthetic oligonucleotide
ccttttaatgcccgtgtcgatcatttccgg

SEQ ID NO: 221418 - DNA, 30 bp, Artificial Sequence
  Synthetic oligonucleotide
tgtatagggataaacaaggtgactttccgg

SEQ ID NO: 221419 - DNA, 30 bp, Artificial Sequence
  Synthetic oligonucleotide
aaccaaagatgccgaactaatgctttccgg

SEQ ID NO: 221420 - DNA, 30 bp, Artificial Sequence
  Synthetic oligonucleotide
acagattccatttgctacgttgttttccgg

SEQ ID NO: 221421 - DNA, 30 bp, Artificial Sequence
  Synthetic oligonucleotide
ggcacttaaacgggtcgcgatgcaaagcgg

SEQ ID NO: 221422 - DNA, 30 bp, Artificial Sequence
  Synthetic oligonucleotide
tgctcgtttcagttggggagtagaaagcgg

SEQ ID NO: 221423 - DNA, 31 bp, Artificial Sequence
  Synthetic oligonucleotide
acaagactgaagcctggatcaaataaagcgg

SEQ ID NO: 221424 - DNA, 30 bp, Artificial Sequence
  Synthetic oligonucleotide
cgtctgaaaggaatgagaattttaaagcgg

SEQ ID NO: 221425 - DNA, 30 bp, Artificial Sequence
  Synthetic oligonucleotide
caccacgaattctttaaccgagccaagcgg

SEQ ID NO: 221426 - DNA, 30 bp, Artificial Sequence
  Synthetic oligonucleotide
tttggtctcagatacaggcaacaacagcgg

SEQ ID NO: 221427 - DNA, 30 bp, Artificial Sequence
  Synthetic oligonucleotide
tcggatcagagcttttgcacggcccagcgg

SEQ ID NO: 221428 - DNA, 30 bp, Artificial Sequence
  Synthetic oligonucleotide
gcatattatggtttctacggtgttcagcgg

SEQ ID NO: 221429 - DNA, 30 bp, Artificial Sequence
  Synthetic oligonucleotide
tgcaccacccatcatttccgcctagagcgg

SEQ ID NO: 221430 - DNA, 30 bp, Artificial Sequence
  Synthetic oligonucleotide
tggttcgtgcggcggtacgtgagcgagcgg

SEQ ID NO: 221431 - DNA, 30 bp, Artificial Sequence
  Synthetic oligonucleotide
atggccagttgaaggtcggtcggcgagcgg

SEQ ID NO: 221432 - DNA, 30 bp, Artificial Sequence
  Synthetic oligonucleotide
cgtagcccaggtctcggagtgcaggagcgg

SEQ ID NO: 221433 - DNA, 30 bp, Artificial Sequence
  Synthetic oligonucleotide
agaaccctcatttagtataagtatgagcgg

SEQ ID NO: 221434 - DNA, 30 bp, Artificial Sequence
  Synthetic oligonucleotide
gacgtcgggggcaccagaggaggatagcgg

SEQ ID NO: 221435 - DNA, 30 bp, Artificial Sequence
  Synthetic oligonucleotide
tactgagggtcgtctatgcggggctagcgg

SEQ ID NO: 221436 - DNA, 30 bp, Artificial Sequence
  Synthetic oligonucleotide
cctgcacaggatctggcttcaaggtagcgg

SEQ ID NO: 221437 - DNA, 30 bp, Artificial Sequence
  Synthetic oligonucleotide
cggagccgtaatatctctcaatggtagcgg

SEQ ID NO: 221438 - DNA, 30 bp, Artificial Sequence
  Synthetic oligonucleotide
cgcaggaacagagtatctattttgtagcgg

SEQ ID NO: 221439 - DNA, 30 bp, Artificial Sequence
  Synthetic oligonucleotide
actagtttggttaggtagtaagtttagcgg

SEQ ID NO: 221440 - DNA, 30 bp, Artificial Sequence
  Synthetic oligonucleotide
tcggtggtgcaagaaaccggtccaacgcgg

SEQ ID NO: 221441 - DNA, 30 bp, Artificial Sequence
  Synthetic oligonucleotide
acttgctaggctcagacaaaggcgacgcgg

SEQ ID NO: 221442 - DNA, 30 bp, Artificial Sequence
  Synthetic oligonucleotide
agggtagtacgaatgtagagcacggcgcgg

SEQ ID NO: 221443 - DNA, 30 bp, Artificial Sequence
  Synthetic oligonucleotide
cggttgccctaaaagtaacaattggcgcgg

SEQ ID NO: 221444 - DNA, 30 bp, Artificial Sequence
  Synthetic oligonucleotide
ccccgagttttggtgatccaggatgcgcgg

SEQ ID NO: 221445 - DNA, 30 bp, Artificial Sequence
  Synthetic oligonucleotide
cagtgtggtcaagtattaccaagtgcgcgg

SEQ ID NO: 221446 - DNA, 30 bp, Artificial Sequence
  Synthetic oligonucleotide
tcaacgagctcgacgtgggaacaatcgcgg

SEQ ID NO: 221447 - DNA, 30 bp, Artificial Sequence
  Synthetic oligonucleotide
ttggacgcatgtacaggatcataatcgcgg

SEQ ID NO: 221448 - DNA, 30 bp, Artificial Sequence
  Synthetic oligonucleotide
cttaacagtaatctaacggtttaatcgcgg

SEQ ID NO: 221449 - DNA, 30 bp, Artificial Sequence
  Synthetic oligonucleotide
aaccactgtggaagattatagacctcgcgg

SEQ ID NO: 221450 - DNA, 30 bp, Artificial Sequence
  Synthetic oligonucleotide
gcgtccagaaattgaatcaagggctcgcgg

SEQ ID NO: 221451 - DNA, 30 bp, Artificial Sequence
  Synthetic oligonucleotide
accgtcgtacaaaggctttggttctcgcgg

SEQ ID NO: 221452 - DNA, 30 bp, Artificial Sequence
  Synthetic oligonucleotide
acattgctaagtgtagtgaccatgtcgcgg

SEQ ID NO: 221453 - DNA, 30 bp, Artificial Sequence
  Synthetic oligonucleotide
acggcattagacaccctaagcagttcgcgg

SEQ ID NO: 221454 - DNA, 30 bp, Artificial Sequence
  Synthetic oligonucleotide
tctccagactctgcgaggcggggttcgcgg

SEQ ID NO: 221455 - DNA, 30 bp, Artificial Sequence
  Synthetic oligonucleotide
gagttactaatgattattcctgaaaggcgg

SEQ ID NO: 221456 - DNA, 30 bp, Artificial Sequence
  Synthetic oligonucleotide
ggataaaatagcagaggtcttggaaggcgg

SEQ ID NO: 221457 - DNA, 30 bp, Artificial Sequence
  Synthetic oligonucleotide
gactgggtaaattccgaaacacgcaggcgg

SEQ ID NO: 221458 - DNA, 30 bp, Artificial Sequence
  Synthetic oligonucleotide
ccttacactcagctcgcatatgcgaggcgg

SEQ ID NO: 221459 - DNA, 30 bp, Artificial Sequence
  Synthetic oligonucleotide
cacgcagcggaaagtcagaaccggaggcgg

SEQ ID NO: 221460 - DNA, 30 bp, Artificial Sequence
  Synthetic oligonucleotide
ttcgtaaggtcggcctttgttatgaggcgg

SEQ ID NO: 221461 - DNA, 30 bp, Artificial Sequence
  Synthetic oligonucleotide
ggacctaagcttagaggttccgataggcgg

SEQ ID NO: 221462 - DNA, 30 bp, Artificial Sequence
  Synthetic oligonucleotide
gaatgttatgtaggggaacatgaacggcgg

SEQ ID NO: 221463 - DNA, 30 bp, Artificial Sequence
  Synthetic oligonucleotide
ttctttgggctacagaatatgtctcggcgg

SEQ ID NO: 221464 - DNA, 30 bp, Artificial Sequence
  Synthetic oligonucleotide
gggcgtgcgggcgtgggtgattatgggcgg

SEQ ID NO: 221465 - DNA, 30 bp, Artificial Sequence
  Synthetic oligonucleotide
ctactgaaatgaacattttatggtgggcgg

SEQ ID NO: 221466 - DNA, 30 bp, Artificial Sequence
  Synthetic oligonucleotide
ttaggggtgaagtgtacgatctgtgggcgg

SEQ ID NO: 221467 - DNA, 30 bp, Artificial Sequence
  Synthetic oligonucleotide
cgggccaagtatatttgttaattatggcgg

SEQ ID NO: 221468 - DNA, 30 bp, Artificial Sequence
  Synthetic oligonucleotide
gcagtcacgggtaagatacgagcctggcgg

SEQ ID NO: 221469 - DNA, 30 bp, Artificial Sequence
  Synthetic oligonucleotide
ttctaggtaactacataatggtcttggcgg

SEQ ID NO: 221470 - DNA, 30 bp, Artificial Sequence
  Synthetic oligonucleotide
tgtgttaattgcctcggtctcataatgcgg

SEQ ID NO: 221471 - DNA, 30 bp, Artificial Sequence
  Synthetic oligonucleotide
ctgcaaagccaaggagacgtctagatgcgg

SEQ ID NO: 221472 - DNA, 30 bp, Artificial Sequence
  Synthetic oligonucleotide
aaaatccacgcatgtgataccaatatgcgg

SEQ ID NO: 221473 - DNA, 30 bp, Artificial Sequence
  Synthetic oligonucleotide
tttcccaagaaggaggctataagtatgcgg

SEQ ID NO: 221474 - DNA, 30 bp, Artificial Sequence
  Synthetic oligonucleotide
agtccagtagtaatatttacgtcactgcgg

SEQ ID NO: 221475 - DNA, 30 bp, Artificial Sequence
  Synthetic oligonucleotide
gcgaatagattctcgtctaaaggagtgcgg

SEQ ID NO: 221476 - DNA, 30 bp, Artificial Sequence
  Synthetic oligonucleotide
acccgggaggttatacgggagactgtgcgg

SEQ ID NO: 221477 - DNA, 30 bp, Artificial Sequence
  Synthetic oligonucleotide
cggttcttgggggatataacgggcttgcgg

SEQ ID NO: 221478 - DNA, 30 bp, Artificial Sequence
  Synthetic oligonucleotide
ttgggttccacctctgttgcattcttgcgg

SEQ ID NO: 221479 - DNA, 30 bp, Artificial Sequence
  Synthetic oligonucleotide
tccatttcaaccatcccttctaagttgcgg

SEQ ID NO: 221480 - DNA, 30 bp, Artificial Sequence
  Synthetic oligonucleotide
gcagggtgttgacccgtgtttgagttgcgg

SEQ ID NO: 221481 - DNA, 30 bp, Artificial Sequence
  Synthetic oligonucleotide
ccaaggacttatgataacgtaaggttgcgg

SEQ ID NO: 221482 - DNA, 30 bp, Artificial Sequence
  Synthetic oligonucleotide
gttgttggacttatgatgtctaaaaatcgg

SEQ ID NO: 221483 - DNA, 30 bp, Artificial Sequence
  Synthetic oligonucleotide
acctggggataatcctctcggccaaatcgg

SEQ ID NO: 221484 - DNA, 30 bp, Artificial Sequence
  Synthetic oligonucleotide
actgaagaagtcgtgccttggcgcaatcgg

SEQ ID NO: 221485 - DNA, 30 bp, Artificial Sequence
  Synthetic oligonucleotide
ctacgaaggattttataccgtgcgaatcgg

SEQ ID NO: 221486 - DNA, 30 bp, Artificial Sequence
  Synthetic oligonucleotide
ccttctgctatcttccggccgtctaatcgg

SEQ ID NO: 221487 - DNA, 30 bp, Artificial Sequence
  Synthetic oligonucleotide
cgtttgtagttaagggcgcactcacatcgg

SEQ ID NO: 221488 - DNA, 30 bp, Artificial Sequence
  Synthetic oligonucleotide
ttgcttatcctaaacttcctgttacatcgg

SEQ ID NO: 221489 - DNA, 30 bp, Artificial Sequence
  Synthetic oligonucleotide
gaagtgtgcgtactgaccgttaggcatcgg

SEQ ID NO: 221490 - DNA, 30 bp, Artificial Sequence
  Synthetic oligonucleotide
tcattgcagacgggttcgcagtttcatcgg

SEQ ID NO: 221491 - DNA, 30 bp, Artificial Sequence
  Synthetic oligonucleotide
ggcgccgggaacttaagcagtctagatcgg

SEQ ID NO: 221492 - DNA, 30 bp, Artificial Sequence
  Synthetic oligonucleotide
taggtattccttaccaatctcgtcgatcgg

SEQ ID NO: 221493 - DNA, 30 bp, Artificial Sequence
  Synthetic oligonucleotide
acgactattgcattggttgccgttgatcgg

SEQ ID NO: 221494 - DNA, 30 bp, Artificial Sequence
  Synthetic oligonucleotide
gaaggagacccctcatgcaccatatatcgg

SEQ ID NO: 221495 - DNA, 30 bp, Artificial Sequence
  Synthetic oligonucleotide
caatgtggttaggatctccatgtatatcgg

SEQ ID NO: 221496 - DNA, 30 bp, Artificial Sequence
  Synthetic oligonucleotide
ccacaacagaatctaatgcgtggctatcgg

SEQ ID NO: 221497 - DNA, 30 bp, Artificial Sequence
  Synthetic oligonucleotide
accgtttctacttggtgccgggggtatcgg

SEQ ID NO: 221498 - DNA, 30 bp, Artificial Sequence
  Synthetic oligonucleotide
acgttgcaaaacttccaaaggatgtatcgg

SEQ ID NO: 221499 - DNA, 30 bp, Artificial Sequence
  Synthetic oligonucleotide
ttgcgaaagaaagtactcgcagtgtatcgg

SEQ ID NO: 221500 - DNA, 30 bp, Artificial Sequence
  Synthetic oligonucleotide
gagtattggtggataagggtggattatcgg

SEQ ID NO: 221501 - DNA, 30 bp, Artificial Sequence
  Synthetic oligonucleotide
tgagcatgtcataacttgccaagttatcgg

SEQ ID NO: 221502 - DNA, 30 bp, Artificial Sequence
  Synthetic oligonucleotide
gatacaataaactcacaatcgcggactcgg

SEQ ID NO: 221503 - DNA, 30 bp, Artificial Sequence
  Synthetic oligonucleotide
tgaaagagtaaagggcccttattacctcgg

SEQ ID NO: 221504 - DNA, 30 bp, Artificial Sequence
  Synthetic oligonucleotide
gatagtatctcgcggaatcaaacccctcgg

SEQ ID NO: 221505 - DNA, 30 bp, Artificial Sequence
  Synthetic oligonucleotide
tggtagtagtggttgtggcgtgggcctcgg

SEQ ID NO: 221506 - DNA, 30 bp, Artificial Sequence
  Synthetic oligonucleotide
atcactggaacacgaggcctatacgctcgg

SEQ ID NO: 221507 - DNA, 30 bp, Artificial Sequence
  Synthetic oligonucleotide
ttgcataacactcttagccccaccgctcgg

SEQ ID NO: 221508 - DNA, 30 bp, Artificial Sequence
  Synthetic oligonucleotide
agttgctacgctcgctgtctacccgctcgg

SEQ ID NO: 221509 - DNA, 30 bp, Artificial Sequence
  Synthetic oligonucleotide
aagtcacgggagaggacatggtaggctcgg

SEQ ID NO: 221510 - DNA, 30 bp, Artificial Sequence
  Synthetic oligonucleotide
ccggatacgggggagcggcatgcggctcgg

SEQ ID NO: 221511 - DNA, 30 bp, Artificial Sequence
  Synthetic oligonucleotide
cagcatgtagactgcaggatagatgctcgg

SEQ ID NO: 221512 - DNA, 30 bp, Artificial Sequence
  Synthetic oligonucleotide
ggggagcatactgtgaagcgagcatctcgg

SEQ ID NO: 221513 - DNA, 30 bp, Artificial Sequence
  Synthetic oligonucleotide
gtataagtgcagtgggtaaaggactctcgg

SEQ ID NO: 221514 - DNA, 30 bp, Artificial Sequence
  Synthetic oligonucleotide
caaggttatgaggggaatatcagctctcgg

SEQ ID NO: 221515 - DNA, 30 bp, Artificial Sequence
  Synthetic oligonucleotide
acaaaaaggatggtcatcgcagcaagtcgg

SEQ ID NO: 221516 - DNA, 30 bp, Artificial Sequence
  Synthetic oligonucleotide
ccgcgcagtgataacatccggggaagtcgg

SEQ ID NO: 221517 - DNA, 30 bp, Artificial Sequence
  Synthetic oligonucleotide
gcggctgtcataccggagggattaagtcgg

SEQ ID NO: 221518 - DNA, 30 bp, Artificial Sequence
  Synthetic oligonucleotide
actgcggggcgctgcggataacggagtcgg

SEQ ID NO: 221519 - DNA, 30 bp, Artificial Sequence
  Synthetic oligonucleotide
gcacaatgggtagacgttaggtggagtcgg

SEQ ID NO: 221520 - DNA, 30 bp, Artificial Sequence
  Synthetic oligonucleotide
aacagcttagaagtcaagcggttgagtcgg

SEQ ID NO: 221521 - DNA, 30 bp, Artificial Sequence
  Synthetic oligonucleotide
aggggcgcaccggtgccgaagtgtagtcgg

SEQ ID NO: 221522 - DNA, 30 bp, Artificial Sequence
  Synthetic oligonucleotide
agtgcagttggttcgcccctcggacgtcgg

SEQ ID NO: 221523 - DNA, 30 bp, Artificial Sequence
  Synthetic oligonucleotide
tggtcgtaacggtgattttgcaaaggtcgg

SEQ ID NO: 221524 - DNA, 30 bp, Artificial Sequence
  Synthetic oligonucleotide
aaacttgaacaacagataagaagaggtcgg

SEQ ID NO: 221525 - DNA, 30 bp, Artificial Sequence
  Synthetic oligonucleotide
aaatctgaacaagagggtgaacgcggtcgg

SEQ ID NO: 221526 - DNA, 30 bp, Artificial Sequence
  Synthetic oligonucleotide
tgattgtaccatggctgccttggcggtcgg

SEQ ID NO: 221527 - DNA, 30 bp, Artificial Sequence
  Synthetic oligonucleotide
ttaacacatccgttttaagagtagggtcgg

SEQ ID NO: 221528 - DNA, 30 bp, Artificial Sequence
  Synthetic oligonucleotide
ctacatgaaaaaactgccgtacatggtcgg

SEQ ID NO: 221529 - DNA, 30 bp, Artificial Sequence
  Synthetic oligonucleotide
taaaaatcagttcgcgttcgaactggtcgg

SEQ ID NO: 221530 - DNA, 30 bp, Artificial Sequence
  Synthetic oligonucleotide
tacataattaatggccagaatggtggtcgg

SEQ ID NO: 221531 - DNA, 30 bp, Artificial Sequence
  Synthetic oligonucleotide
tagatacaggtcgcgtttgtcccctgtcgg

SEQ ID NO: 221532 - DNA, 30 bp, Artificial Sequence
  Synthetic oligonucleotide
tcatttcggcgcggggaaatcatttgtcgg

SEQ ID NO: 221533 - DNA, 30 bp, Artificial Sequence
  Synthetic oligonucleotide
agtgaatgtgccattcaacagctttgtcgg

SEQ ID NO: 221534 - DNA, 30 bp, Artificial Sequence
  Synthetic oligonucleotide
atcgtgacagaaggaatttgcttttgtcgg

SEQ ID NO: 221535 - DNA, 30 bp, Artificial Sequence
  Synthetic oligonucleotide
tcctgggaaagttaagtgaggggcattcgg

SEQ ID NO: 221536 - DNA, 30 bp, Artificial Sequence
  Synthetic oligonucleotide
ggtggcgtgaccccgaccggagtgattcgg

SEQ ID NO: 221537 - DNA, 30 bp, Artificial Sequence
  Synthetic oligonucleotide
caataaagtgtaacggcccagaaacttcgg

SEQ ID NO: 221538 - DNA, 30 bp, Artificial Sequence
  Synthetic oligonucleotide
acccgattgctcctgtcacttaaagttcgg

SEQ ID NO: 221539 - DNA, 30 bp, Artificial Sequence
  Synthetic oligonucleotide
atggaatcggatctcgttcaaatagttcgg

SEQ ID NO: 221540 - DNA, 31 bp, Artificial Sequence
  Synthetic oligonucleotide
tgacctacgaataggccggacaaatgttcgg

SEQ ID NO: 221541 - DNA, 30 bp, Artificial Sequence
  Synthetic oligonucleotide
tacttgtgtatagctaagtgccaatttcgg

SEQ ID NO: 221542 - DNA, 30 bp, Artificial Sequence
  Synthetic oligonucleotide
gtagaaatactaaatcaccctgaaaaaggg

SEQ ID NO: 221543 - DNA, 30 bp, Artificial Sequence
  Synthetic oligonucleotide
tgattctcattgcgcttccatagaaaaggg

SEQ ID NO: 221544 - DNA, 30 bp, Artificial Sequence
  Synthetic oligonucleotide
catttgagggaaccatacttggtaaaaggg

SEQ ID NO: 221545 - DNA, 30 bp, Artificial Sequence
  Synthetic oligonucleotide
agatcgcgggcgcaattttactcgaaaggg

SEQ ID NO: 221546 - DNA, 30 bp, Artificial Sequence
  Synthetic oligonucleotide
gcctgggggttcagtcttaccgggaaaggg

SEQ ID NO: 221547 - DNA, 30 bp, Artificial Sequence
  Synthetic oligonucleotide
cccgtaatcctgggacctgatccacaaggg

SEQ ID NO: 221548 - DNA, 30 bp, Artificial Sequence
  Synthetic oligonucleotide
caccgtgaagaatttgctgactagcaaggg

SEQ ID NO: 221549 - DNA, 30 bp, Artificial Sequence
  Synthetic oligonucleotide
tagtaagcggccagcgttgcggggcaaggg

SEQ ID NO: 221550 - DNA, 30 bp, Artificial Sequence
  Synthetic oligonucleotide
gcgcacgaccttgcttttgctagggaaggg

SEQ ID NO: 221551 - DNA, 30 bp, Artificial Sequence
  Synthetic oligonucleotide
tccaacggcggggagatactaggggaaggg

SEQ ID NO: 221552 - DNA, 30 bp, Artificial Sequence
  Synthetic oligonucleotide
attgtgatcgttgctcaaaacctggaaggg

SEQ ID NO: 221553 - DNA, 30 bp, Artificial Sequence
  Synthetic oligonucleotide
caggttagcgagccgctaacgctggaaggg

SEQ ID NO: 221554 - DNA, 30 bp, Artificial Sequence
  Synthetic oligonucleotide
aaggtgcagaagccctaccgtgatgaaggg

SEQ ID NO: 221555 - DNA, 30 bp, Artificial Sequence
  Synthetic oligonucleotide
tatcgtgtcccgcaacatttgagtgaaggg

SEQ ID NO: 221556 - DNA, 30 bp, Artificial Sequence
  Synthetic oligonucleotide
tagtccttgccttcgagaacttactaaggg

SEQ ID NO: 221557 - DNA, 30 bp, Artificial Sequence
  Synthetic oligonucleotide
tcaggttgggcgatcctattaatgtaaggg

SEQ ID NO: 221558 - DNA, 30 bp, Artificial Sequence
  Synthetic oligonucleotide
tcggaaaactcagcgcgccgcgaaacaggg

SEQ ID NO: 221559 - DNA, 30 bp, Artificial Sequence
  Synthetic oligonucleotide
gagtaaagatcaatttagtgaaacacaggg

SEQ ID NO: 221560 - DNA, 30 bp, Artificial Sequence
  Synthetic oligonucleotide
gagcttaatcaccccttcatatacacaggg

SEQ ID NO: 221561 - DNA, 30 bp, Artificial Sequence
  Synthetic oligonucleotide
ctagccaacagatatggtatgaccacaggg

SEQ ID NO: 221562 - DNA, 30 bp, Artificial Sequence
  Synthetic oligonucleotide
ggcctgtctgatcaggcgggaaggacaggg

SEQ ID NO: 221563 - DNA, 30 bp, Artificial Sequence
  Synthetic oligonucleotide
aatacacttttgttacctatccccccaggg

SEQ ID NO: 221564 - DNA, 29 bp, Artificial Sequence
  Synthetic oligonucleotide
cgtaagtctggcagcacacttaagcaggg

SEQ ID NO: 221565 - DNA, 30 bp, Artificial Sequence
  Synthetic oligonucleotide
acagtagagtgtgtgctcaatgtagcaggg

SEQ ID NO: 221566 - DNA, 30 bp, Artificial Sequence
  Synthetic oligonucleotide
tgctatggcatccgtttgcagagcgcaggg

SEQ ID NO: 221567 - DNA, 30 bp, Artificial Sequence
  Synthetic oligonucleotide
aatctagcaggttaaatgactttggcaggg

SEQ ID NO: 221568 - DNA, 30 bp, Artificial Sequence
  Synthetic oligonucleotide
agctaggtgtgtggtggctataatgcaggg

SEQ ID NO: 221569 - DNA, 30 bp, Artificial Sequence
  Synthetic oligonucleotide
tgacgttaaagcactgagaatactgcaggg

SEQ ID NO: 221570 - DNA, 30 bp, Artificial Sequence
  Synthetic oligonucleotide
gtcaggctctgatagttatttgcctcaggg

SEQ ID NO: 221571 - DNA, 30 bp, Artificial Sequence
  Synthetic oligonucleotide
ggatgggtcgcttggacgtgcgcgtcaggg

SEQ ID NO: 221572 - DNA, 30 bp, Artificial Sequence
  Synthetic oligonucleotide
cgcagaaatattttcctcctcgccagaggg

SEQ ID NO: 221573 - DNA, 30 bp, Artificial Sequence
  Synthetic oligonucleotide
aaaactcgaaaatacgcgatctcgagaggg

SEQ ID NO: 221574 - DNA, 31 bp, Artificial Sequence
  Synthetic oligonucleotide
taggcagtacctgatctattgccgtagaggg

SEQ ID NO: 221575 - DNA, 29 bp, Artificial Sequence
  Synthetic oligonucleotide
tatgtactatattaccaaaagttagaggg

SEQ ID NO: 221576 - DNA, 30 bp, Artificial Sequence
  Synthetic oligonucleotide
attggcatgtagtgctgcggagttagaggg

SEQ ID NO: 221577 - DNA, 30 bp, Artificial Sequence
  Synthetic oligonucleotide
ctaagtgtccgggatttaactaggcgaggg

SEQ ID NO: 221578 - DNA, 30 bp, Artificial Sequence
  Synthetic oligonucleotide
agtgttgtctcattgtaagatgttcgaggg

SEQ ID NO: 221579 - DNA, 30 bp, Artificial Sequence
  Synthetic oligonucleotide
cttgcggggtctacttcacaatcaggaggg

SEQ ID NO: 221580 - DNA, 30 bp, Artificial Sequence
  Synthetic oligonucleotide
actccgtgagctacgatagatccgggaggg

SEQ ID NO: 221581 - DNA, 30 bp, Artificial Sequence
  Synthetic oligonucleotide
taaatggttgaattctcatcagcgggaggg

SEQ ID NO: 221582 - DNA, 30 bp, Artificial Sequence
  Synthetic oligonucleotide
tacctttaggcgccctacatatggggaggg

SEQ ID NO: 221583 - DNA, 30 bp, Artificial Sequence
  Synthetic oligonucleotide
atttgaatactgcgcatagcgtatggaggg

SEQ ID NO: 221584 - DNA, 30 bp, Artificial Sequence
  Synthetic oligonucleotide
tcagtggggcgacggttaacacaatgaggg

SEQ ID NO: 221585 - DNA, 30 bp, Artificial Sequence
  Synthetic oligonucleotide
gttcgcctctccagggtaggtaactgaggg

SEQ ID NO: 221586 - DNA, 30 bp, Artificial Sequence
  Synthetic oligonucleotide
aatacaatcttgtgatctgttagctgaggg

SEQ ID NO: 221587 - DNA, 30 bp, Artificial Sequence
  Synthetic oligonucleotide
gtggtaatgaggtgatcttacaagtgaggg

SEQ ID NO: 221588 - DNA, 30 bp, Artificial Sequence
  Synthetic oligonucleotide
agtcggaagtcatgaattcttggttgaggg

SEQ ID NO: 221589 - DNA, 30 bp, Artificial Sequence
  Synthetic oligonucleotide
cggccggggtcaattgaacacctttgaggg

SEQ ID NO: 221590 - DNA, 30 bp, Artificial Sequence
  Synthetic oligonucleotide
ggtcgcgccgtcatccacctaggaataggg

SEQ ID NO: 221591 - DNA, 30 bp, Artificial Sequence
  Synthetic oligonucleotide
tgacggcgcctaaagtcaaggaagataggg

SEQ ID NO: 221592 - DNA, 30 bp, Artificial Sequence
  Synthetic oligonucleotide
taaagtaaacgagtaattttttggataggg

SEQ ID NO: 221593 - DNA, 30 bp, Artificial Sequence
  Synthetic oligonucleotide
cgtgctcggtcaaatagcggcaatataggg

SEQ ID NO: 221594 - DNA, 30 bp, Artificial Sequence
  Synthetic oligonucleotide
cagccgactggagggtgcggaggactaggg

SEQ ID NO: 221595 - DNA, 30 bp, Artificial Sequence
  Synthetic oligonucleotide
taagacaggcactccaatggggtgctaggg

SEQ ID NO: 221596 - DNA, 30 bp, Artificial Sequence
  Synthetic oligonucleotide
acagtcgtttttacctcggtatttctaggg

SEQ ID NO: 221597 - DNA, 30 bp, Artificial Sequence
  Synthetic oligonucleotide
ccccgctaagtcctaagtggagaagtaggg

SEQ ID NO: 221598 - DNA, 30 bp, Artificial Sequence
  Synthetic oligonucleotide
tgctacttatacctatggattaaggtaggg

SEQ ID NO: 221599 - DNA, 30 bp, Artificial Sequence
  Synthetic oligonucleotide
tctcgactttggttaagtaagcctgtaggg

SEQ ID NO: 221600 - DNA, 30 bp, Artificial Sequence
  Synthetic oligonucleotide
tcccgtggcttgcacaatggggtcttaggg

SEQ ID NO: 221601 - DNA, 30 bp, Artificial Sequence
  Synthetic oligonucleotide
ttcggttatgtatgacaaggcctgttaggg

SEQ ID NO: 221602 - DNA, 30 bp, Artificial Sequence
  Synthetic oligonucleotide
gaggagacgccaggcttgggattaaacggg

SEQ ID NO: 221603 - DNA, 31 bp, Artificial Sequence
  Synthetic oligonucleotide
tcatgcggcggatgacggtcggcgcaacggg

SEQ ID NO: 221604 - DNA, 30 bp, Artificial Sequence
  Synthetic oligonucleotide
tagagcgacatgatgaaggaactgaacggg

SEQ ID NO: 221605 - DNA, 30 bp, Artificial Sequence
  Synthetic oligonucleotide
agtcgggaggtaaggggggcgaataacggg

SEQ ID NO: 221606 - DNA, 30 bp, Artificial Sequence
  Synthetic oligonucleotide
ctaacgtatagttactccggagctaacggg

SEQ ID NO: 221607 - DNA, 30 bp, Artificial Sequence
  Synthetic oligonucleotide
ctagcataggcgggcaaattcatacacggg

SEQ ID NO: 221608 - DNA, 30 bp, Artificial Sequence
  Synthetic oligonucleotide
cggtgactgcgctattaggacaagcacggg

SEQ ID NO: 221609 - DNA, 30 bp, Artificial Sequence
  Synthetic oligonucleotide
tcttagtcgctagtgaatcgcaagcacggg

SEQ ID NO: 221610 - DNA, 30 bp, Artificial Sequence
  Synthetic oligonucleotide
ttccaatgtgtgcttgtaaagcggcacggg

SEQ ID NO: 221611 - DNA, 30 bp, Artificial Sequence
  Synthetic oligonucleotide
atcagagaatcgtgcttcagaacagacggg

SEQ ID NO: 221612 - DNA, 30 bp, Artificial Sequence
  Synthetic oligonucleotide
cggaagatcggggcctatggcttggacggg

SEQ ID NO: 221613 - DNA, 30 bp, Artificial Sequence
  Synthetic oligonucleotide
aatttacggcagaatgcacggtagtacggg

SEQ ID NO: 221614 - DNA, 30 bp, Artificial Sequence
  Synthetic oligonucleotide
gaaaagcacacactagccattataaccggg

SEQ ID NO: 221615 - DNA, 30 bp, Artificial Sequence
  Synthetic oligonucleotide
catactatgctgttagcggctggcaccggg

SEQ ID NO: 221616 - DNA, 30 bp, Artificial Sequence
  Synthetic oligonucleotide
ggtattaggtctcattggggctataccggg

SEQ ID NO: 221617 - DNA, 30 bp, Artificial Sequence
  Synthetic oligonucleotide
acttaatcagaacaatcagagaaacccggg

SEQ ID NO: 221618 - DNA, 30 bp, Artificial Sequence
  Synthetic oligonucleotide
tcatggtatggcatgagtcaagaacccggg

SEQ ID NO: 221619 - DNA, 30 bp, Artificial Sequence
  Synthetic oligonucleotide
ttgaatttaaccaagaattgcatccccggg

SEQ ID NO: 221620 - DNA, 30 bp, Artificial Sequence
  Synthetic oligonucleotide
aagttgccacaaggaattgagtagcccggg

SEQ ID NO: 221621 - DNA, 30 bp, Artificial Sequence
  Synthetic oligonucleotide
atatatggacctctagtgggggcgcccggg

SEQ ID NO: 221622 - DNA, 30 bp, Artificial Sequence
  Synthetic oligonucleotide
aaatgacgctacgtaatcgccaaagccggg

SEQ ID NO: 221623 - DNA, 30 bp, Artificial Sequence
  Synthetic oligonucleotide
ataaaccaatatggactgatcatagccggg

SEQ ID NO: 221624 - DNA, 30 bp, Artificial Sequence
  Synthetic oligonucleotide
cgggggcatgggcggagccagatagccggg

SEQ ID NO: 221625 - DNA, 30 bp, Artificial Sequence
  Synthetic oligonucleotide
gcggactgcaaatcgcggtttgtagccggg

SEQ ID NO: 221626 - DNA, 30 bp, Artificial Sequence
  Synthetic oligonucleotide
tgagggtagaactccaggtcacgggccggg

SEQ ID NO: 221627 - DNA, 30 bp, Artificial Sequence
  Synthetic oligonucleotide
aaccaatcgcccgtctgacagggtgccggg

SEQ ID NO: 221628 - DNA, 30 bp, Artificial Sequence
  Synthetic oligonucleotide
cttgttgatcgaatattgggtgaatccggg

SEQ ID NO: 221629 - DNA, 30 bp, Artificial Sequence
  Synthetic oligonucleotide
tgcttgtagaagtggacgcattgatccggg

SEQ ID NO: 221630 - DNA, 30 bp, Artificial Sequence
  Synthetic oligonucleotide
gcaagcatattatagtctactttctccggg

SEQ ID NO: 221631 - DNA, 30 bp, Artificial Sequence
  Synthetic oligonucleotide
aaagtgatgtgccacatgcaagcgtccggg

SEQ ID NO: 221632 - DNA, 30 bp, Artificial Sequence
  Synthetic oligonucleotide
aagttatgggggatataattcgtgtccggg

SEQ ID NO: 221633 - DNA, 30 bp, Artificial Sequence
  Synthetic oligonucleotide
agccggaaggaagcgtgttcgacaagcggg

SEQ ID NO: 221634 - DNA, 31 bp, Artificial Sequence
  Synthetic oligonucleotide
gggggcttcaggcgaggcacgaccaagcggg

SEQ ID NO: 221635 - DNA, 30 bp, Artificial Sequence
  Synthetic oligonucleotide
aaaactaggagtacttcctgtgacagcggg

SEQ ID NO: 221636 - DNA, 30 bp, Artificial Sequence
  Synthetic oligonucleotide
tgacgaaaaggcatagggacacggagcggg

SEQ ID NO: 221637 - DNA, 30 bp, Artificial Sequence
  Synthetic oligonucleotide
tcagatcgtaaccaaccgtctgaacgcggg

SEQ ID NO: 221638 - DNA, 30 bp, Artificial Sequence
  Synthetic oligonucleotide
tgtacggatgaggtacgaatttgccgcggg

SEQ ID NO: 221639 - DNA, 30 bp, Artificial Sequence
  Synthetic oligonucleotide
gcattgaaagtgaccgttgacgacggcggg

SEQ ID NO: 221640 - DNA, 30 bp, Artificial Sequence
  Synthetic oligonucleotide
atgactctcggtcgcatccatggcggcggg

SEQ ID NO: 221641 - DNA, 30 bp, Artificial Sequence
  Synthetic oligonucleotide
atataaggggagaggctgctggtcggcggg

SEQ ID NO: 221642 - DNA, 30 bp, Artificial Sequence
  Synthetic oligonucleotide
aggcagagaaagtaaccttggaggggcggg

SEQ ID NO: 221643 - DNA, 30 bp, Artificial Sequence
  Synthetic oligonucleotide
agcgatgagaccctgtccgtttctggcggg

SEQ ID NO: 221644 - DNA, 30 bp, Artificial Sequence
  Synthetic oligonucleotide
taacaattaaccataagaagactctgcggg

SEQ ID NO: 221645 - DNA, 30 bp, Artificial Sequence
  Synthetic oligonucleotide
atggggggcttgtagcttggcttctgcggg

SEQ ID NO: 221646 - DNA, 30 bp, Artificial Sequence
  Synthetic oligonucleotide
tcttaaaaatgaagcacgaaggggtgcggg

SEQ ID NO: 221647 - DNA, 30 bp, Artificial Sequence
  Synthetic oligonucleotide
acggggtacaacgggctaaggacttgcggg

SEQ ID NO: 221648 - DNA, 30 bp, Artificial Sequence
  Synthetic oligonucleotide
tgaatttgaaagactatagaatgttgcggg

SEQ ID NO: 221649 - DNA, 30 bp, Artificial Sequence
  Synthetic oligonucleotide
gctgtccggcaagggaactgcaaaatcggg

SEQ ID NO: 221650 - DNA, 30 bp, Artificial Sequence
  Synthetic oligonucleotide
cttataagttcggaatagatgctaatcggg

SEQ ID NO: 221651 - DNA, 30 bp, Artificial Sequence
  Synthetic oligonucleotide
atatgtgcgcagtccatcacggtcatcggg

SEQ ID NO: 221652 - DNA, 30 bp, Artificial Sequence
  Synthetic oligonucleotide
gtcagcattggttttcaaaggaggatcggg

SEQ ID NO: 221653 - DNA, 30 bp, Artificial Sequence
  Synthetic oligonucleotide
ccaacatgtcttgaaggtcgacaactcggg

SEQ ID NO: 221654 - DNA, 31 bp, Artificial Sequence
  Synthetic oligonucleotide
gaaactgaagcccacgcgtccgtaactcggg

SEQ ID NO: 221655 - DNA, 30 bp, Artificial Sequence
  Synthetic oligonucleotide
gaaatgtgtggtcaggtagcaatactcggg

SEQ ID NO: 221656 - DNA, 30 bp, Artificial Sequence
  Synthetic oligonucleotide
ggatatccctccgttaaccatcacctcggg

SEQ ID NO: 221657 - DNA, 30 bp, Artificial Sequence
  Synthetic oligonucleotide
agccatgggaaccgtacatggcatctcggg

SEQ ID NO: 221658 - DNA, 30 bp, Artificial Sequence
  Synthetic oligonucleotide
aggagtcaaggcttttggaatgcggtcggg

SEQ ID NO: 221659 - DNA, 30 bp, Artificial Sequence
  Synthetic oligonucleotide
caaggttacgcgaccagattgttggtcggg

SEQ ID NO: 221660 - DNA, 30 bp, Artificial Sequence
  Synthetic oligonucleotide
gtctgttccgtattaccctagattgtcggg

SEQ ID NO: 221661 - DNA, 30 bp, Artificial Sequence
  Synthetic oligonucleotide
cctcggagatgcgcgtggtggctgttcggg

SEQ ID NO: 221662 - DNA, 30 bp, Artificial Sequence
  Synthetic oligonucleotide
acacgggacacggaagcaaatgtgttcggg

SEQ ID NO: 221663 - DNA, 30 bp, Artificial Sequence
  Synthetic oligonucleotide
atgtggttacgatccccttaggatttcggg

SEQ ID NO: 221664 - DNA, 30 bp, Artificial Sequence
  Synthetic oligonucleotide
taagcgcatgtagttagttcgcctttcggg

SEQ ID NO: 221665 - DNA, 30 bp, Artificial Sequence
  Synthetic oligonucleotide
cctgtaggcaccatcggcgttccaaagggg

SEQ ID NO: 221666 - DNA, 30 bp, Artificial Sequence
  Synthetic oligonucleotide
ttatcacatatacgagggaggctcaagggg

SEQ ID NO: 221667 - DNA, 30 bp, Artificial Sequence
  Synthetic oligonucleotide
ggtcgtgtgcatgatgacagcttcaagggg

SEQ ID NO: 221668 - DNA, 30 bp, Artificial Sequence
  Synthetic oligonucleotide
tattgggcaagcacgaggcctagtaagggg

SEQ ID NO: 221669 - DNA, 30 bp, Artificial Sequence
  Synthetic oligonucleotide
atgtgaggatgtgctcatacgcttaagggg

SEQ ID NO: 221670 - DNA, 30 bp, Artificial Sequence
  Synthetic oligonucleotide
ggtgccccagcatcatagcgatgacagggg

SEQ ID NO: 221671 - DNA, 30 bp, Artificial Sequence
  Synthetic oligonucleotide
gcgtacgggaaaccctctagtaagcagggg

SEQ ID NO: 221672 - DNA, 30 bp, Artificial Sequence
  Synthetic oligonucleotide
cgaacaacactaaaaaaggactagcagggg

SEQ ID NO: 221673 - DNA, 30 bp, Artificial Sequence
  Synthetic oligonucleotide
cgttcggtctaatggtaaaagatagagggg

SEQ ID NO: 221674 - DNA, 30 bp, Artificial Sequence
  Synthetic oligonucleotide
gcgagctagtgtgtgtgttagtacgagggg

SEQ ID NO: 221675 - DNA, 30 bp, Artificial Sequence
  Synthetic oligonucleotide
gttacgcgacgtctggcgctgttcgagggg

SEQ ID NO: 221676 - DNA, 30 bp, Artificial Sequence
  Synthetic oligonucleotide
aagctcaaattagaaaagctgcatgagggg

SEQ ID NO: 221677 - DNA, 30 bp, Artificial Sequence
  Synthetic oligonucleotide
cccagcccattacgtataagaagtgagggg

SEQ ID NO: 221678 - DNA, 30 bp, Artificial Sequence
  Synthetic oligonucleotide
gtagtatcatggcatcggccccgatagggg

SEQ ID NO: 221679 - DNA, 30 bp, Artificial Sequence
  Synthetic oligonucleotide
tatagaaaaaccggaagggcgtgatagggg

SEQ ID NO: 221680 - DNA, 30 bp, Artificial Sequence
  Synthetic oligonucleotide
tggttatagaagtatagacgcgtatagggg

SEQ ID NO: 221681 - DNA, 30 bp, Artificial Sequence
  Synthetic oligonucleotide
accgcgaggcatatgttatcccgttagggg

SEQ ID NO: 221682 - DNA, 30 bp, Artificial Sequence
  Synthetic oligonucleotide
ccccaagcccgttgaagtaaacacacgggg

SEQ ID NO: 221683 - DNA, 30 bp, Artificial Sequence
  Synthetic oligonucleotide
ggtatagtgtccatcttcatagccacgggg

SEQ ID NO: 221684 - DNA, 30 bp, Artificial Sequence
  Synthetic oligonucleotide
catcagacaatacggtgcgttagcacgggg

SEQ ID NO: 221685 - DNA, 30 bp, Artificial Sequence
  Synthetic oligonucleotide
cgtgacagatcatatgtactacgtacgggg

SEQ ID NO: 221686 - DNA, 30 bp, Artificial Sequence
  Synthetic oligonucleotide
ctcgtatatacataggcaatcggtacgggg

SEQ ID NO: 221687 - DNA, 30 bp, Artificial Sequence
  Synthetic oligonucleotide
gaggaatactaatgaccacgatttacgggg

SEQ ID NO: 221688 - DNA, 30 bp, Artificial Sequence
  Synthetic oligonucleotide
tacgggaagaaatatttgttcgcaccgggg

SEQ ID NO: 221689 - DNA, 30 bp, Artificial Sequence
  Synthetic oligonucleotide
cgatgctaggctcttagttgttgaccgggg

SEQ ID NO: 221690 - DNA, 30 bp, Artificial Sequence
  Synthetic oligonucleotide
tttgtaactctagacgttcgagagccgggg

SEQ ID NO: 221691 - DNA, 30 bp, Artificial Sequence
  Synthetic oligonucleotide
cttactcttgattcgtaaagtgggccgggg

SEQ ID NO: 221692 - DNA, 30 bp, Artificial Sequence
  Synthetic oligonucleotide
gtgtaatccagtaacaggggctggccgggg

SEQ ID NO: 221693 - DNA, 30 bp, Artificial Sequence
  Synthetic oligonucleotide
gctaagtggaggtgtgagccgcaagcgggg

SEQ ID NO: 221694 - DNA, 30 bp, Artificial Sequence
  Synthetic oligonucleotide
tgtatcgttgtagcggcgcgaggagcgggg

SEQ ID NO: 221695 - DNA, 30 bp, Artificial Sequence
  Synthetic oligonucleotide
tattgtagtgcgcttggactggaggcgggg

SEQ ID NO: 221696 - DNA, 30 bp, Artificial Sequence
  Synthetic oligonucleotide
tagattagctcttacgagatggcggcgggg

SEQ ID NO: 221697 - DNA, 30 bp, Artificial Sequence
  Synthetic oligonucleotide
aagttgtatcctagattaagtgttgcgggg

SEQ ID NO: 221698 - DNA, 30 bp, Artificial Sequence
  Synthetic oligonucleotide
aactttcggtatagggtgtcgctatcgggg

SEQ ID NO: 221699 - DNA, 30 bp, Artificial Sequence
  Synthetic oligonucleotide
ctcgtccccctatacctgcgagcgtcgggg

SEQ ID NO: 221700 - DNA, 30 bp, Artificial Sequence
  Synthetic oligonucleotide
ggtaggagcacggtattctactcttcgggg

SEQ ID NO: 221701 - DNA, 30 bp, Artificial Sequence
  Synthetic oligonucleotide
attactccctatcacacagtatggaggggg

SEQ ID NO: 221702 - DNA, 30 bp, Artificial Sequence
  Synthetic oligonucleotide
cttacccccaatgggaccgacttgaggggg

SEQ ID NO: 221703 - DNA, 30 bp, Artificial Sequence
  Synthetic oligonucleotide
agattagctcgacaacgccaagctaggggg

SEQ ID NO: 221704 - DNA, 30 bp, Artificial Sequence
  Synthetic oligonucleotide
tacgtaatcgtcccatgtactggtaggggg

SEQ ID NO: 221705 - DNA, 30 bp, Artificial Sequence
  Synthetic oligonucleotide
tctgtcagtggttggtcatcatgacggggg

SEQ ID NO: 221706 - DNA, 30 bp, Artificial Sequence
  Synthetic oligonucleotide
acgtgcggaaccgcacttaagctccggggg

SEQ ID NO: 221707 - DNA, 30 bp, Artificial Sequence
  Synthetic oligonucleotide
agagttgagcaaagtaatggggtccggggg

SEQ ID NO: 221708 - DNA, 30 bp, Artificial Sequence
  Synthetic oligonucleotide
tgagaaatctacgcgtcacgtgaggggggg

SEQ ID NO: 221709 - DNA, 30 bp, Artificial Sequence
  Synthetic oligonucleotide
cggtgcgttatcttttaccaaacggggggg

SEQ ID NO: 221710 - DNA, 30 bp, Artificial Sequence
  Synthetic oligonucleotide
acctaaagtataggtgcaacagatgggggg

SEQ ID NO: 221711 - DNA, 30 bp, Artificial Sequence
  Synthetic oligonucleotide
aatcccgtctcgggaggtgtggctgggggg

SEQ ID NO: 221712 - DNA, 30 bp, Artificial Sequence
  Synthetic oligonucleotide
cattagcccgcattgcacacagaatggggg

SEQ ID NO: 221713 - DNA, 30 bp, Artificial Sequence
  Synthetic oligonucleotide
tgtgcaaattcttgttcaagaacatggggg

SEQ ID NO: 221714 - DNA, 30 bp, Artificial Sequence
  Synthetic oligonucleotide
gtcgccccacaagaacaggatgagtggggg

SEQ ID NO: 221715 - DNA, 30 bp, Artificial Sequence
  Synthetic oligonucleotide
ggcgcgttcggagaaaattgcgacatgggg

SEQ ID NO: 221716 - DNA, 30 bp, Artificial Sequence
  Synthetic oligonucleotide
acagttaggtagcggtggtacaggatgggg

SEQ ID NO: 221717 - DNA, 30 bp, Artificial Sequence
  Synthetic oligonucleotide
aggcatttgcaaaataaaatagggatgggg

SEQ ID NO: 221718 - DNA, 30 bp, Artificial Sequence
  Synthetic oligonucleotide
cccatcgtcgggagcactgtcgtgatgggg

SEQ ID NO: 221719 - DNA, 30 bp, Artificial Sequence
  Synthetic oligonucleotide
ttggcataatcgtttaaaaaacctatgggg

SEQ ID NO: 221720 - DNA, 30 bp, Artificial Sequence
  Synthetic oligonucleotide
tgggtttaacagaaatctagaattatgggg

SEQ ID NO: 221721 - DNA, 30 bp, Artificial Sequence
  Synthetic oligonucleotide
acctatagttctggagatggtcttatgggg

SEQ ID NO: 221722 - DNA, 30 bp, Artificial Sequence
  Synthetic oligonucleotide
gatagggtgacggttgtgtgcgggctgggg

SEQ ID NO: 221723 - DNA, 30 bp, Artificial Sequence
  Synthetic oligonucleotide
gtgaatagcatacgtgatatgctagtgggg

SEQ ID NO: 221724 - DNA, 30 bp, Artificial Sequence
  Synthetic oligonucleotide
acaataggcaatggttcagggagcgtgggg

SEQ ID NO: 221725 - DNA, 30 bp, Artificial Sequence
  Synthetic oligonucleotide
ggaactttccgggagcggcggaatgtgggg

SEQ ID NO: 221726 - DNA, 30 bp, Artificial Sequence
  Synthetic oligonucleotide
gtagcttggatccctttagggcttgtgggg

SEQ ID NO: 221727 - DNA, 30 bp, Artificial Sequence
  Synthetic oligonucleotide
tttgtttggaaaaaacggcgatcattgggg

SEQ ID NO: 221728 - DNA, 30 bp, Artificial Sequence
  Synthetic oligonucleotide
agacccgggtaagcttatgcggcgttgggg

SEQ ID NO: 221729 - DNA, 30 bp, Artificial Sequence
  Synthetic oligonucleotide
aaacagagagcaatcaaggcttctttgggg

SEQ ID NO: 221730 - DNA, 30 bp, Artificial Sequence
  Synthetic oligonucleotide
gtttcgtaagtgagggtataggttttgggg

SEQ ID NO: 221731 - DNA, 30 bp, Artificial Sequence
  Synthetic oligonucleotide
tcttacccggctgtgtaaatccgaaatggg

SEQ ID NO: 221732 - DNA, 30 bp, Artificial Sequence
  Synthetic oligonucleotide
gattggtgaagggttccgcggctaaatggg

SEQ ID NO: 221733 - DNA, 30 bp, Artificial Sequence
  Synthetic oligonucleotide
gtacccgatggcggtcgccgtgtaaatggg

SEQ ID NO: 221734 - DNA, 30 bp, Artificial Sequence
  Synthetic oligonucleotide
acatattcaggacgaatagtcgtcaatggg

SEQ ID NO: 221735 - DNA, 30 bp, Artificial Sequence
  Synthetic oligonucleotide
tgtgcgtaattgagggtaattgagaatggg

SEQ ID NO: 221736 - DNA, 30 bp, Artificial Sequence
  Synthetic oligonucleotide
ttaaatgactctgggggccaagataatggg

SEQ ID NO: 221737 - DNA, 30 bp, Artificial Sequence
  Synthetic oligonucleotide
caaacggcattggtcttagcttaacatggg

SEQ ID NO: 221738 - DNA, 30 bp, Artificial Sequence
  Synthetic oligonucleotide
cgattaaagtcgggctggtcggtacatggg

SEQ ID NO: 221739 - DNA, 30 bp, Artificial Sequence
  Synthetic oligonucleotide
gagaagatcccgcagtcggcgtatcatggg

SEQ ID NO: 221740 - DNA, 30 bp, Artificial Sequence
  Synthetic oligonucleotide
tcgacacccctaggtgtgacgaaagatggg

SEQ ID NO: 221741 - DNA, 30 bp, Artificial Sequence
  Synthetic oligonucleotide
acaaccatcattctccgcgcgcaagatggg

SEQ ID NO: 221742 - DNA, 30 bp, Artificial Sequence
  Synthetic oligonucleotide
tgagtaaaggatgtcttacggcaagatggg

SEQ ID NO: 221743 - DNA, 30 bp, Artificial Sequence
  Synthetic oligonucleotide
ggggattatagcgtattacctagagatggg

SEQ ID NO: 221744 - DNA, 30 bp, Artificial Sequence
  Synthetic oligonucleotide
aatgtgaggtgcattgatacaactgatggg

SEQ ID NO: 221745 - DNA, 30 bp, Artificial Sequence
  Synthetic oligonucleotide
tgcttaatcaaatctttgagcacctatggg

SEQ ID NO: 221746 - DNA, 30 bp, Artificial Sequence
  Synthetic oligonucleotide
gttcaagcacaaggataaaacagctatggg

SEQ ID NO: 221747 - DNA, 30 bp, Artificial Sequence
  Synthetic oligonucleotide
taacataaagtaccatttacactgtatggg

SEQ ID NO: 221748 - DNA, 30 bp, Artificial Sequence
  Synthetic oligonucleotide
agtgtaagctggcggggcaaagtgtatggg

SEQ ID NO: 221749 - DNA, 30 bp, Artificial Sequence
  Synthetic oligonucleotide
atatgtttatggatacgcctaacttatggg

SEQ ID NO: 221750 - DNA, 30 bp, Artificial Sequence
  Synthetic oligonucleotide
ctcgaagttcatacataacgtagttatggg

SEQ ID NO: 221751 - DNA, 30 bp, Artificial Sequence
  Synthetic oligonucleotide
ggccaaaccaagacagtgcctgccactggg

SEQ ID NO: 221752 - DNA, 30 bp, Artificial Sequence
  Synthetic oligonucleotide
aaacattggcttaattgcacatagactggg

SEQ ID NO: 221753 - DNA, 30 bp, Artificial Sequence
  Synthetic oligonucleotide
ttacaagcgttccggtcataagtgactggg

SEQ ID NO: 221754 - DNA, 30 bp, Artificial Sequence
  Synthetic oligonucleotide
tcccaatatcatttcatcgttccacctggg

SEQ ID NO: 221755 - DNA, 30 bp, Artificial Sequence
  Synthetic oligonucleotide
ctggcttaacccgcgtagtcaagtcctggg

SEQ ID NO: 221756 - DNA, 30 bp, Artificial Sequence
  Synthetic oligonucleotide
accttttttcggtttgccgatccagctggg

SEQ ID NO: 221757 - DNA, 30 bp, Artificial Sequence
  Synthetic oligonucleotide
atcgtgtcttacgtcctaccgggagctggg

SEQ ID NO: 221758 - DNA, 30 bp, Artificial Sequence
  Synthetic oligonucleotide
gccggggactcataagtccaatgggctggg

SEQ ID NO: 221759 - DNA, 30 bp, Artificial Sequence
  Synthetic oligonucleotide
gaagacgagacttagaggttaggatctggg

SEQ ID NO: 221760 - DNA, 30 bp, Artificial Sequence
  Synthetic oligonucleotide
tcgaacttcagtcaggtttgactatctggg

SEQ ID NO: 221761 - DNA, 31 bp, Artificial Sequence
  Synthetic oligonucleotide
acaaagttcggacgtctcgacctcctctggg

SEQ ID NO: 221762 - DNA, 30 bp, Artificial Sequence
  Synthetic oligonucleotide
ggaaaggatgcccctaaggaatcgtctggg

SEQ ID NO: 221763 - DNA, 30 bp, Artificial Sequence
  Synthetic oligonucleotide
ggcaagtaaggggagcgtattgcttctggg

SEQ ID NO: 221764 - DNA, 30 bp, Artificial Sequence
  Synthetic oligonucleotide
acgtttattcagggcatgcaaagttctggg

SEQ ID NO: 221765 - DNA, 30 bp, Artificial Sequence
  Synthetic oligonucleotide
agcaggcatgcgcaactgatcctttctggg

SEQ ID NO: 221766 - DNA, 30 bp, Artificial Sequence
  Synthetic oligonucleotide
cgagtgttagctgcgaatccgtccagtggg

SEQ ID NO: 221767 - DNA, 30 bp, Artificial Sequence
  Synthetic oligonucleotide
aatgccggccagccaagggtccgcagtggg

SEQ ID NO: 221768 - DNA, 30 bp, Artificial Sequence
  Synthetic oligonucleotide
taaatccctgtcgccgaccacggcagtggg

SEQ ID NO: 221769 - DNA, 30 bp, Artificial Sequence
  Synthetic oligonucleotide
tatctcttgcactaaaatgcaacgagtggg

SEQ ID NO: 221770 - DNA, 30 bp, Artificial Sequence
  Synthetic oligonucleotide
ccacgcaacaagagcatggagctgcgtggg

SEQ ID NO: 221771 - DNA, 30 bp, Artificial Sequence
  Synthetic oligonucleotide
tgacctaaggccacaggtcaatgtcgtggg

SEQ ID NO: 221772 - DNA, 30 bp, Artificial Sequence
  Synthetic oligonucleotide
tagtggacagtatatagtgatataggtggg

SEQ ID NO: 221773 - DNA, 30 bp, Artificial Sequence
  Synthetic oligonucleotide
ctagggggcgagaaaacgcctggcggtggg

SEQ ID NO: 221774 - DNA, 30 bp, Artificial Sequence
  Synthetic oligonucleotide
cggagtactggcgggtcaataccgggtggg

SEQ ID NO: 221775 - DNA, 30 bp, Artificial Sequence
  Synthetic oligonucleotide
taacggcggggagtgtctgttgggggtggg

SEQ ID NO: 221776 - DNA, 30 bp, Artificial Sequence
  Synthetic oligonucleotide
tcccatttgagcatggaattgcaatgtggg

SEQ ID NO: 221777 - DNA, 30 bp, Artificial Sequence
  Synthetic oligonucleotide
gtgtctcgctgaattatcgtgacatgtggg

SEQ ID NO: 221778 - DNA, 30 bp, Artificial Sequence
  Synthetic oligonucleotide
aaaaacgagttgccggactggtagtgtggg

SEQ ID NO: 221779 - DNA, 30 bp, Artificial Sequence
  Synthetic oligonucleotide
cagacctgtggcgggcgttcggggtgtggg

SEQ ID NO: 221780 - DNA, 30 bp, Artificial Sequence
  Synthetic oligonucleotide
tcaggcaaaatacttctaatgtattgtggg

SEQ ID NO: 221781 - DNA, 30 bp, Artificial Sequence
  Synthetic oligonucleotide
gttcgtcgggagtatgcccgttcttgtggg

SEQ ID NO: 221782 - DNA, 30 bp, Artificial Sequence
  Synthetic oligonucleotide
tggctcgacttccgctggtgcccaattggg

SEQ ID NO: 221783 - DNA, 30 bp, Artificial Sequence
  Synthetic oligonucleotide
ttaaatcaattgatttaagtatacattggg

SEQ ID NO: 221784 - DNA, 30 bp, Artificial Sequence
  Synthetic oligonucleotide
ggatgctaaatgccggacaagctgattggg

SEQ ID NO: 221785 - DNA, 30 bp, Artificial Sequence
  Synthetic oligonucleotide
gcgagttttaacggattccgtctgattggg

SEQ ID NO: 221786 - DNA, 30 bp, Artificial Sequence
  Synthetic oligonucleotide
acacactgacgtaggcggtgccaacttggg

SEQ ID NO: 221787 - DNA, 30 bp, Artificial Sequence
  Synthetic oligonucleotide
tgccaacagagttatgacagatcacttggg

SEQ ID NO: 221788 - DNA, 30 bp, Artificial Sequence
  Synthetic oligonucleotide
ggatcagtctctccgctgaactcccttggg

SEQ ID NO: 221789 - DNA, 30 bp, Artificial Sequence
  Synthetic oligonucleotide
tgctagacgaaggataacatttcgcttggg

SEQ ID NO: 221790 - DNA, 30 bp, Artificial Sequence
  Synthetic oligonucleotide
taagggaaaatctcgcggatagggcttggg

SEQ ID NO: 221791 - DNA, 30 bp, Artificial Sequence
  Synthetic oligonucleotide
tgccagtattagaccgcaacttcagttggg

SEQ ID NO: 221792 - DNA, 30 bp, Artificial Sequence
  Synthetic oligonucleotide
cgtaccgggggccgagcagccaaggttggg

SEQ ID NO: 221793 - DNA, 30 bp, Artificial Sequence
  Synthetic oligonucleotide
ggtattaaccatgtgctggggactgttggg

SEQ ID NO: 221794 - DNA, 30 bp, Artificial Sequence
  Synthetic oligonucleotide
tctgtatgcccacttaaaccgaaatttggg

SEQ ID NO: 221795 - DNA, 30 bp, Artificial Sequence
  Synthetic oligonucleotide
caactcaaaaggagtactagcacttttggg

SEQ ID NO: 221796 - DNA, 30 bp, Artificial Sequence
  Synthetic oligonucleotide
aaaagcatgaccaaggctcgtagttttggg

SEQ ID NO: 221797 - DNA, 30 bp, Artificial Sequence
  Synthetic oligonucleotide
tgggtagtgcaacctgaagttaaaaaatgg

SEQ ID NO: 221798 - DNA, 30 bp, Artificial Sequence
  Synthetic oligonucleotide
aatgtaggtaaatctagagcaccaaaatgg

SEQ ID NO: 221799 - DNA, 30 bp, Artificial Sequence
  Synthetic oligonucleotide
aaccaagacgagcatctagttatcaaatgg

SEQ ID NO: 221800 - DNA, 30 bp, Artificial Sequence
  Synthetic oligonucleotide
tgtcagtaagcgtacctcgtagtcaaatgg

SEQ ID NO: 221801 - DNA, 30 bp, Artificial Sequence
  Synthetic oligonucleotide
cgctctatctatcgaaggtaaacgaaatgg

SEQ ID NO: 221802 - DNA, 30 bp, Artificial Sequence
  Synthetic oligonucleotide
ttaaaggtatctgagtaccacgtgaaatgg

SEQ ID NO: 221803 - DNA, 30 bp, Artificial Sequence
  Synthetic oligonucleotide
ggtggtacgattactttatgtaataaatgg

SEQ ID NO: 221804 - DNA, 30 bp, Artificial Sequence
  Synthetic oligonucleotide
gttgctgtatttgggatgacacataaatgg

SEQ ID NO: 221805 - DNA, 30 bp, Artificial Sequence
  Synthetic oligonucleotide
ttcgtaagactttgaccaacgggtaaatgg

SEQ ID NO: 221806 - DNA, 30 bp, Artificial Sequence
  Synthetic oligonucleotide
tcgtgatacagtcaaccggtgtcacaatgg

SEQ ID NO: 221807 - DNA, 30 bp, Artificial Sequence
  Synthetic oligonucleotide
atcactataaccgcattacacgaccaatgg

SEQ ID NO: 221808 - DNA, 30 bp, Artificial Sequence
  Synthetic oligonucleotide
tatgatcaatcttacttactgcgccaatgg

SEQ ID NO: 221809 - DNA, 30 bp, Artificial Sequence
  Synthetic oligonucleotide
tggtctagctccagccaaaagtcgcaatgg

SEQ ID NO: 221810 - DNA, 30 bp, Artificial Sequence
  Synthetic oligonucleotide
ccttcggcgactcgctgtgatagggaatgg

SEQ ID NO: 221811 - DNA, 30 bp, Artificial Sequence
  Synthetic oligonucleotide
aaggcgctacgtctgtcgcactgggaatgg

SEQ ID NO: 221812 - DNA, 30 bp, Artificial Sequence
  Synthetic oligonucleotide
gtctgtgggtccttaggttcgccctaatgg

SEQ ID NO: 221813 - DNA, 30 bp, Artificial Sequence
  Synthetic oligonucleotide
gcgagcctggctcggcttgtctagtaatgg

SEQ ID NO: 221814 - DNA, 30 bp, Artificial Sequence
  Synthetic oligonucleotide
gtaagttgaccggacctgttgacgtaatgg

SEQ ID NO: 221815 - DNA, 30 bp, Artificial Sequence
  Synthetic oligonucleotide
cgccaaaacgtagtttggctactcacatgg

SEQ ID NO: 221816 - DNA, 30 bp, Artificial Sequence
  Synthetic oligonucleotide
tcttagggagcaagttggatttggacatgg

SEQ ID NO: 221817 - DNA, 30 bp, Artificial Sequence
  Synthetic oligonucleotide
gtctgatgtgatcggagagttagtacatgg

SEQ ID NO: 221818 - DNA, 30 bp, Artificial Sequence
  Synthetic oligonucleotide
gtaataggaccaatcttcgaaacaccatgg

SEQ ID NO: 221819 - DNA, 30 bp, Artificial Sequence
  Synthetic oligonucleotide
atacccaggattgtcgggaacgcaccatgg

SEQ ID NO: 221820 - DNA, 30 bp, Artificial Sequence
  Synthetic oligonucleotide
gaatgtaacgactaacgtgcaataccatgg

SEQ ID NO: 221821 - DNA, 30 bp, Artificial Sequence
  Synthetic oligonucleotide
attcggttgaatagtgttttaacgccatgg

SEQ ID NO: 221822 - DNA, 30 bp, Artificial Sequence
  Synthetic oligonucleotide
cgggggcggcccgtctctccgaggccatgg

SEQ ID NO: 221823 - DNA, 30 bp, Artificial Sequence
  Synthetic oligonucleotide
agtctaatacttggcaatcgaaatccatgg

SEQ ID NO: 221824 - DNA, 30 bp, Artificial Sequence
  Synthetic oligonucleotide
acctatatgcggacatgtatgtgagcatgg

SEQ ID NO: 221825 - DNA, 30 bp, Artificial Sequence
  Synthetic oligonucleotide
gtgtgttcgtatcgaggacgtcgtgcatgg

SEQ ID NO: 221826 - DNA, 30 bp, Artificial Sequence
  Synthetic oligonucleotide
acggatctagtttgcttgtgggagtcatgg

SEQ ID NO: 221827 - DNA, 30 bp, Artificial Sequence
  Synthetic oligonucleotide
tacttgaagcgattgattcaccgttcatgg

SEQ ID NO: 221828 - DNA, 30 bp, Artificial Sequence
  Synthetic oligonucleotide
ctgaatatttacgttcagcaacagagatgg

SEQ ID NO: 221829 - DNA, 30 bp, Artificial Sequence
  Synthetic oligonucleotide
gcacacatgtgtgcgtgcgatccgagatgg

SEQ ID NO: 221830 - DNA, 30 bp, Artificial Sequence
  Synthetic oligonucleotide
gtaaacctgatgagaccatacaggagatgg

SEQ ID NO: 221831 - DNA, 30 bp, Artificial Sequence
  Synthetic oligonucleotide
tcgctgaagtatagggacatacggagatgg

SEQ ID NO: 221832 - DNA, 30 bp, Artificial Sequence
  Synthetic oligonucleotide
atgatagtttgaccccggtgcactcgatgg

SEQ ID NO: 221833 - DNA, 30 bp, Artificial Sequence
  Synthetic oligonucleotide
ggtgtggcgggcggggatggaaaaggatgg

SEQ ID NO: 221834 - DNA, 30 bp, Artificial Sequence
  Synthetic oligonucleotide
gggaatcgtagcattggtatgagaggatgg

SEQ ID NO: 221835 - DNA, 30 bp, Artificial Sequence
  Synthetic oligonucleotide
tggtttaaacttctatgtgattgcggatgg

SEQ ID NO: 221836 - DNA, 30 bp, Artificial Sequence
  Synthetic oligonucleotide
ctgtcctgtagtgagtcacttaggggatgg

SEQ ID NO: 221837 - DNA, 30 bp, Artificial Sequence
  Synthetic oligonucleotide
aaataactgtgggttgtagggctgggatgg

SEQ ID NO: 221838 - DNA, 30 bp, Artificial Sequence
  Synthetic oligonucleotide
tcaaaaccacttctggagtgaattggatgg

SEQ ID NO: 221839 - DNA, 30 bp, Artificial Sequence
  Synthetic oligonucleotide
atataccacatcctgggcatcgtatgatgg

SEQ ID NO: 221840 - DNA, 30 bp, Artificial Sequence
  Synthetic oligonucleotide
gaatcagcacggcaaaagtgacagtgatgg

SEQ ID NO: 221841 - DNA, 30 bp, Artificial Sequence
  Synthetic oligonucleotide
gaaaataacgcctaacaagggttgtgatgg

SEQ ID NO: 221842 - DNA, 30 bp, Artificial Sequence
  Synthetic oligonucleotide
gacaacttagcaaacggggttcgttgatgg

SEQ ID NO: 221843 - DNA, 30 bp, Artificial Sequence
  Synthetic oligonucleotide
ctaggctattctcaaagataaggttgatgg

SEQ ID NO: 221844 - DNA, 30 bp, Artificial Sequence
  Synthetic oligonucleotide
cccgaattcgccctctagatgtggatatgg

SEQ ID NO: 221845 - DNA, 30 bp, Artificial Sequence
  Synthetic oligonucleotide
agcagaggttaaaatacgctaagtatatgg

SEQ ID NO: 221846 - DNA, 30 bp, Artificial Sequence
  Synthetic oligonucleotide
gcttgacagtgcttggtaaccagtatatgg

SEQ ID NO: 221847 - DNA, 30 bp, Artificial Sequence
  Synthetic oligonucleotide
agagcaaaatttgcttaaggcagcctatgg

SEQ ID NO: 221848 - DNA, 30 bp, Artificial Sequence
  Synthetic oligonucleotide
ggtaaaggcactcaaacttcagtgctatgg

SEQ ID NO: 221849 - DNA, 30 bp, Artificial Sequence
  Synthetic oligonucleotide
tcggtaatgcttcaggtgcgcgttctatgg

SEQ ID NO: 221850 - DNA, 30 bp, Artificial Sequence
  Synthetic oligonucleotide
actaaacgggtgtaattaagtcccgtatgg

SEQ ID NO: 221851 - DNA, 30 bp, Artificial Sequence
  Synthetic oligonucleotide
tctccgtgaaggtatcaacagtccgtatgg

SEQ ID NO: 221852 - DNA, 30 bp, Artificial Sequence
  Synthetic oligonucleotide
gctagattggctctaagttgcaaggtatgg

SEQ ID NO: 221853 - DNA, 30 bp, Artificial Sequence
  Synthetic oligonucleotide
gccccggatgagctttgacatatggtatgg

SEQ ID NO: 221854 - DNA, 30 bp, Artificial Sequence
  Synthetic oligonucleotide
cgttaatatggatcctactatcaattatgg

SEQ ID NO: 221855 - DNA, 30 bp, Artificial Sequence
  Synthetic oligonucleotide
atactacggcgcacgggagcagtattatgg

SEQ ID NO: 221856 - DNA, 30 bp, Artificial Sequence
  Synthetic oligonucleotide
ctcatgggacatgagatgtcgagtttatgg

SEQ ID NO: 221857 - DNA, 30 bp, Artificial Sequence
  Synthetic oligonucleotide
atagttagattagaagaactctaaaactgg

SEQ ID NO: 221858 - DNA, 30 bp, Artificial Sequence
  Synthetic oligonucleotide
ggatgctcgcatttcgagcacagaaactgg

SEQ ID NO: 221859 - DNA, 30 bp, Artificial Sequence
  Synthetic oligonucleotide
ttggagaaaaggcataaaatgcagaactgg

SEQ ID NO: 221860 - DNA, 30 bp, Artificial Sequence
  Synthetic oligonucleotide
cctctgtgtctaaagcgaaacaaacactgg

SEQ ID NO: 221861 - DNA, 30 bp, Artificial Sequence
  Synthetic oligonucleotide
ggccggtccagcgctcatattaaccactgg

SEQ ID NO: 221862 - DNA, 30 bp, Artificial Sequence
  Synthetic oligonucleotide
tcacccaaggatatgtgcatgccccactgg

SEQ ID NO: 221863 - DNA, 30 bp, Artificial Sequence
  Synthetic oligonucleotide
cgtctttagataacaaagaacggccactgg

SEQ ID NO: 221864 - DNA, 30 bp, Artificial Sequence
  Synthetic oligonucleotide
gggtgaacgacagatgtcgtgtagcactgg

SEQ ID NO: 221865 - DNA, 30 bp, Artificial Sequence
  Synthetic oligonucleotide
agtaattgaagagccggtcgacctcactgg

SEQ ID NO: 221866 - DNA, 30 bp, Artificial Sequence
  Synthetic oligonucleotide
aaagtgcaggctttgaacagtctagactgg

SEQ ID NO: 221867 - DNA, 30 bp, Artificial Sequence
  Synthetic oligonucleotide
tgcatgagccttatatctacttacgactgg

SEQ ID NO: 221868 - DNA, 30 bp, Artificial Sequence
  Synthetic oligonucleotide
ggcgattagatcagccactggctcgactgg

SEQ ID NO: 221869 - DNA, 30 bp, Artificial Sequence
  Synthetic oligonucleotide
cattcgactcgcacaactaggcaggactgg

SEQ ID NO: 221870 - DNA, 30 bp, Artificial Sequence
  Synthetic oligonucleotide
gccggaggctaagttaatctatgggactgg

SEQ ID NO: 221871 - DNA, 30 bp, Artificial Sequence
  Synthetic oligonucleotide
cggattaataggctcatgctcgtggactgg

SEQ ID NO: 221872 - DNA, 30 bp, Artificial Sequence
  Synthetic oligonucleotide
catctaacaacggggttctaaccctactgg

SEQ ID NO: 221873 - DNA, 30 bp, Artificial Sequence
  Synthetic oligonucleotide
tacggggttacgctgagaccaatctactgg

SEQ ID NO: 221874 - DNA, 30 bp, Artificial Sequence
  Synthetic oligonucleotide
tctcaatgtgtatagaagctcaagtactgg

SEQ ID NO: 221875 - DNA, 30 bp, Artificial Sequence
  Synthetic oligonucleotide
cgaattaaagcaaatcgagcgcggtactgg

SEQ ID NO: 221876 - DNA, 30 bp, Artificial Sequence
  Synthetic oligonucleotide
gttatttaaaacatgtgttgctcttactgg

SEQ ID NO: 221877 - DNA, 30 bp, Artificial Sequence
  Synthetic oligonucleotide
agtagtctagtgatatgggggtcttactgg

SEQ ID NO: 221878 - DNA, 30 bp, Artificial Sequence
  Synthetic oligonucleotide
aagtaagttaatccgtacgtaagttactgg

SEQ ID NO: 221879 - DNA, 30 bp, Artificial Sequence
  Synthetic oligonucleotide
tctccaacgtctaaattcgatccaacctgg

SEQ ID NO: 221880 - DNA, 30 bp, Artificial Sequence
  Synthetic oligonucleotide
tattggaacgtgttatgtaatgtaacctgg

SEQ ID NO: 221881 - DNA, 30 bp, Artificial Sequence
  Synthetic oligonucleotide
gcttcctacacaacgatgcctgacacctgg

SEQ ID NO: 221882 - DNA, 30 bp, Artificial Sequence
  Synthetic oligonucleotide
tgtctcaaactaaaatggtaaagcacctgg

SEQ ID NO: 221883 - DNA, 30 bp, Artificial Sequence
  Synthetic oligonucleotide
caccgtggattcgggctccagggcacctgg

SEQ ID NO: 221884 - DNA, 30 bp, Artificial Sequence
  Synthetic oligonucleotide
gaatggaagggaagtctctggtaaccctgg

SEQ ID NO: 221885 - DNA, 30 bp, Artificial Sequence
  Synthetic oligonucleotide
gagcaatccacatctataggaaacccctgg

SEQ ID NO: 221886 - DNA, 30 bp, Artificial Sequence
  Synthetic oligonucleotide
ggtcttccaagagtgactgagggcccctgg

SEQ ID NO: 221887 - DNA, 30 bp, Artificial Sequence
  Synthetic oligonucleotide
tcaattaaaatcgacacgcggggtccctgg

SEQ ID NO: 221888 - DNA, 30 bp, Artificial Sequence
  Synthetic oligonucleotide
agtattagtttacgccggttcaaagcctgg

SEQ ID NO: 221889 - DNA, 30 bp, Artificial Sequence
  Synthetic oligonucleotide
atagctttaggattgtcagtgcacgcctgg

SEQ ID NO: 221890 - DNA, 30 bp, Artificial Sequence
  Synthetic oligonucleotide
agtggatgaagttatctttccttggcctgg

SEQ ID NO: 221891 - DNA, 31 bp, Artificial Sequence
  Synthetic oligonucleotide
ctatcagtgatgacaacttcataaatcctgg

SEQ ID NO: 221892 - DNA, 30 bp, Artificial Sequence
  Synthetic oligonucleotide
cataatgattggatctggcccgaatcctgg

SEQ ID NO: 221893 - DNA, 30 bp, Artificial Sequence
  Synthetic oligonucleotide
cttacatagcatgtagtaggggcatcctgg

SEQ ID NO: 221894 - DNA, 30 bp, Artificial Sequence
  Synthetic oligonucleotide
tcgtacgttcatggtatgcccggatcctgg

SEQ ID NO: 221895 - DNA, 30 bp, Artificial Sequence
  Synthetic oligonucleotide
ctgttaattttcgaccattaagtctcctgg

SEQ ID NO: 221896 - DNA, 30 bp, Artificial Sequence
  Synthetic oligonucleotide
taaacggcataccttaatagacgttcctgg

SEQ ID NO: 221897 - DNA, 30 bp, Artificial Sequence
  Synthetic oligonucleotide
ttaaagatcagcgactctccgtagagctgg

SEQ ID NO: 221898 - DNA, 30 bp, Artificial Sequence
  Synthetic oligonucleotide
aaacatgatgggagacatgtcacacgctgg

SEQ ID NO: 221899 - DNA, 30 bp, Artificial Sequence
  Synthetic oligonucleotide
gcaattcctccagggtctatatttcgctgg

SEQ ID NO: 221900 - DNA, 30 bp, Artificial Sequence
  Synthetic oligonucleotide
ctgcacggtccgaatcatatggaaggctgg

SEQ ID NO: 221901 - DNA, 30 bp, Artificial Sequence
  Synthetic oligonucleotide
taaagtctcataacaggagcacgaggctgg

SEQ ID NO: 221902 - DNA, 31 bp, Artificial Sequence
  Synthetic oligonucleotide
atgttggattacgtcatagaatccgggctgg

SEQ ID NO: 221903 - DNA, 29 bp, Artificial Sequence
  Synthetic oligonucleotide
acgacagactagcgaccgaggggggctgg

SEQ ID NO: 221904 - DNA, 30 bp, Artificial Sequence
  Synthetic oligonucleotide
cgaattgattcagtgcgtccggatggctgg

SEQ ID NO: 221905 - DNA, 30 bp, Artificial Sequence
  Synthetic oligonucleotide
tgtggaagtgtgatatcatattctggctgg

SEQ ID NO: 221906 - DNA, 30 bp, Artificial Sequence
  Synthetic oligonucleotide
gataaccgattaatctcctcaagtggctgg

SEQ ID NO: 221907 - DNA, 30 bp, Artificial Sequence
  Synthetic oligonucleotide
cataaaaacgtgggtcgcatcttaatctgg

SEQ ID NO: 221908 - DNA, 30 bp, Artificial Sequence
  Synthetic oligonucleotide
gctgggactaatatgacttgaaccatctgg

SEQ ID NO: 221909 - DNA, 30 bp, Artificial Sequence
  Synthetic oligonucleotide
tatgataacggtaccatttcaagcatctgg

SEQ ID NO: 221910 - DNA, 30 bp, Artificial Sequence
  Synthetic oligonucleotide
ctacggttagcacaatatactgcgatctgg

SEQ ID NO: 221911 - DNA, 30 bp, Artificial Sequence
  Synthetic oligonucleotide
ttcttcggtaagtgcttacacatgatctgg

SEQ ID NO: 221912 - DNA, 30 bp, Artificial Sequence
  Synthetic oligonucleotide
tgatgaaaaatgggtggactccatatctgg

SEQ ID NO: 221913 - DNA, 30 bp, Artificial Sequence
  Synthetic oligonucleotide
tcggtgttaaagaaaagtacccctatctgg

SEQ ID NO: 221914 - DNA, 30 bp, Artificial Sequence
  Synthetic oligonucleotide
cagaagtgggcccccacgtgatctatctgg

SEQ ID NO: 221915 - DNA, 30 bp, Artificial Sequence
  Synthetic oligonucleotide
cgggagcgtcgctcaaacgccgttatctgg

SEQ ID NO: 221916 - DNA, 30 bp, Artificial Sequence
  Synthetic oligonucleotide
tttgcttgcttggacaatactaccctctgg

SEQ ID NO: 221917 - DNA, 30 bp, Artificial Sequence
  Synthetic oligonucleotide
caatatcgcggccatggtcggaaagtctgg

SEQ ID NO: 221918 - DNA, 30 bp, Artificial Sequence
  Synthetic oligonucleotide
gaacacacagtgtatcggggtgacgtctgg

SEQ ID NO: 221919 - DNA, 30 bp, Artificial Sequence
  Synthetic oligonucleotide
aaatgagtacgcgcttctatttccgtctgg

SEQ ID NO: 221920 - DNA, 30 bp, Artificial Sequence
  Synthetic oligonucleotide
gtacctccccagacaaaccagagcgtctgg

SEQ ID NO: 221921 - DNA, 30 bp, Artificial Sequence
  Synthetic oligonucleotide
gcgcgcaagtatcagtaccgcatcgtctgg

SEQ ID NO: 221922 - DNA, 30 bp, Artificial Sequence
  Synthetic oligonucleotide
caacacattagtggagacaaaacggtctgg

SEQ ID NO: 221923 - DNA, 30 bp, Artificial Sequence
  Synthetic oligonucleotide
gacggataacgcggtataagtccggtctgg

SEQ ID NO: 221924 - DNA, 30 bp, Artificial Sequence
  Synthetic oligonucleotide
aaacgaagagaaatatatccagtggtctgg

SEQ ID NO: 221925 - DNA, 30 bp, Artificial Sequence
  Synthetic oligonucleotide
cgatacgagtgctcagtatgcattgtctgg

SEQ ID NO: 221926 - DNA, 30 bp, Artificial Sequence
  Synthetic oligonucleotide
atgcccgcgtaatgcaagcattcattctgg

SEQ ID NO: 221927 - DNA, 30 bp, Artificial Sequence
  Synthetic oligonucleotide
tcatgtaggccgtaagtttcctgcttctgg

SEQ ID NO: 221928 - DNA, 30 bp, Artificial Sequence
  Synthetic oligonucleotide
tagggttggcagtatctgaaaaagttctgg

SEQ ID NO: 221929 - DNA, 30 bp, Artificial Sequence
  Synthetic oligonucleotide
gcgcctagaatcgaccaggaggagttctgg

SEQ ID NO: 221930 - DNA, 30 bp, Artificial Sequence
  Synthetic oligonucleotide
gattgttcagttagtagccaatctttctgg

SEQ ID NO: 221931 - DNA, 30 bp, Artificial Sequence
  Synthetic oligonucleotide
tggggattatgaatcatggccttaaagtgg

SEQ ID NO: 221932 - DNA, 30 bp, Artificial Sequence
  Synthetic oligonucleotide
tgaaggtaatggatctgggcaacgaagtgg

SEQ ID NO: 221933 - DNA, 30 bp, Artificial Sequence
  Synthetic oligonucleotide
gtccgtgcgagtctgagggtcgcacagtgg

SEQ ID NO: 221934 - DNA, 30 bp, Artificial Sequence
  Synthetic oligonucleotide
ggccgagtgaataatttcacggcacagtgg

SEQ ID NO: 221935 - DNA, 31 bp, Artificial Sequence
  Synthetic oligonucleotide
tgaagactaagggggcaacggtgcacagtgg

SEQ ID NO: 221936 - DNA, 30 bp, Artificial Sequence
  Synthetic oligonucleotide
cggggcacgcgcactctagctgtacagtgg

SEQ ID NO: 221937 - DNA, 30 bp, Artificial Sequence
  Synthetic oligonucleotide
ggggaatgcgacggtcgttgcggccagtgg

SEQ ID NO: 221938 - DNA, 30 bp, Artificial Sequence
  Synthetic oligonucleotide
acagctatgacgaagatcggacatcagtgg

SEQ ID NO: 221939 - DNA, 30 bp, Artificial Sequence
  Synthetic oligonucleotide
aagtttctcgacgatatggggaaagagtgg

SEQ ID NO: 221940 - DNA, 30 bp, Artificial Sequence
  Synthetic oligonucleotide
ggtcaacttgctctgataagctacgagtgg

SEQ ID NO: 221941 - DNA, 30 bp, Artificial Sequence
  Synthetic oligonucleotide
cacgggcgtaaagcacacagtcgcgagtgg

SEQ ID NO: 221942 - DNA, 30 bp, Artificial Sequence
  Synthetic oligonucleotide
aaggtgagcgatttcataggttcggagtgg

SEQ ID NO: 221943 - DNA, 30 bp, Artificial Sequence
  Synthetic oligonucleotide
cagggtaaccgttggaatcacggatagtgg

SEQ ID NO: 221944 - DNA, 30 bp, Artificial Sequence
  Synthetic oligonucleotide
gggcgccagccgcaagtagaaagctagtgg

SEQ ID NO: 221945 - DNA, 30 bp, Artificial Sequence
  Synthetic oligonucleotide
gcaagcctttactttgtcgtacggtagtgg

SEQ ID NO: 221946 - DNA, 30 bp, Artificial Sequence
  Synthetic oligonucleotide
tctatttggaaaatcgtcccatggtagtgg

SEQ ID NO: 221947 - DNA, 30 bp, Artificial Sequence
  Synthetic oligonucleotide
cccataatggcaaaaaccggggtgtagtgg

SEQ ID NO: 221948 - DNA, 30 bp, Artificial Sequence
  Synthetic oligonucleotide
acggattaattagtgactgagaattagtgg

SEQ ID NO: 221949 - DNA, 30 bp, Artificial Sequence
  Synthetic oligonucleotide
accgaggacagattgagtggtcagacgtgg

SEQ ID NO: 221950 - DNA, 30 bp, Artificial Sequence
  Synthetic oligonucleotide
aaagctcatactacgggaagtaggacgtgg

SEQ ID NO: 221951 - DNA, 30 bp, Artificial Sequence
  Synthetic oligonucleotide
acggataggcccgtactcacaagtacgtgg

SEQ ID NO: 221952 - DNA, 30 bp, Artificial Sequence
  Synthetic oligonucleotide
ggttagacgggttagtgggggattacgtgg

SEQ ID NO: 221953 - DNA, 30 bp, Artificial Sequence
  Synthetic oligonucleotide
catgctctagcaacgatgacgttcccgtgg

SEQ ID NO: 221954 - DNA, 30 bp, Artificial Sequence
  Synthetic oligonucleotide
gggaacgcggtgcaggtacgtttgccgtgg

SEQ ID NO: 221955 - DNA, 30 bp, Artificial Sequence
  Synthetic oligonucleotide
ccgtcggatgtctcggagatcggtccgtgg

SEQ ID NO: 221956 - DNA, 30 bp, Artificial Sequence
  Synthetic oligonucleotide
gagtgtaaattggtgcaaatctccgcgtgg

SEQ ID NO: 221957 - DNA, 30 bp, Artificial Sequence
  Synthetic oligonucleotide
aagagacgtctgggaattgcccatgcgtgg

SEQ ID NO: 221958 - DNA, 30 bp, Artificial Sequence
  Synthetic oligonucleotide
acttcacgttgcttccgtatagttgcgtgg

SEQ ID NO: 221959 - DNA, 30 bp, Artificial Sequence
  Synthetic oligonucleotide
ccaattcagaaaccccaggatcactcgtgg

SEQ ID NO: 221960 - DNA, 30 bp, Artificial Sequence
  Synthetic oligonucleotide
taagtgagcaaatccgcactcacctcgtgg

SEQ ID NO: 221961 - DNA, 30 bp, Artificial Sequence
  Synthetic oligonucleotide
aggaaatcgtcacgttggggcaagtcgtgg

SEQ ID NO: 221962 - DNA, 30 bp, Artificial Sequence
  Synthetic oligonucleotide
gcctgcgtgtaagataatgggatgtcgtgg

SEQ ID NO: 221963 - DNA, 30 bp, Artificial Sequence
  Synthetic oligonucleotide
tgactccgaatttcggcgcaaaaaaggtgg

SEQ ID NO: 221964 - DNA, 30 bp, Artificial Sequence
  Synthetic oligonucleotide
ggctaatggtcagatgtgggaagaaggtgg

SEQ ID NO: 221965 - DNA, 30 bp, Artificial Sequence
  Synthetic oligonucleotide
tcacaaaaacttaaacttaaggtgaggtgg

SEQ ID NO: 221966 - DNA, 30 bp, Artificial Sequence
  Synthetic oligonucleotide
cggctggggccgatgcaattttgtaggtgg

SEQ ID NO: 221967 - DNA, 30 bp, Artificial Sequence
  Synthetic oligonucleotide
actaggtgggagtccatgaggtttaggtgg

SEQ ID NO: 221968 - DNA, 30 bp, Artificial Sequence
  Synthetic oligonucleotide
tatgtgcaaacatctttcgtagaacggtgg

SEQ ID NO: 221969 - DNA, 30 bp, Artificial Sequence
  Synthetic oligonucleotide
taagctatttctaaataaaatctacggtgg

SEQ ID NO: 221970 - DNA, 30 bp, Artificial Sequence
  Synthetic oligonucleotide
cgtttacaatttcgcgtggataaccggtgg

SEQ ID NO: 221971 - DNA, 30 bp, Artificial Sequence
  Synthetic oligonucleotide
agtcacgcatgatcataacgggagcggtgg

SEQ ID NO: 221972 - DNA, 30 bp, Artificial Sequence
  Synthetic oligonucleotide
cgggtgtgaagtccgtgcatctggcggtgg

SEQ ID NO: 221973 - DNA, 30 bp, Artificial Sequence
  Synthetic oligonucleotide
acctgtcaggggcgagtttcgaatcggtgg

SEQ ID NO: 221974 - DNA, 30 bp, Artificial Sequence
  Synthetic oligonucleotide
aaagtctcgtgcacggagttagatcggtgg

SEQ ID NO: 221975 - DNA, 30 bp, Artificial Sequence
  Synthetic oligonucleotide
gggctaggctgctggcatattgctcggtgg

SEQ ID NO: 221976 - DNA, 30 bp, Artificial Sequence
  Synthetic oligonucleotide
cggcacttgatacctctctaaagtcggtgg

SEQ ID NO: 221977 - DNA, 30 bp, Artificial Sequence
  Synthetic oligonucleotide
ccgcatggacagaacgagaatagtcggtgg

SEQ ID NO: 221978 - DNA, 30 bp, Artificial Sequence
  Synthetic oligonucleotide
agattacccgggtggaaacacggtcggtgg

SEQ ID NO: 221979 - DNA, 30 bp, Artificial Sequence
  Synthetic oligonucleotide
aagccggagccacatgatgtgggagggtgg

SEQ ID NO: 221980 - DNA, 30 bp, Artificial Sequence
  Synthetic oligonucleotide
tggacgctgtaacggcgcaaggtagggtgg

SEQ ID NO: 221981 - DNA, 30 bp, Artificial Sequence
  Synthetic oligonucleotide
tgcggtaatggatcatttgaagacgggtgg

SEQ ID NO: 221982 - DNA, 30 bp, Artificial Sequence
  Synthetic oligonucleotide
ctcattgcgctccgtgtttccttatggtgg

SEQ ID NO: 221983 - DNA, 30 bp, Artificial Sequence
  Synthetic oligonucleotide
ccagggttgcagagcaatactcactggtgg

SEQ ID NO: 221984 - DNA, 30 bp, Artificial Sequence
  Synthetic oligonucleotide
ggcgactagctattgtcagtgccttggtgg

SEQ ID NO: 221985 - DNA, 30 bp, Artificial Sequence
  Synthetic oligonucleotide
ctaaacgaacctctacgcgttaacatgtgg

SEQ ID NO: 221986 - DNA, 30 bp, Artificial Sequence
  Synthetic oligonucleotide
ggttcatctctggtactaggttacatgtgg

SEQ ID NO: 221987 - DNA, 30 bp, Artificial Sequence
  Synthetic oligonucleotide
tgggctatcgtagaactcgacctcatgtgg

SEQ ID NO: 221988 - DNA, 30 bp, Artificial Sequence
  Synthetic oligonucleotide
ttggctctgaacgcggagatcgagatgtgg

SEQ ID NO: 221989 - DNA, 30 bp, Artificial Sequence
  Synthetic oligonucleotide
gtgacccaatatggctgacatacgatgtgg

SEQ ID NO: 221990 - DNA, 30 bp, Artificial Sequence
  Synthetic oligonucleotide
aacgttgacgattgcttctaaaggatgtgg

SEQ ID NO: 221991 - DNA, 30 bp, Artificial Sequence
  Synthetic oligonucleotide
atgtgaattgactgcgaagtgcttatgtgg

SEQ ID NO: 221992 - DNA, 30 bp, Artificial Sequence
  Synthetic oligonucleotide
gccgtctggagacaccttcggaagctgtgg

SEQ ID NO: 221993 - DNA, 30 bp, Artificial Sequence
  Synthetic oligonucleotide
ttaggctaaagttgcgcgctccagctgtgg

SEQ ID NO: 221994 - DNA, 30 bp, Artificial Sequence
  Synthetic oligonucleotide
ttgcatgtcgccagctgagtgggtctgtgg

SEQ ID NO: 221995 - DNA, 30 bp, Artificial Sequence
  Synthetic oligonucleotide
ctgcggacaggagcgggtactacagtgtgg

SEQ ID NO: 221996 - DNA, 30 bp, Artificial Sequence
  Synthetic oligonucleotide
taggatgcccgcgaacctcgaagcgtgtgg

SEQ ID NO: 221997 - DNA, 30 bp, Artificial Sequence
  Synthetic oligonucleotide
gagtgtagctcaggccgacggaatgtgtgg

SEQ ID NO: 221998 - DNA, 30 bp, Artificial Sequence
  Synthetic oligonucleotide
gagagtactcgtatcgaatcggttgtgtgg

SEQ ID NO: 221999 - DNA, 30 bp, Artificial Sequence
  Synthetic oligonucleotide
actggaggctgtctaactggtaaattgtgg

SEQ ID NO: 222000 - DNA, 30 bp, Artificial Sequence
  Synthetic oligonucleotide
tggttcaagaattctcggttaatattgtgg

SEQ ID NO: 222001 - DNA, 30 bp, Artificial Sequence
  Synthetic oligonucleotide
gaaggttgtgtactgtcaatcgtgttgtgg

SEQ ID NO: 222002 - DNA, 30 bp, Artificial Sequence
  Synthetic oligonucleotide
cgagtaatgtctcatagaactcctttgtgg

SEQ ID NO: 222003 - DNA, 30 bp, Artificial Sequence
  Synthetic oligonucleotide
aatgaccgataagcgcgctcgagaaattgg

SEQ ID NO: 222004 - DNA, 30 bp, Artificial Sequence
  Synthetic oligonucleotide
taaccagagcccttccaggtatcgaattgg

SEQ ID NO: 222005 - DNA, 30 bp, Artificial Sequence
  Synthetic oligonucleotide
cgttaatagagcgtgctctacctgaattgg

SEQ ID NO: 222006 - DNA, 30 bp, Artificial Sequence
  Synthetic oligonucleotide
ggcactccgtaggaccaggatggacattgg

SEQ ID NO: 222007 - DNA, 30 bp, Artificial Sequence
  Synthetic oligonucleotide
gctcaaaggcgaggacggacttgacattgg

SEQ ID NO: 222008 - DNA, 30 bp, Artificial Sequence
  Synthetic oligonucleotide
ccgttaatgaccctatctcccatacattgg

SEQ ID NO: 222009 - DNA, 30 bp, Artificial Sequence
  Synthetic oligonucleotide
tacgcaactccgacggtatctgcgcattgg

SEQ ID NO: 222010 - DNA, 30 bp, Artificial Sequence
  Synthetic oligonucleotide
cctagctcgtggaggtgtaattatcattgg

SEQ ID NO: 222011 - DNA, 30 bp, Artificial Sequence
  Synthetic oligonucleotide
cccgaagtactgctggactgccttcattgg

SEQ ID NO: 222012 - DNA, 30 bp, Artificial Sequence
  Synthetic oligonucleotide
gaccgtaagggatccctctttccggattgg

SEQ ID NO: 222013 - DNA, 30 bp, Artificial Sequence
  Synthetic oligonucleotide
cgcggagagcaccatggctagtcggattgg

SEQ ID NO: 222014 - DNA, 30 bp, Artificial Sequence
  Synthetic oligonucleotide
agctatcaataaaccccgaatatggattgg

SEQ ID NO: 222015 - DNA, 30 bp, Artificial Sequence
  Synthetic oligonucleotide
gagattgggctgtagcacgggcttgattgg

SEQ ID NO: 222016 - DNA, 30 bp, Artificial Sequence
  Synthetic oligonucleotide
tccgggggccaagtacgatctccgtattgg

SEQ ID NO: 222017 - DNA, 30 bp, Artificial Sequence
  Synthetic oligonucleotide
aaatgacacgtagaaaaattcagttattgg

SEQ ID NO: 222018 - DNA, 30 bp, Artificial Sequence
  Synthetic oligonucleotide
agccggaattcacccggagtacgttattgg

SEQ ID NO: 222019 - DNA, 30 bp, Artificial Sequence
  Synthetic oligonucleotide
ggtaaacactcgattctggtcagcacttgg

SEQ ID NO: 222020 - DNA, 30 bp, Artificial Sequence
  Synthetic oligonucleotide
atggatataacggggtgaggttatacttgg

SEQ ID NO: 222021 - DNA, 30 bp, Artificial Sequence
  Synthetic oligonucleotide
gacgtccaaagtacttcacgagtcccttgg

SEQ ID NO: 222022 - DNA, 30 bp, Artificial Sequence
  Synthetic oligonucleotide
catactcgatcaattcattgggctccttgg

SEQ ID NO: 222023 - DNA, 30 bp, Artificial Sequence
  Synthetic oligonucleotide
ggtgcaaatcataaaaggggtattccttgg

SEQ ID NO: 222024 - DNA, 30 bp, Artificial Sequence
  Synthetic oligonucleotide
cctcaccttcaaggtaaacgagtcgcttgg

SEQ ID NO: 222025 - DNA, 30 bp, Artificial Sequence
  Synthetic oligonucleotide
agaatttgattaaacatcacggatgcttgg

SEQ ID NO: 222026 - DNA, 30 bp, Artificial Sequence
  Synthetic oligonucleotide
caatttggcttgtcgagaaactgtgcttgg

SEQ ID NO: 222027 - DNA, 30 bp, Artificial Sequence
  Synthetic oligonucleotide
gtggccaagcacaggatctttgaatcttgg

SEQ ID NO: 222028 - DNA, 30 bp, Artificial Sequence
  Synthetic oligonucleotide
gagacggctactggtagttggatatcttgg

SEQ ID NO: 222029 - DNA, 30 bp, Artificial Sequence
  Synthetic oligonucleotide
taatcgatgctataaacaacaggctcttgg

SEQ ID NO: 222030 - DNA, 30 bp, Artificial Sequence
  Synthetic oligonucleotide
gcagtagattcgagcaacatcaagtcttgg

SEQ ID NO: 222031 - DNA, 30 bp, Artificial Sequence
  Synthetic oligonucleotide
cataggggattaccattaaggagaagttgg

SEQ ID NO: 222032 - DNA, 30 bp, Artificial Sequence
  Synthetic oligonucleotide
gccacgttgtggaatctaaacaatagttgg

SEQ ID NO: 222033 - DNA, 30 bp, Artificial Sequence
  Synthetic oligonucleotide
agcatcctgtcggcaatctaacgtagttgg

SEQ ID NO: 222034 - DNA, 30 bp, Artificial Sequence
  Synthetic oligonucleotide
gcgaggctcctttgtcttcgggcacgttgg

SEQ ID NO: 222035 - DNA, 30 bp, Artificial Sequence
  Synthetic oligonucleotide
acatactgtgcggaaaagaacccccgttgg

SEQ ID NO: 222036 - DNA, 30 bp, Artificial Sequence
  Synthetic oligonucleotide
agacgttgctcattcacttgtagccgttgg

SEQ ID NO: 222037 - DNA, 30 bp, Artificial Sequence
  Synthetic oligonucleotide
ctccaagaacaacaaggattaggccgttgg

SEQ ID NO: 222038 - DNA, 30 bp, Artificial Sequence
  Synthetic oligonucleotide
gcgactcaatggtaatcaaagtgccgttgg

SEQ ID NO: 222039 - DNA, 30 bp, Artificial Sequence
  Synthetic oligonucleotide
taggtgttaaatgggccgcttcagcgttgg

SEQ ID NO: 222040 - DNA, 30 bp, Artificial Sequence
  Synthetic oligonucleotide
gaaaagaggatggctccagccaatcgttgg

SEQ ID NO: 222041 - DNA, 30 bp, Artificial Sequence
  Synthetic oligonucleotide
cccgctaagttccagtaacaagatcgttgg

SEQ ID NO: 222042 - DNA, 30 bp, Artificial Sequence
  Synthetic oligonucleotide
agtaacaggagctttgttagaactcgttgg

SEQ ID NO: 222043 - DNA, 30 bp, Artificial Sequence
  Synthetic oligonucleotide
ctattctatgaacaacgtagaaaaggttgg

SEQ ID NO: 222044 - DNA, 30 bp, Artificial Sequence
  Synthetic oligonucleotide
aggtcagagagattaatgcgggcgggttgg

SEQ ID NO: 222045 - DNA, 30 bp, Artificial Sequence
  Synthetic oligonucleotide
cgccactgtaacggggacggtgggggttgg

SEQ ID NO: 222046 - DNA, 30 bp, Artificial Sequence
  Synthetic oligonucleotide
acaatgtttagggaagtttgtagtggttgg

SEQ ID NO: 222047 - DNA, 30 bp, Artificial Sequence
  Synthetic oligonucleotide
cccgactggaggggtaagagacttggttgg

SEQ ID NO: 222048 - DNA, 30 bp, Artificial Sequence
  Synthetic oligonucleotide
cgggatacggctgagaacaagtaatgttgg

SEQ ID NO: 222049 - DNA, 30 bp, Artificial Sequence
  Synthetic oligonucleotide
ttattttgcgcgacgttgtcgtaatgttgg

SEQ ID NO: 222050 - DNA, 30 bp, Artificial Sequence
  Synthetic oligonucleotide
ggatatcgccttagccgatatccatgttgg

SEQ ID NO: 222051 - DNA, 30 bp, Artificial Sequence
  Synthetic oligonucleotide
acctacacggccccttttagaatttgttgg

SEQ ID NO: 222052 - DNA, 30 bp, Artificial Sequence
  Synthetic oligonucleotide
aagcttagttccttcgggaaggtttgttgg

SEQ ID NO: 222053 - DNA, 30 bp, Artificial Sequence
  Synthetic oligonucleotide
ttagttagctgcggaaaatttgcgatttgg

SEQ ID NO: 222054 - DNA, 30 bp, Artificial Sequence
  Synthetic oligonucleotide
tatgcagtgtccgggtatcaaactatttgg

SEQ ID NO: 222055 - DNA, 30 bp, Artificial Sequence
  Synthetic oligonucleotide
gaggggtttgattagagcgttattatttgg

SEQ ID NO: 222056 - DNA, 30 bp, Artificial Sequence
  Synthetic oligonucleotide
gctgttaagacttgtcgtgatgaactttgg

SEQ ID NO: 222057 - DNA, 30 bp, Artificial Sequence
  Synthetic oligonucleotide
tataagcgtcgagatctccataccctttgg

SEQ ID NO: 222058 - DNA, 30 bp, Artificial Sequence
  Synthetic oligonucleotide
gtacttttcccgatggtactcagagtttgg

SEQ ID NO: 222059 - DNA, 30 bp, Artificial Sequence
  Synthetic oligonucleotide
tcaaagcacaactatgatgaattcgtttgg

SEQ ID NO: 222060 - DNA, 30 bp, Artificial Sequence
  Synthetic oligonucleotide
gaggaggtctcacgacggtgatcggtttgg

SEQ ID NO: 222061 - DNA, 31 bp, Artificial Sequence
  Synthetic oligonucleotide
tacgaaaactatggctttagttttattttgg

SEQ ID NO: 222062 - DNA, 30 bp, Artificial Sequence
  Synthetic oligonucleotide
agagcggcatcacagcagcggaagttttgg

SEQ ID NO: 222063 - DNA, 30 bp, Artificial Sequence
  Synthetic oligonucleotide
accgtaaacggtccccatgcgtcgttttgg

SEQ ID NO: 222064 - DNA, 30 bp, Artificial Sequence
  Synthetic oligonucleotide
taactggtgatatcgatgctgaggttttgg

SEQ ID NO: 222065 - DNA, 30 bp, Artificial Sequence
  Synthetic oligonucleotide
cgtaattcgaaacacaagagcactttttgg

SEQ ID NO: 222066 - DNA, 30 bp, Artificial Sequence
  Synthetic oligonucleotide
tctcagctattgttgttcctcattttttgg

SEQ ID NO: 222067 - DNA, 30 bp, Artificial Sequence
  Synthetic oligonucleotide
gagttcactgttcccggataccaaaaaatg

SEQ ID NO: 222068 - DNA, 30 bp, Artificial Sequence
  Synthetic oligonucleotide
gataggagacacgcggtaatgtaaaaaatg

SEQ ID NO: 222069 - DNA, 30 bp, Artificial Sequence
  Synthetic oligonucleotide
gtagtaatggttacgtcccgccgaaaaatg

SEQ ID NO: 222070 - DNA, 30 bp, Artificial Sequence
  Synthetic oligonucleotide
gatagcgcccacttatataatggcaaaatg

SEQ ID NO: 222071 - DNA, 30 bp, Artificial Sequence
  Synthetic oligonucleotide
agttaactgacttactttgcaatcaaaatg

SEQ ID NO: 222072 - DNA, 30 bp, Artificial Sequence
  Synthetic oligonucleotide
tgtgatgcgtgatccaatgatgtcaaaatg

SEQ ID NO: 222073 - DNA, 30 bp, Artificial Sequence
  Synthetic oligonucleotide
atccgcatcgacctatgctaggagaaaatg

SEQ ID NO: 222074 - DNA, 30 bp, Artificial Sequence
  Synthetic oligonucleotide
ggggtaccaaaatctacagttgataaaatg

SEQ ID NO: 222075 - DNA, 30 bp, Artificial Sequence
  Synthetic oligonucleotide
atcataccagtatcgtggctgccacaaatg

SEQ ID NO: 222076 - DNA, 30 bp, Artificial Sequence
  Synthetic oligonucleotide
gactggcttccgctcaacctgctacaaatg

SEQ ID NO: 222077 - DNA, 30 bp, Artificial Sequence
  Synthetic oligonucleotide
tcattaggactgtagaccagataccaaatg

SEQ ID NO: 222078 - DNA, 30 bp, Artificial Sequence
  Synthetic oligonucleotide
cacttttgcacttcaccagaatcccaaatg

SEQ ID NO: 222079 - DNA, 30 bp, Artificial Sequence
  Synthetic oligonucleotide
ggccgaccaatgtatgtggcaggccaaatg

SEQ ID NO: 222080 - DNA, 30 bp, Artificial Sequence
  Synthetic oligonucleotide
tcatgcgagatatgtagtattgagcaaatg

SEQ ID NO: 222081 - DNA, 30 bp, Artificial Sequence
  Synthetic oligonucleotide
aataatagctgcagtacgaaaatgcaaatg

SEQ ID NO: 222082 - DNA, 30 bp, Artificial Sequence
  Synthetic oligonucleotide
ggacggacaggacccgtctaaatgcaaatg

SEQ ID NO: 222083 - DNA, 30 bp, Artificial Sequence
  Synthetic oligonucleotide
ggtcaggagggcatttacatgatgcaaatg

SEQ ID NO: 222084 - DNA, 30 bp, Artificial Sequence
  Synthetic oligonucleotide
ctcggcgtccagatggaagatttgcaaatg

SEQ ID NO: 222085 - DNA, 30 bp, Artificial Sequence
  Synthetic oligonucleotide
tttaatggaagatctgaatctaatcaaatg

SEQ ID NO: 222086 - DNA, 30 bp, Artificial Sequence
  Synthetic oligonucleotide
attactgaatctgcagaggtaccagaaatg

SEQ ID NO: 222087 - DNA, 30 bp, Artificial Sequence
  Synthetic oligonucleotide
taggagctagccgctccaagggcagaaatg

SEQ ID NO: 222088 - DNA, 30 bp, Artificial Sequence
  Synthetic oligonucleotide
tcagacgtattactagtcaatgcagaaatg

SEQ ID NO: 222089 - DNA, 30 bp, Artificial Sequence
  Synthetic oligonucleotide
cgccaagtcacgatgacgattagcgaaatg

SEQ ID NO: 222090 - DNA, 30 bp, Artificial Sequence
  Synthetic oligonucleotide
ttggattatacaaggacaggttgcgaaatg

SEQ ID NO: 222091 - DNA, 30 bp, Artificial Sequence
  Synthetic oligonucleotide
acaagggtgattgtcgggttctgggaaatg

SEQ ID NO: 222092 - DNA, 30 bp, Artificial Sequence
  Synthetic oligonucleotide
tattcaggagggggtagaaattttgaaatg

SEQ ID NO: 222093 - DNA, 30 bp, Artificial Sequence
  Synthetic oligonucleotide
cgcaagacgcaatggctagcgaagtaaatg

SEQ ID NO: 222094 - DNA, 30 bp, Artificial Sequence
  Synthetic oligonucleotide
atgcaagccatatcagttctctaaacaatg

SEQ ID NO: 222095 - DNA, 30 bp, Artificial Sequence
  Synthetic oligonucleotide
tatggcggcatgagccggggtggaacaatg

SEQ ID NO: 222096 - DNA, 30 bp, Artificial Sequence
  Synthetic oligonucleotide
atagacagtgctgtagatcccctcacaatg

SEQ ID NO: 222097 - DNA, 30 bp, Artificial Sequence
  Synthetic oligonucleotide
aaataccagcatctcagaatcgggacaatg

SEQ ID NO: 222098 - DNA, 30 bp, Artificial Sequence
  Synthetic oligonucleotide
agcgtgcatacagcgtgagggtgtacaatg

SEQ ID NO: 222099 - DNA, 30 bp, Artificial Sequence
  Synthetic oligonucleotide
gtcaacctcaagagttacaggccaccaatg

SEQ ID NO: 222100 - DNA, 30 bp, Artificial Sequence
  Synthetic oligonucleotide
gtggaaatccatggataccgggcagcaatg

SEQ ID NO: 222101 - DNA, 30 bp, Artificial Sequence
  Synthetic oligonucleotide
gtggaggatcactatctgctacgagcaatg

SEQ ID NO: 222102 - DNA, 30 bp, Artificial Sequence
  Synthetic oligonucleotide
ggcttaggacaataagacatagtagcaatg

SEQ ID NO: 222103 - DNA, 30 bp, Artificial Sequence
  Synthetic oligonucleotide
ttcacgatgacttacgacccagtggcaatg

SEQ ID NO: 222104 - DNA, 30 bp, Artificial Sequence
  Synthetic oligonucleotide
tgggtagcgtgcggagtacagttggcaatg

SEQ ID NO: 222105 - DNA, 30 bp, Artificial Sequence
  Synthetic oligonucleotide
taagtggatgggcctctggtgggtgcaatg

SEQ ID NO: 222106 - DNA, 30 bp, Artificial Sequence
  Synthetic oligonucleotide
cagtacttggtgcacttaagtgtctcaatg

SEQ ID NO: 222107 - DNA, 30 bp, Artificial Sequence
  Synthetic oligonucleotide
gaatgcccccagatgtacgatccgtcaatg

SEQ ID NO: 222108 - DNA, 29 bp, Artificial Sequence
  Synthetic oligonucleotide
tattacggggtgccgattgacaaagaatg

SEQ ID NO: 222109 - DNA, 30 bp, Artificial Sequence
  Synthetic oligonucleotide
tccgagaacctgtgaacaaataacagaatg

SEQ ID NO: 222110 - DNA, 30 bp, Artificial Sequence
  Synthetic oligonucleotide
ggcttgcaaacgtgactaaacccgagaatg

SEQ ID NO: 222111 - DNA, 30 bp, Artificial Sequence
  Synthetic oligonucleotide
gttatcgcaacagtgggaatgagtagaatg

SEQ ID NO: 222112 - DNA, 30 bp, Artificial Sequence
  Synthetic oligonucleotide
aacttcgtcggcgggcgagagattagaatg

SEQ ID NO: 222113 - DNA, 30 bp, Artificial Sequence
  Synthetic oligonucleotide
gaagcctgagtggcacctgtggatcgaatg

SEQ ID NO: 222114 - DNA, 30 bp, Artificial Sequence
  Synthetic oligonucleotide
gttacataacggtactgtgaagaaggaatg

SEQ ID NO: 222115 - DNA, 30 bp, Artificial Sequence
  Synthetic oligonucleotide
gaacgataaaaattcgcggcacggggaatg

SEQ ID NO: 222116 - DNA, 30 bp, Artificial Sequence
  Synthetic oligonucleotide
tcgaattcctatttctcttctatgggaatg

SEQ ID NO: 222117 - DNA, 30 bp, Artificial Sequence
  Synthetic oligonucleotide
aaaccatgccatgataatttcaaatgaatg

SEQ ID NO: 222118 - DNA, 30 bp, Artificial Sequence
  Synthetic oligonucleotide
agttaggcccatgaacccgtctaatgaatg

SEQ ID NO: 222119 - DNA, 30 bp, Artificial Sequence
  Synthetic oligonucleotide
ggtttcgtgtaacgaacaggcatatgaatg

SEQ ID NO: 222120 - DNA, 30 bp, Artificial Sequence
  Synthetic oligonucleotide
gaatgaatatcagcatccagggtatgaatg

SEQ ID NO: 222121 - DNA, 30 bp, Artificial Sequence
  Synthetic oligonucleotide
ggagggtgtcacatgatttgaatctgaatg

SEQ ID NO: 222122 - DNA, 30 bp, Artificial Sequence
  Synthetic oligonucleotide
taggatgtttgtagcgctaccatgtgaatg

SEQ ID NO: 222123 - DNA, 30 bp, Artificial Sequence
  Synthetic oligonucleotide
ggacgtgacggcgcatcgagcttgtgaatg

SEQ ID NO: 222124 - DNA, 30 bp, Artificial Sequence
  Synthetic oligonucleotide
tgcccagaaccgacgtggtgggacataatg

SEQ ID NO: 222125 - DNA, 30 bp, Artificial Sequence
  Synthetic oligonucleotide
ggctaacttattagtctcacaagcataatg

SEQ ID NO: 222126 - DNA, 29 bp, Artificial Sequence
  Synthetic oligonucleotide
ccccacactcgcctcggactctcataatg

SEQ ID NO: 222127 - DNA, 30 bp, Artificial Sequence
  Synthetic oligonucleotide
gtaagtggaagattgcatcaacgactaatg

SEQ ID NO: 222128 - DNA, 30 bp, Artificial Sequence
  Synthetic oligonucleotide
gggctcaagcctgtgatttccttactaatg

SEQ ID NO: 222129 - DNA, 30 bp, Artificial Sequence
  Synthetic oligonucleotide
ttcaacgaatcaatgaagacgtacctaatg

SEQ ID NO: 222130 - DNA, 30 bp, Artificial Sequence
  Synthetic oligonucleotide
tgtattacgcgcattggtcttcaagtaatg

SEQ ID NO: 222131 - DNA, 30 bp, Artificial Sequence
  Synthetic oligonucleotide
gctgcaccaacatacacatagacagtaatg

SEQ ID NO: 222132 - DNA, 30 bp, Artificial Sequence
  Synthetic oligonucleotide
ggattcgacaaagggggatactcagtaatg

SEQ ID NO: 222133 - DNA, 30 bp, Artificial Sequence
  Synthetic oligonucleotide
acgtaaagtgcatggttcattcgagtaatg

SEQ ID NO: 222134 - DNA, 30 bp, Artificial Sequence
  Synthetic oligonucleotide
aagatgccagtcgcacaccaaggagtaatg

SEQ ID NO: 222135 - DNA, 30 bp, Artificial Sequence
  Synthetic oligonucleotide
gaaaaaagggcagggacgtgattcgtaatg

SEQ ID NO: 222136 - DNA, 30 bp, Artificial Sequence
  Synthetic oligonucleotide
tgtctacaaaggtccgtagaataggtaatg

SEQ ID NO: 222137 - DNA, 30 bp, Artificial Sequence
  Synthetic oligonucleotide
aatcacacgatttttggtagcgtggtaatg

SEQ ID NO: 222138 - DNA, 30 bp, Artificial Sequence
  Synthetic oligonucleotide
ttttgtatggtagtcctaatgaatgtaatg

SEQ ID NO: 222139 - DNA, 30 bp, Artificial Sequence
  Synthetic oligonucleotide
atgagttagcttgccaataaccttgtaatg

SEQ ID NO: 222140 - DNA, 30 bp, Artificial Sequence
  Synthetic oligonucleotide
cgtttgaggatctatttggaagctttaatg

SEQ ID NO: 222141 - DNA, 30 bp, Artificial Sequence
  Synthetic oligonucleotide
catgaccacgtggctcacttcagaaacatg

SEQ ID NO: 222142 - DNA, 30 bp, Artificial Sequence
  Synthetic oligonucleotide
cttgggagaaaagcacgggacataaacatg

SEQ ID NO: 222143 - DNA, 30 bp, Artificial Sequence
  Synthetic oligonucleotide
ttcaacgactgcgaaagggcgggcaacatg

SEQ ID NO: 222144 - DNA, 30 bp, Artificial Sequence
  Synthetic oligonucleotide
gataaccaaggataggccggcatcaacatg

SEQ ID NO: 222145 - DNA, 30 bp, Artificial Sequence
  Synthetic oligonucleotide
tctgaacgtctttaaatgaccgtcaacatg

SEQ ID NO: 222146 - DNA, 30 bp, Artificial Sequence
  Synthetic oligonucleotide
aactaataggttgttagataggctaacatg

SEQ ID NO: 222147 - DNA, 30 bp, Artificial Sequence
  Synthetic oligonucleotide
ttgtcgtccagggaagcgcagaaacacatg

SEQ ID NO: 222148 - DNA, 30 bp, Artificial Sequence
  Synthetic oligonucleotide
atttcggtggtatagatacgatagcacatg

SEQ ID NO: 222149 - DNA, 30 bp, Artificial Sequence
  Synthetic oligonucleotide
ttggatccggcgatcggtccgccgcacatg

SEQ ID NO: 222150 - DNA, 30 bp, Artificial Sequence
  Synthetic oligonucleotide
caagcgctgaaaaacggttcgccgcacatg

SEQ ID NO: 222151 - DNA, 30 bp, Artificial Sequence
  Synthetic oligonucleotide
ccatagcagtctgcgttatatgggcacatg

SEQ ID NO: 222152 - DNA, 30 bp, Artificial Sequence
  Synthetic oligonucleotide
gagagtgtcacttctgatgtgcgtcacatg

SEQ ID NO: 222153 - DNA, 30 bp, Artificial Sequence
  Synthetic oligonucleotide
gaaaaaccggcgtgaacggggtgcgacatg

SEQ ID NO: 222154 - DNA, 30 bp, Artificial Sequence
  Synthetic oligonucleotide
tggtcatcttcggctgagctagctgacatg

SEQ ID NO: 222155 - DNA, 30 bp, Artificial Sequence
  Synthetic oligonucleotide
agacggaatatagcggcataaagtgacatg

SEQ ID NO: 222156 - DNA, 30 bp, Artificial Sequence
  Synthetic oligonucleotide
cggctatcaggtgtggagggtaaatacatg

SEQ ID NO: 222157 - DNA, 30 bp, Artificial Sequence
  Synthetic oligonucleotide
gatgtggactggttgaaggtagaatacatg

SEQ ID NO: 222158 - DNA, 30 bp, Artificial Sequence
  Synthetic oligonucleotide
ggagggagaactttacaacgcctatacatg

SEQ ID NO: 222159 - DNA, 30 bp, Artificial Sequence
  Synthetic oligonucleotide
cccatcctttaacccccaaaaaactacatg

SEQ ID NO: 222160 - DNA, 30 bp, Artificial Sequence
  Synthetic oligonucleotide
ctgtgtcatggttattggttgtactacatg

SEQ ID NO: 222161 - DNA, 30 bp, Artificial Sequence
  Synthetic oligonucleotide
ccgaaagcgcacttgcagagctgctacatg

SEQ ID NO: 222162 - DNA, 30 bp, Artificial Sequence
  Synthetic oligonucleotide
gtaggaatgcctcccaagcattgttacatg

SEQ ID NO: 222163 - DNA, 30 bp, Artificial Sequence
  Synthetic oligonucleotide
actgcactgcttgtgaacgttgtaaccatg

SEQ ID NO: 222164 - DNA, 30 bp, Artificial Sequence
  Synthetic oligonucleotide
tatcaaagacgttatgagggggacaccatg

SEQ ID NO: 222165 - DNA, 30 bp, Artificial Sequence
  Synthetic oligonucleotide
tagaacgcattgctaaacacgggcaccatg

SEQ ID NO: 222166 - DNA, 30 bp, Artificial Sequence
  Synthetic oligonucleotide
gtgcaatcttcgcggataggacagaccatg

SEQ ID NO: 222167 - DNA, 30 bp, Artificial Sequence
  Synthetic oligonucleotide
gccagttaatcggtaccgctgcggaccatg

SEQ ID NO: 222168 - DNA, 30 bp, Artificial Sequence
  Synthetic oligonucleotide
cttggtacccttagcgtctaccctaccatg

SEQ ID NO: 222169 - DNA, 30 bp, Artificial Sequence
  Synthetic oligonucleotide
ggcgacatagacatgtgtaacctacccatg

SEQ ID NO: 222170 - DNA, 30 bp, Artificial Sequence
  Synthetic oligonucleotide
gggccctgacgcaattggtcagaccccatg

SEQ ID NO: 222171 - DNA, 30 bp, Artificial Sequence
  Synthetic oligonucleotide
agattgaacttttctgcgactaggcccatg

SEQ ID NO: 222172 - DNA, 30 bp, Artificial Sequence
  Synthetic oligonucleotide
cacttaaagtacgtgtcacaccggcccatg

SEQ ID NO: 222173 - DNA, 30 bp, Artificial Sequence
  Synthetic oligonucleotide
cgggtaacgcggccaactgtgtggcccatg

SEQ ID NO: 222174 - DNA, 30 bp, Artificial Sequence
  Synthetic oligonucleotide
gggaccttgggaagggataagcaatccatg

SEQ ID NO: 222175 - DNA, 30 bp, Artificial Sequence
  Synthetic oligonucleotide
taggttgcactacgatcatacgcatccatg

SEQ ID NO: 222176 - DNA, 30 bp, Artificial Sequence
  Synthetic oligonucleotide
atgccagttggctgggaccatatatccatg

SEQ ID NO: 222177 - DNA, 30 bp, Artificial Sequence
  Synthetic oligonucleotide
cgttcggctcggcttaaatagggttccatg

SEQ ID NO: 222178 - DNA, 30 bp, Artificial Sequence
  Synthetic oligonucleotide
caaagggagattctacgaagcagaagcatg

SEQ ID NO: 222179 - DNA, 30 bp, Artificial Sequence
  Synthetic oligonucleotide
tcgtaaacctttcgtgtggtttttagcatg

SEQ ID NO: 222180 - DNA, 30 bp, Artificial Sequence
  Synthetic oligonucleotide
agacgcaaaacagcttctaagctccgcatg

SEQ ID NO: 222181 - DNA, 30 bp, Artificial Sequence
  Synthetic oligonucleotide
cattctccggtcccgtccttgtgcggcatg

SEQ ID NO: 222182 - DNA, 30 bp, Artificial Sequence
  Synthetic oligonucleotide
aagatcgacgttcagtgatatatcggcatg

SEQ ID NO: 222183 - DNA, 30 bp, Artificial Sequence
  Synthetic oligonucleotide
cccgaccgacctgtacgagtgtctggcatg

SEQ ID NO: 222184 - DNA, 30 bp, Artificial Sequence
  Synthetic oligonucleotide
tccaaaatccgattatagaatccatgcatg

SEQ ID NO: 222185 - DNA, 30 bp, Artificial Sequence
  Synthetic oligonucleotide
ggaactatcgtgcggttaggtttctgcatg

SEQ ID NO: 222186 - DNA, 30 bp, Artificial Sequence
  Synthetic oligonucleotide
agtatagcactaggactaggagagtgcatg

SEQ ID NO: 222187 - DNA, 30 bp, Artificial Sequence
  Synthetic oligonucleotide
gtttaagagagattatggtggtaaatcatg

SEQ ID NO: 222188 - DNA, 30 bp, Artificial Sequence
  Synthetic oligonucleotide
caactgaatgaatgcggaacaggaatcatg

SEQ ID NO: 222189 - DNA, 30 bp, Artificial Sequence
  Synthetic oligonucleotide
tggacatgctatgactttcggtacatcatg

SEQ ID NO: 222190 - DNA, 30 bp, Artificial Sequence
  Synthetic oligonucleotide
aaaaatattagcattgtagaagagatcatg

SEQ ID NO: 222191 - DNA, 30 bp, Artificial Sequence
  Synthetic oligonucleotide
atcgacgaatcattgcacgtgatgatcatg

SEQ ID NO: 222192 - DNA, 30 bp, Artificial Sequence
  Synthetic oligonucleotide
cctattcggacgggtgcacagttgatcatg

SEQ ID NO: 222193 - DNA, 30 bp, Artificial Sequence
  Synthetic oligonucleotide
ccttccgcgggggttaatatttgtatcatg

SEQ ID NO: 222194 - DNA, 30 bp, Artificial Sequence
  Synthetic oligonucleotide
gcacgcggtcagggagaggatggactcatg

SEQ ID NO: 222195 - DNA, 30 bp, Artificial Sequence
  Synthetic oligonucleotide
taaatagtgaaaactcatacgcggctcatg

SEQ ID NO: 222196 - DNA, 30 bp, Artificial Sequence
  Synthetic oligonucleotide
ccgggtaaaaacaactgtttcgggctcatg

SEQ ID NO: 222197 - DNA, 30 bp, Artificial Sequence
  Synthetic oligonucleotide
atgctgcatggatttaccaatttgctcatg

SEQ ID NO: 222198 - DNA, 30 bp, Artificial Sequence
  Synthetic oligonucleotide
cacgatactaggtctgactagaccgtcatg

SEQ ID NO: 222199 - DNA, 30 bp, Artificial Sequence
  Synthetic oligonucleotide
tccctactgtaacgttggacgagattcatg

SEQ ID NO: 222200 - DNA, 30 bp, Artificial Sequence
  Synthetic oligonucleotide
aaatgcacaaacccgtatagttacttcatg

SEQ ID NO: 222201 - DNA, 30 bp, Artificial Sequence
  Synthetic oligonucleotide
gcgttcgtgttcattgatgagaagttcatg

SEQ ID NO: 222202 - DNA, 30 bp, Artificial Sequence
  Synthetic oligonucleotide
gacatgataatatacattccttagttcatg

SEQ ID NO: 222203 - DNA, 30 bp, Artificial Sequence
  Synthetic oligonucleotide
aggagtattaaggatgtaatagggttcatg

SEQ ID NO: 222204 - DNA, 30 bp, Artificial Sequence
  Synthetic oligonucleotide
aggaatcaagtgatactaattagtttcatg

SEQ ID NO: 222205 - DNA, 30 bp, Artificial Sequence
  Synthetic oligonucleotide
caatttttacgtgggctggaagttttcatg

SEQ ID NO: 222206 - DNA, 30 bp, Artificial Sequence
  Synthetic oligonucleotide
ttgatgtctgtagtaaaagtaaagaagatg

SEQ ID NO: 222207 - DNA, 30 bp, Artificial Sequence
  Synthetic oligonucleotide
aatcccaaggaccctttggttcataagatg

SEQ ID NO: 222208 - DNA, 30 bp, Artificial Sequence
  Synthetic oligonucleotide
atactaaaagatgtgctttagcaccagatg

SEQ ID NO: 222209 - DNA, 30 bp, Artificial Sequence
  Synthetic oligonucleotide
cgtcttgaattactggtgtcttaccagatg

SEQ ID NO: 222210 - DNA, 30 bp, Artificial Sequence
  Synthetic oligonucleotide
cgtctatataggaaagggcgctgccagatg

SEQ ID NO: 222211 - DNA, 30 bp, Artificial Sequence
  Synthetic oligonucleotide
ccgccatatcggtttctcaagccgcagatg

SEQ ID NO: 222212 - DNA, 30 bp, Artificial Sequence
  Synthetic oligonucleotide
tacttactgcgctctgatggcgtgcagatg

SEQ ID NO: 222213 - DNA, 30 bp, Artificial Sequence
  Synthetic oligonucleotide
gtatgtgtgcttagctcctacttgcagatg

SEQ ID NO: 222214 - DNA, 30 bp, Artificial Sequence
  Synthetic oligonucleotide
agaaactcacggctgttttataatcagatg

SEQ ID NO: 222215 - DNA, 30 bp, Artificial Sequence
  Synthetic oligonucleotide
tcttcactcacgttcaattggacagagatg

SEQ ID NO: 222216 - DNA, 30 bp, Artificial Sequence
  Synthetic oligonucleotide
aaagtctccagaatcaaaaaaggagagatg

SEQ ID NO: 222217 - DNA, 30 bp, Artificial Sequence
  Synthetic oligonucleotide
atacgtcttcccccaaaactataatagatg

SEQ ID NO: 222218 - DNA, 31 bp, Artificial Sequence
  Synthetic oligonucleotide
agatgtgcttgaacatgtattttgatagatg

SEQ ID NO: 222219 - DNA, 30 bp, Artificial Sequence
  Synthetic oligonucleotide
ttggtatttgtcagcgtgtatatatagatg

SEQ ID NO: 222220 - DNA, 30 bp, Artificial Sequence
  Synthetic oligonucleotide
agccgatagggcccctttttagcctagatg

SEQ ID NO: 222221 - DNA, 30 bp, Artificial Sequence
  Synthetic oligonucleotide
aggcatcagttcgcgtccgtgtagtagatg

SEQ ID NO: 222222 - DNA, 30 bp, Artificial Sequence
  Synthetic oligonucleotide
gctctgtacggcaccgctaagctaacgatg

SEQ ID NO: 222223 - DNA, 30 bp, Artificial Sequence
  Synthetic oligonucleotide
atgtccggcacgtggtgtatgctaacgatg

SEQ ID NO: 222224 - DNA, 30 bp, Artificial Sequence
  Synthetic oligonucleotide
ttgaatgctatttagtttgaagttacgatg

SEQ ID NO: 222225 - DNA, 30 bp, Artificial Sequence
  Synthetic oligonucleotide
gggttaaacgtataaatcattagaccgatg

SEQ ID NO: 222226 - DNA, 30 bp, Artificial Sequence
  Synthetic oligonucleotide
ttaagggattgtaggacctgtggcccgatg

SEQ ID NO: 222227 - DNA, 30 bp, Artificial Sequence
  Synthetic oligonucleotide
tgctaaatctatcgggcccatatcccgatg

SEQ ID NO: 222228 - DNA, 30 bp, Artificial Sequence
  Synthetic oligonucleotide
gttcaactaaactagcccagtgagccgatg

SEQ ID NO: 222229 - DNA, 30 bp, Artificial Sequence
  Synthetic oligonucleotide
acatatagcccggacctaaccgcagcgatg

SEQ ID NO: 222230 - DNA, 30 bp, Artificial Sequence
  Synthetic oligonucleotide
tcagagtacaacgcacttcgaaccgcgatg

SEQ ID NO: 222231 - DNA, 30 bp, Artificial Sequence
  Synthetic oligonucleotide
agtcgcagggccgaaactctacaggcgatg

SEQ ID NO: 222232 - DNA, 30 bp, Artificial Sequence
  Synthetic oligonucleotide
cacgtctaggtgctcggtaacggggcgatg

SEQ ID NO: 222233 - DNA, 30 bp, Artificial Sequence
  Synthetic oligonucleotide
gtcgtcaggtcgatcagcatgtgggcgatg

SEQ ID NO: 222234 - DNA, 30 bp, Artificial Sequence
  Synthetic oligonucleotide
gaggtgcctttcgtgacttaaaatgcgatg

SEQ ID NO: 222235 - DNA, 30 bp, Artificial Sequence
  Synthetic oligonucleotide
ctcggggtgtagttcccttcaacatcgatg

SEQ ID NO: 222236 - DNA, 30 bp, Artificial Sequence
  Synthetic oligonucleotide
cgaacaacggggccaagcaggccatcgatg

SEQ ID NO: 222237 - DNA, 30 bp, Artificial Sequence
  Synthetic oligonucleotide
ttccacgatcttgggaaatgctcatcgatg

SEQ ID NO: 222238 - DNA, 30 bp, Artificial Sequence
  Synthetic oligonucleotide
atcatcggtttactgacacatatatcgatg

SEQ ID NO: 222239 - DNA, 30 bp, Artificial Sequence
  Synthetic oligonucleotide
ggcaagtgggcccgtcatctcgtatcgatg

SEQ ID NO: 222240 - DNA, 30 bp, Artificial Sequence
  Synthetic oligonucleotide
actgattatagtgggtataccgactcgatg

SEQ ID NO: 222241 - DNA, 30 bp, Artificial Sequence
  Synthetic oligonucleotide
caccttcttcagagaataaatacgtcgatg

SEQ ID NO: 222242 - DNA, 30 bp, Artificial Sequence
  Synthetic oligonucleotide
gcaagaggacccctccaaagacggtcgatg

SEQ ID NO: 222243 - DNA, 30 bp, Artificial Sequence
  Synthetic oligonucleotide
tctcttgtttcctgttggacaacttcgatg

SEQ ID NO: 222244 - DNA, 30 bp, Artificial Sequence
  Synthetic oligonucleotide
actttctgtagaaatgccccaccttcgatg

SEQ ID NO: 222245 - DNA, 30 bp, Artificial Sequence
  Synthetic oligonucleotide
aggctgttaatatgatccgccagttcgatg

SEQ ID NO: 222246 - DNA, 30 bp, Artificial Sequence
  Synthetic oligonucleotide
actatgcatggtgctaaacaaataaggatg

SEQ ID NO: 222247 - DNA, 30 bp, Artificial Sequence
  Synthetic oligonucleotide
atgccattatatgaaggtaagttaaggatg

SEQ ID NO: 222248 - DNA, 30 bp, Artificial Sequence
  Synthetic oligonucleotide
ctgagagtctcttgtcgtgctttaaggatg

SEQ ID NO: 222249 - DNA, 30 bp, Artificial Sequence
  Synthetic oligonucleotide
tacccatcaggatctagcagcagacggatg

SEQ ID NO: 222250 - DNA, 30 bp, Artificial Sequence
  Synthetic oligonucleotide
gcggccggaagagatcatccccgccggatg

SEQ ID NO: 222251 - DNA, 30 bp, Artificial Sequence
  Synthetic oligonucleotide
tgctcaggtcagggtcatccatgtcggatg

SEQ ID NO: 222252 - DNA, 30 bp, Artificial Sequence
  Synthetic oligonucleotide
ttaggggtaacctaatatggataagggatg

SEQ ID NO: 222253 - DNA, 30 bp, Artificial Sequence
  Synthetic oligonucleotide
atcccgatcacaacggctgatccagggatg

SEQ ID NO: 222254 - DNA, 30 bp, Artificial Sequence
  Synthetic oligonucleotide
tgtattagactgggtcagggagccgggatg

SEQ ID NO: 222255 - DNA, 30 bp, Artificial Sequence
  Synthetic oligonucleotide
cgagcagttacattcgatccaacggggatg

SEQ ID NO: 222256 - DNA, 30 bp, Artificial Sequence
  Synthetic oligonucleotide
cgagggtaccttgggggcctcaatgggatg

SEQ ID NO: 222257 - DNA, 30 bp, Artificial Sequence
  Synthetic oligonucleotide
atggcacatttatgaaacatggatgggatg

SEQ ID NO: 222258 - DNA, 30 bp, Artificial Sequence
  Synthetic oligonucleotide
aatgatgatagtgaaatatggaactggatg

SEQ ID NO: 222259 - DNA, 30 bp, Artificial Sequence
  Synthetic oligonucleotide
tgtggtcccatgccagagacggcgtggatg

SEQ ID NO: 222260 - DNA, 30 bp, Artificial Sequence
  Synthetic oligonucleotide
acactttttcatacatgcagaagaatgatg

SEQ ID NO: 222261 - DNA, 30 bp, Artificial Sequence
  Synthetic oligonucleotide
ggtggagtatgcaaaggttttctaatgatg

SEQ ID NO: 222262 - DNA, 30 bp, Artificial Sequence
  Synthetic oligonucleotide
tgggacggtgaacgggattatcccatgatg

SEQ ID NO: 222263 - DNA, 30 bp, Artificial Sequence
  Synthetic oligonucleotide
ttgcttagagggcctctttccgcgatgatg

SEQ ID NO: 222264 - DNA, 30 bp, Artificial Sequence
  Synthetic oligonucleotide
ccatatcgaccgttattgccagttatgatg

SEQ ID NO: 222265 - DNA, 30 bp, Artificial Sequence
  Synthetic oligonucleotide
tgtttatcgtcgtccacgagctgactgatg

SEQ ID NO: 222266 - DNA, 30 bp, Artificial Sequence
  Synthetic oligonucleotide
caagtgtgactcgcctccagggtactgatg

SEQ ID NO: 222267 - DNA, 30 bp, Artificial Sequence
  Synthetic oligonucleotide
ccatcatccgacaacgatgtcgggctgatg

SEQ ID NO: 222268 - DNA, 30 bp, Artificial Sequence
  Synthetic oligonucleotide
atgaatgagagtgttcataaggagttgatg

SEQ ID NO: 222269 - DNA, 30 bp, Artificial Sequence
  Synthetic oligonucleotide
ccatagagacaaagatttgtctggttgatg

SEQ ID NO: 222270 - DNA, 30 bp, Artificial Sequence
  Synthetic oligonucleotide
tcggacactggaggcctgattaatttgatg

SEQ ID NO: 222271 - DNA, 30 bp, Artificial Sequence
  Synthetic oligonucleotide
gtgagcgtgggtagtttatttaaaaatatg

SEQ ID NO: 222272 - DNA, 30 bp, Artificial Sequence
  Synthetic oligonucleotide
gctgtactgaagagatccggtgacaatatg

SEQ ID NO: 222273 - DNA, 30 bp, Artificial Sequence
  Synthetic oligonucleotide
tagaataatcctgggagggcccccaatatg

SEQ ID NO: 222274 - DNA, 30 bp, Artificial Sequence
  Synthetic oligonucleotide
ttccgagcgcagggccgagatgcgaatatg

SEQ ID NO: 222275 - DNA, 30 bp, Artificial Sequence
  Synthetic oligonucleotide
aaaccaatggttatagagtgacataatatg

SEQ ID NO: 222276 - DNA, 30 bp, Artificial Sequence
  Synthetic oligonucleotide
aaggtgaatgggataatactttataatatg

SEQ ID NO: 222277 - DNA, 30 bp, Artificial Sequence
  Synthetic oligonucleotide
attttgcaaacagctaggtgtcgtaatatg

SEQ ID NO: 222278 - DNA, 30 bp, Artificial Sequence
  Synthetic oligonucleotide
ggtaggggagttgacataatagttaatatg

SEQ ID NO: 222279 - DNA, 30 bp, Artificial Sequence
  Synthetic oligonucleotide
ccggaggtgctgcggtgcgataaacatatg

SEQ ID NO: 222280 - DNA, 30 bp, Artificial Sequence
  Synthetic oligonucleotide
caggtgtcagatatgaagtcagcacatatg

SEQ ID NO: 222281 - DNA, 30 bp, Artificial Sequence
  Synthetic oligonucleotide
aagtatgtcacgtcaaaccatttacatatg

SEQ ID NO: 222282 - DNA, 30 bp, Artificial Sequence
  Synthetic oligonucleotide
tcgtagtggtgtgaacgctcgacccatatg

SEQ ID NO: 222283 - DNA, 30 bp, Artificial Sequence
  Synthetic oligonucleotide
acgttgatggaactgaagtcactgcatatg

SEQ ID NO: 222284 - DNA, 30 bp, Artificial Sequence
  Synthetic oligonucleotide
tatggacttgtgaagtctgatctgcatatg

SEQ ID NO: 222285 - DNA, 30 bp, Artificial Sequence
  Synthetic oligonucleotide
cagacagatattgtacttcgttaagatatg

SEQ ID NO: 222286 - DNA, 30 bp, Artificial Sequence
  Synthetic oligonucleotide
cggctcgcgcggggtgctgatgacgatatg

SEQ ID NO: 222287 - DNA, 30 bp, Artificial Sequence
  Synthetic oligonucleotide
gatccgtaacccaagcattttaaggatatg

SEQ ID NO: 222288 - DNA, 30 bp, Artificial Sequence
  Synthetic oligonucleotide
tcccgtcgctattctgttgcgtaggatatg

SEQ ID NO: 222289 - DNA, 30 bp, Artificial Sequence
  Synthetic oligonucleotide
cctgcacgtatcataagaacgaatgatatg

SEQ ID NO: 222290 - DNA, 30 bp, Artificial Sequence
  Synthetic oligonucleotide
attgtagtcattgatccctcacatgatatg

SEQ ID NO: 222291 - DNA, 30 bp, Artificial Sequence
  Synthetic oligonucleotide
caaagatccgtgagatgtcgtataactatg

SEQ ID NO: 222292 - DNA, 30 bp, Artificial Sequence
  Synthetic oligonucleotide
cggtgccaatatagaacggttcagactatg

SEQ ID NO: 222293 - DNA, 30 bp, Artificial Sequence
  Synthetic oligonucleotide
gtacgtttgggttacaccgcctagactatg

SEQ ID NO: 222294 - DNA, 30 bp, Artificial Sequence
  Synthetic oligonucleotide
cgaaagtcctttttcgctattccgactatg

SEQ ID NO: 222295 - DNA, 30 bp, Artificial Sequence
  Synthetic oligonucleotide
gacacatacgccgaatggactcaacctatg

SEQ ID NO: 222296 - DNA, 30 bp, Artificial Sequence
  Synthetic oligonucleotide
tccgagccttagttctagcgtctacctatg

SEQ ID NO: 222297 - DNA, 30 bp, Artificial Sequence
  Synthetic oligonucleotide
agaaaatcttcacaggggaatccccctatg

SEQ ID NO: 222298 - DNA, 30 bp, Artificial Sequence
  Synthetic oligonucleotide
ccaatcaagtatacgattgccatgcctatg

SEQ ID NO: 222299 - DNA, 30 bp, Artificial Sequence
  Synthetic oligonucleotide
actcggggaattgggcctatgcacgctatg

SEQ ID NO: 222300 - DNA, 30 bp, Artificial Sequence
  Synthetic oligonucleotide
ctggcatgcatacagaacggtgccgctatg

SEQ ID NO: 222301 - DNA, 30 bp, Artificial Sequence
  Synthetic oligonucleotide
agagaaaattactgtatagcttcatctatg

SEQ ID NO: 222302 - DNA, 30 bp, Artificial Sequence
  Synthetic oligonucleotide
tggttcctctatggcttgggaaggtctatg

SEQ ID NO: 222303 - DNA, 30 bp, Artificial Sequence
  Synthetic oligonucleotide
ccattcgcttaagtacttgagcgttctatg

SEQ ID NO: 222304 - DNA, 30 bp, Artificial Sequence
  Synthetic oligonucleotide
atgtaagttgcggtatgctaccgaagtatg

SEQ ID NO: 222305 - DNA, 30 bp, Artificial Sequence
  Synthetic oligonucleotide
cgcgtcaactccgctcgagctaggagtatg

SEQ ID NO: 222306 - DNA, 30 bp, Artificial Sequence
  Synthetic oligonucleotide
aagggtcagccttgcgtcggacggagtatg

SEQ ID NO: 222307 - DNA, 30 bp, Artificial Sequence
  Synthetic oligonucleotide
aagacatcgtccccaaaccgtctgagtatg

SEQ ID NO: 222308 - DNA, 30 bp, Artificial Sequence
  Synthetic oligonucleotide
cacaggaagtacttttgatccccacgtatg

SEQ ID NO: 222309 - DNA, 30 bp, Artificial Sequence
  Synthetic oligonucleotide
tatgccaagaaatggcggcgtggacgtatg

SEQ ID NO: 222310 - DNA, 30 bp, Artificial Sequence
  Synthetic oligonucleotide
cgaggtgacgacgcctgtcttctacgtatg

SEQ ID NO: 222311 - DNA, 30 bp, Artificial Sequence
  Synthetic oligonucleotide
tacgcccatcgcagtacgtcgagccgtatg

SEQ ID NO: 222312 - DNA, 30 bp, Artificial Sequence
  Synthetic oligonucleotide
catgtacaaaccgatacttcgtatcgtatg

SEQ ID NO: 222313 - DNA, 30 bp, Artificial Sequence
  Synthetic oligonucleotide
tatgaaaactgagtcgtataccgtcgtatg

SEQ ID NO: 222314 - DNA, 31 bp, Artificial Sequence
  Synthetic oligonucleotide
gaggagtcatctgcattagccatttcgtatg

SEQ ID NO: 222315 - DNA, 30 bp, Artificial Sequence
  Synthetic oligonucleotide
aaagtggggctatcaaatctgtgaggtatg

SEQ ID NO: 222316 - DNA, 30 bp, Artificial Sequence
  Synthetic oligonucleotide
gtagtgctggggcggtccgaattaggtatg

SEQ ID NO: 222317 - DNA, 30 bp, Artificial Sequence
  Synthetic oligonucleotide
ttttgggaaagcgaacatggctgcggtatg

SEQ ID NO: 222318 - DNA, 30 bp, Artificial Sequence
  Synthetic oligonucleotide
atcgcgaggggttaatcgatgagtggtatg

SEQ ID NO: 222319 - DNA, 30 bp, Artificial Sequence
  Synthetic oligonucleotide
atagggggtcgggcgctctgtgttggtatg

SEQ ID NO: 222320 - DNA, 30 bp, Artificial Sequence
  Synthetic oligonucleotide
caatggtaataacaggaattcgtatgtatg

SEQ ID NO: 222321 - DNA, 30 bp, Artificial Sequence
  Synthetic oligonucleotide
cgtcagaggtactaaaatcgactgtgtatg

SEQ ID NO: 222322 - DNA, 30 bp, Artificial Sequence
  Synthetic oligonucleotide
cacccctctacgagggttacggattgtatg

SEQ ID NO: 222323 - DNA, 30 bp, Artificial Sequence
  Synthetic oligonucleotide
agaggtatggcttcgcttgcgtattgtatg

SEQ ID NO: 222324 - DNA, 30 bp, Artificial Sequence
  Synthetic oligonucleotide
cgccgagttgttttgatccgagccattatg

SEQ ID NO: 222325 - DNA, 30 bp, Artificial Sequence
  Synthetic oligonucleotide
tcttgtttcacggtagaataagctattatg

SEQ ID NO: 222326 - DNA, 30 bp, Artificial Sequence
  Synthetic oligonucleotide
acaaacaacccgattccaatcgctattatg

SEQ ID NO: 222327 - DNA, 30 bp, Artificial Sequence
  Synthetic oligonucleotide
ggaccaggtttattggcagctcttattatg

SEQ ID NO: 222328 - DNA, 30 bp, Artificial Sequence
  Synthetic oligonucleotide
ggacgctagtcaacatgattagcacttatg

SEQ ID NO: 222329 - DNA, 30 bp, Artificial Sequence
  Synthetic oligonucleotide
aagattacagagcatccggcacgacttatg

SEQ ID NO: 222330 - DNA, 30 bp, Artificial Sequence
  Synthetic oligonucleotide
ggcccactcgtgcgagattagcatcttatg

SEQ ID NO: 222331 - DNA, 30 bp, Artificial Sequence
  Synthetic oligonucleotide
gattagtgtctgagatgttattaagttatg

SEQ ID NO: 222332 - DNA, 30 bp, Artificial Sequence
  Synthetic oligonucleotide
gattatactaactctcgataacgagttatg

SEQ ID NO: 222333 - DNA, 30 bp, Artificial Sequence
  Synthetic oligonucleotide
ggattcctgatcagacacggtccggttatg

SEQ ID NO: 222334 - DNA, 30 bp, Artificial Sequence
  Synthetic oligonucleotide
gcacaccaagatgttgtgtcaggggttatg

SEQ ID NO: 222335 - DNA, 30 bp, Artificial Sequence
  Synthetic oligonucleotide
gctagaattcaagatttataatttgttatg

SEQ ID NO: 222336 - DNA, 30 bp, Artificial Sequence
  Synthetic oligonucleotide
atggcaggatacctataatcagtatttatg

SEQ ID NO: 222337 - DNA, 30 bp, Artificial Sequence
  Synthetic oligonucleotide
aaaacaatagtacaagaatataggtttatg

SEQ ID NO: 222338 - DNA, 30 bp, Artificial Sequence
  Synthetic oligonucleotide
ggttccatccatgaattttatgggtttatg

SEQ ID NO: 222339 - DNA, 30 bp, Artificial Sequence
  Synthetic oligonucleotide
agcttagtcaactatacatagatttttatg

SEQ ID NO: 222340 - DNA, 30 bp, Artificial Sequence
  Synthetic oligonucleotide
tttatccaatgcaggctatccgtaaaactg

SEQ ID NO: 222341 - DNA, 30 bp, Artificial Sequence
  Synthetic oligonucleotide
aggttggaccgcttaagatagggcaaactg

SEQ ID NO: 222342 - DNA, 30 bp, Artificial Sequence
  Synthetic oligonucleotide
taggttagcgacgtcattcacaggaaactg

SEQ ID NO: 222343 - DNA, 30 bp, Artificial Sequence
  Synthetic oligonucleotide
gtcgctacgtccgcttaaaccgggaaactg

SEQ ID NO: 222344 - DNA, 26 bp, Artificial Sequence
  Synthetic oligonucleotide
gcggcggataacgaagcgtgaaactg

SEQ ID NO: 222345 - DNA, 30 bp, Artificial Sequence
  Synthetic oligonucleotide
taggtagagacgaattttagggctcaactg

SEQ ID NO: 222346 - DNA, 30 bp, Artificial Sequence
  Synthetic oligonucleotide
catgggcgctctgggtaagctcgtcaactg

SEQ ID NO: 222347 - DNA, 30 bp, Artificial Sequence
  Synthetic oligonucleotide
tatcaattctgtgtgtataattacgaactg

SEQ ID NO: 222348 - DNA, 30 bp, Artificial Sequence
  Synthetic oligonucleotide
tgaaggagtatgcacgttatgtccgaactg

SEQ ID NO: 222349 - DNA, 30 bp, Artificial Sequence
  Synthetic oligonucleotide
gccccaggagcatgtgatttgtgcgaactg

SEQ ID NO: 222350 - DNA, 30 bp, Artificial Sequence
  Synthetic oligonucleotide
tcacgactctttctgatttgtgtcgaactg

SEQ ID NO: 222351 - DNA, 30 bp, Artificial Sequence
  Synthetic oligonucleotide
ctgttattaacaacaaatactatggaactg

SEQ ID NO: 222352 - DNA, 30 bp, Artificial Sequence
  Synthetic oligonucleotide
agaggagataggtcgttctcctttgaactg

SEQ ID NO: 222353 - DNA, 30 bp, Artificial Sequence
  Synthetic oligonucleotide
ctaggattgtactatgccccgaattaactg

SEQ ID NO: 222354 - DNA, 30 bp, Artificial Sequence
  Synthetic oligonucleotide
taccttctacgtgtgggctgaataacactg

SEQ ID NO: 222355 - DNA, 30 bp, Artificial Sequence
  Synthetic oligonucleotide
ctcggatgagcagcagggccattaacactg

SEQ ID NO: 222356 - DNA, 30 bp, Artificial Sequence
  Synthetic oligonucleotide
ctcacagcgccgcggggggtaggcacactg

SEQ ID NO: 222357 - DNA, 30 bp, Artificial Sequence
  Synthetic oligonucleotide
agaaacactcagccttacaataggacactg

SEQ ID NO: 222358 - DNA, 30 bp, Artificial Sequence
  Synthetic oligonucleotide
ccatgttgctatcgtcggagttttacactg

SEQ ID NO: 222359 - DNA, 30 bp, Artificial Sequence
  Synthetic oligonucleotide
atcgctaagcgagtagaattcaacccactg

SEQ ID NO: 222360 - DNA, 30 bp, Artificial Sequence
  Synthetic oligonucleotide
atgggtgttggttctccgagtaggccactg

SEQ ID NO: 222361 - DNA, 30 bp, Artificial Sequence
  Synthetic oligonucleotide
ctttaacacatccctagttcacgtccactg

SEQ ID NO: 222362 - DNA, 30 bp, Artificial Sequence
  Synthetic oligonucleotide
gacagccttggaacgagagccacagcactg

SEQ ID NO: 222363 - DNA, 30 bp, Artificial Sequence
  Synthetic oligonucleotide
gctggcaggaaatgtagtgctggagcactg

SEQ ID NO: 222364 - DNA, 30 bp, Artificial Sequence
  Synthetic oligonucleotide
atgccatgtggcagacctcattgagcactg

SEQ ID NO: 222365 - DNA, 30 bp, Artificial Sequence
  Synthetic oligonucleotide
gtctgggtgttgtccaaaaatcatgcactg

SEQ ID NO: 222366 - DNA, 30 bp, Artificial Sequence
  Synthetic oligonucleotide
tgttgataagtacaacggacgggtgcactg

SEQ ID NO: 222367 - DNA, 30 bp, Artificial Sequence
  Synthetic oligonucleotide
catagaagcgagcttggtaatacaagactg

SEQ ID NO: 222368 - DNA, 30 bp, Artificial Sequence
  Synthetic oligonucleotide
tgagcgccgcctccgcgatctcacagactg

SEQ ID NO: 222369 - DNA, 30 bp, Artificial Sequence
  Synthetic oligonucleotide
ggatggggaggtgagctccgccccagactg

SEQ ID NO: 222370 - DNA, 30 bp, Artificial Sequence
  Synthetic oligonucleotide
gcacagttgagtaagctcatccccagactg

SEQ ID NO: 222371 - DNA, 30 bp, Artificial Sequence
  Synthetic oligonucleotide
acttgccaacgcggtagcggcatacgactg

SEQ ID NO: 222372 - DNA, 30 bp, Artificial Sequence
  Synthetic oligonucleotide
tggactcggttatctctcacgggccgactg

SEQ ID NO: 222373 - DNA, 30 bp, Artificial Sequence
  Synthetic oligonucleotide
tcattttcagacgaccccaattcgcgactg

SEQ ID NO: 222374 - DNA, 30 bp, Artificial Sequence
  Synthetic oligonucleotide
aaaataagaatatatctttaagtgcgactg

SEQ ID NO: 222375 - DNA, 30 bp, Artificial Sequence
  Synthetic oligonucleotide
ctggtactcatcctatgggcttggggactg

SEQ ID NO: 222376 - DNA, 30 bp, Artificial Sequence
  Synthetic oligonucleotide
gtagacagacttttggcaaatagatgactg

SEQ ID NO: 222377 - DNA, 30 bp, Artificial Sequence
  Synthetic oligonucleotide
cctcaacacatcatagcaatcggaatactg

SEQ ID NO: 222378 - DNA, 30 bp, Artificial Sequence
  Synthetic oligonucleotide
accggatcttacataggagcctgaatactg

SEQ ID NO: 222379 - DNA, 30 bp, Artificial Sequence
  Synthetic oligonucleotide
tctgtgcgcctaggagggagtcacatactg

SEQ ID NO: 222380 - DNA, 30 bp, Artificial Sequence
  Synthetic oligonucleotide
cgtaggtctgggccacggcaacgcatactg

SEQ ID NO: 222381 - DNA, 30 bp, Artificial Sequence
  Synthetic oligonucleotide
cgtcggtgggctctgaatcgtttcatactg

SEQ ID NO: 222382 - DNA, 30 bp, Artificial Sequence
  Synthetic oligonucleotide
gtcggggtagagagaatgcaggacctactg

SEQ ID NO: 222383 - DNA, 30 bp, Artificial Sequence
  Synthetic oligonucleotide
actatagtcctttgaccatgatgcctactg

SEQ ID NO: 222384 - DNA, 30 bp, Artificial Sequence
  Synthetic oligonucleotide
aagtcgaggtgataaggccgtccgctactg

SEQ ID NO: 222385 - DNA, 30 bp, Artificial Sequence
  Synthetic oligonucleotide
tgactgcgggctgcctcgagtctgctactg

SEQ ID NO: 222386 - DNA, 30 bp, Artificial Sequence
  Synthetic oligonucleotide
tccagccctattttccaggtgaccgtactg

SEQ ID NO: 222387 - DNA, 30 bp, Artificial Sequence
  Synthetic oligonucleotide
agagagttaggtaatgacagaggtgtactg

SEQ ID NO: 222388 - DNA, 30 bp, Artificial Sequence
  Synthetic oligonucleotide
ggggacaattattggcacaaatttgtactg

SEQ ID NO: 222389 - DNA, 30 bp, Artificial Sequence
  Synthetic oligonucleotide
cgagagatggtgggtagttctgcattactg

SEQ ID NO: 222390 - DNA, 31 bp, Artificial Sequence
  Synthetic oligonucleotide
tgggctcaggtatatcttctactcattactg

SEQ ID NO: 222391 - DNA, 30 bp, Artificial Sequence
  Synthetic oligonucleotide
ttgcgcgttaaaggaatgactggattactg

SEQ ID NO: 222392 - DNA, 30 bp, Artificial Sequence
  Synthetic oligonucleotide
tgttcgcctcataagtgcgctcgcttactg

SEQ ID NO: 222393 - DNA, 30 bp, Artificial Sequence
  Synthetic oligonucleotide
ggggtgggccaacgccatatgcagttactg

SEQ ID NO: 222394 - DNA, 30 bp, Artificial Sequence
  Synthetic oligonucleotide
ttaaaccatctgtgcgttgaggggttactg

SEQ ID NO: 222395 - DNA, 30 bp, Artificial Sequence
  Synthetic oligonucleotide
acgatatacaaatgcaacttacgtttactg

SEQ ID NO: 222396 - DNA, 30 bp, Artificial Sequence
  Synthetic oligonucleotide
gggatagccaaagttcgttcgattttactg

SEQ ID NO: 222397 - DNA, 30 bp, Artificial Sequence
  Synthetic oligonucleotide
tgatcgaacgccaagactaatgataacctg

SEQ ID NO: 222398 - DNA, 30 bp, Artificial Sequence
  Synthetic oligonucleotide
tctccgggaacatatttggaacttaacctg

SEQ ID NO: 222399 - DNA, 30 bp, Artificial Sequence
  Synthetic oligonucleotide
gatattccacgagattggcgtacacacctg

SEQ ID NO: 222400 - DNA, 30 bp, Artificial Sequence
  Synthetic oligonucleotide
gtatagctgttgggattaggaaaccacctg

SEQ ID NO: 222401 - DNA, 30 bp, Artificial Sequence
  Synthetic oligonucleotide
aagacgctagttcaagaagggaaccacctg

SEQ ID NO: 222402 - DNA, 30 bp, Artificial Sequence
  Synthetic oligonucleotide
tggtttcatctggtgcaccccaagcacctg

SEQ ID NO: 222403 - DNA, 30 bp, Artificial Sequence
  Synthetic oligonucleotide
cattgtccgggacgtactccgaagcacctg

SEQ ID NO: 222404 - DNA, 30 bp, Artificial Sequence
  Synthetic oligonucleotide
aagcctgttgcaacatatacatccgacctg

SEQ ID NO: 222405 - DNA, 30 bp, Artificial Sequence
  Synthetic oligonucleotide
caaattgaatatttggctgggaaatacctg

SEQ ID NO: 222406 - DNA, 30 bp, Artificial Sequence
  Synthetic oligonucleotide
gagcacgtgccggtcccggcaagatacctg

SEQ ID NO: 222407 - DNA, 30 bp, Artificial Sequence
  Synthetic oligonucleotide
gatcccctgtaaggtacgtccatatacctg

SEQ ID NO: 222408 - DNA, 30 bp, Artificial Sequence
  Synthetic oligonucleotide
caacggatgatgtctggggatttatacctg

SEQ ID NO: 222409 - DNA, 30 bp, Artificial Sequence
  Synthetic oligonucleotide
tgagggaggtcactgtagcacagctacctg

SEQ ID NO: 222410 - DNA, 30 bp, Artificial Sequence
  Synthetic oligonucleotide
gctcttcgaatgggatgttacggttacctg

SEQ ID NO: 222411 - DNA, 30 bp, Artificial Sequence
  Synthetic oligonucleotide
agttgcccggaagacatggacccaaccctg

SEQ ID NO: 222412 - DNA, 30 bp, Artificial Sequence
  Synthetic oligonucleotide
ccaggactatggtgcccatatttgaccctg

SEQ ID NO: 222413 - DNA, 30 bp, Artificial Sequence
  Synthetic oligonucleotide
agcatgtgtcttgatctttagcttaccctg

SEQ ID NO: 222414 - DNA, 30 bp, Artificial Sequence
  Synthetic oligonucleotide
tctgcaaaatgacggtgtgactggcccctg

SEQ ID NO: 222415 - DNA, 30 bp, Artificial Sequence
  Synthetic oligonucleotide
cgccgaatcgggacacagtctaatcccctg

SEQ ID NO: 222416 - DNA, 30 bp, Artificial Sequence
  Synthetic oligonucleotide
acttgcggacgcaatgtgatacgtcccctg

SEQ ID NO: 222417 - DNA, 30 bp, Artificial Sequence
  Synthetic oligonucleotide
tgccagtcattgaggttatgataagccctg

SEQ ID NO: 222418 - DNA, 30 bp, Artificial Sequence
  Synthetic oligonucleotide
aggactaggacctttttatcgcctgccctg

SEQ ID NO: 222419 - DNA, 30 bp, Artificial Sequence
  Synthetic oligonucleotide
agtgctatgagtttagacttttcatccctg

SEQ ID NO: 222420 - DNA, 30 bp, Artificial Sequence
  Synthetic oligonucleotide
cgttgcccagtgttgacgttgacctccctg

SEQ ID NO: 222421 - DNA, 30 bp, Artificial Sequence
  Synthetic oligonucleotide
ttagcctcggcggcgattcataccagcctg

SEQ ID NO: 222422 - DNA, 30 bp, Artificial Sequence
  Synthetic oligonucleotide
gtgacattaagttaggcgtttacgagcctg

SEQ ID NO: 222423 - DNA, 30 bp, Artificial Sequence
  Synthetic oligonucleotide
ggaccccgcttatttaccctgccgagcctg

SEQ ID NO: 222424 - DNA, 30 bp, Artificial Sequence
  Synthetic oligonucleotide
aactggactgggtaacgtcgccgtagcctg

SEQ ID NO: 222425 - DNA, 30 bp, Artificial Sequence
  Synthetic oligonucleotide
gggctcaatggaaattgtatgggtagcctg

SEQ ID NO: 222426 - DNA, 30 bp, Artificial Sequence
  Synthetic oligonucleotide
aatcatttaacaacattgtacattagcctg

SEQ ID NO: 222427 - DNA, 30 bp, Artificial Sequence
  Synthetic oligonucleotide
aacgcgcattgaattactaagtgccgcctg

SEQ ID NO: 222428 - DNA, 30 bp, Artificial Sequence
  Synthetic oligonucleotide
cttggtgattcgaggaacggggctggcctg

SEQ ID NO: 222429 - DNA, 30 bp, Artificial Sequence
  Synthetic oligonucleotide
gcagtcactgcgacggttattttctgcctg

SEQ ID NO: 222430 - DNA, 30 bp, Artificial Sequence
  Synthetic oligonucleotide
tcgtatagttcaataagggcacggtgcctg

SEQ ID NO: 222431 - DNA, 30 bp, Artificial Sequence
  Synthetic oligonucleotide
acatgtctccgaaatatgccagaaatcctg

SEQ ID NO: 222432 - DNA, 30 bp, Artificial Sequence
  Synthetic oligonucleotide
tagtgtggatcaaggctcgaaggaatcctg

SEQ ID NO: 222433 - DNA, 30 bp, Artificial Sequence
  Synthetic oligonucleotide
tgatgacaaatgttctatagaaacatcctg

SEQ ID NO: 222434 - DNA, 30 bp, Artificial Sequence
  Synthetic oligonucleotide
acccaccgcttacaagtaactatcatcctg

SEQ ID NO: 222435 - DNA, 30 bp, Artificial Sequence
  Synthetic oligonucleotide
gtagagttagattgagttaaatatatcctg

SEQ ID NO: 222436 - DNA, 30 bp, Artificial Sequence
  Synthetic oligonucleotide
gaagacttcaagacctcttccgctatcctg

SEQ ID NO: 222437 - DNA, 30 bp, Artificial Sequence
  Synthetic oligonucleotide
acgcattcgagagttcacccaattatcctg

SEQ ID NO: 222438 - DNA, 30 bp, Artificial Sequence
  Synthetic oligonucleotide
gtcacagagggtgtggcctcagaagtcctg

SEQ ID NO: 222439 - DNA, 30 bp, Artificial Sequence
  Synthetic oligonucleotide
tattcggtcgcggggtaacacctagtcctg

SEQ ID NO: 222440 - DNA, 30 bp, Artificial Sequence
  Synthetic oligonucleotide
ccggccacgattacagactcgtgggtcctg

SEQ ID NO: 222441 - DNA, 30 bp, Artificial Sequence
  Synthetic oligonucleotide
gatacagttggacaatgtggtaaattcctg

SEQ ID NO: 222442 - DNA, 30 bp, Artificial Sequence
  Synthetic oligonucleotide
aatcgagtgacgaagaggagcgagttcctg

SEQ ID NO: 222443 - DNA, 30 bp, Artificial Sequence
  Synthetic oligonucleotide
gacttgcgcaagtcttgaggaactttcctg

SEQ ID NO: 222444 - DNA, 30 bp, Artificial Sequence
  Synthetic oligonucleotide
tgtggaatcggttactggtaaggtttcctg

SEQ ID NO: 222445 - DNA, 30 bp, Artificial Sequence
  Synthetic oligonucleotide
gttagtcactgcatgttaactgcaaagctg

SEQ ID NO: 222446 - DNA, 30 bp, Artificial Sequence
  Synthetic oligonucleotide
tattctcaacggcagtgtacaataaagctg

SEQ ID NO: 222447 - DNA, 30 bp, Artificial Sequence
  Synthetic oligonucleotide
agcatagtaaaaaattaaattcggaagctg

SEQ ID NO: 222448 - DNA, 30 bp, Artificial Sequence
  Synthetic oligonucleotide
acctcaaagggcggctcaatataacagctg

SEQ ID NO: 222449 - DNA, 30 bp, Artificial Sequence
  Synthetic oligonucleotide
tcaacatatccgttttcaggttcacagctg

SEQ ID NO: 222450 - DNA, 30 bp, Artificial Sequence
  Synthetic oligonucleotide
agcgctgccaagatcgcgctaccccagctg

SEQ ID NO: 222451 - DNA, 30 bp, Artificial Sequence
  Synthetic oligonucleotide
taccgtttaacgtcgttaccactccagctg

SEQ ID NO: 222452 - DNA, 30 bp, Artificial Sequence
  Synthetic oligonucleotide
ttttggatctatcgttaacataatcagctg

SEQ ID NO: 222453 - DNA, 30 bp, Artificial Sequence
  Synthetic oligonucleotide
aaagaataagaatctactccttctcagctg

SEQ ID NO: 222454 - DNA, 30 bp, Artificial Sequence
  Synthetic oligonucleotide
acggcatggctggaagagtgttctcagctg

SEQ ID NO: 222455 - DNA, 30 bp, Artificial Sequence
  Synthetic oligonucleotide
gtaacacgacaaacttggctctacgagctg

SEQ ID NO: 222456 - DNA, 30 bp, Artificial Sequence
  Synthetic oligonucleotide
ttggaaaaaacagcgtgagattcatagctg

SEQ ID NO: 222457 - DNA, 30 bp, Artificial Sequence
  Synthetic oligonucleotide
ggaacgacggagataggtcacggatagctg

SEQ ID NO: 222458 - DNA, 30 bp, Artificial Sequence
  Synthetic oligonucleotide
aacagggctagtagattggcgaactagctg

SEQ ID NO: 222459 - DNA, 30 bp, Artificial Sequence
  Synthetic oligonucleotide
gtctgttctcaggatgcggcggtgtagctg

SEQ ID NO: 222460 - DNA, 30 bp, Artificial Sequence
  Synthetic oligonucleotide
aattgtagcataatgtattcaggttagctg

SEQ ID NO: 222461 - DNA, 30 bp, Artificial Sequence
  Synthetic oligonucleotide
gccgtgttgaggagtatggcgtggacgctg

SEQ ID NO: 222462 - DNA, 30 bp, Artificial Sequence
  Synthetic oligonucleotide
cggtagaccggatcggcgctacgaccgctg

SEQ ID NO: 222463 - DNA, 30 bp, Artificial Sequence
  Synthetic oligonucleotide
cttgctgacgtaaggcatgggaccccgctg

SEQ ID NO: 222464 - DNA, 40 bp, Artificial Sequence
  Synthetic oligonucleotide
gtagtcgcccacggttccatcctggcagtattgcccgctg

SEQ ID NO: 222465 - DNA, 30 bp, Artificial Sequence
  Synthetic oligonucleotide
gggtgggcgagcagtcgcagaagtccgctg

SEQ ID NO: 222466 - DNA, 30 bp, Artificial Sequence
  Synthetic oligonucleotide
ggttccttccactagtatatgcatgcgctg

SEQ ID NO: 222467 - DNA, 30 bp, Artificial Sequence
  Synthetic oligonucleotide
gccgcggaacgcgaaactggacgctcgctg

SEQ ID NO: 222468 - DNA, 30 bp, Artificial Sequence
  Synthetic oligonucleotide
gaaatatcactgatttcgtccacaaggctg

SEQ ID NO: 222469 - DNA, 30 bp, Artificial Sequence
  Synthetic oligonucleotide
aaggaccgcccggcggagtaagcaaggctg

SEQ ID NO: 222470 - DNA, 30 bp, Artificial Sequence
  Synthetic oligonucleotide
ggcggagggcatggcttaacccgaaggctg

SEQ ID NO: 222471 - DNA, 30 bp, Artificial Sequence
  Synthetic oligonucleotide
caactgaagtttaactaaaatgtaaggctg

SEQ ID NO: 222472 - DNA, 30 bp, Artificial Sequence
  Synthetic oligonucleotide
cacagcaaatgtatacaatttcccaggctg

SEQ ID NO: 222473 - DNA, 30 bp, Artificial Sequence
  Synthetic oligonucleotide
gtgtgaagttaagtcgtgcagcataggctg

SEQ ID NO: 222474 - DNA, 30 bp, Artificial Sequence
  Synthetic oligonucleotide
cgcagataaggtatcgaatcaggacggctg

SEQ ID NO: 222475 - DNA, 30 bp, Artificial Sequence
  Synthetic oligonucleotide
aagtaatcatcatcagctcaagtacggctg

SEQ ID NO: 222476 - DNA, 30 bp, Artificial Sequence
  Synthetic oligonucleotide
agactgatgttgagcgactgggcccggctg

SEQ ID NO: 222477 - DNA, 30 bp, Artificial Sequence
  Synthetic oligonucleotide
ctagaatgtatatacaagataattcggctg

SEQ ID NO: 222478 - DNA, 30 bp, Artificial Sequence
  Synthetic oligonucleotide
ttacagacagcaccggggaataaagggctg

SEQ ID NO: 222479 - DNA, 30 bp, Artificial Sequence
  Synthetic oligonucleotide
ccacaatatgaagaccctccccgggggctg

SEQ ID NO: 222480 - DNA, 30 bp, Artificial Sequence
  Synthetic oligonucleotide
cgccgtgcgttaggtggcggccctgggctg

SEQ ID NO: 222481 - DNA, 30 bp, Artificial Sequence
  Synthetic oligonucleotide
aagtcgacgctagcggacataagatggctg

SEQ ID NO: 222482 - DNA, 30 bp, Artificial Sequence
  Synthetic oligonucleotide
tactatgaatccacatcgggggtctggctg

SEQ ID NO: 222483 - DNA, 30 bp, Artificial Sequence
  Synthetic oligonucleotide
gctacaatctagtcgatttagtggtggctg

SEQ ID NO: 222484 - DNA, 30 bp, Artificial Sequence
  Synthetic oligonucleotide
aagacggcgagaagcacgagttattggctg

SEQ ID NO: 222485 - DNA, 30 bp, Artificial Sequence
  Synthetic oligonucleotide
ggccaagacagctgtaagtgtcgaatgctg

SEQ ID NO: 222486 - DNA, 30 bp, Artificial Sequence
  Synthetic oligonucleotide
tgcgacaacaaaaatcagcgtctaatgctg

SEQ ID NO: 222487 - DNA, 30 bp, Artificial Sequence
  Synthetic oligonucleotide
cacttacaaaggtgtgaagataccatgctg

SEQ ID NO: 222488 - DNA, 30 bp, Artificial Sequence
  Synthetic oligonucleotide
ctcactgcctactgcgaaccttccatgctg

SEQ ID NO: 222489 - DNA, 30 bp, Artificial Sequence
  Synthetic oligonucleotide
gagacaagccaagatgctggaggcatgctg

SEQ ID NO: 222490 - DNA, 30 bp, Artificial Sequence
  Synthetic oligonucleotide
cgtgaacttagttgaggtaactttatgctg

SEQ ID NO: 222491 - DNA, 30 bp, Artificial Sequence
  Synthetic oligonucleotide
gtaacgcaggctcccacttgcctactgctg

SEQ ID NO: 222492 - DNA, 30 bp, Artificial Sequence
  Synthetic oligonucleotide
tacctcgtgccaaattgttgcagcctgctg

SEQ ID NO: 222493 - DNA, 30 bp, Artificial Sequence
  Synthetic oligonucleotide
aaatacctcaattcgagcgtacatctgctg

SEQ ID NO: 222494 - DNA, 30 bp, Artificial Sequence
  Synthetic oligonucleotide
gagagttagatactccacagctctctgctg

SEQ ID NO: 222495 - DNA, 30 bp, Artificial Sequence
  Synthetic oligonucleotide
gccccagtagctgcgagggcgtgtctgctg

SEQ ID NO: 222496 - DNA, 30 bp, Artificial Sequence
  Synthetic oligonucleotide
gtcgaacgtatcatatagcgcaaagtgctg

SEQ ID NO: 222497 - DNA, 30 bp, Artificial Sequence
  Synthetic oligonucleotide
cactcttgcttcgtggttctcgaagtgctg

SEQ ID NO: 222498 - DNA, 30 bp, Artificial Sequence
  Synthetic oligonucleotide
aggtggcccaacgggataatcagtgtgctg

SEQ ID NO: 222499 - DNA, 30 bp, Artificial Sequence
  Synthetic oligonucleotide
ctgcacctcgcgaagcagggatcattgctg

SEQ ID NO: 222500 - DNA, 30 bp, Artificial Sequence
  Synthetic oligonucleotide
agcacttggtgaggtaagactgtaaatctg

SEQ ID NO: 222501 - DNA, 30 bp, Artificial Sequence
  Synthetic oligonucleotide
ctttggtcctaaccatgtaaggtgcatctg

SEQ ID NO: 222502 - DNA, 30 bp, Artificial Sequence
  Synthetic oligonucleotide
gaacgactcgggctctttgaaactcatctg

SEQ ID NO: 222503 - DNA, 30 bp, Artificial Sequence
  Synthetic oligonucleotide
gcatcctgatcaaaaacgccaggtcatctg

SEQ ID NO: 222504 - DNA, 30 bp, Artificial Sequence
  Synthetic oligonucleotide
cggcctaaagatggtatagtacttcatctg

SEQ ID NO: 222505 - DNA, 25 bp, Artificial Sequence
  Synthetic oligonucleotide
gcatagctatttcggctaagatctg

SEQ ID NO: 222506 - DNA, 30 bp, Artificial Sequence
  Synthetic oligonucleotide
cagactcgcgttcggtctgactacgatctg

SEQ ID NO: 222507 - DNA, 30 bp, Artificial Sequence
  Synthetic oligonucleotide
gttgttccgggattcgaacaagtggatctg

SEQ ID NO: 222508 - DNA, 30 bp, Artificial Sequence
  Synthetic oligonucleotide
gagacagggaggacctatggcaaatatctg

SEQ ID NO: 222509 - DNA, 30 bp, Artificial Sequence
  Synthetic oligonucleotide
aaaactcccaggctggcctgaagatatctg

SEQ ID NO: 222510 - DNA, 30 bp, Artificial Sequence
  Synthetic oligonucleotide
gttatcagggaaaaggtccccctatatctg

SEQ ID NO: 222511 - DNA, 30 bp, Artificial Sequence
  Synthetic oligonucleotide
acagttcttgggcggtaacgtctatatctg

SEQ ID NO: 222512 - DNA, 30 bp, Artificial Sequence
  Synthetic oligonucleotide
gtgttggcataatactggggaaggtatctg

SEQ ID NO: 222513 - DNA, 30 bp, Artificial Sequence
  Synthetic oligonucleotide
gttcacggatagccggtcgggtggtatctg

SEQ ID NO: 222514 - DNA, 30 bp, Artificial Sequence
  Synthetic oligonucleotide
tggaccctagtagatacttgggattatctg

SEQ ID NO: 222515 - DNA, 30 bp, Artificial Sequence
  Synthetic oligonucleotide
ttctaagacatacgaaaaaagatttatctg

SEQ ID NO: 222516 - DNA, 30 bp, Artificial Sequence
  Synthetic oligonucleotide
agtgttgagataacgttagagcaaactctg

SEQ ID NO: 222517 - DNA, 30 bp, Artificial Sequence
  Synthetic oligonucleotide
aaacatataataagacgtcatagaactctg

SEQ ID NO: 222518 - DNA, 30 bp, Artificial Sequence
  Synthetic oligonucleotide
taagcttggcaattgtagtgaattactctg

SEQ ID NO: 222519 - DNA, 30 bp, Artificial Sequence
  Synthetic oligonucleotide
aggcgtgttagagaaggaccaaaacctctg

SEQ ID NO: 222520 - DNA, 30 bp, Artificial Sequence
  Synthetic oligonucleotide
gattcgttatgcgttacttatgcacctctg

SEQ ID NO: 222521 - DNA, 30 bp, Artificial Sequence
  Synthetic oligonucleotide
gtctaagtgtggcccaggcatagccctctg

SEQ ID NO: 222522 - DNA, 30 bp, Artificial Sequence
  Synthetic oligonucleotide
acatatacatgacaaagggctatagctctg

SEQ ID NO: 222523 - DNA, 30 bp, Artificial Sequence
  Synthetic oligonucleotide
gaaccgtggatcaggatttggctagctctg

SEQ ID NO: 222524 - DNA, 30 bp, Artificial Sequence
  Synthetic oligonucleotide
atatgccctgaaaggtagttcgcggctctg

SEQ ID NO: 222525 - DNA, 30 bp, Artificial Sequence
  Synthetic oligonucleotide
tttggtcacttagaccgtaacgcatctctg

SEQ ID NO: 222526 - DNA, 30 bp, Artificial Sequence
  Synthetic oligonucleotide
tttgtagtacatggacagggcgattctctg

SEQ ID NO: 222527 - DNA, 30 bp, Artificial Sequence
  Synthetic oligonucleotide
agaaccaatgcacaagtaactggaagtctg

SEQ ID NO: 222528 - DNA, 30 bp, Artificial Sequence
  Synthetic oligonucleotide
tgccttacggacagcacgttaggtagtctg

SEQ ID NO: 222529 - DNA, 30 bp, Artificial Sequence
  Synthetic oligonucleotide
aacagagttaaattatcgcggtaccgtctg

SEQ ID NO: 222530 - DNA, 30 bp, Artificial Sequence
  Synthetic oligonucleotide
ataaatcatagatacacacacgtaggtctg

SEQ ID NO: 222531 - DNA, 27 bp, Artificial Sequence
  Synthetic oligonucleotide
aatctcgctacggtgaaccgcggtctg

SEQ ID NO: 222532 - DNA, 30 bp, Artificial Sequence
  Synthetic oligonucleotide
agctgcccacgcaccaggccgatcggtctg

SEQ ID NO: 222533 - DNA, 30 bp, Artificial Sequence
  Synthetic oligonucleotide
tcgcatagcgctaattgtgatatcggtctg

SEQ ID NO: 222534 - DNA, 30 bp, Artificial Sequence
  Synthetic oligonucleotide
gtaagcgcttagcgggagactacgggtctg

SEQ ID NO: 222535 - DNA, 30 bp, Artificial Sequence
  Synthetic oligonucleotide
gtcgtgttgagggtttcgtggttgggtctg

SEQ ID NO: 222536 - DNA, 30 bp, Artificial Sequence
  Synthetic oligonucleotide
ttcgtgcttgggtttacttaagctggtctg

SEQ ID NO: 222537 - DNA, 30 bp, Artificial Sequence
  Synthetic oligonucleotide
gcaaggaatcaaaagggaccatttggtctg

SEQ ID NO: 222538 - DNA, 30 bp, Artificial Sequence
  Synthetic oligonucleotide
cactacaaaagattatcttcaaaatgtctg

SEQ ID NO: 222539 - DNA, 30 bp, Artificial Sequence
  Synthetic oligonucleotide
gctcaaggttatttgttcgcgtaatgtctg

SEQ ID NO: 222540 - DNA, 30 bp, Artificial Sequence
  Synthetic oligonucleotide
tatataccaggatcacaacaggactgtctg

SEQ ID NO: 222541 - DNA, 30 bp, Artificial Sequence
  Synthetic oligonucleotide
ggatatggtctcctaacagcggagtgtctg

SEQ ID NO: 222542 - DNA, 30 bp, Artificial Sequence
  Synthetic oligonucleotide
cgataggcagatcaatcgtatacttgtctg

SEQ ID NO: 222543 - DNA, 30 bp, Artificial Sequence
  Synthetic oligonucleotide
ccgtaattggcacgaacagtgttaattctg

SEQ ID NO: 222544 - DNA, 30 bp, Artificial Sequence
  Synthetic oligonucleotide
tgtctaacataaattaagttccatattctg

SEQ ID NO: 222545 - DNA, 30 bp, Artificial Sequence
  Synthetic oligonucleotide
gtgtttaatagtcagctagatccacttctg

SEQ ID NO: 222546 - DNA, 30 bp, Artificial Sequence
  Synthetic oligonucleotide
tgagacgaaggggagtgtattgtccttctg

SEQ ID NO: 222547 - DNA, 30 bp, Artificial Sequence
  Synthetic oligonucleotide
ctttcaagtttacacaccgatgtgcttctg

SEQ ID NO: 222548 - DNA, 30 bp, Artificial Sequence
  Synthetic oligonucleotide
agtgtgggttgggaggaaatggatcttctg

SEQ ID NO: 222549 - DNA, 30 bp, Artificial Sequence
  Synthetic oligonucleotide
aaagaaaggctcgtaaagtacattcttctg

SEQ ID NO: 222550 - DNA, 30 bp, Artificial Sequence
  Synthetic oligonucleotide
aaaggaggcttgtaagcaacgattcttctg

SEQ ID NO: 222551 - DNA, 30 bp, Artificial Sequence
  Synthetic oligonucleotide
gggggctgcattcctccatttgaagttctg

SEQ ID NO: 222552 - DNA, 30 bp, Artificial Sequence
  Synthetic oligonucleotide
tagcgcttcagggaagcttgttacgttctg

SEQ ID NO: 222553 - DNA, 30 bp, Artificial Sequence
  Synthetic oligonucleotide
gctggaagagccctaggaaatgtcgttctg

SEQ ID NO: 222554 - DNA, 30 bp, Artificial Sequence
  Synthetic oligonucleotide
gtgggcgctgcgcgactgcggaatgttctg

SEQ ID NO: 222555 - DNA, 30 bp, Artificial Sequence
  Synthetic oligonucleotide
tcggtccacgcaagctatagtagaaaagtg

SEQ ID NO: 222556 - DNA, 30 bp, Artificial Sequence
  Synthetic oligonucleotide
tctccatatacggtttgccaacgcaaagtg

SEQ ID NO: 222557 - DNA, 30 bp, Artificial Sequence
  Synthetic oligonucleotide
gggtaatgggccccgtgtgagtcgaaagtg

SEQ ID NO: 222558 - DNA, 30 bp, Artificial Sequence
  Synthetic oligonucleotide
agacccggatcggatctattgcaacaagtg

SEQ ID NO: 222559 - DNA, 30 bp, Artificial Sequence
  Synthetic oligonucleotide
gtaaagtaatgctatgttcacagacaagtg

SEQ ID NO: 222560 - DNA, 30 bp, Artificial Sequence
  Synthetic oligonucleotide
ctagaaaatggagcggttgtcatacaagtg

SEQ ID NO: 222561 - DNA, 30 bp, Artificial Sequence
  Synthetic oligonucleotide
ttgccggtgtaggcacctatgtgccaagtg

SEQ ID NO: 222562 - DNA, 30 bp, Artificial Sequence
  Synthetic oligonucleotide
tcttgatcgatcatgtatgatgtgcaagtg

SEQ ID NO: 222563 - DNA, 30 bp, Artificial Sequence
  Synthetic oligonucleotide
gcatgcttctgcgcacggtcgactcaagtg

SEQ ID NO: 222564 - DNA, 30 bp, Artificial Sequence
  Synthetic oligonucleotide
gcccccacttcgggatcggaacctcaagtg

SEQ ID NO: 222565 - DNA, 30 bp, Artificial Sequence
  Synthetic oligonucleotide
gtcgtttgaggtttagggttatctcaagtg

SEQ ID NO: 222566 - DNA, 30 bp, Artificial Sequence
  Synthetic oligonucleotide
agggttcttggaatggcctgcagagaagtg

SEQ ID NO: 222567 - DNA, 30 bp, Artificial Sequence
  Synthetic oligonucleotide
ctttacgttcaacgtggggttgttgaagtg

SEQ ID NO: 222568 - DNA, 30 bp, Artificial Sequence
  Synthetic oligonucleotide
gggtttgagagttctgttgttaactaagtg

SEQ ID NO: 222569 - DNA, 30 bp, Artificial Sequence
  Synthetic oligonucleotide
catacacataatattttgtggggctaagtg

SEQ ID NO: 222570 - DNA, 30 bp, Artificial Sequence
  Synthetic oligonucleotide
gcgtaaatggagcgctcctctcggtaagtg

SEQ ID NO: 222571 - DNA, 30 bp, Artificial Sequence
  Synthetic oligonucleotide
catgtgctttcgtgattgtgtcggtaagtg

SEQ ID NO: 222572 - DNA, 30 bp, Artificial Sequence
  Synthetic oligonucleotide
attggcgaagcgtttggcaccttgtaagtg

SEQ ID NO: 222573 - DNA, 30 bp, Artificial Sequence
  Synthetic oligonucleotide
ggttctgaccggtccggacatcaaacagtg

SEQ ID NO: 222574 - DNA, 30 bp, Artificial Sequence
  Synthetic oligonucleotide
ctaaaaaccttgacacatctccacacagtg

SEQ ID NO: 222575 - DNA, 30 bp, Artificial Sequence
  Synthetic oligonucleotide
gcggttcctcttacggtatacggcacagtg

SEQ ID NO: 222576 - DNA, 30 bp, Artificial Sequence
  Synthetic oligonucleotide
tcgtttagattgcacatcaaattcacagtg

SEQ ID NO: 222577 - DNA, 30 bp, Artificial Sequence
  Synthetic oligonucleotide
ccccagggctacaagagcgccaggacagtg

SEQ ID NO: 222578 - DNA, 30 bp, Artificial Sequence
  Synthetic oligonucleotide
tgtaactggcacgtttgtcttcttacagtg

SEQ ID NO: 222579 - DNA, 30 bp, Artificial Sequence
  Synthetic oligonucleotide
atagactcagtcgtcccaatcgttacagtg

SEQ ID NO: 222580 - DNA, 30 bp, Artificial Sequence
  Synthetic oligonucleotide
aacgtatccgaaagcctcgcatttacagtg

SEQ ID NO: 222581 - DNA, 30 bp, Artificial Sequence
  Synthetic oligonucleotide
tcaagtaggtatacgtattaggccccagtg

SEQ ID NO: 222582 - DNA, 30 bp, Artificial Sequence
  Synthetic oligonucleotide
gtagtctctttcgcgcaacttgccccagtg

SEQ ID NO: 222583 - DNA, 30 bp, Artificial Sequence
  Synthetic oligonucleotide
cctggaactactacccgatctgtcccagtg

SEQ ID NO: 222584 - DNA, 30 bp, Artificial Sequence
  Synthetic oligonucleotide
gtagtgatgaaggcgcggaactggccagtg

SEQ ID NO: 222585 - DNA, 30 bp, Artificial Sequence
  Synthetic oligonucleotide
ttacgcaggaccatcctttgtgtgccagtg

SEQ ID NO: 222586 - DNA, 30 bp, Artificial Sequence
  Synthetic oligonucleotide
aagtatgaccggactgttcggtaagcagtg

SEQ ID NO: 222587 - DNA, 30 bp, Artificial Sequence
  Synthetic oligonucleotide
tgagtcatgctagtgaagaccacggcagtg

SEQ ID NO: 222588 - DNA, 30 bp, Artificial Sequence
  Synthetic oligonucleotide
ccgataagtggtttcccggctacggcagtg

SEQ ID NO: 222589 - DNA, 30 bp, Artificial Sequence
  Synthetic oligonucleotide
agcacagctatccgggcttgggcggcagtg

SEQ ID NO: 222590 - DNA, 30 bp, Artificial Sequence
  Synthetic oligonucleotide
gcaccttacagggtggttctttgggcagtg

SEQ ID NO: 222591 - DNA, 30 bp, Artificial Sequence
  Synthetic oligonucleotide
gcctagtattttgtcttattcaatgcagtg

SEQ ID NO: 222592 - DNA, 30 bp, Artificial Sequence
  Synthetic oligonucleotide
ttgggggagctagaaactttgcgtgcagtg

SEQ ID NO: 222593 - DNA, 30 bp, Artificial Sequence
  Synthetic oligonucleotide
aaccggcaatcgggaatgttgccatcagtg

SEQ ID NO: 222594 - DNA, 30 bp, Artificial Sequence
  Synthetic oligonucleotide
gaataccttgagaaccaaaggggatcagtg

SEQ ID NO: 222595 - DNA, 30 bp, Artificial Sequence
  Synthetic oligonucleotide
ctgagccgtgtaattgaagctttgtcagtg

SEQ ID NO: 222596 - DNA, 30 bp, Artificial Sequence
  Synthetic oligonucleotide
gcatcacatgtaggttacaatcattcagtg

SEQ ID NO: 222597 - DNA, 30 bp, Artificial Sequence
  Synthetic oligonucleotide
cctcgaggggcactttgttcccaaagagtg

SEQ ID NO: 222598 - DNA, 30 bp, Artificial Sequence
  Synthetic oligonucleotide
aagttagcacttataccatcgtaaagagtg

SEQ ID NO: 222599 - DNA, 30 bp, Artificial Sequence
  Synthetic oligonucleotide
tggaagaccaagcgtcctcggttaagagtg

SEQ ID NO: 222600 - DNA, 30 bp, Artificial Sequence
  Synthetic oligonucleotide
ttgagcacgcataaatggcaactcagagtg

SEQ ID NO: 222601 - DNA, 30 bp, Artificial Sequence
  Synthetic oligonucleotide
tccgttcatcctgctgggagagggagagtg

SEQ ID NO: 222602 - DNA, 30 bp, Artificial Sequence
  Synthetic oligonucleotide
attattgcttatactactgcggctagagtg

SEQ ID NO: 222603 - DNA, 30 bp, Artificial Sequence
  Synthetic oligonucleotide
ggtaccttactgtgaatacacagtagagtg

SEQ ID NO: 222604 - DNA, 30 bp, Artificial Sequence
  Synthetic oligonucleotide
ggggctaagcgtctcagtaggctccgagtg

SEQ ID NO: 222605 - DNA, 30 bp, Artificial Sequence
  Synthetic oligonucleotide
cccctgatttagttttacgtactgcgagtg

SEQ ID NO: 222606 - DNA, 30 bp, Artificial Sequence
  Synthetic oligonucleotide
aaaattctgcaggataaagagtgtcgagtg

SEQ ID NO: 222607 - DNA, 30 bp, Artificial Sequence
  Synthetic oligonucleotide
aagctcgagcaaagattcaccgttcgagtg

SEQ ID NO: 222608 - DNA, 30 bp, Artificial Sequence
  Synthetic oligonucleotide
ggtgattgcgacgtgtaaagaataggagtg

SEQ ID NO: 222609 - DNA, 30 bp, Artificial Sequence
  Synthetic oligonucleotide
caaacgctgttcccctacgctaggggagtg

SEQ ID NO: 222610 - DNA, 30 bp, Artificial Sequence
  Synthetic oligonucleotide
cgttttcgaaagaaggccgtggtgggagtg

SEQ ID NO: 222611 - DNA, 30 bp, Artificial Sequence
  Synthetic oligonucleotide
cgataggtctttacacatttaaatggagtg

SEQ ID NO: 222612 - DNA, 30 bp, Artificial Sequence
  Synthetic oligonucleotide
attcgcgcgggtctgtttggtacatgagtg

SEQ ID NO: 222613 - DNA, 30 bp, Artificial Sequence
  Synthetic oligonucleotide
agcgctgtttactgctagttcgtgtgagtg

SEQ ID NO: 222614 - DNA, 30 bp, Artificial Sequence
  Synthetic oligonucleotide
tgccctggcacgccagtgacgataatagtg

SEQ ID NO: 222615 - DNA, 30 bp, Artificial Sequence
  Synthetic oligonucleotide
cactctcgtggcggccgtttgaacatagtg

SEQ ID NO: 222616 - DNA, 30 bp, Artificial Sequence
  Synthetic oligonucleotide
tgtatagtgtcctatagtattaacatagtg

SEQ ID NO: 222617 - DNA, 30 bp, Artificial Sequence
  Synthetic oligonucleotide
catcgcaaatgtaacatccactctatagtg

SEQ ID NO: 222618 - DNA, 30 bp, Artificial Sequence
  Synthetic oligonucleotide
ggacctggagtgttgtagagtcgtatagtg

SEQ ID NO: 222619 - DNA, 30 bp, Artificial Sequence
  Synthetic oligonucleotide
gctatgacttgataaatttagcgcctagtg

SEQ ID NO: 222620 - DNA, 30 bp, Artificial Sequence
  Synthetic oligonucleotide
cagtttgacagtgacgtttgtagtctagtg

SEQ ID NO: 222621 - DNA, 30 bp, Artificial Sequence
  Synthetic oligonucleotide
cctggattggctcggagaacataagtagtg

SEQ ID NO: 222622 - DNA, 30 bp, Artificial Sequence
  Synthetic oligonucleotide
gcgtactccgtagttgtccgggcagtagtg

SEQ ID NO: 222623 - DNA, 30 bp, Artificial Sequence
  Synthetic oligonucleotide
catttgtcctttatctgattttgagtagtg

SEQ ID NO: 222624 - DNA, 30 bp, Artificial Sequence
  Synthetic oligonucleotide
gacgaagggcactgacgtattatagtagtg

SEQ ID NO: 222625 - DNA, 30 bp, Artificial Sequence
  Synthetic oligonucleotide
ctagtaaggcccctttcgtagagcgtagtg

SEQ ID NO: 222626 - DNA, 30 bp, Artificial Sequence
  Synthetic oligonucleotide
gtggttaaggcgttagggtgtctcgtagtg

SEQ ID NO: 222627 - DNA, 30 bp, Artificial Sequence
  Synthetic oligonucleotide
acccgaagggtgtgggctgagttcgtagtg

SEQ ID NO: 222628 - DNA, 30 bp, Artificial Sequence
  Synthetic oligonucleotide
ataggcgaccgaagcccatgtgtggtagtg

SEQ ID NO: 222629 - DNA, 30 bp, Artificial Sequence
  Synthetic oligonucleotide
tagtctattactgatataagttaattagtg

SEQ ID NO: 222630 - DNA, 30 bp, Artificial Sequence
  Synthetic oligonucleotide
actcagtccagtgcggatatctacttagtg

SEQ ID NO: 222631 - DNA, 30 bp, Artificial Sequence
  Synthetic oligonucleotide
tttatacctgcgtcagtaggtatgttagtg

SEQ ID NO: 222632 - DNA, 30 bp, Artificial Sequence
  Synthetic oligonucleotide
attcgaggaccggggagttatgctttagtg

SEQ ID NO: 222633 - DNA, 30 bp, Artificial Sequence
  Synthetic oligonucleotide
tagcgtcgcttctatgctgatgacaacgtg

SEQ ID NO: 222634 - DNA, 30 bp, Artificial Sequence
  Synthetic oligonucleotide
gacaacacggacatgttagagctcaacgtg

SEQ ID NO: 222635 - DNA, 30 bp, Artificial Sequence
  Synthetic oligonucleotide
gttcactgaggcgagatgatggagaacgtg

SEQ ID NO: 222636 - DNA, 30 bp, Artificial Sequence
  Synthetic oligonucleotide
ccaaaaattgctgcgtagtacgttaacgtg

SEQ ID NO: 222637 - DNA, 30 bp, Artificial Sequence
  Synthetic oligonucleotide
accgccgctcgcaggcaccgaaaacacgtg

SEQ ID NO: 222638 - DNA, 30 bp, Artificial Sequence
  Synthetic oligonucleotide
gttcatcggagcttgggccttgtgcacgtg

SEQ ID NO: 222639 - DNA, 30 bp, Artificial Sequence
  Synthetic oligonucleotide
tcaatgaatatccaaatcccgtatcacgtg

SEQ ID NO: 222640 - DNA, 30 bp, Artificial Sequence
  Synthetic oligonucleotide
ggtgcgggtaggcacatgttatctcacgtg

SEQ ID NO: 222641 - DNA, 30 bp, Artificial Sequence
  Synthetic oligonucleotide
tctcaatgtattcacatcctcgtggacgtg

SEQ ID NO: 222642 - DNA, 30 bp, Artificial Sequence
  Synthetic oligonucleotide
tgtccaacccacagggagacacaatacgtg

SEQ ID NO: 222643 - DNA, 30 bp, Artificial Sequence
  Synthetic oligonucleotide
aagtcagtgggtacacacccgttatacgtg

SEQ ID NO: 222644 - DNA, 30 bp, Artificial Sequence
  Synthetic oligonucleotide
tcgtatttgaaagaaatttaattgtacgtg

SEQ ID NO: 222645 - DNA, 30 bp, Artificial Sequence
  Synthetic oligonucleotide
agatataagttagtaacaccacattacgtg

SEQ ID NO: 222646 - DNA, 30 bp, Artificial Sequence
  Synthetic oligonucleotide
acaagggactcttgggtctgtgattacgtg

SEQ ID NO: 222647 - DNA, 30 bp, Artificial Sequence
  Synthetic oligonucleotide
gtagccccagagattcacagggcttacgtg

SEQ ID NO: 222648 - DNA, 30 bp, Artificial Sequence
  Synthetic oligonucleotide
caaatagctgtacgtgctgcgatttacgtg

SEQ ID NO: 222649 - DNA, 30 bp, Artificial Sequence
  Synthetic oligonucleotide
ttacgtccaatatatgtccgagtttacgtg

SEQ ID NO: 222650 - DNA, 30 bp, Artificial Sequence
  Synthetic oligonucleotide
gcattggtccttatgcttcgttaaaccgtg

SEQ ID NO: 222651 - DNA, 30 bp, Artificial Sequence
  Synthetic oligonucleotide
atatcgttgtcatagcttaggctcaccgtg

SEQ ID NO: 222652 - DNA, 30 bp, Artificial Sequence
  Synthetic oligonucleotide
gcggaggtaaggggtcatgggacgaccgtg

SEQ ID NO: 222653 - DNA, 30 bp, Artificial Sequence
  Synthetic oligonucleotide
tctatgggttttagtgtagaactgaccgtg

SEQ ID NO: 222654 - DNA, 30 bp, Artificial Sequence
  Synthetic oligonucleotide
gagaatatttagtggatagactcccccgtg

SEQ ID NO: 222655 - DNA, 30 bp, Artificial Sequence
  Synthetic oligonucleotide
tcgcctattaaacgcctaacgagccccgtg

SEQ ID NO: 222656 - DNA, 30 bp, Artificial Sequence
  Synthetic oligonucleotide
gatgtaacccgacttagagaagtccccgtg

SEQ ID NO: 222657 - DNA, 30 bp, Artificial Sequence
  Synthetic oligonucleotide
ttatctacagcatttaaaatccggcccgtg

SEQ ID NO: 222658 - DNA, 30 bp, Artificial Sequence
  Synthetic oligonucleotide
cgaagggtaggtcccacggagttagccgtg

SEQ ID NO: 222659 - DNA, 30 bp, Artificial Sequence
  Synthetic oligonucleotide
gcacaaccattacctcatgtttgcgccgtg

SEQ ID NO: 222660 - DNA, 30 bp, Artificial Sequence
  Synthetic oligonucleotide
ttcatagaatctagtatggcgatcgccgtg

SEQ ID NO: 222661 - DNA, 30 bp, Artificial Sequence
  Synthetic oligonucleotide
accggcgcaaaggccgaaaaacaggccgtg

SEQ ID NO: 222662 - DNA, 30 bp, Artificial Sequence
  Synthetic oligonucleotide
cttcgataggtacacgcgttctactccgtg

SEQ ID NO: 222663 - DNA, 30 bp, Artificial Sequence
  Synthetic oligonucleotide
tgggttaccttggctgagtttgggtccgtg

SEQ ID NO: 222664 - DNA, 30 bp, Artificial Sequence
  Synthetic oligonucleotide
gaaaacaggccgccattaacacgaagcgtg

SEQ ID NO: 222665 - DNA, 30 bp, Artificial Sequence
  Synthetic oligonucleotide
cccggtttttagagggtgttaggaagcgtg

SEQ ID NO: 222666 - DNA, 30 bp, Artificial Sequence
  Synthetic oligonucleotide
taataccgtactgttcccgagataagcgtg

SEQ ID NO: 222667 - DNA, 30 bp, Artificial Sequence
  Synthetic oligonucleotide
gactcagatgtctcatatatttacagcgtg

SEQ ID NO: 222668 - DNA, 30 bp, Artificial Sequence
  Synthetic oligonucleotide
tcatgcgaaaatgtccgggcgatcagcgtg

SEQ ID NO: 222669 - DNA, 30 bp, Artificial Sequence
  Synthetic oligonucleotide
aaggccgtgtggagagtctaattcagcgtg

SEQ ID NO: 222670 - DNA, 30 bp, Artificial Sequence
  Synthetic oligonucleotide
gatgacatttttttgtcatccaggagcgtg

SEQ ID NO: 222671 - DNA, 30 bp, Artificial Sequence
  Synthetic oligonucleotide
gtaggtttactatggcgtgaaaatagcgtg

SEQ ID NO: 222672 - DNA, 30 bp, Artificial Sequence
  Synthetic oligonucleotide
cttgccatagcttcaggacttactagcgtg

SEQ ID NO: 222673 - DNA, 30 bp, Artificial Sequence
  Synthetic oligonucleotide
gatggtgaaggcagcatattcagtagcgtg

SEQ ID NO: 222674 - DNA, 30 bp, Artificial Sequence
  Synthetic oligonucleotide
gcacctttgttattaggctatgttagcgtg

SEQ ID NO: 222675 - DNA, 30 bp, Artificial Sequence
  Synthetic oligonucleotide
atgatcaagtttatggtcaagacacgcgtg

SEQ ID NO: 222676 - DNA, 30 bp, Artificial Sequence
  Synthetic oligonucleotide
accggtgcgggtacagtacgactccgcgtg

SEQ ID NO: 222677 - DNA, 30 bp, Artificial Sequence
  Synthetic oligonucleotide
agtctattaacacatatactggtgcgcgtg

SEQ ID NO: 222678 - DNA, 30 bp, Artificial Sequence
  Synthetic oligonucleotide
accataaatctgagtttgtgtaacggcgtg

SEQ ID NO: 222679 - DNA, 30 bp, Artificial Sequence
  Synthetic oligonucleotide
caaggtgagccctggaaacttgactgcgtg

SEQ ID NO: 222680 - DNA, 30 bp, Artificial Sequence
  Synthetic oligonucleotide
aatatgtggtaagtaaactcgtactgcgtg

SEQ ID NO: 222681 - DNA, 30 bp, Artificial Sequence
  Synthetic oligonucleotide
aaacgtcttgctgtgcaaggcacctgcgtg

SEQ ID NO: 222682 - DNA, 30 bp, Artificial Sequence
  Synthetic oligonucleotide
ccgcgggcttgccggttatgcacgtgcgtg

SEQ ID NO: 222683 - DNA, 30 bp, Artificial Sequence
  Synthetic oligonucleotide
agggcacgggacgatcccggtaggtgcgtg

SEQ ID NO: 222684 - DNA, 30 bp, Artificial Sequence
  Synthetic oligonucleotide
cgcccataattaaggagattggtttgcgtg

SEQ ID NO: 222685 - DNA, 30 bp, Artificial Sequence
  Synthetic oligonucleotide
accagctagtatcgcaaggggtaaatcgtg

SEQ ID NO: 222686 - DNA, 30 bp, Artificial Sequence
  Synthetic oligonucleotide
tttagaagtgtaaagctcacggggatcgtg

SEQ ID NO: 222687 - DNA, 30 bp, Artificial Sequence
  Synthetic oligonucleotide
ccctcctgtatagccacttggactatcgtg

SEQ ID NO: 222688 - DNA, 30 bp, Artificial Sequence
  Synthetic oligonucleotide
tattgccgcatcgttggccaccatctcgtg

SEQ ID NO: 222689 - DNA, 30 bp, Artificial Sequence
  Synthetic oligonucleotide
caagtaggatatctttgcttgcttctcgtg

SEQ ID NO: 222690 - DNA, 30 bp, Artificial Sequence
  Synthetic oligonucleotide
tcgcacattggcccgtgttcaccgttcgtg

SEQ ID NO: 222691 - DNA, 30 bp, Artificial Sequence
  Synthetic oligonucleotide
tagctggtagatctttttgagaggttcgtg

SEQ ID NO: 222692 - DNA, 31 bp, Artificial Sequence
  Synthetic oligonucleotide
taaggttaggtcatcacaacaacctttcgtg

SEQ ID NO: 222693 - DNA, 30 bp, Artificial Sequence
  Synthetic oligonucleotide
taagtaattgcgcttctgtctggtttcgtg

SEQ ID NO: 222694 - DNA, 30 bp, Artificial Sequence
  Synthetic oligonucleotide
agggtaccgtgacgccgtcctgcaaaggtg

SEQ ID NO: 222695 - DNA, 30 bp, Artificial Sequence
  Synthetic oligonucleotide
gaccagggaatgaacaggtcctccaaggtg

SEQ ID NO: 222696 - DNA, 30 bp, Artificial Sequence
  Synthetic oligonucleotide
aacccaatgtattccggctcaggcaaggtg

SEQ ID NO: 222697 - DNA, 30 bp, Artificial Sequence
  Synthetic oligonucleotide
gctggtgttacccagaactcaaataaggtg

SEQ ID NO: 222698 - DNA, 30 bp, Artificial Sequence
  Synthetic oligonucleotide
cgtggtttttctgattcctactttaaggtg

SEQ ID NO: 222699 - DNA, 30 bp, Artificial Sequence
  Synthetic oligonucleotide
cgattactgtatgaaacatatatgcaggtg

SEQ ID NO: 222700 - DNA, 30 bp, Artificial Sequence
  Synthetic oligonucleotide
atgcatagagcattgggcctatatcaggtg

SEQ ID NO: 222701 - DNA, 30 bp, Artificial Sequence
  Synthetic oligonucleotide
gaaattgagaactagggtctatgtcaggtg

SEQ ID NO: 222702 - DNA, 30 bp, Artificial Sequence
  Synthetic oligonucleotide
ctgggtgactaagatgcagtttgtcaggtg

SEQ ID NO: 222703 - DNA, 30 bp, Artificial Sequence
  Synthetic oligonucleotide
tacaagttcggccagcccggagttcaggtg

SEQ ID NO: 222704 - DNA, 30 bp, Artificial Sequence
  Synthetic oligonucleotide
ttcatctctatgccttgaaacctcgaggtg

SEQ ID NO: 222705 - DNA, 30 bp, Artificial Sequence
  Synthetic oligonucleotide
ggaggaccatgggttccccacgtcgaggtg

SEQ ID NO: 222706 - DNA, 30 bp, Artificial Sequence
  Synthetic oligonucleotide
agaagtttcttatgagctgggccggaggtg

SEQ ID NO: 222707 - DNA, 30 bp, Artificial Sequence
  Synthetic oligonucleotide
atgtcaatggagttggtacattatgaggtg

SEQ ID NO: 222708 - DNA, 30 bp, Artificial Sequence
  Synthetic oligonucleotide
tgtaaaatcatacccagggcttatgaggtg

SEQ ID NO: 222709 - DNA, 30 bp, Artificial Sequence
  Synthetic oligonucleotide
aactggtaaggggataatagttttgaggtg

SEQ ID NO: 222710 - DNA, 30 bp, Artificial Sequence
  Synthetic oligonucleotide
accgttaccggggggctctatggataggtg

SEQ ID NO: 222711 - DNA, 25 bp, Artificial Sequence
  Synthetic oligonucleotide
gcgaagttagtataaaagttaggtg

SEQ ID NO: 222712 - DNA, 30 bp, Artificial Sequence
  Synthetic oligonucleotide
ttatcaagtgattgattcaccagttaggtg

SEQ ID NO: 222713 - DNA, 30 bp, Artificial Sequence
  Synthetic oligonucleotide
taaaatagtccgaaggaagcattttaggtg

SEQ ID NO: 222714 - DNA, 30 bp, Artificial Sequence
  Synthetic oligonucleotide
ataaaagtgaccctactttagttttaggtg

SEQ ID NO: 222715 - DNA, 30 bp, Artificial Sequence
  Synthetic oligonucleotide
cgggccaagtagcctcaaagtatcacggtg

SEQ ID NO: 222716 - DNA, 30 bp, Artificial Sequence
  Synthetic oligonucleotide
gtaggccaggggaagcccaaccctacggtg

SEQ ID NO: 222717 - DNA, 30 bp, Artificial Sequence
  Synthetic oligonucleotide
aggatagctcaaactgtactcacaccggtg

SEQ ID NO: 222718 - DNA, 30 bp, Artificial Sequence
  Synthetic oligonucleotide
gcgacctaataaaccgtcgacttaccggtg

SEQ ID NO: 222719 - DNA, 30 bp, Artificial Sequence
  Synthetic oligonucleotide
attaatttcgctcaagtaacgtcgccggtg

SEQ ID NO: 222720 - DNA, 30 bp, Artificial Sequence
  Synthetic oligonucleotide
atatttactgggttatcgggtaatccggtg

SEQ ID NO: 222721 - DNA, 30 bp, Artificial Sequence
  Synthetic oligonucleotide
cttagtcgatagatctaaacgcgtccggtg

SEQ ID NO: 222722 - DNA, 30 bp, Artificial Sequence
  Synthetic oligonucleotide
tagcgacttcatgggtcatgctgtccggtg

SEQ ID NO: 222723 - DNA, 30 bp, Artificial Sequence
  Synthetic oligonucleotide
ttacaaagctttagaagcagttgtccggtg

SEQ ID NO: 222724 - DNA, 30 bp, Artificial Sequence
  Synthetic oligonucleotide
tgcattgggtatctatcaatgcaagcggtg

SEQ ID NO: 222725 - DNA, 30 bp, Artificial Sequence
  Synthetic oligonucleotide
ccgaggatctaagtaggtttgagcgcggtg

SEQ ID NO: 222726 - DNA, 30 bp, Artificial Sequence
  Synthetic oligonucleotide
aggagctgcgactgaacgctgcgcgcggtg

SEQ ID NO: 222727 - DNA, 30 bp, Artificial Sequence
  Synthetic oligonucleotide
gtagtacatggtgtaacaggtattgcggtg

SEQ ID NO: 222728 - DNA, 30 bp, Artificial Sequence
  Synthetic oligonucleotide
aggtggaaaggggggcgggcgtcatcggtg

SEQ ID NO: 222729 - DNA, 30 bp, Artificial Sequence
  Synthetic oligonucleotide
tatgtaaagtgaaagttactcatttcggtg

SEQ ID NO: 222730 - DNA, 30 bp, Artificial Sequence
  Synthetic oligonucleotide
ccctgggtatcccaacgctaccaaagggtg

SEQ ID NO: 222731 - DNA, 30 bp, Artificial Sequence
  Synthetic oligonucleotide
ttgcgttcgtagggccttctaccaagggtg

SEQ ID NO: 222732 - DNA, 30 bp, Artificial Sequence
  Synthetic oligonucleotide
aggtttgtttcgcggccgtggctaagggtg

SEQ ID NO: 222733 - DNA, 30 bp, Artificial Sequence
  Synthetic oligonucleotide
gttatggtcgtgccacttgcggacagggtg

SEQ ID NO: 222734 - DNA, 30 bp, Artificial Sequence
  Synthetic oligonucleotide
acggcaggtactaaccttgcggtcagggtg

SEQ ID NO: 222735 - DNA, 30 bp, Artificial Sequence
  Synthetic oligonucleotide
tgattgttaatttctaacacccaacgggtg

SEQ ID NO: 222736 - DNA, 30 bp, Artificial Sequence
  Synthetic oligonucleotide
tggccaattaacacagacattagacgggtg

SEQ ID NO: 222737 - DNA, 30 bp, Artificial Sequence
  Synthetic oligonucleotide
aaggtatcagaccatggaccgcaccgggtg

SEQ ID NO: 222738 - DNA, 30 bp, Artificial Sequence
  Synthetic oligonucleotide
gggatgtgtcgatcagttgagctccgggtg

SEQ ID NO: 222739 - DNA, 30 bp, Artificial Sequence
  Synthetic oligonucleotide
aatgtagcagtggtagtagttcgtcgggtg

SEQ ID NO: 222740 - DNA, 30 bp, Artificial Sequence
  Synthetic oligonucleotide
caagaggatgcggacgtcgctataggggtg

SEQ ID NO: 222741 - DNA, 30 bp, Artificial Sequence
  Synthetic oligonucleotide
cacgccccgcaattatgtcttgtaggggtg

SEQ ID NO: 222742 - DNA, 30 bp, Artificial Sequence
  Synthetic oligonucleotide
taagcccgcaagagtctaacaatgggggtg

SEQ ID NO: 222743 - DNA, 30 bp, Artificial Sequence
  Synthetic oligonucleotide
tccatcttgttgaaagtcccggatggggtg

SEQ ID NO: 222744 - DNA, 30 bp, Artificial Sequence
  Synthetic oligonucleotide
ctaacgcttccagttacgttgcttggggtg

SEQ ID NO: 222745 - DNA, 29 bp, Artificial Sequence
  Synthetic oligonucleotide
tttgtgtcccacagcccctgggatgggtg

SEQ ID NO: 222746 - DNA, 30 bp, Artificial Sequence
  Synthetic oligonucleotide
tggggggttggttgagcgaactcctgggtg

SEQ ID NO: 222747 - DNA, 30 bp, Artificial Sequence
  Synthetic oligonucleotide
cacctttattcctgcggtgccacttgggtg

SEQ ID NO: 222748 - DNA, 30 bp, Artificial Sequence
  Synthetic oligonucleotide
attttaggcgacctttgcatcttttgggtg

SEQ ID NO: 222749 - DNA, 30 bp, Artificial Sequence
  Synthetic oligonucleotide
gcgaccgatgttcggaagattacaatggtg

SEQ ID NO: 222750 - DNA, 30 bp, Artificial Sequence
  Synthetic oligonucleotide
tctaggttgagaggggtgcgggccatggtg

SEQ ID NO: 222751 - DNA, 30 bp, Artificial Sequence
  Synthetic oligonucleotide
tggcacggtgtatgtccttgggccatggtg

SEQ ID NO: 222752 - DNA, 30 bp, Artificial Sequence
  Synthetic oligonucleotide
gcgaacgtaaggaggactctaggcatggtg

SEQ ID NO: 222753 - DNA, 30 bp, Artificial Sequence
  Synthetic oligonucleotide
ataggggttcaattttgcctaaagatggtg

SEQ ID NO: 222754 - DNA, 30 bp, Artificial Sequence
  Synthetic oligonucleotide
gtaccctaaagacgggaacgtaatatggtg

SEQ ID NO: 222755 - DNA, 30 bp, Artificial Sequence
  Synthetic oligonucleotide
tttcattgaacatgccagtgctatatggtg

SEQ ID NO: 222756 - DNA, 30 bp, Artificial Sequence
  Synthetic oligonucleotide
aacgtaatgtataaggctatgagcctggtg

SEQ ID NO: 222757 - DNA, 30 bp, Artificial Sequence
  Synthetic oligonucleotide
cccaaagcaatccttgtgggccagctggtg

SEQ ID NO: 222758 - DNA, 30 bp, Artificial Sequence
  Synthetic oligonucleotide
tagagaatagtttaaagccctccgctggtg

SEQ ID NO: 222759 - DNA, 30 bp, Artificial Sequence
  Synthetic oligonucleotide
taagtgttcttaggatatcgatggctggtg

SEQ ID NO: 222760 - DNA, 30 bp, Artificial Sequence
  Synthetic oligonucleotide
ataacagagttagagtttgcgaatctggtg

SEQ ID NO: 222761 - DNA, 30 bp, Artificial Sequence
  Synthetic oligonucleotide
gtcctctaattagccgagatggatctggtg

SEQ ID NO: 222762 - DNA, 30 bp, Artificial Sequence
  Synthetic oligonucleotide
gcatgcaagtttcgaaactgtgaagtggtg

SEQ ID NO: 222763 - DNA, 30 bp, Artificial Sequence
  Synthetic oligonucleotide
ttctacctgggaagagggcaaggagtggtg

SEQ ID NO: 222764 - DNA, 30 bp, Artificial Sequence
  Synthetic oligonucleotide
acgatgtccggtcggattgatggagtggtg

SEQ ID NO: 222765 - DNA, 30 bp, Artificial Sequence
  Synthetic oligonucleotide
ggctttccaacggaagggagagctgtggtg

SEQ ID NO: 222766 - DNA, 30 bp, Artificial Sequence
  Synthetic oligonucleotide
aagacgatacgcgggtcgcccggattggtg

SEQ ID NO: 222767 - DNA, 30 bp, Artificial Sequence
  Synthetic oligonucleotide
gcgtgccttctgtgggcaatgggattggtg

SEQ ID NO: 222768 - DNA, 30 bp, Artificial Sequence
  Synthetic oligonucleotide
ggccccgtcctgggtagcaaatagttggtg

SEQ ID NO: 222769 - DNA, 30 bp, Artificial Sequence
  Synthetic oligonucleotide
gtcgatccaagcttaacatagccaaatgtg

SEQ ID NO: 222770 - DNA, 30 bp, Artificial Sequence
  Synthetic oligonucleotide
ctgttttatgggaaagaagttaacaatgtg

SEQ ID NO: 222771 - DNA, 30 bp, Artificial Sequence
  Synthetic oligonucleotide
tcacgtgaagtcgatgctcttgtcaatgtg

SEQ ID NO: 222772 - DNA, 30 bp, Artificial Sequence
  Synthetic oligonucleotide
tttcaaattttctcgacatgggcgaatgtg

SEQ ID NO: 222773 - DNA, 30 bp, Artificial Sequence
  Synthetic oligonucleotide
aaatgatgggtatttcaagctgcgaatgtg

SEQ ID NO: 222774 - DNA, 30 bp, Artificial Sequence
  Synthetic oligonucleotide
ggacaccgagggaactcaccacggaatgtg

SEQ ID NO: 222775 - DNA, 30 bp, Artificial Sequence
  Synthetic oligonucleotide
tgaggtccctaccgtatcatcagtaatgtg

SEQ ID NO: 222776 - DNA, 30 bp, Artificial Sequence
  Synthetic oligonucleotide
ctggcaacttattccgtggcacgccatgtg

SEQ ID NO: 222777 - DNA, 30 bp, Artificial Sequence
  Synthetic oligonucleotide
ccaggctaccctgggggtatcatccatgtg

SEQ ID NO: 222778 - DNA, 30 bp, Artificial Sequence
  Synthetic oligonucleotide
ggagtggaaacatcttggctgaagcatgtg

SEQ ID NO: 222779 - DNA, 30 bp, Artificial Sequence
  Synthetic oligonucleotide
cgtatgtacaggatatttggaattcatgtg

SEQ ID NO: 222780 - DNA, 30 bp, Artificial Sequence
  Synthetic oligonucleotide
ttcagggtgtacaccggcgtccaagatgtg

SEQ ID NO: 222781 - DNA, 30 bp, Artificial Sequence
  Synthetic oligonucleotide
agtaagagtatatgcgttcgcttcgatgtg

SEQ ID NO: 222782 - DNA, 30 bp, Artificial Sequence
  Synthetic oligonucleotide
tttacaaaaattgatcaagcgttcgatgtg

SEQ ID NO: 222783 - DNA, 30 bp, Artificial Sequence
  Synthetic oligonucleotide
tcatattaccacgaaattagagaatatgtg

SEQ ID NO: 222784 - DNA, 30 bp, Artificial Sequence
  Synthetic oligonucleotide
gtccggcgtagagaccccatggtctatgtg

SEQ ID NO: 222785 - DNA, 30 bp, Artificial Sequence
  Synthetic oligonucleotide
tgcccaggatgactatcgtccggttatgtg

SEQ ID NO: 222786 - DNA, 30 bp, Artificial Sequence
  Synthetic oligonucleotide
gtagggtgtcgcctattaatatacactgtg

SEQ ID NO: 222787 - DNA, 30 bp, Artificial Sequence
  Synthetic oligonucleotide
gctactgaagtatgtcagcccagcactgtg

SEQ ID NO: 222788 - DNA, 30 bp, Artificial Sequence
  Synthetic oligonucleotide
cccaacattggcatttagcccaggactgtg

SEQ ID NO: 222789 - DNA, 30 bp, Artificial Sequence
  Synthetic oligonucleotide
ggaaaggcctcccaaccagactggactgtg

SEQ ID NO: 222790 - DNA, 30 bp, Artificial Sequence
  Synthetic oligonucleotide
gatctaacaccagcaaagtgcaatactgtg

SEQ ID NO: 222791 - DNA, 30 bp, Artificial Sequence
  Synthetic oligonucleotide
atgttcgcttggcagtaagaaccccctgtg

SEQ ID NO: 222792 - DNA, 30 bp, Artificial Sequence
  Synthetic oligonucleotide
gtctgtatgaagcaacatccgaggcctgtg

SEQ ID NO: 222793 - DNA, 30 bp, Artificial Sequence
  Synthetic oligonucleotide
ttcgctacaagctggtattgattgcctgtg

SEQ ID NO: 222794 - DNA, 30 bp, Artificial Sequence
  Synthetic oligonucleotide
caagcgttttggtaggtcactcctcctgtg

SEQ ID NO: 222795 - DNA, 30 bp, Artificial Sequence
  Synthetic oligonucleotide
ccggtttgcgacaagaggattatagctgtg

SEQ ID NO: 222796 - DNA, 30 bp, Artificial Sequence
  Synthetic oligonucleotide
tgtaagaaactacagtattaaaatgctgtg

SEQ ID NO: 222797 - DNA, 30 bp, Artificial Sequence
  Synthetic oligonucleotide
atcacggggaaattatttgattatgctgtg

SEQ ID NO: 222798 - DNA, 30 bp, Artificial Sequence
  Synthetic oligonucleotide
tccggcgcatcaataaggacacactctgtg

SEQ ID NO: 222799 - DNA, 30 bp, Artificial Sequence
  Synthetic oligonucleotide
agacatattacacattggcatacgtctgtg

SEQ ID NO: 222800 - DNA, 30 bp, Artificial Sequence
  Synthetic oligonucleotide
ggcggtggtcttgcatacgggttttctgtg

SEQ ID NO: 222801 - DNA, 30 bp, Artificial Sequence
  Synthetic oligonucleotide
cctgagtgccaaacgcaggtttccagtgtg

SEQ ID NO: 222802 - DNA, 30 bp, Artificial Sequence
  Synthetic oligonucleotide
taggtatagtcggtaattaacctgagtgtg

SEQ ID NO: 222803 - DNA, 30 bp, Artificial Sequence
  Synthetic oligonucleotide
taggatcagccctcatatcaggttagtgtg

SEQ ID NO: 222804 - DNA, 30 bp, Artificial Sequence
  Synthetic oligonucleotide
gtaacgacgctcactgatatgtaacgtgtg

SEQ ID NO: 222805 - DNA, 30 bp, Artificial Sequence
  Synthetic oligonucleotide
tgggcatttagccgccattctctacgtgtg

SEQ ID NO: 222806 - DNA, 30 bp, Artificial Sequence
  Synthetic oligonucleotide
cctacgaaatacgtgaatctacagcgtgtg

SEQ ID NO: 222807 - DNA, 30 bp, Artificial Sequence
  Synthetic oligonucleotide
cggacccgctgaactgggtggtggcgtgtg

SEQ ID NO: 222808 - DNA, 30 bp, Artificial Sequence
  Synthetic oligonucleotide
cgccctcgcgggggactatgcatgcgtgtg

SEQ ID NO: 222809 - DNA, 30 bp, Artificial Sequence
  Synthetic oligonucleotide
ctggttacgggaaccgggatttacggtgtg

SEQ ID NO: 222810 - DNA, 30 bp, Artificial Sequence
  Synthetic oligonucleotide
acaaagatttagggttactctaccggtgtg

SEQ ID NO: 222811 - DNA, 30 bp, Artificial Sequence
  Synthetic oligonucleotide
ggacgtatctacagctcgaaccatggtgtg

SEQ ID NO: 222812 - DNA, 30 bp, Artificial Sequence
  Synthetic oligonucleotide
gccatctataatggcggtggaggtggtgtg

SEQ ID NO: 222813 - DNA, 30 bp, Artificial Sequence
  Synthetic oligonucleotide
taaagagactatcatgcgaaattctgtgtg

SEQ ID NO: 222814 - DNA, 30 bp, Artificial Sequence
  Synthetic oligonucleotide
agcgggtatgacgagcgggacttctgtgtg

SEQ ID NO: 222815 - DNA, 29 bp, Artificial Sequence
  Synthetic oligonucleotide
gttctgcggctgccagtgagcagtgtgtg

SEQ ID NO: 222816 - DNA, 30 bp, Artificial Sequence
  Synthetic oligonucleotide
tcaccatgaatctcaacgcgcttaattgtg

SEQ ID NO: 222817 - DNA, 30 bp, Artificial Sequence
  Synthetic oligonucleotide
agccacaagtacagttagtaggacattgtg

SEQ ID NO: 222818 - DNA, 30 bp, Artificial Sequence
  Synthetic oligonucleotide
acatgggttattaaatgaaaccggattgtg

SEQ ID NO: 222819 - DNA, 30 bp, Artificial Sequence
  Synthetic oligonucleotide
aaacgtataactggtcccggccgtattgtg

SEQ ID NO: 222820 - DNA, 30 bp, Artificial Sequence
  Synthetic oligonucleotide
ggtgcaggagctacggaattgccccttgtg

SEQ ID NO: 222821 - DNA, 30 bp, Artificial Sequence
  Synthetic oligonucleotide
tatttacatagcattgtcccgtcccttgtg

SEQ ID NO: 222822 - DNA, 30 bp, Artificial Sequence
  Synthetic oligonucleotide
taggtgattatggtggctccaagggttgtg

SEQ ID NO: 222823 - DNA, 30 bp, Artificial Sequence
  Synthetic oligonucleotide
aaaagaactgtagaacctgtgagggttgtg

SEQ ID NO: 222824 - DNA, 30 bp, Artificial Sequence
  Synthetic oligonucleotide
ggtatcgcacaagcgggaaaattggttgtg

SEQ ID NO: 222825 - DNA, 30 bp, Artificial Sequence
  Synthetic oligonucleotide
aaaggaaatttaggggcattacgtgttgtg

SEQ ID NO: 222826 - DNA, 30 bp, Artificial Sequence
  Synthetic oligonucleotide
ggtactgtggcaagagcctcgcaaaaattg

SEQ ID NO: 222827 - DNA, 30 bp, Artificial Sequence
  Synthetic oligonucleotide
aacaatttgcagcggagctcatcaaaattg

SEQ ID NO: 222828 - DNA, 30 bp, Artificial Sequence
  Synthetic oligonucleotide
atactcactcagaaatgccttcccaaattg

SEQ ID NO: 222829 - DNA, 30 bp, Artificial Sequence
  Synthetic oligonucleotide
gacctggtcagctagcctaagggcaaattg

SEQ ID NO: 222830 - DNA, 30 bp, Artificial Sequence
  Synthetic oligonucleotide
gggtattcaaagtgatcggccacgaaattg

SEQ ID NO: 222831 - DNA, 30 bp, Artificial Sequence
  Synthetic oligonucleotide
acacgatttacgttgaaatagactaaattg

SEQ ID NO: 222832 - DNA, 30 bp, Artificial Sequence
  Synthetic oligonucleotide
actggatactgtctgtcataaatacaattg

SEQ ID NO: 222833 - DNA, 30 bp, Artificial Sequence
  Synthetic oligonucleotide
gggtgggtttatcgaattgcggaccaattg

SEQ ID NO: 222834 - DNA, 30 bp, Artificial Sequence
  Synthetic oligonucleotide
tagtaaactaaatttacaagtctccaattg

SEQ ID NO: 222835 - DNA, 30 bp, Artificial Sequence
  Synthetic oligonucleotide
ggcttcggtagacgatgtaaggcgcaattg

SEQ ID NO: 222836 - DNA, 30 bp, Artificial Sequence
  Synthetic oligonucleotide
acctttaacttcagacaggttgcgcaattg

SEQ ID NO: 222837 - DNA, 30 bp, Artificial Sequence
  Synthetic oligonucleotide
gtttactccggcattggtatcgttcaattg

SEQ ID NO: 222838 - DNA, 30 bp, Artificial Sequence
  Synthetic oligonucleotide
gcttcacgcggtgggatatggccagaattg

SEQ ID NO: 222839 - DNA, 30 bp, Artificial Sequence
  Synthetic oligonucleotide
tgggtaacatggcgctagcgcttagaattg

SEQ ID NO: 222840 - DNA, 30 bp, Artificial Sequence
  Synthetic oligonucleotide
actaaaggctggccccggaagcaataattg

SEQ ID NO: 222841 - DNA, 30 bp, Artificial Sequence
  Synthetic oligonucleotide
gggtacgagaatagactttcggtctaattg

SEQ ID NO: 222842 - DNA, 30 bp, Artificial Sequence
  Synthetic oligonucleotide
catgcaggttacagagaatctcagtaattg

SEQ ID NO: 222843 - DNA, 30 bp, Artificial Sequence
  Synthetic oligonucleotide
gagccccgttaggaaaaagaagagtaattg

SEQ ID NO: 222844 - DNA, 30 bp, Artificial Sequence
  Synthetic oligonucleotide
taacgcctcgagcaaagcaccccgtaattg

SEQ ID NO: 222845 - DNA, 30 bp, Artificial Sequence
  Synthetic oligonucleotide
ctaaggcgactgtgaagtaacgcgtaattg

SEQ ID NO: 222846 - DNA, 30 bp, Artificial Sequence
  Synthetic oligonucleotide
ttcgatgacgggagctcatgctggtaattg

SEQ ID NO: 222847 - DNA, 30 bp, Artificial Sequence
  Synthetic oligonucleotide
cagctaagttcaaagtttgcagtgtaattg

SEQ ID NO: 222848 - DNA, 30 bp, Artificial Sequence
  Synthetic oligonucleotide
tagctagagcatggaggggataattaattg

SEQ ID NO: 222849 - DNA, 30 bp, Artificial Sequence
  Synthetic oligonucleotide
tcgggttccatgtcacctctggagacattg

SEQ ID NO: 222850 - DNA, 30 bp, Artificial Sequence
  Synthetic oligonucleotide
aaggttgtaattaaacgctttatgacattg

SEQ ID NO: 222851 - DNA, 30 bp, Artificial Sequence
  Synthetic oligonucleotide
ttggggtaaaaaaccatgctatttacattg

SEQ ID NO: 222852 - DNA, 30 bp, Artificial Sequence
  Synthetic oligonucleotide
cacaagttaggatatataagactgccattg

SEQ ID NO: 222853 - DNA, 30 bp, Artificial Sequence
  Synthetic oligonucleotide
aactcgaaattaacctactggtatccattg

SEQ ID NO: 222854 - DNA, 30 bp, Artificial Sequence
  Synthetic oligonucleotide
gtctaccgacaagtgggcccggtcgcattg

SEQ ID NO: 222855 - DNA, 30 bp, Artificial Sequence
  Synthetic oligonucleotide
cacctagggctctgtgacgggcgtgcattg

SEQ ID NO: 222856 - DNA, 30 bp, Artificial Sequence
  Synthetic oligonucleotide
agacaatgaagagaatacctttactcattg

SEQ ID NO: 222857 - DNA, 31 bp, Artificial Sequence
  Synthetic oligonucleotide
cacggatccagactcagcagaagattcattg

SEQ ID NO: 222858 - DNA, 30 bp, Artificial Sequence
  Synthetic oligonucleotide
tactctggatcctaagacattgaaagattg

SEQ ID NO: 222859 - DNA, 30 bp, Artificial Sequence
  Synthetic oligonucleotide
cttgggttgtagaattgcggtacaagattg

SEQ ID NO: 222860 - DNA, 30 bp, Artificial Sequence
  Synthetic oligonucleotide
ctagctaggcacggtttgaaacccagattg

SEQ ID NO: 222861 - DNA, 30 bp, Artificial Sequence
  Synthetic oligonucleotide
tagaagactggtgctatagcgttcagattg

SEQ ID NO: 222862 - DNA, 30 bp, Artificial Sequence
  Synthetic oligonucleotide
cgtgcgtcttctatcgtggatatacgattg

SEQ ID NO: 222863 - DNA, 30 bp, Artificial Sequence
  Synthetic oligonucleotide
ttatagagtgtctggggatagaaccgattg

SEQ ID NO: 222864 - DNA, 30 bp, Artificial Sequence
  Synthetic oligonucleotide
agagatagtccgactcggagcttccgattg

SEQ ID NO: 222865 - DNA, 30 bp, Artificial Sequence
  Synthetic oligonucleotide
cgcaggaaaggcatgattagcccgcgattg

SEQ ID NO: 222866 - DNA, 30 bp, Artificial Sequence
  Synthetic oligonucleotide
aacaggggatgatctgagaatcggcgattg

SEQ ID NO: 222867 - DNA, 30 bp, Artificial Sequence
  Synthetic oligonucleotide
tcagtgggtaacgttggtgctgaaggattg

SEQ ID NO: 222868 - DNA, 30 bp, Artificial Sequence
  Synthetic oligonucleotide
gctagcaacacatcctcaattccaggattg

SEQ ID NO: 222869 - DNA, 30 bp, Artificial Sequence
  Synthetic oligonucleotide
ctaagttggattaacggcgtctacggattg

SEQ ID NO: 222870 - DNA, 30 bp, Artificial Sequence
  Synthetic oligonucleotide
acccagacagggggtgccggcattggattg

SEQ ID NO: 222871 - DNA, 30 bp, Artificial Sequence
  Synthetic oligonucleotide
cggacgcgaggaatcaccagaaaatgattg

SEQ ID NO: 222872 - DNA, 30 bp, Artificial Sequence
  Synthetic oligonucleotide
atcaggtatgaaatgtatgcgatatgattg

SEQ ID NO: 222873 - DNA, 30 bp, Artificial Sequence
  Synthetic oligonucleotide
gttgcgtccacttcgtgcaacttctgattg

SEQ ID NO: 222874 - DNA, 30 bp, Artificial Sequence
  Synthetic oligonucleotide
ccgaaggattgacccgtagcgccttgattg

SEQ ID NO: 222875 - DNA, 30 bp, Artificial Sequence
  Synthetic oligonucleotide
gtgtctatgggcaggcaggtgccttgattg

SEQ ID NO: 222876 - DNA, 30 bp, Artificial Sequence
  Synthetic oligonucleotide
cagtactccggatggtagagtgtttgattg

SEQ ID NO: 222877 - DNA, 30 bp, Artificial Sequence
  Synthetic oligonucleotide
cgccagagcagccctaatggggaaatattg

SEQ ID NO: 222878 - DNA, 30 bp, Artificial Sequence
  Synthetic oligonucleotide
aattgcacgacacaagggggttaaatattg

SEQ ID NO: 222879 - DNA, 30 bp, Artificial Sequence
  Synthetic oligonucleotide
gtgacgaattataggtcagtacggatattg

SEQ ID NO: 222880 - DNA, 30 bp, Artificial Sequence
  Synthetic oligonucleotide
tggccaggtggagacttcctatatatattg

SEQ ID NO: 222881 - DNA, 30 bp, Artificial Sequence
  Synthetic oligonucleotide
tggccattatgcatctggctggaactattg

SEQ ID NO: 222882 - DNA, 30 bp, Artificial Sequence
  Synthetic oligonucleotide
tgagtgtgatacgagcgcgcccacctattg

SEQ ID NO: 222883 - DNA, 31 bp, Artificial Sequence
  Synthetic oligonucleotide
taggagaatcagtggcagcaaacagctattg

SEQ ID NO: 222884 - DNA, 30 bp, Artificial Sequence
  Synthetic oligonucleotide
cacactacccgcgtggttttctggctattg

SEQ ID NO: 222885 - DNA, 30 bp, Artificial Sequence
  Synthetic oligonucleotide
atgttccacgtttcgctctacgaagtattg

SEQ ID NO: 222886 - DNA, 30 bp, Artificial Sequence
  Synthetic oligonucleotide
attacgactcggggttgcggtccagtattg

SEQ ID NO: 222887 - DNA, 30 bp, Artificial Sequence
  Synthetic oligonucleotide
gctagataaataataaagggtgacgtattg

SEQ ID NO: 222888 - DNA, 30 bp, Artificial Sequence
  Synthetic oligonucleotide
taccgagagaagtaaccgcctgtcgtattg

SEQ ID NO: 222889 - DNA, 30 bp, Artificial Sequence
  Synthetic oligonucleotide
ggataggtcaataactgggatgaggtattg

SEQ ID NO: 222890 - DNA, 30 bp, Artificial Sequence
  Synthetic oligonucleotide
ttcaaacaagatgacacacagcatgtattg

SEQ ID NO: 222891 - DNA, 30 bp, Artificial Sequence
  Synthetic oligonucleotide
gaacagacaaaggaaagctcgaggttattg

SEQ ID NO: 222892 - DNA, 30 bp, Artificial Sequence
  Synthetic oligonucleotide
gtttcaacggaaagggggcacgggttattg

SEQ ID NO: 222893 - DNA, 30 bp, Artificial Sequence
  Synthetic oligonucleotide
ccataagtgggacggataacacaaaacttg

SEQ ID NO: 222894 - DNA, 30 bp, Artificial Sequence
  Synthetic oligonucleotide
tcggcagacgtcaagcggctgggaaacttg

SEQ ID NO: 222895 - DNA, 30 bp, Artificial Sequence
  Synthetic oligonucleotide
cggtgcttaccgtattaatagcacaacttg

SEQ ID NO: 222896 - DNA, 30 bp, Artificial Sequence
  Synthetic oligonucleotide
gttcgtggtgacaccgggacgggcaacttg

SEQ ID NO: 222897 - DNA, 30 bp, Artificial Sequence
  Synthetic oligonucleotide
gacgtaacgggtcccaaggctcagaacttg

SEQ ID NO: 222898 - DNA, 30 bp, Artificial Sequence
  Synthetic oligonucleotide
attggtacgattacggaggagaggaacttg

SEQ ID NO: 222899 - DNA, 30 bp, Artificial Sequence
  Synthetic oligonucleotide
tggaacaggcacgcgagcattcataacttg

SEQ ID NO: 222900 - DNA, 30 bp, Artificial Sequence
  Synthetic oligonucleotide
tgacgaaatcagagtgagccgtttaacttg

SEQ ID NO: 222901 - DNA, 30 bp, Artificial Sequence
  Synthetic oligonucleotide
cgtaatcagtcacctctatgggcagacttg

SEQ ID NO: 222902 - DNA, 30 bp, Artificial Sequence
  Synthetic oligonucleotide
cgagtaacttaatatgcgtaaacggacttg

SEQ ID NO: 222903 - DNA, 30 bp, Artificial Sequence
  Synthetic oligonucleotide
ccaaagcagggggttgccttcgatgacttg

SEQ ID NO: 222904 - DNA, 30 bp, Artificial Sequence
  Synthetic oligonucleotide
tatagaaaagtgtgacacctgccatacttg

SEQ ID NO: 222905 - DNA, 30 bp, Artificial Sequence
  Synthetic oligonucleotide
cggatcgatgtgtgtaagtgtgtatacttg

SEQ ID NO: 222906 - DNA, 30 bp, Artificial Sequence
  Synthetic oligonucleotide
ctggtgctgggaatttgctgcacgtacttg

SEQ ID NO: 222907 - DNA, 30 bp, Artificial Sequence
  Synthetic oligonucleotide
gtggagcctaggagcaggcacagttacttg

SEQ ID NO: 222908 - DNA, 32 bp, Artificial Sequence
  Synthetic oligonucleotide
ttacttattactgagaataagtcgtttacttg

SEQ ID NO: 222909 - DNA, 30 bp, Artificial Sequence
  Synthetic oligonucleotide
ttcccgactgcatgaaacaccatgaccttg

SEQ ID NO: 222910 - DNA, 30 bp, Artificial Sequence
  Synthetic oligonucleotide
gatagagcagttgcaaagcggtaccccttg

SEQ ID NO: 222911 - DNA, 30 bp, Artificial Sequence
  Synthetic oligonucleotide
acaaaaggttagagcccgacctgtcccttg

SEQ ID NO: 222912 - DNA, 30 bp, Artificial Sequence
  Synthetic oligonucleotide
gagctgttgcaattagggcgaatagccttg

SEQ ID NO: 222913 - DNA, 30 bp, Artificial Sequence
  Synthetic oligonucleotide
agtatggtccgtctagaaattcgcgccttg

SEQ ID NO: 222914 - DNA, 30 bp, Artificial Sequence
  Synthetic oligonucleotide
gtaagtgagaatcatccatggaatgccttg

SEQ ID NO: 222915 - DNA, 30 bp, Artificial Sequence
  Synthetic oligonucleotide
ttaatagctacacgagcagaagaatccttg

SEQ ID NO: 222916 - DNA, 30 bp, Artificial Sequence
  Synthetic oligonucleotide
gtcagccatgcgggtgacgtaaaaagcttg

SEQ ID NO: 222917 - DNA, 30 bp, Artificial Sequence
  Synthetic oligonucleotide
acttatgtgacttccgatttcaaaagcttg

SEQ ID NO: 222918 - DNA, 30 bp, Artificial Sequence
  Synthetic oligonucleotide
cacgtagaattgagtgcgtgataaagcttg

SEQ ID NO: 222919 - DNA, 30 bp, Artificial Sequence
  Synthetic oligonucleotide
tggcggataggatccagatggcccagcttg

SEQ ID NO: 222920 - DNA, 30 bp, Artificial Sequence
  Synthetic oligonucleotide
ctcggtcaaagagagcgtgcgcgtagcttg

SEQ ID NO: 222921 - DNA, 30 bp, Artificial Sequence
  Synthetic oligonucleotide
gacgtctcatcaagtagatcggcacgcttg

SEQ ID NO: 222922 - DNA, 30 bp, Artificial Sequence
  Synthetic oligonucleotide
gttacgtagtcaaagtccagtagacgcttg

SEQ ID NO: 222923 - DNA, 30 bp, Artificial Sequence
  Synthetic oligonucleotide
gacatctgacggtgtactgcaatacgcttg

SEQ ID NO: 222924 - DNA, 30 bp, Artificial Sequence
  Synthetic oligonucleotide
accgtctgaaattgttccggacggcgcttg

SEQ ID NO: 222925 - DNA, 30 bp, Artificial Sequence
  Synthetic oligonucleotide
tacggcattcctgtcatccaagggcgcttg

SEQ ID NO: 222926 - DNA, 30 bp, Artificial Sequence
  Synthetic oligonucleotide
cggtagcgataagatttcaacgggcgcttg

SEQ ID NO: 222927 - DNA, 30 bp, Artificial Sequence
  Synthetic oligonucleotide
acaccctaaaggtattcctttgaaggcttg

SEQ ID NO: 222928 - DNA, 30 bp, Artificial Sequence
  Synthetic oligonucleotide
actgaacaagggaaatactctcgaggcttg

SEQ ID NO: 222929 - DNA, 30 bp, Artificial Sequence
  Synthetic oligonucleotide
tgctatccctatgagagggaacccggcttg

SEQ ID NO: 222930 - DNA, 30 bp, Artificial Sequence
  Synthetic oligonucleotide
cggcgctacaacgggaggacatagggcttg

SEQ ID NO: 222931 - DNA, 30 bp, Artificial Sequence
  Synthetic oligonucleotide
tactttacttcagacgaacacgggggcttg

SEQ ID NO: 222932 - DNA, 30 bp, Artificial Sequence
  Synthetic oligonucleotide
ggagctttatatggggaagtaagtggcttg

SEQ ID NO: 222933 - DNA, 30 bp, Artificial Sequence
  Synthetic oligonucleotide
gcgaagactattggctgatggcactgcttg

SEQ ID NO: 222934 - DNA, 30 bp, Artificial Sequence
  Synthetic oligonucleotide
cgtccactctcattttggtgcaagtgcttg

SEQ ID NO: 222935 - DNA, 30 bp, Artificial Sequence
  Synthetic oligonucleotide
atccaattgatcgcatagcgaaggtgcttg

SEQ ID NO: 222936 - DNA, 30 bp, Artificial Sequence
  Synthetic oligonucleotide
acatagagggttcagcggtctgattgcttg

SEQ ID NO: 222937 - DNA, 30 bp, Artificial Sequence
  Synthetic oligonucleotide
cggcatccgaagcttctactatgttgcttg

SEQ ID NO: 222938 - DNA, 30 bp, Artificial Sequence
  Synthetic oligonucleotide
gcatgttttgtgtcaaaatagatttgcttg

SEQ ID NO: 222939 - DNA, 30 bp, Artificial Sequence
  Synthetic oligonucleotide
gagtttatgtcagaaggccgtttgctcttg

SEQ ID NO: 222940 - DNA, 30 bp, Artificial Sequence
  Synthetic oligonucleotide
ttgtcccataggcttcggcgtagagtcttg

SEQ ID NO: 222941 - DNA, 30 bp, Artificial Sequence
  Synthetic oligonucleotide
gatgtgtccctacgggaaggtagagtcttg

SEQ ID NO: 222942 - DNA, 30 bp, Artificial Sequence
  Synthetic oligonucleotide
ttaggatcaccgtacacgcatgttgtcttg

SEQ ID NO: 222943 - DNA, 30 bp, Artificial Sequence
  Synthetic oligonucleotide
ggctaaaggacacgtacttaggaattcttg

SEQ ID NO: 222944 - DNA, 30 bp, Artificial Sequence
  Synthetic oligonucleotide
atcaaagccgtaagggatactgagttcttg

SEQ ID NO: 222945 - DNA, 30 bp, Artificial Sequence
  Synthetic oligonucleotide
gggaacaacctggcttcaagtttaaagttg

SEQ ID NO: 222946 - DNA, 30 bp, Artificial Sequence
  Synthetic oligonucleotide
gctctggtatcttacaatatttgcaagttg

SEQ ID NO: 222947 - DNA, 30 bp, Artificial Sequence
  Synthetic oligonucleotide
ccatggatgcgtggatatgcccagaagttg

SEQ ID NO: 222948 - DNA, 30 bp, Artificial Sequence
  Synthetic oligonucleotide
gaattaacacccgaagaccgccggaagttg

SEQ ID NO: 222949 - DNA, 30 bp, Artificial Sequence
  Synthetic oligonucleotide
ccgggggaggacatgcccctcgggaagttg

SEQ ID NO: 222950 - DNA, 30 bp, Artificial Sequence
  Synthetic oligonucleotide
atcagggcgagtaaatgtaagtctaagttg

SEQ ID NO: 222951 - DNA, 30 bp, Artificial Sequence
  Synthetic oligonucleotide
aagtcaagtgcccgctacacaagtaagttg

SEQ ID NO: 222952 - DNA, 30 bp, Artificial Sequence
  Synthetic oligonucleotide
gcattaatcatgcgattagtcgaccagttg

SEQ ID NO: 222953 - DNA, 30 bp, Artificial Sequence
  Synthetic oligonucleotide
cacttgttaacaaagtggctgccccagttg

SEQ ID NO: 222954 - DNA, 30 bp, Artificial Sequence
  Synthetic oligonucleotide
ccacgatcaatagtggcacccagccagttg

SEQ ID NO: 222955 - DNA, 30 bp, Artificial Sequence
  Synthetic oligonucleotide
aaggtggaaattgttgaaatttttcagttg

SEQ ID NO: 222956 - DNA, 30 bp, Artificial Sequence
  Synthetic oligonucleotide
gagcttggccagtcacgaggcccagagttg

SEQ ID NO: 222957 - DNA, 30 bp, Artificial Sequence
  Synthetic oligonucleotide
tgagtgcacaggacgcatagctaggagttg

SEQ ID NO: 222958 - DNA, 30 bp, Artificial Sequence
  Synthetic oligonucleotide
ccaatatgggtctccatcgcaaatgagttg

SEQ ID NO: 222959 - DNA, 30 bp, Artificial Sequence
  Synthetic oligonucleotide
gacatcgtacattacagagcgggctagttg

SEQ ID NO: 222960 - DNA, 30 bp, Artificial Sequence
  Synthetic oligonucleotide
gccgtcgcctgaactttaggagagtagttg

SEQ ID NO: 222961 - DNA, 30 bp, Artificial Sequence
  Synthetic oligonucleotide
agtttaaggaggattacgttgaattagttg

SEQ ID NO: 222962 - DNA, 30 bp, Artificial Sequence
  Synthetic oligonucleotide
gccgacctgcgccatgaatattccacgttg

SEQ ID NO: 222963 - DNA, 30 bp, Artificial Sequence
  Synthetic oligonucleotide
gaattcctggaccgtaagaaccgaccgttg

SEQ ID NO: 222964 - DNA, 30 bp, Artificial Sequence
  Synthetic oligonucleotide
gtgggtttcaaggtctatgtggagccgttg

SEQ ID NO: 222965 - DNA, 30 bp, Artificial Sequence
  Synthetic oligonucleotide
gtgtacggtgtcatgtgaacgcgtccgttg

SEQ ID NO: 222966 - DNA, 30 bp, Artificial Sequence
  Synthetic oligonucleotide
gggggacgtcgaacgtgaagtgttccgttg

SEQ ID NO: 222967 - DNA, 30 bp, Artificial Sequence
  Synthetic oligonucleotide
cttagagccagatctgtaccccacgcgttg

SEQ ID NO: 222968 - DNA, 30 bp, Artificial Sequence
  Synthetic oligonucleotide
ggttccgggaactagcagtttcacgcgttg

SEQ ID NO: 222969 - DNA, 30 bp, Artificial Sequence
  Synthetic oligonucleotide
aagtatgaatgaaacgtaatctaatcgttg

SEQ ID NO: 222970 - DNA, 30 bp, Artificial Sequence
  Synthetic oligonucleotide
atctagattggataataacaagacaggttg

SEQ ID NO: 222971 - DNA, 30 bp, Artificial Sequence
  Synthetic oligonucleotide
aaaatcgacttctgaaggaaatcgaggttg

SEQ ID NO: 222972 - DNA, 30 bp, Artificial Sequence
  Synthetic oligonucleotide
aggggtgcgggtaacaggactaggaggttg

SEQ ID NO: 222973 - DNA, 30 bp, Artificial Sequence
  Synthetic oligonucleotide
tagagtgccgttttttatctatggaggttg

SEQ ID NO: 222974 - DNA, 30 bp, Artificial Sequence
  Synthetic oligonucleotide
cgcgtcaagtagtgtttctaaagtaggttg

SEQ ID NO: 222975 - DNA, 30 bp, Artificial Sequence
  Synthetic oligonucleotide
ttggggatgagtcactgtttgggtaggttg

SEQ ID NO: 222976 - DNA, 30 bp, Artificial Sequence
  Synthetic oligonucleotide
cgcgaagcgaatccaggaaggtttaggttg

SEQ ID NO: 222977 - DNA, 30 bp, Artificial Sequence
  Synthetic oligonucleotide
atattcagaggataaggtcctaaacggttg

SEQ ID NO: 222978 - DNA, 30 bp, Artificial Sequence
  Synthetic oligonucleotide
ttgaagtgtttaattggtagggggcggttg

SEQ ID NO: 222979 - DNA, 30 bp, Artificial Sequence
  Synthetic oligonucleotide
ttgccataaggagcaccgacgcaagggttg

SEQ ID NO: 222980 - DNA, 30 bp, Artificial Sequence
  Synthetic oligonucleotide
cggggaagatagctgtcagtttcagggttg

SEQ ID NO: 222981 - DNA, 30 bp, Artificial Sequence
  Synthetic oligonucleotide
actctgcgtgtccgagtgatgatcgggttg

SEQ ID NO: 222982 - DNA, 30 bp, Artificial Sequence
  Synthetic oligonucleotide
aattttccagcttcgcaaaacgcggggttg

SEQ ID NO: 222983 - DNA, 30 bp, Artificial Sequence
  Synthetic oligonucleotide
taaacggagtggtaggaccgaagtgggttg

SEQ ID NO: 222984 - DNA, 30 bp, Artificial Sequence
  Synthetic oligonucleotide
ggagtctggacatgtgtagcgcgctggttg

SEQ ID NO: 222985 - DNA, 30 bp, Artificial Sequence
  Synthetic oligonucleotide
tgaccggactttttccataccctctggttg

SEQ ID NO: 222986 - DNA, 30 bp, Artificial Sequence
  Synthetic oligonucleotide
cctgtgggattttcagtcactgtctggttg

SEQ ID NO: 222987 - DNA, 30 bp, Artificial Sequence
  Synthetic oligonucleotide
cgtcaagtttcttgatatggataaatgttg

SEQ ID NO: 222988 - DNA, 30 bp, Artificial Sequence
  Synthetic oligonucleotide
ctgtactctgggtattacccctaaatgttg

SEQ ID NO: 222989 - DNA, 30 bp, Artificial Sequence
  Synthetic oligonucleotide
tcaatattgaattaaactggtggaatgttg

SEQ ID NO: 222990 - DNA, 30 bp, Artificial Sequence
  Synthetic oligonucleotide
aagataaaggttagtctacagctaatgttg

SEQ ID NO: 222991 - DNA, 30 bp, Artificial Sequence
  Synthetic oligonucleotide
cggtcttaccagcaacaacggcacctgttg

SEQ ID NO: 222992 - DNA, 30 bp, Artificial Sequence
  Synthetic oligonucleotide
tcgttaggacacaagtattcgtgcctgttg

SEQ ID NO: 222993 - DNA, 30 bp, Artificial Sequence
  Synthetic oligonucleotide
atacggaacatgtcccttctatctctgttg

SEQ ID NO: 222994 - DNA, 30 bp, Artificial Sequence
  Synthetic oligonucleotide
tcacgaggtcgcgacaacctccgcgtgttg

SEQ ID NO: 222995 - DNA, 30 bp, Artificial Sequence
  Synthetic oligonucleotide
aatggcattctgattctatggttcgtgttg

SEQ ID NO: 222996 - DNA, 30 bp, Artificial Sequence
  Synthetic oligonucleotide
cttagggggctcatgtccgggggcttgttg

SEQ ID NO: 222997 - DNA, 30 bp, Artificial Sequence
  Synthetic oligonucleotide
ctaggggcacttttggaaaaagtgttgttg

SEQ ID NO: 222998 - DNA, 30 bp, Artificial Sequence
  Synthetic oligonucleotide
ctcgccattaatgtcgtacacggtttgttg

SEQ ID NO: 222999 - DNA, 30 bp, Artificial Sequence
  Synthetic oligonucleotide
ggcagaattaaatttgggaccaaaaatttg

SEQ ID NO: 223000 - DNA, 30 bp, Artificial Sequence
  Synthetic oligonucleotide
ctctacatcgatagaactgtcgacaatttg

SEQ ID NO: 223001 - DNA, 30 bp, Artificial Sequence
  Synthetic oligonucleotide
atacaggtaaggggtccagttaagaatttg

SEQ ID NO: 223002 - DNA, 30 bp, Artificial Sequence
  Synthetic oligonucleotide
gaccagtcaggtgggataaccaggaatttg

SEQ ID NO: 223003 - DNA, 30 bp, Artificial Sequence
  Synthetic oligonucleotide
aacgtggcccttaaaacgcagtcacatttg

SEQ ID NO: 223004 - DNA, 30 bp, Artificial Sequence
  Synthetic oligonucleotide
ggctcaaggagcgggtgaccgcgccatttg

SEQ ID NO: 223005 - DNA, 30 bp, Artificial Sequence
  Synthetic oligonucleotide
attgggattcaaactctagagggccatttg

SEQ ID NO: 223006 - DNA, 30 bp, Artificial Sequence
  Synthetic oligonucleotide
tgggggagaatcacgttagattgccatttg

SEQ ID NO: 223007 - DNA, 30 bp, Artificial Sequence
  Synthetic oligonucleotide
agccgcgtcctagttcgccaaccgcatttg

SEQ ID NO: 223008 - DNA, 30 bp, Artificial Sequence
  Synthetic oligonucleotide
gaatgggggaggagtctacccaggcatttg

SEQ ID NO: 223009 - DNA, 30 bp, Artificial Sequence
  Synthetic oligonucleotide
tccagttctcagtgatagattcggcatttg

SEQ ID NO: 223010 - DNA, 30 bp, Artificial Sequence
  Synthetic oligonucleotide
tttggcagagttcacatcggattcgatttg

SEQ ID NO: 223011 - DNA, 30 bp, Artificial Sequence
  Synthetic oligonucleotide
tcaatacgctagtctgagtttggggatttg

SEQ ID NO: 223012 - DNA, 30 bp, Artificial Sequence
  Synthetic oligonucleotide
aaggaagttcggggggtaattcctgatttg

SEQ ID NO: 223013 - DNA, 30 bp, Artificial Sequence
  Synthetic oligonucleotide
tgtcgaataggctgattcttatctgatttg

SEQ ID NO: 223014 - DNA, 30 bp, Artificial Sequence
  Synthetic oligonucleotide
tgtctgtactagtggagggttctatatttg

SEQ ID NO: 223015 - DNA, 30 bp, Artificial Sequence
  Synthetic oligonucleotide
tgagggtacgttcggttaaaggcctatttg

SEQ ID NO: 223016 - DNA, 31 bp, Artificial Sequence
  Synthetic oligonucleotide
ggcacctgtgactgattgattttgctatttg

SEQ ID NO: 223017 - DNA, 30 bp, Artificial Sequence
  Synthetic oligonucleotide
acgcaactttgatacaatatagcgtatttg

SEQ ID NO: 223018 - DNA, 30 bp, Artificial Sequence
  Synthetic oligonucleotide
aggtatcgtggctgtcgcggcagaactttg

SEQ ID NO: 223019 - DNA, 30 bp, Artificial Sequence
  Synthetic oligonucleotide
tacttatcaagcggcaaacaaccgactttg

SEQ ID NO: 223020 - DNA, 30 bp, Artificial Sequence
  Synthetic oligonucleotide
ggttaagacataactagatgatatactttg

SEQ ID NO: 223021 - DNA, 30 bp, Artificial Sequence
  Synthetic oligonucleotide
cgcagaatctattatcttccagtgcctttg

SEQ ID NO: 223022 - DNA, 30 bp, Artificial Sequence
  Synthetic oligonucleotide
agactagatatcaggactcttatggctttg

SEQ ID NO: 223023 - DNA, 30 bp, Artificial Sequence
  Synthetic oligonucleotide
gccagaacaacctggcgtcttcgtgctttg

SEQ ID NO: 223024 - DNA, 30 bp, Artificial Sequence
  Synthetic oligonucleotide
tcagagagggaatgacctcacaaatctttg

SEQ ID NO: 223025 - DNA, 30 bp, Artificial Sequence
  Synthetic oligonucleotide
acatcataccgttagacggtagtctctttg

SEQ ID NO: 223026 - DNA, 30 bp, Artificial Sequence
  Synthetic oligonucleotide
taacggacgcggttagggtagaacagtttg

SEQ ID NO: 223027 - DNA, 30 bp, Artificial Sequence
  Synthetic oligonucleotide
cctaggcaggaaattatgtcgctcagtttg

SEQ ID NO: 223028 - DNA, 30 bp, Artificial Sequence
  Synthetic oligonucleotide
tgagtcggttaaagacttcgggagagtttg

SEQ ID NO: 223029 - DNA, 30 bp, Artificial Sequence
  Synthetic oligonucleotide
gcgactgggattcagccaaaatctagtttg

SEQ ID NO: 223030 - DNA, 30 bp, Artificial Sequence
  Synthetic oligonucleotide
gtgtaatacaatagagcatagagccgtttg

SEQ ID NO: 223031 - DNA, 29 bp, Artificial Sequence
  Synthetic oligonucleotide
ttaaagactgcaacaggtcgaggcgtttg

SEQ ID NO: 223032 - DNA, 30 bp, Artificial Sequence
  Synthetic oligonucleotide
gattattcagtcggacaatatgggcgtttg

SEQ ID NO: 223033 - DNA, 30 bp, Artificial Sequence
  Synthetic oligonucleotide
cggtcactatgagatggtggcttcggtttg

SEQ ID NO: 223034 - DNA, 30 bp, Artificial Sequence
  Synthetic oligonucleotide
ctgaaggctacgagaagcttagagggtttg

SEQ ID NO: 223035 - DNA, 30 bp, Artificial Sequence
  Synthetic oligonucleotide
cccggggaggcaagagaactgtagggtttg

SEQ ID NO: 223036 - DNA, 30 bp, Artificial Sequence
  Synthetic oligonucleotide
aaggtggtgtaacctcgtgccttgggtttg

SEQ ID NO: 223037 - DNA, 30 bp, Artificial Sequence
  Synthetic oligonucleotide
ttcctgaatggcataaatgtgagctgtttg

SEQ ID NO: 223038 - DNA, 30 bp, Artificial Sequence
  Synthetic oligonucleotide
atgaggaactggagggagactccgtgtttg

SEQ ID NO: 223039 - DNA, 30 bp, Artificial Sequence
  Synthetic oligonucleotide
cgggcaagggcgcgatcgaagggcattttg

SEQ ID NO: 223040 - DNA, 30 bp, Artificial Sequence
  Synthetic oligonucleotide
caaccggctgaccaatccacgtagattttg

SEQ ID NO: 223041 - DNA, 30 bp, Artificial Sequence
  Synthetic oligonucleotide
atagaaaacaaatcgatagatgatattttg

SEQ ID NO: 223042 - DNA, 30 bp, Artificial Sequence
  Synthetic oligonucleotide
gggagagtgaaagggacggccggtattttg

SEQ ID NO: 223043 - DNA, 30 bp, Artificial Sequence
  Synthetic oligonucleotide
tgcttccagaatcactatatactacttttg

SEQ ID NO: 223044 - DNA, 30 bp, Artificial Sequence
  Synthetic oligonucleotide
gacaccgggcatcattctgctaatcttttg

SEQ ID NO: 223045 - DNA, 30 bp, Artificial Sequence
  Synthetic oligonucleotide
ccttctttaggggaatatgagctcgttttg

SEQ ID NO: 223046 - DNA, 30 bp, Artificial Sequence
  Synthetic oligonucleotide
atagcgtaccctatggtaacaacggttttg

SEQ ID NO: 223047 - DNA, 30 bp, Artificial Sequence
  Synthetic oligonucleotide
cgggcctatacgacggtacacactgttttg

SEQ ID NO: 223048 - DNA, 30 bp, Artificial Sequence
  Synthetic oligonucleotide
ggagttgcgaagggagtaaggtttgttttg

SEQ ID NO: 223049 - DNA, 30 bp, Artificial Sequence
  Synthetic oligonucleotide
agtggacttgatcaattggaagcatttttg

SEQ ID NO: 223050 - DNA, 30 bp, Artificial Sequence
  Synthetic oligonucleotide
ataataatatcataccttttgttgtttttg

SEQ ID NO: 223051 - DNA, 30 bp, Artificial Sequence
  Synthetic oligonucleotide
tgctaagacgttgaactgccttattttttg

SEQ ID NO: 223052 - DNA, 30 bp, Artificial Sequence
  Synthetic oligonucleotide
gcaagcgttgggcgttagaccgcttttttg

SEQ ID NO: 223053 - DNA, 30 bp, Artificial Sequence
  Synthetic oligonucleotide
catcattggctggacagcgtattgaaaaat

SEQ ID NO: 223054 - DNA, 30 bp, Artificial Sequence
  Synthetic oligonucleotide
ctattgccggggaggagctgtaataaaaat

SEQ ID NO: 223055 - DNA, 30 bp, Artificial Sequence
  Synthetic oligonucleotide
tagatccagctccatcgagctcataaaaat

SEQ ID NO: 223056 - DNA, 30 bp, Artificial Sequence
  Synthetic oligonucleotide
cgttcaattatctcgttaagggctaaaaat

SEQ ID NO: 223057 - DNA, 30 bp, Artificial Sequence
  Synthetic oligonucleotide
agcaagtagcatatgcgcctccagcaaaat

SEQ ID NO: 223058 - DNA, 30 bp, Artificial Sequence
  Synthetic oligonucleotide
cctaggtaaagggcccacggggcgcaaaat

SEQ ID NO: 223059 - DNA, 30 bp, Artificial Sequence
  Synthetic oligonucleotide
gtccgccaagagatataggctaatcaaaat

SEQ ID NO: 223060 - DNA, 30 bp, Artificial Sequence
  Synthetic oligonucleotide
catcgcgtcgccattgggaaccgtcaaaat

SEQ ID NO: 223061 - DNA, 30 bp, Artificial Sequence
  Synthetic oligonucleotide
agaaaggatgcgggaaattggaacgaaaat

SEQ ID NO: 223062 - DNA, 30 bp, Artificial Sequence
  Synthetic oligonucleotide
agttacgaatcatgactactttaggaaaat

SEQ ID NO: 223063 - DNA, 30 bp, Artificial Sequence
  Synthetic oligonucleotide
acgggtctttagttctccatgggggaaaat

SEQ ID NO: 223064 - DNA, 30 bp, Artificial Sequence
  Synthetic oligonucleotide
tgtctcgaggatgcacttggtcatgaaaat

SEQ ID NO: 223065 - DNA, 30 bp, Artificial Sequence
  Synthetic oligonucleotide
ggaggcgaatggtcggttttctactaaaat

SEQ ID NO: 223066 - DNA, 30 bp, Artificial Sequence
  Synthetic oligonucleotide
tcatagcgaaagcttatatagagctaaaat

SEQ ID NO: 223067 - DNA, 30 bp, Artificial Sequence
  Synthetic oligonucleotide
gtggcaacacaccgaagttgaagttaaaat

SEQ ID NO: 223068 - DNA, 30 bp, Artificial Sequence
  Synthetic oligonucleotide
atatgataacgaactttaccataaacaaat

SEQ ID NO: 223069 - DNA, 30 bp, Artificial Sequence
  Synthetic oligonucleotide
agctatggatcatgggagagtctaacaaat

SEQ ID NO: 223070 - DNA, 30 bp, Artificial Sequence
  Synthetic oligonucleotide
tcgaggatttgctggagtctctacccaaat

SEQ ID NO: 223071 - DNA, 30 bp, Artificial Sequence
  Synthetic oligonucleotide
cgtttctcataatcaggattctccccaaat

SEQ ID NO: 223072 - DNA, 30 bp, Artificial Sequence
  Synthetic oligonucleotide
taaccatcctgggtaggctataggccaaat

SEQ ID NO: 223073 - DNA, 30 bp, Artificial Sequence
  Synthetic oligonucleotide
cgcccaattttagcaatcttcagagcaaat

SEQ ID NO: 223074 - DNA, 30 bp, Artificial Sequence
  Synthetic oligonucleotide
tatcggagtggatggtcactgtccgcaaat

SEQ ID NO: 223075 - DNA, 30 bp, Artificial Sequence
  Synthetic oligonucleotide
agggtaatggcaatggctggcaaggcaaat

SEQ ID NO: 223076 - DNA, 30 bp, Artificial Sequence
  Synthetic oligonucleotide
tagaactcataaacctaattactggcaaat

SEQ ID NO: 223077 - DNA, 30 bp, Artificial Sequence
  Synthetic oligonucleotide
ttctagtgaggatctcaagaccaatcaaat

SEQ ID NO: 223078 - DNA, 30 bp, Artificial Sequence
  Synthetic oligonucleotide
cggcaactgtactctgaatgcttatcaaat

SEQ ID NO: 223079 - DNA, 30 bp, Artificial Sequence
  Synthetic oligonucleotide
gcagaagtttaccgactacacacctcaaat

SEQ ID NO: 223080 - DNA, 30 bp, Artificial Sequence
  Synthetic oligonucleotide
ggttcgtgtaatttgggtacctattcaaat

SEQ ID NO: 223081 - DNA, 30 bp, Artificial Sequence
  Synthetic oligonucleotide
acccaagcggctcggtggaactgttcaaat

SEQ ID NO: 223082 - DNA, 30 bp, Artificial Sequence
  Synthetic oligonucleotide
tcgctcccgacaaatgcaattatttcaaat

SEQ ID NO: 223083 - DNA, 30 bp, Artificial Sequence
  Synthetic oligonucleotide
atggaagtcactcgtactacgaaaagaaat

SEQ ID NO: 223084 - DNA, 30 bp, Artificial Sequence
  Synthetic oligonucleotide
ccggtgagaaacgcgtgacgttaaagaaat

SEQ ID NO: 223085 - DNA, 30 bp, Artificial Sequence
  Synthetic oligonucleotide
gtagggcgcgttcccaatataccaagaaat

SEQ ID NO: 223086 - DNA, 30 bp, Artificial Sequence
  Synthetic oligonucleotide
gcggtgtggtattgatgctggccaagaaat

SEQ ID NO: 223087 - DNA, 30 bp, Artificial Sequence
  Synthetic oligonucleotide
tgacagtacttcgatactttatgaagaaat

SEQ ID NO: 223088 - DNA, 30 bp, Artificial Sequence
  Synthetic oligonucleotide
ctcgtattgccggtgctttgacagagaaat

SEQ ID NO: 223089 - DNA, 30 bp, Artificial Sequence
  Synthetic oligonucleotide
taccgaagaacggtccattagaggagaaat

SEQ ID NO: 223090 - DNA, 30 bp, Artificial Sequence
  Synthetic oligonucleotide
ttatagagattaaaggaaagtaggagaaat

SEQ ID NO: 223091 - DNA, 30 bp, Artificial Sequence
  Synthetic oligonucleotide
gaacggagtcactcttcaatcagtagaaat

SEQ ID NO: 223092 - DNA, 30 bp, Artificial Sequence
  Synthetic oligonucleotide
gcctgaaagggtcttggtagtattagaaat

SEQ ID NO: 223093 - DNA, 30 bp, Artificial Sequence
  Synthetic oligonucleotide
agctctgccagcaggcgggggctacgaaat

SEQ ID NO: 223094 - DNA, 30 bp, Artificial Sequence
  Synthetic oligonucleotide
atgagtagcttaatgtcgttagtccgaaat

SEQ ID NO: 223095 - DNA, 30 bp, Artificial Sequence
  Synthetic oligonucleotide
tcgccgatagaggacacgtcgactcgaaat

SEQ ID NO: 223096 - DNA, 30 bp, Artificial Sequence
  Synthetic oligonucleotide
tgaatggtgcatttatgtacagtcggaaat

SEQ ID NO: 223097 - DNA, 30 bp, Artificial Sequence
  Synthetic oligonucleotide
aagcgcctttcgggtactgatgagggaaat

SEQ ID NO: 223098 - DNA, 30 bp, Artificial Sequence
  Synthetic oligonucleotide
tgtagagccatgcttgggcttggtggaaat

SEQ ID NO: 223099 - DNA, 30 bp, Artificial Sequence
  Synthetic oligonucleotide
gatcggcacctatgaggcgcctcatgaaat

SEQ ID NO: 223100 - DNA, 30 bp, Artificial Sequence
  Synthetic oligonucleotide
aagcagccaatttagacgtgtgtatgaaat

SEQ ID NO: 223101 - DNA, 30 bp, Artificial Sequence
  Synthetic oligonucleotide
cgactagataagtgtcctgtggactgaaat

SEQ ID NO: 223102 - DNA, 30 bp, Artificial Sequence
  Synthetic oligonucleotide
cccaccccatcacgagtaacctcctgaaat

SEQ ID NO: 223103 - DNA, 30 bp, Artificial Sequence
  Synthetic oligonucleotide
atcgggtcatggggcttgggtagttgaaat

SEQ ID NO: 223104 - DNA, 30 bp, Artificial Sequence
  Synthetic oligonucleotide
acggcgaatcgattttttggttgttgaaat

SEQ ID NO: 223105 - DNA, 30 bp, Artificial Sequence
  Synthetic oligonucleotide
caatgttgagggtcgctgcatccaataaat

SEQ ID NO: 223106 - DNA, 30 bp, Artificial Sequence
  Synthetic oligonucleotide
ggccggtacgcgcagaatgacgtaataaat

SEQ ID NO: 223107 - DNA, 30 bp, Artificial Sequence
  Synthetic oligonucleotide
gcggtccacttgcgcttggaccatataaat

SEQ ID NO: 223108 - DNA, 30 bp, Artificial Sequence
  Synthetic oligonucleotide
atcacaagttgcgcgacgagcgaactaaat

SEQ ID NO: 223109 - DNA, 30 bp, Artificial Sequence
  Synthetic oligonucleotide
gagatcggccttcggcaggactaactaaat

SEQ ID NO: 223110 - DNA, 30 bp, Artificial Sequence
  Synthetic oligonucleotide
gtgagcaccgcgaacaaggactcactaaat

SEQ ID NO: 223111 - DNA, 30 bp, Artificial Sequence
  Synthetic oligonucleotide
gccaatcgcggataagaagatcgcctaaat

SEQ ID NO: 223112 - DNA, 30 bp, Artificial Sequence
  Synthetic oligonucleotide
ggaaccagaggcatggcgttaaacgtaaat

SEQ ID NO: 223113 - DNA, 30 bp, Artificial Sequence
  Synthetic oligonucleotide
accccgcttacaaacggtcaatccgtaaat

SEQ ID NO: 223114 - DNA, 30 bp, Artificial Sequence
  Synthetic oligonucleotide
acaaaatccaaattcggctattccgtaaat

SEQ ID NO: 223115 - DNA, 30 bp, Artificial Sequence
  Synthetic oligonucleotide
ctgagtaaatgaaacgtcaggtcggtaaat

SEQ ID NO: 223116 - DNA, 30 bp, Artificial Sequence
  Synthetic oligonucleotide
gacggtcataccaaattatacagggtaaat

SEQ ID NO: 223117 - DNA, 30 bp, Artificial Sequence
  Synthetic oligonucleotide
ggaggaaaggtccatgcagctaatgtaaat

SEQ ID NO: 223118 - DNA, 30 bp, Artificial Sequence
  Synthetic oligonucleotide
taaagctgagagacaccagccgttgtaaat

SEQ ID NO: 223119 - DNA, 30 bp, Artificial Sequence
  Synthetic oligonucleotide
ctcggaattcggggggctatcgccttaaat

SEQ ID NO: 223120 - DNA, 30 bp, Artificial Sequence
  Synthetic oligonucleotide
gataccagttgtattggtctggccttaaat

SEQ ID NO: 223121 - DNA, 30 bp, Artificial Sequence
  Synthetic oligonucleotide
ggctggagaatggttgagttggccttaaat

SEQ ID NO: 223122 - DNA, 30 bp, Artificial Sequence
  Synthetic oligonucleotide
tctcgccggagcatctcgttctccttaaat

SEQ ID NO: 223123 - DNA, 30 bp, Artificial Sequence
  Synthetic oligonucleotide
gcgcctagactcacgcgtttcccgttaaat

SEQ ID NO: 223124 - DNA, 30 bp, Artificial Sequence
  Synthetic oligonucleotide
gacatccaatgttagggtaaaggtttaaat

SEQ ID NO: 223125 - DNA, 30 bp, Artificial Sequence
  Synthetic oligonucleotide
tgggtcacgcccgtgacggtgcccaacaat

SEQ ID NO: 223126 - DNA, 30 bp, Artificial Sequence
  Synthetic oligonucleotide
atctaagccagccaggtctcattcaacaat

SEQ ID NO: 223127 - DNA, 30 bp, Artificial Sequence
  Synthetic oligonucleotide
cacctcgatacagtgaaggaacataacaat

SEQ ID NO: 223128 - DNA, 30 bp, Artificial Sequence
  Synthetic oligonucleotide
aacgacgctcctagtcggtactctaacaat

SEQ ID NO: 223129 - DNA, 30 bp, Artificial Sequence
  Synthetic oligonucleotide
tcggcactatcggtggcaaggagacacaat

SEQ ID NO: 223130 - DNA, 30 bp, Artificial Sequence
  Synthetic oligonucleotide
cctgtggactgacatctgcatagacacaat

SEQ ID NO: 223131 - DNA, 30 bp, Artificial Sequence
  Synthetic oligonucleotide
tgcgcgcatccatgcttcaccacccacaat

SEQ ID NO: 223132 - DNA, 30 bp, Artificial Sequence
  Synthetic oligonucleotide
cggatgtgtcgctagggacgccgccacaat

SEQ ID NO: 223133 - DNA, 30 bp, Artificial Sequence
  Synthetic oligonucleotide
ttgtggaatgacctatggactgagcacaat

SEQ ID NO: 223134 - DNA, 30 bp, Artificial Sequence
  Synthetic oligonucleotide
tgcctcgtcgggggtaactattcagacaat

SEQ ID NO: 223135 - DNA, 30 bp, Artificial Sequence
  Synthetic oligonucleotide
ggcaaggggttcacactccctctagacaat

SEQ ID NO: 223136 - DNA, 30 bp, Artificial Sequence
  Synthetic oligonucleotide
gcaccctcacgaagcggtttataggacaat

SEQ ID NO: 223137 - DNA, 30 bp, Artificial Sequence
  Synthetic oligonucleotide
cggacatgaactgaactgggttctgacaat

SEQ ID NO: 223138 - DNA, 30 bp, Artificial Sequence
  Synthetic oligonucleotide
cttgagtcgttcgagaagttgaaatacaat

SEQ ID NO: 223139 - DNA, 30 bp, Artificial Sequence
  Synthetic oligonucleotide
cacacagactaaatatgcgccgactacaat

SEQ ID NO: 223140 - DNA, 30 bp, Artificial Sequence
  Synthetic oligonucleotide
ggttccatgctactacctctggactacaat

SEQ ID NO: 223141 - DNA, 30 bp, Artificial Sequence
  Synthetic oligonucleotide
atcatggtaagggggatcagtgagtacaat

SEQ ID NO: 223142 - DNA, 30 bp, Artificial Sequence
  Synthetic oligonucleotide
gccagatctggtcaggtagaagtgtacaat

SEQ ID NO: 223143 - DNA, 30 bp, Artificial Sequence
  Synthetic oligonucleotide
gatcgaaggtatcctttggcgacttacaat

SEQ ID NO: 223144 - DNA, 30 bp, Artificial Sequence
  Synthetic oligonucleotide
atacaacaaatggcacgatactttaccaat

SEQ ID NO: 223145 - DNA, 30 bp, Artificial Sequence
  Synthetic oligonucleotide
ttgcggctattagaccgaaacccacccaat

SEQ ID NO: 223146 - DNA, 30 bp, Artificial Sequence
  Synthetic oligonucleotide
gttgatctccgaaacaacagttcacccaat

SEQ ID NO: 223147 - DNA, 30 bp, Artificial Sequence
  Synthetic oligonucleotide
tcttcgcggttcggcacaattaaccccaat

SEQ ID NO: 223148 - DNA, 30 bp, Artificial Sequence
  Synthetic oligonucleotide
caggctccaaacgatggtttaagccccaat

SEQ ID NO: 223149 - DNA, 30 bp, Artificial Sequence
  Synthetic oligonucleotide
acggtgatcccatattggtgctgccccaat

SEQ ID NO: 223150 - DNA, 30 bp, Artificial Sequence
  Synthetic oligonucleotide
taagaaacggtgggcgggggatcgcccaat

SEQ ID NO: 223151 - DNA, 31 bp, Artificial Sequence
  Synthetic oligonucleotide
tcaggccgttattagggatgagggggccaat

SEQ ID NO: 223152 - DNA, 30 bp, Artificial Sequence
  Synthetic oligonucleotide
taggggatatgaagtcgcattatggccaat

SEQ ID NO: 223153 - DNA, 30 bp, Artificial Sequence
  Synthetic oligonucleotide
ttgtgtcggtggccataccctagctccaat

SEQ ID NO: 223154 - DNA, 30 bp, Artificial Sequence
  Synthetic oligonucleotide
catggttgctcggggtataacgcttccaat

SEQ ID NO: 223155 - DNA, 30 bp, Artificial Sequence
  Synthetic oligonucleotide
atgccttggtagacagttaacaacagcaat

SEQ ID NO: 223156 - DNA, 30 bp, Artificial Sequence
  Synthetic oligonucleotide
tccgttgggtttagcagtgggtcgagcaat

SEQ ID NO: 223157 - DNA, 30 bp, Artificial Sequence
  Synthetic oligonucleotide
acgtgacccccgtggtcaactatgagcaat

SEQ ID NO: 223158 - DNA, 30 bp, Artificial Sequence
  Synthetic oligonucleotide
aagttctatgcctgtccgagaaatagcaat

SEQ ID NO: 223159 - DNA, 30 bp, Artificial Sequence
  Synthetic oligonucleotide
acaccgcgggattgacaaggtgttagcaat

SEQ ID NO: 223160 - DNA, 30 bp, Artificial Sequence
  Synthetic oligonucleotide
ttaccagaaatgggggggaaaaaacgcaat

SEQ ID NO: 223161 - DNA, 30 bp, Artificial Sequence
  Synthetic oligonucleotide
catggggggcaagtgataccgccgcgcaat

SEQ ID NO: 223162 - DNA, 30 bp, Artificial Sequence
  Synthetic oligonucleotide
aggaccgtcgactgttgacatgttcgcaat

SEQ ID NO: 223163 - DNA, 30 bp, Artificial Sequence
  Synthetic oligonucleotide
agaaaagtgccgctcacagagaaaggcaat

SEQ ID NO: 223164 - DNA, 30 bp, Artificial Sequence
  Synthetic oligonucleotide
tagtaacaattcgactgacagcaaggcaat

SEQ ID NO: 223165 - DNA, 30 bp, Artificial Sequence
  Synthetic oligonucleotide
cgatagctagttaaccaggacacaggcaat

SEQ ID NO: 223166 - DNA, 30 bp, Artificial Sequence
  Synthetic oligonucleotide
gttgacttatagttcatggtgtagggcaat

SEQ ID NO: 223167 - DNA, 30 bp, Artificial Sequence
  Synthetic oligonucleotide
acaggatgagtcctcagccttacgggcaat

SEQ ID NO: 223168 - DNA, 30 bp, Artificial Sequence
  Synthetic oligonucleotide
agattgtccagagaaaaaggtatgggcaat

SEQ ID NO: 223169 - DNA, 30 bp, Artificial Sequence
  Synthetic oligonucleotide
gagagggtgactaaagccgcgacgtgcaat

SEQ ID NO: 223170 - DNA, 30 bp, Artificial Sequence
  Synthetic oligonucleotide
attaagagggaaaaagatcaggacatcaat

SEQ ID NO: 223171 - DNA, 30 bp, Artificial Sequence
  Synthetic oligonucleotide
ggctgtcatccgacattcatcggcatcaat

SEQ ID NO: 223172 - DNA, 30 bp, Artificial Sequence
  Synthetic oligonucleotide
cgatgtaaagtcgaacagggctatatcaat

SEQ ID NO: 223173 - DNA, 30 bp, Artificial Sequence
  Synthetic oligonucleotide
ataggcgttgatctattctaattactcaat

SEQ ID NO: 223174 - DNA, 30 bp, Artificial Sequence
  Synthetic oligonucleotide
tccgatccgtagtcttgagtggacctcaat

SEQ ID NO: 223175 - DNA, 29 bp, Artificial Sequence
  Synthetic oligonucleotide
ttgcaaaatatagtctgagtacgctcaat

SEQ ID NO: 223176 - DNA, 30 bp, Artificial Sequence
  Synthetic oligonucleotide
gactcaagtccaaccagaaatccgctcaat

SEQ ID NO: 223177 - DNA, 30 bp, Artificial Sequence
  Synthetic oligonucleotide
ccacggtgcgcgatgcgtgaaatgctcaat

SEQ ID NO: 223178 - DNA, 30 bp, Artificial Sequence
  Synthetic oligonucleotide
acgctcacatgtgcgcgacgacgagtcaat

SEQ ID NO: 223179 - DNA, 30 bp, Artificial Sequence
  Synthetic oligonucleotide
ggtagatcacaggtgtgtagtcaggtcaat

SEQ ID NO: 223180 - DNA, 30 bp, Artificial Sequence
  Synthetic oligonucleotide
tacttgcttatagagagtgacagggtcaat

SEQ ID NO: 223181 - DNA, 30 bp, Artificial Sequence
  Synthetic oligonucleotide
cttaatggattaaggccctggcgggtcaat

SEQ ID NO: 223182 - DNA, 30 bp, Artificial Sequence
  Synthetic oligonucleotide
tttatggaggatagggtgattcgggtcaat

SEQ ID NO: 223183 - DNA, 30 bp, Artificial Sequence
  Synthetic oligonucleotide
ggttgtgatttcaaactatgtatggtcaat

SEQ ID NO: 223184 - DNA, 30 bp, Artificial Sequence
  Synthetic oligonucleotide
tgggacagcgaatggcattagggtgtcaat

SEQ ID NO: 223185 - DNA, 30 bp, Artificial Sequence
  Synthetic oligonucleotide
ctcatcgggtgagacgcgggtaaattcaat

SEQ ID NO: 223186 - DNA, 30 bp, Artificial Sequence
  Synthetic oligonucleotide
gggggataaggcacatacttcacattcaat

SEQ ID NO: 223187 - DNA, 30 bp, Artificial Sequence
  Synthetic oligonucleotide
taaagatgtgaaaattgctataggttcaat

SEQ ID NO: 223188 - DNA, 30 bp, Artificial Sequence
  Synthetic oligonucleotide
ctccgggttaaagaaatctccctgttcaat

SEQ ID NO: 223189 - DNA, 30 bp, Artificial Sequence
  Synthetic oligonucleotide
tatcatgggctgcgcggtatacgtttcaat

SEQ ID NO: 223190 - DNA, 30 bp, Artificial Sequence
  Synthetic oligonucleotide
aagacacagtagaatgtccaccaaaagaat

SEQ ID NO: 223191 - DNA, 30 bp, Artificial Sequence
  Synthetic oligonucleotide
tgattaagcaaggctctcgacccaaagaat

SEQ ID NO: 223192 - DNA, 30 bp, Artificial Sequence
  Synthetic oligonucleotide
tctgcaagctaggtaagtttccacaagaat

SEQ ID NO: 223193 - DNA, 30 bp, Artificial Sequence
  Synthetic oligonucleotide
acactggtttgcagaggcaatcacaagaat

SEQ ID NO: 223194 - DNA, 30 bp, Artificial Sequence
  Synthetic oligonucleotide
ttaagatgccaagtggggacggacaagaat

SEQ ID NO: 223195 - DNA, 30 bp, Artificial Sequence
  Synthetic oligonucleotide
gatcgacccgccgaactactatcgaagaat

SEQ ID NO: 223196 - DNA, 30 bp, Artificial Sequence
  Synthetic oligonucleotide
gtgagatccattgtccttcactataagaat

SEQ ID NO: 223197 - DNA, 30 bp, Artificial Sequence
  Synthetic oligonucleotide
tggagtggtacgcatcacgttagtaagaat

SEQ ID NO: 223198 - DNA, 30 bp, Artificial Sequence
  Synthetic oligonucleotide
caaccgttattaagtatggagttacagaat

SEQ ID NO: 223199 - DNA, 30 bp, Artificial Sequence
  Synthetic oligonucleotide
tcatgtatgagggacggaccttaccagaat

SEQ ID NO: 223200 - DNA, 30 bp, Artificial Sequence
  Synthetic oligonucleotide
aaccttggaccaatcaaaaatacccagaat

SEQ ID NO: 223201 - DNA, 30 bp, Artificial Sequence
  Synthetic oligonucleotide
atagataaatattggacgagattccagaat

SEQ ID NO: 223202 - DNA, 30 bp, Artificial Sequence
  Synthetic oligonucleotide
ggatgcgccggtttaactatacgagagaat

SEQ ID NO: 223203 - DNA, 30 bp, Artificial Sequence
  Synthetic oligonucleotide
aagccccgatgaccaggccggtgagagaat

SEQ ID NO: 223204 - DNA, 30 bp, Artificial Sequence
  Synthetic oligonucleotide
gttgaacgttaagggaggacttgagagaat

SEQ ID NO: 223205 - DNA, 30 bp, Artificial Sequence
  Synthetic oligonucleotide
aagtgtgcttggacgggtatccccgagaat

SEQ ID NO: 223206 - DNA, 30 bp, Artificial Sequence
  Synthetic oligonucleotide
attgtgcataataggaaaatgggcgagaat

SEQ ID NO: 223207 - DNA, 30 bp, Artificial Sequence
  Synthetic oligonucleotide
ctactttagttatggtgaaccaaatagaat

SEQ ID NO: 223208 - DNA, 30 bp, Artificial Sequence
  Synthetic oligonucleotide
cccccaaatggaggattttaagcatagaat

SEQ ID NO: 223209 - DNA, 30 bp, Artificial Sequence
  Synthetic oligonucleotide
gcacatggaaaccccaatatactatagaat

SEQ ID NO: 223210 - DNA, 30 bp, Artificial Sequence
  Synthetic oligonucleotide
cacgggggaatgcaccacccaaggtagaat

SEQ ID NO: 223211 - DNA, 30 bp, Artificial Sequence
  Synthetic oligonucleotide
tcaagtacccaaaaggtacagaggtagaat

SEQ ID NO: 223212 - DNA, 30 bp, Artificial Sequence
  Synthetic oligonucleotide
taccccggaatcactagcgtgaaaacgaat

SEQ ID NO: 223213 - DNA, 30 bp, Artificial Sequence
  Synthetic oligonucleotide
ggtcggaccaccagagtcggctaaacgaat

SEQ ID NO: 223214 - DNA, 30 bp, Artificial Sequence
  Synthetic oligonucleotide
caccagccactcgtcccaaggaacacgaat

SEQ ID NO: 223215 - DNA, 30 bp, Artificial Sequence
  Synthetic oligonucleotide
gagcgggaacgaattgctaaactcacgaat

SEQ ID NO: 223216 - DNA, 30 bp, Artificial Sequence
  Synthetic oligonucleotide
aggggcttacgcggggttttgtcgacgaat

SEQ ID NO: 223217 - DNA, 30 bp, Artificial Sequence
  Synthetic oligonucleotide
gtaaccaaggctgctgcacgcgtgccgaat

SEQ ID NO: 223218 - DNA, 30 bp, Artificial Sequence
  Synthetic oligonucleotide
atgggtacagagtcctcgaaccctccgaat

SEQ ID NO: 223219 - DNA, 30 bp, Artificial Sequence
  Synthetic oligonucleotide
cggggtataaaaccgcatgtggaagcgaat

SEQ ID NO: 223220 - DNA, 30 bp, Artificial Sequence
  Synthetic oligonucleotide
taacttggaataacgtttacacacgcgaat

SEQ ID NO: 223221 - DNA, 30 bp, Artificial Sequence
  Synthetic oligonucleotide
catcggcaaatgtaatttacctccgcgaat

SEQ ID NO: 223222 - DNA, 30 bp, Artificial Sequence
  Synthetic oligonucleotide
gcgcgacaaaagaaggccgcaacggcgaat

SEQ ID NO: 223223 - DNA, 30 bp, Artificial Sequence
  Synthetic oligonucleotide
tggtaggtgagcaggttcaggtctgcgaat

SEQ ID NO: 223224 - DNA, 30 bp, Artificial Sequence
  Synthetic oligonucleotide
cagtcaaacgtttgaatctaaaaatcgaat

SEQ ID NO: 223225 - DNA, 30 bp, Artificial Sequence
  Synthetic oligonucleotide
agccaatggctttactcggattagtcgaat

SEQ ID NO: 223226 - DNA, 30 bp, Artificial Sequence
  Synthetic oligonucleotide
tgctagaaggcgggaatatgctcgtcgaat

SEQ ID NO: 223227 - DNA, 30 bp, Artificial Sequence
  Synthetic oligonucleotide
ccgaccattccaagtaagtctgtgtcgaat

SEQ ID NO: 223228 - DNA, 30 bp, Artificial Sequence
  Synthetic oligonucleotide
agggatttcgaaagaaagtgtctaaggaat

SEQ ID NO: 223229 - DNA, 30 bp, Artificial Sequence
  Synthetic oligonucleotide
ctacgccgatgaggaattggcgtcaggaat

SEQ ID NO: 223230 - DNA, 30 bp, Artificial Sequence
  Synthetic oligonucleotide
gtagtgggagtcctaaccggtacgaggaat

SEQ ID NO: 223231 - DNA, 30 bp, Artificial Sequence
  Synthetic oligonucleotide
ctttatcgacaactgaacgtaatgaggaat

SEQ ID NO: 223232 - DNA, 30 bp, Artificial Sequence
  Synthetic oligonucleotide
gacgcacttcgatttgcttcggtacggaat

SEQ ID NO: 223233 - DNA, 30 bp, Artificial Sequence
  Synthetic oligonucleotide
ctatgtaaccataccatcccttcccggaat

SEQ ID NO: 223234 - DNA, 30 bp, Artificial Sequence
  Synthetic oligonucleotide
gcctaaggggaggtaaacttcgagcggaat

SEQ ID NO: 223235 - DNA, 30 bp, Artificial Sequence
  Synthetic oligonucleotide
tccggagagggtgtaagccctatgcggaat

SEQ ID NO: 223236 - DNA, 30 bp, Artificial Sequence
  Synthetic oligonucleotide
tggtgcggcaaggacactatagaagggaat

SEQ ID NO: 223237 - DNA, 30 bp, Artificial Sequence
  Synthetic oligonucleotide
gccttagggccaatggccggcttcgggaat

SEQ ID NO: 223238 - DNA, 30 bp, Artificial Sequence
  Synthetic oligonucleotide
aggtatcccggaaaaattcgggaggggaat

SEQ ID NO: 223239 - DNA, 30 bp, Artificial Sequence
  Synthetic oligonucleotide
aaaggaatcctggatatgtaaattgggaat

SEQ ID NO: 223240 - DNA, 30 bp, Artificial Sequence
  Synthetic oligonucleotide
cgcggtgaggcgggagctttgcttgggaat

SEQ ID NO: 223241 - DNA, 30 bp, Artificial Sequence
  Synthetic oligonucleotide
aatataaggccctactcgccgaaatggaat

SEQ ID NO: 223242 - DNA, 30 bp, Artificial Sequence
  Synthetic oligonucleotide
tctcatacccgaccatcccgaacatggaat

SEQ ID NO: 223243 - DNA, 30 bp, Artificial Sequence
  Synthetic oligonucleotide
ttgaccgctacacttcaagccatatggaat

SEQ ID NO: 223244 - DNA, 30 bp, Artificial Sequence
  Synthetic oligonucleotide
tgcgcctgcgttcttccgatagcctggaat

SEQ ID NO: 223245 - DNA, 30 bp, Artificial Sequence
  Synthetic oligonucleotide
gttaggtgtatacgtaagaaccgctggaat

SEQ ID NO: 223246 - DNA, 30 bp, Artificial Sequence
  Synthetic oligonucleotide
taagcacggcttactctgttctcgtggaat

SEQ ID NO: 223247 - DNA, 30 bp, Artificial Sequence
  Synthetic oligonucleotide
ggtggttaaggggtatgacatgtgtggaat

SEQ ID NO: 223248 - DNA, 30 bp, Artificial Sequence
  Synthetic oligonucleotide
tttcggtaatcttaaccggccaattggaat

SEQ ID NO: 223249 - DNA, 30 bp, Artificial Sequence
  Synthetic oligonucleotide
gttaggtcgatatgcacgaaaatttggaat

SEQ ID NO: 223250 - DNA, 30 bp, Artificial Sequence
  Synthetic oligonucleotide
ggggcacaataagtttatgttgccatgaat

SEQ ID NO: 223251 - DNA, 30 bp, Artificial Sequence
  Synthetic oligonucleotide
acgcgtgatcgtcccatcacgggcatgaat

SEQ ID NO: 223252 - DNA, 30 bp, Artificial Sequence
  Synthetic oligonucleotide
cggaaagtgaccagggtcattcagatgaat

SEQ ID NO: 223253 - DNA, 30 bp, Artificial Sequence
  Synthetic oligonucleotide
tgtggatatgaatagaaagtgtatatgaat

SEQ ID NO: 223254 - DNA, 30 bp, Artificial Sequence
  Synthetic oligonucleotide
ccaacctcggaacgataaaaaccactgaat

SEQ ID NO: 223255 - DNA, 30 bp, Artificial Sequence
  Synthetic oligonucleotide
ataggaacttggccaaggtagaaagtgaat

SEQ ID NO: 223256 - DNA, 31 bp, Artificial Sequence
  Synthetic oligonucleotide
agcctgtcaccgaaatcgttaaaaggtgaat

SEQ ID NO: 223257 - DNA, 30 bp, Artificial Sequence
  Synthetic oligonucleotide
aacacggacactggaaatagacaattgaat

SEQ ID NO: 223258 - DNA, 30 bp, Artificial Sequence
  Synthetic oligonucleotide
gactcgacacgacacggtccaccattgaat

SEQ ID NO: 223259 - DNA, 30 bp, Artificial Sequence
  Synthetic oligonucleotide
gcgagaataactcgcacttggccattgaat

SEQ ID NO: 223260 - DNA, 30 bp, Artificial Sequence
  Synthetic oligonucleotide
aaacagtaggtgacggatatcaacttgaat

SEQ ID NO: 223261 - DNA, 30 bp, Artificial Sequence
  Synthetic oligonucleotide
cggtataatttgtagtggccagtcttgaat

SEQ ID NO: 223262 - DNA, 30 bp, Artificial Sequence
  Synthetic oligonucleotide
agaatggatcatacgacagccaagttgaat

SEQ ID NO: 223263 - DNA, 30 bp, Artificial Sequence
  Synthetic oligonucleotide
ggagactgcggtattctacctcctttgaat

SEQ ID NO: 223264 - DNA, 30 bp, Artificial Sequence
  Synthetic oligonucleotide
agggcaagatccaatccgcctccaaataat

SEQ ID NO: 223265 - DNA, 30 bp, Artificial Sequence
  Synthetic oligonucleotide
catgcaacagagggcgccgtgataaataat

SEQ ID NO: 223266 - DNA, 30 bp, Artificial Sequence
  Synthetic oligonucleotide
gtgctagaggaaactgcggacctaaataat

SEQ ID NO: 223267 - DNA, 30 bp, Artificial Sequence
  Synthetic oligonucleotide
atcgacacaggcggtggatttaacaataat

SEQ ID NO: 223268 - DNA, 30 bp, Artificial Sequence
  Synthetic oligonucleotide
gatcgtagagctcgtgttagggacaataat

SEQ ID NO: 223269 - DNA, 30 bp, Artificial Sequence
  Synthetic oligonucleotide
gttgaagtgatgcgtctacatactaataat

SEQ ID NO: 223270 - DNA, 30 bp, Artificial Sequence
  Synthetic oligonucleotide
gtcggagcatgagtcggagtcgctaataat

SEQ ID NO: 223271 - DNA, 30 bp, Artificial Sequence
  Synthetic oligonucleotide
tacggtgagctaagatgttccagtaataat

SEQ ID NO: 223272 - DNA, 30 bp, Artificial Sequence
  Synthetic oligonucleotide
ggcccactcaccggcagtaacggtaataat

SEQ ID NO: 223273 - DNA, 30 bp, Artificial Sequence
  Synthetic oligonucleotide
ttgtgctgtagagaatgtagggcgcataat

SEQ ID NO: 223274 - DNA, 30 bp, Artificial Sequence
  Synthetic oligonucleotide
gtgaaaattctccctaaggttaggcataat

SEQ ID NO: 223275 - DNA, 30 bp, Artificial Sequence
  Synthetic oligonucleotide
aaactagccgcggacctcaaagtgcataat

SEQ ID NO: 223276 - DNA, 30 bp, Artificial Sequence
  Synthetic oligonucleotide
tttacggtcttgaaaggtgacagtcataat

SEQ ID NO: 223277 - DNA, 30 bp, Artificial Sequence
  Synthetic oligonucleotide
gtaggcaggttaaatcatgtgcacgataat

SEQ ID NO: 223278 - DNA, 30 bp, Artificial Sequence
  Synthetic oligonucleotide
ccagctccgactatgccctcacccgataat

SEQ ID NO: 223279 - DNA, 30 bp, Artificial Sequence
  Synthetic oligonucleotide
cttcaacaagcatgtcatcgaatcgataat

SEQ ID NO: 223280 - DNA, 30 bp, Artificial Sequence
  Synthetic oligonucleotide
gaggtatacaaacaatgggttccggataat

SEQ ID NO: 223281 - DNA, 30 bp, Artificial Sequence
  Synthetic oligonucleotide
ttatgtcaagtgcgtcaggtgtgggataat

SEQ ID NO: 223282 - DNA, 30 bp, Artificial Sequence
  Synthetic oligonucleotide
ggtcaacgctagactaggtcataatataat

SEQ ID NO: 223283 - DNA, 30 bp, Artificial Sequence
  Synthetic oligonucleotide
ttaacgttccaagaagcagtggtatataat

SEQ ID NO: 223284 - DNA, 30 bp, Artificial Sequence
  Synthetic oligonucleotide
tgtacagtctcgcaaaccgtgaactataat

SEQ ID NO: 223285 - DNA, 30 bp, Artificial Sequence
  Synthetic oligonucleotide
gacaatgatggattataaacccccactaat

SEQ ID NO: 223286 - DNA, 30 bp, Artificial Sequence
  Synthetic oligonucleotide
gcggatcggaaaagtttcagaagccctaat

SEQ ID NO: 223287 - DNA, 30 bp, Artificial Sequence
  Synthetic oligonucleotide
ctattcatacttaaccgtattgagcctaat

SEQ ID NO: 223288 - DNA, 30 bp, Artificial Sequence
  Synthetic oligonucleotide
aagaagggaacgctcgggtcctaagctaat

SEQ ID NO: 223289 - DNA, 30 bp, Artificial Sequence
  Synthetic oligonucleotide
agcactttcggccgtcattcgcgggctaat

SEQ ID NO: 223290 - DNA, 30 bp, Artificial Sequence
  Synthetic oligonucleotide
gggtggacataaccggtttcagatgctaat

SEQ ID NO: 223291 - DNA, 30 bp, Artificial Sequence
  Synthetic oligonucleotide
tgcccggcatgcgtcaccatgtagtctaat

SEQ ID NO: 223292 - DNA, 30 bp, Artificial Sequence
  Synthetic oligonucleotide
ctcgcgcacagtcattcgtgttattctaat

SEQ ID NO: 223293 - DNA, 30 bp, Artificial Sequence
  Synthetic oligonucleotide
aatcccgggaacgtaatcccaagcagtaat

SEQ ID NO: 223294 - DNA, 30 bp, Artificial Sequence
  Synthetic oligonucleotide
caaagtgcgcacgccgtcgacacgagtaat

SEQ ID NO: 223295 - DNA, 30 bp, Artificial Sequence
  Synthetic oligonucleotide
tcggtttcaaggcactcaaacatgagtaat

SEQ ID NO: 223296 - DNA, 30 bp, Artificial Sequence
  Synthetic oligonucleotide
ggtactcgtcacaagacccattgtagtaat

SEQ ID NO: 223297 - DNA, 30 bp, Artificial Sequence
  Synthetic oligonucleotide
gaacttcgataggcattaagtcaacgtaat

SEQ ID NO: 223298 - DNA, 30 bp, Artificial Sequence
  Synthetic oligonucleotide
agattgtccgagagctaacaaatacgtaat

SEQ ID NO: 223299 - DNA, 30 bp, Artificial Sequence
  Synthetic oligonucleotide
ctctggtattggcagacgaccgagcgtaat

SEQ ID NO: 223300 - DNA, 30 bp, Artificial Sequence
  Synthetic oligonucleotide
ccagccatgctaagcttatcgtatcgtaat

SEQ ID NO: 223301 - DNA, 30 bp, Artificial Sequence
  Synthetic oligonucleotide
gcaggatgggtctccctcagaactcgtaat

SEQ ID NO: 223302 - DNA, 30 bp, Artificial Sequence
  Synthetic oligonucleotide
gacagttcattagatgtgcttcgtcgtaat

SEQ ID NO: 223303 - DNA, 30 bp, Artificial Sequence
  Synthetic oligonucleotide
tgccacgtccgaggctggagcattcgtaat

SEQ ID NO: 223304 - DNA, 30 bp, Artificial Sequence
  Synthetic oligonucleotide
agctagtgggcgccaaggtcatgcggtaat

SEQ ID NO: 223305 - DNA, 30 bp, Artificial Sequence
  Synthetic oligonucleotide
agaatggggatatcgtgttagtgcggtaat

SEQ ID NO: 223306 - DNA, 30 bp, Artificial Sequence
  Synthetic oligonucleotide
aacgggcttccgcctagccttttcggtaat

SEQ ID NO: 223307 - DNA, 30 bp, Artificial Sequence
  Synthetic oligonucleotide
ctggttagatattggtgaaaaactggtaat

SEQ ID NO: 223308 - DNA, 30 bp, Artificial Sequence
  Synthetic oligonucleotide
atgggatcgccaggtaatgtggcgtgtaat

SEQ ID NO: 223309 - DNA, 30 bp, Artificial Sequence
  Synthetic oligonucleotide
gcccttcaagacaacgagatgcggtgtaat

SEQ ID NO: 223310 - DNA, 30 bp, Artificial Sequence
  Synthetic oligonucleotide
cagttcatgttcattgaaagagggtgtaat

SEQ ID NO: 223311 - DNA, 30 bp, Artificial Sequence
  Synthetic oligonucleotide
gcatatctgcagagtatcatgatgtgtaat

SEQ ID NO: 223312 - DNA, 30 bp, Artificial Sequence
  Synthetic oligonucleotide
ggggttgaacccacaaacaagagttgtaat

SEQ ID NO: 223313 - DNA, 30 bp, Artificial Sequence
  Synthetic oligonucleotide
tcgattgaccgggtcattctaaaaattaat

SEQ ID NO: 223314 - DNA, 30 bp, Artificial Sequence
  Synthetic oligonucleotide
tctggttggtgagagttaagcataattaat

SEQ ID NO: 223315 - DNA, 30 bp, Artificial Sequence
  Synthetic oligonucleotide
ctagagaaacggaaagaggtattaattaat

SEQ ID NO: 223316 - DNA, 30 bp, Artificial Sequence
  Synthetic oligonucleotide
tggggcatagtaacaaatctagagattaat

SEQ ID NO: 223317 - DNA, 30 bp, Artificial Sequence
  Synthetic oligonucleotide
aatcattgagtggatcgatgtgggattaat

SEQ ID NO: 223318 - DNA, 30 bp, Artificial Sequence
  Synthetic oligonucleotide
cagtcgactaacaggtttaacattattaat

SEQ ID NO: 223319 - DNA, 30 bp, Artificial Sequence
  Synthetic oligonucleotide
gagatgcgacaacttcagtctacacttaat

SEQ ID NO: 223320 - DNA, 30 bp, Artificial Sequence
  Synthetic oligonucleotide
ccgtttggtacccattccggcagacttaat

SEQ ID NO: 223321 - DNA, 30 bp, Artificial Sequence
  Synthetic oligonucleotide
cattgcgtccagtcgcgaggtggacttaat

SEQ ID NO: 223322 - DNA, 30 bp, Artificial Sequence
  Synthetic oligonucleotide
gatatcgtgttacaaaataggacccttaat

SEQ ID NO: 223323 - DNA, 30 bp, Artificial Sequence
  Synthetic oligonucleotide
tacggcggtaaaccttaggcttcccttaat

SEQ ID NO: 223324 - DNA, 30 bp, Artificial Sequence
  Synthetic oligonucleotide
agggagccggatcagggttaggggcttaat

SEQ ID NO: 223325 - DNA, 30 bp, Artificial Sequence
  Synthetic oligonucleotide
caagcccaggcacctaccctattgcttaat

SEQ ID NO: 223326 - DNA, 30 bp, Artificial Sequence
  Synthetic oligonucleotide
taacggccaagactctcccatgatcttaat

SEQ ID NO: 223327 - DNA, 30 bp, Artificial Sequence
  Synthetic oligonucleotide
tcattacgtctaggattgcgccgtcttaat

SEQ ID NO: 223328 - DNA, 30 bp, Artificial Sequence
  Synthetic oligonucleotide
cgagtgtaaaaccgaccttaacgggttaat

SEQ ID NO: 223329 - DNA, 30 bp, Artificial Sequence
  Synthetic oligonucleotide
gtccttttgccaaaacgaataactgttaat

SEQ ID NO: 223330 - DNA, 30 bp, Artificial Sequence
  Synthetic oligonucleotide
gttatgaaaagtattcggcttgggtttaat

SEQ ID NO: 223331 - DNA, 30 bp, Artificial Sequence
  Synthetic oligonucleotide
cgcggtgatgacgcactacccggttttaat

SEQ ID NO: 223332 - DNA, 30 bp, Artificial Sequence
  Synthetic oligonucleotide
cggccgggaagaatgtttgttacaaaacat

SEQ ID NO: 223333 - DNA, 30 bp, Artificial Sequence
  Synthetic oligonucleotide
tcctcaacctggtagagggcttccaaacat

SEQ ID NO: 223334 - DNA, 30 bp, Artificial Sequence
  Synthetic oligonucleotide
tgcggctatcttcagggagagcagaaacat

SEQ ID NO: 223335 - DNA, 30 bp, Artificial Sequence
  Synthetic oligonucleotide
tattacgcgtacaacatcaacgctaaacat

SEQ ID NO: 223336 - DNA, 30 bp, Artificial Sequence
  Synthetic oligonucleotide
gcaagcgaggtgctatggtcccagcaacat

SEQ ID NO: 223337 - DNA, 30 bp, Artificial Sequence
  Synthetic oligonucleotide
ctaccgtctcccggattttcagcgcaacat

SEQ ID NO: 223338 - DNA, 30 bp, Artificial Sequence
  Synthetic oligonucleotide
ctaatgacacgaaaaattatcatgcaacat

SEQ ID NO: 223339 - DNA, 30 bp, Artificial Sequence
  Synthetic oligonucleotide
cacactaatatacggtagacactagaacat

SEQ ID NO: 223340 - DNA, 30 bp, Artificial Sequence
  Synthetic oligonucleotide
tggagcgttgcatgcgatcccaacgaacat

SEQ ID NO: 223341 - DNA, 30 bp, Artificial Sequence
  Synthetic oligonucleotide
gaggggcccgtgggatatggtcgctaacat

SEQ ID NO: 223342 - DNA, 30 bp, Artificial Sequence
  Synthetic oligonucleotide
tagggatgccatgcaatacatctctaacat

SEQ ID NO: 223343 - DNA, 30 bp, Artificial Sequence
  Synthetic oligonucleotide
tccgggtcgggctctaagacgaagtaacat

SEQ ID NO: 223344 - DNA, 30 bp, Artificial Sequence
  Synthetic oligonucleotide
actgatccattcacatgttatccgtaacat

SEQ ID NO: 223345 - DNA, 30 bp, Artificial Sequence
  Synthetic oligonucleotide
tgtcataatcgatctcggccagggtaacat

SEQ ID NO: 223346 - DNA, 30 bp, Artificial Sequence
  Synthetic oligonucleotide
gtgacgagtagtacgtgtactctgtaacat

SEQ ID NO: 223347 - DNA, 30 bp, Artificial Sequence
  Synthetic oligonucleotide
taccaaaagtatctaaagtaaacttaacat

SEQ ID NO: 223348 - DNA, 30 bp, Artificial Sequence
  Synthetic oligonucleotide
atgtccggcatttgagcttaactaacacat

SEQ ID NO: 223349 - DNA, 30 bp, Artificial Sequence
  Synthetic oligonucleotide
tcctgtaggacgcccggtaatcccacacat

SEQ ID NO: 223350 - DNA, 30 bp, Artificial Sequence
  Synthetic oligonucleotide
acgggcaacggctaatctaggtccacacat

SEQ ID NO: 223351 - DNA, 30 bp, Artificial Sequence
  Synthetic oligonucleotide
cccaatcgatttcaaatgaaggagacacat

SEQ ID NO: 223352 - DNA, 30 bp, Artificial Sequence
  Synthetic oligonucleotide
aagcaaggtatcaaaatttcggcgacacat

SEQ ID NO: 223353 - DNA, 30 bp, Artificial Sequence
  Synthetic oligonucleotide
gtcatcgttccggtaggaagtgctacacat

SEQ ID NO: 223354 - DNA, 30 bp, Artificial Sequence
  Synthetic oligonucleotide
agggcgccttatacaatgcggggtacacat

SEQ ID NO: 223355 - DNA, 30 bp, Artificial Sequence
  Synthetic oligonucleotide
tgttaccaatttgaagcacctacaccacat

SEQ ID NO: 223356 - DNA, 30 bp, Artificial Sequence
  Synthetic oligonucleotide
gtacacagtctaatcgcaaacccaccacat

SEQ ID NO: 223357 - DNA, 30 bp, Artificial Sequence
  Synthetic oligonucleotide
gtctgaactgctagattgcttgcaccacat

SEQ ID NO: 223358 - DNA, 30 bp, Artificial Sequence
  Synthetic oligonucleotide
acagggttgtggatccaaaatggcccacat

SEQ ID NO: 223359 - DNA, 30 bp, Artificial Sequence
  Synthetic oligonucleotide
acgttgagtgttgttagtatccagccacat

SEQ ID NO: 223360 - DNA, 30 bp, Artificial Sequence
  Synthetic oligonucleotide
tactactcacatcagtgaccagagccacat

SEQ ID NO: 223361 - DNA, 30 bp, Artificial Sequence
  Synthetic oligonucleotide
attgtcaacgcaccacctccgaggccacat

SEQ ID NO: 223362 - DNA, 30 bp, Artificial Sequence
  Synthetic oligonucleotide
tttaaaggagtacagactaaaggtccacat

SEQ ID NO: 223363 - DNA, 30 bp, Artificial Sequence
  Synthetic oligonucleotide
gtacactttaaattataacgcttagcacat

SEQ ID NO: 223364 - DNA, 30 bp, Artificial Sequence
  Synthetic oligonucleotide
tgtctgtgtggtgaagcacaatctgcacat

SEQ ID NO: 223365 - DNA, 30 bp, Artificial Sequence
  Synthetic oligonucleotide
gcctgaagcaacagttctcgtaaatcacat

SEQ ID NO: 223366 - DNA, 30 bp, Artificial Sequence
  Synthetic oligonucleotide
ctcaatccgcaatcctgttcttcatcacat

SEQ ID NO: 223367 - DNA, 30 bp, Artificial Sequence
  Synthetic oligonucleotide
ttcaagaaacatatatgagaaatctcacat

SEQ ID NO: 223368 - DNA, 30 bp, Artificial Sequence
  Synthetic oligonucleotide
ggtactcttaatcacggttgttagtcacat

SEQ ID NO: 223369 - DNA, 30 bp, Artificial Sequence
  Synthetic oligonucleotide
gcgccgcgtccgacttctgagatgtcacat

SEQ ID NO: 223370 - DNA, 30 bp, Artificial Sequence
  Synthetic oligonucleotide
tggacataaaagttgcacacgatgtcacat

SEQ ID NO: 223371 - DNA, 30 bp, Artificial Sequence
  Synthetic oligonucleotide
caggcagccaatcgatgcacctcttcacat

SEQ ID NO: 223372 - DNA, 30 bp, Artificial Sequence
  Synthetic oligonucleotide
acctcggaagcgttaataaaaccaagacat

SEQ ID NO: 223373 - DNA, 30 bp, Artificial Sequence
  Synthetic oligonucleotide
tgggacagaatacgcagtgcaagaagacat

SEQ ID NO: 223374 - DNA, 30 bp, Artificial Sequence
  Synthetic oligonucleotide
cgggttgcatctcacagcgacatcagacat

SEQ ID NO: 223375 - DNA, 29 bp, Artificial Sequence
  Synthetic oligonucleotide
ttgactgcccgcatagaagtaggagacat

SEQ ID NO: 223376 - DNA, 30 bp, Artificial Sequence
  Synthetic oligonucleotide
gttagtctggatatgtttataccacgacat

SEQ ID NO: 223377 - DNA, 30 bp, Artificial Sequence
  Synthetic oligonucleotide
tcgcggactgacctctgtatcccacgacat

SEQ ID NO: 223378 - DNA, 30 bp, Artificial Sequence
  Synthetic oligonucleotide
ctgtatttattgaacagttcgaaaggacat

SEQ ID NO: 223379 - DNA, 30 bp, Artificial Sequence
  Synthetic oligonucleotide
aattgggcatcttaaaacccctaaggacat

SEQ ID NO: 223380 - DNA, 30 bp, Artificial Sequence
  Synthetic oligonucleotide
cggaatgccgggctgtgtaaggtaggacat

SEQ ID NO: 223381 - DNA, 30 bp, Artificial Sequence
  Synthetic oligonucleotide
cacactgtcctaaaccagtaatacggacat

SEQ ID NO: 223382 - DNA, 30 bp, Artificial Sequence
  Synthetic oligonucleotide
gcatcgactaggaggtcaccccagggacat

SEQ ID NO: 223383 - DNA, 30 bp, Artificial Sequence
  Synthetic oligonucleotide
cagcggttctcggcaatacagttgggacat

SEQ ID NO: 223384 - DNA, 30 bp, Artificial Sequence
  Synthetic oligonucleotide
tttcgtcggttgaatatcgcagctggacat

SEQ ID NO: 223385 - DNA, 30 bp, Artificial Sequence
  Synthetic oligonucleotide
taatgtgtatcctctgactggcgatgacat

SEQ ID NO: 223386 - DNA, 30 bp, Artificial Sequence
  Synthetic oligonucleotide
cataaacatggaactcgctgcaagtgacat

SEQ ID NO: 223387 - DNA, 30 bp, Artificial Sequence
  Synthetic oligonucleotide
tatgatagacatgcctgtctcacgtgacat

SEQ ID NO: 223388 - DNA, 30 bp, Artificial Sequence
  Synthetic oligonucleotide
ccgcatttgggacgctcgatgaggtgacat

SEQ ID NO: 223389 - DNA, 30 bp, Artificial Sequence
  Synthetic oligonucleotide
ctgaaagtgtccttcagccgccaaatacat

SEQ ID NO: 223390 - DNA, 30 bp, Artificial Sequence
  Synthetic oligonucleotide
tttggatgacgactccagtgggctatacat

SEQ ID NO: 223391 - DNA, 30 bp, Artificial Sequence
  Synthetic oligonucleotide
ctatccactagaaccgacctgatcctacat

SEQ ID NO: 223392 - DNA, 30 bp, Artificial Sequence
  Synthetic oligonucleotide
ccttctgtatgggccaaagtccagctacat

SEQ ID NO: 223393 - DNA, 31 bp, Artificial Sequence
  Synthetic oligonucleotide
tgatgaggtaattggcgttcaaaatctacat

SEQ ID NO: 223394 - DNA, 30 bp, Artificial Sequence
  Synthetic oligonucleotide
ggggccaaccatccgcaccaccgagtacat

SEQ ID NO: 223395 - DNA, 30 bp, Artificial Sequence
  Synthetic oligonucleotide
aagcggtaaggtcaaacctctcgagtacat

SEQ ID NO: 223396 - DNA, 30 bp, Artificial Sequence
  Synthetic oligonucleotide
cagggatggttacgatgtgtaggagtacat

SEQ ID NO: 223397 - DNA, 30 bp, Artificial Sequence
  Synthetic oligonucleotide
gcgaacgagcgatgcaagtctggtgtacat

SEQ ID NO: 223398 - DNA, 30 bp, Artificial Sequence
  Synthetic oligonucleotide
attaggcaagagagactctctcttgtacat

SEQ ID NO: 223399 - DNA, 30 bp, Artificial Sequence
  Synthetic oligonucleotide
taagacctgatttccagtactacgttacat

SEQ ID NO: 223400 - DNA, 30 bp, Artificial Sequence
  Synthetic oligonucleotide
tcagtggcgaacggacgtaaggtcaaccat

SEQ ID NO: 223401 - DNA, 30 bp, Artificial Sequence
  Synthetic oligonucleotide
caaaggaagctgcggaataggcagaaccat

SEQ ID NO: 223402 - DNA, 30 bp, Artificial Sequence
  Synthetic oligonucleotide
aggggcagaatatttgcggccctgaaccat

SEQ ID NO: 223403 - DNA, 30 bp, Artificial Sequence
  Synthetic oligonucleotide
cgcccactagtcactatataaacacaccat

SEQ ID NO: 223404 - DNA, 30 bp, Artificial Sequence
  Synthetic oligonucleotide
agctgcgatttgaaacagtccacgcaccat

SEQ ID NO: 223405 - DNA, 30 bp, Artificial Sequence
  Synthetic oligonucleotide
tgcagccgcaggctaggcggtccagaccat

SEQ ID NO: 223406 - DNA, 30 bp, Artificial Sequence
  Synthetic oligonucleotide
gtatgatggatcaccgcctgagacgaccat

SEQ ID NO: 223407 - DNA, 30 bp, Artificial Sequence
  Synthetic oligonucleotide
ggaaatgactgtccttgcttaacgtaccat

SEQ ID NO: 223408 - DNA, 30 bp, Artificial Sequence
  Synthetic oligonucleotide
ccacatgggttgggccgaggcatgtaccat

SEQ ID NO: 223409 - DNA, 30 bp, Artificial Sequence
  Synthetic oligonucleotide
acccgatcgtgcggccgcgatacttaccat

SEQ ID NO: 223410 - DNA, 30 bp, Artificial Sequence
  Synthetic oligonucleotide
ttccgtgagtcgtcatatagccgttaccat

SEQ ID NO: 223411 - DNA, 30 bp, Artificial Sequence
  Synthetic oligonucleotide
caagaatagcacagatgtgatcacacccat

SEQ ID NO: 223412 - DNA, 30 bp, Artificial Sequence
  Synthetic oligonucleotide
gtacccaagcgatacttgggatgcacccat

SEQ ID NO: 223413 - DNA, 30 bp, Artificial Sequence
  Synthetic oligonucleotide
tacggcgccaccttaataattgcgacccat

SEQ ID NO: 223414 - DNA, 30 bp, Artificial Sequence
  Synthetic oligonucleotide
gggaccaagtttgcggttaaacaaccccat

SEQ ID NO: 223415 - DNA, 30 bp, Artificial Sequence
  Synthetic oligonucleotide
tgcaacgcatgcacggataattatccccat

SEQ ID NO: 223416 - DNA, 30 bp, Artificial Sequence
  Synthetic oligonucleotide
tcgccatctcggcggtggagtggtccccat

SEQ ID NO: 223417 - DNA, 30 bp, Artificial Sequence
  Synthetic oligonucleotide
tggggtatcatcatatgatagagtgcccat

SEQ ID NO: 223418 - DNA, 30 bp, Artificial Sequence
  Synthetic oligonucleotide
acatcagtattgtgcgagcctaggtcccat

SEQ ID NO: 223419 - DNA, 30 bp, Artificial Sequence
  Synthetic oligonucleotide
gaaggtgatagtattctgggaaaaagccat

SEQ ID NO: 223420 - DNA, 30 bp, Artificial Sequence
  Synthetic oligonucleotide
ttggagggctgggttcatccagtcagccat

SEQ ID NO: 223421 - DNA, 30 bp, Artificial Sequence
  Synthetic oligonucleotide
gaggcaagtgtgttagaaagccagagccat

SEQ ID NO: 223422 - DNA, 30 bp, Artificial Sequence
  Synthetic oligonucleotide
gcggtatatcaacacaactatgatagccat

SEQ ID NO: 223423 - DNA, 30 bp, Artificial Sequence
  Synthetic oligonucleotide
tattggatattaaaggtaaacagtagccat

SEQ ID NO: 223424 - DNA, 30 bp, Artificial Sequence
  Synthetic oligonucleotide
tacaggtcgtgaagtccgagctgacgccat

SEQ ID NO: 223425 - DNA, 30 bp, Artificial Sequence
  Synthetic oligonucleotide
gggtgtagacatgcactgatacaccgccat

SEQ ID NO: 223426 - DNA, 30 bp, Artificial Sequence
  Synthetic oligonucleotide
gcgcctgatgacgatgttttaaggcgccat

SEQ ID NO: 223427 - DNA, 30 bp, Artificial Sequence
  Synthetic oligonucleotide
cgtaacaggagacctttccggcggggccat

SEQ ID NO: 223428 - DNA, 30 bp, Artificial Sequence
  Synthetic oligonucleotide
attgttatcctagattggggatggggccat

SEQ ID NO: 223429 - DNA, 30 bp, Artificial Sequence
  Synthetic oligonucleotide
ataggacgcttggtagctcttaaatgccat

SEQ ID NO: 223430 - DNA, 30 bp, Artificial Sequence
  Synthetic oligonucleotide
tgtcattattcagtaaatttattctgccat

SEQ ID NO: 223431 - DNA, 30 bp, Artificial Sequence
  Synthetic oligonucleotide
tgccagatgctcaacaataggaaaatccat

SEQ ID NO: 223432 - DNA, 30 bp, Artificial Sequence
  Synthetic oligonucleotide
tacgttgggaccgaaccacgtgcaatccat

SEQ ID NO: 223433 - DNA, 30 bp, Artificial Sequence
  Synthetic oligonucleotide
aacgaggatatttgagtgaagcacatccat

SEQ ID NO: 223434 - DNA, 30 bp, Artificial Sequence
  Synthetic oligonucleotide
gttgagggcctgggcgagccagtcatccat

SEQ ID NO: 223435 - DNA, 30 bp, Artificial Sequence
  Synthetic oligonucleotide
tgcgaaatctcaatctatgctaagatccat

SEQ ID NO: 223436 - DNA, 30 bp, Artificial Sequence
  Synthetic oligonucleotide
cggttatgtgtatctcaattaggtctccat

SEQ ID NO: 223437 - DNA, 30 bp, Artificial Sequence
  Synthetic oligonucleotide
aagagtgtcggaggctgtccggaagtccat

SEQ ID NO: 223438 - DNA, 30 bp, Artificial Sequence
  Synthetic oligonucleotide
aacgagtcgtaacgcgatgtaatagtccat

SEQ ID NO: 223439 - DNA, 30 bp, Artificial Sequence
  Synthetic oligonucleotide
agggcgtatttaaaccaccaaaacgtccat

SEQ ID NO: 223440 - DNA, 30 bp, Artificial Sequence
  Synthetic oligonucleotide
gcatatgcacaggtacggtaacgattccat

SEQ ID NO: 223441 - DNA, 30 bp, Artificial Sequence
  Synthetic oligonucleotide
gcttcatgtaactgtaaaatacacttccat

SEQ ID NO: 223442 - DNA, 30 bp, Artificial Sequence
  Synthetic oligonucleotide
tcacttgtcctaacggcatgactcttccat

SEQ ID NO: 223443 - DNA, 30 bp, Artificial Sequence
  Synthetic oligonucleotide
accttggtaatttctgtcatggggttccat

SEQ ID NO: 223444 - DNA, 30 bp, Artificial Sequence
  Synthetic oligonucleotide
cggtatatgcagtacgtattagacaagcat

SEQ ID NO: 223445 - DNA, 30 bp, Artificial Sequence
  Synthetic oligonucleotide
gggtgttaacgcgcttcagaggccaagcat

SEQ ID NO: 223446 - DNA, 30 bp, Artificial Sequence
  Synthetic oligonucleotide
ggatacgagtgaatcactgaaacgaagcat

SEQ ID NO: 223447 - DNA, 30 bp, Artificial Sequence
  Synthetic oligonucleotide
catccagcattggtagaacccacgaagcat

SEQ ID NO: 223448 - DNA, 30 bp, Artificial Sequence
  Synthetic oligonucleotide
gagcctgcgacactcctgatgcataagcat

SEQ ID NO: 223449 - DNA, 30 bp, Artificial Sequence
  Synthetic oligonucleotide
ggatatgccagactaagaaactataagcat

SEQ ID NO: 223450 - DNA, 30 bp, Artificial Sequence
  Synthetic oligonucleotide
agggctggactatacgggctagctaagcat

SEQ ID NO: 223451 - DNA, 30 bp, Artificial Sequence
  Synthetic oligonucleotide
ggtagatagattcacgttttagctaagcat

SEQ ID NO: 223452 - DNA, 30 bp, Artificial Sequence
  Synthetic oligonucleotide
ttggccatctatcgatgcgcctttaagcat

SEQ ID NO: 223453 - DNA, 30 bp, Artificial Sequence
  Synthetic oligonucleotide
tactttgtaccctgggaggatgcacagcat

SEQ ID NO: 223454 - DNA, 30 bp, Artificial Sequence
  Synthetic oligonucleotide
acgccactggttgtcgttgcgcaccagcat

SEQ ID NO: 223455 - DNA, 30 bp, Artificial Sequence
  Synthetic oligonucleotide
gagtaggcaacaaaatgtaacctgcagcat

SEQ ID NO: 223456 - DNA, 30 bp, Artificial Sequence
  Synthetic oligonucleotide
atcttgtgcacgatagattagtttcagcat

SEQ ID NO: 223457 - DNA, 30 bp, Artificial Sequence
  Synthetic oligonucleotide
ttggacaaatcccagccttgtaaagagcat

SEQ ID NO: 223458 - DNA, 30 bp, Artificial Sequence
  Synthetic oligonucleotide
gaattctcaatgttccggtgcgtagagcat

SEQ ID NO: 223459 - DNA, 30 bp, Artificial Sequence
  Synthetic oligonucleotide
cattgaacgcgtagcacgtcagacgagcat

SEQ ID NO: 223460 - DNA, 30 bp, Artificial Sequence
  Synthetic oligonucleotide
tgaggaatatccgattcgtggcccgagcat

SEQ ID NO: 223461 - DNA, 30 bp, Artificial Sequence
  Synthetic oligonucleotide
gccaaaagagctgtagactattgcgagcat

SEQ ID NO: 223462 - DNA, 30 bp, Artificial Sequence
  Synthetic oligonucleotide
aataagtggttccaagtcgcatagtagcat

SEQ ID NO: 223463 - DNA, 30 bp, Artificial Sequence
  Synthetic oligonucleotide
agcaatagttgaggtctagcggggtagcat

SEQ ID NO: 223464 - DNA, 30 bp, Artificial Sequence
  Synthetic oligonucleotide
ccctcaatgcatgaaacattggtgtagcat

SEQ ID NO: 223465 - DNA, 30 bp, Artificial Sequence
  Synthetic oligonucleotide
cactcctgggaggggcgcgaaaaaacgcat

SEQ ID NO: 223466 - DNA, 30 bp, Artificial Sequence
  Synthetic oligonucleotide
gtgctaagggtaacaacacctgcaacgcat

SEQ ID NO: 223467 - DNA, 30 bp, Artificial Sequence
  Synthetic oligonucleotide
agagcctcaaagcgacttacggacacgcat

SEQ ID NO: 223468 - DNA, 30 bp, Artificial Sequence
  Synthetic oligonucleotide
cgcgagcacgatgcataggatcagacgcat

SEQ ID NO: 223469 - DNA, 30 bp, Artificial Sequence
  Synthetic oligonucleotide
aaccccactgtttgatggctagaaccgcat

SEQ ID NO: 223470 - DNA, 30 bp, Artificial Sequence
  Synthetic oligonucleotide
tgaaaagtggggatcgaggatggaccgcat

SEQ ID NO: 223471 - DNA, 30 bp, Artificial Sequence
  Synthetic oligonucleotide
gaacctcagcacaaccgcctactaccgcat

SEQ ID NO: 223472 - DNA, 30 bp, Artificial Sequence
  Synthetic oligonucleotide
gtcaggcacggcgcgtatcatttcccgcat

SEQ ID NO: 223473 - DNA, 30 bp, Artificial Sequence
  Synthetic oligonucleotide
agtaccgaaccatctgtgggttatccgcat

SEQ ID NO: 223474 - DNA, 30 bp, Artificial Sequence
  Synthetic oligonucleotide
gtccaagctcttcggaaccccagtccgcat

SEQ ID NO: 223475 - DNA, 30 bp, Artificial Sequence
  Synthetic oligonucleotide
ccatactgctagccgttcaaagaagcgcat

SEQ ID NO: 223476 - DNA, 30 bp, Artificial Sequence
  Synthetic oligonucleotide
cgaacgtgggcgcctggcaaatgagcgcat

SEQ ID NO: 223477 - DNA, 30 bp, Artificial Sequence
  Synthetic oligonucleotide
tccagcgttaaccaacaataggccgcgcat

SEQ ID NO: 223478 - DNA, 30 bp, Artificial Sequence
  Synthetic oligonucleotide
taggaaagcttacccggcaacaaggcgcat

SEQ ID NO: 223479 - DNA, 30 bp, Artificial Sequence
  Synthetic oligonucleotide
ggtacctaagcgtcttagctcacggcgcat

SEQ ID NO: 223480 - DNA, 30 bp, Artificial Sequence
  Synthetic oligonucleotide
catcgattcttaagtccatcggcggcgcat

SEQ ID NO: 223481 - DNA, 30 bp, Artificial Sequence
  Synthetic oligonucleotide
taggattatgttttaatattccgatcgcat

SEQ ID NO: 223482 - DNA, 30 bp, Artificial Sequence
  Synthetic oligonucleotide
tgcttgcacggacgtgatttcaggtcgcat

SEQ ID NO: 223483 - DNA, 30 bp, Artificial Sequence
  Synthetic oligonucleotide
ggatgttgttgtgtattctacgattcgcat

SEQ ID NO: 223484 - DNA, 30 bp, Artificial Sequence
  Synthetic oligonucleotide
acaatctatactgcttctgtgacttcgcat

SEQ ID NO: 223485 - DNA, 30 bp, Artificial Sequence
  Synthetic oligonucleotide
aggaagggtgcccaaccccgcgcttcgcat

SEQ ID NO: 223486 - DNA, 30 bp, Artificial Sequence
  Synthetic oligonucleotide
ggaatataaaataaagtcgaaatttcgcat

SEQ ID NO: 223487 - DNA, 30 bp, Artificial Sequence
  Synthetic oligonucleotide
cggtcacttcccaatgtgtgtaaaaggcat

SEQ ID NO: 223488 - DNA, 30 bp, Artificial Sequence
  Synthetic oligonucleotide
cgttacagatgctgggcgagagtcaggcat

SEQ ID NO: 223489 - DNA, 30 bp, Artificial Sequence
  Synthetic oligonucleotide
tcgtcttttcatctcagctcgttcaggcat

SEQ ID NO: 223490 - DNA, 30 bp, Artificial Sequence
  Synthetic oligonucleotide
aacggttaggggtacgggtcgtcgaggcat

SEQ ID NO: 223491 - DNA, 30 bp, Artificial Sequence
  Synthetic oligonucleotide
acgtcgcacaggccatgggcattgaggcat

SEQ ID NO: 223492 - DNA, 30 bp, Artificial Sequence
  Synthetic oligonucleotide
taatgatagtggactccgcgctataggcat

SEQ ID NO: 223493 - DNA, 30 bp, Artificial Sequence
  Synthetic oligonucleotide
tctatgtcgacaagacatgacgtacggcat

SEQ ID NO: 223494 - DNA, 30 bp, Artificial Sequence
  Synthetic oligonucleotide
cctcagtcaggaacgtggacggaccggcat

SEQ ID NO: 223495 - DNA, 30 bp, Artificial Sequence
  Synthetic oligonucleotide
tcctttgatgagaatacaagaacccggcat

SEQ ID NO: 223496 - DNA, 30 bp, Artificial Sequence
  Synthetic oligonucleotide
acccgtatagacacgcgtcgggagcggcat

SEQ ID NO: 223497 - DNA, 30 bp, Artificial Sequence
  Synthetic oligonucleotide
agatccaaatcggcaccccggcttcggcat

SEQ ID NO: 223498 - DNA, 30 bp, Artificial Sequence
  Synthetic oligonucleotide
aggcggtgagttgaatatttggttcggcat

SEQ ID NO: 223499 - DNA, 30 bp, Artificial Sequence
  Synthetic oligonucleotide
acagtagtacactcaggccaatttcggcat

SEQ ID NO: 223500 - DNA, 30 bp, Artificial Sequence
  Synthetic oligonucleotide
cgacgcttgggaatgcaaagagcagggcat

SEQ ID NO: 223501 - DNA, 30 bp, Artificial Sequence
  Synthetic oligonucleotide
atcaggctgtaggtgatacggcgagggcat

SEQ ID NO: 223502 - DNA, 30 bp, Artificial Sequence
  Synthetic oligonucleotide
aataggagcagatgacgtgaagacgggcat

SEQ ID NO: 223503 - DNA, 30 bp, Artificial Sequence
  Synthetic oligonucleotide
gctttaagaagaactttcccgtgggggcat

SEQ ID NO: 223504 - DNA, 30 bp, Artificial Sequence
  Synthetic oligonucleotide
aggggcttccactgaacgttcatggggcat

SEQ ID NO: 223505 - DNA, 30 bp, Artificial Sequence
  Synthetic oligonucleotide
caatcaaaaaagattctggatgtggggcat

SEQ ID NO: 223506 - DNA, 30 bp, Artificial Sequence
  Synthetic oligonucleotide
aaacggcgctatgaaaattcggctgggcat

SEQ ID NO: 223507 - DNA, 30 bp, Artificial Sequence
  Synthetic oligonucleotide
gtcacattcggttggtgctagtcgtggcat

SEQ ID NO: 223508 - DNA, 30 bp, Artificial Sequence
  Synthetic oligonucleotide
acgcagctggcatgaagaaaatggtggcat

SEQ ID NO: 223509 - DNA, 30 bp, Artificial Sequence
  Synthetic oligonucleotide
gctcggtaaccattcctagaaagttggcat

SEQ ID NO: 223510 - DNA, 30 bp, Artificial Sequence
  Synthetic oligonucleotide
aatgcgcaccaagtcacgtgcaaaatgcat

SEQ ID NO: 223511 - DNA, 30 bp, Artificial Sequence
  Synthetic oligonucleotide
agatggtagttagtgttgggtagaatgcat

SEQ ID NO: 223512 - DNA, 30 bp, Artificial Sequence
  Synthetic oligonucleotide
gcagggataagctcggtcctaaacatgcat

SEQ ID NO: 223513 - DNA, 30 bp, Artificial Sequence
  Synthetic oligonucleotide
catatattagtcgtaccatctcaactgcat

SEQ ID NO: 223514 - DNA, 30 bp, Artificial Sequence
  Synthetic oligonucleotide
ctttacaaagctccagggttccgtctgcat

SEQ ID NO: 223515 - DNA, 30 bp, Artificial Sequence
  Synthetic oligonucleotide
ctgacgccctggggcgcagagatagtgcat

SEQ ID NO: 223516 - DNA, 30 bp, Artificial Sequence
  Synthetic oligonucleotide
gcacctgaagactcgccaatgggcgtgcat

SEQ ID NO: 223517 - DNA, 30 bp, Artificial Sequence
  Synthetic oligonucleotide
atctaactgggatcgccttatttcgtgcat

SEQ ID NO: 223518 - DNA, 30 bp, Artificial Sequence
  Synthetic oligonucleotide
gcagcggaacttatcagatcttaggtgcat

SEQ ID NO: 223519 - DNA, 30 bp, Artificial Sequence
  Synthetic oligonucleotide
gggataaattaaccaacgaaatatgtgcat

SEQ ID NO: 223520 - DNA, 30 bp, Artificial Sequence
  Synthetic oligonucleotide
accccacggaactgaactaagtatgtgcat

SEQ ID NO: 223521 - DNA, 30 bp, Artificial Sequence
  Synthetic oligonucleotide
gctagcgtaggcttgaggccttctgtgcat

SEQ ID NO: 223522 - DNA, 30 bp, Artificial Sequence
  Synthetic oligonucleotide
agacactcccgatacgcctggggcttgcat

SEQ ID NO: 223523 - DNA, 30 bp, Artificial Sequence
  Synthetic oligonucleotide
gtcaactacttaagtcgtgggtagttgcat

SEQ ID NO: 223524 - DNA, 30 bp, Artificial Sequence
  Synthetic oligonucleotide
atcaattcacccttactgagtgggttgcat

SEQ ID NO: 223525 - DNA, 30 bp, Artificial Sequence
  Synthetic oligonucleotide
ggtaatgcccagacagatctatctttgcat

SEQ ID NO: 223526 - DNA, 30 bp, Artificial Sequence
  Synthetic oligonucleotide
catacaggccaagggacagtaggtttgcat

SEQ ID NO: 223527 - DNA, 30 bp, Artificial Sequence
  Synthetic oligonucleotide
tgcggatacatgtaccactttggtttgcat

SEQ ID NO: 223528 - DNA, 30 bp, Artificial Sequence
  Synthetic oligonucleotide
gaaatcatagctgccgttaaagaaaatcat

SEQ ID NO: 223529 - DNA, 30 bp, Artificial Sequence
  Synthetic oligonucleotide
atggagtacaccagtccgtgtacaaatcat

SEQ ID NO: 223530 - DNA, 30 bp, Artificial Sequence
  Synthetic oligonucleotide
tcaggtaacaaggccagctatcccaatcat

SEQ ID NO: 223531 - DNA, 30 bp, Artificial Sequence
  Synthetic oligonucleotide
gtagagcgaataatttatccgtataatcat

SEQ ID NO: 223532 - DNA, 30 bp, Artificial Sequence
  Synthetic oligonucleotide
tatccgcgccccaggtaacattataatcat

SEQ ID NO: 223533 - DNA, 30 bp, Artificial Sequence
  Synthetic oligonucleotide
ctcgaaagcgggcgtacactcttacatcat

SEQ ID NO: 223534 - DNA, 30 bp, Artificial Sequence
  Synthetic oligonucleotide
cataattcggactcggaaaatgtccatcat

SEQ ID NO: 223535 - DNA, 30 bp, Artificial Sequence
  Synthetic oligonucleotide
ctgggaagatataatgcgggtaagcatcat

SEQ ID NO: 223536 - DNA, 30 bp, Artificial Sequence
  Synthetic oligonucleotide
gttgaattggtaggatccactcggcatcat

SEQ ID NO: 223537 - DNA, 30 bp, Artificial Sequence
  Synthetic oligonucleotide
ggagtgggcccaacaaccgtccaagatcat

SEQ ID NO: 223538 - DNA, 30 bp, Artificial Sequence
  Synthetic oligonucleotide
tcgcaagatcgtcgtaaacgagtcgatcat

SEQ ID NO: 223539 - DNA, 30 bp, Artificial Sequence
  Synthetic oligonucleotide
agtgaccagtctgggtatacctgggatcat

SEQ ID NO: 223540 - DNA, 30 bp, Artificial Sequence
  Synthetic oligonucleotide
tgtcggtagattccagaagggcgatatcat

SEQ ID NO: 223541 - DNA, 30 bp, Artificial Sequence
  Synthetic oligonucleotide
cagctcaagggagtctgctcaaactatcat

SEQ ID NO: 223542 - DNA, 30 bp, Artificial Sequence
  Synthetic oligonucleotide
tccgggccgggagcaaggaactggtatcat

SEQ ID NO: 223543 - DNA, 30 bp, Artificial Sequence
  Synthetic oligonucleotide
gacggaaggttccttcgggatgccactcat

SEQ ID NO: 223544 - DNA, 30 bp, Artificial Sequence
  Synthetic oligonucleotide
gggaacttgcacaaagggcaagagactcat

SEQ ID NO: 223545 - DNA, 30 bp, Artificial Sequence
  Synthetic oligonucleotide
tgaatctcatgtttcggtgtggatactcat

SEQ ID NO: 223546 - DNA, 30 bp, Artificial Sequence
  Synthetic oligonucleotide
ttggcttaggcttaggcgtaggctactcat

SEQ ID NO: 223547 - DNA, 30 bp, Artificial Sequence
  Synthetic oligonucleotide
aaggacaacgatctttcataccaacctcat

SEQ ID NO: 223548 - DNA, 30 bp, Artificial Sequence
  Synthetic oligonucleotide
gtaaagagggtcagggaggtcccacctcat

SEQ ID NO: 223549 - DNA, 30 bp, Artificial Sequence
  Synthetic oligonucleotide
gtccgaggtcgttgcggttccctccctcat

SEQ ID NO: 223550 - DNA, 30 bp, Artificial Sequence
  Synthetic oligonucleotide
aagccgaatctgacgcagacgaagcctcat

SEQ ID NO: 223551 - DNA, 30 bp, Artificial Sequence
  Synthetic oligonucleotide
agcagagaccaccaatatgggagtcctcat

SEQ ID NO: 223552 - DNA, 30 bp, Artificial Sequence
  Synthetic oligonucleotide
catgaccggcaaatacgtaaaccagctcat

SEQ ID NO: 223553 - DNA, 30 bp, Artificial Sequence
  Synthetic oligonucleotide
gtccgaacggagagcccgtaataggctcat

SEQ ID NO: 223554 - DNA, 30 bp, Artificial Sequence
  Synthetic oligonucleotide
cgttaatgttggaaagaccgactggctcat

SEQ ID NO: 223555 - DNA, 30 bp, Artificial Sequence
  Synthetic oligonucleotide
cgtagtgtaggccgtagggcgaatgctcat

SEQ ID NO: 223556 - DNA, 30 bp, Artificial Sequence
  Synthetic oligonucleotide
agtagagcccactggggcaagtatgctcat

SEQ ID NO: 223557 - DNA, 30 bp, Artificial Sequence
  Synthetic oligonucleotide
gccgtgagtagaatagaaccaactgctcat

SEQ ID NO: 223558 - DNA, 30 bp, Artificial Sequence
  Synthetic oligonucleotide
tgatcgtacaagaagtttcagggctctcat

SEQ ID NO: 223559 - DNA, 30 bp, Artificial Sequence
  Synthetic oligonucleotide
agattcctcgaagatccccgaaagtctcat

SEQ ID NO: 223560 - DNA, 30 bp, Artificial Sequence
  Synthetic oligonucleotide
atggcgtttcgacagccccggtagtctcat

SEQ ID NO: 223561 - DNA, 30 bp, Artificial Sequence
  Synthetic oligonucleotide
aggtgttagttttacgtgcggggaagtcat

SEQ ID NO: 223562 - DNA, 30 bp, Artificial Sequence
  Synthetic oligonucleotide
gagatattgtgacgcccgtcaaacagtcat

SEQ ID NO: 223563 - DNA, 30 bp, Artificial Sequence
  Synthetic oligonucleotide
tataggttggcgttatcacggggcagtcat

SEQ ID NO: 223564 - DNA, 30 bp, Artificial Sequence
  Synthetic oligonucleotide
gggcgcggaagtgacagtatgaagagtcat

SEQ ID NO: 223565 - DNA, 30 bp, Artificial Sequence
  Synthetic oligonucleotide
taagcctccaaagaattatgggagagtcat

SEQ ID NO: 223566 - DNA, 30 bp, Artificial Sequence
  Synthetic oligonucleotide
aagatggcggaatttaactgcccgagtcat

SEQ ID NO: 223567 - DNA, 30 bp, Artificial Sequence
  Synthetic oligonucleotide
atagtgtgcacgaaaacaagtggacgtcat

SEQ ID NO: 223568 - DNA, 30 bp, Artificial Sequence
  Synthetic oligonucleotide
gacgatctaatagctacatcagtacgtcat

SEQ ID NO: 223569 - DNA, 30 bp, Artificial Sequence
  Synthetic oligonucleotide
tcggataggaaccccaagacctcccgtcat

SEQ ID NO: 223570 - DNA, 30 bp, Artificial Sequence
  Synthetic oligonucleotide
tttacaagctttgcaccacgagtgcgtcat

SEQ ID NO: 223571 - DNA, 30 bp, Artificial Sequence
  Synthetic oligonucleotide
caagcctcggcaacagggaaaccaggtcat

SEQ ID NO: 223572 - DNA, 30 bp, Artificial Sequence
  Synthetic oligonucleotide
actcggggtgggcgcttcctaagaggtcat

SEQ ID NO: 223573 - DNA, 30 bp, Artificial Sequence
  Synthetic oligonucleotide
tcacagatctcgagagcagcctacggtcat

SEQ ID NO: 223574 - DNA, 30 bp, Artificial Sequence
  Synthetic oligonucleotide
gcgcatcagaactattattatcccggtcat

SEQ ID NO: 223575 - DNA, 30 bp, Artificial Sequence
  Synthetic oligonucleotide
gaaagatcacctggatacatccgtggtcat

SEQ ID NO: 223576 - DNA, 30 bp, Artificial Sequence
  Synthetic oligonucleotide
acttgcgcacggctcgtatttgaatgtcat

SEQ ID NO: 223577 - DNA, 30 bp, Artificial Sequence
  Synthetic oligonucleotide
tcacgggagcgactttgacgcgcatgtcat

SEQ ID NO: 223578 - DNA, 30 bp, Artificial Sequence
  Synthetic oligonucleotide
ggcccaaggctcacacatttttcctgtcat

SEQ ID NO: 223579 - DNA, 30 bp, Artificial Sequence
  Synthetic oligonucleotide
gacgtcagtagggcaggattcctgtgtcat

SEQ ID NO: 223580 - DNA, 30 bp, Artificial Sequence
  Synthetic oligonucleotide
tgtacgttccgtaacaaataaacttgtcat

SEQ ID NO: 223581 - DNA, 30 bp, Artificial Sequence
  Synthetic oligonucleotide
cgaccgttatagaagtaccctgccattcat

SEQ ID NO: 223582 - DNA, 30 bp, Artificial Sequence
  Synthetic oligonucleotide
agggctggttagtactgtaagagcattcat

SEQ ID NO: 223583 - DNA, 30 bp, Artificial Sequence
  Synthetic oligonucleotide
caaaactgcaaccccagtaattgcattcat

SEQ ID NO: 223584 - DNA, 30 bp, Artificial Sequence
  Synthetic oligonucleotide
gaacccggcacattggctgggacgattcat

SEQ ID NO: 223585 - DNA, 30 bp, Artificial Sequence
  Synthetic oligonucleotide
acggagccagctgacgcatgaatgattcat

SEQ ID NO: 223586 - DNA, 30 bp, Artificial Sequence
  Synthetic oligonucleotide
cgcatagatgtgggatgcgatctgattcat

SEQ ID NO: 223587 - DNA, 30 bp, Artificial Sequence
  Synthetic oligonucleotide
taggaagccaggatttaactatgtattcat

SEQ ID NO: 223588 - DNA, 30 bp, Artificial Sequence
  Synthetic oligonucleotide
tacgtgtatactggcgaagaagtacttcat

SEQ ID NO: 223589 - DNA, 30 bp, Artificial Sequence
  Synthetic oligonucleotide
tcattatgtaaaccggcatccgcccttcat

SEQ ID NO: 223590 - DNA, 30 bp, Artificial Sequence
  Synthetic oligonucleotide
tacgagaagttaagtggggcggatcttcat

SEQ ID NO: 223591 - DNA, 30 bp, Artificial Sequence
  Synthetic oligonucleotide
taacacgtagggtggcgagtgagtcttcat

SEQ ID NO: 223592 - DNA, 30 bp, Artificial Sequence
  Synthetic oligonucleotide
ggtaccccgagttagatctgttttcttcat

SEQ ID NO: 223593 - DNA, 30 bp, Artificial Sequence
  Synthetic oligonucleotide
cagccatgctgcatgggccgcaaagttcat

SEQ ID NO: 223594 - DNA, 30 bp, Artificial Sequence
  Synthetic oligonucleotide
aagacattaccaatgaagacccgagttcat

SEQ ID NO: 223595 - DNA, 30 bp, Artificial Sequence
  Synthetic oligonucleotide
atagacaaggtgggtattaataactttcat

SEQ ID NO: 223596 - DNA, 30 bp, Artificial Sequence
  Synthetic oligonucleotide
gcgcgaccccacaatccgattcactttcat

SEQ ID NO: 223597 - DNA, 30 bp, Artificial Sequence
  Synthetic oligonucleotide
atgctttgtacacctaacaagtgctttcat

SEQ ID NO: 223598 - DNA, 30 bp, Artificial Sequence
  Synthetic oligonucleotide
cggatcacatggcactttgtgatgtttcat

SEQ ID NO: 223599 - DNA, 30 bp, Artificial Sequence
  Synthetic oligonucleotide
gcattcagggatcaaaggcagtgttttcat

SEQ ID NO: 223600 - DNA, 30 bp, Artificial Sequence
  Synthetic oligonucleotide
tggccactggtgtatcaattaaaaaaagat

SEQ ID NO: 223601 - DNA, 30 bp, Artificial Sequence
  Synthetic oligonucleotide
tagcatcagaaattggggatgaaaaaagat

SEQ ID NO: 223602 - DNA, 30 bp, Artificial Sequence
  Synthetic oligonucleotide
caggatgtcgagttggcagctggcaaagat

SEQ ID NO: 223603 - DNA, 30 bp, Artificial Sequence
  Synthetic oligonucleotide
ctcagcaggtaacccaattgaaagaaagat

SEQ ID NO: 223604 - DNA, 30 bp, Artificial Sequence
  Synthetic oligonucleotide
caagactcacgaagttgcagtaataaagat

SEQ ID NO: 223605 - DNA, 30 bp, Artificial Sequence
  Synthetic oligonucleotide
atcattagcaattcaacgtcctaacaagat

SEQ ID NO: 223606 - DNA, 30 bp, Artificial Sequence
  Synthetic oligonucleotide
ctaattgcgaaaagggcaatttcccaagat

SEQ ID NO: 223607 - DNA, 30 bp, Artificial Sequence
  Synthetic oligonucleotide
aacatttaaaacaatccaactgagcaagat

SEQ ID NO: 223608 - DNA, 30 bp, Artificial Sequence
  Synthetic oligonucleotide
acgatcgaaaaggtgacctcgtatcaagat

SEQ ID NO: 223609 - DNA, 30 bp, Artificial Sequence
  Synthetic oligonucleotide
ctcaaccgtacgccgtcagttagagaagat

SEQ ID NO: 223610 - DNA, 30 bp, Artificial Sequence
  Synthetic oligonucleotide
gtgtcggctgaccgtgtaaccgccgaagat

SEQ ID NO: 223611 - DNA, 30 bp, Artificial Sequence
  Synthetic oligonucleotide
tagaataggcctataaaaccattcgaagat

SEQ ID NO: 223612 - DNA, 30 bp, Artificial Sequence
  Synthetic oligonucleotide
agttccgggtgaaaaaagatttaggaagat

SEQ ID NO: 223613 - DNA, 30 bp, Artificial Sequence
  Synthetic oligonucleotide
gctgagtaccacacataccgtgtggaagat

SEQ ID NO: 223614 - DNA, 30 bp, Artificial Sequence
  Synthetic oligonucleotide
ccgaaaaggtgtaaaatcagctttgaagat

SEQ ID NO: 223615 - DNA, 30 bp, Artificial Sequence
  Synthetic oligonucleotide
ttgtaagtcgcaatgaaagtgagataagat

SEQ ID NO: 223616 - DNA, 30 bp, Artificial Sequence
  Synthetic oligonucleotide
atcaccgtcttagaggtcgtagactaagat

SEQ ID NO: 223617 - DNA, 30 bp, Artificial Sequence
  Synthetic oligonucleotide
tagatataagtatttgcggatgactaagat

SEQ ID NO: 223618 - DNA, 30 bp, Artificial Sequence
  Synthetic oligonucleotide
aactaacttcaggtgaacctaataacagat

SEQ ID NO: 223619 - DNA, 30 bp, Artificial Sequence
  Synthetic oligonucleotide
ccgcaggcgtagaccgataaattcacagat

SEQ ID NO: 223620 - DNA, 30 bp, Artificial Sequence
  Synthetic oligonucleotide
tgtgaattttatttgttctatcgaccagat

SEQ ID NO: 223621 - DNA, 30 bp, Artificial Sequence
  Synthetic oligonucleotide
agatcgcactagtcacgtccttgcccagat

SEQ ID NO: 223622 - DNA, 30 bp, Artificial Sequence
  Synthetic oligonucleotide
gcggcccgactcttaacagattggccagat

SEQ ID NO: 223623 - DNA, 30 bp, Artificial Sequence
  Synthetic oligonucleotide
aattaacgggacaggtagaacgtagcagat

SEQ ID NO: 223624 - DNA, 30 bp, Artificial Sequence
  Synthetic oligonucleotide
taggcatcttctccaaagataaccgcagat

SEQ ID NO: 223625 - DNA, 30 bp, Artificial Sequence
  Synthetic oligonucleotide
acaccaataaaacttcgccgcgccgcagat

SEQ ID NO: 223626 - DNA, 30 bp, Artificial Sequence
  Synthetic oligonucleotide
aaaattgatgatatacggagtttggcagat

SEQ ID NO: 223627 - DNA, 30 bp, Artificial Sequence
  Synthetic oligonucleotide
tcctggtggtgttctttaggcgttgcagat

SEQ ID NO: 223628 - DNA, 30 bp, Artificial Sequence
  Synthetic oligonucleotide
ccaaagctgccattacggcattaatcagat

SEQ ID NO: 223629 - DNA, 30 bp, Artificial Sequence
  Synthetic oligonucleotide
tcaagcaatccaaaatcgatggtctcagat

SEQ ID NO: 223630 - DNA, 30 bp, Artificial Sequence
  Synthetic oligonucleotide
cccactgtaatcaggataaaaaggtcagat

SEQ ID NO: 223631 - DNA, 30 bp, Artificial Sequence
  Synthetic oligonucleotide
gtgtgacttgcaaggaggcagaggtcagat

SEQ ID NO: 223632 - DNA, 30 bp, Artificial Sequence
  Synthetic oligonucleotide
gaagtgccgcggttacgagtagtgtcagat

SEQ ID NO: 223633 - DNA, 30 bp, Artificial Sequence
  Synthetic oligonucleotide
gaactatgacggagaccagcgcgttcagat

SEQ ID NO: 223634 - DNA, 30 bp, Artificial Sequence
  Synthetic oligonucleotide
ggtacatcgaaagttcgcggtgtaagagat

SEQ ID NO: 223635 - DNA, 30 bp, Artificial Sequence
  Synthetic oligonucleotide
cgttaagccatgggaattccctacagagat

SEQ ID NO: 223636 - DNA, 30 bp, Artificial Sequence
  Synthetic oligonucleotide
ggtgttgataggtcccggcggtacagagat

SEQ ID NO: 223637 - DNA, 30 bp, Artificial Sequence
  Synthetic oligonucleotide
agtcaaccgttcacggagttacagagagat

SEQ ID NO: 223638 - DNA, 30 bp, Artificial Sequence
  Synthetic oligonucleotide
gttacctttgagacctgggcagttagagat

SEQ ID NO: 223639 - DNA, 30 bp, Artificial Sequence
  Synthetic oligonucleotide
agcattatatcgtatgaatgacaccgagat

SEQ ID NO: 223640 - DNA, 30 bp, Artificial Sequence
  Synthetic oligonucleotide
cggcgatggttggcggctttttcccgagat

SEQ ID NO: 223641 - DNA, 30 bp, Artificial Sequence
  Synthetic oligonucleotide
cgtattgtgtaatatcgtgtcttccgagat

SEQ ID NO: 223642 - DNA, 30 bp, Artificial Sequence
  Synthetic oligonucleotide
cacgttcgaatttacgttgagctgcgagat

SEQ ID NO: 223643 - DNA, 30 bp, Artificial Sequence
  Synthetic oligonucleotide
actctaatgagtccgatatagggtcgagat

SEQ ID NO: 223644 - DNA, 30 bp, Artificial Sequence
  Synthetic oligonucleotide
ctcggactgacggatgcgctaaaaggagat

SEQ ID NO: 223645 - DNA, 30 bp, Artificial Sequence
  Synthetic oligonucleotide
caaggttcactccgcatgccaacaggagat

SEQ ID NO: 223646 - DNA, 30 bp, Artificial Sequence
  Synthetic oligonucleotide
ctaacgccctgcagtgccgcaataggagat

SEQ ID NO: 223647 - DNA, 30 bp, Artificial Sequence
  Synthetic oligonucleotide
ggagcgttcttatacacgttgtttggagat

SEQ ID NO: 223648 - DNA, 30 bp, Artificial Sequence
  Synthetic oligonucleotide
ggggttgcgatcctgtccaatccatgagat

SEQ ID NO: 223649 - DNA, 30 bp, Artificial Sequence
  Synthetic oligonucleotide
ctgaaccgccactaccagtaaacgtgagat

SEQ ID NO: 223650 - DNA, 30 bp, Artificial Sequence
  Synthetic oligonucleotide
gcaagcccgaggtccgccttcaaaatagat

SEQ ID NO: 223651 - DNA, 30 bp, Artificial Sequence
  Synthetic oligonucleotide
cgcgtgtactacacgatcaaatagatagat

SEQ ID NO: 223652 - DNA, 30 bp, Artificial Sequence
  Synthetic oligonucleotide
cagatcggcggaaaaccatcgatgatagat

SEQ ID NO: 223653 - DNA, 30 bp, Artificial Sequence
  Synthetic oligonucleotide
cgtcatgcgcagtactcggaactgatagat

SEQ ID NO: 223654 - DNA, 30 bp, Artificial Sequence
  Synthetic oligonucleotide
aggggcatctcagctgattgacctatagat

SEQ ID NO: 223655 - DNA, 30 bp, Artificial Sequence
  Synthetic oligonucleotide
cactggtttaactgggggtggccactagat

SEQ ID NO: 223656 - DNA, 30 bp, Artificial Sequence
  Synthetic oligonucleotide
cctccttgagcgatggcttatgcactagat

SEQ ID NO: 223657 - DNA, 30 bp, Artificial Sequence
  Synthetic oligonucleotide
attagcatttaaatttaagcaaagctagat

SEQ ID NO: 223658 - DNA, 30 bp, Artificial Sequence
  Synthetic oligonucleotide
cgggattcgtgaaatataagccctctagat

SEQ ID NO: 223659 - DNA, 30 bp, Artificial Sequence
  Synthetic oligonucleotide
tcccggagggagcgggtcgtcaaagtagat

SEQ ID NO: 223660 - DNA, 30 bp, Artificial Sequence
  Synthetic oligonucleotide
tatacaggagcggtcaaagaaccagtagat

SEQ ID NO: 223661 - DNA, 30 bp, Artificial Sequence
  Synthetic oligonucleotide
tcagggcgggcgaatttatctgcagtagat

SEQ ID NO: 223662 - DNA, 30 bp, Artificial Sequence
  Synthetic oligonucleotide
gtgaatgccaagtcatgggctcgagtagat

SEQ ID NO: 223663 - DNA, 30 bp, Artificial Sequence
  Synthetic oligonucleotide
tgtacaatccaaacatgcactagtgtagat

SEQ ID NO: 223664 - DNA, 30 bp, Artificial Sequence
  Synthetic oligonucleotide
atgctggaccttatgagaagcattgtagat

SEQ ID NO: 223665 - DNA, 30 bp, Artificial Sequence
  Synthetic oligonucleotide
gtcgcaccgcgtcgtcctgcgaagttagat

SEQ ID NO: 223666 - DNA, 30 bp, Artificial Sequence
  Synthetic oligonucleotide
ttgaggtgaacggtctgatgacggttagat

SEQ ID NO: 223667 - DNA, 30 bp, Artificial Sequence
  Synthetic oligonucleotide
cttgtgacatcaacgggttatagcaacgat

SEQ ID NO: 223668 - DNA, 30 bp, Artificial Sequence
  Synthetic oligonucleotide
acgtgcgtaaatcgagtcagcaggaacgat

SEQ ID NO: 223669 - DNA, 30 bp, Artificial Sequence
  Synthetic oligonucleotide
aaactacagtcagctaaagaaggtaacgat

SEQ ID NO: 223670 - DNA, 30 bp, Artificial Sequence
  Synthetic oligonucleotide
ccagtgccttgccttactcgtccacacgat

SEQ ID NO: 223671 - DNA, 30 bp, Artificial Sequence
  Synthetic oligonucleotide
actgacacgacagaagtcatgcgccacgat

SEQ ID NO: 223672 - DNA, 30 bp, Artificial Sequence
  Synthetic oligonucleotide
agtcgatcgattttctttttgtgccacgat

SEQ ID NO: 223673 - DNA, 30 bp, Artificial Sequence
  Synthetic oligonucleotide
cgtgagcttgttacgtgtggaaatcacgat

SEQ ID NO: 223674 - DNA, 30 bp, Artificial Sequence
  Synthetic oligonucleotide
gccaatatgggtaagttgtgtcgtcacgat

SEQ ID NO: 223675 - DNA, 30 bp, Artificial Sequence
  Synthetic oligonucleotide
acgtacccgtgtggacatcaaaaagacgat

SEQ ID NO: 223676 - DNA, 30 bp, Artificial Sequence
  Synthetic oligonucleotide
cgcgcggttgctcccttcgaccaagacgat

SEQ ID NO: 223677 - DNA, 30 bp, Artificial Sequence
  Synthetic oligonucleotide
aaggaaatttaattgagtcccgtagacgat

SEQ ID NO: 223678 - DNA, 30 bp, Artificial Sequence
  Synthetic oligonucleotide
tcactgggcgggccgttggtctacgacgat

SEQ ID NO: 223679 - DNA, 30 bp, Artificial Sequence
  Synthetic oligonucleotide
actgtgcaacaaaggaactttcgcgacgat

SEQ ID NO: 223680 - DNA, 30 bp, Artificial Sequence
  Synthetic oligonucleotide
ctgcattggatttctaccaatggcgacgat

SEQ ID NO: 223681 - DNA, 31 bp, Artificial Sequence
  Synthetic oligonucleotide
ttaggttactatcaaacacgagagggacgat

SEQ ID NO: 223682 - DNA, 30 bp, Artificial Sequence
  Synthetic oligonucleotide
gtcatcgtggtttgcgacacacatgacgat

SEQ ID NO: 223683 - DNA, 30 bp, Artificial Sequence
  Synthetic oligonucleotide
ggtggtgtcccgccagcgctggcgtacgat

SEQ ID NO: 223684 - DNA, 30 bp, Artificial Sequence
  Synthetic oligonucleotide
cgcttaatccacacatattgttccaccgat

SEQ ID NO: 223685 - DNA, 30 bp, Artificial Sequence
  Synthetic oligonucleotide
tattaacttaagctcgactagcgcaccgat

SEQ ID NO: 223686 - DNA, 30 bp, Artificial Sequence
  Synthetic oligonucleotide
gcttaatggcaactcgctagctagaccgat

SEQ ID NO: 223687 - DNA, 30 bp, Artificial Sequence
  Synthetic oligonucleotide
cgcgttaagttgtaaggcatcggacccgat

SEQ ID NO: 223688 - DNA, 30 bp, Artificial Sequence
  Synthetic oligonucleotide
acactaaagaatcacgaaattgacgccgat

SEQ ID NO: 223689 - DNA, 30 bp, Artificial Sequence
  Synthetic oligonucleotide
ctctgaaaaagggactgcagttacgccgat

SEQ ID NO: 223690 - DNA, 30 bp, Artificial Sequence
  Synthetic oligonucleotide
gtctcttcagacttcatagagctcgccgat

SEQ ID NO: 223691 - DNA, 30 bp, Artificial Sequence
  Synthetic oligonucleotide
ctgagattaacttattagccaaaggccgat

SEQ ID NO: 223692 - DNA, 30 bp, Artificial Sequence
  Synthetic oligonucleotide
ggagcgaacaaaagactgcatccggccgat

SEQ ID NO: 223693 - DNA, 30 bp, Artificial Sequence
  Synthetic oligonucleotide
cgctcccaatcaagggtttaaattgccgat

SEQ ID NO: 223694 - DNA, 30 bp, Artificial Sequence
  Synthetic oligonucleotide
tcacggaaatccggcgataagacttccgat

SEQ ID NO: 223695 - DNA, 30 bp, Artificial Sequence
  Synthetic oligonucleotide
acctacatttgatctactagtggttccgat

SEQ ID NO: 223696 - DNA, 30 bp, Artificial Sequence
  Synthetic oligonucleotide
ctcagtggagggaaatgttgcacaagcgat

SEQ ID NO: 223697 - DNA, 30 bp, Artificial Sequence
  Synthetic oligonucleotide
tccaaatagggacagaccttgcgcagcgat

SEQ ID NO: 223698 - DNA, 30 bp, Artificial Sequence
  Synthetic oligonucleotide
atgaggccttcagatgggtctacgagcgat

SEQ ID NO: 223699 - DNA, 30 bp, Artificial Sequence
  Synthetic oligonucleotide
caaatagtggtcaatcggcccgggagcgat

SEQ ID NO: 223700 - DNA, 30 bp, Artificial Sequence
  Synthetic oligonucleotide
caacgggccacgtaatacaagaggcgcgat

SEQ ID NO: 223701 - DNA, 30 bp, Artificial Sequence
  Synthetic oligonucleotide
acgtaccccgcgggctatgatgctcgcgat

SEQ ID NO: 223702 - DNA, 30 bp, Artificial Sequence
  Synthetic oligonucleotide
tgacaaaccagcgatgacgattcaggcgat

SEQ ID NO: 223703 - DNA, 30 bp, Artificial Sequence
  Synthetic oligonucleotide
gttggagtcgagtgtggtgggggaggcgat

SEQ ID NO: 223704 - DNA, 30 bp, Artificial Sequence
  Synthetic oligonucleotide
tggtggtttcaattaccgcataccggcgat

SEQ ID NO: 223705 - DNA, 30 bp, Artificial Sequence
  Synthetic oligonucleotide
gcgtaaaaacttataacaaactgcggcgat

SEQ ID NO: 223706 - DNA, 30 bp, Artificial Sequence
  Synthetic oligonucleotide
tggccaggggtctagggcacggcgggcgat

SEQ ID NO: 223707 - DNA, 30 bp, Artificial Sequence
  Synthetic oligonucleotide
gttgttccaatccgttaagataggggcgat

SEQ ID NO: 223708 - DNA, 30 bp, Artificial Sequence
  Synthetic oligonucleotide
tcccggtccagaggcggaaatacatgcgat

SEQ ID NO: 223709 - DNA, 30 bp, Artificial Sequence
  Synthetic oligonucleotide
atggtccttagttatcaaacaccgtgcgat

SEQ ID NO: 223710 - DNA, 30 bp, Artificial Sequence
  Synthetic oligonucleotide
gggcttgcacggtctcatacagacatcgat

SEQ ID NO: 223711 - DNA, 30 bp, Artificial Sequence
  Synthetic oligonucleotide
gcatctccgggcccctgagtatacatcgat

SEQ ID NO: 223712 - DNA, 30 bp, Artificial Sequence
  Synthetic oligonucleotide
cgcaatcgttggcctaaaatgaagatcgat

SEQ ID NO: 223713 - DNA, 30 bp, Artificial Sequence
  Synthetic oligonucleotide
acgggacagagcatatattataatatcgat

SEQ ID NO: 223714 - DNA, 30 bp, Artificial Sequence
  Synthetic oligonucleotide
ccgtttgcaaaagtgcatagctctatcgat

SEQ ID NO: 223715 - DNA, 30 bp, Artificial Sequence
  Synthetic oligonucleotide
ctgacccaaaaccgtacagtcctactcgat

SEQ ID NO: 223716 - DNA, 30 bp, Artificial Sequence
  Synthetic oligonucleotide
ggacagtctcgtggcatcactaacctcgat

SEQ ID NO: 223717 - DNA, 30 bp, Artificial Sequence
  Synthetic oligonucleotide
cggcttagaaaggctcggatgggcctcgat

SEQ ID NO: 223718 - DNA, 30 bp, Artificial Sequence
  Synthetic oligonucleotide
gatttaatggcctctctagccagtctcgat

SEQ ID NO: 223719 - DNA, 30 bp, Artificial Sequence
  Synthetic oligonucleotide
ataaccatcgtagaaactgttagggtcgat

SEQ ID NO: 223720 - DNA, 30 bp, Artificial Sequence
  Synthetic oligonucleotide
gggaatcatgtatcccgttgggtattcgat

SEQ ID NO: 223721 - DNA, 30 bp, Artificial Sequence
  Synthetic oligonucleotide
atatgcttagaagaaattaccaacttcgat

SEQ ID NO: 223722 - DNA, 30 bp, Artificial Sequence
  Synthetic oligonucleotide
cgaaaggtgtctaacgcacacctgttcgat

SEQ ID NO: 223723 - DNA, 30 bp, Artificial Sequence
  Synthetic oligonucleotide
gccggaatgagaaatgggctaactttcgat

SEQ ID NO: 223724 - DNA, 30 bp, Artificial Sequence
  Synthetic oligonucleotide
caaaacgaggcgtgcggatagcttttcgat

SEQ ID NO: 223725 - DNA, 30 bp, Artificial Sequence
  Synthetic oligonucleotide
atagagatctcagtggagagcaaaaaggat

SEQ ID NO: 223726 - DNA, 30 bp, Artificial Sequence
  Synthetic oligonucleotide
agattaatcttatttttatgtgccaaggat

SEQ ID NO: 223727 - DNA, 30 bp, Artificial Sequence
  Synthetic oligonucleotide
caagacgcgaaaagaaagggtagacaggat

SEQ ID NO: 223728 - DNA, 30 bp, Artificial Sequence
  Synthetic oligonucleotide
cttctcaacgaataatctagtcaccaggat

SEQ ID NO: 223729 - DNA, 30 bp, Artificial Sequence
  Synthetic oligonucleotide
aaggcagcacgcgacaaatgatcgcaggat

SEQ ID NO: 223730 - DNA, 30 bp, Artificial Sequence
  Synthetic oligonucleotide
gttgccgtatcgatcgtgagccgcgaggat

SEQ ID NO: 223731 - DNA, 30 bp, Artificial Sequence
  Synthetic oligonucleotide
cgaagtgaaacagccgttaatttcgaggat

SEQ ID NO: 223732 - DNA, 30 bp, Artificial Sequence
  Synthetic oligonucleotide
gctcctaggcgaattctaagccgggaggat

SEQ ID NO: 223733 - DNA, 30 bp, Artificial Sequence
  Synthetic oligonucleotide
aaagtggcgcttgatcaccgcggggaggat

SEQ ID NO: 223734 - DNA, 30 bp, Artificial Sequence
  Synthetic oligonucleotide
ggcaaagtcattgtatgagaccgtgaggat

SEQ ID NO: 223735 - DNA, 30 bp, Artificial Sequence
  Synthetic oligonucleotide
acatcggcaaacaatcacggtattgaggat

SEQ ID NO: 223736 - DNA, 30 bp, Artificial Sequence
  Synthetic oligonucleotide
ggcactcggggactggcaaagttataggat

SEQ ID NO: 223737 - DNA, 30 bp, Artificial Sequence
  Synthetic oligonucleotide
agcgaggacgtttacttcgggcactaggat

SEQ ID NO: 223738 - DNA, 30 bp, Artificial Sequence
  Synthetic oligonucleotide
acaatatggcaaccggagtgttgctaggat

SEQ ID NO: 223739 - DNA, 30 bp, Artificial Sequence
  Synthetic oligonucleotide
ggagcgcgggacacgcgacctctgtaggat

SEQ ID NO: 223740 - DNA, 30 bp, Artificial Sequence
  Synthetic oligonucleotide
ctcaagtatccatgcgcagtgggttaggat

SEQ ID NO: 223741 - DNA, 30 bp, Artificial Sequence
  Synthetic oligonucleotide
agtcgatatgactggtctgttttttaggat

SEQ ID NO: 223742 - DNA, 30 bp, Artificial Sequence
  Synthetic oligonucleotide
cgtgcgcaaatgtgggagtggatcacggat

SEQ ID NO: 223743 - DNA, 30 bp, Artificial Sequence
  Synthetic oligonucleotide
ccacgcagttaagcaggtcatagcccggat

SEQ ID NO: 223744 - DNA, 30 bp, Artificial Sequence
  Synthetic oligonucleotide
gtctccttgaaccagataagcggtccggat

SEQ ID NO: 223745 - DNA, 30 bp, Artificial Sequence
  Synthetic oligonucleotide
agaggatcatttttaatatggacagcggat

SEQ ID NO: 223746 - DNA, 30 bp, Artificial Sequence
  Synthetic oligonucleotide
ttatgaggagatgtaatatttggcgcggat

SEQ ID NO: 223747 - DNA, 30 bp, Artificial Sequence
  Synthetic oligonucleotide
catggctatactcactactgggtcgcggat

SEQ ID NO: 223748 - DNA, 30 bp, Artificial Sequence
  Synthetic oligonucleotide
ttcataagattggggcacatggtcgcggat

SEQ ID NO: 223749 - DNA, 30 bp, Artificial Sequence
  Synthetic oligonucleotide
atgcctaaaggaggcatggcatcggcggat

SEQ ID NO: 223750 - DNA, 30 bp, Artificial Sequence
  Synthetic oligonucleotide
cttccctcaccggatttcgaatgatcggat

SEQ ID NO: 223751 - DNA, 30 bp, Artificial Sequence
  Synthetic oligonucleotide
ttgggagctagctcctagatcgtttcggat

SEQ ID NO: 223752 - DNA, 30 bp, Artificial Sequence
  Synthetic oligonucleotide
ctacaaagctttactggcgctgaaagggat

SEQ ID NO: 223753 - DNA, 30 bp, Artificial Sequence
  Synthetic oligonucleotide
ttacgtcctacggtttcaaagtcaagggat

SEQ ID NO: 223754 - DNA, 30 bp, Artificial Sequence
  Synthetic oligonucleotide
tgaaaggctcggattctcgacctgcgggat

SEQ ID NO: 223755 - DNA, 30 bp, Artificial Sequence
  Synthetic oligonucleotide
tacgataatcgggagacaattgctcgggat

SEQ ID NO: 223756 - DNA, 30 bp, Artificial Sequence
  Synthetic oligonucleotide
gggaaccacttgaacctcatgtctcgggat

SEQ ID NO: 223757 - DNA, 30 bp, Artificial Sequence
  Synthetic oligonucleotide
actctgtagtaccgaaaaacgccaggggat

SEQ ID NO: 223758 - DNA, 31 bp, Artificial Sequence
  Synthetic oligonucleotide
agtaggataagagattgtcagaatcggggat

SEQ ID NO: 223759 - DNA, 30 bp, Artificial Sequence
  Synthetic oligonucleotide
tgtaaattgcgctgccattcagctggggat

SEQ ID NO: 223760 - DNA, 30 bp, Artificial Sequence
  Synthetic oligonucleotide
taataacaatctacgtgcactggtggggat

SEQ ID NO: 223761 - DNA, 30 bp, Artificial Sequence
  Synthetic oligonucleotide
aaacgtgtacaagcggcaacggactgggat

SEQ ID NO: 223762 - DNA, 30 bp, Artificial Sequence
  Synthetic oligonucleotide
ctcggtcggatctggtttatgcgctgggat

SEQ ID NO: 223763 - DNA, 30 bp, Artificial Sequence
  Synthetic oligonucleotide
tgtaatggagggtaaaaaatgcattgggat

SEQ ID NO: 223764 - DNA, 30 bp, Artificial Sequence
  Synthetic oligonucleotide
gtcgcgtcccgcttgagagacgaaatggat

SEQ ID NO: 223765 - DNA, 30 bp, Artificial Sequence
  Synthetic oligonucleotide
gggaggggttgtgttatctcggacatggat

SEQ ID NO: 223766 - DNA, 30 bp, Artificial Sequence
  Synthetic oligonucleotide
tgcgaaagaatagactagtacaatatggat

SEQ ID NO: 223767 - DNA, 30 bp, Artificial Sequence
  Synthetic oligonucleotide
gtaatacatacagcctagtactctatggat

SEQ ID NO: 223768 - DNA, 30 bp, Artificial Sequence
  Synthetic oligonucleotide
gggattttgggttgagtgaggcgtatggat

SEQ ID NO: 223769 - DNA, 30 bp, Artificial Sequence
  Synthetic oligonucleotide
catggcagggtaattgcgccttttatggat

SEQ ID NO: 223770 - DNA, 30 bp, Artificial Sequence
  Synthetic oligonucleotide
tagtgcgttgtcgtataaagcaaactggat

SEQ ID NO: 223771 - DNA, 30 bp, Artificial Sequence
  Synthetic oligonucleotide
atgaccaagcaacacaagggtagactggat

SEQ ID NO: 223772 - DNA, 30 bp, Artificial Sequence
  Synthetic oligonucleotide
gattatggcgcgcctggtcttagactggat

SEQ ID NO: 223773 - DNA, 30 bp, Artificial Sequence
  Synthetic oligonucleotide
tactctcgcccagagagaccactactggat

SEQ ID NO: 223774 - DNA, 30 bp, Artificial Sequence
  Synthetic oligonucleotide
gcttagtattaagtaaatctcgacctggat

SEQ ID NO: 223775 - DNA, 30 bp, Artificial Sequence
  Synthetic oligonucleotide
gctagaacacgataggtcctccggctggat

SEQ ID NO: 223776 - DNA, 30 bp, Artificial Sequence
  Synthetic oligonucleotide
ttataacaggagagataagacatagtggat

SEQ ID NO: 223777 - DNA, 30 bp, Artificial Sequence
  Synthetic oligonucleotide
aaatatgtgttttgtaggtggaccgtggat

SEQ ID NO: 223778 - DNA, 30 bp, Artificial Sequence
  Synthetic oligonucleotide
ctgggcagtcagaacactgaataggtggat

SEQ ID NO: 223779 - DNA, 30 bp, Artificial Sequence
  Synthetic oligonucleotide
gggaaccagtcagcgctgtgggcggtggat

SEQ ID NO: 223780 - DNA, 30 bp, Artificial Sequence
  Synthetic oligonucleotide
agtggacgtgtactgaataatcatgtggat

SEQ ID NO: 223781 - DNA, 30 bp, Artificial Sequence
  Synthetic oligonucleotide
agttggccgcaggggtgtcggtgtgtggat

SEQ ID NO: 223782 - DNA, 30 bp, Artificial Sequence
  Synthetic oligonucleotide
tgagcgttcagattaatggtaccattggat

SEQ ID NO: 223783 - DNA, 30 bp, Artificial Sequence
  Synthetic oligonucleotide
cgtttggagcatatatagatttcattggat

SEQ ID NO: 223784 - DNA, 30 bp, Artificial Sequence
  Synthetic oligonucleotide
cactgcggatcacgattgtcaatattggat

SEQ ID NO: 223785 - DNA, 30 bp, Artificial Sequence
  Synthetic oligonucleotide
tagacaacaatataaaatacaagcttggat

SEQ ID NO: 223786 - DNA, 30 bp, Artificial Sequence
  Synthetic oligonucleotide
cagatcattctgctatgaaacatcttggat

SEQ ID NO: 223787 - DNA, 30 bp, Artificial Sequence
  Synthetic oligonucleotide
acaaacctgatgcgggggagtgatttggat

SEQ ID NO: 223788 - DNA, 30 bp, Artificial Sequence
  Synthetic oligonucleotide
ggcacctttggcttattatgtgctttggat

SEQ ID NO: 223789 - DNA, 30 bp, Artificial Sequence
  Synthetic oligonucleotide
gtagatagcaacagatgtacaacaaatgat

SEQ ID NO: 223790 - DNA, 30 bp, Artificial Sequence
  Synthetic oligonucleotide
aataatagattggcaacggccccaaatgat

SEQ ID NO: 223791 - DNA, 30 bp, Artificial Sequence
  Synthetic oligonucleotide
cataagacacggtccacaagtagaaatgat

SEQ ID NO: 223792 - DNA, 30 bp, Artificial Sequence
  Synthetic oligonucleotide
caccagacaatattagcttagcgcaatgat

SEQ ID NO: 223793 - DNA, 30 bp, Artificial Sequence
  Synthetic oligonucleotide
atggcgggaaactttaagaataggaatgat

SEQ ID NO: 223794 - DNA, 30 bp, Artificial Sequence
  Synthetic oligonucleotide
gcaccaatttagagtacagcatataatgat

SEQ ID NO: 223795 - DNA, 30 bp, Artificial Sequence
  Synthetic oligonucleotide
cttaagcgctggaggtgggattagcatgat

SEQ ID NO: 223796 - DNA, 30 bp, Artificial Sequence
  Synthetic oligonucleotide
gcgcccctgacgacatgcttcaatcatgat

SEQ ID NO: 223797 - DNA, 30 bp, Artificial Sequence
  Synthetic oligonucleotide
gcagttgtcactacgaaaagtaaagatgat

SEQ ID NO: 223798 - DNA, 30 bp, Artificial Sequence
  Synthetic oligonucleotide
agcgaatctgtaatctgcggccaagatgat

SEQ ID NO: 223799 - DNA, 30 bp, Artificial Sequence
  Synthetic oligonucleotide
tggtatggcacgggaattatcagagatgat

SEQ ID NO: 223800 - DNA, 30 bp, Artificial Sequence
  Synthetic oligonucleotide
tgtcgtccggagacgtggttcagagatgat

SEQ ID NO: 223801 - DNA, 30 bp, Artificial Sequence
  Synthetic oligonucleotide
aggccgggtatctatttcagcatcgatgat

SEQ ID NO: 223802 - DNA, 30 bp, Artificial Sequence
  Synthetic oligonucleotide
ttcaaaagagatcggtgagcataggatgat

SEQ ID NO: 223803 - DNA, 30 bp, Artificial Sequence
  Synthetic oligonucleotide
tgtttcggcgagcgagcgcatggggatgat

SEQ ID NO: 223804 - DNA, 30 bp, Artificial Sequence
  Synthetic oligonucleotide
cgcccgtgattagtcagaaccgatgatgat

SEQ ID NO: 223805 - DNA, 30 bp, Artificial Sequence
  Synthetic oligonucleotide
ttcgccagaggagttaagtgaatatatgat

SEQ ID NO: 223806 - DNA, 30 bp, Artificial Sequence
  Synthetic oligonucleotide
tcgacgggagagatctacagaatctatgat

SEQ ID NO: 223807 - DNA, 30 bp, Artificial Sequence
  Synthetic oligonucleotide
ttctcatcggagattccgtatgtctatgat

SEQ ID NO: 223808 - DNA, 30 bp, Artificial Sequence
  Synthetic oligonucleotide
tttgcatataaaggagaggcaatgtatgat

SEQ ID NO: 223809 - DNA, 30 bp, Artificial Sequence
  Synthetic oligonucleotide
cctaactgagtcgcctagaagtattatgat

SEQ ID NO: 223810 - DNA, 30 bp, Artificial Sequence
  Synthetic oligonucleotide
cggagttccatggttgctatgtgttatgat

SEQ ID NO: 223811 - DNA, 30 bp, Artificial Sequence
  Synthetic oligonucleotide
gggaatgtgtctcaagagaccatttatgat

SEQ ID NO: 223812 - DNA, 30 bp, Artificial Sequence
  Synthetic oligonucleotide
ttgtcctccttaaagagattcggaactgat

SEQ ID NO: 223813 - DNA, 30 bp, Artificial Sequence
  Synthetic oligonucleotide
ggggcctgaccgagcctgtgcgtaactgat

SEQ ID NO: 223814 - DNA, 30 bp, Artificial Sequence
  Synthetic oligonucleotide
tcggacgatctaggtcagatctggactgat

SEQ ID NO: 223815 - DNA, 30 bp, Artificial Sequence
  Synthetic oligonucleotide
gtgctctgcacagggacttatctgactgat

SEQ ID NO: 223816 - DNA, 30 bp, Artificial Sequence
  Synthetic oligonucleotide
tactgaacatcgagttaactctgtactgat

SEQ ID NO: 223817 - DNA, 30 bp, Artificial Sequence
  Synthetic oligonucleotide
acggttacgtgcgttgcccggtaacctgat

SEQ ID NO: 223818 - DNA, 30 bp, Artificial Sequence
  Synthetic oligonucleotide
cggagtagcaaatccagacttttccctgat

SEQ ID NO: 223819 - DNA, 30 bp, Artificial Sequence
  Synthetic oligonucleotide
gtacgccgagtcgcacgggcaagatctgat

SEQ ID NO: 223820 - DNA, 30 bp, Artificial Sequence
  Synthetic oligonucleotide
cggtctatggccggcaatcacacctctgat

SEQ ID NO: 223821 - DNA, 30 bp, Artificial Sequence
  Synthetic oligonucleotide
gattaaaaaacaccaaaaggatcgtctgat

SEQ ID NO: 223822 - DNA, 30 bp, Artificial Sequence
  Synthetic oligonucleotide
gacgtatagtatgacgctgtacggtctgat

SEQ ID NO: 223823 - DNA, 30 bp, Artificial Sequence
  Synthetic oligonucleotide
aatgcacgaaatacatgtcatttgtctgat

SEQ ID NO: 223824 - DNA, 30 bp, Artificial Sequence
  Synthetic oligonucleotide
ttgcagagtgtcatcagttccaccagtgat

SEQ ID NO: 223825 - DNA, 30 bp, Artificial Sequence
  Synthetic oligonucleotide
gataatacacaatataaggcaatcagtgat

SEQ ID NO: 223826 - DNA, 30 bp, Artificial Sequence
  Synthetic oligonucleotide
gcaagttaattcacatcgtgttggagtgat

SEQ ID NO: 223827 - DNA, 30 bp, Artificial Sequence
  Synthetic oligonucleotide
gatccgtggaccggcattaaagtgagtgat

SEQ ID NO: 223828 - DNA, 30 bp, Artificial Sequence
  Synthetic oligonucleotide
attccaaacgacgccgactcaaaccgtgat

SEQ ID NO: 223829 - DNA, 30 bp, Artificial Sequence
  Synthetic oligonucleotide
gttgatacccatagccaaaaaggccgtgat

SEQ ID NO: 223830 - DNA, 30 bp, Artificial Sequence
  Synthetic oligonucleotide
cactagtgtgtaacaatgatagtgcgtgat

SEQ ID NO: 223831 - DNA, 30 bp, Artificial Sequence
  Synthetic oligonucleotide
cttcaataggagtgctacagtagtcgtgat

SEQ ID NO: 223832 - DNA, 30 bp, Artificial Sequence
  Synthetic oligonucleotide
cggcaccggagccctttactggcaggtgat

SEQ ID NO: 223833 - DNA, 30 bp, Artificial Sequence
  Synthetic oligonucleotide
gcatgactggatgggcagggtaacggtgat

SEQ ID NO: 223834 - DNA, 30 bp, Artificial Sequence
  Synthetic oligonucleotide
gcggtttggcggtttacagatttcggtgat

SEQ ID NO: 223835 - DNA, 30 bp, Artificial Sequence
  Synthetic oligonucleotide
agaaattaagacatcacatgcgatggtgat

SEQ ID NO: 223836 - DNA, 30 bp, Artificial Sequence
  Synthetic oligonucleotide
ttgggtgtagtactggggcatgatggtgat

SEQ ID NO: 223837 - DNA, 30 bp, Artificial Sequence
  Synthetic oligonucleotide
catatagcaaatcgaaaggcaggatgtgat

SEQ ID NO: 223838 - DNA, 30 bp, Artificial Sequence
  Synthetic oligonucleotide
tttaatctcgcgatcggtcactgatgtgat

SEQ ID NO: 223839 - DNA, 30 bp, Artificial Sequence
  Synthetic oligonucleotide
ggttaaccgtggggtcagatctgttgtgat

SEQ ID NO: 223840 - DNA, 30 bp, Artificial Sequence
  Synthetic oligonucleotide
gggtgaagaatctgccaaaacatttgtgat

SEQ ID NO: 223841 - DNA, 30 bp, Artificial Sequence
  Synthetic oligonucleotide
gggcccggcgggacgcaaactacagttgat

SEQ ID NO: 223842 - DNA, 30 bp, Artificial Sequence
  Synthetic oligonucleotide
gcgaggttcgtcaatcaaacgttcgttgat

SEQ ID NO: 223843 - DNA, 30 bp, Artificial Sequence
  Synthetic oligonucleotide
ttaccactcctggtaagtcaacgggttgat

SEQ ID NO: 223844 - DNA, 30 bp, Artificial Sequence
  Synthetic oligonucleotide
tagttaaggtactgatcttagctggttgat

SEQ ID NO: 223845 - DNA, 30 bp, Artificial Sequence
  Synthetic oligonucleotide
tgggggaatcattggagaagatatgttgat

SEQ ID NO: 223846 - DNA, 30 bp, Artificial Sequence
  Synthetic oligonucleotide
gagggatccattacaagcaaatcatttgat

SEQ ID NO: 223847 - DNA, 30 bp, Artificial Sequence
  Synthetic oligonucleotide
acgaaattgattagatcgtgttcatttgat

SEQ ID NO: 223848 - DNA, 30 bp, Artificial Sequence
  Synthetic oligonucleotide
atgagcagcaccccggagattagatttgat

SEQ ID NO: 223849 - DNA, 30 bp, Artificial Sequence
  Synthetic oligonucleotide
tgctagaatgccgcttttaaccgatttgat

SEQ ID NO: 223850 - DNA, 30 bp, Artificial Sequence
  Synthetic oligonucleotide
ccttcatgggcagcagtgtgctagtttgat

SEQ ID NO: 223851 - DNA, 30 bp, Artificial Sequence
  Synthetic oligonucleotide
ttggagatcgtctacagcaagaattttgat

SEQ ID NO: 223852 - DNA, 30 bp, Artificial Sequence
  Synthetic oligonucleotide
gggttcggcatgaaataaaaccaaaaatat

SEQ ID NO: 223853 - DNA, 30 bp, Artificial Sequence
  Synthetic oligonucleotide
gtgccagctgagagagaaacctgcaaatat

SEQ ID NO: 223854 - DNA, 30 bp, Artificial Sequence
  Synthetic oligonucleotide
gcagtagacgacggctctacgttcaaatat

SEQ ID NO: 223855 - DNA, 30 bp, Artificial Sequence
  Synthetic oligonucleotide
ctatacggagtaaggatcgaaacgaaatat

SEQ ID NO: 223856 - DNA, 30 bp, Artificial Sequence
  Synthetic oligonucleotide
tcgacgaattcaatgactttgcataaatat

SEQ ID NO: 223857 - DNA, 30 bp, Artificial Sequence
  Synthetic oligonucleotide
actgtgctcgaagtagttcagattaaatat

SEQ ID NO: 223858 - DNA, 30 bp, Artificial Sequence
  Synthetic oligonucleotide
ctcgaaatgagaatggcttctgaacaatat

SEQ ID NO: 223859 - DNA, 30 bp, Artificial Sequence
  Synthetic oligonucleotide
cagcgtcctcacaaatgatactagcaatat

SEQ ID NO: 223860 - DNA, 30 bp, Artificial Sequence
  Synthetic oligonucleotide
gggtactaggggcgaacggaggcgcaatat

SEQ ID NO: 223861 - DNA, 30 bp, Artificial Sequence
  Synthetic oligonucleotide
gcggttgggaagcgggggacacaagaatat

SEQ ID NO: 223862 - DNA, 30 bp, Artificial Sequence
  Synthetic oligonucleotide
cgcaagacctggcgacaaggcagagaatat

SEQ ID NO: 223863 - DNA, 30 bp, Artificial Sequence
  Synthetic oligonucleotide
aatgcttccaacctcatctcagccgaatat

SEQ ID NO: 223864 - DNA, 30 bp, Artificial Sequence
  Synthetic oligonucleotide
tttgggcggggcccacgcttaagcgaatat

SEQ ID NO: 223865 - DNA, 30 bp, Artificial Sequence
  Synthetic oligonucleotide
aacgaggttccccaacttgggctcgaatat

SEQ ID NO: 223866 - DNA, 30 bp, Artificial Sequence
  Synthetic oligonucleotide
gtggggcgtcacgataggccccgggaatat

SEQ ID NO: 223867 - DNA, 30 bp, Artificial Sequence
  Synthetic oligonucleotide
ttcagataagtccagtgggtttgggaatat

SEQ ID NO: 223868 - DNA, 30 bp, Artificial Sequence
  Synthetic oligonucleotide
caaacttgagcaaggggctcaactgaatat

SEQ ID NO: 223869 - DNA, 30 bp, Artificial Sequence
  Synthetic oligonucleotide
aaggtatctggtcggaataatcaataatat

SEQ ID NO: 223870 - DNA, 30 bp, Artificial Sequence
  Synthetic oligonucleotide
tgatcttgaggcaagttggagggataatat

SEQ ID NO: 223871 - DNA, 30 bp, Artificial Sequence
  Synthetic oligonucleotide
ggcgatattacatcattggagtgataatat

SEQ ID NO: 223872 - DNA, 29 bp, Artificial Sequence
  Synthetic oligonucleotide
cctctagggtccatccatggtcgtaatat

SEQ ID NO: 223873 - DNA, 30 bp, Artificial Sequence
  Synthetic oligonucleotide
acagatgacgtcgtccttgaggcaacatat

SEQ ID NO: 223874 - DNA, 30 bp, Artificial Sequence
  Synthetic oligonucleotide
ggaacgagtctatattttcgagcgacatat

SEQ ID NO: 223875 - DNA, 30 bp, Artificial Sequence
  Synthetic oligonucleotide
ccaatacaagtggtatgggcacggacatat

SEQ ID NO: 223876 - DNA, 30 bp, Artificial Sequence
  Synthetic oligonucleotide
accccacggaatagccgcaatcggacatat

SEQ ID NO: 223877 - DNA, 30 bp, Artificial Sequence
  Synthetic oligonucleotide
gattgattattgccccacctacggccatat

SEQ ID NO: 223878 - DNA, 30 bp, Artificial Sequence
  Synthetic oligonucleotide
aatacataaccgtgcgtatcacatccatat

SEQ ID NO: 223879 - DNA, 30 bp, Artificial Sequence
  Synthetic oligonucleotide
gtatcgaacgtaaccccggatacggcatat

SEQ ID NO: 223880 - DNA, 30 bp, Artificial Sequence
  Synthetic oligonucleotide
acaaacgttctacggcctgaaaaatcatat

SEQ ID NO: 223881 - DNA, 30 bp, Artificial Sequence
  Synthetic oligonucleotide
tcggcggttgttgggtacgaccactcatat

SEQ ID NO: 223882 - DNA, 30 bp, Artificial Sequence
  Synthetic oligonucleotide
cacgatgcatattccgtaccacgctcatat

SEQ ID NO: 223883 - DNA, 30 bp, Artificial Sequence
  Synthetic oligonucleotide
cctgggttgtggcaaacgggcggaagatat

SEQ ID NO: 223884 - DNA, 30 bp, Artificial Sequence
  Synthetic oligonucleotide
ctgtcgctctatgcccgaggcttcagatat

SEQ ID NO: 223885 - DNA, 30 bp, Artificial Sequence
  Synthetic oligonucleotide
tatgacatggccaggagtatggagagatat

SEQ ID NO: 223886 - DNA, 30 bp, Artificial Sequence
  Synthetic oligonucleotide
gtatactacgtatacgcttcgaggagatat

SEQ ID NO: 223887 - DNA, 30 bp, Artificial Sequence
  Synthetic oligonucleotide
caaaatgggggagtttcagtttaacgatat

SEQ ID NO: 223888 - DNA, 30 bp, Artificial Sequence
  Synthetic oligonucleotide
tagcagagagcgaattacataatacgatat

SEQ ID NO: 223889 - DNA, 30 bp, Artificial Sequence
  Synthetic oligonucleotide
agaataacatggcatgttacattacgatat

SEQ ID NO: 223890 - DNA, 30 bp, Artificial Sequence
  Synthetic oligonucleotide
tgaccggggcctgacgagcgcatgcgatat

SEQ ID NO: 223891 - DNA, 30 bp, Artificial Sequence
  Synthetic oligonucleotide
tctcggaaaaatatgttgcaccgtcgatat

SEQ ID NO: 223892 - DNA, 30 bp, Artificial Sequence
  Synthetic oligonucleotide
gctcgccgagtccgagaccgcataggatat

SEQ ID NO: 223893 - DNA, 30 bp, Artificial Sequence
  Synthetic oligonucleotide
ggcgtgcatgaaaatcgattggacggatat

SEQ ID NO: 223894 - DNA, 30 bp, Artificial Sequence
  Synthetic oligonucleotide
tccttgccgttcgaaataaagtgcggatat

SEQ ID NO: 223895 - DNA, 30 bp, Artificial Sequence
  Synthetic oligonucleotide
ccgtacttcgttacggacatccagggatat

SEQ ID NO: 223896 - DNA, 30 bp, Artificial Sequence
  Synthetic oligonucleotide
tagctcatgccccaacctggttagggatat

SEQ ID NO: 223897 - DNA, 30 bp, Artificial Sequence
  Synthetic oligonucleotide
gtgtctagacaatcagcgtaccttggatat

SEQ ID NO: 223898 - DNA, 30 bp, Artificial Sequence
  Synthetic oligonucleotide
tatggcactactagactgggtacatgatat

SEQ ID NO: 223899 - DNA, 30 bp, Artificial Sequence
  Synthetic oligonucleotide
ttgtttggtgtgagagaggtggtatgatat

SEQ ID NO: 223900 - DNA, 30 bp, Artificial Sequence
  Synthetic oligonucleotide
tcccaatataaaaaacacagttactgatat

SEQ ID NO: 223901 - DNA, 30 bp, Artificial Sequence
  Synthetic oligonucleotide
gtttgccttcgtaggatgtgaatctgatat

SEQ ID NO: 223902 - DNA, 30 bp, Artificial Sequence
  Synthetic oligonucleotide
atatgttatacggatacagaacagtgatat

SEQ ID NO: 223903 - DNA, 30 bp, Artificial Sequence
  Synthetic oligonucleotide
gaaatggaactagcacatgcggagtgatat

SEQ ID NO: 223904 - DNA, 30 bp, Artificial Sequence
  Synthetic oligonucleotide
ggggtgatataagttatgtgaccgtgatat

SEQ ID NO: 223905 - DNA, 30 bp, Artificial Sequence
  Synthetic oligonucleotide
ggtggggaaatgccaccggactcgtgatat

SEQ ID NO: 223906 - DNA, 30 bp, Artificial Sequence
  Synthetic oligonucleotide
actggatcctagatcgggtgccattgatat

SEQ ID NO: 223907 - DNA, 30 bp, Artificial Sequence
  Synthetic oligonucleotide
tgcgtgtgctagactcggggtcattgatat

SEQ ID NO: 223908 - DNA, 30 bp, Artificial Sequence
  Synthetic oligonucleotide
cgttcgaatgcagctcggtggtcttgatat

SEQ ID NO: 223909 - DNA, 30 bp, Artificial Sequence
  Synthetic oligonucleotide
ccctgctaggaattgtcagtcggaatatat

SEQ ID NO: 223910 - DNA, 30 bp, Artificial Sequence
  Synthetic oligonucleotide
ataaacgtgcggtgagtgaaatacatatat

SEQ ID NO: 223911 - DNA, 30 bp, Artificial Sequence
  Synthetic oligonucleotide
ccgagcctgtaaatcgtcaggaatatatat

SEQ ID NO: 223912 - DNA, 30 bp, Artificial Sequence
  Synthetic oligonucleotide
ccacgtcacgcaagtgcctcctgcctatat

SEQ ID NO: 223913 - DNA, 30 bp, Artificial Sequence
  Synthetic oligonucleotide
aagaataacagtagtgggtcgcggctatat

SEQ ID NO: 223914 - DNA, 30 bp, Artificial Sequence
  Synthetic oligonucleotide
gcaaggttaaatgttttaagcctgctatat

SEQ ID NO: 223915 - DNA, 30 bp, Artificial Sequence
  Synthetic oligonucleotide
ctaggaaatttaattagcattcaagtatat

SEQ ID NO: 223916 - DNA, 30 bp, Artificial Sequence
  Synthetic oligonucleotide
gctcgtatggactagttagggcgcgtatat

SEQ ID NO: 223917 - DNA, 30 bp, Artificial Sequence
  Synthetic oligonucleotide
tactcgaagccgtgggccgggggcgtatat

SEQ ID NO: 223918 - DNA, 30 bp, Artificial Sequence
  Synthetic oligonucleotide
agaaggggccatatcacttagattgtatat

SEQ ID NO: 223919 - DNA, 30 bp, Artificial Sequence
  Synthetic oligonucleotide
gggagatccaatctataacgagttgtatat

SEQ ID NO: 223920 - DNA, 30 bp, Artificial Sequence
  Synthetic oligonucleotide
tggcctcaccggaggtatacgacattatat

SEQ ID NO: 223921 - DNA, 30 bp, Artificial Sequence
  Synthetic oligonucleotide
tggggcagatatgctggttataccttatat

SEQ ID NO: 223922 - DNA, 30 bp, Artificial Sequence
  Synthetic oligonucleotide
gggcgcggatttgtcactgagtgcttatat

SEQ ID NO: 223923 - DNA, 30 bp, Artificial Sequence
  Synthetic oligonucleotide
agctgtggctagagttttatcgatttatat

SEQ ID NO: 223924 - DNA, 30 bp, Artificial Sequence
  Synthetic oligonucleotide
agataatcgctatactttgatactttatat

SEQ ID NO: 223925 - DNA, 30 bp, Artificial Sequence
  Synthetic oligonucleotide
attcggcgtccaggcgagataattttatat

SEQ ID NO: 223926 - DNA, 30 bp, Artificial Sequence
  Synthetic oligonucleotide
tgacgtacggtcaccgatgcttagaactat

SEQ ID NO: 223927 - DNA, 30 bp, Artificial Sequence
  Synthetic oligonucleotide
aacgcatgggtcagcagcgcgattaactat

SEQ ID NO: 223928 - DNA, 30 bp, Artificial Sequence
  Synthetic oligonucleotide
atcatacagaaaaagaggtgctaacactat

SEQ ID NO: 223929 - DNA, 30 bp, Artificial Sequence
  Synthetic oligonucleotide
cgaataaatgttctcgatttacgacactat

SEQ ID NO: 223930 - DNA, 30 bp, Artificial Sequence
  Synthetic oligonucleotide
cacagttccagggttttgaccatacactat

SEQ ID NO: 223931 - DNA, 30 bp, Artificial Sequence
  Synthetic oligonucleotide
gcttgtttgttgtctcgatgttgccactat

SEQ ID NO: 223932 - DNA, 30 bp, Artificial Sequence
  Synthetic oligonucleotide
ctacacagtcctggacgaccatggcactat

SEQ ID NO: 223933 - DNA, 30 bp, Artificial Sequence
  Synthetic oligonucleotide
catactcagacacgtgaaatccatcactat

SEQ ID NO: 223934 - DNA, 30 bp, Artificial Sequence
  Synthetic oligonucleotide
ttcaaatcaaacgatacgagacaagactat

SEQ ID NO: 223935 - DNA, 30 bp, Artificial Sequence
  Synthetic oligonucleotide
tgagtcgggctgtaaaaagagatcgactat

SEQ ID NO: 223936 - DNA, 30 bp, Artificial Sequence
  Synthetic oligonucleotide
acgcatgccgcctgtcaaaggatcgactat

SEQ ID NO: 223937 - DNA, 30 bp, Artificial Sequence
  Synthetic oligonucleotide
cggatgtatgtctgctttacagatgactat

SEQ ID NO: 223938 - DNA, 30 bp, Artificial Sequence
  Synthetic oligonucleotide
gttagcggacagggggtagagggtgactat

SEQ ID NO: 223939 - DNA, 30 bp, Artificial Sequence
  Synthetic oligonucleotide
taatgagtcactgtaacatacattgactat

SEQ ID NO: 223940 - DNA, 30 bp, Artificial Sequence
  Synthetic oligonucleotide
ggttgagtgtttgtacctcaggcctactat

SEQ ID NO: 223941 - DNA, 30 bp, Artificial Sequence
  Synthetic oligonucleotide
agagaagtcgcgatcgtgataacgtactat

SEQ ID NO: 223942 - DNA, 30 bp, Artificial Sequence
  Synthetic oligonucleotide
gaatgatactgccacaaatcacggtactat

SEQ ID NO: 223943 - DNA, 30 bp, Artificial Sequence
  Synthetic oligonucleotide
caacacgggtcaataccgcagctgtactat

SEQ ID NO: 223944 - DNA, 30 bp, Artificial Sequence
  Synthetic oligonucleotide
attgcaggcgacacagggagggtttactat

SEQ ID NO: 223945 - DNA, 30 bp, Artificial Sequence
  Synthetic oligonucleotide
aaggtcgtagatttcaaacggtcaacctat

SEQ ID NO: 223946 - DNA, 30 bp, Artificial Sequence
  Synthetic oligonucleotide
gccttcacatttgcaaccacatctacctat

SEQ ID NO: 223947 - DNA, 30 bp, Artificial Sequence
  Synthetic oligonucleotide
caacataacgagtctcgcacatctacctat

SEQ ID NO: 223948 - DNA, 30 bp, Artificial Sequence
  Synthetic oligonucleotide
tttatccacagtaagtcaacttaaccctat

SEQ ID NO: 223949 - DNA, 30 bp, Artificial Sequence
  Synthetic oligonucleotide
gatgaggtgaaccttctctaactcccctat

SEQ ID NO: 223950 - DNA, 30 bp, Artificial Sequence
  Synthetic oligonucleotide
aggtctggtgacactgatgggaggccctat

SEQ ID NO: 223951 - DNA, 30 bp, Artificial Sequence
  Synthetic oligonucleotide
gaacgccaaaattactgacgtgatccctat

SEQ ID NO: 223952 - DNA, 30 bp, Artificial Sequence
  Synthetic oligonucleotide
atcatagtgcattgccaccagtcagcctat

SEQ ID NO: 223953 - DNA, 30 bp, Artificial Sequence
  Synthetic oligonucleotide
tcctgtatattcctttaagagagagcctat

SEQ ID NO: 223954 - DNA, 30 bp, Artificial Sequence
  Synthetic oligonucleotide
cgtacttctggcgcgtatcttatggcctat

SEQ ID NO: 223955 - DNA, 30 bp, Artificial Sequence
  Synthetic oligonucleotide
ctttgactcgtgaaagatgtaagtgcctat

SEQ ID NO: 223956 - DNA, 30 bp, Artificial Sequence
  Synthetic oligonucleotide
tcagagagcgctctagttaagcgtgcctat

SEQ ID NO: 223957 - DNA, 30 bp, Artificial Sequence
  Synthetic oligonucleotide
cgataaccaattattacaacgaattcctat

SEQ ID NO: 223958 - DNA, 30 bp, Artificial Sequence
  Synthetic oligonucleotide
atatccgatcatgggctccaggattcctat

SEQ ID NO: 223959 - DNA, 30 bp, Artificial Sequence
  Synthetic oligonucleotide
ttggtgtgttctctttttgtgttttcctat

SEQ ID NO: 223960 - DNA, 30 bp, Artificial Sequence
  Synthetic oligonucleotide
gttcggagtgtataaattgtgctaagctat

SEQ ID NO: 223961 - DNA, 30 bp, Artificial Sequence
  Synthetic oligonucleotide
ggtaccttggcgaagaaggtacttagctat

SEQ ID NO: 223962 - DNA, 30 bp, Artificial Sequence
  Synthetic oligonucleotide
acgttcacgaaccatactctacaacgctat

SEQ ID NO: 223963 - DNA, 30 bp, Artificial Sequence
  Synthetic oligonucleotide
tcgctccggcttaggtcgccaggacgctat

SEQ ID NO: 223964 - DNA, 30 bp, Artificial Sequence
  Synthetic oligonucleotide
cgcgtgggttggaagtgactctgacgctat

SEQ ID NO: 223965 - DNA, 30 bp, Artificial Sequence
  Synthetic oligonucleotide
agtttaagcgaatatccattatcccgctat

SEQ ID NO: 223966 - DNA, 30 bp, Artificial Sequence
  Synthetic oligonucleotide
agcactatcaaactgatggaggggcgctat

SEQ ID NO: 223967 - DNA, 30 bp, Artificial Sequence
  Synthetic oligonucleotide
ataataaggtgagtcgtggtgccaggctat

SEQ ID NO: 223968 - DNA, 30 bp, Artificial Sequence
  Synthetic oligonucleotide
ctgccaacagtaaaactgggtgagggctat

SEQ ID NO: 223969 - DNA, 30 bp, Artificial Sequence
  Synthetic oligonucleotide
actactagggagtcgcgaatcaaatgctat

SEQ ID NO: 223970 - DNA, 31 bp, Artificial Sequence
  Synthetic oligonucleotide
agggtgtttttgctgtatgattgaatgctat

SEQ ID NO: 223971 - DNA, 30 bp, Artificial Sequence
  Synthetic oligonucleotide
gccagtcaaagtttcgagcgaaactgctat

SEQ ID NO: 223972 - DNA, 30 bp, Artificial Sequence
  Synthetic oligonucleotide
accgacggctccccgaacagccactgctat

SEQ ID NO: 223973 - DNA, 30 bp, Artificial Sequence
  Synthetic oligonucleotide
ggttaaatggggttacgtctgttgtgctat

SEQ ID NO: 223974 - DNA, 30 bp, Artificial Sequence
  Synthetic oligonucleotide
caataggcatttctccgtatgtattgctat

SEQ ID NO: 223975 - DNA, 30 bp, Artificial Sequence
  Synthetic oligonucleotide
acgatgattcttaatttaaattgaatctat

SEQ ID NO: 223976 - DNA, 30 bp, Artificial Sequence
  Synthetic oligonucleotide
tctttgagatctcatgagttattcatctat

SEQ ID NO: 223977 - DNA, 30 bp, Artificial Sequence
  Synthetic oligonucleotide
gcaacccaacggacggtacgttagatctat

SEQ ID NO: 223978 - DNA, 30 bp, Artificial Sequence
  Synthetic oligonucleotide
cgctctgtaatgtcgttttggaggatctat

SEQ ID NO: 223979 - DNA, 30 bp, Artificial Sequence
  Synthetic oligonucleotide
gttatacaccgactaagggtctcactctat

SEQ ID NO: 223980 - DNA, 30 bp, Artificial Sequence
  Synthetic oligonucleotide
tagaattgatatggagtgctactactctat

SEQ ID NO: 223981 - DNA, 30 bp, Artificial Sequence
  Synthetic oligonucleotide
tgattccacccacccttgttgaccctctat

SEQ ID NO: 223982 - DNA, 30 bp, Artificial Sequence
  Synthetic oligonucleotide
tacgagtgatcgtagtgtaaaccgctctat

SEQ ID NO: 223983 - DNA, 30 bp, Artificial Sequence
  Synthetic oligonucleotide
atagtgactaaaacaggcactaatgtctat

SEQ ID NO: 223984 - DNA, 30 bp, Artificial Sequence
  Synthetic oligonucleotide
acagaagatgatcctgtgatgtgcttctat

SEQ ID NO: 223985 - DNA, 30 bp, Artificial Sequence
  Synthetic oligonucleotide
caccgtatggcgataaattaaccgttctat

SEQ ID NO: 223986 - DNA, 30 bp, Artificial Sequence
  Synthetic oligonucleotide
acgatgtgatcgtggtgatacgatttctat

SEQ ID NO: 223987 - DNA, 30 bp, Artificial Sequence
  Synthetic oligonucleotide
tgagggcatttgccgaaggttggtttctat

SEQ ID NO: 223988 - DNA, 30 bp, Artificial Sequence
  Synthetic oligonucleotide
tcggggtcgaggatgggggaaataaagtat

SEQ ID NO: 223989 - DNA, 30 bp, Artificial Sequence
  Synthetic oligonucleotide
ggaatcccctatctaaacgtcaacaagtat

SEQ ID NO: 223990 - DNA, 30 bp, Artificial Sequence
  Synthetic oligonucleotide
acctcggtcgtgggtgacggacacaagtat

SEQ ID NO: 223991 - DNA, 30 bp, Artificial Sequence
  Synthetic oligonucleotide
ttagaccggatatcctaatttagcaagtat

SEQ ID NO: 223992 - DNA, 30 bp, Artificial Sequence
  Synthetic oligonucleotide
cttactccaggcgttagtccttgcaagtat

SEQ ID NO: 223993 - DNA, 30 bp, Artificial Sequence
  Synthetic oligonucleotide
cactgcgtggggttgcgcatagtcaagtat

SEQ ID NO: 223994 - DNA, 30 bp, Artificial Sequence
  Synthetic oligonucleotide
ggctatctaaacaatactattgtacagtat

SEQ ID NO: 223995 - DNA, 30 bp, Artificial Sequence
  Synthetic oligonucleotide
gcccaagctttgcgaattcacttccagtat

SEQ ID NO: 223996 - DNA, 30 bp, Artificial Sequence
  Synthetic oligonucleotide
agtagtatctgtaagactgtcggtcagtat

SEQ ID NO: 223997 - DNA, 30 bp, Artificial Sequence
  Synthetic oligonucleotide
aggtgtaagacaccaggttctcaagagtat

SEQ ID NO: 223998 - DNA, 30 bp, Artificial Sequence
  Synthetic oligonucleotide
caggaatgcgcagagaaggcgccagagtat

SEQ ID NO: 223999 - DNA, 30 bp, Artificial Sequence
  Synthetic oligonucleotide
cactaacggcggggcgtcaagttagagtat

SEQ ID NO: 224000 - DNA, 30 bp, Artificial Sequence
  Synthetic oligonucleotide
tccacagccccggcgctccggctcgagtat

SEQ ID NO: 224001 - DNA, 30 bp, Artificial Sequence
  Synthetic oligonucleotide
gagaaaatacgtacattgccgaaggagtat

SEQ ID NO: 224002 - DNA, 30 bp, Artificial Sequence
  Synthetic oligonucleotide
cgttgcgagatcccgagtctaattgagtat

SEQ ID NO: 224003 - DNA, 30 bp, Artificial Sequence
  Synthetic oligonucleotide
tcctgttttcggagtctaagagttgagtat

SEQ ID NO: 224004 - DNA, 30 bp, Artificial Sequence
  Synthetic oligonucleotide
ttatgaagtcgcacgggatatgttgagtat

SEQ ID NO: 224005 - DNA, 30 bp, Artificial Sequence
  Synthetic oligonucleotide
ggcaccggcctcgcctcaaggagatagtat

SEQ ID NO: 224006 - DNA, 30 bp, Artificial Sequence
  Synthetic oligonucleotide
agactgttatctaccggaggttactagtat

SEQ ID NO: 224007 - DNA, 30 bp, Artificial Sequence
  Synthetic oligonucleotide
aaactgccagagggcggggatacctagtat

SEQ ID NO: 224008 - DNA, 30 bp, Artificial Sequence
  Synthetic oligonucleotide
agggcttcatcgtagcgattcttctagtat

SEQ ID NO: 224009 - DNA, 30 bp, Artificial Sequence
  Synthetic oligonucleotide
tgtactacaagttgatgttgcatttagtat

SEQ ID NO: 224010 - DNA, 30 bp, Artificial Sequence
  Synthetic oligonucleotide
tcgagggcaagaaggagacaattttagtat

SEQ ID NO: 224011 - DNA, 30 bp, Artificial Sequence
  Synthetic oligonucleotide
actttgaaaatctagcgtattattacgtat

SEQ ID NO: 224012 - DNA, 30 bp, Artificial Sequence
  Synthetic oligonucleotide
caccgtgccaaaatgtagtcaacaccgtat

SEQ ID NO: 224013 - DNA, 30 bp, Artificial Sequence
  Synthetic oligonucleotide
ggtttaagcgcgaacgggggaaagccgtat

SEQ ID NO: 224014 - DNA, 30 bp, Artificial Sequence
  Synthetic oligonucleotide
cggaacggggattgcgctaataagccgtat

SEQ ID NO: 224015 - DNA, 30 bp, Artificial Sequence
  Synthetic oligonucleotide
ttatcaacatctactggggcttccgcgtat

SEQ ID NO: 224016 - DNA, 30 bp, Artificial Sequence
  Synthetic oligonucleotide
acgtggctcgggcgcttctgcctcgcgtat

SEQ ID NO: 224017 - DNA, 30 bp, Artificial Sequence
  Synthetic oligonucleotide
gcaatgcgcatttctaacccataatcgtat

SEQ ID NO: 224018 - DNA, 30 bp, Artificial Sequence
  Synthetic oligonucleotide
ctaaaagactccagttgtccaatgtcgtat

SEQ ID NO: 224019 - DNA, 30 bp, Artificial Sequence
  Synthetic oligonucleotide
cttcactttcgtgtcgccaatccttcgtat

SEQ ID NO: 224020 - DNA, 30 bp, Artificial Sequence
  Synthetic oligonucleotide
tcccggataaatagtacagatacaaggtat

SEQ ID NO: 224021 - DNA, 30 bp, Artificial Sequence
  Synthetic oligonucleotide
accgtcgcaccgggtcgctaggacaggtat

SEQ ID NO: 224022 - DNA, 30 bp, Artificial Sequence
  Synthetic oligonucleotide
gatcgcctagtcactcccaactcccggtat

SEQ ID NO: 224023 - DNA, 30 bp, Artificial Sequence
  Synthetic oligonucleotide
tacgtagtttttcagcacaaccgtcggtat

SEQ ID NO: 224024 - DNA, 28 bp, Artificial Sequence
  Synthetic oligonucleotide
gggttaccgtgaggccttatttcggtat

SEQ ID NO: 224025 - DNA, 30 bp, Artificial Sequence
  Synthetic oligonucleotide
ccgcagagagccgcacacattaaggggtat

SEQ ID NO: 224026 - DNA, 30 bp, Artificial Sequence
  Synthetic oligonucleotide
actcgtaatatgtacgacacgcgggggtat

SEQ ID NO: 224027 - DNA, 30 bp, Artificial Sequence
  Synthetic oligonucleotide
agatccacctgggcaggccctgtggggtat

SEQ ID NO: 224028 - DNA, 30 bp, Artificial Sequence
  Synthetic oligonucleotide
tcggacatctgtaagaggactccctggtat

SEQ ID NO: 224029 - DNA, 30 bp, Artificial Sequence
  Synthetic oligonucleotide
tgcgcactcagatgcgtgctttcctggtat

SEQ ID NO: 224030 - DNA, 30 bp, Artificial Sequence
  Synthetic oligonucleotide
ttgccgtaatggcttacacataagtggtat

SEQ ID NO: 224031 - DNA, 30 bp, Artificial Sequence
  Synthetic oligonucleotide
tcctcagatcagtcgtgttaagcaatgtat

SEQ ID NO: 224032 - DNA, 30 bp, Artificial Sequence
  Synthetic oligonucleotide
tgtacaaccatgcgaacagaaagaatgtat

SEQ ID NO: 224033 - DNA, 30 bp, Artificial Sequence
  Synthetic oligonucleotide
ctgtagtattagccttcgatccgactgtat

SEQ ID NO: 224034 - DNA, 30 bp, Artificial Sequence
  Synthetic oligonucleotide
atcgggaggttctcaggtggcgtggtgtat

SEQ ID NO: 224035 - DNA, 30 bp, Artificial Sequence
  Synthetic oligonucleotide
tcccgaaacggggttacgatgttggtgtat

SEQ ID NO: 224036 - DNA, 30 bp, Artificial Sequence
  Synthetic oligonucleotide
atcttggctcgctgagaaggcagtgtgtat

SEQ ID NO: 224037 - DNA, 30 bp, Artificial Sequence
  Synthetic oligonucleotide
tcttatctgttgtgtgttcctcttgtgtat

SEQ ID NO: 224038 - DNA, 25 bp, Artificial Sequence
  Synthetic oligonucleotide
tttgttgtgttttcctcttgtgtat

SEQ ID NO: 224039 - DNA, 30 bp, Artificial Sequence
  Synthetic oligonucleotide
tggtatcccagggggaaattgtttgtgtat

SEQ ID NO: 224040 - DNA, 30 bp, Artificial Sequence
  Synthetic oligonucleotide
cggacggcgtttgtgagtcagcagttgtat

SEQ ID NO: 224041 - DNA, 30 bp, Artificial Sequence
  Synthetic oligonucleotide
atccatcgaaagtatgtttgtcggttgtat

SEQ ID NO: 224042 - DNA, 30 bp, Artificial Sequence
  Synthetic oligonucleotide
cgagtgtataaaaaccatctcaatttgtat

SEQ ID NO: 224043 - DNA, 30 bp, Artificial Sequence
  Synthetic oligonucleotide
acgcgccagtgttcaaaacatgtaaattat

SEQ ID NO: 224044 - DNA, 30 bp, Artificial Sequence
  Synthetic oligonucleotide
gtgcactggtgtatgtgcttgaagaattat

SEQ ID NO: 224045 - DNA, 31 bp, Artificial Sequence
  Synthetic oligonucleotide
attaagtgtgctaacctggctccagaattat

SEQ ID NO: 224046 - DNA, 30 bp, Artificial Sequence
  Synthetic oligonucleotide
ataccgctaatccgttgaagtgggaattat

SEQ ID NO: 224047 - DNA, 30 bp, Artificial Sequence
  Synthetic oligonucleotide
ctacgtcgatttgcggtttagggtaattat

SEQ ID NO: 224048 - DNA, 30 bp, Artificial Sequence
  Synthetic oligonucleotide
agatttaaaacggtgagcttaaaccattat

SEQ ID NO: 224049 - DNA, 30 bp, Artificial Sequence
  Synthetic oligonucleotide
gtgtaccgatttcacaatcacgaccattat

SEQ ID NO: 224050 - DNA, 30 bp, Artificial Sequence
  Synthetic oligonucleotide
atgttatctgcaagggttgatacccattat

SEQ ID NO: 224051 - DNA, 30 bp, Artificial Sequence
  Synthetic oligonucleotide
gtaagtagatcaacgggtcagggccattat

SEQ ID NO: 224052 - DNA, 30 bp, Artificial Sequence
  Synthetic oligonucleotide
cagcagccgagtgatggcgagacgcattat

SEQ ID NO: 224053 - DNA, 30 bp, Artificial Sequence
  Synthetic oligonucleotide
tcattaggcgagtatcaacactggcattat

SEQ ID NO: 224054 - DNA, 30 bp, Artificial Sequence
  Synthetic oligonucleotide
agaaattggaattggttccttagtcattat

SEQ ID NO: 224055 - DNA, 30 bp, Artificial Sequence
  Synthetic oligonucleotide
cacgccaaattaggacaccgacgtcattat

SEQ ID NO: 224056 - DNA, 30 bp, Artificial Sequence
  Synthetic oligonucleotide
agcgttgcgcccgtaatatattttcattat

SEQ ID NO: 224057 - DNA, 30 bp, Artificial Sequence
  Synthetic oligonucleotide
gtgtgtggcgatgaaaggggtacagattat

SEQ ID NO: 224058 - DNA, 30 bp, Artificial Sequence
  Synthetic oligonucleotide
tgacaaaggattaacccccaaggagattat

SEQ ID NO: 224059 - DNA, 30 bp, Artificial Sequence
  Synthetic oligonucleotide
tcacaggagcgtaggctttgacacgattat

SEQ ID NO: 224060 - DNA, 30 bp, Artificial Sequence
  Synthetic oligonucleotide
gcgacgtcaggcttagtgcatagggattat

SEQ ID NO: 224061 - DNA, 30 bp, Artificial Sequence
  Synthetic oligonucleotide
tgttacgctacgggacgctaatgtgattat

SEQ ID NO: 224062 - DNA, 30 bp, Artificial Sequence
  Synthetic oligonucleotide
tataggattcagttatacaccctatattat

SEQ ID NO: 224063 - DNA, 30 bp, Artificial Sequence
  Synthetic oligonucleotide
ttaggcgtcagtgagtgtctgttgtattat

SEQ ID NO: 224064 - DNA, 30 bp, Artificial Sequence
  Synthetic oligonucleotide
atgaggttttccagacaacgagcttattat

SEQ ID NO: 224065 - DNA, 30 bp, Artificial Sequence
  Synthetic oligonucleotide
tatggtaccgtgacgaaagtgaacacttat

SEQ ID NO: 224066 - DNA, 30 bp, Artificial Sequence
  Synthetic oligonucleotide
tagtagataggcgacttaagaccgacttat

SEQ ID NO: 224067 - DNA, 30 bp, Artificial Sequence
  Synthetic oligonucleotide
tgctcgccggtctaatcacatgggacttat

SEQ ID NO: 224068 - DNA, 30 bp, Artificial Sequence
  Synthetic oligonucleotide
gcgcgcccagtgctgctacaactgacttat

SEQ ID NO: 224069 - DNA, 30 bp, Artificial Sequence
  Synthetic oligonucleotide
ggatacggaatggacaatgcctctgcttat

SEQ ID NO: 224070 - DNA, 30 bp, Artificial Sequence
  Synthetic oligonucleotide
atagacaataggagtgtttacacgtcttat

SEQ ID NO: 224071 - DNA, 30 bp, Artificial Sequence
  Synthetic oligonucleotide
atgcataagggtagggacctatcgtcttat

SEQ ID NO: 224072 - DNA, 30 bp, Artificial Sequence
  Synthetic oligonucleotide
gcaatgtaacggtcggctgtttcgtcttat

SEQ ID NO: 224073 - DNA, 30 bp, Artificial Sequence
  Synthetic oligonucleotide
agaaccgagttgatccacagagggtcttat

SEQ ID NO: 224074 - DNA, 30 bp, Artificial Sequence
  Synthetic oligonucleotide
tcccgggtggatcagtgacttgtgtcttat

SEQ ID NO: 224075 - DNA, 30 bp, Artificial Sequence
  Synthetic oligonucleotide
cgaattagaacttcaccgatttaaagttat

SEQ ID NO: 224076 - DNA, 30 bp, Artificial Sequence
  Synthetic oligonucleotide
atagcactctggtcgtattcaaagagttat

SEQ ID NO: 224077 - DNA, 30 bp, Artificial Sequence
  Synthetic oligonucleotide
tagtatatgggatctggtatgtctagttat

SEQ ID NO: 224078 - DNA, 30 bp, Artificial Sequence
  Synthetic oligonucleotide
caggtgctacgtcttgggttgcgccgttat

SEQ ID NO: 224079 - DNA, 30 bp, Artificial Sequence
  Synthetic oligonucleotide
gcttaactcattaagatagggggtcgttat

SEQ ID NO: 224080 - DNA, 30 bp, Artificial Sequence
  Synthetic oligonucleotide
cgtgcatctctcagatcccgccttcgttat

SEQ ID NO: 224081 - DNA, 30 bp, Artificial Sequence
  Synthetic oligonucleotide
actggaggcacggtcacaatggctggttat

SEQ ID NO: 224082 - DNA, 30 bp, Artificial Sequence
  Synthetic oligonucleotide
ggaggatagtcttggatgtgttcatgttat

SEQ ID NO: 224083 - DNA, 30 bp, Artificial Sequence
  Synthetic oligonucleotide
gcgataaagagtctcaaggagcactgttat

SEQ ID NO: 224084 - DNA, 30 bp, Artificial Sequence
  Synthetic oligonucleotide
atggcttgatagaggcgccacggctgttat

SEQ ID NO: 224085 - DNA, 30 bp, Artificial Sequence
  Synthetic oligonucleotide
cctaaggttggtagatacaggttctgttat

SEQ ID NO: 224086 - DNA, 30 bp, Artificial Sequence
  Synthetic oligonucleotide
tgggtagaatagtatggacgttattgttat

SEQ ID NO: 224087 - DNA, 30 bp, Artificial Sequence
  Synthetic oligonucleotide
ccaaactcggatgagcggacttaaatttat

SEQ ID NO: 224088 - DNA, 30 bp, Artificial Sequence
  Synthetic oligonucleotide
ctaggcgtgacagtggcacatgcaatttat

SEQ ID NO: 224089 - DNA, 30 bp, Artificial Sequence
  Synthetic oligonucleotide
gttcgaacgtcaaccgtcagattaatttat

SEQ ID NO: 224090 - DNA, 30 bp, Artificial Sequence
  Synthetic oligonucleotide
tcactaggtcaagatattttggagatttat

SEQ ID NO: 224091 - DNA, 30 bp, Artificial Sequence
  Synthetic oligonucleotide
cttggcattcacccggaatgcgcgatttat

SEQ ID NO: 224092 - DNA, 30 bp, Artificial Sequence
  Synthetic oligonucleotide
tgaaaacagtagacacgacgctatatttat

SEQ ID NO: 224093 - DNA, 30 bp, Artificial Sequence
  Synthetic oligonucleotide
cacggagattgacagccagatgaactttat

SEQ ID NO: 224094 - DNA, 30 bp, Artificial Sequence
  Synthetic oligonucleotide
agacaaaataccctaattccgcggctttat

SEQ ID NO: 224095 - DNA, 30 bp, Artificial Sequence
  Synthetic oligonucleotide
gacatacttataggcgggacgaaagtttat

SEQ ID NO: 224096 - DNA, 30 bp, Artificial Sequence
  Synthetic oligonucleotide
atgtgagacgtgacttggcaggtcgtttat

SEQ ID NO: 224097 - DNA, 30 bp, Artificial Sequence
  Synthetic oligonucleotide
tcttatctgttgtgttttcctcttgtttat

SEQ ID NO: 224098 - DNA, 30 bp, Artificial Sequence
  Synthetic oligonucleotide
aacgtattcgtatgacgacaccgattttat

SEQ ID NO: 224099 - DNA, 30 bp, Artificial Sequence
  Synthetic oligonucleotide
aggctattggcttaagtaaatagcttttat

SEQ ID NO: 224100 - DNA, 30 bp, Artificial Sequence
  Synthetic oligonucleotide
ttgggcgatagctaccatgttccgttttat

SEQ ID NO: 224101 - DNA, 30 bp, Artificial Sequence
  Synthetic oligonucleotide
ctggagggcctcgtgactattaatttttat

SEQ ID NO: 224102 - DNA, 30 bp, Artificial Sequence
  Synthetic oligonucleotide
ttctgtccctccttgcgtgggcgaaaaact

SEQ ID NO: 224103 - DNA, 30 bp, Artificial Sequence
  Synthetic oligonucleotide
ataatgcgcccgttggcacagaacaaaact

SEQ ID NO: 224104 - DNA, 30 bp, Artificial Sequence
  Synthetic oligonucleotide
gcgttttagtatagagacagatcgaaaact

SEQ ID NO: 224105 - DNA, 30 bp, Artificial Sequence
  Synthetic oligonucleotide
aaactcgtaatcgaaaatggcgggaaaact

SEQ ID NO: 224106 - DNA, 30 bp, Artificial Sequence
  Synthetic oligonucleotide
taataataaccttcatagatatctaaaact

SEQ ID NO: 224107 - DNA, 30 bp, Artificial Sequence
  Synthetic oligonucleotide
cgttcactgattccaagcgggctgcaaact

SEQ ID NO: 224108 - DNA, 30 bp, Artificial Sequence
  Synthetic oligonucleotide
atctaccactccgttagaaacgttcaaact

SEQ ID NO: 224109 - DNA, 30 bp, Artificial Sequence
  Synthetic oligonucleotide
gtcgtcttaaccgatgtcaccaaagaaact

SEQ ID NO: 224110 - DNA, 30 bp, Artificial Sequence
  Synthetic oligonucleotide
atggtacaatggggtaatttagcagaaact

SEQ ID NO: 224111 - DNA, 30 bp, Artificial Sequence
  Synthetic oligonucleotide
tcagtcactttgaatagattttgagaaact

SEQ ID NO: 224112 - DNA, 30 bp, Artificial Sequence
  Synthetic oligonucleotide
tgcggcgtctacgctcaacttcacgaaact

SEQ ID NO: 224113 - DNA, 30 bp, Artificial Sequence
  Synthetic oligonucleotide
acaagtagtgctttgaagaagcgcgaaact

SEQ ID NO: 224114 - DNA, 30 bp, Artificial Sequence
  Synthetic oligonucleotide
tgtccattaacaagggtcctacaataaact

SEQ ID NO: 224115 - DNA, 30 bp, Artificial Sequence
  Synthetic oligonucleotide
cttagcaacgggaaagaccaccactaaact

SEQ ID NO: 224116 - DNA, 30 bp, Artificial Sequence
  Synthetic oligonucleotide
tacgttgagatcgattatcccgtgtaaact

SEQ ID NO: 224117 - DNA, 30 bp, Artificial Sequence
  Synthetic oligonucleotide
ctaggaaagcggacaaaacatttgtaaact

SEQ ID NO: 224118 - DNA, 30 bp, Artificial Sequence
  Synthetic oligonucleotide
ggtatacatcagacatagtgtagttaaact

SEQ ID NO: 224119 - DNA, 31 bp, Artificial Sequence
  Synthetic oligonucleotide
acacaaagtcgctttaatgtcggtaacaact

SEQ ID NO: 224120 - DNA, 30 bp, Artificial Sequence
  Synthetic oligonucleotide
ttcaaggggacaaaaatagggcccacaact

SEQ ID NO: 224121 - DNA, 30 bp, Artificial Sequence
  Synthetic oligonucleotide
ggatgagtatacaattcggactggacaact

SEQ ID NO: 224122 - DNA, 30 bp, Artificial Sequence
  Synthetic oligonucleotide
ttctgcggcatctccatacaggtgacaact

SEQ ID NO: 224123 - DNA, 30 bp, Artificial Sequence
  Synthetic oligonucleotide
agagaagtcatcggtgggcgtagtacaact

SEQ ID NO: 224124 - DNA, 30 bp, Artificial Sequence
  Synthetic oligonucleotide
gggccaaatttataacattgtagtacaact

SEQ ID NO: 224125 - DNA, 30 bp, Artificial Sequence
  Synthetic oligonucleotide
aagttatgcaggcgtcacattgcagcaact

SEQ ID NO: 224126 - DNA, 30 bp, Artificial Sequence
  Synthetic oligonucleotide
taagcgtaggtccaggattgttgggcaact

SEQ ID NO: 224127 - DNA, 30 bp, Artificial Sequence
  Synthetic oligonucleotide
caccgcagatcccaggccctgcatgcaact

SEQ ID NO: 224128 - DNA, 30 bp, Artificial Sequence
  Synthetic oligonucleotide
tactgggcgtaagtagtgcggtcatcaact

SEQ ID NO: 224129 - DNA, 30 bp, Artificial Sequence
  Synthetic oligonucleotide
ggacaccgacttacccagaaaatatcaact

SEQ ID NO: 224130 - DNA, 30 bp, Artificial Sequence
  Synthetic oligonucleotide
accacaaagggagtttagtatgtatcaact

SEQ ID NO: 224131 - DNA, 30 bp, Artificial Sequence
  Synthetic oligonucleotide
tagacagagtcaggcggtcttcactcaact

SEQ ID NO: 224132 - DNA, 30 bp, Artificial Sequence
  Synthetic oligonucleotide
gcacttttaggcgaagccactctgagaact

SEQ ID NO: 224133 - DNA, 30 bp, Artificial Sequence
  Synthetic oligonucleotide
tcactttgagagcagcacgggcatagaact

SEQ ID NO: 224134 - DNA, 30 bp, Artificial Sequence
  Synthetic oligonucleotide
catacggcatagtagtctgctggtagaact

SEQ ID NO: 224135 - DNA, 30 bp, Artificial Sequence
  Synthetic oligonucleotide
cgggggaaacgagaaccggttaaacgaact

SEQ ID NO: 224136 - DNA, 30 bp, Artificial Sequence
  Synthetic oligonucleotide
tgccacctaacaagcatgtgcgcccgaact

SEQ ID NO: 224137 - DNA, 30 bp, Artificial Sequence
  Synthetic oligonucleotide
ttccttttagctcaaatcaatatgcgaact

SEQ ID NO: 224138 - DNA, 30 bp, Artificial Sequence
  Synthetic oligonucleotide
tttccgaggggaacgagctggcatcgaact

SEQ ID NO: 224139 - DNA, 30 bp, Artificial Sequence
  Synthetic oligonucleotide
tgttccgaccgggaagtgtgacttcgaact

SEQ ID NO: 224140 - DNA, 30 bp, Artificial Sequence
  Synthetic oligonucleotide
ttcgggcattaactagtgacctggggaact

SEQ ID NO: 224141 - DNA, 30 bp, Artificial Sequence
  Synthetic oligonucleotide
gcactgtacatgttattgcggatgggaact

SEQ ID NO: 224142 - DNA, 30 bp, Artificial Sequence
  Synthetic oligonucleotide
gacaactaatcttatgagttacgtggaact

SEQ ID NO: 224143 - DNA, 30 bp, Artificial Sequence
  Synthetic oligonucleotide
ggacagggacatgcctcaatccgtggaact

SEQ ID NO: 224144 - DNA, 30 bp, Artificial Sequence
  Synthetic oligonucleotide
aacaagtgcggagtcgcaacgatatgaact

SEQ ID NO: 224145 - DNA, 30 bp, Artificial Sequence
  Synthetic oligonucleotide
gcaaataagtctgaacccctggccataact

SEQ ID NO: 224146 - DNA, 30 bp, Artificial Sequence
  Synthetic oligonucleotide
caggtgcaacgttcgtaaggtaagataact

SEQ ID NO: 224147 - DNA, 30 bp, Artificial Sequence
  Synthetic oligonucleotide
gacgcgctcggacgcatttaaatgataact

SEQ ID NO: 224148 - DNA, 30 bp, Artificial Sequence
  Synthetic oligonucleotide
agtgccacctatgaggttcggtttataact

SEQ ID NO: 224149 - DNA, 30 bp, Artificial Sequence
  Synthetic oligonucleotide
ggtgaacttgcatatttggcacaactaact

SEQ ID NO: 224150 - DNA, 30 bp, Artificial Sequence
  Synthetic oligonucleotide
ttcagaaatctctgtaacggacaactaact

SEQ ID NO: 224151 - DNA, 30 bp, Artificial Sequence
  Synthetic oligonucleotide
ccggatttgcctataaaggggtaactaact

SEQ ID NO: 224152 - DNA, 30 bp, Artificial Sequence
  Synthetic oligonucleotide
agactcaaggtagaagtgattggactaact

SEQ ID NO: 224153 - DNA, 30 bp, Artificial Sequence
  Synthetic oligonucleotide
tactccattgggtggtaaaaattgctaact

SEQ ID NO: 224154 - DNA, 30 bp, Artificial Sequence
  Synthetic oligonucleotide
gggggtgattaggatacaactccattaact

SEQ ID NO: 224155 - DNA, 30 bp, Artificial Sequence
  Synthetic oligonucleotide
gtgggcatagcatccggcaccggattaact

SEQ ID NO: 224156 - DNA, 30 bp, Artificial Sequence
  Synthetic oligonucleotide
aataaccgtgagaacagagatatattaact

SEQ ID NO: 224157 - DNA, 30 bp, Artificial Sequence
  Synthetic oligonucleotide
tgggaaaatctgcctcactgatatttaact

SEQ ID NO: 224158 - DNA, 30 bp, Artificial Sequence
  Synthetic oligonucleotide
gctcgtcgggtttaggtgacaaccaacact

SEQ ID NO: 224159 - DNA, 30 bp, Artificial Sequence
  Synthetic oligonucleotide
gagagctgtaagtacaaaggttgacacact

SEQ ID NO: 224160 - DNA, 30 bp, Artificial Sequence
  Synthetic oligonucleotide
acacgcgaatcaagattgcggagccacact

SEQ ID NO: 224161 - DNA, 30 bp, Artificial Sequence
  Synthetic oligonucleotide
agtggttgaagatgattaaacactgacact

SEQ ID NO: 224162 - DNA, 30 bp, Artificial Sequence
  Synthetic oligonucleotide
ttataagctgagccgagaataagtgacact

SEQ ID NO: 224163 - DNA, 30 bp, Artificial Sequence
  Synthetic oligonucleotide
atgcaagttacaaatcgggacaaatacact

SEQ ID NO: 224164 - DNA, 30 bp, Artificial Sequence
  Synthetic oligonucleotide
tgtagggcacaacactctatttcttacact

SEQ ID NO: 224165 - DNA, 30 bp, Artificial Sequence
  Synthetic oligonucleotide
ttatactccgataagatataatgttacact

SEQ ID NO: 224166 - DNA, 30 bp, Artificial Sequence
  Synthetic oligonucleotide
gggccgggccagtggctagatcgaaccact

SEQ ID NO: 224167 - DNA, 30 bp, Artificial Sequence
  Synthetic oligonucleotide
aatatgggagcatagcactctggaaccact

SEQ ID NO: 224168 - DNA, 30 bp, Artificial Sequence
  Synthetic oligonucleotide
attcctagtctgccttctctagccaccact

SEQ ID NO: 224169 - DNA, 30 bp, Artificial Sequence
  Synthetic oligonucleotide
cgacggtctaacatcatcccgctccccact

SEQ ID NO: 224170 - DNA, 30 bp, Artificial Sequence
  Synthetic oligonucleotide
cttttcttgggaaggcgcggttcgcccact

SEQ ID NO: 224171 - DNA, 30 bp, Artificial Sequence
  Synthetic oligonucleotide
ggctataacctacttctcgaaggtcccact

SEQ ID NO: 224172 - DNA, 30 bp, Artificial Sequence
  Synthetic oligonucleotide
cagcaatgaggtaagtgatgagaagccact

SEQ ID NO: 224173 - DNA, 30 bp, Artificial Sequence
  Synthetic oligonucleotide
acagattgaaataagtaatcatctgccact

SEQ ID NO: 224174 - DNA, 30 bp, Artificial Sequence
  Synthetic oligonucleotide
cgctctgtagacattacaggtattgccact

SEQ ID NO: 224175 - DNA, 30 bp, Artificial Sequence
  Synthetic oligonucleotide
tcgacacatctctcaccagacggatccact

SEQ ID NO: 224176 - DNA, 30 bp, Artificial Sequence
  Synthetic oligonucleotide
cagacaaaaaagttctaagatttgtccact

SEQ ID NO: 224177 - DNA, 30 bp, Artificial Sequence
  Synthetic oligonucleotide
ggggcgggggagggcgtaattcattccact

SEQ ID NO: 224178 - DNA, 30 bp, Artificial Sequence
  Synthetic oligonucleotide
tatgcgaatcatcctgcgtggtcaagcact

SEQ ID NO: 224179 - DNA, 30 bp, Artificial Sequence
  Synthetic oligonucleotide
ctgccagggtagattgggaggggaagcact

SEQ ID NO: 224180 - DNA, 30 bp, Artificial Sequence
  Synthetic oligonucleotide
aagtaaaccgcatcggatatcgacagcact

SEQ ID NO: 224181 - DNA, 30 bp, Artificial Sequence
  Synthetic oligonucleotide
atagtataatatatgtatgcaagcagcact

SEQ ID NO: 224182 - DNA, 30 bp, Artificial Sequence
  Synthetic oligonucleotide
atcctcagttggctaacagagatcagcact

SEQ ID NO: 224183 - DNA, 30 bp, Artificial Sequence
  Synthetic oligonucleotide
ctcagtgactttacatagctagcgagcact

SEQ ID NO: 224184 - DNA, 30 bp, Artificial Sequence
  Synthetic oligonucleotide
cctcacgcggtttatcgaatcacccgcact

SEQ ID NO: 224185 - DNA, 30 bp, Artificial Sequence
  Synthetic oligonucleotide
aggccaaggccgtcttaacgtcgccgcact

SEQ ID NO: 224186 - DNA, 30 bp, Artificial Sequence
  Synthetic oligonucleotide
cgtcgaagagtagtggtttgagtccgcact

SEQ ID NO: 224187 - DNA, 30 bp, Artificial Sequence
  Synthetic oligonucleotide
tgtacagcaccgtcaagatctcgtcgcact

SEQ ID NO: 224188 - DNA, 30 bp, Artificial Sequence
  Synthetic oligonucleotide
gatcgtgtggtgggaagtatatcgggcact

SEQ ID NO: 224189 - DNA, 30 bp, Artificial Sequence
  Synthetic oligonucleotide
atcatagcacaagtacaagggtggggcact

SEQ ID NO: 224190 - DNA, 30 bp, Artificial Sequence
  Synthetic oligonucleotide
gcaatgttaccaacaggtgagttgggcact

SEQ ID NO: 224191 - DNA, 30 bp, Artificial Sequence
  Synthetic oligonucleotide
gcccagtgacggcatccaggtagtggcact

SEQ ID NO: 224192 - DNA, 30 bp, Artificial Sequence
  Synthetic oligonucleotide
acaggtgaaccacaaatttaaacgtgcact

SEQ ID NO: 224193 - DNA, 30 bp, Artificial Sequence
  Synthetic oligonucleotide
cataccagtgagttggggctcccgtgcact

SEQ ID NO: 224194 - DNA, 30 bp, Artificial Sequence
  Synthetic oligonucleotide
tgagctgattcggctcgtaccccgatcact

SEQ ID NO: 224195 - DNA, 30 bp, Artificial Sequence
  Synthetic oligonucleotide
agtctagccaaaggggagagtcatatcact

SEQ ID NO: 224196 - DNA, 30 bp, Artificial Sequence
  Synthetic oligonucleotide
aaaatggatgaaggtggctgatctatcact

SEQ ID NO: 224197 - DNA, 30 bp, Artificial Sequence
  Synthetic oligonucleotide
gtaaccggtttgcagaaggagtgtatcact

SEQ ID NO: 224198 - DNA, 30 bp, Artificial Sequence
  Synthetic oligonucleotide
tctcgaaccgtagaaaaagggcaactcact

SEQ ID NO: 224199 - DNA, 30 bp, Artificial Sequence
  Synthetic oligonucleotide
gtattttggccaaacgttggataactcact

SEQ ID NO: 224200 - DNA, 30 bp, Artificial Sequence
  Synthetic oligonucleotide
aggagtgttatgtgtagtgagatactcact

SEQ ID NO: 224201 - DNA, 30 bp, Artificial Sequence
  Synthetic oligonucleotide
ctctgtaagtgggcctgggtgcaagtcact

SEQ ID NO: 224202 - DNA, 31 bp, Artificial Sequence
  Synthetic oligonucleotide
gcgatcaattcttagccaagctcaagtcact

SEQ ID NO: 224203 - DNA, 30 bp, Artificial Sequence
  Synthetic oligonucleotide
ctgatgaattcgggtatgccataggtcact

SEQ ID NO: 224204 - DNA, 30 bp, Artificial Sequence
  Synthetic oligonucleotide
acatcactccactagcctactgcggtcact

SEQ ID NO: 224205 - DNA, 30 bp, Artificial Sequence
  Synthetic oligonucleotide
acgaagcacaaacactataaagatgtcact

SEQ ID NO: 224206 - DNA, 30 bp, Artificial Sequence
  Synthetic oligonucleotide
agtgttaagtgaaaaaaatagggtgtcact

SEQ ID NO: 224207 - DNA, 30 bp, Artificial Sequence
  Synthetic oligonucleotide
acaagatggctctttgtgggcaaaaagact

SEQ ID NO: 224208 - DNA, 30 bp, Artificial Sequence
  Synthetic oligonucleotide
aaacgtgaacccggacttaatggaaagact

SEQ ID NO: 224209 - DNA, 30 bp, Artificial Sequence
  Synthetic oligonucleotide
tcccacgaccgaagattaatgaacaagact

SEQ ID NO: 224210 - DNA, 30 bp, Artificial Sequence
  Synthetic oligonucleotide
gagacaacgctgggccagaggaagaagact

SEQ ID NO: 224211 - DNA, 30 bp, Artificial Sequence
  Synthetic oligonucleotide
caatttaagatttccagcatggttaagact

SEQ ID NO: 224212 - DNA, 30 bp, Artificial Sequence
  Synthetic oligonucleotide
ctatcagatcaataaaaacattttaagact

SEQ ID NO: 224213 - DNA, 30 bp, Artificial Sequence
  Synthetic oligonucleotide
agttagagctgataccatcaaacacagact

SEQ ID NO: 224214 - DNA, 30 bp, Artificial Sequence
  Synthetic oligonucleotide
cgcggaagtgtctataggagaccacagact

SEQ ID NO: 224215 - DNA, 30 bp, Artificial Sequence
  Synthetic oligonucleotide
gagagcaggctacggttggggccccagact

SEQ ID NO: 224216 - DNA, 30 bp, Artificial Sequence
  Synthetic oligonucleotide
gattatcagtagggagtcacgatagagact

SEQ ID NO: 224217 - DNA, 30 bp, Artificial Sequence
  Synthetic oligonucleotide
ctaatacgggcttaaaaactgctagagact

SEQ ID NO: 224218 - DNA, 30 bp, Artificial Sequence
  Synthetic oligonucleotide
agtaatagaggtaattacgggactgagact

SEQ ID NO: 224219 - DNA, 30 bp, Artificial Sequence
  Synthetic oligonucleotide
ccttacatctggaattttcttactgagact

SEQ ID NO: 224220 - DNA, 30 bp, Artificial Sequence
  Synthetic oligonucleotide
ggtccactgacgaaggaattagaatagact

SEQ ID NO: 224221 - DNA, 30 bp, Artificial Sequence
  Synthetic oligonucleotide
cgtcccagtctgagcttagggggctagact

SEQ ID NO: 224222 - DNA, 30 bp, Artificial Sequence
  Synthetic oligonucleotide
cacgaagctacggtctgagttaagtagact

SEQ ID NO: 224223 - DNA, 30 bp, Artificial Sequence
  Synthetic oligonucleotide
gaacaagtggcgtggagataatggtagact

SEQ ID NO: 224224 - DNA, 30 bp, Artificial Sequence
  Synthetic oligonucleotide
gcgtgggtcctacaggtgcgccattagact

SEQ ID NO: 224225 - DNA, 30 bp, Artificial Sequence
  Synthetic oligonucleotide
cgagggaacgtcgcgagggctcattagact

SEQ ID NO: 224226 - DNA, 30 bp, Artificial Sequence
  Synthetic oligonucleotide
taacgtggcaggccggcattggacacgact

SEQ ID NO: 224227 - DNA, 30 bp, Artificial Sequence
  Synthetic oligonucleotide
ccctcaaagctggttactacagggacgact

SEQ ID NO: 224228 - DNA, 30 bp, Artificial Sequence
  Synthetic oligonucleotide
tatagacgaggtcagaactttgggacgact

SEQ ID NO: 224229 - DNA, 30 bp, Artificial Sequence
  Synthetic oligonucleotide
tcctgtggccgttcgcgcgattatacgact

SEQ ID NO: 224230 - DNA, 30 bp, Artificial Sequence
  Synthetic oligonucleotide
tagttgcgaacaatcgtatttgcaccgact

SEQ ID NO: 224231 - DNA, 30 bp, Artificial Sequence
  Synthetic oligonucleotide
gttaagaatttacacatggtctacccgact

SEQ ID NO: 224232 - DNA, 30 bp, Artificial Sequence
  Synthetic oligonucleotide
ggacgttgataaaaacctggaatcccgact

SEQ ID NO: 224233 - DNA, 30 bp, Artificial Sequence
  Synthetic oligonucleotide
tgatagtgcgtggctaagtgggtcccgact

SEQ ID NO: 224234 - DNA, 30 bp, Artificial Sequence
  Synthetic oligonucleotide
aagtgggcccagtcattgacctggccgact

SEQ ID NO: 224235 - DNA, 30 bp, Artificial Sequence
  Synthetic oligonucleotide
gggtgtgtctttacgcctaagcgagcgact

SEQ ID NO: 224236 - DNA, 30 bp, Artificial Sequence
  Synthetic oligonucleotide
ggcaaagttcgggatgcgctagtagcgact

SEQ ID NO: 224237 - DNA, 30 bp, Artificial Sequence
  Synthetic oligonucleotide
aagatattgtggaaaatgataatggcgact

SEQ ID NO: 224238 - DNA, 30 bp, Artificial Sequence
  Synthetic oligonucleotide
atgcgtgtcggtaccgggaaatttgcgact

SEQ ID NO: 224239 - DNA, 30 bp, Artificial Sequence
  Synthetic oligonucleotide
ttggggcagatcgaaggaaacgtctcgact

SEQ ID NO: 224240 - DNA, 30 bp, Artificial Sequence
  Synthetic oligonucleotide
agttgttaatggcgtctccacttctcgact

SEQ ID NO: 224241 - DNA, 30 bp, Artificial Sequence
  Synthetic oligonucleotide
attgttcagactgacttatgattaaggact

SEQ ID NO: 224242 - DNA, 30 bp, Artificial Sequence
  Synthetic oligonucleotide
gctgtcaaatttggcttcgtgagcaggact

SEQ ID NO: 224243 - DNA, 30 bp, Artificial Sequence
  Synthetic oligonucleotide
gagcaccgtttgtaatcttcgggcaggact

SEQ ID NO: 224244 - DNA, 30 bp, Artificial Sequence
  Synthetic oligonucleotide
tgaacatcatgcgtcggacattctaggact

SEQ ID NO: 224245 - DNA, 30 bp, Artificial Sequence
  Synthetic oligonucleotide
ggtgtaagccataaaggccgtctacggact

SEQ ID NO: 224246 - DNA, 30 bp, Artificial Sequence
  Synthetic oligonucleotide
tctcaaaggtaagggcttccacaccggact

SEQ ID NO: 224247 - DNA, 30 bp, Artificial Sequence
  Synthetic oligonucleotide
attggcgctgtagctgaagattaccggact

SEQ ID NO: 224248 - DNA, 30 bp, Artificial Sequence
  Synthetic oligonucleotide
gaggatgggggtatttaaataggtcggact

SEQ ID NO: 224249 - DNA, 30 bp, Artificial Sequence
  Synthetic oligonucleotide
tatgggtggacagctgctgtaagggggact

SEQ ID NO: 224250 - DNA, 30 bp, Artificial Sequence
  Synthetic oligonucleotide
cctaatgcaatagacaaacatgatgggact

SEQ ID NO: 224251 - DNA, 30 bp, Artificial Sequence
  Synthetic oligonucleotide
cgattcgaactcggacataacgactggact

SEQ ID NO: 224252 - DNA, 30 bp, Artificial Sequence
  Synthetic oligonucleotide
gttaggggacatgtaagactcacgtggact

SEQ ID NO: 224253 - DNA, 30 bp, Artificial Sequence
  Synthetic oligonucleotide
gcgaaagcgacaactatggaaaattggact

SEQ ID NO: 224254 - DNA, 30 bp, Artificial Sequence
  Synthetic oligonucleotide
aggagggttatggacgacggacattggact

SEQ ID NO: 224255 - DNA, 30 bp, Artificial Sequence
  Synthetic oligonucleotide
attagtggagccctttcacgatgttggact

SEQ ID NO: 224256 - DNA, 30 bp, Artificial Sequence
  Synthetic oligonucleotide
catcggacggcgggtcgcgcaaaaatgact

SEQ ID NO: 224257 - DNA, 30 bp, Artificial Sequence
  Synthetic oligonucleotide
gtgacggttcaacccaaaattgcaatgact

SEQ ID NO: 224258 - DNA, 30 bp, Artificial Sequence
  Synthetic oligonucleotide
gtgaggcccggagtttgagtccctatgact

SEQ ID NO: 224259 - DNA, 30 bp, Artificial Sequence
  Synthetic oligonucleotide
atgaatgcacgttggacctcgtctatgact

SEQ ID NO: 224260 - DNA, 30 bp, Artificial Sequence
  Synthetic oligonucleotide
atgtaaagactcgtgacgtaatttatgact

SEQ ID NO: 224261 - DNA, 30 bp, Artificial Sequence
  Synthetic oligonucleotide
gcaaggcgtaaagtagggaaccaactgact

SEQ ID NO: 224262 - DNA, 30 bp, Artificial Sequence
  Synthetic oligonucleotide
tgctacacgaagatagaaagcctactgact

SEQ ID NO: 224263 - DNA, 30 bp, Artificial Sequence
  Synthetic oligonucleotide
actgaatggcgttatgctgtagtgctgact

SEQ ID NO: 224264 - DNA, 30 bp, Artificial Sequence
  Synthetic oligonucleotide
cgagcgctacactgggtctggggtctgact

SEQ ID NO: 224265 - DNA, 30 bp, Artificial Sequence
  Synthetic oligonucleotide
cacacagacttagggaagatatttctgact

SEQ ID NO: 224266 - DNA, 30 bp, Artificial Sequence
  Synthetic oligonucleotide
gattcccagcggttaagagcgtaagtgact

SEQ ID NO: 224267 - DNA, 30 bp, Artificial Sequence
  Synthetic oligonucleotide
actgataagatcaggcgtgaaaccgtgact

SEQ ID NO: 224268 - DNA, 30 bp, Artificial Sequence
  Synthetic oligonucleotide
gcagggttgcatcccccgttatgcgtgact

SEQ ID NO: 224269 - DNA, 30 bp, Artificial Sequence
  Synthetic oligonucleotide
agatgacgacttgatgcgaggcgattgact

SEQ ID NO: 224270 - DNA, 30 bp, Artificial Sequence
  Synthetic oligonucleotide
ttgatcgtcaacgaggccactctcttgact

SEQ ID NO: 224271 - DNA, 30 bp, Artificial Sequence
  Synthetic oligonucleotide
cggaagcggaggacaccacgtccgttgact

SEQ ID NO: 224272 - DNA, 30 bp, Artificial Sequence
  Synthetic oligonucleotide
gaggaagatgataggaaggagcgtttgact

SEQ ID NO: 224273 - DNA, 30 bp, Artificial Sequence
  Synthetic oligonucleotide
gacaaattgggtagtgcttaggtaaatact

SEQ ID NO: 224274 - DNA, 30 bp, Artificial Sequence
  Synthetic oligonucleotide
acagggctgtgtttgcctgtgatgaatact

SEQ ID NO: 224275 - DNA, 30 bp, Artificial Sequence
  Synthetic oligonucleotide
agttaaagcgtatcttatcggggtaatact

SEQ ID NO: 224276 - DNA, 31 bp, Artificial Sequence
  Synthetic oligonucleotide
cagccggagggttcgagcgcataaacatact

SEQ ID NO: 224277 - DNA, 30 bp, Artificial Sequence
  Synthetic oligonucleotide
acaaaagactctggtcaccgtgtacatact

SEQ ID NO: 224278 - DNA, 30 bp, Artificial Sequence
  Synthetic oligonucleotide
aacaccggatcttatgtcgaaggccatact

SEQ ID NO: 224279 - DNA, 30 bp, Artificial Sequence
  Synthetic oligonucleotide
caaacatcgcgcggaagaaaatcgcatact

SEQ ID NO: 224280 - DNA, 30 bp, Artificial Sequence
  Synthetic oligonucleotide
agaaggatccgactagccgatagagatact

SEQ ID NO: 224281 - DNA, 30 bp, Artificial Sequence
  Synthetic oligonucleotide
aagcgatatttcttgcgctcctgagatact

SEQ ID NO: 224282 - DNA, 30 bp, Artificial Sequence
  Synthetic oligonucleotide
ttcctgcgtcacgctatggcccacgatact

SEQ ID NO: 224283 - DNA, 30 bp, Artificial Sequence
  Synthetic oligonucleotide
tcgctaggcgaacatcggataatcgatact

SEQ ID NO: 224284 - DNA, 30 bp, Artificial Sequence
  Synthetic oligonucleotide
atgttggtttagtccacacgtgaggatact

SEQ ID NO: 224285 - DNA, 30 bp, Artificial Sequence
  Synthetic oligonucleotide
caagccgataaatggttcagtacggatact

SEQ ID NO: 224286 - DNA, 30 bp, Artificial Sequence
  Synthetic oligonucleotide
tagcatgatcctatgtgcgacccggatact

SEQ ID NO: 224287 - DNA, 30 bp, Artificial Sequence
  Synthetic oligonucleotide
tcgagcacagcgatcgcggccgactatact

SEQ ID NO: 224288 - DNA, 30 bp, Artificial Sequence
  Synthetic oligonucleotide
agcgactcacgaataggtctatattatact

SEQ ID NO: 224289 - DNA, 30 bp, Artificial Sequence
  Synthetic oligonucleotide
aaatgattccacggaagcaatcgaactact

SEQ ID NO: 224290 - DNA, 30 bp, Artificial Sequence
  Synthetic oligonucleotide
ccccactcccagccataacgtcagactact

SEQ ID NO: 224291 - DNA, 30 bp, Artificial Sequence
  Synthetic oligonucleotide
aagataagatcgccgaacgcggagactact

SEQ ID NO: 224292 - DNA, 30 bp, Artificial Sequence
  Synthetic oligonucleotide
acataagttgcatcttggcatctacctact

SEQ ID NO: 224293 - DNA, 30 bp, Artificial Sequence
  Synthetic oligonucleotide
caccaggcgttgttaaaacatcctcctact

SEQ ID NO: 224294 - DNA, 30 bp, Artificial Sequence
  Synthetic oligonucleotide
gacgacagatcttgacgacttaccgctact

SEQ ID NO: 224295 - DNA, 30 bp, Artificial Sequence
  Synthetic oligonucleotide
tagtctgaaagtgggggcccacaatctact

SEQ ID NO: 224296 - DNA, 30 bp, Artificial Sequence
  Synthetic oligonucleotide
gggacggccgtgttgatgccttgatctact

SEQ ID NO: 224297 - DNA, 30 bp, Artificial Sequence
  Synthetic oligonucleotide
caacatggtagccggacatgcatctctact

SEQ ID NO: 224298 - DNA, 30 bp, Artificial Sequence
  Synthetic oligonucleotide
tcgctagttcttctgtctgaatcgtctact

SEQ ID NO: 224299 - DNA, 30 bp, Artificial Sequence
  Synthetic oligonucleotide
tatacggagtgcatagcggggaaaagtact

SEQ ID NO: 224300 - DNA, 30 bp, Artificial Sequence
  Synthetic oligonucleotide
tcaattggtggctcattcaagccaagtact

SEQ ID NO: 224301 - DNA, 30 bp, Artificial Sequence
  Synthetic oligonucleotide
tcggccatacaacctggctaccgaagtact

SEQ ID NO: 224302 - DNA, 30 bp, Artificial Sequence
  Synthetic oligonucleotide
ctgtagtgcgctatcgtggacgtaagtact

SEQ ID NO: 224303 - DNA, 30 bp, Artificial Sequence
  Synthetic oligonucleotide
ataggaaactgggcattagtctccagtact

SEQ ID NO: 224304 - DNA, 30 bp, Artificial Sequence
  Synthetic oligonucleotide
aacatattcttctctaatatgtcgagtact

SEQ ID NO: 224305 - DNA, 30 bp, Artificial Sequence
  Synthetic oligonucleotide
ccggatgtgcaagctatcgtcggtagtact

SEQ ID NO: 224306 - DNA, 30 bp, Artificial Sequence
  Synthetic oligonucleotide
agctaacccccttagagcatgtagcgtact

SEQ ID NO: 224307 - DNA, 30 bp, Artificial Sequence
  Synthetic oligonucleotide
caccaggcaagtatactcacttctcgtact

SEQ ID NO: 224308 - DNA, 30 bp, Artificial Sequence
  Synthetic oligonucleotide
gtgcgtgttgccaaaatgccgaaaggtact

SEQ ID NO: 224309 - DNA, 30 bp, Artificial Sequence
  Synthetic oligonucleotide
gcgtatacgataccgcatttagaaggtact

SEQ ID NO: 224310 - DNA, 30 bp, Artificial Sequence
  Synthetic oligonucleotide
tttacgggggatcaattaaggtccggtact

SEQ ID NO: 224311 - DNA, 30 bp, Artificial Sequence
  Synthetic oligonucleotide
ccagactgctcctgctcatagacgggtact

SEQ ID NO: 224312 - DNA, 30 bp, Artificial Sequence
  Synthetic oligonucleotide
acttacgtaggctacagcaaggcgggtact

SEQ ID NO: 224313 - DNA, 30 bp, Artificial Sequence
  Synthetic oligonucleotide
gcttgatcgctcacattgtcggtgggtact

SEQ ID NO: 224314 - DNA, 30 bp, Artificial Sequence
  Synthetic oligonucleotide
cgatatcatgcatgttctattaatggtact

SEQ ID NO: 224315 - DNA, 30 bp, Artificial Sequence
  Synthetic oligonucleotide
acaatggtaagttaaacttgaactggtact

SEQ ID NO: 224316 - DNA, 30 bp, Artificial Sequence
  Synthetic oligonucleotide
cccgttgggtggtctacgtcaaaatgtact

SEQ ID NO: 224317 - DNA, 30 bp, Artificial Sequence
  Synthetic oligonucleotide
acggttattggtgttagagacagatgtact

SEQ ID NO: 224318 - DNA, 30 bp, Artificial Sequence
  Synthetic oligonucleotide
cgaaacaccgaagcacatctgagatgtact

SEQ ID NO: 224319 - DNA, 30 bp, Artificial Sequence
  Synthetic oligonucleotide
tcacggggcaaattcagtcttaattgtact

SEQ ID NO: 224320 - DNA, 30 bp, Artificial Sequence
  Synthetic oligonucleotide
cgttgcgtctttgttatccaatcttgtact

SEQ ID NO: 224321 - DNA, 30 bp, Artificial Sequence
  Synthetic oligonucleotide
cacagacatatgccggcattcgtcattact

SEQ ID NO: 224322 - DNA, 30 bp, Artificial Sequence
  Synthetic oligonucleotide
tcggttcgctctacgcatgcgccacttact

SEQ ID NO: 224323 - DNA, 30 bp, Artificial Sequence
  Synthetic oligonucleotide
gaaacatgtcgctacaaactttagcttact

SEQ ID NO: 224324 - DNA, 30 bp, Artificial Sequence
  Synthetic oligonucleotide
cgtccgtgagatgccaccttgcacgttact

SEQ ID NO: 224325 - DNA, 30 bp, Artificial Sequence
  Synthetic oligonucleotide
ccctaattgctcaaccattcccaggttact

SEQ ID NO: 224326 - DNA, 30 bp, Artificial Sequence
  Synthetic oligonucleotide
taatgagtagtgatatatttttgtgttact

SEQ ID NO: 224327 - DNA, 30 bp, Artificial Sequence
  Synthetic oligonucleotide
aaagacggcgtcgatcaacccataaaacct

SEQ ID NO: 224328 - DNA, 30 bp, Artificial Sequence
  Synthetic oligonucleotide
gttgcaaccataagaagacagcagaaacct

SEQ ID NO: 224329 - DNA, 30 bp, Artificial Sequence
  Synthetic oligonucleotide
gctgacgagagaattaatataatgaaacct

SEQ ID NO: 224330 - DNA, 30 bp, Artificial Sequence
  Synthetic oligonucleotide
gtcaaatgaactattgtttaaccacaacct

SEQ ID NO: 224331 - DNA, 30 bp, Artificial Sequence
  Synthetic oligonucleotide
ccgtaaatgtattctcctatggcacaacct

SEQ ID NO: 224332 - DNA, 30 bp, Artificial Sequence
  Synthetic oligonucleotide
ccacttcaccgtgtatttgcgcgccaacct

SEQ ID NO: 224333 - DNA, 30 bp, Artificial Sequence
  Synthetic oligonucleotide
tgccgccacataccaagtagctcgcaacct

SEQ ID NO: 224334 - DNA, 30 bp, Artificial Sequence
  Synthetic oligonucleotide
gaaggatcggaagtcaggtcgcgggaacct

SEQ ID NO: 224335 - DNA, 30 bp, Artificial Sequence
  Synthetic oligonucleotide
ggtctggaaatccacattagaggggaacct

SEQ ID NO: 224336 - DNA, 30 bp, Artificial Sequence
  Synthetic oligonucleotide
catccgaattgttgcataaaagcgtaacct

SEQ ID NO: 224337 - DNA, 31 bp, Artificial Sequence
  Synthetic oligonucleotide
gtcgcttaaacataaacactccaaaacacct

SEQ ID NO: 224338 - DNA, 30 bp, Artificial Sequence
  Synthetic oligonucleotide
gataccgtaagacgtgtatgccgaacacct

SEQ ID NO: 224339 - DNA, 30 bp, Artificial Sequence
  Synthetic oligonucleotide
tgaagttgggtattttacgttcccacacct

SEQ ID NO: 224340 - DNA, 30 bp, Artificial Sequence
  Synthetic oligonucleotide
taagacctgtagaggaggatctggacacct

SEQ ID NO: 224341 - DNA, 30 bp, Artificial Sequence
  Synthetic oligonucleotide
taattcgactctcgattcagcgaaccacct

SEQ ID NO: 224342 - DNA, 30 bp, Artificial Sequence
  Synthetic oligonucleotide
tcccaggatgcacgcgtcgggaagccacct

SEQ ID NO: 224343 - DNA, 30 bp, Artificial Sequence
  Synthetic oligonucleotide
ttgtttacaatttaagaacaaatgccacct

SEQ ID NO: 224344 - DNA, 30 bp, Artificial Sequence
  Synthetic oligonucleotide
ccagttagaccttgtaccattattccacct

SEQ ID NO: 224345 - DNA, 30 bp, Artificial Sequence
  Synthetic oligonucleotide
cagactaacgctaactgagtcgcagcacct

SEQ ID NO: 224346 - DNA, 30 bp, Artificial Sequence
  Synthetic oligonucleotide
acggcttatcagcaagcacatcaggcacct

SEQ ID NO: 224347 - DNA, 30 bp, Artificial Sequence
  Synthetic oligonucleotide
gtttgggaggtcgatttagaggaggcacct

SEQ ID NO: 224348 - DNA, 30 bp, Artificial Sequence
  Synthetic oligonucleotide
ataaaggtaccgttacaggaaagtgcacct

SEQ ID NO: 224349 - DNA, 30 bp, Artificial Sequence
  Synthetic oligonucleotide
ctggcaccggatcataaggataactcacct

SEQ ID NO: 224350 - DNA, 30 bp, Artificial Sequence
  Synthetic oligonucleotide
acatggtagttaagaagctcatcgtcacct

SEQ ID NO: 224351 - DNA, 30 bp, Artificial Sequence
  Synthetic oligonucleotide
agcactgggaaggaagacgttgcaagacct

SEQ ID NO: 224352 - DNA, 30 bp, Artificial Sequence
  Synthetic oligonucleotide
gataacccaaccgctgtgctatgaagacct

SEQ ID NO: 224353 - DNA, 30 bp, Artificial Sequence
  Synthetic oligonucleotide
ttaataaaatgggggggcgagacgagacct

SEQ ID NO: 224354 - DNA, 30 bp, Artificial Sequence
  Synthetic oligonucleotide
tagcccaaccgggttgtactggcacgacct

SEQ ID NO: 224355 - DNA, 30 bp, Artificial Sequence
  Synthetic oligonucleotide
tgccatttgaaaacgcgtgtttcaggacct

SEQ ID NO: 224356 - DNA, 30 bp, Artificial Sequence
  Synthetic oligonucleotide
gggtggagttaccctagacgtctaggacct

SEQ ID NO: 224357 - DNA, 30 bp, Artificial Sequence
  Synthetic oligonucleotide
tgtgaggaaatccgctaagcacgcggacct

SEQ ID NO: 224358 - DNA, 30 bp, Artificial Sequence
  Synthetic oligonucleotide
gtttatggttataggtggagtctcggacct

SEQ ID NO: 224359 - DNA, 30 bp, Artificial Sequence
  Synthetic oligonucleotide
ggcaaacctattaaaaatcctcatggacct

SEQ ID NO: 224360 - DNA, 30 bp, Artificial Sequence
  Synthetic oligonucleotide
agcgctagaggcggaccgttaggtggacct

SEQ ID NO: 224361 - DNA, 30 bp, Artificial Sequence
  Synthetic oligonucleotide
tcaggtggttcagagggggttaaatgacct

SEQ ID NO: 224362 - DNA, 30 bp, Artificial Sequence
  Synthetic oligonucleotide
gtatagcgagccactacgtacccatgacct

SEQ ID NO: 224363 - DNA, 30 bp, Artificial Sequence
  Synthetic oligonucleotide
aaagatctcagtgagagcgacgagatacct

SEQ ID NO: 224364 - DNA, 30 bp, Artificial Sequence
  Synthetic oligonucleotide
ggaacaagaatacaagtcttaccactacct

SEQ ID NO: 224365 - DNA, 30 bp, Artificial Sequence
  Synthetic oligonucleotide
ctatcgaataattatcagcagaacctacct

SEQ ID NO: 224366 - DNA, 30 bp, Artificial Sequence
  Synthetic oligonucleotide
gctaaaaagaccaggctgcggcccctacct

SEQ ID NO: 224367 - DNA, 30 bp, Artificial Sequence
  Synthetic oligonucleotide
gaccctcgcagaattaaaaacatcctacct

SEQ ID NO: 224368 - DNA, 30 bp, Artificial Sequence
  Synthetic oligonucleotide
cggccaataggcgtatcccggaagctacct

SEQ ID NO: 224369 - DNA, 30 bp, Artificial Sequence
  Synthetic oligonucleotide
ttgttacggaagggataatcgtgtctacct

SEQ ID NO: 224370 - DNA, 30 bp, Artificial Sequence
  Synthetic oligonucleotide
tacttcgtcaggaactgtgtagttgtacct

SEQ ID NO: 224371 - DNA, 30 bp, Artificial Sequence
  Synthetic oligonucleotide
cacgtcacgattcgcatcccgctgttacct

SEQ ID NO: 224372 - DNA, 30 bp, Artificial Sequence
  Synthetic oligonucleotide
caaccacctctagtggcgacaactttacct

SEQ ID NO: 224373 - DNA, 30 bp, Artificial Sequence
  Synthetic oligonucleotide
tggccggtgctagacccagactggaaccct

SEQ ID NO: 224374 - DNA, 30 bp, Artificial Sequence
  Synthetic oligonucleotide
cgagcctgacgaaaaagttacactaaccct

SEQ ID NO: 224375 - DNA, 30 bp, Artificial Sequence
  Synthetic oligonucleotide
ataacaatggcagcgcttattcaacaccct

SEQ ID NO: 224376 - DNA, 30 bp, Artificial Sequence
  Synthetic oligonucleotide
agactttggattcgctattcgtaacaccct

SEQ ID NO: 224377 - DNA, 30 bp, Artificial Sequence
  Synthetic oligonucleotide
aagcaaaaggatgatcgcaacgggcaccct

SEQ ID NO: 224378 - DNA, 30 bp, Artificial Sequence
  Synthetic oligonucleotide
tcccaggtccaatcgaatcatcccgaccct

SEQ ID NO: 224379 - DNA, 30 bp, Artificial Sequence
  Synthetic oligonucleotide
cggggggaacaccagagccaatttgaccct

SEQ ID NO: 224380 - DNA, 30 bp, Artificial Sequence
  Synthetic oligonucleotide
tcaacgtgatagagggtttaattataccct

SEQ ID NO: 224381 - DNA, 30 bp, Artificial Sequence
  Synthetic oligonucleotide
ccctcaggatcatattcagacaggtaccct

SEQ ID NO: 224382 - DNA, 30 bp, Artificial Sequence
  Synthetic oligonucleotide
ctataggccagcacctaggtcaattaccct

SEQ ID NO: 224383 - DNA, 30 bp, Artificial Sequence
  Synthetic oligonucleotide
tcgctgcgtgaacccttgctaccttaccct

SEQ ID NO: 224384 - DNA, 30 bp, Artificial Sequence
  Synthetic oligonucleotide
atgcgaatgtatgtgctcttcgagacccct

SEQ ID NO: 224385 - DNA, 30 bp, Artificial Sequence
  Synthetic oligonucleotide
acggatgcatagaatgcaaccgctacccct

SEQ ID NO: 224386 - DNA, 30 bp, Artificial Sequence
  Synthetic oligonucleotide
agaggagtaaaagcgtaaatcattacccct

SEQ ID NO: 224387 - DNA, 30 bp, Artificial Sequence
  Synthetic oligonucleotide
ggtatcggtatgcatatgcgattgccccct

SEQ ID NO: 224388 - DNA, 30 bp, Artificial Sequence
  Synthetic oligonucleotide
acgaattggctgtagactgggaaagcccct

SEQ ID NO: 224389 - DNA, 30 bp, Artificial Sequence
  Synthetic oligonucleotide
tctgaatactggttgcttggaacagcccct

SEQ ID NO: 224390 - DNA, 30 bp, Artificial Sequence
  Synthetic oligonucleotide
aaacgggcaaggtgagttcggggagcccct

SEQ ID NO: 224391 - DNA, 30 bp, Artificial Sequence
  Synthetic oligonucleotide
ccttcgttagtcttgtgggaaatagcccct

SEQ ID NO: 224392 - DNA, 30 bp, Artificial Sequence
  Synthetic oligonucleotide
cccaggcgtatctagccgcactacgcccct

SEQ ID NO: 224393 - DNA, 30 bp, Artificial Sequence
  Synthetic oligonucleotide
ggtactcttgggtgagcgcgcatctcccct

SEQ ID NO: 224394 - DNA, 30 bp, Artificial Sequence
  Synthetic oligonucleotide
gctagttactgccccatctcaaccagccct

SEQ ID NO: 224395 - DNA, 30 bp, Artificial Sequence
  Synthetic oligonucleotide
caaggtaccggcatcgagtcattacgccct

SEQ ID NO: 224396 - DNA, 30 bp, Artificial Sequence
  Synthetic oligonucleotide
gaacgtaatcatagtaatagcaggcgccct

SEQ ID NO: 224397 - DNA, 30 bp, Artificial Sequence
  Synthetic oligonucleotide
gtaccacagtgagaaaaaaacagaggccct

SEQ ID NO: 224398 - DNA, 30 bp, Artificial Sequence
  Synthetic oligonucleotide
ttgagattcgtcagacaggtcagcggccct

SEQ ID NO: 224399 - DNA, 30 bp, Artificial Sequence
  Synthetic oligonucleotide
gtggaaagaggggcgaaaggtcggggccct

SEQ ID NO: 224400 - DNA, 30 bp, Artificial Sequence
  Synthetic oligonucleotide
attacaacttgcggtgagtctcgtggccct

SEQ ID NO: 224401 - DNA, 30 bp, Artificial Sequence
  Synthetic oligonucleotide
ttctcaccgttaagggcgacgatctgccct

SEQ ID NO: 224402 - DNA, 30 bp, Artificial Sequence
  Synthetic oligonucleotide
cgctgttatggtaccatttggcgcctccct

SEQ ID NO: 224403 - DNA, 30 bp, Artificial Sequence
  Synthetic oligonucleotide
gaccgcgatggagtcacaaatatagtccct

SEQ ID NO: 224404 - DNA, 30 bp, Artificial Sequence
  Synthetic oligonucleotide
cgatattaaggtaggcgcaagtatgtccct

SEQ ID NO: 224405 - DNA, 30 bp, Artificial Sequence
  Synthetic oligonucleotide
gctcgtagcggtgttgtattaagattccct

SEQ ID NO: 224406 - DNA, 30 bp, Artificial Sequence
  Synthetic oligonucleotide
gcatagtaagcgagttacgacatgttccct

SEQ ID NO: 224407 - DNA, 30 bp, Artificial Sequence
  Synthetic oligonucleotide
gaatgataacttgtatgactgcgaaagcct

SEQ ID NO: 224408 - DNA, 30 bp, Artificial Sequence
  Synthetic oligonucleotide
atgatcggtacaattgaggtccccaagcct

SEQ ID NO: 224409 - DNA, 30 bp, Artificial Sequence
  Synthetic oligonucleotide
ctaacaacggtcctgttgatgattcagcct

SEQ ID NO: 224410 - DNA, 30 bp, Artificial Sequence
  Synthetic oligonucleotide
cacggaccataagacacagcggttcagcct

SEQ ID NO: 224411 - DNA, 30 bp, Artificial Sequence
  Synthetic oligonucleotide
aggacccacacgtgactagcttttcagcct

SEQ ID NO: 224412 - DNA, 31 bp, Artificial Sequence
  Synthetic oligonucleotide
gtcattaggctatagcgagcttacagagcct

SEQ ID NO: 224413 - DNA, 30 bp, Artificial Sequence
  Synthetic oligonucleotide
aaacaagttcaccagtaaaaacaggagcct

SEQ ID NO: 224414 - DNA, 30 bp, Artificial Sequence
  Synthetic oligonucleotide
tcacgtagttaagcgtgatagatggagcct

SEQ ID NO: 224415 - DNA, 30 bp, Artificial Sequence
  Synthetic oligonucleotide
gccttggattagaaagaccacggtgagcct

SEQ ID NO: 224416 - DNA, 30 bp, Artificial Sequence
  Synthetic oligonucleotide
cggacgctcggggagcatcaagcttagcct

SEQ ID NO: 224417 - DNA, 30 bp, Artificial Sequence
  Synthetic oligonucleotide
gcgaggacctacaactagctgcgttagcct

SEQ ID NO: 224418 - DNA, 30 bp, Artificial Sequence
  Synthetic oligonucleotide
cgatgagggtgttaactcgaaccaccgcct

SEQ ID NO: 224419 - DNA, 30 bp, Artificial Sequence
  Synthetic oligonucleotide
cacaggcctttgagtcatccgtgcccgcct

SEQ ID NO: 224420 - DNA, 30 bp, Artificial Sequence
  Synthetic oligonucleotide
cgtgactctgcgtctgtgttcttcccgcct

SEQ ID NO: 224421 - DNA, 30 bp, Artificial Sequence
  Synthetic oligonucleotide
aaccgggagtgaatgattagggggccgcct

SEQ ID NO: 224422 - DNA, 30 bp, Artificial Sequence
  Synthetic oligonucleotide
ctgaaagctccagttgccaaagcatcgcct

SEQ ID NO: 224423 - DNA, 30 bp, Artificial Sequence
  Synthetic oligonucleotide
gcatcactgaagatcagttcgggatcgcct

SEQ ID NO: 224424 - DNA, 30 bp, Artificial Sequence
  Synthetic oligonucleotide
ctatgggttaaatctgggttcaactcgcct

SEQ ID NO: 224425 - DNA, 30 bp, Artificial Sequence
  Synthetic oligonucleotide
aggaactatccagtgtagccgtactcgcct

SEQ ID NO: 224426 - DNA, 30 bp, Artificial Sequence
  Synthetic oligonucleotide
gccgtaagatcctcttctcgttaaaggcct

SEQ ID NO: 224427 - DNA, 30 bp, Artificial Sequence
  Synthetic oligonucleotide
ggcttgaacctttggtgtacgataaggcct

SEQ ID NO: 224428 - DNA, 30 bp, Artificial Sequence
  Synthetic oligonucleotide
gatcacgtaattgcgtaacatgggaggcct

SEQ ID NO: 224429 - DNA, 30 bp, Artificial Sequence
  Synthetic oligonucleotide
aataccgcgaggggcgggcgcgataggcct

SEQ ID NO: 224430 - DNA, 30 bp, Artificial Sequence
  Synthetic oligonucleotide
gaagtgtggcgacgataaaaaagtcggcct

SEQ ID NO: 224431 - DNA, 30 bp, Artificial Sequence
  Synthetic oligonucleotide
cgatcagaatcggctaataaaccagggcct

SEQ ID NO: 224432 - DNA, 30 bp, Artificial Sequence
  Synthetic oligonucleotide
atatggtttaataggaagcaggtagggcct

SEQ ID NO: 224433 - DNA, 31 bp, Artificial Sequence
  Synthetic oligonucleotide
accgcttcacttagcgaggacgagcgggcct

SEQ ID NO: 224434 - DNA, 30 bp, Artificial Sequence
  Synthetic oligonucleotide
tatatagaccaatactcggactaggggcct

SEQ ID NO: 224435 - DNA, 30 bp, Artificial Sequence
  Synthetic oligonucleotide
tgtggatgaaattcggagtcgtcatggcct

SEQ ID NO: 224436 - DNA, 30 bp, Artificial Sequence
  Synthetic oligonucleotide
gccgagagcgtcgttgttaactgatggcct

SEQ ID NO: 224437 - DNA, 30 bp, Artificial Sequence
  Synthetic oligonucleotide
cgagtaaggtcacacttaatgaactggcct

SEQ ID NO: 224438 - DNA, 30 bp, Artificial Sequence
  Synthetic oligonucleotide
ctaggttccacacatggttctaattggcct

SEQ ID NO: 224439 - DNA, 29 bp, Artificial Sequence
  Synthetic oligonucleotide
tctaactaaaccaagatcaggcttggcct

SEQ ID NO: 224440 - DNA, 30 bp, Artificial Sequence
  Synthetic oligonucleotide
acagcggcaaaggatttcggcgtcatgcct

SEQ ID NO: 224441 - DNA, 30 bp, Artificial Sequence
  Synthetic oligonucleotide
tgcgagaccgcgtatgccccgcttatgcct

SEQ ID NO: 224442 - DNA, 30 bp, Artificial Sequence
  Synthetic oligonucleotide
attacactttcgaaatgcgagtagctgcct

SEQ ID NO: 224443 - DNA, 30 bp, Artificial Sequence
  Synthetic oligonucleotide
accgggaagaatgcgattgttcatctgcct

SEQ ID NO: 224444 - DNA, 30 bp, Artificial Sequence
  Synthetic oligonucleotide
cgctgtgttctagttcaaaccacagtgcct

SEQ ID NO: 224445 - DNA, 30 bp, Artificial Sequence
  Synthetic oligonucleotide
cggagttacgtcggggccggctctgtgcct

SEQ ID NO: 224446 - DNA, 30 bp, Artificial Sequence
  Synthetic oligonucleotide
tgggcatatacataaaccaactttgtgcct

SEQ ID NO: 224447 - DNA, 30 bp, Artificial Sequence
  Synthetic oligonucleotide
accagcacgcactatcgtacagaattgcct

SEQ ID NO: 224448 - DNA, 31 bp, Artificial Sequence
  Synthetic oligonucleotide
aaagatgtgttagtttgggtaataattgcct

SEQ ID NO: 224449 - DNA, 30 bp, Artificial Sequence
  Synthetic oligonucleotide
acattactatttgaagtgttcgcattgcct

SEQ ID NO: 224450 - DNA, 30 bp, Artificial Sequence
  Synthetic oligonucleotide
tatcggaatttccagaaccggcatttgcct

SEQ ID NO: 224451 - DNA, 30 bp, Artificial Sequence
  Synthetic oligonucleotide
agagatccgcaagtgtacacacgaaatcct

SEQ ID NO: 224452 - DNA, 30 bp, Artificial Sequence
  Synthetic oligonucleotide
gtcgcgagaagtagcaatgttcgcaatcct

SEQ ID NO: 224453 - DNA, 30 bp, Artificial Sequence
  Synthetic oligonucleotide
gcagtttcgatgctcttggagatgaatcct

SEQ ID NO: 224454 - DNA, 30 bp, Artificial Sequence
  Synthetic oligonucleotide
agtggcgtctaaaagagtacagctcatcct

SEQ ID NO: 224455 - DNA, 30 bp, Artificial Sequence
  Synthetic oligonucleotide
cccggcaggcaatggtgcacggaagatcct

SEQ ID NO: 224456 - DNA, 30 bp, Artificial Sequence
  Synthetic oligonucleotide
atcagagtggcatggatagatggagatcct

SEQ ID NO: 224457 - DNA, 30 bp, Artificial Sequence
  Synthetic oligonucleotide
tatgaatggtacctccgagtatccgatcct

SEQ ID NO: 224458 - DNA, 30 bp, Artificial Sequence
  Synthetic oligonucleotide
gtaagttaacggctttaagagctcgatcct

SEQ ID NO: 224459 - DNA, 30 bp, Artificial Sequence
  Synthetic oligonucleotide
agagtggtgaatttcacaaagcgggatcct

SEQ ID NO: 224460 - DNA, 30 bp, Artificial Sequence
  Synthetic oligonucleotide
agaaaccaccggactccataatcatatcct

SEQ ID NO: 224461 - DNA, 30 bp, Artificial Sequence
  Synthetic oligonucleotide
agaggattgcataacaattcacactatcct

SEQ ID NO: 224462 - DNA, 30 bp, Artificial Sequence
  Synthetic oligonucleotide
cttgctggccaacggccggatccctatcct

SEQ ID NO: 224463 - DNA, 30 bp, Artificial Sequence
  Synthetic oligonucleotide
ggggcagggtcaaaaatctaggcctatcct

SEQ ID NO: 224464 - DNA, 30 bp, Artificial Sequence
  Synthetic oligonucleotide
aagtgagggggcgttagttcccagactcct

SEQ ID NO: 224465 - DNA, 30 bp, Artificial Sequence
  Synthetic oligonucleotide
gggtagagaataacaggctagttccctcct

SEQ ID NO: 224466 - DNA, 30 bp, Artificial Sequence
  Synthetic oligonucleotide
actcgagtatgacgctgaatttacgctcct

SEQ ID NO: 224467 - DNA, 30 bp, Artificial Sequence
  Synthetic oligonucleotide
gattgaccactcttgtggacatccgctcct

SEQ ID NO: 224468 - DNA, 30 bp, Artificial Sequence
  Synthetic oligonucleotide
ttaacacctgtatctgcgggagttgctcct

SEQ ID NO: 224469 - DNA, 30 bp, Artificial Sequence
  Synthetic oligonucleotide
aaaatgggcttaaggacatttggttctcct

SEQ ID NO: 224470 - DNA, 30 bp, Artificial Sequence
  Synthetic oligonucleotide
ctgacatcacatcggcattagcgaagtcct

SEQ ID NO: 224471 - DNA, 30 bp, Artificial Sequence
  Synthetic oligonucleotide
gcacgccccgaggccgtgataatcagtcct

SEQ ID NO: 224472 - DNA, 30 bp, Artificial Sequence
  Synthetic oligonucleotide
gagttagggtggggaaaggcgaatcgtcct

SEQ ID NO: 224473 - DNA, 30 bp, Artificial Sequence
  Synthetic oligonucleotide
gcaaatttcatcgtaaaaaaataaggtcct

SEQ ID NO: 224474 - DNA, 30 bp, Artificial Sequence
  Synthetic oligonucleotide
ggttctgggatagacagactgacaggtcct

SEQ ID NO: 224475 - DNA, 30 bp, Artificial Sequence
  Synthetic oligonucleotide
cgttgttctgaaacgcgaccgaagggtcct

SEQ ID NO: 224476 - DNA, 30 bp, Artificial Sequence
  Synthetic oligonucleotide
accgtttagcgtccaatcggcactggtcct

SEQ ID NO: 224477 - DNA, 30 bp, Artificial Sequence
  Synthetic oligonucleotide
gacatattcactaatttgctttgtggtcct

SEQ ID NO: 224478 - DNA, 30 bp, Artificial Sequence
  Synthetic oligonucleotide
gctatttcgccaaataggtaaggatgtcct

SEQ ID NO: 224479 - DNA, 30 bp, Artificial Sequence
  Synthetic oligonucleotide
gaggcccaggagtagcagagcgattgtcct

SEQ ID NO: 224480 - DNA, 30 bp, Artificial Sequence
  Synthetic oligonucleotide
cggaggaaaacataggacggtcgaattcct

SEQ ID NO: 224481 - DNA, 30 bp, Artificial Sequence
  Synthetic oligonucleotide
acgctagggctgtgctttttgttaattcct

SEQ ID NO: 224482 - DNA, 30 bp, Artificial Sequence
  Synthetic oligonucleotide
aatctgaagggcacaattctgactcttcct

SEQ ID NO: 224483 - DNA, 30 bp, Artificial Sequence
  Synthetic oligonucleotide
atgcaggcgtacgggtgaacacaatttcct

SEQ ID NO: 224484 - DNA, 30 bp, Artificial Sequence
  Synthetic oligonucleotide
tcgggtaatcctcggaagtgttaatttcct

SEQ ID NO: 224485 - DNA, 30 bp, Artificial Sequence
  Synthetic oligonucleotide
cagaaaattggcacggagtgggtctttcct

SEQ ID NO: 224486 - DNA, 30 bp, Artificial Sequence
  Synthetic oligonucleotide
ggtgactttaccataagaaggatgtttcct

SEQ ID NO: 224487 - DNA, 30 bp, Artificial Sequence
  Synthetic oligonucleotide
atcgacccgatggtacagagtgcaaaagct

SEQ ID NO: 224488 - DNA, 30 bp, Artificial Sequence
  Synthetic oligonucleotide
catggtctggttcaattctggggaaaagct

SEQ ID NO: 224489 - DNA, 30 bp, Artificial Sequence
  Synthetic oligonucleotide
gggcagaagcatcgcgcaatgataaaagct

SEQ ID NO: 224490 - DNA, 30 bp, Artificial Sequence
  Synthetic oligonucleotide
gtcggacgagtttggttcacacctaaagct

SEQ ID NO: 224491 - DNA, 30 bp, Artificial Sequence
  Synthetic oligonucleotide
aggcctaggtgataagagacgggtaaagct

SEQ ID NO: 224492 - DNA, 30 bp, Artificial Sequence
  Synthetic oligonucleotide
aaggtatgcgccttgcgaccgtgtaaagct

SEQ ID NO: 224493 - DNA, 30 bp, Artificial Sequence
  Synthetic oligonucleotide
acaccgccgccgggcttggcaattaaagct

SEQ ID NO: 224494 - DNA, 30 bp, Artificial Sequence
  Synthetic oligonucleotide
gctgtttctgatccggtaaattggcaagct

SEQ ID NO: 224495 - DNA, 30 bp, Artificial Sequence
  Synthetic oligonucleotide
gtggaagtggaatatgtgggcggtcaagct

SEQ ID NO: 224496 - DNA, 30 bp, Artificial Sequence
  Synthetic oligonucleotide
atggaattggcatctttgtgcacagaagct

SEQ ID NO: 224497 - DNA, 30 bp, Artificial Sequence
  Synthetic oligonucleotide
actgggttgtgcatggaagtaggagaagct

SEQ ID NO: 224498 - DNA, 30 bp, Artificial Sequence
  Synthetic oligonucleotide
acccaggacctgaggcgaatagccgaagct

SEQ ID NO: 224499 - DNA, 30 bp, Artificial Sequence
  Synthetic oligonucleotide
ggaaactggggacacgtggtcatcgaagct

SEQ ID NO: 224500 - DNA, 30 bp, Artificial Sequence
  Synthetic oligonucleotide
agagcacggtgtgttaaattgcaggaagct

SEQ ID NO: 224501 - DNA, 30 bp, Artificial Sequence
  Synthetic oligonucleotide
agaagcgcagccgttctagtcagggaagct

SEQ ID NO: 224502 - DNA, 30 bp, Artificial Sequence
  Synthetic oligonucleotide
ccgatgtagtctaatccaaaacgggaagct

SEQ ID NO: 224503 - DNA, 30 bp, Artificial Sequence
  Synthetic oligonucleotide
gaggtatttacagctcttgctagtgaagct

SEQ ID NO: 224504 - DNA, 30 bp, Artificial Sequence
  Synthetic oligonucleotide
aaaaataggaaagtaagtattcaataagct

SEQ ID NO: 224505 - DNA, 30 bp, Artificial Sequence
  Synthetic oligonucleotide
aaagtaaggatacataagggagggtaagct

SEQ ID NO: 224506 - DNA, 30 bp, Artificial Sequence
  Synthetic oligonucleotide
agcgacagtcggctcctacacatgtaagct

SEQ ID NO: 224507 - DNA, 30 bp, Artificial Sequence
  Synthetic oligonucleotide
ggatgcaagatcatacctttatattaagct

SEQ ID NO: 224508 - DNA, 30 bp, Artificial Sequence
  Synthetic oligonucleotide
tatatcaggtcagcttccaaagtttaagct

SEQ ID NO: 224509 - DNA, 30 bp, Artificial Sequence
  Synthetic oligonucleotide
tcaaagacgaagaaccgagcgtacacagct

SEQ ID NO: 224510 - DNA, 30 bp, Artificial Sequence
  Synthetic oligonucleotide
cgtgcgcatgcctgtacatcacgcacagct

SEQ ID NO: 224511 - DNA, 30 bp, Artificial Sequence
  Synthetic oligonucleotide
aatcgtccagaacctagacctatcacagct

SEQ ID NO: 224512 - DNA, 30 bp, Artificial Sequence
  Synthetic oligonucleotide
gattgcggcattcgtggttgaggaccagct

SEQ ID NO: 224513 - DNA, 30 bp, Artificial Sequence
  Synthetic oligonucleotide
ctcgttgatctacgttcaatagagccagct

SEQ ID NO: 224514 - DNA, 30 bp, Artificial Sequence
  Synthetic oligonucleotide
aatagacacaatccggtctaatcgccagct

SEQ ID NO: 224515 - DNA, 30 bp, Artificial Sequence
  Synthetic oligonucleotide
catctgcgtgcacccttgactctgccagct

SEQ ID NO: 224516 - DNA, 30 bp, Artificial Sequence
  Synthetic oligonucleotide
tggagtacactgaggttcttaagtccagct

SEQ ID NO: 224517 - DNA, 30 bp, Artificial Sequence
  Synthetic oligonucleotide
ggtaccactaattgacgagtataagcagct

SEQ ID NO: 224518 - DNA, 30 bp, Artificial Sequence
  Synthetic oligonucleotide
agagcaggacaaagattgggataggcagct

SEQ ID NO: 224519 - DNA, 30 bp, Artificial Sequence
  Synthetic oligonucleotide
taggcaaaaggtgggtcgtgacaatcagct

SEQ ID NO: 224520 - DNA, 30 bp, Artificial Sequence
  Synthetic oligonucleotide
ctgtcggccctaagccaaacaacctcagct

SEQ ID NO: 224521 - DNA, 30 bp, Artificial Sequence
  Synthetic oligonucleotide
caataattcttgaggtgctttatctcagct

SEQ ID NO: 224522 - DNA, 30 bp, Artificial Sequence
  Synthetic oligonucleotide
ctgaaaaaatttcaatacagatggtcagct

SEQ ID NO: 224523 - DNA, 30 bp, Artificial Sequence
  Synthetic oligonucleotide
cgggcatttgctcaatgtggaatgtcagct

SEQ ID NO: 224524 - DNA, 30 bp, Artificial Sequence
  Synthetic oligonucleotide
gacacagtacacgcactcgccgacagagct

SEQ ID NO: 224525 - DNA, 30 bp, Artificial Sequence
  Synthetic oligonucleotide
aacaagtcagatgtatattagtgcagagct

SEQ ID NO: 224526 - DNA, 30 bp, Artificial Sequence
  Synthetic oligonucleotide
tgtaaggcaatttatttacctcgtagagct

SEQ ID NO: 224527 - DNA, 30 bp, Artificial Sequence
  Synthetic oligonucleotide
acggtagtaagttgacacgggcttagagct

SEQ ID NO: 224528 - DNA, 30 bp, Artificial Sequence
  Synthetic oligonucleotide
aaggccacacccgtgggcggggttagagct

SEQ ID NO: 224529 - DNA, 30 bp, Artificial Sequence
  Synthetic oligonucleotide
cacaattttcgttgagaaacatcacgagct

SEQ ID NO: 224530 - DNA, 30 bp, Artificial Sequence
  Synthetic oligonucleotide
aaccggagtttggtgcttgaagtccgagct

SEQ ID NO: 224531 - DNA, 30 bp, Artificial Sequence
  Synthetic oligonucleotide
cagctaagtatatgcggtgatcagcgagct

SEQ ID NO: 224532 - DNA, 30 bp, Artificial Sequence
  Synthetic oligonucleotide
aataattagaaggtgttcaattagcgagct

SEQ ID NO: 224533 - DNA, 30 bp, Artificial Sequence
  Synthetic oligonucleotide
aaaaagaatacgtcacccacgtatcgagct

SEQ ID NO: 224534 - DNA, 30 bp, Artificial Sequence
  Synthetic oligonucleotide
tgctcgtcgttagttcaaacttatcgagct

SEQ ID NO: 224535 - DNA, 30 bp, Artificial Sequence
  Synthetic oligonucleotide
cttcgctactaaaagttggatattcgagct

SEQ ID NO: 224536 - DNA, 30 bp, Artificial Sequence
  Synthetic oligonucleotide
ggagagaacctgtttacccacaacggagct

SEQ ID NO: 224537 - DNA, 30 bp, Artificial Sequence
  Synthetic oligonucleotide
aggcggtgcaagtgcattaattccggagct

SEQ ID NO: 224538 - DNA, 30 bp, Artificial Sequence
  Synthetic oligonucleotide
tacttccaatagtaatgatttcagggagct

SEQ ID NO: 224539 - DNA, 30 bp, Artificial Sequence
  Synthetic oligonucleotide
actgccaggatccaataaggcatgggagct

SEQ ID NO: 224540 - DNA, 30 bp, Artificial Sequence
  Synthetic oligonucleotide
atgggcggagatctcaggaggattggagct

SEQ ID NO: 224541 - DNA, 30 bp, Artificial Sequence
  Synthetic oligonucleotide
ttcagtagtcgcgaaggttaagtttgagct

SEQ ID NO: 224542 - DNA, 30 bp, Artificial Sequence
  Synthetic oligonucleotide
caacgttcagggtataaatcgcaaatagct

SEQ ID NO: 224543 - DNA, 30 bp, Artificial Sequence
  Synthetic oligonucleotide
cgtcgtcctctccctatcgcggtaatagct

SEQ ID NO: 224544 - DNA, 30 bp, Artificial Sequence
  Synthetic oligonucleotide
acaccgcggagtcggaaggatatgatagct

SEQ ID NO: 224545 - DNA, 30 bp, Artificial Sequence
  Synthetic oligonucleotide
tacagtgctagcgagcgggtcaatatagct

SEQ ID NO: 224546 - DNA, 30 bp, Artificial Sequence
  Synthetic oligonucleotide
cgaaaggtgcatggattgtatcttatagct

SEQ ID NO: 224547 - DNA, 30 bp, Artificial Sequence
  Synthetic oligonucleotide
aaaacgtggatccaggtcaattatctagct

SEQ ID NO: 224548 - DNA, 30 bp, Artificial Sequence
  Synthetic oligonucleotide
gcgtcgccgatctctgaccagattctagct

SEQ ID NO: 224549 - DNA, 30 bp, Artificial Sequence
  Synthetic oligonucleotide
gaaacagttaaaacaaatggtggagtagct

SEQ ID NO: 224550 - DNA, 30 bp, Artificial Sequence
  Synthetic oligonucleotide
tacgatcactccctgcaagtccacgtagct

SEQ ID NO: 224551 - DNA, 30 bp, Artificial Sequence
  Synthetic oligonucleotide
aagcctcctgaggcaaacaggtctgtagct

SEQ ID NO: 224552 - DNA, 30 bp, Artificial Sequence
  Synthetic oligonucleotide
tcaacttcctggatccccgcaattgtagct

SEQ ID NO: 224553 - DNA, 30 bp, Artificial Sequence
  Synthetic oligonucleotide
ataaggggcctgcacatttaatcattagct

SEQ ID NO: 224554 - DNA, 30 bp, Artificial Sequence
  Synthetic oligonucleotide
tagcgggagtttaagggatcgctattagct

SEQ ID NO: 224555 - DNA, 30 bp, Artificial Sequence
  Synthetic oligonucleotide
cacggagactggtcaactctcgtattagct

SEQ ID NO: 224556 - DNA, 30 bp, Artificial Sequence
  Synthetic oligonucleotide
agcagtagaggtagaactggcgatttagct

SEQ ID NO: 224557 - DNA, 30 bp, Artificial Sequence
  Synthetic oligonucleotide
tagtcttagccctgggataaaattaacgct

SEQ ID NO: 224558 - DNA, 30 bp, Artificial Sequence
  Synthetic oligonucleotide
cgattccgagtcaaggtaaaggttaacgct

SEQ ID NO: 224559 - DNA, 30 bp, Artificial Sequence
  Synthetic oligonucleotide
aacagaaacttagccatacctatacacgct

SEQ ID NO: 224560 - DNA, 30 bp, Artificial Sequence
  Synthetic oligonucleotide
tggtgcctggtctattcttggcatcacgct

SEQ ID NO: 224561 - DNA, 30 bp, Artificial Sequence
  Synthetic oligonucleotide
cgaggcggctccgattttgaacacgacgct

SEQ ID NO: 224562 - DNA, 30 bp, Artificial Sequence
  Synthetic oligonucleotide
gtcgtcgccccggacgacacgttcgacgct

SEQ ID NO: 224563 - DNA, 30 bp, Artificial Sequence
  Synthetic oligonucleotide
tttaacgaagctaagctccaggctgacgct

SEQ ID NO: 224564 - DNA, 30 bp, Artificial Sequence
  Synthetic oligonucleotide
gtcaaatagcagcatactattagatacgct

SEQ ID NO: 224565 - DNA, 30 bp, Artificial Sequence
  Synthetic oligonucleotide
tcgatactggttactactaacaactacgct

SEQ ID NO: 224566 - DNA, 30 bp, Artificial Sequence
  Synthetic oligonucleotide
acgtcaccctctgaacaaagggactacgct

SEQ ID NO: 224567 - DNA, 30 bp, Artificial Sequence
  Synthetic oligonucleotide
ggacagccttaagagtgggctttctacgct

SEQ ID NO: 224568 - DNA, 30 bp, Artificial Sequence
  Synthetic oligonucleotide
acaccaactgcaggaggtcttctgtacgct

SEQ ID NO: 224569 - DNA, 30 bp, Artificial Sequence
  Synthetic oligonucleotide
ccgcgtggccgtggttgtcagttgtacgct

SEQ ID NO: 224570 - DNA, 30 bp, Artificial Sequence
  Synthetic oligonucleotide
cagtagactcaaacagggtacggttacgct

SEQ ID NO: 224571 - DNA, 30 bp, Artificial Sequence
  Synthetic oligonucleotide
ccgggcaatcacaggtgtagcggttacgct

SEQ ID NO: 224572 - DNA, 30 bp, Artificial Sequence
  Synthetic oligonucleotide
gcatactcaatgatcttgtacttaaccgct

SEQ ID NO: 224573 - DNA, 30 bp, Artificial Sequence
  Synthetic oligonucleotide
caaaggtacaaacgcaatcggagcaccgct

SEQ ID NO: 224574 - DNA, 30 bp, Artificial Sequence
  Synthetic oligonucleotide
gtgagtaaggcttaccctgttgctaccgct

SEQ ID NO: 224575 - DNA, 30 bp, Artificial Sequence
  Synthetic oligonucleotide
atacatcgcctatggcagaagtttaccgct

SEQ ID NO: 224576 - DNA, 31 bp, Artificial Sequence
  Synthetic oligonucleotide
ccacacgtcaacaaccgcctaatttcccgct

SEQ ID NO: 224577 - DNA, 30 bp, Artificial Sequence
  Synthetic oligonucleotide
ccaatggtgaagcgactgttccaagccgct

SEQ ID NO: 224578 - DNA, 30 bp, Artificial Sequence
  Synthetic oligonucleotide
gaagaaggaccccttctctacctcgccgct

SEQ ID NO: 224579 - DNA, 30 bp, Artificial Sequence
  Synthetic oligonucleotide
tgccaggccgacacggacattactgccgct

SEQ ID NO: 224580 - DNA, 30 bp, Artificial Sequence
  Synthetic oligonucleotide
gactgtttgggttaagaccttcactccgct

SEQ ID NO: 224581 - DNA, 30 bp, Artificial Sequence
  Synthetic oligonucleotide
atgtgccaagccgggcacctgtagtccgct

SEQ ID NO: 224582 - DNA, 30 bp, Artificial Sequence
  Synthetic oligonucleotide
cagaccgttgacaagtcagaggggtccgct

SEQ ID NO: 224583 - DNA, 30 bp, Artificial Sequence
  Synthetic oligonucleotide
ggggacttccggcagttcgggataagcgct

SEQ ID NO: 224584 - DNA, 30 bp, Artificial Sequence
  Synthetic oligonucleotide
aatagggtatgtaacgtaaaactaagcgct

SEQ ID NO: 224585 - DNA, 30 bp, Artificial Sequence
  Synthetic oligonucleotide
cagtccttatgggtgcgtagagccagcgct

SEQ ID NO: 224586 - DNA, 30 bp, Artificial Sequence
  Synthetic oligonucleotide
ttgcgcgtccactgaaggggcggtggcgct

SEQ ID NO: 224587 - DNA, 30 bp, Artificial Sequence
  Synthetic oligonucleotide
attgggcttgatagcgctagtagctgcgct

SEQ ID NO: 224588 - DNA, 30 bp, Artificial Sequence
  Synthetic oligonucleotide
gttacgaatgcttcgacctgtaggtgcgct

SEQ ID NO: 224589 - DNA, 30 bp, Artificial Sequence
  Synthetic oligonucleotide
cgttagagcactaggttgccttacatcgct

SEQ ID NO: 224590 - DNA, 30 bp, Artificial Sequence
  Synthetic oligonucleotide
atgctaaattcctgaaagaatatgatcgct

SEQ ID NO: 224591 - DNA, 30 bp, Artificial Sequence
  Synthetic oligonucleotide
cacaggccaatatacttagcttatatcgct

SEQ ID NO: 224592 - DNA, 30 bp, Artificial Sequence
  Synthetic oligonucleotide
ggccggagaggacatactaatcctatcgct

SEQ ID NO: 224593 - DNA, 30 bp, Artificial Sequence
  Synthetic oligonucleotide
aaaggggcatcgaccctgaagaaactcgct

SEQ ID NO: 224594 - DNA, 30 bp, Artificial Sequence
  Synthetic oligonucleotide
cctgcctagaaagcatgcgcgtcactcgct

SEQ ID NO: 224595 - DNA, 31 bp, Artificial Sequence
  Synthetic oligonucleotide
aaagaacgtcaaaccagtcgcagagctcgct

SEQ ID NO: 224596 - DNA, 30 bp, Artificial Sequence
  Synthetic oligonucleotide
aacgacgtggttgagttcttgtgtctcgct

SEQ ID NO: 224597 - DNA, 30 bp, Artificial Sequence
  Synthetic oligonucleotide
ccttacgtaaaaactagaagcgtagtcgct

SEQ ID NO: 224598 - DNA, 30 bp, Artificial Sequence
  Synthetic oligonucleotide
cattgctgacacaacccaccaaacgtcgct

SEQ ID NO: 224599 - DNA, 30 bp, Artificial Sequence
  Synthetic oligonucleotide
tcgcaccacttaaataactccatcgtcgct

SEQ ID NO: 224600 - DNA, 30 bp, Artificial Sequence
  Synthetic oligonucleotide
acttatgtgctgtcagttcaagttgtcgct

SEQ ID NO: 224601 - DNA, 30 bp, Artificial Sequence
  Synthetic oligonucleotide
cacgggctaagccggcggtcattattcgct

SEQ ID NO: 224602 - DNA, 30 bp, Artificial Sequence
  Synthetic oligonucleotide
agatagaggaccggcgctggtcagttcgct

SEQ ID NO: 224603 - DNA, 30 bp, Artificial Sequence
  Synthetic oligonucleotide
tattagggaacgaaaggtacgtggttcgct

SEQ ID NO: 224604 - DNA, 30 bp, Artificial Sequence
  Synthetic oligonucleotide
gtaggggctcttaggagatacgagaaggct

SEQ ID NO: 224605 - DNA, 30 bp, Artificial Sequence
  Synthetic oligonucleotide
gtcccgcgaatcgtgtacggggagaaggct

SEQ ID NO: 224606 - DNA, 30 bp, Artificial Sequence
  Synthetic oligonucleotide
ttatcaagtggaatgtagcttacgaaggct

SEQ ID NO: 224607 - DNA, 30 bp, Artificial Sequence
  Synthetic oligonucleotide
aacgtccgcccacgaacattccttaaggct

SEQ ID NO: 224608 - DNA, 30 bp, Artificial Sequence
  Synthetic oligonucleotide
tgcgtgggtttaatttgggcaccccaggct

SEQ ID NO: 224609 - DNA, 30 bp, Artificial Sequence
  Synthetic oligonucleotide
gatcacgcggttacgtccgggaggcaggct

SEQ ID NO: 224610 - DNA, 30 bp, Artificial Sequence
  Synthetic oligonucleotide
tccatgacgtatgccttattatcagaggct

SEQ ID NO: 224611 - DNA, 30 bp, Artificial Sequence
  Synthetic oligonucleotide
gggcgcgtcgtggcgtaggctcaggaggct

SEQ ID NO: 224612 - DNA, 30 bp, Artificial Sequence
  Synthetic oligonucleotide
agcacccatcgtctgacaactacggaggct

SEQ ID NO: 224613 - DNA, 30 bp, Artificial Sequence
  Synthetic oligonucleotide
gaaggatccagtagtatgatcccggaggct

SEQ ID NO: 224614 - DNA, 30 bp, Artificial Sequence
  Synthetic oligonucleotide
gcgatggggctatagatgggccctgaggct

SEQ ID NO: 224615 - DNA, 30 bp, Artificial Sequence
  Synthetic oligonucleotide
cagagtatgatcagcgcttgacgtgaggct

SEQ ID NO: 224616 - DNA, 30 bp, Artificial Sequence
  Synthetic oligonucleotide
cttagagcccagccaagacagcgttaggct

SEQ ID NO: 224617 - DNA, 30 bp, Artificial Sequence
  Synthetic oligonucleotide
gctgggttccgtcaactacctatcacggct

SEQ ID NO: 224618 - DNA, 30 bp, Artificial Sequence
  Synthetic oligonucleotide
aggggatgagctggatgacaagtcacggct

SEQ ID NO: 224619 - DNA, 30 bp, Artificial Sequence
  Synthetic oligonucleotide
cagtgctcattaggttgtacggtcacggct

SEQ ID NO: 224620 - DNA, 30 bp, Artificial Sequence
  Synthetic oligonucleotide
tctaaggtactaggatttctggagacggct

SEQ ID NO: 224621 - DNA, 30 bp, Artificial Sequence
  Synthetic oligonucleotide
cggggggtggaagtagtgcgtgggacggct

SEQ ID NO: 224622 - DNA, 30 bp, Artificial Sequence
  Synthetic oligonucleotide
cgttcactgttacaagcagtatcaccggct

SEQ ID NO: 224623 - DNA, 30 bp, Artificial Sequence
  Synthetic oligonucleotide
agcaaaagtgataagtggaatggagcggct

SEQ ID NO: 224624 - DNA, 30 bp, Artificial Sequence
  Synthetic oligonucleotide
ttctttgtgtcgtacgaaactatagcggct

SEQ ID NO: 224625 - DNA, 30 bp, Artificial Sequence
  Synthetic oligonucleotide
aacagggcggtactaacagtgattgcggct

SEQ ID NO: 224626 - DNA, 30 bp, Artificial Sequence
  Synthetic oligonucleotide
cgaggaccgagctggtatacaataagggct

SEQ ID NO: 224627 - DNA, 30 bp, Artificial Sequence
  Synthetic oligonucleotide
actggcagaatccaacgtgtatcgagggct

SEQ ID NO: 224628 - DNA, 30 bp, Artificial Sequence
  Synthetic oligonucleotide
ttgcagacatgtgagtcaagttcgagggct

SEQ ID NO: 224629 - DNA, 30 bp, Artificial Sequence
  Synthetic oligonucleotide
ggggctacggatttgtttgcaactcgggct

SEQ ID NO: 224630 - DNA, 30 bp, Artificial Sequence
  Synthetic oligonucleotide
tcataaaggcgcacccaaagatttggggct

SEQ ID NO: 224631 - DNA, 30 bp, Artificial Sequence
  Synthetic oligonucleotide
ttccgaggtgaaatgcacaaagaatgggct

SEQ ID NO: 224632 - DNA, 30 bp, Artificial Sequence
  Synthetic oligonucleotide
agtggtggctaacgtcccgggtcatgggct

SEQ ID NO: 224633 - DNA, 31 bp, Artificial Sequence
  Synthetic oligonucleotide
ctccctctgtggaagcggtcttctttgggct

SEQ ID NO: 224634 - DNA, 30 bp, Artificial Sequence
  Synthetic oligonucleotide
acttttggtctaggattctatggcatggct

SEQ ID NO: 224635 - DNA, 30 bp, Artificial Sequence
  Synthetic oligonucleotide
cgttccagcgtcggatcatttccgatggct

SEQ ID NO: 224636 - DNA, 30 bp, Artificial Sequence
  Synthetic oligonucleotide
ccccattcaactgttggttaagctatggct

SEQ ID NO: 224637 - DNA, 30 bp, Artificial Sequence
  Synthetic oligonucleotide
ctaaggcctccattgaccgtgtttatggct

SEQ ID NO: 224638 - DNA, 30 bp, Artificial Sequence
  Synthetic oligonucleotide
tcgcttactacagattgcacaagactggct

SEQ ID NO: 224639 - DNA, 30 bp, Artificial Sequence
  Synthetic oligonucleotide
ttggtgacagccgatacatcaagactggct

SEQ ID NO: 224640 - DNA, 30 bp, Artificial Sequence
  Synthetic oligonucleotide
gcaagcgttaactctaagtttcagctggct

SEQ ID NO: 224641 - DNA, 30 bp, Artificial Sequence
  Synthetic oligonucleotide
agattggattgcaagctgctcaggctggct

SEQ ID NO: 224642 - DNA, 30 bp, Artificial Sequence
  Synthetic oligonucleotide
ttgaatcgatctcctttaggtatgctggct

SEQ ID NO: 224643 - DNA, 30 bp, Artificial Sequence
  Synthetic oligonucleotide
gtgagctatcttaaagtgatgcgtctggct

SEQ ID NO: 224644 - DNA, 30 bp, Artificial Sequence
  Synthetic oligonucleotide
cccagtaggttcgagctcaggtaagtggct

SEQ ID NO: 224645 - DNA, 30 bp, Artificial Sequence
  Synthetic oligonucleotide
ggtcaccgtaaatacacacccatcgtggct

SEQ ID NO: 224646 - DNA, 30 bp, Artificial Sequence
  Synthetic oligonucleotide
ctggtaatgcacagcttttctactgtggct

SEQ ID NO: 224647 - DNA, 30 bp, Artificial Sequence
  Synthetic oligonucleotide
gcagcatggctgttgagttcggagttggct

SEQ ID NO: 224648 - DNA, 30 bp, Artificial Sequence
  Synthetic oligonucleotide
caatgtcactatacgatctaggatttggct

SEQ ID NO: 224649 - DNA, 30 bp, Artificial Sequence
  Synthetic oligonucleotide
aggggtacacgccgtgaaggctgtttggct

SEQ ID NO: 224650 - DNA, 30 bp, Artificial Sequence
  Synthetic oligonucleotide
cgaaatacgatgtctgtcgacgttttggct

SEQ ID NO: 224651 - DNA, 30 bp, Artificial Sequence
  Synthetic oligonucleotide
cttgtaagcgaaggcgccatacagaatgct

SEQ ID NO: 224652 - DNA, 30 bp, Artificial Sequence
  Synthetic oligonucleotide
cgatgacagcaatcgtgaagctcgaatgct

SEQ ID NO: 224653 - DNA, 30 bp, Artificial Sequence
  Synthetic oligonucleotide
ggaaatattcggtgcggcggcgaccatgct

SEQ ID NO: 224654 - DNA, 30 bp, Artificial Sequence
  Synthetic oligonucleotide
cgctgagacaggtgttgtacgatgcatgct

SEQ ID NO: 224655 - DNA, 30 bp, Artificial Sequence
  Synthetic oligonucleotide
cgttagattggagttactatactggatgct

SEQ ID NO: 224656 - DNA, 30 bp, Artificial Sequence
  Synthetic oligonucleotide
accaacgatgtttgtatacagctggatgct

SEQ ID NO: 224657 - DNA, 30 bp, Artificial Sequence
  Synthetic oligonucleotide
taacctcgatatgatggcggttatgatgct

SEQ ID NO: 224658 - DNA, 31 bp, Artificial Sequence
  Synthetic oligonucleotide
gttcatggtttcagcggagagcggtgatgct

SEQ ID NO: 224659 - DNA, 30 bp, Artificial Sequence
  Synthetic oligonucleotide
caaatggatggctcacgtaagaaatatgct

SEQ ID NO: 224660 - DNA, 30 bp, Artificial Sequence
  Synthetic oligonucleotide
caggcgctatcacacgggttcgaatatgct

SEQ ID NO: 224661 - DNA, 30 bp, Artificial Sequence
  Synthetic oligonucleotide
tctgcacactgcgcgttttacaactatgct

SEQ ID NO: 224662 - DNA, 30 bp, Artificial Sequence
  Synthetic oligonucleotide
tgggttcatccaataaggtcctcctatgct

SEQ ID NO: 224663 - DNA, 30 bp, Artificial Sequence
  Synthetic oligonucleotide
acagggccggtgcacctcaacgtctatgct

SEQ ID NO: 224664 - DNA, 30 bp, Artificial Sequence
  Synthetic oligonucleotide
catagagcataaacctccaggatgtatgct

SEQ ID NO: 224665 - DNA, 30 bp, Artificial Sequence
  Synthetic oligonucleotide
catctagccggggcttgttgagaaactgct

SEQ ID NO: 224666 - DNA, 30 bp, Artificial Sequence
  Synthetic oligonucleotide
tcggatgctgattttccattttcaactgct

SEQ ID NO: 224667 - DNA, 30 bp, Artificial Sequence
  Synthetic oligonucleotide
tggcatgtcgccaaagtaaggagacctgct

SEQ ID NO: 224668 - DNA, 31 bp, Artificial Sequence
  Synthetic oligonucleotide
tccaaaccagttcgctaactggtatcctgct

SEQ ID NO: 224669 - DNA, 30 bp, Artificial Sequence
  Synthetic oligonucleotide
gcagagtagcgcgccatatatagtcctgct

SEQ ID NO: 224670 - DNA, 30 bp, Artificial Sequence
  Synthetic oligonucleotide
ctaaaataaaacaactagaatggagctgct

SEQ ID NO: 224671 - DNA, 30 bp, Artificial Sequence
  Synthetic oligonucleotide
catgcaaatgactacccccacgaggctgct

SEQ ID NO: 224672 - DNA, 30 bp, Artificial Sequence
  Synthetic oligonucleotide
gattgatcgtatcaggtatgcacatctgct

SEQ ID NO: 224673 - DNA, 30 bp, Artificial Sequence
  Synthetic oligonucleotide
tttcgctaccccggactttacgtatctgct

SEQ ID NO: 224674 - DNA, 30 bp, Artificial Sequence
  Synthetic oligonucleotide
taagaggtcgacataaggaacttatctgct

SEQ ID NO: 224675 - DNA, 30 bp, Artificial Sequence
  Synthetic oligonucleotide
gaacccaacctaccatgtcaacgctctgct

SEQ ID NO: 224676 - DNA, 30 bp, Artificial Sequence
  Synthetic oligonucleotide
gggtcatattacgcaacgtatatctctgct

SEQ ID NO: 224677 - DNA, 30 bp, Artificial Sequence
  Synthetic oligonucleotide
cgtatataagtcaaagaacttatgtctgct

SEQ ID NO: 224678 - DNA, 30 bp, Artificial Sequence
  Synthetic oligonucleotide
atacgagtagggccaaaggtcgttagtgct

SEQ ID NO: 224679 - DNA, 30 bp, Artificial Sequence
  Synthetic oligonucleotide
aggaccaattctgatcacacagcaggtgct

SEQ ID NO: 224680 - DNA, 30 bp, Artificial Sequence
  Synthetic oligonucleotide
gctgaccattgcggtaaacctgtcggtgct

SEQ ID NO: 224681 - DNA, 30 bp, Artificial Sequence
  Synthetic oligonucleotide
agtggggggttaagaacggcaaattgtgct

SEQ ID NO: 224682 - DNA, 30 bp, Artificial Sequence
  Synthetic oligonucleotide
gcagcgaagggccgtggggatccaattgct

SEQ ID NO: 224683 - DNA, 30 bp, Artificial Sequence
  Synthetic oligonucleotide
cttcggtatttctgtaatataatcattgct

SEQ ID NO: 224684 - DNA, 30 bp, Artificial Sequence
  Synthetic oligonucleotide
aggagaaatcagtacggtatgttcattgct

SEQ ID NO: 224685 - DNA, 30 bp, Artificial Sequence
  Synthetic oligonucleotide
actgtgggtaaattgcgacaaggtattgct

SEQ ID NO: 224686 - DNA, 30 bp, Artificial Sequence
  Synthetic oligonucleotide
gcaattattggttggagtgccggacttgct

SEQ ID NO: 224687 - DNA, 30 bp, Artificial Sequence
  Synthetic oligonucleotide
aggtgccacaggaagcgtatatagcttgct

SEQ ID NO: 224688 - DNA, 30 bp, Artificial Sequence
  Synthetic oligonucleotide
acccgtggcatggtcgacgaaagtcttgct

SEQ ID NO: 224689 - DNA, 30 bp, Artificial Sequence
  Synthetic oligonucleotide
gctatggaggattgatgtgtgtcagttgct

SEQ ID NO: 224690 - DNA, 30 bp, Artificial Sequence
  Synthetic oligonucleotide
cctagtagccaactacgccgtgctgttgct

SEQ ID NO: 224691 - DNA, 30 bp, Artificial Sequence
  Synthetic oligonucleotide
ttatattgtattaaaagggagtttgttgct

SEQ ID NO: 224692 - DNA, 30 bp, Artificial Sequence
  Synthetic oligonucleotide
aacgtcatgcagttgattggcgtttttgct

SEQ ID NO: 224693 - DNA, 30 bp, Artificial Sequence
  Synthetic oligonucleotide
cagcgaaagctaaatgcaggggaaaaatct

SEQ ID NO: 224694 - DNA, 30 bp, Artificial Sequence
  Synthetic oligonucleotide
ataaacttgaataaacgtcacctaaaatct

SEQ ID NO: 224695 - DNA, 30 bp, Artificial Sequence
  Synthetic oligonucleotide
tagatagcgtcagattattgtcacaaatct

SEQ ID NO: 224696 - DNA, 30 bp, Artificial Sequence
  Synthetic oligonucleotide
ctcagaaaaggttttagaagttgcaaatct

SEQ ID NO: 224697 - DNA, 30 bp, Artificial Sequence
  Synthetic oligonucleotide
agatccacgaacaacatgactcagaaatct

SEQ ID NO: 224698 - DNA, 30 bp, Artificial Sequence
  Synthetic oligonucleotide
gagattaaggagtcggagattattaaatct

SEQ ID NO: 224699 - DNA, 30 bp, Artificial Sequence
  Synthetic oligonucleotide
tgggtgttggcgaaatcagggtaacaatct

SEQ ID NO: 224700 - DNA, 30 bp, Artificial Sequence
  Synthetic oligonucleotide
gataaggtagaggtcttggtcgaccaatct

SEQ ID NO: 224701 - DNA, 30 bp, Artificial Sequence
  Synthetic oligonucleotide
ccaaggtgcatattagcagcgctccaatct

SEQ ID NO: 224702 - DNA, 30 bp, Artificial Sequence
  Synthetic oligonucleotide
cacgaaatgcgaataaattttgtgcaatct

SEQ ID NO: 224703 - DNA, 30 bp, Artificial Sequence
  Synthetic oligonucleotide
aagcgcgcgagcactccgaaattgcaatct

SEQ ID NO: 224704 - DNA, 30 bp, Artificial Sequence
  Synthetic oligonucleotide
atcgtctgctgatgtctatattgtcaatct

SEQ ID NO: 224705 - DNA, 30 bp, Artificial Sequence
  Synthetic oligonucleotide
taggatcattgcacatgaggataagaatct

SEQ ID NO: 224706 - DNA, 30 bp, Artificial Sequence
  Synthetic oligonucleotide
gttacggcacatcatgggtagtcttaatct

SEQ ID NO: 224707 - DNA, 31 bp, Artificial Sequence
  Synthetic oligonucleotide
gatcgttagcaaccacatattcttttaatct

SEQ ID NO: 224708 - DNA, 30 bp, Artificial Sequence
  Synthetic oligonucleotide
tgatagggacgagattgctgtataacatct

SEQ ID NO: 224709 - DNA, 30 bp, Artificial Sequence
  Synthetic oligonucleotide
gactgtatcgtctcttgatggtatacatct

SEQ ID NO: 224710 - DNA, 30 bp, Artificial Sequence
  Synthetic oligonucleotide
ggtacttgtatagaccgactccgtccatct

SEQ ID NO: 224711 - DNA, 30 bp, Artificial Sequence
  Synthetic oligonucleotide
gggttgtgctatgtggtattttttccatct

SEQ ID NO: 224712 - DNA, 29 bp, Artificial Sequence
  Synthetic oligonucleotide
caaagtgcagtggagcactctaagcatct

SEQ ID NO: 224713 - DNA, 30 bp, Artificial Sequence
  Synthetic oligonucleotide
aggacattacatactccgtacatggcatct

SEQ ID NO: 224714 - DNA, 30 bp, Artificial Sequence
  Synthetic oligonucleotide
ccagagagatttgatcaataactggcatct

SEQ ID NO: 224715 - DNA, 30 bp, Artificial Sequence
  Synthetic oligonucleotide
ctcgtgtattgagcccctcaaagtgcatct

SEQ ID NO: 224716 - DNA, 30 bp, Artificial Sequence
  Synthetic oligonucleotide
cgaaagcgtctcgggatcaattgatcatct

SEQ ID NO: 224717 - DNA, 30 bp, Artificial Sequence
  Synthetic oligonucleotide
gaccggggacatccaggacgacactcatct

SEQ ID NO: 224718 - DNA, 30 bp, Artificial Sequence
  Synthetic oligonucleotide
gccgtaacatcacatcatgggtcgtcatct

SEQ ID NO: 224719 - DNA, 30 bp, Artificial Sequence
  Synthetic oligonucleotide
cgggtaatttttcccagtatggattcatct

SEQ ID NO: 224720 - DNA, 30 bp, Artificial Sequence
  Synthetic oligonucleotide
atcacaacagagcaatgaacaaaaagatct

SEQ ID NO: 224721 - DNA, 30 bp, Artificial Sequence
  Synthetic oligonucleotide
cgtagtcgatataccgggaaacaaagatct

SEQ ID NO: 224722 - DNA, 30 bp, Artificial Sequence
  Synthetic oligonucleotide
tgtccacgttagtccggatgcccaagatct

SEQ ID NO: 224723 - DNA, 30 bp, Artificial Sequence
  Synthetic oligonucleotide
cctataggaaggcatcaccggaagagatct

SEQ ID NO: 224724 - DNA, 30 bp, Artificial Sequence
  Synthetic oligonucleotide
gttactgtgaaatcagacgaaaggagatct

SEQ ID NO: 224725 - DNA, 30 bp, Artificial Sequence
  Synthetic oligonucleotide
gtttgaagtttttagcgcacagtgagatct

SEQ ID NO: 224726 - DNA, 30 bp, Artificial Sequence
  Synthetic oligonucleotide
gcgtgtgttccacttcaggccggccgatct

SEQ ID NO: 224727 - DNA, 30 bp, Artificial Sequence
  Synthetic oligonucleotide
atagtggctcagtagcctaccgtgcgatct

SEQ ID NO: 224728 - DNA, 30 bp, Artificial Sequence
  Synthetic oligonucleotide
gaagtgatcgcacatatactgcatcgatct

SEQ ID NO: 224729 - DNA, 30 bp, Artificial Sequence
  Synthetic oligonucleotide
atagtgtaagaaaaatccaatagtcgatct

SEQ ID NO: 224730 - DNA, 30 bp, Artificial Sequence
  Synthetic oligonucleotide
tagaatgttattggcgtggataaaggatct

SEQ ID NO: 224731 - DNA, 30 bp, Artificial Sequence
  Synthetic oligonucleotide
ttcagtgacgggtgcggcgcatgatgatct

SEQ ID NO: 224732 - DNA, 30 bp, Artificial Sequence
  Synthetic oligonucleotide
gtgagagctcgggtctgatttgtatgatct

SEQ ID NO: 224733 - DNA, 30 bp, Artificial Sequence
  Synthetic oligonucleotide
gtgattaagacgatatactttttgtgatct

SEQ ID NO: 224734 - DNA, 30 bp, Artificial Sequence
  Synthetic oligonucleotide
gcacggaatgttagtagacccctaatatct

SEQ ID NO: 224735 - DNA, 30 bp, Artificial Sequence
  Synthetic oligonucleotide
ctggctccggcaccaaactccgccatatct

SEQ ID NO: 224736 - DNA, 30 bp, Artificial Sequence
  Synthetic oligonucleotide
ggaggttacctaaatgggtctagcatatct

SEQ ID NO: 224737 - DNA, 30 bp, Artificial Sequence
  Synthetic oligonucleotide
gtagatcgtcccatacaggcactcatatct

SEQ ID NO: 224738 - DNA, 30 bp, Artificial Sequence
  Synthetic oligonucleotide
ctcatcaaggtcagctgcatcaggatatct

SEQ ID NO: 224739 - DNA, 30 bp, Artificial Sequence
  Synthetic oligonucleotide
taactcagtcagagcatttcataactatct

SEQ ID NO: 224740 - DNA, 30 bp, Artificial Sequence
  Synthetic oligonucleotide
tcatgtagacgagggaatttttaactatct

SEQ ID NO: 224741 - DNA, 30 bp, Artificial Sequence
  Synthetic oligonucleotide
ataaaattgggaaagtgtaaatggctatct

SEQ ID NO: 224742 - DNA, 30 bp, Artificial Sequence
  Synthetic oligonucleotide
cgtcgattatttttaatgcccatgctatct

SEQ ID NO: 224743 - DNA, 30 bp, Artificial Sequence
  Synthetic oligonucleotide
atggctagtgtgactgcaaacaaagtatct

SEQ ID NO: 224744 - DNA, 30 bp, Artificial Sequence
  Synthetic oligonucleotide
gttaacaaagtcggcaacctagacgtatct

SEQ ID NO: 224745 - DNA, 30 bp, Artificial Sequence
  Synthetic oligonucleotide
gctatttcagatcgactagcgtatgtatct

SEQ ID NO: 224746 - DNA, 30 bp, Artificial Sequence
  Synthetic oligonucleotide
ccttaaggccgatgcaatctaaagttatct

SEQ ID NO: 224747 - DNA, 30 bp, Artificial Sequence
  Synthetic oligonucleotide
agattggttggtgcgtcttctgcaaactct

SEQ ID NO: 224748 - DNA, 30 bp, Artificial Sequence
  Synthetic oligonucleotide
ctgacacgcgtcccccaacatctaaactct

SEQ ID NO: 224749 - DNA, 30 bp, Artificial Sequence
  Synthetic oligonucleotide
agtccctacggtgcttgtctagcgcactct

SEQ ID NO: 224750 - DNA, 30 bp, Artificial Sequence
  Synthetic oligonucleotide
cagtattagagcgtcgggacatctcactct

SEQ ID NO: 224751 - DNA, 30 bp, Artificial Sequence
  Synthetic oligonucleotide
atcaaatagtcgtttcaaggactagactct

SEQ ID NO: 224752 - DNA, 30 bp, Artificial Sequence
  Synthetic oligonucleotide
ctaagcagaccaatgcagcgcgtcgactct

SEQ ID NO: 224753 - DNA, 30 bp, Artificial Sequence
  Synthetic oligonucleotide
cagtgtagctcctggcgagtaggatactct

SEQ ID NO: 224754 - DNA, 30 bp, Artificial Sequence
  Synthetic oligonucleotide
gccgatgagtaaacactgaataactactct

SEQ ID NO: 224755 - DNA, 30 bp, Artificial Sequence
  Synthetic oligonucleotide
aagatttccagaacatgggaagtgtactct

SEQ ID NO: 224756 - DNA, 30 bp, Artificial Sequence
  Synthetic oligonucleotide
ccgggtaaatcggatccaaacgtgtactct

SEQ ID NO: 224757 - DNA, 30 bp, Artificial Sequence
  Synthetic oligonucleotide
tggatatgtggcgcgttggtacaaacctct

SEQ ID NO: 224758 - DNA, 30 bp, Artificial Sequence
  Synthetic oligonucleotide
aactcgccggtgaaccgacaataaacctct

SEQ ID NO: 224759 - DNA, 30 bp, Artificial Sequence
  Synthetic oligonucleotide
agaccgcggaataaaggctgcgacacctct

SEQ ID NO: 224760 - DNA, 30 bp, Artificial Sequence
  Synthetic oligonucleotide
catgtggggaagaacggtaagtgcacctct

SEQ ID NO: 224761 - DNA, 30 bp, Artificial Sequence
  Synthetic oligonucleotide
gttcggaaagaacgtctgtgcttgacctct

SEQ ID NO: 224762 - DNA, 30 bp, Artificial Sequence
  Synthetic oligonucleotide
tttggtgacttggggaagcaatctccctct

SEQ ID NO: 224763 - DNA, 30 bp, Artificial Sequence
  Synthetic oligonucleotide
gcacaggacatatcatagggggtagcctct

SEQ ID NO: 224764 - DNA, 30 bp, Artificial Sequence
  Synthetic oligonucleotide
gcctcaaatatagcttcagggctcgcctct

SEQ ID NO: 224765 - DNA, 30 bp, Artificial Sequence
  Synthetic oligonucleotide
ccgggctcttacagataagatgtatcctct

SEQ ID NO: 224766 - DNA, 30 bp, Artificial Sequence
  Synthetic oligonucleotide
tagctatgagagccacgacgtcactcctct

SEQ ID NO: 224767 - DNA, 30 bp, Artificial Sequence
  Synthetic oligonucleotide
cgcgtagagccctcaaaccaccggtcctct

SEQ ID NO: 224768 - DNA, 30 bp, Artificial Sequence
  Synthetic oligonucleotide
gagggagcacacttgtaggaaaacagctct

SEQ ID NO: 224769 - DNA, 30 bp, Artificial Sequence
  Synthetic oligonucleotide
tgactcctacataatgaatcggggagctct

SEQ ID NO: 224770 - DNA, 30 bp, Artificial Sequence
  Synthetic oligonucleotide
acattgcatgagatgggaccgtttagctct

SEQ ID NO: 224771 - DNA, 30 bp, Artificial Sequence
  Synthetic oligonucleotide
tgtgcgatatgcaaggatcatccacgctct

SEQ ID NO: 224772 - DNA, 30 bp, Artificial Sequence
  Synthetic oligonucleotide
actaggcgcggacggtcgcaggatcgctct

SEQ ID NO: 224773 - DNA, 30 bp, Artificial Sequence
  Synthetic oligonucleotide
cgaatcaagcagaacgactaaagtcgctct

SEQ ID NO: 224774 - DNA, 30 bp, Artificial Sequence
  Synthetic oligonucleotide
gccgaggatgcggggttccaagcaggctct

SEQ ID NO: 224775 - DNA, 30 bp, Artificial Sequence
  Synthetic oligonucleotide
aacaggagcgtagacgtccggataggctct

SEQ ID NO: 224776 - DNA, 30 bp, Artificial Sequence
  Synthetic oligonucleotide
gcgaaggcagcggattaaacattaggctct

SEQ ID NO: 224777 - DNA, 30 bp, Artificial Sequence
  Synthetic oligonucleotide
atagctcgacgttcagtgggtatcggctct

SEQ ID NO: 224778 - DNA, 30 bp, Artificial Sequence
  Synthetic oligonucleotide
tctcaggtgtaaggacctgacaatggctct

SEQ ID NO: 224779 - DNA, 30 bp, Artificial Sequence
  Synthetic oligonucleotide
ggacagtatcggcggcaaagttatggctct

SEQ ID NO: 224780 - DNA, 30 bp, Artificial Sequence
  Synthetic oligonucleotide
gatacaggcgcctacgggggtctatgctct

SEQ ID NO: 224781 - DNA, 30 bp, Artificial Sequence
  Synthetic oligonucleotide
caaaatacgttctcgtctctggtctgctct

SEQ ID NO: 224782 - DNA, 30 bp, Artificial Sequence
  Synthetic oligonucleotide
gacgcgcgccagccacctagcccttgctct

SEQ ID NO: 224783 - DNA, 30 bp, Artificial Sequence
  Synthetic oligonucleotide
acggacagactaacggggccgctttgctct

SEQ ID NO: 224784 - DNA, 30 bp, Artificial Sequence
  Synthetic oligonucleotide
atccgcgatagaccttcgtctcgactctct

SEQ ID NO: 224785 - DNA, 30 bp, Artificial Sequence
  Synthetic oligonucleotide
caatggaaagtccgattcttcagtctctct

SEQ ID NO: 224786 - DNA, 30 bp, Artificial Sequence
  Synthetic oligonucleotide
gtcagagtctctagaaagataggcgtctct

SEQ ID NO: 224787 - DNA, 30 bp, Artificial Sequence
  Synthetic oligonucleotide
cacctcaataagctactgtcctgcgtctct

SEQ ID NO: 224788 - DNA, 30 bp, Artificial Sequence
  Synthetic oligonucleotide
ggacgaccgacggtgtgcaattaggtctct

SEQ ID NO: 224789 - DNA, 30 bp, Artificial Sequence
  Synthetic oligonucleotide
gatcaaccctaggcacaaggcgcggtctct

SEQ ID NO: 224790 - DNA, 30 bp, Artificial Sequence
  Synthetic oligonucleotide
accccatgtaggacaaagagtcctgtctct

SEQ ID NO: 224791 - DNA, 30 bp, Artificial Sequence
  Synthetic oligonucleotide
atggtgaaatgcgacacccgtcctgtctct

SEQ ID NO: 224792 - DNA, 30 bp, Artificial Sequence
  Synthetic oligonucleotide
ggaatgagatgcaaactgtatataaagtct

SEQ ID NO: 224793 - DNA, 30 bp, Artificial Sequence
  Synthetic oligonucleotide
aagaccctctggtatgacaaactaaagtct

SEQ ID NO: 224794 - DNA, 30 bp, Artificial Sequence
  Synthetic oligonucleotide
gatgcttttccattgtagtagctcaagtct

SEQ ID NO: 224795 - DNA, 30 bp, Artificial Sequence
  Synthetic oligonucleotide
aatacgcaacacagtaggtacgctaagtct

SEQ ID NO: 224796 - DNA, 30 bp, Artificial Sequence
  Synthetic oligonucleotide
tgcaacggtaaaagtaaaggctttaagtct

SEQ ID NO: 224797 - DNA, 30 bp, Artificial Sequence
  Synthetic oligonucleotide
tcgaactcctcacaatccaccacacagtct

SEQ ID NO: 224798 - DNA, 30 bp, Artificial Sequence
  Synthetic oligonucleotide
aaagacggatgcgcaactcaggcacagtct

SEQ ID NO: 224799 - DNA, 30 bp, Artificial Sequence
  Synthetic oligonucleotide
ttgctcaatggtgatatacaacaccagtct

SEQ ID NO: 224800 - DNA, 30 bp, Artificial Sequence
  Synthetic oligonucleotide
gcagtccctttaagggcgttcgaccagtct

SEQ ID NO: 224801 - DNA, 30 bp, Artificial Sequence
  Synthetic oligonucleotide
ctaaatatgttagaaattgtgaggcagtct

SEQ ID NO: 224802 - DNA, 30 bp, Artificial Sequence
  Synthetic oligonucleotide
aatcgaaaggctaaccggggtacagagtct

SEQ ID NO: 224803 - DNA, 30 bp, Artificial Sequence
  Synthetic oligonucleotide
taggtattagaacgtgaaggtccagagtct

SEQ ID NO: 224804 - DNA, 30 bp, Artificial Sequence
  Synthetic oligonucleotide
gcacagtgggtataacgatgattagagtct

SEQ ID NO: 224805 - DNA, 30 bp, Artificial Sequence
  Synthetic oligonucleotide
cttggaagagcgtggactgccctcgagtct

SEQ ID NO: 224806 - DNA, 30 bp, Artificial Sequence
  Synthetic oligonucleotide
ccacgggagagttacctgacaagtgagtct

SEQ ID NO: 224807 - DNA, 30 bp, Artificial Sequence
  Synthetic oligonucleotide
ggtttgcttgaggttaagcgaggtgagtct

SEQ ID NO: 224808 - DNA, 30 bp, Artificial Sequence
  Synthetic oligonucleotide
gcactaaagtggtgcactacagagtagtct

SEQ ID NO: 224809 - DNA, 30 bp, Artificial Sequence
  Synthetic oligonucleotide
ttcgctttgcgccctcacatttattagtct

SEQ ID NO: 224810 - DNA, 30 bp, Artificial Sequence
  Synthetic oligonucleotide
aatacaagatggaaattgacacgtacgtct

SEQ ID NO: 224811 - DNA, 30 bp, Artificial Sequence
  Synthetic oligonucleotide
aaaccccgcatgggaaagaggtacccgtct

SEQ ID NO: 224812 - DNA, 30 bp, Artificial Sequence
  Synthetic oligonucleotide
ggattcgcaccgactgttgtggagccgtct

SEQ ID NO: 224813 - DNA, 30 bp, Artificial Sequence
  Synthetic oligonucleotide
gcgcagtcgtaacaaagacgtacgccgtct

SEQ ID NO: 224814 - DNA, 30 bp, Artificial Sequence
  Synthetic oligonucleotide
cataggcccggcttgcggggactagcgtct

SEQ ID NO: 224815 - DNA, 30 bp, Artificial Sequence
  Synthetic oligonucleotide
gaccgcgcgttcacttaggacatggcgtct

SEQ ID NO: 224816 - DNA, 30 bp, Artificial Sequence
  Synthetic oligonucleotide
cactgatcgtacttacttggaggtgcgtct

SEQ ID NO: 224817 - DNA, 30 bp, Artificial Sequence
  Synthetic oligonucleotide
cctagtttatttgtcacgtttttttcgtct

SEQ ID NO: 224818 - DNA, 30 bp, Artificial Sequence
  Synthetic oligonucleotide
atcgtggacatcgcacagccccaaaggtct

SEQ ID NO: 224819 - DNA, 30 bp, Artificial Sequence
  Synthetic oligonucleotide
cgccgcgtatttaagaaggacgaaaggtct

SEQ ID NO: 224820 - DNA, 30 bp, Artificial Sequence
  Synthetic oligonucleotide
taaccaatgggcttgtagcggttgaggtct

SEQ ID NO: 224821 - DNA, 30 bp, Artificial Sequence
  Synthetic oligonucleotide
ctggggcgcgtagtatggtgcctacggtct

SEQ ID NO: 224822 - DNA, 30 bp, Artificial Sequence
  Synthetic oligonucleotide
gcgacatagtacgtctttagctcccggtct

SEQ ID NO: 224823 - DNA, 30 bp, Artificial Sequence
  Synthetic oligonucleotide
ctcagcgagtcagtgcgcttgatccggtct

SEQ ID NO: 224824 - DNA, 30 bp, Artificial Sequence
  Synthetic oligonucleotide
gaacgtacacaatcaagaccaacgcggtct

SEQ ID NO: 224825 - DNA, 30 bp, Artificial Sequence
  Synthetic oligonucleotide
gggcgtttatgcatccacattgaagggtct

SEQ ID NO: 224826 - DNA, 30 bp, Artificial Sequence
  Synthetic oligonucleotide
tggtgttcatttccgaactctctagggtct

SEQ ID NO: 224827 - DNA, 30 bp, Artificial Sequence
  Synthetic oligonucleotide
catctatcttagaggaggtataacgggtct

SEQ ID NO: 224828 - DNA, 30 bp, Artificial Sequence
  Synthetic oligonucleotide
ttgcgcgttcattgaaccctcaaggggtct

SEQ ID NO: 224829 - DNA, 30 bp, Artificial Sequence
  Synthetic oligonucleotide
aagaggtatttgcccagccaacctgggtct

SEQ ID NO: 224830 - DNA, 30 bp, Artificial Sequence
  Synthetic oligonucleotide
ggcctaaaaacctatgtgatgttatggtct

SEQ ID NO: 224831 - DNA, 30 bp, Artificial Sequence
  Synthetic oligonucleotide
gacgccgcggatttaaggcgaaactggtct

SEQ ID NO: 224832 - DNA, 30 bp, Artificial Sequence
  Synthetic oligonucleotide
gccacaatcaacataaatttagagtggtct

SEQ ID NO: 224833 - DNA, 30 bp, Artificial Sequence
  Synthetic oligonucleotide
agagaagtctaatccgctataaaaatgtct

SEQ ID NO: 224834 - DNA, 30 bp, Artificial Sequence
  Synthetic oligonucleotide
atcgatcagccaccagacttcacaatgtct

SEQ ID NO: 224835 - DNA, 30 bp, Artificial Sequence
  Synthetic oligonucleotide
atatgaggtacccaaatcggtataatgtct

SEQ ID NO: 224836 - DNA, 30 bp, Artificial Sequence
  Synthetic oligonucleotide
tgccaaactgggactaacgtggccatgtct

SEQ ID NO: 224837 - DNA, 31 bp, Artificial Sequence
  Synthetic oligonucleotide
cgggtcagcgcggtatggaagggcgatgtct

SEQ ID NO: 224838 - DNA, 30 bp, Artificial Sequence
  Synthetic oligonucleotide
ttgagcggtgctaattaagacgaactgtct

SEQ ID NO: 224839 - DNA, 30 bp, Artificial Sequence
  Synthetic oligonucleotide
tcggtacatttatcccgcagttctctgtct

SEQ ID NO: 224840 - DNA, 30 bp, Artificial Sequence
  Synthetic oligonucleotide
tgggctgcttagctcatgtccaaattgtct

SEQ ID NO: 224841 - DNA, 30 bp, Artificial Sequence
  Synthetic oligonucleotide
atgcgggcgctacagcggtaaccattgtct

SEQ ID NO: 224842 - DNA, 30 bp, Artificial Sequence
  Synthetic oligonucleotide
tcggagccatggtacaacccaagattgtct

SEQ ID NO: 224843 - DNA, 30 bp, Artificial Sequence
  Synthetic oligonucleotide
agtacccgtgggccaaaaaaacgattgtct

SEQ ID NO: 224844 - DNA, 30 bp, Artificial Sequence
  Synthetic oligonucleotide
aaatgataagctatacgataagacttgtct

SEQ ID NO: 224845 - DNA, 30 bp, Artificial Sequence
  Synthetic oligonucleotide
agcgtgagtccaggaaagtcgtacttgtct

SEQ ID NO: 224846 - DNA, 30 bp, Artificial Sequence
  Synthetic oligonucleotide
gccggggtggtcatactatccagcttgtct

SEQ ID NO: 224847 - DNA, 30 bp, Artificial Sequence
  Synthetic oligonucleotide
atacaccgtagctgtaacccagagttgtct

SEQ ID NO: 224848 - DNA, 30 bp, Artificial Sequence
  Synthetic oligonucleotide
ggagaggttgcatattttatggtgttgtct

SEQ ID NO: 224849 - DNA, 30 bp, Artificial Sequence
  Synthetic oligonucleotide
tggactagaggggataggaataatttgtct

SEQ ID NO: 224850 - DNA, 30 bp, Artificial Sequence
  Synthetic oligonucleotide
caaaggacagaatgtggttgtagtttgtct

SEQ ID NO: 224851 - DNA, 30 bp, Artificial Sequence
  Synthetic oligonucleotide
atacggtcgatacgtaatctgaaaaattct

SEQ ID NO: 224852 - DNA, 30 bp, Artificial Sequence
  Synthetic oligonucleotide
ctcaaaagtgtgtcttgacccggaaattct

SEQ ID NO: 224853 - DNA, 30 bp, Artificial Sequence
  Synthetic oligonucleotide
acgccgctcgtaggccctcttttcaattct

SEQ ID NO: 224854 - DNA, 30 bp, Artificial Sequence
  Synthetic oligonucleotide
gacagagcactggtagcccaatggaattct

SEQ ID NO: 224855 - DNA, 30 bp, Artificial Sequence
  Synthetic oligonucleotide
ttcggtgtcaggtgacgttcaggtaattct

SEQ ID NO: 224856 - DNA, 30 bp, Artificial Sequence
  Synthetic oligonucleotide
cctttagattcatatatgttataacattct

SEQ ID NO: 224857 - DNA, 30 bp, Artificial Sequence
  Synthetic oligonucleotide
ggtgaatagggactgagttggcaccattct

SEQ ID NO: 224858 - DNA, 30 bp, Artificial Sequence
  Synthetic oligonucleotide
taaaatcgctggtgcgagaactaagattct

SEQ ID NO: 224859 - DNA, 30 bp, Artificial Sequence
  Synthetic oligonucleotide
ttggtgcttataccggttccaatagattct

SEQ ID NO: 224860 - DNA, 30 bp, Artificial Sequence
  Synthetic oligonucleotide
gtggtggcaacacgtgtatgcggggattct

SEQ ID NO: 224861 - DNA, 30 bp, Artificial Sequence
  Synthetic oligonucleotide
tggtgaggattacccggtacttatgattct

SEQ ID NO: 224862 - DNA, 30 bp, Artificial Sequence
  Synthetic oligonucleotide
tcggaacagaatgcaattcatcgatattct

SEQ ID NO: 224863 - DNA, 30 bp, Artificial Sequence
  Synthetic oligonucleotide
tgaacgagcggcgacgaccaagactattct

SEQ ID NO: 224864 - DNA, 30 bp, Artificial Sequence
  Synthetic oligonucleotide
cgtactgctcggcaggtgggaaagtattct

SEQ ID NO: 224865 - DNA, 30 bp, Artificial Sequence
  Synthetic oligonucleotide
aggggacaagcagacttggcatcgtattct

SEQ ID NO: 224866 - DNA, 30 bp, Artificial Sequence
  Synthetic oligonucleotide
gaacgcattctatgtgcgactgcttattct

SEQ ID NO: 224867 - DNA, 30 bp, Artificial Sequence
  Synthetic oligonucleotide
cattacgtttccgtgcttgccttttattct

SEQ ID NO: 224868 - DNA, 30 bp, Artificial Sequence
  Synthetic oligonucleotide
aacgagctgagagaagaaggtgcaacttct

SEQ ID NO: 224869 - DNA, 30 bp, Artificial Sequence
  Synthetic oligonucleotide
gttccgaacataaggattgcgaggacttct

SEQ ID NO: 224870 - DNA, 30 bp, Artificial Sequence
  Synthetic oligonucleotide
ccgtgttcagtccgggactactggacttct

SEQ ID NO: 224871 - DNA, 30 bp, Artificial Sequence
  Synthetic oligonucleotide
ttgaggcgtattaagcacaaaatgacttct

SEQ ID NO: 224872 - DNA, 30 bp, Artificial Sequence
  Synthetic oligonucleotide
ccgagtgctggtggttccattggtacttct

SEQ ID NO: 224873 - DNA, 30 bp, Artificial Sequence
  Synthetic oligonucleotide
gcagtcattcctgcaaatcgccgaccttct

SEQ ID NO: 224874 - DNA, 30 bp, Artificial Sequence
  Synthetic oligonucleotide
tagggggaatactagggaccgaaagcttct

SEQ ID NO: 224875 - DNA, 30 bp, Artificial Sequence
  Synthetic oligonucleotide
actcgcaggaagcacgaaaaattagcttct

SEQ ID NO: 224876 - DNA, 30 bp, Artificial Sequence
  Synthetic oligonucleotide
ggtgacagtctgaagaaaatcgcggcttct

SEQ ID NO: 224877 - DNA, 30 bp, Artificial Sequence
  Synthetic oligonucleotide
aaatagccggcaacacgggtagctgcttct

SEQ ID NO: 224878 - DNA, 30 bp, Artificial Sequence
  Synthetic oligonucleotide
ccatggctcagatcatgcccgcactcttct

SEQ ID NO: 224879 - DNA, 30 bp, Artificial Sequence
  Synthetic oligonucleotide
gtaactagcatcggcaatatgtacagttct

SEQ ID NO: 224880 - DNA, 30 bp, Artificial Sequence
  Synthetic oligonucleotide
aacgggacattacgttcgaatgagagttct

SEQ ID NO: 224881 - DNA, 30 bp, Artificial Sequence
  Synthetic oligonucleotide
ccagtatcgtcgggggagagaactagttct

SEQ ID NO: 224882 - DNA, 30 bp, Artificial Sequence
  Synthetic oligonucleotide
agggtaagttacaatggagatgctagttct

SEQ ID NO: 224883 - DNA, 30 bp, Artificial Sequence
  Synthetic oligonucleotide
gttatcgcttggtcaaaccctgtacgttct

SEQ ID NO: 224884 - DNA, 30 bp, Artificial Sequence
  Synthetic oligonucleotide
gttaaaaggtgcatatcactgacccgttct

SEQ ID NO: 224885 - DNA, 30 bp, Artificial Sequence
  Synthetic oligonucleotide
acataccccaccgacgcgaaatagcgttct

SEQ ID NO: 224886 - DNA, 30 bp, Artificial Sequence
  Synthetic oligonucleotide
ggtcggactacagtatttgtatattgttct

SEQ ID NO: 224887 - DNA, 30 bp, Artificial Sequence
  Synthetic oligonucleotide
ttccaagtacaactctaggcactcatttct

SEQ ID NO: 224888 - DNA, 30 bp, Artificial Sequence
  Synthetic oligonucleotide
ccgtgtaggaccagtcagactttcatttct

SEQ ID NO: 224889 - DNA, 30 bp, Artificial Sequence
  Synthetic oligonucleotide
atcactgcaaaacggtcggaaaggatttct

SEQ ID NO: 224890 - DNA, 30 bp, Artificial Sequence
  Synthetic oligonucleotide
gagtattcgagggacatcgatatgatttct

SEQ ID NO: 224891 - DNA, 30 bp, Artificial Sequence
  Synthetic oligonucleotide
aagaagcagggcatggtgaggggtatttct

SEQ ID NO: 224892 - DNA, 30 bp, Artificial Sequence
  Synthetic oligonucleotide
gagaaagaggtaaatggacagagcctttct

SEQ ID NO: 224893 - DNA, 30 bp, Artificial Sequence
  Synthetic oligonucleotide
taaagccaagagcacttcgttcatctttct

SEQ ID NO: 224894 - DNA, 30 bp, Artificial Sequence
  Synthetic oligonucleotide
ggtgaatgacggggggtgtaagctctttct

SEQ ID NO: 224895 - DNA, 30 bp, Artificial Sequence
  Synthetic oligonucleotide
gtaagacggccgccgggggagcttctttct

SEQ ID NO: 224896 - DNA, 30 bp, Artificial Sequence
  Synthetic oligonucleotide
cccgtgtcgcaaaggtagtaaccagtttct

SEQ ID NO: 224897 - DNA, 30 bp, Artificial Sequence
  Synthetic oligonucleotide
ctgcaagttgacgaaattcagctagtttct

SEQ ID NO: 224898 - DNA, 30 bp, Artificial Sequence
  Synthetic oligonucleotide
cctacacggcaaagtggttcaagcgtttct

SEQ ID NO: 224899 - DNA, 30 bp, Artificial Sequence
  Synthetic oligonucleotide
tcctgaggtcaggtcgcctaggaattttct

SEQ ID NO: 224900 - DNA, 30 bp, Artificial Sequence
  Synthetic oligonucleotide
caatcgaggctcttgcgatttgggttttct

SEQ ID NO: 224901 - DNA, 30 bp, Artificial Sequence
  Synthetic oligonucleotide
gggaactgaccctggtacaggaatttttct

SEQ ID NO: 224902 - DNA, 30 bp, Artificial Sequence
  Synthetic oligonucleotide
ctcagggcctgaacacgcgtcgatttttct

SEQ ID NO: 224903 - DNA, 30 bp, Artificial Sequence
  Synthetic oligonucleotide
gggtacatcgaaacggttgcattcaaaagt

SEQ ID NO: 224904 - DNA, 30 bp, Artificial Sequence
  Synthetic oligonucleotide
aaactgtcaggccgataaggggcgaaaagt

SEQ ID NO: 224905 - DNA, 30 bp, Artificial Sequence
  Synthetic oligonucleotide
attaatccaggcaactggtacttgaaaagt

SEQ ID NO: 224906 - DNA, 30 bp, Artificial Sequence
  Synthetic oligonucleotide
ctttccagggcaacgatcgatagtaaaagt

SEQ ID NO: 224907 - DNA, 30 bp, Artificial Sequence
  Synthetic oligonucleotide
gacgactgcctgtaggaagcgatacaaagt

SEQ ID NO: 224908 - DNA, 30 bp, Artificial Sequence
  Synthetic oligonucleotide
gcctgggaggtcatctgggaaaagcaaagt

SEQ ID NO: 224909 - DNA, 30 bp, Artificial Sequence
  Synthetic oligonucleotide
gaaaacgcgccgcatcgggaataagaaagt

SEQ ID NO: 224910 - DNA, 30 bp, Artificial Sequence
  Synthetic oligonucleotide
gtttgaaggccatcgtacggaccagaaagt

SEQ ID NO: 224911 - DNA, 30 bp, Artificial Sequence
  Synthetic oligonucleotide
taagggagacggtaccggcaagtcgaaagt

SEQ ID NO: 224912 - DNA, 30 bp, Artificial Sequence
  Synthetic oligonucleotide
gacatatgagtaagatatgtttgggaaagt

SEQ ID NO: 224913 - DNA, 30 bp, Artificial Sequence
  Synthetic oligonucleotide
gtaaatcgggtcttaggtttggtggaaagt

SEQ ID NO: 224914 - DNA, 30 bp, Artificial Sequence
  Synthetic oligonucleotide
gcagttttcgaagttctgtcacatgaaagt

SEQ ID NO: 224915 - DNA, 30 bp, Artificial Sequence
  Synthetic oligonucleotide
gtgtacggattagctcgggagtctgaaagt

SEQ ID NO: 224916 - DNA, 30 bp, Artificial Sequence
  Synthetic oligonucleotide
ctacaccgcggatctccgtcttaataaagt

SEQ ID NO: 224917 - DNA, 30 bp, Artificial Sequence
  Synthetic oligonucleotide
acaaacctagtttggggagaaaagtaaagt

SEQ ID NO: 224918 - DNA, 30 bp, Artificial Sequence
  Synthetic oligonucleotide
tcacgggaatgatgtgtaatatcgtaaagt

SEQ ID NO: 224919 - DNA, 30 bp, Artificial Sequence
  Synthetic oligonucleotide
tgcgcgaagacagttgcattcaattaaagt

SEQ ID NO: 224920 - DNA, 30 bp, Artificial Sequence
  Synthetic oligonucleotide
gtgcccacacgctattggtcgtattaaagt

SEQ ID NO: 224921 - DNA, 30 bp, Artificial Sequence
  Synthetic oligonucleotide
gcaccgttatgattagtgtcaacaacaagt

SEQ ID NO: 224922 - DNA, 30 bp, Artificial Sequence
  Synthetic oligonucleotide
tctaaatgctttcaatatgtaacaacaagt

SEQ ID NO: 224923 - DNA, 30 bp, Artificial Sequence
  Synthetic oligonucleotide
agctaacgggggatggtgggttcaacaagt

SEQ ID NO: 224924 - DNA, 30 bp, Artificial Sequence
  Synthetic oligonucleotide
caatacataaaaatcgctcttccgacaagt

SEQ ID NO: 224925 - DNA, 30 bp, Artificial Sequence
  Synthetic oligonucleotide
tatgactgggtataaaaacacatgacaagt

SEQ ID NO: 224926 - DNA, 30 bp, Artificial Sequence
  Synthetic oligonucleotide
gtaattcgggcgaaatctttgatgacaagt

SEQ ID NO: 224927 - DNA, 30 bp, Artificial Sequence
  Synthetic oligonucleotide
ctggaatgatctttatagatatatacaagt

SEQ ID NO: 224928 - DNA, 30 bp, Artificial Sequence
  Synthetic oligonucleotide
gctaaaacaaaaaaccgagtctgtacaagt

SEQ ID NO: 224929 - DNA, 30 bp, Artificial Sequence
  Synthetic oligonucleotide
cctattgtcgattcctctggtgcaccaagt

SEQ ID NO: 224930 - DNA, 30 bp, Artificial Sequence
  Synthetic oligonucleotide
gttcatagtgtgtagggcatagagccaagt

SEQ ID NO: 224931 - DNA, 30 bp, Artificial Sequence
  Synthetic oligonucleotide
cccctaagtcagagtcgatagaggccaagt

SEQ ID NO: 224932 - DNA, 30 bp, Artificial Sequence
  Synthetic oligonucleotide
gttaacagctgtcacaagaagattccaagt

SEQ ID NO: 224933 - DNA, 30 bp, Artificial Sequence
  Synthetic oligonucleotide
tacttaaagatctgagtgagtacagcaagt

SEQ ID NO: 224934 - DNA, 30 bp, Artificial Sequence
  Synthetic oligonucleotide
aagataggatcgcacagatatatagcaagt

SEQ ID NO: 224935 - DNA, 30 bp, Artificial Sequence
  Synthetic oligonucleotide
tgggcattccaagccgtaattagcgcaagt

SEQ ID NO: 224936 - DNA, 30 bp, Artificial Sequence
  Synthetic oligonucleotide
gttaaggctgaaaataagccgatcgcaagt

SEQ ID NO: 224937 - DNA, 30 bp, Artificial Sequence
  Synthetic oligonucleotide
gatctaccggtcaatacgtgcgtcgcaagt

SEQ ID NO: 224938 - DNA, 30 bp, Artificial Sequence
  Synthetic oligonucleotide
catgtcaaccggtccacgtcgtaggcaagt

SEQ ID NO: 224939 - DNA, 30 bp, Artificial Sequence
  Synthetic oligonucleotide
tagggcctccagctcaacttgtcggcaagt

SEQ ID NO: 224940 - DNA, 30 bp, Artificial Sequence
  Synthetic oligonucleotide
ccagggtgcctctattcaactcgggcaagt

SEQ ID NO: 224941 - DNA, 30 bp, Artificial Sequence
  Synthetic oligonucleotide
tgctcggggtgattacgcgccaaatcaagt

SEQ ID NO: 224942 - DNA, 30 bp, Artificial Sequence
  Synthetic oligonucleotide
gtccagctcgtcagtggagacccatcaagt

SEQ ID NO: 224943 - DNA, 30 bp, Artificial Sequence
  Synthetic oligonucleotide
cgattcgcacgcagagatgtggtctcaagt

SEQ ID NO: 224944 - DNA, 30 bp, Artificial Sequence
  Synthetic oligonucleotide
gtctagggctgcttacctacagattcaagt

SEQ ID NO: 224945 - DNA, 30 bp, Artificial Sequence
  Synthetic oligonucleotide
aagcactacgaggctatgagagcttcaagt

SEQ ID NO: 224946 - DNA, 30 bp, Artificial Sequence
  Synthetic oligonucleotide
gcaaggatcacagtgactgaaaaaagaagt

SEQ ID NO: 224947 - DNA, 30 bp, Artificial Sequence
  Synthetic oligonucleotide
ccctggtaaggtcaacttaatacaagaagt

SEQ ID NO: 224948 - DNA, 30 bp, Artificial Sequence
  Synthetic oligonucleotide
gaggatacctgtagttctctgtgaagaagt

SEQ ID NO: 224949 - DNA, 30 bp, Artificial Sequence
  Synthetic oligonucleotide
gaaagaagttgattagcggtcataagaagt

SEQ ID NO: 224950 - DNA, 30 bp, Artificial Sequence
  Synthetic oligonucleotide
gttgtttggtaaaaggaataaaacagaagt

SEQ ID NO: 224951 - DNA, 30 bp, Artificial Sequence
  Synthetic oligonucleotide
taatggtacctgaaccagttggtgagaagt

SEQ ID NO: 224952 - DNA, 30 bp, Artificial Sequence
  Synthetic oligonucleotide
aaatgacgccattcctgaggagatagaagt

SEQ ID NO: 224953 - DNA, 30 bp, Artificial Sequence
  Synthetic oligonucleotide
tctagtcgaaggagaataggataacgaagt

SEQ ID NO: 224954 - DNA, 30 bp, Artificial Sequence
  Synthetic oligonucleotide
gtcttagtgacctgcgcaataggacgaagt

SEQ ID NO: 224955 - DNA, 30 bp, Artificial Sequence
  Synthetic oligonucleotide
aattgcagttctaccaagaatccccgaagt

SEQ ID NO: 224956 - DNA, 30 bp, Artificial Sequence
  Synthetic oligonucleotide
aaacaaggacactacgggtttcagcgaagt

SEQ ID NO: 224957 - DNA, 30 bp, Artificial Sequence
  Synthetic oligonucleotide
tggtcttccgggcgatcgaagtcaggaagt

SEQ ID NO: 224958 - DNA, 30 bp, Artificial Sequence
  Synthetic oligonucleotide
ttagcgtccaagaaagtctcttgcggaagt

SEQ ID NO: 224959 - DNA, 30 bp, Artificial Sequence
  Synthetic oligonucleotide
ggtaatgccaagagataaggtctgggaagt

SEQ ID NO: 224960 - DNA, 30 bp, Artificial Sequence
  Synthetic oligonucleotide
tggcggcgtagacgacaaacccatggaagt

SEQ ID NO: 224961 - DNA, 29 bp, Artificial Sequence
  Synthetic oligonucleotide
taacaaatcacgttaggctatgatgaagt

SEQ ID NO: 224962 - DNA, 30 bp, Artificial Sequence
  Synthetic oligonucleotide
gctagtatctaccttatgacaggttgaagt

SEQ ID NO: 224963 - DNA, 30 bp, Artificial Sequence
  Synthetic oligonucleotide
cctgtcatttagagttccggatcaataagt

SEQ ID NO: 224964 - DNA, 30 bp, Artificial Sequence
  Synthetic oligonucleotide
ttcgccgaacgaataacgtaaataataagt

SEQ ID NO: 224965 - DNA, 30 bp, Artificial Sequence
  Synthetic oligonucleotide
tgcccactgcagcataatcccgacataagt

SEQ ID NO: 224966 - DNA, 30 bp, Artificial Sequence
  Synthetic oligonucleotide
aggaaatatcaatggccctccatgataagt

SEQ ID NO: 224967 - DNA, 30 bp, Artificial Sequence
  Synthetic oligonucleotide
tcgtcggatgttgtgaactaatatataagt

SEQ ID NO: 224968 - DNA, 30 bp, Artificial Sequence
  Synthetic oligonucleotide
cgttgggaggagtggtccaagtgtataagt

SEQ ID NO: 224969 - DNA, 30 bp, Artificial Sequence
  Synthetic oligonucleotide
ggcatataacctggctggatgattataagt

SEQ ID NO: 224970 - DNA, 30 bp, Artificial Sequence
  Synthetic oligonucleotide
cagatatcccagtatggcacaagactaagt

SEQ ID NO: 224971 - DNA, 30 bp, Artificial Sequence
  Synthetic oligonucleotide
ttgaggactaattaacgtttcgacctaagt

SEQ ID NO: 224972 - DNA, 30 bp, Artificial Sequence
  Synthetic oligonucleotide
ggggaaagacttcatcaagcaacagtaagt

SEQ ID NO: 224973 - DNA, 30 bp, Artificial Sequence
  Synthetic oligonucleotide
ggttatacgaactaggcacctgcagtaagt

SEQ ID NO: 224974 - DNA, 25 bp, Artificial Sequence
  Synthetic oligonucleotide
agagagggcactgcagcgagtaagt

SEQ ID NO: 224975 - DNA, 30 bp, Artificial Sequence
  Synthetic oligonucleotide
acgccccctagaaggttatcgttagtaagt

SEQ ID NO: 224976 - DNA, 30 bp, Artificial Sequence
  Synthetic oligonucleotide
cacgaaagccgggcttgacctaccgtaagt

SEQ ID NO: 224977 - DNA, 30 bp, Artificial Sequence
  Synthetic oligonucleotide
ggtaggctagttgtacttcttttcgtaagt

SEQ ID NO: 224978 - DNA, 30 bp, Artificial Sequence
  Synthetic oligonucleotide
ccgcccatgttagagcgaacgaaggtaagt

SEQ ID NO: 224979 - DNA, 30 bp, Artificial Sequence
  Synthetic oligonucleotide
taagccaatagaaagtgcacttaggtaagt

SEQ ID NO: 224980 - DNA, 30 bp, Artificial Sequence
  Synthetic oligonucleotide
gacgtactccaggttttgcgattggtaagt

SEQ ID NO: 224981 - DNA, 30 bp, Artificial Sequence
  Synthetic oligonucleotide
cgatggcgaaggattaatcgggtattaagt

SEQ ID NO: 224982 - DNA, 30 bp, Artificial Sequence
  Synthetic oligonucleotide
tttacgtcgataaacagcagcggcttaagt

SEQ ID NO: 224983 - DNA, 30 bp, Artificial Sequence
  Synthetic oligonucleotide
tacctagactgaactacgggtggcttaagt

SEQ ID NO: 224984 - DNA, 30 bp, Artificial Sequence
  Synthetic oligonucleotide
ataagagaaaccagctacgcgtgcttaagt

SEQ ID NO: 224985 - DNA, 30 bp, Artificial Sequence
  Synthetic oligonucleotide
ttggaggggttaaccccttggaaaaacagt

SEQ ID NO: 224986 - DNA, 30 bp, Artificial Sequence
  Synthetic oligonucleotide
atacactcattggaagggaataaaaacagt

SEQ ID NO: 224987 - DNA, 30 bp, Artificial Sequence
  Synthetic oligonucleotide
tccgactctactctctgcaaagcaaacagt

SEQ ID NO: 224988 - DNA, 30 bp, Artificial Sequence
  Synthetic oligonucleotide
tacaatagcccttccgccaaatgcaacagt

SEQ ID NO: 224989 - DNA, 30 bp, Artificial Sequence
  Synthetic oligonucleotide
acgcgttcaaaccattatcgacagaacagt

SEQ ID NO: 224990 - DNA, 31 bp, Artificial Sequence
  Synthetic oligonucleotide
ctctgtaggccccactactagtcctaacagt

SEQ ID NO: 224991 - DNA, 30 bp, Artificial Sequence
  Synthetic oligonucleotide
taagacaggctaactaaagaatctaacagt

SEQ ID NO: 224992 - DNA, 30 bp, Artificial Sequence
  Synthetic oligonucleotide
ggataaagtggtgttgttcaggttaacagt

SEQ ID NO: 224993 - DNA, 30 bp, Artificial Sequence
  Synthetic oligonucleotide
ttgcttagatcaaggtcgctataacacagt

SEQ ID NO: 224994 - DNA, 30 bp, Artificial Sequence
  Synthetic oligonucleotide
cctatggggtgacctcctgcatagcacagt

SEQ ID NO: 224995 - DNA, 30 bp, Artificial Sequence
  Synthetic oligonucleotide
gtatgctgctataccaagcaactgcacagt

SEQ ID NO: 224996 - DNA, 30 bp, Artificial Sequence
  Synthetic oligonucleotide
agtgttatgttatttgggtatagtcacagt

SEQ ID NO: 224997 - DNA, 30 bp, Artificial Sequence
  Synthetic oligonucleotide
caaaagtcatcgtctcttcagggtcacagt

SEQ ID NO: 224998 - DNA, 30 bp, Artificial Sequence
  Synthetic oligonucleotide
aaactcggaagtgtcatttagggagacagt

SEQ ID NO: 224999 - DNA, 30 bp, Artificial Sequence
  Synthetic oligonucleotide
cgtataaagtcgcttatctagaacgacagt

SEQ ID NO: 225000 - DNA, 30 bp, Artificial Sequence
  Synthetic oligonucleotide
cgcctgactcggatgtccttacacgacagt

SEQ ID NO: 225001 - DNA, 30 bp, Artificial Sequence
  Synthetic oligonucleotide
agggttcatcagtgcttttcctacgacagt

SEQ ID NO: 225002 - DNA, 30 bp, Artificial Sequence
  Synthetic oligonucleotide
ccacactacagtatacgtgaattcgacagt

SEQ ID NO: 225003 - DNA, 30 bp, Artificial Sequence
  Synthetic oligonucleotide
ggttggcacgtgctcaaactagaggacagt

SEQ ID NO: 225004 - DNA, 30 bp, Artificial Sequence
  Synthetic oligonucleotide
gggtggataagatcctatagcacggacagt

SEQ ID NO: 225005 - DNA, 30 bp, Artificial Sequence
  Synthetic oligonucleotide
tctactggagtagggctattttcggacagt

SEQ ID NO: 225006 - DNA, 30 bp, Artificial Sequence
  Synthetic oligonucleotide
ataaagcttgtacttacattatgggacagt

SEQ ID NO: 225007 - DNA, 30 bp, Artificial Sequence
  Synthetic oligonucleotide
aatgcgagttcacatgtgagttgtgacagt

SEQ ID NO: 225008 - DNA, 30 bp, Artificial Sequence
  Synthetic oligonucleotide
gcaacaagtatccagagcggcgttgacagt

SEQ ID NO: 225009 - DNA, 30 bp, Artificial Sequence
  Synthetic oligonucleotide
atcacataagtatctaaggtcggatacagt

SEQ ID NO: 225010 - DNA, 30 bp, Artificial Sequence
  Synthetic oligonucleotide
gaccagaccccacatgagtgaggctacagt

SEQ ID NO: 225011 - DNA, 30 bp, Artificial Sequence
  Synthetic oligonucleotide
ccatgtgatgtcgggcaagttggctacagt

SEQ ID NO: 225012 - DNA, 30 bp, Artificial Sequence
  Synthetic oligonucleotide
ttggtgaggtccacctcacctcagtacagt

SEQ ID NO: 225013 - DNA, 30 bp, Artificial Sequence
  Synthetic oligonucleotide
gagagggtgtggcgttcgtgtgggtacagt

SEQ ID NO: 225014 - DNA, 30 bp, Artificial Sequence
  Synthetic oligonucleotide
ccgaccaattctacatccagatggtacagt

SEQ ID NO: 225015 - DNA, 30 bp, Artificial Sequence
  Synthetic oligonucleotide
cgatgtatgctgatcttagtaatgtacagt

SEQ ID NO: 225016 - DNA, 30 bp, Artificial Sequence
  Synthetic oligonucleotide
ctggcctcgctgaagcctccagtaaccagt

SEQ ID NO: 225017 - DNA, 30 bp, Artificial Sequence
  Synthetic oligonucleotide
ctcattatgcagagaagccacgataccagt

SEQ ID NO: 225018 - DNA, 30 bp, Artificial Sequence
  Synthetic oligonucleotide
taaagatacgcctgcgatattcttcccagt

SEQ ID NO: 225019 - DNA, 30 bp, Artificial Sequence
  Synthetic oligonucleotide
tccttgtgatccagagtttgttttcccagt

SEQ ID NO: 225020 - DNA, 30 bp, Artificial Sequence
  Synthetic oligonucleotide
gggggatacaggtacaaaatgtaggccagt

SEQ ID NO: 225021 - DNA, 30 bp, Artificial Sequence
  Synthetic oligonucleotide
ggacgcataaccacatagtggggtgccagt

SEQ ID NO: 225022 - DNA, 30 bp, Artificial Sequence
  Synthetic oligonucleotide
acacctgatttatcgtacatatgtgccagt

SEQ ID NO: 225023 - DNA, 30 bp, Artificial Sequence
  Synthetic oligonucleotide
caactatgaataaaactattaaactccagt

SEQ ID NO: 225024 - DNA, 30 bp, Artificial Sequence
  Synthetic oligonucleotide
agttagtatcaagtcacgccacactccagt

SEQ ID NO: 225025 - DNA, 30 bp, Artificial Sequence
  Synthetic oligonucleotide
tcggaaatgtggttctccacactctccagt

SEQ ID NO: 225026 - DNA, 30 bp, Artificial Sequence
  Synthetic oligonucleotide
caggtgatttggtgcccagctttctccagt

SEQ ID NO: 225027 - DNA, 30 bp, Artificial Sequence
  Synthetic oligonucleotide
gccatgaacagatgatcagcggcgtccagt

SEQ ID NO: 225028 - DNA, 30 bp, Artificial Sequence
  Synthetic oligonucleotide
tctaacaaactaacgattgccggttccagt

SEQ ID NO: 225029 - DNA, 30 bp, Artificial Sequence
  Synthetic oligonucleotide
tggactgtgacatgttgcccgggcagcagt

SEQ ID NO: 225030 - DNA, 30 bp, Artificial Sequence
  Synthetic oligonucleotide
ctgcatctaataagtttcccgaggagcagt

SEQ ID NO: 225031 - DNA, 29 bp, Artificial Sequence
  Synthetic oligonucleotide
ccccaggcgtcatgggagaggttagcagt

SEQ ID NO: 225032 - DNA, 30 bp, Artificial Sequence
  Synthetic oligonucleotide
aggatggccgggctcatcaagggatgcagt

SEQ ID NO: 225033 - DNA, 30 bp, Artificial Sequence
  Synthetic oligonucleotide
taggttaaccctccctgctagatctgcagt

SEQ ID NO: 225034 - DNA, 30 bp, Artificial Sequence
  Synthetic oligonucleotide
cgtaatcatagagacacgccggtctgcagt

SEQ ID NO: 225035 - DNA, 30 bp, Artificial Sequence
  Synthetic oligonucleotide
gctgggatatgtacagttctatagtgcagt

SEQ ID NO: 225036 - DNA, 30 bp, Artificial Sequence
  Synthetic oligonucleotide
ccacgttcaccgaggtcaatggcgtgcagt

SEQ ID NO: 225037 - DNA, 30 bp, Artificial Sequence
  Synthetic oligonucleotide
aagccatccgcaggtcatcattattgcagt

SEQ ID NO: 225038 - DNA, 30 bp, Artificial Sequence
  Synthetic oligonucleotide
agaacgtcaagtttcaagtgttaaatcagt

SEQ ID NO: 225039 - DNA, 30 bp, Artificial Sequence
  Synthetic oligonucleotide
cttcgggaatatatgcttgcctggatcagt

SEQ ID NO: 225040 - DNA, 30 bp, Artificial Sequence
  Synthetic oligonucleotide
attaagcacaagcccgagaacttgatcagt

SEQ ID NO: 225041 - DNA, 30 bp, Artificial Sequence
  Synthetic oligonucleotide
ggtcacgcacaccaatcaaatcatatcagt

SEQ ID NO: 225042 - DNA, 30 bp, Artificial Sequence
  Synthetic oligonucleotide
ggccaaaaatgtatggaagctgtactcagt

SEQ ID NO: 225043 - DNA, 30 bp, Artificial Sequence
  Synthetic oligonucleotide
aaacctgtaggcacatgcgatatcctcagt

SEQ ID NO: 225044 - DNA, 30 bp, Artificial Sequence
  Synthetic oligonucleotide
taagtggatagcgctcggactaggctcagt

SEQ ID NO: 225045 - DNA, 30 bp, Artificial Sequence
  Synthetic oligonucleotide
gattagaccggcaagcggtacttgctcagt

SEQ ID NO: 225046 - DNA, 30 bp, Artificial Sequence
  Synthetic oligonucleotide
ttaggcacgagtgtctgcaaaagtctcagt

SEQ ID NO: 225047 - DNA, 30 bp, Artificial Sequence
  Synthetic oligonucleotide
cactgtgagaatggcatcacccaagtcagt

SEQ ID NO: 225048 - DNA, 30 bp, Artificial Sequence
  Synthetic oligonucleotide
ccaatcccggtttgtaatcaccaggtcagt

SEQ ID NO: 225049 - DNA, 30 bp, Artificial Sequence
  Synthetic oligonucleotide
cgtgtatgtgatgtatcggcgtaattcagt

SEQ ID NO: 225050 - DNA, 30 bp, Artificial Sequence
  Synthetic oligonucleotide
tcggatatcttagtgattgttgagttcagt

SEQ ID NO: 225051 - DNA, 30 bp, Artificial Sequence
  Synthetic oligonucleotide
aaagcggtagccataggtacagctttcagt

SEQ ID NO: 225052 - DNA, 30 bp, Artificial Sequence
  Synthetic oligonucleotide
tggtgttgtggcttacttggtattttcagt

SEQ ID NO: 225053 - DNA, 30 bp, Artificial Sequence
  Synthetic oligonucleotide
ggtgcattctagccgcaacgccgcaagagt

SEQ ID NO: 225054 - DNA, 30 bp, Artificial Sequence
  Synthetic oligonucleotide
atcctgggttgcctgatcatccataagagt

SEQ ID NO: 225055 - DNA, 30 bp, Artificial Sequence
  Synthetic oligonucleotide
ccgtgtggggttcgggcttggtctaagagt

SEQ ID NO: 225056 - DNA, 30 bp, Artificial Sequence
  Synthetic oligonucleotide
gtacgtgctcattttgtggcttcgcagagt

SEQ ID NO: 225057 - DNA, 30 bp, Artificial Sequence
  Synthetic oligonucleotide
caagttctgaaaagtgatggtcatcagagt

SEQ ID NO: 225058 - DNA, 30 bp, Artificial Sequence
  Synthetic oligonucleotide
atattcagttttggaaatctcgaagagagt

SEQ ID NO: 225059 - DNA, 30 bp, Artificial Sequence
  Synthetic oligonucleotide
aagagaacctggctggccctggctgagagt

SEQ ID NO: 225060 - DNA, 30 bp, Artificial Sequence
  Synthetic oligonucleotide
caacctttgagcatacaattggtatagagt

SEQ ID NO: 225061 - DNA, 30 bp, Artificial Sequence
  Synthetic oligonucleotide
tacaccagatcatagtagacatattagagt

SEQ ID NO: 225062 - DNA, 30 bp, Artificial Sequence
  Synthetic oligonucleotide
ttactcaggcttgggtctctatcttagagt

SEQ ID NO: 225063 - DNA, 30 bp, Artificial Sequence
  Synthetic oligonucleotide
tcaaatatagaatgattcatagcaacgagt

SEQ ID NO: 225064 - DNA, 30 bp, Artificial Sequence
  Synthetic oligonucleotide
ccatactgtgtggcaacattaacgacgagt

SEQ ID NO: 225065 - DNA, 30 bp, Artificial Sequence
  Synthetic oligonucleotide
ggctatgtgccgaccggtgtccatacgagt

SEQ ID NO: 225066 - DNA, 30 bp, Artificial Sequence
  Synthetic oligonucleotide
cggctgtagttgttaaggcaaactacgagt

SEQ ID NO: 225067 - DNA, 30 bp, Artificial Sequence
  Synthetic oligonucleotide
agaatcgctaagtagggagttataccgagt

SEQ ID NO: 225068 - DNA, 30 bp, Artificial Sequence
  Synthetic oligonucleotide
taggtatacgggtcaatgcaactaccgagt

SEQ ID NO: 225069 - DNA, 30 bp, Artificial Sequence
  Synthetic oligonucleotide
aaccgtggctgaggatggttttccccgagt

SEQ ID NO: 225070 - DNA, 30 bp, Artificial Sequence
  Synthetic oligonucleotide
ccagatgtctatgtgagcgctcggccgagt

SEQ ID NO: 225071 - DNA, 30 bp, Artificial Sequence
  Synthetic oligonucleotide
gatatctcatgagcactgatctcagcgagt

SEQ ID NO: 225072 - DNA, 30 bp, Artificial Sequence
  Synthetic oligonucleotide
gcgcgttatatctgtttgtcaatagcgagt

SEQ ID NO: 225073 - DNA, 30 bp, Artificial Sequence
  Synthetic oligonucleotide
ggcagtgggaggattcatttaatcgcgagt

SEQ ID NO: 225074 - DNA, 30 bp, Artificial Sequence
  Synthetic oligonucleotide
gttaggtcgttgggtcgatatttcgcgagt

SEQ ID NO: 225075 - DNA, 30 bp, Artificial Sequence
  Synthetic oligonucleotide
atgacgtgactagtgtcttaaaaggcgagt

SEQ ID NO: 225076 - DNA, 30 bp, Artificial Sequence
  Synthetic oligonucleotide
cggtaagtccatgagccgcggtcatcgagt

SEQ ID NO: 225077 - DNA, 30 bp, Artificial Sequence
  Synthetic oligonucleotide
tgctcggaagtatatatgaggagttcgagt

SEQ ID NO: 225078 - DNA, 30 bp, Artificial Sequence
  Synthetic oligonucleotide
aaggggttaatgctccacagacgaaggagt

SEQ ID NO: 225079 - DNA, 30 bp, Artificial Sequence
  Synthetic oligonucleotide
aataaaagataagcactttgctgaaggagt

SEQ ID NO: 225080 - DNA, 30 bp, Artificial Sequence
  Synthetic oligonucleotide
aatcatttaggaataagactttacaggagt

SEQ ID NO: 225081 - DNA, 30 bp, Artificial Sequence
  Synthetic oligonucleotide
agggtacgtgttgtgacggaaaagaggagt

SEQ ID NO: 225082 - DNA, 30 bp, Artificial Sequence
  Synthetic oligonucleotide
tgagtgtgcgttgtctcagtctagaggagt

SEQ ID NO: 225083 - DNA, 30 bp, Artificial Sequence
  Synthetic oligonucleotide
ggaatcactcgcgcatcgaggcataggagt

SEQ ID NO: 225084 - DNA, 30 bp, Artificial Sequence
  Synthetic oligonucleotide
tcgcgcccacgattacaccggcttaggagt

SEQ ID NO: 225085 - DNA, 30 bp, Artificial Sequence
  Synthetic oligonucleotide
cgcgtccccgggggtacgagcaaacggagt

SEQ ID NO: 225086 - DNA, 30 bp, Artificial Sequence
  Synthetic oligonucleotide
aatctctgcgaaaggaaatcgtcgcggagt

SEQ ID NO: 225087 - DNA, 30 bp, Artificial Sequence
  Synthetic oligonucleotide
atgctagacacaggtgtcggtaggcggagt

SEQ ID NO: 225088 - DNA, 30 bp, Artificial Sequence
  Synthetic oligonucleotide
gagaacgaatagctttaaacacggcggagt

SEQ ID NO: 225089 - DNA, 30 bp, Artificial Sequence
  Synthetic oligonucleotide
taatatgacaagttcccacgatggcggagt

SEQ ID NO: 225090 - DNA, 30 bp, Artificial Sequence
  Synthetic oligonucleotide
acctgtcccctatattgggcatacgggagt

SEQ ID NO: 225091 - DNA, 30 bp, Artificial Sequence
  Synthetic oligonucleotide
gccgcttagagtgcacatagcgtcgggagt

SEQ ID NO: 225092 - DNA, 30 bp, Artificial Sequence
  Synthetic oligonucleotide
cgcgcggttcctctgacagacgtggggagt

SEQ ID NO: 225093 - DNA, 30 bp, Artificial Sequence
  Synthetic oligonucleotide
taacctccaatatcttgtactgtgtggagt

SEQ ID NO: 225094 - DNA, 30 bp, Artificial Sequence
  Synthetic oligonucleotide
ctgcgtccactagtagtcaagcgaatgagt

SEQ ID NO: 225095 - DNA, 30 bp, Artificial Sequence
  Synthetic oligonucleotide
gttgggagattaagttaaccaattatgagt

SEQ ID NO: 225096 - DNA, 30 bp, Artificial Sequence
  Synthetic oligonucleotide
gcgtgtaatgtacgcccgtcaccgctgagt

SEQ ID NO: 225097 - DNA, 30 bp, Artificial Sequence
  Synthetic oligonucleotide
tcgtctgtgtaggaaaactgcattgtgagt

SEQ ID NO: 225098 - DNA, 30 bp, Artificial Sequence
  Synthetic oligonucleotide
ctcgttatttgagtggcatgatcattgagt

SEQ ID NO: 225099 - DNA, 30 bp, Artificial Sequence
  Synthetic oligonucleotide
cgtctctattatcgaaacgctcgcttgagt

SEQ ID NO: 225100 - DNA, 30 bp, Artificial Sequence
  Synthetic oligonucleotide
tgagtatctcatgttgaccaagtgttgagt

SEQ ID NO: 225101 - DNA, 30 bp, Artificial Sequence
  Synthetic oligonucleotide
tcaacggaatgcgtaactttcgctttgagt

SEQ ID NO: 225102 - DNA, 30 bp, Artificial Sequence
  Synthetic oligonucleotide
gcagcttgacgagggcttaggcacaatagt

SEQ ID NO: 225103 - DNA, 30 bp, Artificial Sequence
  Synthetic oligonucleotide
cttcggaacaccgagtctagtcacaatagt

SEQ ID NO: 225104 - DNA, 30 bp, Artificial Sequence
  Synthetic oligonucleotide
aaccgaaggaactcctccgataagaatagt

SEQ ID NO: 225105 - DNA, 30 bp, Artificial Sequence
  Synthetic oligonucleotide
aggagcacggcacttctgctgctgaatagt

SEQ ID NO: 225106 - DNA, 30 bp, Artificial Sequence
  Synthetic oligonucleotide
gagtgcgaatataagggggaggataatagt

SEQ ID NO: 225107 - DNA, 30 bp, Artificial Sequence
  Synthetic oligonucleotide
gacactagatagaacgggccactacatagt

SEQ ID NO: 225108 - DNA, 30 bp, Artificial Sequence
  Synthetic oligonucleotide
gatggcaggatcgaagtgttatgtcatagt

SEQ ID NO: 225109 - DNA, 30 bp, Artificial Sequence
  Synthetic oligonucleotide
agaaggactgcataagagtctaccgatagt

SEQ ID NO: 225110 - DNA, 30 bp, Artificial Sequence
  Synthetic oligonucleotide
gggtatgttgtgtttagccagcccgatagt

SEQ ID NO: 225111 - DNA, 30 bp, Artificial Sequence
  Synthetic oligonucleotide
cacatgtagcatcttgaactatccgatagt

SEQ ID NO: 225112 - DNA, 30 bp, Artificial Sequence
  Synthetic oligonucleotide
gggtttctaagatgaacgactttcgatagt

SEQ ID NO: 225113 - DNA, 30 bp, Artificial Sequence
  Synthetic oligonucleotide
ttcctgaagtaggtaaatagtaaatatagt

SEQ ID NO: 225114 - DNA, 32 bp, Artificial Sequence
  Synthetic oligonucleotide
cttagactagctcgttgctataaacctatagt

SEQ ID NO: 225115 - DNA, 31 bp, Artificial Sequence
  Synthetic oligonucleotide
aaaaaaaggagcgtgaagctggtagtatagt

SEQ ID NO: 225116 - DNA, 30 bp, Artificial Sequence
  Synthetic oligonucleotide
cgccctgacttggcaggccagccgtatagt

SEQ ID NO: 225117 - DNA, 30 bp, Artificial Sequence
  Synthetic oligonucleotide
tcaatatgtaacacatctccgttgtatagt

SEQ ID NO: 225118 - DNA, 30 bp, Artificial Sequence
  Synthetic oligonucleotide
taggcggcctatttagatatagcttatagt

SEQ ID NO: 225119 - DNA, 30 bp, Artificial Sequence
  Synthetic oligonucleotide
actatcatcaactcaccaaccggttatagt

SEQ ID NO: 225120 - DNA, 30 bp, Artificial Sequence
  Synthetic oligonucleotide
agctgctttcatcctacccaatgttatagt

SEQ ID NO: 225121 - DNA, 30 bp, Artificial Sequence
  Synthetic oligonucleotide
cgttgtccgcggcaaaccttacgaactagt

SEQ ID NO: 225122 - DNA, 30 bp, Artificial Sequence
  Synthetic oligonucleotide
atctcgatgaaccacgaacaaatgactagt

SEQ ID NO: 225123 - DNA, 30 bp, Artificial Sequence
  Synthetic oligonucleotide
gtttaataccaactgttaagcgcacctagt

SEQ ID NO: 225124 - DNA, 30 bp, Artificial Sequence
  Synthetic oligonucleotide
caaggtcggcaatccggtcccacgcctagt

SEQ ID NO: 225125 - DNA, 30 bp, Artificial Sequence
  Synthetic oligonucleotide
gaacgttgtttatgtgggcacgctcctagt

SEQ ID NO: 225126 - DNA, 30 bp, Artificial Sequence
  Synthetic oligonucleotide
agtggggaagtagcctagagctcagctagt

SEQ ID NO: 225127 - DNA, 30 bp, Artificial Sequence
  Synthetic oligonucleotide
tgagcgagttgttgaagtactgccgctagt

SEQ ID NO: 225128 - DNA, 30 bp, Artificial Sequence
  Synthetic oligonucleotide
ggtggataagataagcccattggcgctagt

SEQ ID NO: 225129 - DNA, 30 bp, Artificial Sequence
  Synthetic oligonucleotide
agcgacctaagtgtcatctgcttcgctagt

SEQ ID NO: 225130 - DNA, 30 bp, Artificial Sequence
  Synthetic oligonucleotide
ggtgggagaactagtgaatcctgggctagt

SEQ ID NO: 225131 - DNA, 30 bp, Artificial Sequence
  Synthetic oligonucleotide
gcaaggccagactgcggctatatggctagt

SEQ ID NO: 225132 - DNA, 30 bp, Artificial Sequence
  Synthetic oligonucleotide
tgaacctgtgtgaaaggctatgaatctagt

SEQ ID NO: 225133 - DNA, 30 bp, Artificial Sequence
  Synthetic oligonucleotide
tggggactgtacatggtgttcggatctagt

SEQ ID NO: 225134 - DNA, 30 bp, Artificial Sequence
  Synthetic oligonucleotide
caaccgcgacacatcacgtcatcgtctagt

SEQ ID NO: 225135 - DNA, 30 bp, Artificial Sequence
  Synthetic oligonucleotide
taacaccactagctcgcacgacggtctagt

SEQ ID NO: 225136 - DNA, 30 bp, Artificial Sequence
  Synthetic oligonucleotide
ttcggagacagttggctgatctcttctagt

SEQ ID NO: 225137 - DNA, 30 bp, Artificial Sequence
  Synthetic oligonucleotide
gactaattggataactggtagagaagtagt

SEQ ID NO: 225138 - DNA, 30 bp, Artificial Sequence
  Synthetic oligonucleotide
ccaagccctcgaaaacatcgcagcagtagt

SEQ ID NO: 225139 - DNA, 30 bp, Artificial Sequence
  Synthetic oligonucleotide
ttatgtgtcaccacacttcaatcgagtagt

SEQ ID NO: 225140 - DNA, 30 bp, Artificial Sequence
  Synthetic oligonucleotide
caactggggtactcgactatgagacgtagt

SEQ ID NO: 225141 - DNA, 30 bp, Artificial Sequence
  Synthetic oligonucleotide
ccaccattagtacggctacatagacgtagt

SEQ ID NO: 225142 - DNA, 30 bp, Artificial Sequence
  Synthetic oligonucleotide
caaattcgtttcgaggatacatctcgtagt

SEQ ID NO: 225143 - DNA, 30 bp, Artificial Sequence
  Synthetic oligonucleotide
agccctataggttcgcactgggccggtagt

SEQ ID NO: 225144 - DNA, 30 bp, Artificial Sequence
  Synthetic oligonucleotide
atgttttacctaagggtaaaatcgggtagt

SEQ ID NO: 225145 - DNA, 30 bp, Artificial Sequence
  Synthetic oligonucleotide
cctcaaccccagttgaccgcagggggtagt

SEQ ID NO: 225146 - DNA, 30 bp, Artificial Sequence
  Synthetic oligonucleotide
atagttaggcttctaacctgaagtggtagt

SEQ ID NO: 225147 - DNA, 30 bp, Artificial Sequence
  Synthetic oligonucleotide
gcttgcgcagaacgtgggtcccgtggtagt

SEQ ID NO: 225148 - DNA, 30 bp, Artificial Sequence
  Synthetic oligonucleotide
gaaacacaaggagtggcggaccaatgtagt

SEQ ID NO: 225149 - DNA, 30 bp, Artificial Sequence
  Synthetic oligonucleotide
gaccttcgagctatgtgaccgggatgtagt

SEQ ID NO: 225150 - DNA, 30 bp, Artificial Sequence
  Synthetic oligonucleotide
gttctgggagactgggttcaagagtgtagt

SEQ ID NO: 225151 - DNA, 30 bp, Artificial Sequence
  Synthetic oligonucleotide
gctcggctaccgcgaaaggtagaaattagt

SEQ ID NO: 225152 - DNA, 30 bp, Artificial Sequence
  Synthetic oligonucleotide
gcaatgttacctctaaaccaataaattagt

SEQ ID NO: 225153 - DNA, 30 bp, Artificial Sequence
  Synthetic oligonucleotide
aggaagttgtaccttcgggtaacgattagt

SEQ ID NO: 225154 - DNA, 30 bp, Artificial Sequence
  Synthetic oligonucleotide
ttctataagggaacgtcaagcaaacttagt

SEQ ID NO: 225155 - DNA, 30 bp, Artificial Sequence
  Synthetic oligonucleotide
caaggtcggcttgtaatacgacaacttagt

SEQ ID NO: 225156 - DNA, 30 bp, Artificial Sequence
  Synthetic oligonucleotide
atacgacttagcgatgatgtcggacttagt

SEQ ID NO: 225157 - DNA, 30 bp, Artificial Sequence
  Synthetic oligonucleotide
ggacatagtatcagacgacaacagcttagt

SEQ ID NO: 225158 - DNA, 30 bp, Artificial Sequence
  Synthetic oligonucleotide
tcctatagctcctagccacccagtcttagt

SEQ ID NO: 225159 - DNA, 30 bp, Artificial Sequence
  Synthetic oligonucleotide
tgaggcatatgcagagctcactgtcttagt

SEQ ID NO: 225160 - DNA, 30 bp, Artificial Sequence
  Synthetic oligonucleotide
cccgagtaaggtatagggagtaaagttagt

SEQ ID NO: 225161 - DNA, 30 bp, Artificial Sequence
  Synthetic oligonucleotide
tgcccggaagaatatcaggagtcagttagt

SEQ ID NO: 225162 - DNA, 30 bp, Artificial Sequence
  Synthetic oligonucleotide
ataagacagtagttgagtcacatcgttagt

SEQ ID NO: 225163 - DNA, 30 bp, Artificial Sequence
  Synthetic oligonucleotide
gggcaatttcgtccggattctcaggttagt

SEQ ID NO: 225164 - DNA, 30 bp, Artificial Sequence
  Synthetic oligonucleotide
gtaacgtagctacggcactggcctgttagt

SEQ ID NO: 225165 - DNA, 30 bp, Artificial Sequence
  Synthetic oligonucleotide
cttagcgggagtgatagtctacaatttagt

SEQ ID NO: 225166 - DNA, 30 bp, Artificial Sequence
  Synthetic oligonucleotide
gtggcatgacgtatcatgaggacttttagt

SEQ ID NO: 225167 - DNA, 30 bp, Artificial Sequence
  Synthetic oligonucleotide
ctcgatagaaatgacatagtggtttttagt

SEQ ID NO: 225168 - DNA, 30 bp, Artificial Sequence
  Synthetic oligonucleotide
ccattatatggagacgaagtagacaaacgt

SEQ ID NO: 225169 - DNA, 30 bp, Artificial Sequence
  Synthetic oligonucleotide
agtcttccaacttgaacggccaagaaacgt

SEQ ID NO: 225170 - DNA, 30 bp, Artificial Sequence
  Synthetic oligonucleotide
gatcaacatcctcttgccagctggaaacgt

SEQ ID NO: 225171 - DNA, 30 bp, Artificial Sequence
  Synthetic oligonucleotide
tccttaaagcgtagagacatgcgtaaacgt

SEQ ID NO: 225172 - DNA, 30 bp, Artificial Sequence
  Synthetic oligonucleotide
aagaggcggactatctaacgctcacaacgt

SEQ ID NO: 225173 - DNA, 30 bp, Artificial Sequence
  Synthetic oligonucleotide
aaagaaagtactcactgcggcagacaacgt

SEQ ID NO: 225174 - DNA, 30 bp, Artificial Sequence
  Synthetic oligonucleotide
cgtttatgccgaggcattccaagccaacgt

SEQ ID NO: 225175 - DNA, 30 bp, Artificial Sequence
  Synthetic oligonucleotide
gggaattatggaaaacacgcctggcaacgt

SEQ ID NO: 225176 - DNA, 30 bp, Artificial Sequence
  Synthetic oligonucleotide
ggcttagcaccacaacggtgcgtcgaacgt

SEQ ID NO: 225177 - DNA, 30 bp, Artificial Sequence
  Synthetic oligonucleotide
aactaaaatagagcgattagataggaacgt

SEQ ID NO: 225178 - DNA, 30 bp, Artificial Sequence
  Synthetic oligonucleotide
gctagtaggataaggcacgtccgggaacgt

SEQ ID NO: 225179 - DNA, 30 bp, Artificial Sequence
  Synthetic oligonucleotide
aatagggccggagagcatcagtatgaacgt

SEQ ID NO: 225180 - DNA, 30 bp, Artificial Sequence
  Synthetic oligonucleotide
ttatacgacatcgatataagatttgaacgt

SEQ ID NO: 225181 - DNA, 30 bp, Artificial Sequence
  Synthetic oligonucleotide
atctggatcacggcaagtacaccataacgt

SEQ ID NO: 225182 - DNA, 31 bp, Artificial Sequence
  Synthetic oligonucleotide
ggtgacgggcacgcaaacccgctcataacgt

SEQ ID NO: 225183 - DNA, 30 bp, Artificial Sequence
  Synthetic oligonucleotide
gaggatagcggtgaccaattccactaacgt

SEQ ID NO: 225184 - DNA, 30 bp, Artificial Sequence
  Synthetic oligonucleotide
acccttccaaatagttttcgtacctaacgt

SEQ ID NO: 225185 - DNA, 30 bp, Artificial Sequence
  Synthetic oligonucleotide
tggtcatagaggtcttgtgtgctttaacgt

SEQ ID NO: 225186 - DNA, 30 bp, Artificial Sequence
  Synthetic oligonucleotide
acacacctctcaaagagagacaaaacacgt

SEQ ID NO: 225187 - DNA, 30 bp, Artificial Sequence
  Synthetic oligonucleotide
atcgagatatcttctgcgaaattaacacgt

SEQ ID NO: 225188 - DNA, 30 bp, Artificial Sequence
  Synthetic oligonucleotide
cgtgccggagggtgttcgagcggcacacgt

SEQ ID NO: 225189 - DNA, 30 bp, Artificial Sequence
  Synthetic oligonucleotide
aagtggaagcgactttctatgtgcacacgt

SEQ ID NO: 225190 - DNA, 30 bp, Artificial Sequence
  Synthetic oligonucleotide
aagaattcgtatagcactataactacacgt

SEQ ID NO: 225191 - DNA, 30 bp, Artificial Sequence
  Synthetic oligonucleotide
ctcgtattacgagaaggaccacgtacacgt

SEQ ID NO: 225192 - DNA, 30 bp, Artificial Sequence
  Synthetic oligonucleotide
gaggtccaaggagcatataacacaccacgt

SEQ ID NO: 225193 - DNA, 30 bp, Artificial Sequence
  Synthetic oligonucleotide
acactttggccgttagttctttgaccacgt

SEQ ID NO: 225194 - DNA, 30 bp, Artificial Sequence
  Synthetic oligonucleotide
ctatcaggacggatgttgtgaggcgcacgt

SEQ ID NO: 225195 - DNA, 30 bp, Artificial Sequence
  Synthetic oligonucleotide
tatacgaggatacgcattgttcaggcacgt

SEQ ID NO: 225196 - DNA, 30 bp, Artificial Sequence
  Synthetic oligonucleotide
gactatttagacaaggggcgtgtatcacgt

SEQ ID NO: 225197 - DNA, 30 bp, Artificial Sequence
  Synthetic oligonucleotide
aagctgcaaaatttgtcgtacgactcacgt

SEQ ID NO: 225198 - DNA, 30 bp, Artificial Sequence
  Synthetic oligonucleotide
cagaagtcaggtcgattaacaaagtcacgt

SEQ ID NO: 225199 - DNA, 30 bp, Artificial Sequence
  Synthetic oligonucleotide
acaaggtgaagccctgaatagaggtcacgt

SEQ ID NO: 225200 - DNA, 30 bp, Artificial Sequence
  Synthetic oligonucleotide
tgctaagcacatggcgtagaacattcacgt

SEQ ID NO: 225201 - DNA, 30 bp, Artificial Sequence
  Synthetic oligonucleotide
gtctggttgacacctctttagataagacgt

SEQ ID NO: 225202 - DNA, 30 bp, Artificial Sequence
  Synthetic oligonucleotide
gcttgaatccagaatgggcattggagacgt

SEQ ID NO: 225203 - DNA, 30 bp, Artificial Sequence
  Synthetic oligonucleotide
agcaaagaatcaagataaaccactagacgt

SEQ ID NO: 225204 - DNA, 30 bp, Artificial Sequence
  Synthetic oligonucleotide
aaacgcgtaggccttattttaaaccgacgt

SEQ ID NO: 225205 - DNA, 30 bp, Artificial Sequence
  Synthetic oligonucleotide
catcgtggcactagattatcataccgacgt

SEQ ID NO: 225206 - DNA, 30 bp, Artificial Sequence
  Synthetic oligonucleotide
gaagtccgttaagaagcatgtggccgacgt

SEQ ID NO: 225207 - DNA, 30 bp, Artificial Sequence
  Synthetic oligonucleotide
cggtaaggagggtcaccgacgtcgcgacgt

SEQ ID NO: 225208 - DNA, 30 bp, Artificial Sequence
  Synthetic oligonucleotide
cgggctcaactctcaagggacgggcgacgt

SEQ ID NO: 225209 - DNA, 29 bp, Artificial Sequence
  Synthetic oligonucleotide
gaagtactcagggtagggctttgcgacgt

SEQ ID NO: 225210 - DNA, 30 bp, Artificial Sequence
  Synthetic oligonucleotide
tcacatcatttgctaaactcgggtcgacgt

SEQ ID NO: 225211 - DNA, 30 bp, Artificial Sequence
  Synthetic oligonucleotide
aagccggctaggtcacaggcttcaggacgt

SEQ ID NO: 225212 - DNA, 30 bp, Artificial Sequence
  Synthetic oligonucleotide
tgagtggggtttaaaacgcaacacggacgt

SEQ ID NO: 225213 - DNA, 30 bp, Artificial Sequence
  Synthetic oligonucleotide
tcgcgcaggcaactaattgttaatggacgt

SEQ ID NO: 225214 - DNA, 30 bp, Artificial Sequence
  Synthetic oligonucleotide
gagggcctagggactttgctgcatggacgt

SEQ ID NO: 225215 - DNA, 30 bp, Artificial Sequence
  Synthetic oligonucleotide
accaatcaacgtggtgtgtcgaaatgacgt

SEQ ID NO: 225216 - DNA, 30 bp, Artificial Sequence
  Synthetic oligonucleotide
acttcataataccgcgaaggacagtgacgt

SEQ ID NO: 225217 - DNA, 30 bp, Artificial Sequence
  Synthetic oligonucleotide
ggaaagccaggccagattcgcagttgacgt

SEQ ID NO: 225218 - DNA, 30 bp, Artificial Sequence
  Synthetic oligonucleotide
ataggacgtgggcgtggcttacgaatacgt

SEQ ID NO: 225219 - DNA, 30 bp, Artificial Sequence
  Synthetic oligonucleotide
cttgtacaatatgagatggtagacatacgt

SEQ ID NO: 225220 - DNA, 30 bp, Artificial Sequence
  Synthetic oligonucleotide
ccgggtggtgggggcacgatactcatacgt

SEQ ID NO: 225221 - DNA, 30 bp, Artificial Sequence
  Synthetic oligonucleotide
aaatctgtggggggaacagagacgatacgt

SEQ ID NO: 225222 - DNA, 30 bp, Artificial Sequence
  Synthetic oligonucleotide
catttgcggctaccgtcttgagggatacgt

SEQ ID NO: 225223 - DNA, 28 bp, Artificial Sequence
  Synthetic oligonucleotide
cggaaaggtattggcgtcgctgatacgt

SEQ ID NO: 225224 - DNA, 30 bp, Artificial Sequence
  Synthetic oligonucleotide
atctgagcggcggccaagtagtatatacgt

SEQ ID NO: 225225 - DNA, 30 bp, Artificial Sequence
  Synthetic oligonucleotide
cgtggccttagagatatatatactatacgt

SEQ ID NO: 225226 - DNA, 30 bp, Artificial Sequence
  Synthetic oligonucleotide
gaaccaaaattacccttgtcggaactacgt

SEQ ID NO: 225227 - DNA, 30 bp, Artificial Sequence
  Synthetic oligonucleotide
aatcttgtactaaacaccgcagtactacgt

SEQ ID NO: 225228 - DNA, 30 bp, Artificial Sequence
  Synthetic oligonucleotide
tttgggattgaaagagactacaagctacgt

SEQ ID NO: 225229 - DNA, 30 bp, Artificial Sequence
  Synthetic oligonucleotide
tggggttgacgcggagccaatcaagtacgt

SEQ ID NO: 225230 - DNA, 30 bp, Artificial Sequence
  Synthetic oligonucleotide
tggtaacaagtagtcgggggtcccgtacgt

SEQ ID NO: 225231 - DNA, 30 bp, Artificial Sequence
  Synthetic oligonucleotide
tccggagcatcagttattgtttgcgtacgt

SEQ ID NO: 225232 - DNA, 30 bp, Artificial Sequence
  Synthetic oligonucleotide
acagtccagaagcgtacatttatcttacgt

SEQ ID NO: 225233 - DNA, 30 bp, Artificial Sequence
  Synthetic oligonucleotide
caggcctacagtcacacggaggtgttacgt

SEQ ID NO: 225234 - DNA, 30 bp, Artificial Sequence
  Synthetic oligonucleotide
ttaggtgattcaataccttgttctttacgt

SEQ ID NO: 225235 - DNA, 30 bp, Artificial Sequence
  Synthetic oligonucleotide
gaacgtactatagggcaaaatggaaaccgt

SEQ ID NO: 225236 - DNA, 30 bp, Artificial Sequence
  Synthetic oligonucleotide
taagacgggcgacagtcgttagacaaccgt

SEQ ID NO: 225237 - DNA, 30 bp, Artificial Sequence
  Synthetic oligonucleotide
agtgtgggcttttgacaaagaagtaaccgt

SEQ ID NO: 225238 - DNA, 30 bp, Artificial Sequence
  Synthetic oligonucleotide
ttcaatgtggtaggagaaacacttaaccgt

SEQ ID NO: 225239 - DNA, 30 bp, Artificial Sequence
  Synthetic oligonucleotide
ggtctacctggctgaatataacgacaccgt

SEQ ID NO: 225240 - DNA, 30 bp, Artificial Sequence
  Synthetic oligonucleotide
ccgggcagtcaatacgggctcacccaccgt

SEQ ID NO: 225241 - DNA, 30 bp, Artificial Sequence
  Synthetic oligonucleotide
gcacgtacagtattccagcatcgccaccgt

SEQ ID NO: 225242 - DNA, 30 bp, Artificial Sequence
  Synthetic oligonucleotide
tatcgcgccgtcgctatacctgaagaccgt

SEQ ID NO: 225243 - DNA, 30 bp, Artificial Sequence
  Synthetic oligonucleotide
ggagtaagtggattgacgcaaacagaccgt

SEQ ID NO: 225244 - DNA, 30 bp, Artificial Sequence
  Synthetic oligonucleotide
gagggagcctataattatccctacgaccgt

SEQ ID NO: 225245 - DNA, 30 bp, Artificial Sequence
  Synthetic oligonucleotide
ataactgcagctgccaggctgagcgaccgt

SEQ ID NO: 225246 - DNA, 30 bp, Artificial Sequence
  Synthetic oligonucleotide
tcccggggcccaacggggttcatcgaccgt

SEQ ID NO: 225247 - DNA, 30 bp, Artificial Sequence
  Synthetic oligonucleotide
gtgattccactgcgtgctcgtgaataccgt

SEQ ID NO: 225248 - DNA, 30 bp, Artificial Sequence
  Synthetic oligonucleotide
tactcgcgtcgatcaaagcaggtctaccgt

SEQ ID NO: 225249 - DNA, 30 bp, Artificial Sequence
  Synthetic oligonucleotide
gaacacggaccgttatagactctgtaccgt

SEQ ID NO: 225250 - DNA, 30 bp, Artificial Sequence
  Synthetic oligonucleotide
gcattgaactcaacatcctttgtgtaccgt

SEQ ID NO: 225251 - DNA, 30 bp, Artificial Sequence
  Synthetic oligonucleotide
ggagcgtacgcgtcaatttgattgtaccgt

SEQ ID NO: 225252 - DNA, 30 bp, Artificial Sequence
  Synthetic oligonucleotide
tgacatgacatgaacgcacggaattaccgt

SEQ ID NO: 225253 - DNA, 30 bp, Artificial Sequence
  Synthetic oligonucleotide
ttggcggacgtgatttacagtcggccccgt

SEQ ID NO: 225254 - DNA, 30 bp, Artificial Sequence
  Synthetic oligonucleotide
tcgacaaatatgcggcttcctacagcccgt

SEQ ID NO: 225255 - DNA, 30 bp, Artificial Sequence
  Synthetic oligonucleotide
cctaggaacccaactggttgatacgcccgt

SEQ ID NO: 225256 - DNA, 30 bp, Artificial Sequence
  Synthetic oligonucleotide
cgttcttagcataaatatatgacacgccgt

SEQ ID NO: 225257 - DNA, 30 bp, Artificial Sequence
  Synthetic oligonucleotide
gttagtaatgtcagaagctgggcacgccgt

SEQ ID NO: 225258 - DNA, 30 bp, Artificial Sequence
  Synthetic oligonucleotide
acacatggaatcaatcgcatagatcgccgt

SEQ ID NO: 225259 - DNA, 30 bp, Artificial Sequence
  Synthetic oligonucleotide
cagcgggacgaatgaagttcttgtcgccgt

SEQ ID NO: 225260 - DNA, 30 bp, Artificial Sequence
  Synthetic oligonucleotide
aggtactagtacgctggtgctgccggccgt

SEQ ID NO: 225261 - DNA, 30 bp, Artificial Sequence
  Synthetic oligonucleotide
gatagttgtagaaagttttatgagggccgt

SEQ ID NO: 225262 - DNA, 30 bp, Artificial Sequence
  Synthetic oligonucleotide
gtcaacagggtagaagtcggtcggggccgt

SEQ ID NO: 225263 - DNA, 30 bp, Artificial Sequence
  Synthetic oligonucleotide
ttaaagtgagagtgtacaacaaatggccgt

SEQ ID NO: 225264 - DNA, 30 bp, Artificial Sequence
  Synthetic oligonucleotide
atgtcggcaagtaatacgtgctatggccgt

SEQ ID NO: 225265 - DNA, 30 bp, Artificial Sequence
  Synthetic oligonucleotide
acaggacactttcgcacttaatcttgccgt

SEQ ID NO: 225266 - DNA, 30 bp, Artificial Sequence
  Synthetic oligonucleotide
atggtactgaatgccgagacataaatccgt

SEQ ID NO: 225267 - DNA, 30 bp, Artificial Sequence
  Synthetic oligonucleotide
cattcgacggtcggtccgggttcaatccgt

SEQ ID NO: 225268 - DNA, 30 bp, Artificial Sequence
  Synthetic oligonucleotide
acgacaattagtattgggtttggaatccgt

SEQ ID NO: 225269 - DNA, 30 bp, Artificial Sequence
  Synthetic oligonucleotide
cactggctcccacgttgtgttgtaatccgt

SEQ ID NO: 225270 - DNA, 30 bp, Artificial Sequence
  Synthetic oligonucleotide
ccattgatcgtcacgacaccattcatccgt

SEQ ID NO: 225271 - DNA, 30 bp, Artificial Sequence
  Synthetic oligonucleotide
ttcccacaatgtttcttttgctgtatccgt

SEQ ID NO: 225272 - DNA, 30 bp, Artificial Sequence
  Synthetic oligonucleotide
ttacgaagtgggtgccatacagacctccgt

SEQ ID NO: 225273 - DNA, 30 bp, Artificial Sequence
  Synthetic oligonucleotide
caggctgaaaatcttagataattcctccgt

SEQ ID NO: 225274 - DNA, 30 bp, Artificial Sequence
  Synthetic oligonucleotide
acgaggacgatgacacatggagggctccgt

SEQ ID NO: 225275 - DNA, 30 bp, Artificial Sequence
  Synthetic oligonucleotide
aacgctaggagagtaatatggagtctccgt

SEQ ID NO: 225276 - DNA, 30 bp, Artificial Sequence
  Synthetic oligonucleotide
atgcacgaagtttaccaaggcgcagtccgt

SEQ ID NO: 225277 - DNA, 30 bp, Artificial Sequence
  Synthetic oligonucleotide
cactggagtacatgcatggaaatagtccgt

SEQ ID NO: 225278 - DNA, 30 bp, Artificial Sequence
  Synthetic oligonucleotide
ttgggagtacaaattgataagatcgtccgt

SEQ ID NO: 225279 - DNA, 30 bp, Artificial Sequence
  Synthetic oligonucleotide
tcgaagcaatctataagtatcctggtccgt

SEQ ID NO: 225280 - DNA, 30 bp, Artificial Sequence
  Synthetic oligonucleotide
ttgaacccggacagtctaacccatgtccgt

SEQ ID NO: 225281 - DNA, 30 bp, Artificial Sequence
  Synthetic oligonucleotide
ttcggtacccgagctacaagaacattccgt

SEQ ID NO: 225282 - DNA, 30 bp, Artificial Sequence
  Synthetic oligonucleotide
tccaatagataactaactaagctattccgt

SEQ ID NO: 225283 - DNA, 30 bp, Artificial Sequence
  Synthetic oligonucleotide
gacggaagtttaagtgtcgtcttattccgt

SEQ ID NO: 225284 - DNA, 30 bp, Artificial Sequence
  Synthetic oligonucleotide
catagtggaactcaatctactgacttccgt

SEQ ID NO: 225285 - DNA, 30 bp, Artificial Sequence
  Synthetic oligonucleotide
gtaggatctccttcgtgtcggtgcttccgt

SEQ ID NO: 225286 - DNA, 30 bp, Artificial Sequence
  Synthetic oligonucleotide
cgttcgttcggcaaggtgcgcgatttccgt

SEQ ID NO: 225287 - DNA, 30 bp, Artificial Sequence
  Synthetic oligonucleotide
cgagctttgggaattccgatctatttccgt

SEQ ID NO: 225288 - DNA, 30 bp, Artificial Sequence
  Synthetic oligonucleotide
agttccctgggtgtgcaaagagctttccgt

SEQ ID NO: 225289 - DNA, 30 bp, Artificial Sequence
  Synthetic oligonucleotide
ctaaaagggaactcacctaacgtcaagcgt

SEQ ID NO: 225290 - DNA, 30 bp, Artificial Sequence
  Synthetic oligonucleotide
gacgtagttcaggctggacgatgtaagcgt

SEQ ID NO: 225291 - DNA, 30 bp, Artificial Sequence
  Synthetic oligonucleotide
caaccatagatgcgccttgtggcccagcgt

SEQ ID NO: 225292 - DNA, 30 bp, Artificial Sequence
  Synthetic oligonucleotide
ttcgactgcgcaggttagatcattcagcgt

SEQ ID NO: 225293 - DNA, 30 bp, Artificial Sequence
  Synthetic oligonucleotide
taaaagctcatgcgcgagaaaaacgagcgt

SEQ ID NO: 225294 - DNA, 30 bp, Artificial Sequence
  Synthetic oligonucleotide
aggtgtcagccttaacaactccacgagcgt

SEQ ID NO: 225295 - DNA, 30 bp, Artificial Sequence
  Synthetic oligonucleotide
tcaattgtgcgaattcttacaatcgagcgt

SEQ ID NO: 225296 - DNA, 30 bp, Artificial Sequence
  Synthetic oligonucleotide
cctaggctgtctacgtgccgtgatgagcgt

SEQ ID NO: 225297 - DNA, 30 bp, Artificial Sequence
  Synthetic oligonucleotide
agtaactaaattgatgttcacaaatagcgt

SEQ ID NO: 225298 - DNA, 30 bp, Artificial Sequence
  Synthetic oligonucleotide
tgacaaggcgttggacaccccagatagcgt

SEQ ID NO: 225299 - DNA, 30 bp, Artificial Sequence
  Synthetic oligonucleotide
caccgtggaccaccacaatagcgatagcgt

SEQ ID NO: 225300 - DNA, 30 bp, Artificial Sequence
  Synthetic oligonucleotide
cacgtagccgttagtatgtgcaagtagcgt

SEQ ID NO: 225301 - DNA, 30 bp, Artificial Sequence
  Synthetic oligonucleotide
cgcaatgccccatgctaaggagcgtagcgt

SEQ ID NO: 225302 - DNA, 30 bp, Artificial Sequence
  Synthetic oligonucleotide
aacaagcaagagaccgagatgtcttagcgt

SEQ ID NO: 225303 - DNA, 30 bp, Artificial Sequence
  Synthetic oligonucleotide
tttatgcaaaccctatggaatacaccgcgt

SEQ ID NO: 225304 - DNA, 30 bp, Artificial Sequence
  Synthetic oligonucleotide
gcgtcacttcaaatcattgcgtatccgcgt

SEQ ID NO: 225305 - DNA, 30 bp, Artificial Sequence
  Synthetic oligonucleotide
gaggaaaggttcatttagagaagtccgcgt

SEQ ID NO: 225306 - DNA, 30 bp, Artificial Sequence
  Synthetic oligonucleotide
taagattgcagggtttccagcccagcgcgt

SEQ ID NO: 225307 - DNA, 30 bp, Artificial Sequence
  Synthetic oligonucleotide
agatctctgccctatataagacacgcgcgt

SEQ ID NO: 225308 - DNA, 30 bp, Artificial Sequence
  Synthetic oligonucleotide
gatcgagcaactagttgcgacttcgcgcgt

SEQ ID NO: 225309 - DNA, 30 bp, Artificial Sequence
  Synthetic oligonucleotide
ggaagggcatcatctattccccgtgcgcgt

SEQ ID NO: 225310 - DNA, 30 bp, Artificial Sequence
  Synthetic oligonucleotide
gttctgctatcgatacatgatggtgcgcgt

SEQ ID NO: 225311 - DNA, 30 bp, Artificial Sequence
  Synthetic oligonucleotide
gcaacacgtagtctatacgagtgtgcgcgt

SEQ ID NO: 225312 - DNA, 30 bp, Artificial Sequence
  Synthetic oligonucleotide
ctatgaaatgccaatgggcactttgcgcgt

SEQ ID NO: 225313 - DNA, 30 bp, Artificial Sequence
  Synthetic oligonucleotide
catgggtaaacaacgtcgaccgagtcgcgt

SEQ ID NO: 225314 - DNA, 30 bp, Artificial Sequence
  Synthetic oligonucleotide
tctagactaactcattcagctgcgtcgcgt

SEQ ID NO: 225315 - DNA, 30 bp, Artificial Sequence
  Synthetic oligonucleotide
cgaattagggaaaaagattaattttcgcgt

SEQ ID NO: 225316 - DNA, 30 bp, Artificial Sequence
  Synthetic oligonucleotide
tctgggaagcggagttgtttataaaggcgt

SEQ ID NO: 225317 - DNA, 30 bp, Artificial Sequence
  Synthetic oligonucleotide
ttggtcaagtcagcccttaatgtaaggcgt

SEQ ID NO: 225318 - DNA, 30 bp, Artificial Sequence
  Synthetic oligonucleotide
tagtctcccgaagttgtagtggataggcgt

SEQ ID NO: 225319 - DNA, 30 bp, Artificial Sequence
  Synthetic oligonucleotide
aaacgaaagtttcatttaaatactaggcgt

SEQ ID NO: 225320 - DNA, 30 bp, Artificial Sequence
  Synthetic oligonucleotide
cattatgctaacactgtctagggacggcgt

SEQ ID NO: 225321 - DNA, 30 bp, Artificial Sequence
  Synthetic oligonucleotide
gatatatcgaggtaccaggtcaagcggcgt

SEQ ID NO: 225322 - DNA, 30 bp, Artificial Sequence
  Synthetic oligonucleotide
caattctgctctacgtcatcctatcggcgt

SEQ ID NO: 225323 - DNA, 30 bp, Artificial Sequence
  Synthetic oligonucleotide
tggtccagaaacaccacctacactcggcgt

SEQ ID NO: 225324 - DNA, 30 bp, Artificial Sequence
  Synthetic oligonucleotide
tagcgtaagaaaacgggcacttgtcggcgt

SEQ ID NO: 225325 - DNA, 30 bp, Artificial Sequence
  Synthetic oligonucleotide
taaaacaagtcaatcgcctgtacagggcgt

SEQ ID NO: 225326 - DNA, 30 bp, Artificial Sequence
  Synthetic oligonucleotide
ctaataccaaaccattaccatctggggcgt

SEQ ID NO: 225327 - DNA, 30 bp, Artificial Sequence
  Synthetic oligonucleotide
aagcagggttcatgtcaatcatgctggcgt

SEQ ID NO: 225328 - DNA, 30 bp, Artificial Sequence
  Synthetic oligonucleotide
atgttactaaggaatctataagagtggcgt

SEQ ID NO: 225329 - DNA, 30 bp, Artificial Sequence
  Synthetic oligonucleotide
gttgttatccgtgtgcgaggggtgtggcgt

SEQ ID NO: 225330 - DNA, 30 bp, Artificial Sequence
  Synthetic oligonucleotide
tccactgaactcccagctccgggttggcgt

SEQ ID NO: 225331 - DNA, 30 bp, Artificial Sequence
  Synthetic oligonucleotide
cccagcgtctcgtaaaatacccaaatgcgt

SEQ ID NO: 225332 - DNA, 30 bp, Artificial Sequence
  Synthetic oligonucleotide
cctcaaatttgacgactttacttaatgcgt

SEQ ID NO: 225333 - DNA, 30 bp, Artificial Sequence
  Synthetic oligonucleotide
gacggatcagtgttgttatactccatgcgt

SEQ ID NO: 225334 - DNA, 30 bp, Artificial Sequence
  Synthetic oligonucleotide
aaaagatcctggccgatcaccggactgcgt

SEQ ID NO: 225335 - DNA, 30 bp, Artificial Sequence
  Synthetic oligonucleotide
gcgcggggatccggtcaccggatactgcgt

SEQ ID NO: 225336 - DNA, 30 bp, Artificial Sequence
  Synthetic oligonucleotide
tcatcttctaaggacgaaacaggtctgcgt

SEQ ID NO: 225337 - DNA, 30 bp, Artificial Sequence
  Synthetic oligonucleotide
gatggagttcctcggcaaggtgccgtgcgt

SEQ ID NO: 225338 - DNA, 30 bp, Artificial Sequence
  Synthetic oligonucleotide
aaagccccatttcgacttcatctcgtgcgt

SEQ ID NO: 225339 - DNA, 30 bp, Artificial Sequence
  Synthetic oligonucleotide
atgcttaaagccgcatccccagctgtgcgt

SEQ ID NO: 225340 - DNA, 30 bp, Artificial Sequence
  Synthetic oligonucleotide
atgcaattgcgatgcattctgaaattgcgt

SEQ ID NO: 225341 - DNA, 30 bp, Artificial Sequence
  Synthetic oligonucleotide
tgaaaaaccccccacatccgaggaaatcgt

SEQ ID NO: 225342 - DNA, 30 bp, Artificial Sequence
  Synthetic oligonucleotide
gcttggggggagcaagaagaggacaatcgt

SEQ ID NO: 225343 - DNA, 30 bp, Artificial Sequence
  Synthetic oligonucleotide
aaaggtctgtctttagtgaggaccaatcgt

SEQ ID NO: 225344 - DNA, 30 bp, Artificial Sequence
  Synthetic oligonucleotide
agcgggtctgatttatatcgatgcaatcgt

SEQ ID NO: 225345 - DNA, 30 bp, Artificial Sequence
  Synthetic oligonucleotide
aatcaagaaccgataattattaagaatcgt

SEQ ID NO: 225346 - DNA, 30 bp, Artificial Sequence
  Synthetic oligonucleotide
ggatccagacggtaactcgtatttaatcgt

SEQ ID NO: 225347 - DNA, 30 bp, Artificial Sequence
  Synthetic oligonucleotide
gagtaacaaagaacctttaattaacatcgt

SEQ ID NO: 225348 - DNA, 30 bp, Artificial Sequence
  Synthetic oligonucleotide
cgccatggtttagagggccgtcgccatcgt

SEQ ID NO: 225349 - DNA, 30 bp, Artificial Sequence
  Synthetic oligonucleotide
tgctggtaattctacttaagctctcatcgt

SEQ ID NO: 225350 - DNA, 30 bp, Artificial Sequence
  Synthetic oligonucleotide
agtgggtatgccaattttgtaggtcatcgt

SEQ ID NO: 225351 - DNA, 30 bp, Artificial Sequence
  Synthetic oligonucleotide
gtatctaaacacgtatggggttgagatcgt

SEQ ID NO: 225352 - DNA, 30 bp, Artificial Sequence
  Synthetic oligonucleotide
atgtaatccagcgtgctgtgattagatcgt

SEQ ID NO: 225353 - DNA, 30 bp, Artificial Sequence
  Synthetic oligonucleotide
taggggggcaggaccacggtgaccgatcgt

SEQ ID NO: 225354 - DNA, 30 bp, Artificial Sequence
  Synthetic oligonucleotide
aggagccaatctggtagagggctcgatcgt

SEQ ID NO: 225355 - DNA, 30 bp, Artificial Sequence
  Synthetic oligonucleotide
gggtgggccataggaaagagactggatcgt

SEQ ID NO: 225356 - DNA, 30 bp, Artificial Sequence
  Synthetic oligonucleotide
acagctccactgaggatttatgtggatcgt

SEQ ID NO: 225357 - DNA, 30 bp, Artificial Sequence
  Synthetic oligonucleotide
ggaacgacgctttaacatcaagctgatcgt

SEQ ID NO: 225358 - DNA, 30 bp, Artificial Sequence
  Synthetic oligonucleotide
gaattcgcacgtcatctggaatgctatcgt

SEQ ID NO: 225359 - DNA, 30 bp, Artificial Sequence
  Synthetic oligonucleotide
gcggtctcttatgtggcgaagtaaactcgt

SEQ ID NO: 225360 - DNA, 30 bp, Artificial Sequence
  Synthetic oligonucleotide
ggctccgataataaacccggaccaactcgt

SEQ ID NO: 225361 - DNA, 30 bp, Artificial Sequence
  Synthetic oligonucleotide
tgccgtcggtactgggcaagacgtactcgt

SEQ ID NO: 225362 - DNA, 30 bp, Artificial Sequence
  Synthetic oligonucleotide
aaccaggttatgaaccaaaagggccctcgt

SEQ ID NO: 225363 - DNA, 30 bp, Artificial Sequence
  Synthetic oligonucleotide
agtgctagccaggcgcctacagttcctcgt

SEQ ID NO: 225364 - DNA, 30 bp, Artificial Sequence
  Synthetic oligonucleotide
ccttgggtgtatcacatcggactggctcgt

SEQ ID NO: 225365 - DNA, 30 bp, Artificial Sequence
  Synthetic oligonucleotide
aacgacacgcggctgcgcggatatgctcgt

SEQ ID NO: 225366 - DNA, 30 bp, Artificial Sequence
  Synthetic oligonucleotide
gcaggagtaccaccaatcagagaatctcgt

SEQ ID NO: 225367 - DNA, 30 bp, Artificial Sequence
  Synthetic oligonucleotide
gcgtaccatgttgatgcccactgatctcgt

SEQ ID NO: 225368 - DNA, 30 bp, Artificial Sequence
  Synthetic oligonucleotide
ttaggtcaaatggtcagcacgaattctcgt

SEQ ID NO: 225369 - DNA, 30 bp, Artificial Sequence
  Synthetic oligonucleotide
ccgacgctccaaatacttatgaacagtcgt

SEQ ID NO: 225370 - DNA, 30 bp, Artificial Sequence
  Synthetic oligonucleotide
atgcggttgcggcgacttgtgatgagtcgt

SEQ ID NO: 225371 - DNA, 30 bp, Artificial Sequence
  Synthetic oligonucleotide
aggtcttcacgtcgcgcaggggtgagtcgt

SEQ ID NO: 225372 - DNA, 30 bp, Artificial Sequence
  Synthetic oligonucleotide
accgtgcatcaaacttgaagaaaacgtcgt

SEQ ID NO: 225373 - DNA, 30 bp, Artificial Sequence
  Synthetic oligonucleotide
atcgccggtctagcggcataggtacgtcgt

SEQ ID NO: 225374 - DNA, 30 bp, Artificial Sequence
  Synthetic oligonucleotide
ggcccctggcgaactagtaagttacgtcgt

SEQ ID NO: 225375 - DNA, 30 bp, Artificial Sequence
  Synthetic oligonucleotide
accaacttataccgtcgcccggaccgtcgt

SEQ ID NO: 225376 - DNA, 30 bp, Artificial Sequence
  Synthetic oligonucleotide
ttgcgatctgggatgaaaaaaccgcgtcgt

SEQ ID NO: 225377 - DNA, 30 bp, Artificial Sequence
  Synthetic oligonucleotide
cgacagcgctacacgtagtcgaaaggtcgt

SEQ ID NO: 225378 - DNA, 30 bp, Artificial Sequence
  Synthetic oligonucleotide
aagccagtaagactcacccggttaggtcgt

SEQ ID NO: 225379 - DNA, 30 bp, Artificial Sequence
  Synthetic oligonucleotide
tctgtgatattagtaccggaatggggtcgt

SEQ ID NO: 225380 - DNA, 30 bp, Artificial Sequence
  Synthetic oligonucleotide
atagcgccaacccgcactttacaatgtcgt

SEQ ID NO: 225381 - DNA, 30 bp, Artificial Sequence
  Synthetic oligonucleotide
gggcatgccacaactaaggggcaatgtcgt

SEQ ID NO: 225382 - DNA, 30 bp, Artificial Sequence
  Synthetic oligonucleotide
aacgtatttaacagaccgaaataatgtcgt

SEQ ID NO: 225383 - DNA, 31 bp, Artificial Sequence
  Synthetic oligonucleotide
cctctgattattgccagcccgcaagtgtcgt

SEQ ID NO: 225384 - DNA, 30 bp, Artificial Sequence
  Synthetic oligonucleotide
ttactgtcaagctaagactctaggtgtcgt

SEQ ID NO: 225385 - DNA, 30 bp, Artificial Sequence
  Synthetic oligonucleotide
tgaactgagagagttgtctacgcttgtcgt

SEQ ID NO: 225386 - DNA, 31 bp, Artificial Sequence
  Synthetic oligonucleotide
atgagttgtaccagcgtaatttcgaattcgt

SEQ ID NO: 225387 - DNA, 30 bp, Artificial Sequence
  Synthetic oligonucleotide
tgtcttacaatcacggaagccgtaattcgt

SEQ ID NO: 225388 - DNA, 30 bp, Artificial Sequence
  Synthetic oligonucleotide
aacatacaagtggccttaacactcattcgt

SEQ ID NO: 225389 - DNA, 31 bp, Artificial Sequence
  Synthetic oligonucleotide
tcttagtgatctagggacaaggttccttcgt

SEQ ID NO: 225390 - DNA, 30 bp, Artificial Sequence
  Synthetic oligonucleotide
gacggggccgtctgtgagcgggatcttcgt

SEQ ID NO: 225391 - DNA, 30 bp, Artificial Sequence
  Synthetic oligonucleotide
aagtattgaccccaatagaaaagtcttcgt

SEQ ID NO: 225392 - DNA, 30 bp, Artificial Sequence
  Synthetic oligonucleotide
taagtgctccaccaattgcgaaaagttcgt

SEQ ID NO: 225393 - DNA, 30 bp, Artificial Sequence
  Synthetic oligonucleotide
ctcggataatcgtctcgacaataagttcgt

SEQ ID NO: 225394 - DNA, 30 bp, Artificial Sequence
  Synthetic oligonucleotide
agagaatttagggatcagttcaacgttcgt

SEQ ID NO: 225395 - DNA, 30 bp, Artificial Sequence
  Synthetic oligonucleotide
tttggcgcggacggtagcgatcgggttcgt

SEQ ID NO: 225396 - DNA, 30 bp, Artificial Sequence
  Synthetic oligonucleotide
gcgagttggcctcagttaggagctgttcgt

SEQ ID NO: 225397 - DNA, 30 bp, Artificial Sequence
  Synthetic oligonucleotide
agggtcacatatcagtaccagatttttcgt

SEQ ID NO: 225398 - DNA, 30 bp, Artificial Sequence
  Synthetic oligonucleotide
cccataagtgtactctttaaccgaaaaggt

SEQ ID NO: 225399 - DNA, 30 bp, Artificial Sequence
  Synthetic oligonucleotide
atcacaccacgcaccccacacagcaaaggt

SEQ ID NO: 225400 - DNA, 30 bp, Artificial Sequence
  Synthetic oligonucleotide
ggtaaggtgtacctaccaaacgtcaaaggt

SEQ ID NO: 225401 - DNA, 30 bp, Artificial Sequence
  Synthetic oligonucleotide
tccgtgaagtagcgatgcactgcgaaaggt

SEQ ID NO: 225402 - DNA, 30 bp, Artificial Sequence
  Synthetic oligonucleotide
tatttcaaaaaaatatttgctcggaaaggt

SEQ ID NO: 225403 - DNA, 30 bp, Artificial Sequence
  Synthetic oligonucleotide
tctgtccgactccaatgtgtaatgaaaggt

SEQ ID NO: 225404 - DNA, 30 bp, Artificial Sequence
  Synthetic oligonucleotide
ttgacgaggccgccctcataagtgaaaggt

SEQ ID NO: 225405 - DNA, 30 bp, Artificial Sequence
  Synthetic oligonucleotide
caaaggaggatctatgcggttacacaaggt

SEQ ID NO: 225406 - DNA, 30 bp, Artificial Sequence
  Synthetic oligonucleotide
cccagaaaggtagagaaacaaccacaaggt

SEQ ID NO: 225407 - DNA, 30 bp, Artificial Sequence
  Synthetic oligonucleotide
ttctctcgttgataaggtatcgagcaaggt

SEQ ID NO: 225408 - DNA, 30 bp, Artificial Sequence
  Synthetic oligonucleotide
ggcgtcagcacgtcataccagccgcaaggt

SEQ ID NO: 225409 - DNA, 30 bp, Artificial Sequence
  Synthetic oligonucleotide
cgtcttagttgccaagaccgctatcaaggt

SEQ ID NO: 225410 - DNA, 30 bp, Artificial Sequence
  Synthetic oligonucleotide
gggtctcatagcatccgacgtgttcaaggt

SEQ ID NO: 225411 - DNA, 30 bp, Artificial Sequence
  Synthetic oligonucleotide
gttgtcattttaggttggccatcagaaggt

SEQ ID NO: 225412 - DNA, 30 bp, Artificial Sequence
  Synthetic oligonucleotide
aggcaagtcgataacaacccggtagaaggt

SEQ ID NO: 225413 - DNA, 30 bp, Artificial Sequence
  Synthetic oligonucleotide
acacggcttgccgtagcctcgggcgaaggt

SEQ ID NO: 225414 - DNA, 30 bp, Artificial Sequence
  Synthetic oligonucleotide
gctctacgactaaaaaagaatacataaggt

SEQ ID NO: 225415 - DNA, 30 bp, Artificial Sequence
  Synthetic oligonucleotide
agaacccaatagtattgagccttctaaggt

SEQ ID NO: 225416 - DNA, 30 bp, Artificial Sequence
  Synthetic oligonucleotide
aggtttagcatatggcaacgcaattaaggt

SEQ ID NO: 225417 - DNA, 30 bp, Artificial Sequence
  Synthetic oligonucleotide
gtggtatcaagggactcggctcagacaggt

SEQ ID NO: 225418 - DNA, 30 bp, Artificial Sequence
  Synthetic oligonucleotide
tcagcgtggcccaacaagaatatgacaggt

SEQ ID NO: 225419 - DNA, 30 bp, Artificial Sequence
  Synthetic oligonucleotide
cgtctcatatcagataatcggagtacaggt

SEQ ID NO: 225420 - DNA, 30 bp, Artificial Sequence
  Synthetic oligonucleotide
gcacatgtgaagccagattattttacaggt

SEQ ID NO: 225421 - DNA, 30 bp, Artificial Sequence
  Synthetic oligonucleotide
cgtgggctaaccaccggaagatgaccaggt

SEQ ID NO: 225422 - DNA, 30 bp, Artificial Sequence
  Synthetic oligonucleotide
cctgagtatatcatcatagccgtcccaggt

SEQ ID NO: 225423 - DNA, 30 bp, Artificial Sequence
  Synthetic oligonucleotide
gggttaattcttttcaaagtcttgccaggt

SEQ ID NO: 225424 - DNA, 30 bp, Artificial Sequence
  Synthetic oligonucleotide
atagactagtggcggctggatgtggcaggt

SEQ ID NO: 225425 - DNA, 30 bp, Artificial Sequence
  Synthetic oligonucleotide
agaattcctccgcgtgctaaaaatgcaggt

SEQ ID NO: 225426 - DNA, 30 bp, Artificial Sequence
  Synthetic oligonucleotide
ggtaatagagcaccgtcgtgtaatgcaggt

SEQ ID NO: 225427 - DNA, 30 bp, Artificial Sequence
  Synthetic oligonucleotide
cgatgtgcctgagaaggcacgcttgcaggt

SEQ ID NO: 225428 - DNA, 30 bp, Artificial Sequence
  Synthetic oligonucleotide
tgtacctccttccagattacagttgcaggt

SEQ ID NO: 225429 - DNA, 30 bp, Artificial Sequence
  Synthetic oligonucleotide
aactatacaggattcggcggtcattcaggt

SEQ ID NO: 225430 - DNA, 30 bp, Artificial Sequence
  Synthetic oligonucleotide
ggggataatcatggatggcgttcttcaggt

SEQ ID NO: 225431 - DNA, 30 bp, Artificial Sequence
  Synthetic oligonucleotide
actacacagacggcggttcactgttcaggt

SEQ ID NO: 225432 - DNA, 30 bp, Artificial Sequence
  Synthetic oligonucleotide
aaagagccggtacaatattgagtttcaggt

SEQ ID NO: 225433 - DNA, 30 bp, Artificial Sequence
  Synthetic oligonucleotide
gtattcaaacccgcctgaaaggtttcaggt

SEQ ID NO: 225434 - DNA, 30 bp, Artificial Sequence
  Synthetic oligonucleotide
atgtcatcaaggagatccatggtaagaggt

SEQ ID NO: 225435 - DNA, 30 bp, Artificial Sequence
  Synthetic oligonucleotide
ggtccagtcgcgcccggactcacgagaggt

SEQ ID NO: 225436 - DNA, 31 bp, Artificial Sequence
  Synthetic oligonucleotide
aaatcggtctacgatctcgggaatgagaggt

SEQ ID NO: 225437 - DNA, 30 bp, Artificial Sequence
  Synthetic oligonucleotide
tgactataaaatggactacttaaacgaggt

SEQ ID NO: 225438 - DNA, 30 bp, Artificial Sequence
  Synthetic oligonucleotide
caagtaagctcagtcgaacaagtacgaggt

SEQ ID NO: 225439 - DNA, 30 bp, Artificial Sequence
  Synthetic oligonucleotide
agtctagtataggccggagataaaggaggt

SEQ ID NO: 225440 - DNA, 29 bp, Artificial Sequence
  Synthetic oligonucleotide
atcgattgtgatgaaaacatcgaggaggt

SEQ ID NO: 225441 - DNA, 30 bp, Artificial Sequence
  Synthetic oligonucleotide
tgcattttcatgatgaggcggaccggaggt

SEQ ID NO: 225442 - DNA, 30 bp, Artificial Sequence
  Synthetic oligonucleotide
ttgccttgacaagggtggtagcccggaggt

SEQ ID NO: 225443 - DNA, 30 bp, Artificial Sequence
  Synthetic oligonucleotide
gcaatcctgagtcggttgtgaacgggaggt

SEQ ID NO: 225444 - DNA, 30 bp, Artificial Sequence
  Synthetic oligonucleotide
aagtcctactgcacggcagggcggggaggt

SEQ ID NO: 225445 - DNA, 30 bp, Artificial Sequence
  Synthetic oligonucleotide
aatcccccttaagcttgcaacgggggaggt

SEQ ID NO: 225446 - DNA, 30 bp, Artificial Sequence
  Synthetic oligonucleotide
atggaggtcttaggtttgggactatgaggt

SEQ ID NO: 225447 - DNA, 30 bp, Artificial Sequence
  Synthetic oligonucleotide
ttgtcctgtcttggcatgtacggctgaggt

SEQ ID NO: 225448 - DNA, 30 bp, Artificial Sequence
  Synthetic oligonucleotide
tgggaatagtcgtagtaagtagagtgaggt

SEQ ID NO: 225449 - DNA, 30 bp, Artificial Sequence
  Synthetic oligonucleotide
attgcggcacataggtaaggaacgtgaggt

SEQ ID NO: 225450 - DNA, 30 bp, Artificial Sequence
  Synthetic oligonucleotide
cactcggtcgagccaccgcaagattgaggt

SEQ ID NO: 225451 - DNA, 30 bp, Artificial Sequence
  Synthetic oligonucleotide
ggccaatgattatcaaaaaaaatttgaggt

SEQ ID NO: 225452 - DNA, 30 bp, Artificial Sequence
  Synthetic oligonucleotide
cactgttcgttacagccgatggtttgaggt

SEQ ID NO: 225453 - DNA, 30 bp, Artificial Sequence
  Synthetic oligonucleotide
tacctcaacaaatcttatggcagcataggt

SEQ ID NO: 225454 - DNA, 30 bp, Artificial Sequence
  Synthetic oligonucleotide
tatgtggtaacaagtcgagcgtcgataggt

SEQ ID NO: 225455 - DNA, 30 bp, Artificial Sequence
  Synthetic oligonucleotide
ccagaggacataaagagggctgctataggt

SEQ ID NO: 225456 - DNA, 30 bp, Artificial Sequence
  Synthetic oligonucleotide
tttggcagtgagaaaggctgactactaggt

SEQ ID NO: 225457 - DNA, 30 bp, Artificial Sequence
  Synthetic oligonucleotide
atcgaacctgcatatggatctcgcctaggt

SEQ ID NO: 225458 - DNA, 30 bp, Artificial Sequence
  Synthetic oligonucleotide
aggttaaaatactccaatgacagcgtaggt

SEQ ID NO: 225459 - DNA, 30 bp, Artificial Sequence
  Synthetic oligonucleotide
cacgccccagtaagtggactcatggtaggt

SEQ ID NO: 225460 - DNA, 30 bp, Artificial Sequence
  Synthetic oligonucleotide
gcatcgattcgtacgccacccagtgtaggt

SEQ ID NO: 225461 - DNA, 30 bp, Artificial Sequence
  Synthetic oligonucleotide
tgatggtgaagagtagaattaggcttaggt

SEQ ID NO: 225462 - DNA, 30 bp, Artificial Sequence
  Synthetic oligonucleotide
acgtaagttagttgaactttcttcttaggt

SEQ ID NO: 225463 - DNA, 30 bp, Artificial Sequence
  Synthetic oligonucleotide
gacgttcctgaggtccaaaatttcttaggt

SEQ ID NO: 225464 - DNA, 30 bp, Artificial Sequence
  Synthetic oligonucleotide
acttccctatgagtaatccgaacgttaggt

SEQ ID NO: 225465 - DNA, 30 bp, Artificial Sequence
  Synthetic oligonucleotide
gttctaacgcagagcaggatgtcgaacggt

SEQ ID NO: 225466 - DNA, 30 bp, Artificial Sequence
  Synthetic oligonucleotide
acgatcacgttgagtacaaacgataacggt

SEQ ID NO: 225467 - DNA, 30 bp, Artificial Sequence
  Synthetic oligonucleotide
agccggatacgacacattcttggtaacggt

SEQ ID NO: 225468 - DNA, 30 bp, Artificial Sequence
  Synthetic oligonucleotide
cgggcccacgcagaatgcctttttaacggt

SEQ ID NO: 225469 - DNA, 30 bp, Artificial Sequence
  Synthetic oligonucleotide
ctcctaatacaatgccagacatcccacggt

SEQ ID NO: 225470 - DNA, 30 bp, Artificial Sequence
  Synthetic oligonucleotide
ccacatagactcgtattcatcgagcacggt

SEQ ID NO: 225471 - DNA, 30 bp, Artificial Sequence
  Synthetic oligonucleotide
ggatccgaagtttctgaaccgtcgcacggt

SEQ ID NO: 225472 - DNA, 30 bp, Artificial Sequence
  Synthetic oligonucleotide
ggctccatggcaaaaaggaagttgcacggt

SEQ ID NO: 225473 - DNA, 30 bp, Artificial Sequence
  Synthetic oligonucleotide
ggtctctggttatgaatatcgccagacggt

SEQ ID NO: 225474 - DNA, 30 bp, Artificial Sequence
  Synthetic oligonucleotide
tgaggttaggcataagggataaccgacggt

SEQ ID NO: 225475 - DNA, 30 bp, Artificial Sequence
  Synthetic oligonucleotide
acacatcatctgttttaatgtaggtacggt

SEQ ID NO: 225476 - DNA, 30 bp, Artificial Sequence
  Synthetic oligonucleotide
tgtgggggatagatgggctagtggtacggt

SEQ ID NO: 225477 - DNA, 30 bp, Artificial Sequence
  Synthetic oligonucleotide
acaagttcaaggtccggcaccacaaccggt

SEQ ID NO: 225478 - DNA, 30 bp, Artificial Sequence
  Synthetic oligonucleotide
ggttacttacagctatgtcggtcaaccggt

SEQ ID NO: 225479 - DNA, 30 bp, Artificial Sequence
  Synthetic oligonucleotide
caaggatgacgtatgactgcgtgcaccggt

SEQ ID NO: 225480 - DNA, 30 bp, Artificial Sequence
  Synthetic oligonucleotide
ggaccagaaaagcacttatgattcaccggt

SEQ ID NO: 225481 - DNA, 30 bp, Artificial Sequence
  Synthetic oligonucleotide
aattggacatcatacggtgagtcgcccggt

SEQ ID NO: 225482 - DNA, 30 bp, Artificial Sequence
  Synthetic oligonucleotide
tagctacgtacgcataggatttgagccggt

SEQ ID NO: 225483 - DNA, 30 bp, Artificial Sequence
  Synthetic oligonucleotide
ttagtcacgtcggctgtcctcgctgccggt

SEQ ID NO: 225484 - DNA, 30 bp, Artificial Sequence
  Synthetic oligonucleotide
catggtccaaatgcctggcctccaagcggt

SEQ ID NO: 225485 - DNA, 30 bp, Artificial Sequence
  Synthetic oligonucleotide
ggctccacgtacttttacccagcgagcggt

SEQ ID NO: 225486 - DNA, 30 bp, Artificial Sequence
  Synthetic oligonucleotide
aatccgtaagcttacagtgtcgcccgcggt

SEQ ID NO: 225487 - DNA, 30 bp, Artificial Sequence
  Synthetic oligonucleotide
atttgcgataagggaatgttgcttcgcggt

SEQ ID NO: 225488 - DNA, 30 bp, Artificial Sequence
  Synthetic oligonucleotide
gggacaagtttggatgtagcgctaggcggt

SEQ ID NO: 225489 - DNA, 30 bp, Artificial Sequence
  Synthetic oligonucleotide
caactggtagggctgttacagaacggcggt

SEQ ID NO: 225490 - DNA, 30 bp, Artificial Sequence
  Synthetic oligonucleotide
gtctgcagaggtgcgcttcaggacggcggt

SEQ ID NO: 225491 - DNA, 30 bp, Artificial Sequence
  Synthetic oligonucleotide
gttccgagtgggatcccagtccagggcggt

SEQ ID NO: 225492 - DNA, 30 bp, Artificial Sequence
  Synthetic oligonucleotide
cggcaatcacggctccaggtgcggggcggt

SEQ ID NO: 225493 - DNA, 30 bp, Artificial Sequence
  Synthetic oligonucleotide
ggggtgctgcattgcggtatggtatgcggt

SEQ ID NO: 225494 - DNA, 30 bp, Artificial Sequence
  Synthetic oligonucleotide
caaaaggtacgacaataaaactagtgcggt

SEQ ID NO: 225495 - DNA, 30 bp, Artificial Sequence
  Synthetic oligonucleotide
taaaaggaaggggtagcggttcaaatcggt

SEQ ID NO: 225496 - DNA, 30 bp, Artificial Sequence
  Synthetic oligonucleotide
agcgattaagattgatatctcagaatcggt

SEQ ID NO: 225497 - DNA, 30 bp, Artificial Sequence
  Synthetic oligonucleotide
tgggccatggaaagatgcgaggacatcggt

SEQ ID NO: 225498 - DNA, 30 bp, Artificial Sequence
  Synthetic oligonucleotide
ttaatccggagtgcgcgttagcccatcggt

SEQ ID NO: 225499 - DNA, 30 bp, Artificial Sequence
  Synthetic oligonucleotide
ctggtggaattgaaccatcgggccatcggt

SEQ ID NO: 225500 - DNA, 30 bp, Artificial Sequence
  Synthetic oligonucleotide
catcgaaactcccgctatagcacgatcggt

SEQ ID NO: 225501 - DNA, 30 bp, Artificial Sequence
  Synthetic oligonucleotide
cgtcttccgaggtccgtcgtgcggatcggt

SEQ ID NO: 225502 - DNA, 30 bp, Artificial Sequence
  Synthetic oligonucleotide
ggttatggcaagtaaacgttctctctcggt

SEQ ID NO: 225503 - DNA, 30 bp, Artificial Sequence
  Synthetic oligonucleotide
tgaaatgtcgtcccaatcaaaagagtcggt

SEQ ID NO: 225504 - DNA, 30 bp, Artificial Sequence
  Synthetic oligonucleotide
gtgttgtagtcggtgtgatccgacgtcggt

SEQ ID NO: 225505 - DNA, 30 bp, Artificial Sequence
  Synthetic oligonucleotide
tcgccggtgacacatagctgaaccgtcggt

SEQ ID NO: 225506 - DNA, 30 bp, Artificial Sequence
  Synthetic oligonucleotide
acgtgattacgatcaacccacgcggtcggt

SEQ ID NO: 225507 - DNA, 30 bp, Artificial Sequence
  Synthetic oligonucleotide
tctacttcgaagtgggagtgcgcggtcggt

SEQ ID NO: 225508 - DNA, 30 bp, Artificial Sequence
  Synthetic oligonucleotide
tagacatcttgtgggcaattgattgtcggt

SEQ ID NO: 225509 - DNA, 30 bp, Artificial Sequence
  Synthetic oligonucleotide
ttggacagatagtactgggggggtttcggt

SEQ ID NO: 225510 - DNA, 30 bp, Artificial Sequence
  Synthetic oligonucleotide
ttggataccgtgggtgctgtaataaagggt

SEQ ID NO: 225511 - DNA, 30 bp, Artificial Sequence
  Synthetic oligonucleotide
agagttaggcactcgggtaaggtaaagggt

SEQ ID NO: 225512 - DNA, 30 bp, Artificial Sequence
  Synthetic oligonucleotide
gtaacgagttggttgtcagagaacaagggt

SEQ ID NO: 225513 - DNA, 30 bp, Artificial Sequence
  Synthetic oligonucleotide
cgcgaggtttctgactatctgcgcaagggt

SEQ ID NO: 225514 - DNA, 30 bp, Artificial Sequence
  Synthetic oligonucleotide
gatgcattaggaggatctcacgagaagggt

SEQ ID NO: 225515 - DNA, 30 bp, Artificial Sequence
  Synthetic oligonucleotide
ttcgaaagatacgccactatcaaacagggt

SEQ ID NO: 225516 - DNA, 30 bp, Artificial Sequence
  Synthetic oligonucleotide
aagatcggggttcggctgaagaaacagggt

SEQ ID NO: 225517 - DNA, 30 bp, Artificial Sequence
  Synthetic oligonucleotide
ggacatggcatagggttgccagaacagggt

SEQ ID NO: 225518 - DNA, 30 bp, Artificial Sequence
  Synthetic oligonucleotide
aactgtattatgaatttaggttaacagggt

SEQ ID NO: 225519 - DNA, 29 bp, Artificial Sequence
  Synthetic oligonucleotide
taggcgttgacgttgcagtaaagcagggt

SEQ ID NO: 225520 - DNA, 30 bp, Artificial Sequence
  Synthetic oligonucleotide
gtaaaaatccacggaaaatatgcgcagggt

SEQ ID NO: 225521 - DNA, 30 bp, Artificial Sequence
  Synthetic oligonucleotide
attctaacttttagaaagccagggcagggt

SEQ ID NO: 225522 - DNA, 31 bp, Artificial Sequence
  Synthetic oligonucleotide
cgcttgcaaaagcttgctcacgctgcagggt

SEQ ID NO: 225523 - DNA, 30 bp, Artificial Sequence
  Synthetic oligonucleotide
ggtggggggcttacaatataacgtcagggt

SEQ ID NO: 225524 - DNA, 30 bp, Artificial Sequence
  Synthetic oligonucleotide
agcaagatcaggcgtctcaagctagagggt

SEQ ID NO: 225525 - DNA, 30 bp, Artificial Sequence
  Synthetic oligonucleotide
ctgcaccttacaagcggaaagggcgagggt

SEQ ID NO: 225526 - DNA, 31 bp, Artificial Sequence
  Synthetic oligonucleotide
tgggagggtagtggtggcggtgggggagggt

SEQ ID NO: 225527 - DNA, 30 bp, Artificial Sequence
  Synthetic oligonucleotide
ccggcgcaggagcccggtaatggtgagggt

SEQ ID NO: 225528 - DNA, 30 bp, Artificial Sequence
  Synthetic oligonucleotide
tatggtaaacctgcagaactcaaatagggt

SEQ ID NO: 225529 - DNA, 30 bp, Artificial Sequence
  Synthetic oligonucleotide
gcgaggagatgctctgcatagacatagggt

SEQ ID NO: 225530 - DNA, 30 bp, Artificial Sequence
  Synthetic oligonucleotide
ccaggaatgagaaccggatgcgtatagggt

SEQ ID NO: 225531 - DNA, 30 bp, Artificial Sequence
  Synthetic oligonucleotide
ggaccggccaagagcgagagggtctagggt

SEQ ID NO: 225532 - DNA, 30 bp, Artificial Sequence
  Synthetic oligonucleotide
tccgttagggggcaataacggccgtagggt

SEQ ID NO: 225533 - DNA, 30 bp, Artificial Sequence
  Synthetic oligonucleotide
tgttcttgcgggaggtcgtgatattagggt

SEQ ID NO: 225534 - DNA, 30 bp, Artificial Sequence
  Synthetic oligonucleotide
ctgatcaaatcatctctctttaaaacgggt

SEQ ID NO: 225535 - DNA, 30 bp, Artificial Sequence
  Synthetic oligonucleotide
attacctgtgcgggacagtggtgtacgggt

SEQ ID NO: 225536 - DNA, 30 bp, Artificial Sequence
  Synthetic oligonucleotide
gtttattacggcgccataggatcagcgggt

SEQ ID NO: 225537 - DNA, 30 bp, Artificial Sequence
  Synthetic oligonucleotide
tggtgtgtcatggtgatgcccagcgcgggt

SEQ ID NO: 225538 - DNA, 30 bp, Artificial Sequence
  Synthetic oligonucleotide
ggccaagcactaccttgctctaaggcgggt

SEQ ID NO: 225539 - DNA, 30 bp, Artificial Sequence
  Synthetic oligonucleotide
gagtagatatcggccactcgaccggcgggt

SEQ ID NO: 225540 - DNA, 30 bp, Artificial Sequence
  Synthetic oligonucleotide
gaaagatgaggttgcgcgccaagtgcgggt

SEQ ID NO: 225541 - DNA, 30 bp, Artificial Sequence
  Synthetic oligonucleotide
atgtggtggatatagtctttaattgcgggt

SEQ ID NO: 225542 - DNA, 30 bp, Artificial Sequence
  Synthetic oligonucleotide
gcattcaaacggcgttcgtgtaaatcgggt

SEQ ID NO: 225543 - DNA, 30 bp, Artificial Sequence
  Synthetic oligonucleotide
taggccaatgtgcccacatttgcatcgggt

SEQ ID NO: 225544 - DNA, 30 bp, Artificial Sequence
  Synthetic oligonucleotide
gtcagattactactgtgtcattgctcgggt

SEQ ID NO: 225545 - DNA, 30 bp, Artificial Sequence
  Synthetic oligonucleotide
accacgtgtaattaaccacgaacgaggggt

SEQ ID NO: 225546 - DNA, 30 bp, Artificial Sequence
  Synthetic oligonucleotide
taatgtaatcatccagaggtatggaggggt

SEQ ID NO: 225547 - DNA, 30 bp, Artificial Sequence
  Synthetic oligonucleotide
aatcgcatcgttccgcatggccataggggt

SEQ ID NO: 225548 - DNA, 30 bp, Artificial Sequence
  Synthetic oligonucleotide
caaccgggacgagacagcttcatacggggt

SEQ ID NO: 225549 - DNA, 30 bp, Artificial Sequence
  Synthetic oligonucleotide
ccgtatggttgtcaggcggacatccggggt

SEQ ID NO: 225550 - DNA, 30 bp, Artificial Sequence
  Synthetic oligonucleotide
agggatgttaccgaaagtttggtagggggt

SEQ ID NO: 225551 - DNA, 30 bp, Artificial Sequence
  Synthetic oligonucleotide
gatagcccagctaaacgggcgttagggggt

SEQ ID NO: 225552 - DNA, 30 bp, Artificial Sequence
  Synthetic oligonucleotide
gtgctcaagtacttcaattttccggggggt

SEQ ID NO: 225553 - DNA, 30 bp, Artificial Sequence
  Synthetic oligonucleotide
gctgagaccttgaaacttcgcaatgggggt

SEQ ID NO: 225554 - DNA, 30 bp, Artificial Sequence
  Synthetic oligonucleotide
ttcggtcagcaggtggaatcagctgggggt

SEQ ID NO: 225555 - DNA, 30 bp, Artificial Sequence
  Synthetic oligonucleotide
cgtgcggcctggtgggcggcctttgggggt

SEQ ID NO: 225556 - DNA, 30 bp, Artificial Sequence
  Synthetic oligonucleotide
ccgagtttgttaagatatagtccatggggt

SEQ ID NO: 225557 - DNA, 30 bp, Artificial Sequence
  Synthetic oligonucleotide
aagccagatttgacacggtttaagtggggt

SEQ ID NO: 225558 - DNA, 30 bp, Artificial Sequence
  Synthetic oligonucleotide
cggtgaagaaagagcggatgatggtggggt

SEQ ID NO: 225559 - DNA, 30 bp, Artificial Sequence
  Synthetic oligonucleotide
gcggaaatttcgaggaggacaggttggggt

SEQ ID NO: 225560 - DNA, 30 bp, Artificial Sequence
  Synthetic oligonucleotide
aaattacgcggtgttctgaccaagatgggt

SEQ ID NO: 225561 - DNA, 30 bp, Artificial Sequence
  Synthetic oligonucleotide
gcaaactatagcgggcaggaaaggatgggt

SEQ ID NO: 225562 - DNA, 30 bp, Artificial Sequence
  Synthetic oligonucleotide
ctaggaggaaacttcttgtggactatgggt

SEQ ID NO: 225563 - DNA, 30 bp, Artificial Sequence
  Synthetic oligonucleotide
ctcgacaaatctataattggaaaactgggt

SEQ ID NO: 225564 - DNA, 30 bp, Artificial Sequence
  Synthetic oligonucleotide
cctagacctgtgggcgcaggctagctgggt

SEQ ID NO: 225565 - DNA, 30 bp, Artificial Sequence
  Synthetic oligonucleotide
aacattcgcttatcgtgcagattgctgggt

SEQ ID NO: 225566 - DNA, 30 bp, Artificial Sequence
  Synthetic oligonucleotide
ggaggcatccaaaggatctgtttgctgggt

SEQ ID NO: 225567 - DNA, 30 bp, Artificial Sequence
  Synthetic oligonucleotide
tgaaacgtcagggcactcaacaatctgggt

SEQ ID NO: 225568 - DNA, 30 bp, Artificial Sequence
  Synthetic oligonucleotide
tatcgcgcggatcaaacaactcttctgggt

SEQ ID NO: 225569 - DNA, 30 bp, Artificial Sequence
  Synthetic oligonucleotide
ccttataaagcgtagcccttggcagtgggt

SEQ ID NO: 225570 - DNA, 30 bp, Artificial Sequence
  Synthetic oligonucleotide
tatacgcgtaaatatctaggcgtagtgggt

SEQ ID NO: 225571 - DNA, 30 bp, Artificial Sequence
  Synthetic oligonucleotide
gtgctaatttacaggggagtggtagtgggt

SEQ ID NO: 225572 - DNA, 30 bp, Artificial Sequence
  Synthetic oligonucleotide
ggtcaaattgcgccactccatgtagtgggt

SEQ ID NO: 225573 - DNA, 30 bp, Artificial Sequence
  Synthetic oligonucleotide
ggagagtcttagagatcccagggcgtgggt

SEQ ID NO: 225574 - DNA, 30 bp, Artificial Sequence
  Synthetic oligonucleotide
tgctgcctggtaacttcgctcaaggtgggt

SEQ ID NO: 225575 - DNA, 30 bp, Artificial Sequence
  Synthetic oligonucleotide
gacccaggagagcttacttgatatgtgggt

SEQ ID NO: 225576 - DNA, 30 bp, Artificial Sequence
  Synthetic oligonucleotide
tgcaagcatggtcataatcaatctgtgggt

SEQ ID NO: 225577 - DNA, 30 bp, Artificial Sequence
  Synthetic oligonucleotide
ggtactggatagtcggaaattaacttgggt

SEQ ID NO: 225578 - DNA, 30 bp, Artificial Sequence
  Synthetic oligonucleotide
cagtataataggtccatacctgacttgggt

SEQ ID NO: 225579 - DNA, 30 bp, Artificial Sequence
  Synthetic oligonucleotide
cattgaagactagtctacagtaccttgggt

SEQ ID NO: 225580 - DNA, 31 bp, Artificial Sequence
  Synthetic oligonucleotide
atcttgttctatcaatgaaaaaacgttgggt

SEQ ID NO: 225581 - DNA, 30 bp, Artificial Sequence
  Synthetic oligonucleotide
catgatactaggaaaattgaagctttgggt

SEQ ID NO: 225582 - DNA, 30 bp, Artificial Sequence
  Synthetic oligonucleotide
ggcccacgtgacatttagctatgaaatggt

SEQ ID NO: 225583 - DNA, 30 bp, Artificial Sequence
  Synthetic oligonucleotide
gtaaaaaacgtagtattaacgataaatggt

SEQ ID NO: 225584 - DNA, 30 bp, Artificial Sequence
  Synthetic oligonucleotide
ttataacagaaagatatttgtgccaatggt

SEQ ID NO: 225585 - DNA, 30 bp, Artificial Sequence
  Synthetic oligonucleotide
agtgcgtgtcaacgagagggaatcaatggt

SEQ ID NO: 225586 - DNA, 30 bp, Artificial Sequence
  Synthetic oligonucleotide
gatgattgttggcaatgagtgcaacatggt

SEQ ID NO: 225587 - DNA, 30 bp, Artificial Sequence
  Synthetic oligonucleotide
aaggctaaaggtcaaaaacgggcacatggt

SEQ ID NO: 225588 - DNA, 30 bp, Artificial Sequence
  Synthetic oligonucleotide
acgtaaaaactattcacccctcaccatggt

SEQ ID NO: 225589 - DNA, 30 bp, Artificial Sequence
  Synthetic oligonucleotide
ggtgtgcaggtctcatccgatagccatggt

SEQ ID NO: 225590 - DNA, 30 bp, Artificial Sequence
  Synthetic oligonucleotide
gggtctcgatgaatcctgagcctccatggt

SEQ ID NO: 225591 - DNA, 30 bp, Artificial Sequence
  Synthetic oligonucleotide
taatcctagagaccgtctataccgcatggt

SEQ ID NO: 225592 - DNA, 30 bp, Artificial Sequence
  Synthetic oligonucleotide
caaccctcagggactaggtttaggcatggt

SEQ ID NO: 225593 - DNA, 30 bp, Artificial Sequence
  Synthetic oligonucleotide
aagttgtatacccaataacgttaagatggt

SEQ ID NO: 225594 - DNA, 30 bp, Artificial Sequence
  Synthetic oligonucleotide
gtcaaacggctaaacgcgtaggccgatggt

SEQ ID NO: 225595 - DNA, 30 bp, Artificial Sequence
  Synthetic oligonucleotide
taattatagcccacgtgagcccgggatggt

SEQ ID NO: 225596 - DNA, 30 bp, Artificial Sequence
  Synthetic oligonucleotide
ggcagacggtatgaccacgcaactgatggt

SEQ ID NO: 225597 - DNA, 30 bp, Artificial Sequence
  Synthetic oligonucleotide
gagagtggtcaaatccaaacatctgatggt

SEQ ID NO: 225598 - DNA, 30 bp, Artificial Sequence
  Synthetic oligonucleotide
aacgaggcgacggatgggcgaggtgatggt

SEQ ID NO: 225599 - DNA, 30 bp, Artificial Sequence
  Synthetic oligonucleotide
tcgtgttctacgggtacttgttgtgatggt

SEQ ID NO: 225600 - DNA, 30 bp, Artificial Sequence
  Synthetic oligonucleotide
tcaacaagttctaccgttcgggattatggt

SEQ ID NO: 225601 - DNA, 30 bp, Artificial Sequence
  Synthetic oligonucleotide
tgctgtacgtggctgtctcatacttatggt

SEQ ID NO: 225602 - DNA, 30 bp, Artificial Sequence
  Synthetic oligonucleotide
gccggcgatccagaatctatcgcttatggt

SEQ ID NO: 225603 - DNA, 30 bp, Artificial Sequence
  Synthetic oligonucleotide
acacgatttgggtctcgcataaaaactggt

SEQ ID NO: 225604 - DNA, 30 bp, Artificial Sequence
  Synthetic oligonucleotide
ctgttagtgcggggatctaggtcaactggt

SEQ ID NO: 225605 - DNA, 30 bp, Artificial Sequence
  Synthetic oligonucleotide
tggtttctaggtatcgttttatgaactggt

SEQ ID NO: 225606 - DNA, 30 bp, Artificial Sequence
  Synthetic oligonucleotide
tggtcggttgaccaaacttgcttaactggt

SEQ ID NO: 225607 - DNA, 30 bp, Artificial Sequence
  Synthetic oligonucleotide
agcgcgtcagtataaacgaagatcactggt

SEQ ID NO: 225608 - DNA, 30 bp, Artificial Sequence
  Synthetic oligonucleotide
accgtgttgacacacacagattcgactggt

SEQ ID NO: 225609 - DNA, 30 bp, Artificial Sequence
  Synthetic oligonucleotide
acatttggcaaggcacggaacaggactggt

SEQ ID NO: 225610 - DNA, 30 bp, Artificial Sequence
  Synthetic oligonucleotide
tgatctccgggtttaacaaccactcctggt

SEQ ID NO: 225611 - DNA, 30 bp, Artificial Sequence
  Synthetic oligonucleotide
cgtgggtatagagtgggtgctggtcctggt

SEQ ID NO: 225612 - DNA, 30 bp, Artificial Sequence
  Synthetic oligonucleotide
gatggggcatccggttggcgagcagctggt

SEQ ID NO: 225613 - DNA, 30 bp, Artificial Sequence
  Synthetic oligonucleotide
ctacctaggcaaatagtgcggtgagctggt

SEQ ID NO: 225614 - DNA, 30 bp, Artificial Sequence
  Synthetic oligonucleotide
agatcctatcgtggggcgcgtggcgctggt

SEQ ID NO: 225615 - DNA, 30 bp, Artificial Sequence
  Synthetic oligonucleotide
tcgtcggtataattctgccggtcggctggt

SEQ ID NO: 225616 - DNA, 30 bp, Artificial Sequence
  Synthetic oligonucleotide
aaggatagctgagcatccaggactgctggt

SEQ ID NO: 225617 - DNA, 30 bp, Artificial Sequence
  Synthetic oligonucleotide
aatggctggtgcaaggggctacgtgctggt

SEQ ID NO: 225618 - DNA, 30 bp, Artificial Sequence
  Synthetic oligonucleotide
tcccgtagttcgttatgatgtaactctggt

SEQ ID NO: 225619 - DNA, 30 bp, Artificial Sequence
  Synthetic oligonucleotide
aggtcacagatgatgtgggctcaaagtggt

SEQ ID NO: 225620 - DNA, 30 bp, Artificial Sequence
  Synthetic oligonucleotide
tgaaaacagagatgtgtctaagaaagtggt

SEQ ID NO: 225621 - DNA, 30 bp, Artificial Sequence
  Synthetic oligonucleotide
ttccgaggcgccacgacagtaacaagtggt

SEQ ID NO: 225622 - DNA, 30 bp, Artificial Sequence
  Synthetic oligonucleotide
gcgtattaatgttaactatgcataagtggt

SEQ ID NO: 225623 - DNA, 30 bp, Artificial Sequence
  Synthetic oligonucleotide
gctcggctcatatgtgggtgttagagtggt

SEQ ID NO: 225624 - DNA, 30 bp, Artificial Sequence
  Synthetic oligonucleotide
attaaggcaaccggccctgacgggagtggt

SEQ ID NO: 225625 - DNA, 30 bp, Artificial Sequence
  Synthetic oligonucleotide
ggtatgggggtactgtcccaccatagtggt

SEQ ID NO: 225626 - DNA, 30 bp, Artificial Sequence
  Synthetic oligonucleotide
agcagctactaatgatccgcgactagtggt

SEQ ID NO: 225627 - DNA, 30 bp, Artificial Sequence
  Synthetic oligonucleotide
tctcggataaaaagggacacttttagtggt

SEQ ID NO: 225628 - DNA, 30 bp, Artificial Sequence
  Synthetic oligonucleotide
gtccgtggtgacgggtggtgcaaacgtggt

SEQ ID NO: 225629 - DNA, 30 bp, Artificial Sequence
  Synthetic oligonucleotide
aaagacgtaacttcgtaaggcaaccgtggt

SEQ ID NO: 225630 - DNA, 30 bp, Artificial Sequence
  Synthetic oligonucleotide
tcgagattggtaaggctggtccagggtggt

SEQ ID NO: 225631 - DNA, 30 bp, Artificial Sequence
  Synthetic oligonucleotide
actctggcggcgggcacaatacatggtggt

SEQ ID NO: 225632 - DNA, 30 bp, Artificial Sequence
  Synthetic oligonucleotide
gggattgcttccttaacttatactggtggt

SEQ ID NO: 225633 - DNA, 30 bp, Artificial Sequence
  Synthetic oligonucleotide
cacaacagcaatgtgaatgtaacatgtggt

SEQ ID NO: 225634 - DNA, 30 bp, Artificial Sequence
  Synthetic oligonucleotide
cgatgggatatgacaggagagcggtgtggt

SEQ ID NO: 225635 - DNA, 30 bp, Artificial Sequence
  Synthetic oligonucleotide
gcggtacaacggcgactcaaagggtgtggt

SEQ ID NO: 225636 - DNA, 30 bp, Artificial Sequence
  Synthetic oligonucleotide
atggacagcctaaggcttgaagtgtgtggt

SEQ ID NO: 225637 - DNA, 30 bp, Artificial Sequence
  Synthetic oligonucleotide
ctatgaaagaccgggcccgaggattgtggt

SEQ ID NO: 225638 - DNA, 30 bp, Artificial Sequence
  Synthetic oligonucleotide
tagcgagaaagatggtatatgagttgtggt

SEQ ID NO: 225639 - DNA, 30 bp, Artificial Sequence
  Synthetic oligonucleotide
aagtgagccgtgtttcgggggggcattggt

SEQ ID NO: 225640 - DNA, 30 bp, Artificial Sequence
  Synthetic oligonucleotide
attgcacacgcgacagggcattaacttggt

SEQ ID NO: 225641 - DNA, 31 bp, Artificial Sequence
  Synthetic oligonucleotide
gtagagttagtgattagatgctaagcttggt

SEQ ID NO: 225642 - DNA, 30 bp, Artificial Sequence
  Synthetic oligonucleotide
gagaaattgtcgtagacggggtgtcttggt

SEQ ID NO: 225643 - DNA, 30 bp, Artificial Sequence
  Synthetic oligonucleotide
gggcaaccgacaagtattgggacggttggt

SEQ ID NO: 225644 - DNA, 29 bp, Artificial Sequence
  Synthetic oligonucleotide
aaaccaagtcaattgataagggatttggt

SEQ ID NO: 225645 - DNA, 30 bp, Artificial Sequence
  Synthetic oligonucleotide
ccgggccgtacatggttcagaaactttggt

SEQ ID NO: 225646 - DNA, 30 bp, Artificial Sequence
  Synthetic oligonucleotide
acagtatgaaactgggctaaacgctttggt

SEQ ID NO: 225647 - DNA, 30 bp, Artificial Sequence
  Synthetic oligonucleotide
ttttggcaaaataagcaatttcgaaaatgt

SEQ ID NO: 225648 - DNA, 30 bp, Artificial Sequence
  Synthetic oligonucleotide
tgcaagctggagagcaggtttggaaaatgt

SEQ ID NO: 225649 - DNA, 30 bp, Artificial Sequence
  Synthetic oligonucleotide
atcactgcaatactgcaccctataaaatgt

SEQ ID NO: 225650 - DNA, 30 bp, Artificial Sequence
  Synthetic oligonucleotide
tcatgggagagtcccacaatattaaaatgt

SEQ ID NO: 225651 - DNA, 30 bp, Artificial Sequence
  Synthetic oligonucleotide
attggttaagacaccttgttgctcaaatgt

SEQ ID NO: 225652 - DNA, 30 bp, Artificial Sequence
  Synthetic oligonucleotide
caaagcgcagaactttccctgcgacaatgt

SEQ ID NO: 225653 - DNA, 30 bp, Artificial Sequence
  Synthetic oligonucleotide
atttcgatgggaaatgtattcaaccaatgt

SEQ ID NO: 225654 - DNA, 30 bp, Artificial Sequence
  Synthetic oligonucleotide
ggagtgtttgctctgtcatagaggcaatgt

SEQ ID NO: 225655 - DNA, 30 bp, Artificial Sequence
  Synthetic oligonucleotide
gctgcgtccacaattcatcccgctcaatgt

SEQ ID NO: 225656 - DNA, 30 bp, Artificial Sequence
  Synthetic oligonucleotide
tggatctaaggaatgcctatgttagaatgt

SEQ ID NO: 225657 - DNA, 30 bp, Artificial Sequence
  Synthetic oligonucleotide
cccttgtgcgacagagtcgttttcgaatgt

SEQ ID NO: 225658 - DNA, 30 bp, Artificial Sequence
  Synthetic oligonucleotide
cgtggtacccccggcaacaaatatgaatgt

SEQ ID NO: 225659 - DNA, 30 bp, Artificial Sequence
  Synthetic oligonucleotide
agcatgttcggatatgatcagcgtgaatgt

SEQ ID NO: 225660 - DNA, 30 bp, Artificial Sequence
  Synthetic oligonucleotide
ttaattcgttaatctcctcttgcgtaatgt

SEQ ID NO: 225661 - DNA, 30 bp, Artificial Sequence
  Synthetic oligonucleotide
gaggtcgcaagaaggtctgatcggtaatgt

SEQ ID NO: 225662 - DNA, 31 bp, Artificial Sequence
  Synthetic oligonucleotide
tacgactctgtggaaaagcagttgtacatgt

SEQ ID NO: 225663 - DNA, 30 bp, Artificial Sequence
  Synthetic oligonucleotide
cgaaaaccgtatagctatgtgtaaccatgt

SEQ ID NO: 225664 - DNA, 30 bp, Artificial Sequence
  Synthetic oligonucleotide
taagttaacagaaaggaatatctcccatgt

SEQ ID NO: 225665 - DNA, 30 bp, Artificial Sequence
  Synthetic oligonucleotide
ctcaccaagaggtgtcgtgggccgccatgt

SEQ ID NO: 225666 - DNA, 30 bp, Artificial Sequence
  Synthetic oligonucleotide
tgatatctaatccaggttccatggccatgt

SEQ ID NO: 225667 - DNA, 30 bp, Artificial Sequence
  Synthetic oligonucleotide
cgatgatctgcattgctttcggttccatgt

SEQ ID NO: 225668 - DNA, 30 bp, Artificial Sequence
  Synthetic oligonucleotide
tcattcagttcaacacgccggggagcatgt

SEQ ID NO: 225669 - DNA, 30 bp, Artificial Sequence
  Synthetic oligonucleotide
actgagcatccgtctcggagaaacgcatgt

SEQ ID NO: 225670 - DNA, 30 bp, Artificial Sequence
  Synthetic oligonucleotide
taacaagcggctcacccaaagccggcatgt

SEQ ID NO: 225671 - DNA, 30 bp, Artificial Sequence
  Synthetic oligonucleotide
gtcaagcattttctacccatctctgcatgt

SEQ ID NO: 225672 - DNA, 30 bp, Artificial Sequence
  Synthetic oligonucleotide
ggtagcatcaaaagcagtactgttgcatgt

SEQ ID NO: 225673 - DNA, 30 bp, Artificial Sequence
  Synthetic oligonucleotide
tacaacaagtgcttctgatacatatcatgt

SEQ ID NO: 225674 - DNA, 30 bp, Artificial Sequence
  Synthetic oligonucleotide
gggactacgccctggtcaaaagactcatgt

SEQ ID NO: 225675 - DNA, 30 bp, Artificial Sequence
  Synthetic oligonucleotide
gcgctagaacagtgttctgttgggtcatgt

SEQ ID NO: 225676 - DNA, 30 bp, Artificial Sequence
  Synthetic oligonucleotide
cagaaaaacgggatcttctagatgtcatgt

SEQ ID NO: 225677 - DNA, 30 bp, Artificial Sequence
  Synthetic oligonucleotide
gcggacacgagtcgtattggagaaagatgt

SEQ ID NO: 225678 - DNA, 30 bp, Artificial Sequence
  Synthetic oligonucleotide
atttacaaattgcgataacatggcagatgt

SEQ ID NO: 225679 - DNA, 30 bp, Artificial Sequence
  Synthetic oligonucleotide
tatggatgataaactgtttacgtcagatgt

SEQ ID NO: 225680 - DNA, 30 bp, Artificial Sequence
  Synthetic oligonucleotide
aacattcaggaagcgctcaaccagagatgt

SEQ ID NO: 225681 - DNA, 30 bp, Artificial Sequence
  Synthetic oligonucleotide
aaaacaagggccaccactttagggagatgt

SEQ ID NO: 225682 - DNA, 30 bp, Artificial Sequence
  Synthetic oligonucleotide
gtcgttgcgtagctgaggttgatgagatgt

SEQ ID NO: 225683 - DNA, 30 bp, Artificial Sequence
  Synthetic oligonucleotide
aggagccagcgtacccttttgtaccgatgt

SEQ ID NO: 225684 - DNA, 30 bp, Artificial Sequence
  Synthetic oligonucleotide
cgcggctcaggggagatcattgcgcgatgt

SEQ ID NO: 225685 - DNA, 30 bp, Artificial Sequence
  Synthetic oligonucleotide
gtggtggtaggcacctcacaatcgcgatgt

SEQ ID NO: 225686 - DNA, 30 bp, Artificial Sequence
  Synthetic oligonucleotide
ttttgaggaggcccctataaacgtcgatgt

SEQ ID NO: 225687 - DNA, 30 bp, Artificial Sequence
  Synthetic oligonucleotide
gagaccacattgatatatttacggggatgt

SEQ ID NO: 225688 - DNA, 30 bp, Artificial Sequence
  Synthetic oligonucleotide
caacgtatgacattaccaggtatgggatgt

SEQ ID NO: 225689 - DNA, 30 bp, Artificial Sequence
  Synthetic oligonucleotide
tgagcgcgcagggtacggtatgatggatgt

SEQ ID NO: 225690 - DNA, 30 bp, Artificial Sequence
  Synthetic oligonucleotide
taaagtcggaaccgttaatggcttggatgt

SEQ ID NO: 225691 - DNA, 30 bp, Artificial Sequence
  Synthetic oligonucleotide
ccctatgacggttgaccgcggtcctgatgt

SEQ ID NO: 225692 - DNA, 30 bp, Artificial Sequence
  Synthetic oligonucleotide
aatgtctctcgttagtcagtatgttgatgt

SEQ ID NO: 225693 - DNA, 31 bp, Artificial Sequence
  Synthetic oligonucleotide
ctgtaatctaagggaatggacagcaatatgt

SEQ ID NO: 225694 - DNA, 30 bp, Artificial Sequence
  Synthetic oligonucleotide
acggttaagcctgtgtgtgtgggaatatgt

SEQ ID NO: 225695 - DNA, 30 bp, Artificial Sequence
  Synthetic oligonucleotide
agggttcaagcgatgaattacctaatatgt

SEQ ID NO: 225696 - DNA, 30 bp, Artificial Sequence
  Synthetic oligonucleotide
ctgtcatgactggtcatccacatcatatgt

SEQ ID NO: 225697 - DNA, 30 bp, Artificial Sequence
  Synthetic oligonucleotide
tgagttttaggctctagatgtaggatatgt

SEQ ID NO: 225698 - DNA, 30 bp, Artificial Sequence
  Synthetic oligonucleotide
gctagagagagctacgttaaacgtatatgt

SEQ ID NO: 225699 - DNA, 30 bp, Artificial Sequence
  Synthetic oligonucleotide
agctcaacttctcggcgattgttactatgt

SEQ ID NO: 225700 - DNA, 30 bp, Artificial Sequence
  Synthetic oligonucleotide
tttccgctggggacaggcggtaacctatgt

SEQ ID NO: 225701 - DNA, 30 bp, Artificial Sequence
  Synthetic oligonucleotide
ctgaacaggcggaacgggtcacagctatgt

SEQ ID NO: 225702 - DNA, 30 bp, Artificial Sequence
  Synthetic oligonucleotide
tgtatgagtggattgggcattcagctatgt

SEQ ID NO: 225703 - DNA, 30 bp, Artificial Sequence
  Synthetic oligonucleotide
gccagaacgagttggcgagaggtcgtatgt

SEQ ID NO: 225704 - DNA, 30 bp, Artificial Sequence
  Synthetic oligonucleotide
tgagagtgaatgcttggagtcgaggtatgt

SEQ ID NO: 225705 - DNA, 30 bp, Artificial Sequence
  Synthetic oligonucleotide
tacacggaaggcccagccaacttggtatgt

SEQ ID NO: 225706 - DNA, 30 bp, Artificial Sequence
  Synthetic oligonucleotide
acgtactctgcttggaatcactgtgtatgt

SEQ ID NO: 225707 - DNA, 30 bp, Artificial Sequence
  Synthetic oligonucleotide
gtcgctatgaaatagatatgctaaaactgt

SEQ ID NO: 225708 - DNA, 30 bp, Artificial Sequence
  Synthetic oligonucleotide
gcacaacctactgtcaacagtccaaactgt

SEQ ID NO: 225709 - DNA, 30 bp, Artificial Sequence
  Synthetic oligonucleotide
gtttaataaaccactagacttttcaactgt

SEQ ID NO: 225710 - DNA, 30 bp, Artificial Sequence
  Synthetic oligonucleotide
atgccagaattttaacgaagtaataactgt

SEQ ID NO: 225711 - DNA, 30 bp, Artificial Sequence
  Synthetic oligonucleotide
agttatctaatgtaggccattatgcactgt

SEQ ID NO: 225712 - DNA, 30 bp, Artificial Sequence
  Synthetic oligonucleotide
tctttaaataacgctccagctcgcgactgt

SEQ ID NO: 225713 - DNA, 30 bp, Artificial Sequence
  Synthetic oligonucleotide
cactcgttccacaaaggcacggaggactgt

SEQ ID NO: 225714 - DNA, 30 bp, Artificial Sequence
  Synthetic oligonucleotide
gacgatcgttatgcgtggtggatggactgt

SEQ ID NO: 225715 - DNA, 30 bp, Artificial Sequence
  Synthetic oligonucleotide
gcacgatctttttactgtcgtggatactgt

SEQ ID NO: 225716 - DNA, 30 bp, Artificial Sequence
  Synthetic oligonucleotide
tcgtcgagctttctgtctagggcaacctgt

SEQ ID NO: 225717 - DNA, 30 bp, Artificial Sequence
  Synthetic oligonucleotide
gtagctgtaaaaatgcctgactgcacctgt

SEQ ID NO: 225718 - DNA, 30 bp, Artificial Sequence
  Synthetic oligonucleotide
ctttagtggccctttaaatgtgctacctgt

SEQ ID NO: 225719 - DNA, 30 bp, Artificial Sequence
  Synthetic oligonucleotide
gagaaagctgctcagttaccaacaccctgt

SEQ ID NO: 225720 - DNA, 30 bp, Artificial Sequence
  Synthetic oligonucleotide
gaagacatataaaaatcttcgacatcctgt

SEQ ID NO: 225721 - DNA, 30 bp, Artificial Sequence
  Synthetic oligonucleotide
tgtatcagaagggtttccagccgatcctgt

SEQ ID NO: 225722 - DNA, 30 bp, Artificial Sequence
  Synthetic oligonucleotide
cgatctaagacaagggtgctgtgatcctgt

SEQ ID NO: 225723 - DNA, 30 bp, Artificial Sequence
  Synthetic oligonucleotide
tcaatgtattgacaaggattgccttcctgt

SEQ ID NO: 225724 - DNA, 30 bp, Artificial Sequence
  Synthetic oligonucleotide
aaacgactttacctgctaggatcaagctgt

SEQ ID NO: 225725 - DNA, 30 bp, Artificial Sequence
  Synthetic oligonucleotide
ttgtgaggtgtcgccgactaggtaagctgt

SEQ ID NO: 225726 - DNA, 30 bp, Artificial Sequence
  Synthetic oligonucleotide
ctccagcctgatcaacacagtgtaagctgt

SEQ ID NO: 225727 - DNA, 30 bp, Artificial Sequence
  Synthetic oligonucleotide
tgtgtgccttaggatgtctccgctagctgt

SEQ ID NO: 225728 - DNA, 30 bp, Artificial Sequence
  Synthetic oligonucleotide
ttagcaggtaaggctatgcgcgcacgctgt

SEQ ID NO: 225729 - DNA, 30 bp, Artificial Sequence
  Synthetic oligonucleotide
gtcgcgataatggtaaagtctagacgctgt

SEQ ID NO: 225730 - DNA, 30 bp, Artificial Sequence
  Synthetic oligonucleotide
agaggttatggatgtccccgtctacgctgt

SEQ ID NO: 225731 - DNA, 30 bp, Artificial Sequence
  Synthetic oligonucleotide
gtttagaccgggaataaacctgcccgctgt

SEQ ID NO: 225732 - DNA, 30 bp, Artificial Sequence
  Synthetic oligonucleotide
cgtatgatcggttgcgggatcagccgctgt

SEQ ID NO: 225733 - DNA, 30 bp, Artificial Sequence
  Synthetic oligonucleotide
ccatactaagagaagttaacaatccgctgt

SEQ ID NO: 225734 - DNA, 30 bp, Artificial Sequence
  Synthetic oligonucleotide
catcagtcggtgcccaccagcatccgctgt

SEQ ID NO: 225735 - DNA, 30 bp, Artificial Sequence
  Synthetic oligonucleotide
ctcgtcaaggtcgcttgtgtctagggctgt

SEQ ID NO: 225736 - DNA, 30 bp, Artificial Sequence
  Synthetic oligonucleotide
accgtagtgggggtacgctgctttggctgt

SEQ ID NO: 225737 - DNA, 30 bp, Artificial Sequence
  Synthetic oligonucleotide
aatgagggtggcgaggtgggttttggctgt

SEQ ID NO: 225738 - DNA, 31 bp, Artificial Sequence
  Synthetic oligonucleotide
cgctgcacgcgcctaaaagtgaagatgctgt

SEQ ID NO: 225739 - DNA, 30 bp, Artificial Sequence
  Synthetic oligonucleotide
aatgaacctaaacagcccaccatttgctgt

SEQ ID NO: 225740 - DNA, 30 bp, Artificial Sequence
  Synthetic oligonucleotide
ctcggccagaaccgtttgtcactttgctgt

SEQ ID NO: 225741 - DNA, 30 bp, Artificial Sequence
  Synthetic oligonucleotide
ccaactagaagagatcggtcattttgctgt

SEQ ID NO: 225742 - DNA, 30 bp, Artificial Sequence
  Synthetic oligonucleotide
agtccgggtgtgaggtaaaggccaatctgt

SEQ ID NO: 225743 - DNA, 30 bp, Artificial Sequence
  Synthetic oligonucleotide
tcattatctttctcttatttgcgaatctgt

SEQ ID NO: 225744 - DNA, 30 bp, Artificial Sequence
  Synthetic oligonucleotide
agcctgggttccgtaaatgagttaatctgt

SEQ ID NO: 225745 - DNA, 30 bp, Artificial Sequence
  Synthetic oligonucleotide
cgctcaaatccggcaatccatgttatctgt

SEQ ID NO: 225746 - DNA, 30 bp, Artificial Sequence
  Synthetic oligonucleotide
ggcagtgtgttctacagtgatgttatctgt

SEQ ID NO: 225747 - DNA, 30 bp, Artificial Sequence
  Synthetic oligonucleotide
cctaatagggtcctagagggatgactctgt

SEQ ID NO: 225748 - DNA, 30 bp, Artificial Sequence
  Synthetic oligonucleotide
gcttttactaggagctggagacgcctctgt

SEQ ID NO: 225749 - DNA, 30 bp, Artificial Sequence
  Synthetic oligonucleotide
cgggaatcattagtgtagtagttcctctgt

SEQ ID NO: 225750 - DNA, 30 bp, Artificial Sequence
  Synthetic oligonucleotide
cacaatattcgaaacagcatagcgctctgt

SEQ ID NO: 225751 - DNA, 30 bp, Artificial Sequence
  Synthetic oligonucleotide
ctgttcagtagaacctacttcattctctgt

SEQ ID NO: 225752 - DNA, 30 bp, Artificial Sequence
  Synthetic oligonucleotide
gacacgattatgtctgtgaacaacgtctgt

SEQ ID NO: 225753 - DNA, 30 bp, Artificial Sequence
  Synthetic oligonucleotide
gcgatcaaatcaaaaggaggaaacttctgt

SEQ ID NO: 225754 - DNA, 30 bp, Artificial Sequence
  Synthetic oligonucleotide
ggcttattgtcaaagagaacgttcttctgt

SEQ ID NO: 225755 - DNA, 30 bp, Artificial Sequence
  Synthetic oligonucleotide
aacggtcttacaaacggtcacgatttctgt

SEQ ID NO: 225756 - DNA, 30 bp, Artificial Sequence
  Synthetic oligonucleotide
accatgtttgggcattcttagtatttctgt

SEQ ID NO: 225757 - DNA, 30 bp, Artificial Sequence
  Synthetic oligonucleotide
cagttcgagacagactaaaaattaaagtgt

SEQ ID NO: 225758 - DNA, 30 bp, Artificial Sequence
  Synthetic oligonucleotide
ctcgcatggatacgactaaataagaagtgt

SEQ ID NO: 225759 - DNA, 30 bp, Artificial Sequence
  Synthetic oligonucleotide
taacatccaccgaagtgtcccgagaagtgt

SEQ ID NO: 225760 - DNA, 30 bp, Artificial Sequence
  Synthetic oligonucleotide
cagcatgggttgattcgacaccgtaagtgt

SEQ ID NO: 225761 - DNA, 30 bp, Artificial Sequence
  Synthetic oligonucleotide
cacatactcggatggtttttcaaacagtgt

SEQ ID NO: 225762 - DNA, 29 bp, Artificial Sequence
  Synthetic oligonucleotide
cacaactacggtataatactccacagtgt

SEQ ID NO: 225763 - DNA, 30 bp, Artificial Sequence
  Synthetic oligonucleotide
agaatcggcctatgcccaatgggacagtgt

SEQ ID NO: 225764 - DNA, 30 bp, Artificial Sequence
  Synthetic oligonucleotide
gtatcgattcgatgaccaggctgacagtgt

SEQ ID NO: 225765 - DNA, 30 bp, Artificial Sequence
  Synthetic oligonucleotide
gtgagacggagtaacaagaatatacagtgt

SEQ ID NO: 225766 - DNA, 30 bp, Artificial Sequence
  Synthetic oligonucleotide
cgcaacacgaaggtagtttaactccagtgt

SEQ ID NO: 225767 - DNA, 30 bp, Artificial Sequence
  Synthetic oligonucleotide
cgaattggtactccttgtatagtccagtgt

SEQ ID NO: 225768 - DNA, 30 bp, Artificial Sequence
  Synthetic oligonucleotide
tgtggcggtctcgccagttcgtagcagtgt

SEQ ID NO: 225769 - DNA, 30 bp, Artificial Sequence
  Synthetic oligonucleotide
ttccgcgcaactggcgcgattatagagtgt

SEQ ID NO: 225770 - DNA, 30 bp, Artificial Sequence
  Synthetic oligonucleotide
tgagcgaaacgttcaaatatgtacgagtgt

SEQ ID NO: 225771 - DNA, 30 bp, Artificial Sequence
  Synthetic oligonucleotide
gcagtagcccaacgataccagttcgagtgt

SEQ ID NO: 225772 - DNA, 30 bp, Artificial Sequence
  Synthetic oligonucleotide
ccgttatccatcaggaggtggaaatagtgt

SEQ ID NO: 225773 - DNA, 30 bp, Artificial Sequence
  Synthetic oligonucleotide
gcccaaacaatctgaccagttagatagtgt

SEQ ID NO: 225774 - DNA, 30 bp, Artificial Sequence
  Synthetic oligonucleotide
ctgtgggagagcaaaatggagttatagtgt

SEQ ID NO: 225775 - DNA, 30 bp, Artificial Sequence
  Synthetic oligonucleotide
tagagctctttagcattgacctgctagtgt

SEQ ID NO: 225776 - DNA, 30 bp, Artificial Sequence
  Synthetic oligonucleotide
tattccgatataggaggagcgcgtacgtgt

SEQ ID NO: 225777 - DNA, 30 bp, Artificial Sequence
  Synthetic oligonucleotide
ccctatacgagaaagctccagatcccgtgt

SEQ ID NO: 225778 - DNA, 30 bp, Artificial Sequence
  Synthetic oligonucleotide
gcacgtacgggacgcgtgagagcgccgtgt

SEQ ID NO: 225779 - DNA, 30 bp, Artificial Sequence
  Synthetic oligonucleotide
catctgtaggggtcctgcgcgtaagcgtgt

SEQ ID NO: 225780 - DNA, 30 bp, Artificial Sequence
  Synthetic oligonucleotide
gttgttcttagtgagagaggactagcgtgt

SEQ ID NO: 225781 - DNA, 30 bp, Artificial Sequence
  Synthetic oligonucleotide
tacttctcgtagggtctggtaggggcgtgt

SEQ ID NO: 225782 - DNA, 30 bp, Artificial Sequence
  Synthetic oligonucleotide
ctagtggcaggagcgtatggaactgcgtgt

SEQ ID NO: 225783 - DNA, 30 bp, Artificial Sequence
  Synthetic oligonucleotide
aaattgtaagccaggcgatatagtgcgtgt

SEQ ID NO: 225784 - DNA, 30 bp, Artificial Sequence
  Synthetic oligonucleotide
gggattcgggagcctctcgcggtatcgtgt

SEQ ID NO: 225785 - DNA, 30 bp, Artificial Sequence
  Synthetic oligonucleotide
tggacatatgccgctatcgggtactcgtgt

SEQ ID NO: 225786 - DNA, 30 bp, Artificial Sequence
  Synthetic oligonucleotide
gggcatcacaacgagatccggacctcgtgt

SEQ ID NO: 225787 - DNA, 30 bp, Artificial Sequence
  Synthetic oligonucleotide
ccacaccgagacacccattaagagtcgtgt

SEQ ID NO: 225788 - DNA, 30 bp, Artificial Sequence
  Synthetic oligonucleotide
tgctataaaaaatatacagaagcgtcgtgt

SEQ ID NO: 225789 - DNA, 30 bp, Artificial Sequence
  Synthetic oligonucleotide
atagtctcatggaagtaggattcaaggtgt

SEQ ID NO: 225790 - DNA, 30 bp, Artificial Sequence
  Synthetic oligonucleotide
aacagacgtttggtgtattccagaaggtgt

SEQ ID NO: 225791 - DNA, 30 bp, Artificial Sequence
  Synthetic oligonucleotide
ggcgacaacccctattaatagggcaggtgt

SEQ ID NO: 225792 - DNA, 30 bp, Artificial Sequence
  Synthetic oligonucleotide
aggtgcaggggcaagaataggatgaggtgt

SEQ ID NO: 225793 - DNA, 30 bp, Artificial Sequence
  Synthetic oligonucleotide
gatttagaggtcaacgatctcattaggtgt

SEQ ID NO: 225794 - DNA, 30 bp, Artificial Sequence
  Synthetic oligonucleotide
gtttgcaaaatcagctgaatttaacggtgt

SEQ ID NO: 225795 - DNA, 30 bp, Artificial Sequence
  Synthetic oligonucleotide
cggtagcgatcaaacaccgttactcggtgt

SEQ ID NO: 225796 - DNA, 30 bp, Artificial Sequence
  Synthetic oligonucleotide
accatagcgtcacacggaagtggagggtgt

SEQ ID NO: 225797 - DNA, 30 bp, Artificial Sequence
  Synthetic oligonucleotide
aattgcgagtgtcatacataacgcgggtgt

SEQ ID NO: 225798 - DNA, 30 bp, Artificial Sequence
  Synthetic oligonucleotide
actcatcagaaagccttacgtgttgggtgt

SEQ ID NO: 225799 - DNA, 30 bp, Artificial Sequence
  Synthetic oligonucleotide
cgaacggtatgagggaacttatcatggtgt

SEQ ID NO: 225800 - DNA, 30 bp, Artificial Sequence
  Synthetic oligonucleotide
atttacgagattataaaggtgttttggtgt

SEQ ID NO: 225801 - DNA, 30 bp, Artificial Sequence
  Synthetic oligonucleotide
cccccccaaccaaaaggctgtagaatgtgt

SEQ ID NO: 225802 - DNA, 30 bp, Artificial Sequence
  Synthetic oligonucleotide
ccctccggacggccagatcttcgaatgtgt

SEQ ID NO: 225803 - DNA, 30 bp, Artificial Sequence
  Synthetic oligonucleotide
attgtagtggcatctctctgaataatgtgt

SEQ ID NO: 225804 - DNA, 30 bp, Artificial Sequence
  Synthetic oligonucleotide
ccggatcgaaactacataaaatacatgtgt

SEQ ID NO: 225805 - DNA, 30 bp, Artificial Sequence
  Synthetic oligonucleotide
agagacacggaaagactccgcatcatgtgt

SEQ ID NO: 225806 - DNA, 30 bp, Artificial Sequence
  Synthetic oligonucleotide
tgtgatcgttgagtaacgagatgtatgtgt

SEQ ID NO: 225807 - DNA, 30 bp, Artificial Sequence
  Synthetic oligonucleotide
aggtgtttggggatggtattgattatgtgt

SEQ ID NO: 225808 - DNA, 31 bp, Artificial Sequence
  Synthetic oligonucleotide
ccttgttccccacaagcttgtgctactgtgt

SEQ ID NO: 225809 - DNA, 30 bp, Artificial Sequence
  Synthetic oligonucleotide
ggtgtcagtcgtatgcagcggcgcctgtgt

SEQ ID NO: 225810 - DNA, 30 bp, Artificial Sequence
  Synthetic oligonucleotide
tgagcctaaagactgcggtatacagtgtgt

SEQ ID NO: 225811 - DNA, 30 bp, Artificial Sequence
  Synthetic oligonucleotide
caaccgtaacccgtccaccggagattgtgt

SEQ ID NO: 225812 - DNA, 30 bp, Artificial Sequence
  Synthetic oligonucleotide
ttggggtacagcacgcaaggtaagttgtgt

SEQ ID NO: 225813 - DNA, 30 bp, Artificial Sequence
  Synthetic oligonucleotide
tacgcatcatgggtacgaacacagttgtgt

SEQ ID NO: 225814 - DNA, 30 bp, Artificial Sequence
  Synthetic oligonucleotide
tatgtcaattggatcgaataaaggttgtgt

SEQ ID NO: 225815 - DNA, 30 bp, Artificial Sequence
  Synthetic oligonucleotide
ggcattcgacaaggtttctaactgttgtgt

SEQ ID NO: 225816 - DNA, 30 bp, Artificial Sequence
  Synthetic oligonucleotide
gtatcgtactagagcgacatcggtttgtgt

SEQ ID NO: 225817 - DNA, 30 bp, Artificial Sequence
  Synthetic oligonucleotide
tgccagataagttgattgttgagaaattgt

SEQ ID NO: 225818 - DNA, 30 bp, Artificial Sequence
  Synthetic oligonucleotide
agaagtcgaaagtaataatgaagcaattgt

SEQ ID NO: 225819 - DNA, 30 bp, Artificial Sequence
  Synthetic oligonucleotide
gcgcccatttagatatgagcatagaattgt

SEQ ID NO: 225820 - DNA, 30 bp, Artificial Sequence
  Synthetic oligonucleotide
tccgcgagtattgtcgttatcgggaattgt

SEQ ID NO: 225821 - DNA, 30 bp, Artificial Sequence
  Synthetic oligonucleotide
cacatatcattattttccatgcataattgt

SEQ ID NO: 225822 - DNA, 30 bp, Artificial Sequence
  Synthetic oligonucleotide
gagcgatgaggttccaaccctagtaattgt

SEQ ID NO: 225823 - DNA, 30 bp, Artificial Sequence
  Synthetic oligonucleotide
accaacacacaggcatctgtatgtaattgt

SEQ ID NO: 225824 - DNA, 30 bp, Artificial Sequence
  Synthetic oligonucleotide
ccaaattgatacttgagaagattccattgt

SEQ ID NO: 225825 - DNA, 30 bp, Artificial Sequence
  Synthetic oligonucleotide
gctgcgtcaacgtaaataatcactcattgt

SEQ ID NO: 225826 - DNA, 30 bp, Artificial Sequence
  Synthetic oligonucleotide
cgttgtgttgctatgtggtggtgtcattgt

SEQ ID NO: 225827 - DNA, 30 bp, Artificial Sequence
  Synthetic oligonucleotide
gtgtattaaagattagtttgacccgattgt

SEQ ID NO: 225828 - DNA, 30 bp, Artificial Sequence
  Synthetic oligonucleotide
ggacggatcgggtagtgttacagtgattgt

SEQ ID NO: 225829 - DNA, 30 bp, Artificial Sequence
  Synthetic oligonucleotide
ggcttcgactggcatctttggcgatattgt

SEQ ID NO: 225830 - DNA, 30 bp, Artificial Sequence
  Synthetic oligonucleotide
caagagcaaaaagcgccccataagtattgt

SEQ ID NO: 225831 - DNA, 30 bp, Artificial Sequence
  Synthetic oligonucleotide
agacacttattgcagtaatagcagtattgt

SEQ ID NO: 225832 - DNA, 30 bp, Artificial Sequence
  Synthetic oligonucleotide
aataggtgcggttgaggtaaaacgtattgt

SEQ ID NO: 225833 - DNA, 30 bp, Artificial Sequence
  Synthetic oligonucleotide
ctttatgtgtcggagggaactgtaacttgt

SEQ ID NO: 225834 - DNA, 30 bp, Artificial Sequence
  Synthetic oligonucleotide
ttcatgtggtatagcacattgttcacttgt

SEQ ID NO: 225835 - DNA, 30 bp, Artificial Sequence
  Synthetic oligonucleotide
aagagaaggagacgagcatttgagacttgt

SEQ ID NO: 225836 - DNA, 30 bp, Artificial Sequence
  Synthetic oligonucleotide
gatcatcttctggaaaacggaaacccttgt

SEQ ID NO: 225837 - DNA, 30 bp, Artificial Sequence
  Synthetic oligonucleotide
gacgctactgatcacttcgtcccgccttgt

SEQ ID NO: 225838 - DNA, 30 bp, Artificial Sequence
  Synthetic oligonucleotide
ttgtaaaatggcaggcccatctatccttgt

SEQ ID NO: 225839 - DNA, 30 bp, Artificial Sequence
  Synthetic oligonucleotide
cgatctaacgggcccgtgagaaaagcttgt

SEQ ID NO: 225840 - DNA, 30 bp, Artificial Sequence
  Synthetic oligonucleotide
taacaatggggctgtacacgttaagcttgt

SEQ ID NO: 225841 - DNA, 30 bp, Artificial Sequence
  Synthetic oligonucleotide
gcgcgccatggtccagcgacaatagcttgt

SEQ ID NO: 225842 - DNA, 30 bp, Artificial Sequence
  Synthetic oligonucleotide
tcagcaggtagcctctaaattctagcttgt

SEQ ID NO: 225843 - DNA, 30 bp, Artificial Sequence
  Synthetic oligonucleotide
aagggcagcacggactcatacaaatcttgt

SEQ ID NO: 225844 - DNA, 30 bp, Artificial Sequence
  Synthetic oligonucleotide
atgactccattacgagtaagagcctcttgt

SEQ ID NO: 225845 - DNA, 30 bp, Artificial Sequence
  Synthetic oligonucleotide
gtatttctgctaaggcatatactctcttgt

SEQ ID NO: 225846 - DNA, 30 bp, Artificial Sequence
  Synthetic oligonucleotide
gaggtatgtaagtagagattgcggtcttgt

SEQ ID NO: 225847 - DNA, 30 bp, Artificial Sequence
  Synthetic oligonucleotide
aagtgatggataatgaatccagtgtcttgt

SEQ ID NO: 225848 - DNA, 30 bp, Artificial Sequence
  Synthetic oligonucleotide
gtgcactgacacttggatcgattttcttgt

SEQ ID NO: 225849 - DNA, 30 bp, Artificial Sequence
  Synthetic oligonucleotide
gagtcatgcctgaggctgctcgcaagttgt

SEQ ID NO: 225850 - DNA, 30 bp, Artificial Sequence
  Synthetic oligonucleotide
catacattctgcattttactggtcagttgt

SEQ ID NO: 225851 - DNA, 30 bp, Artificial Sequence
  Synthetic oligonucleotide
cctcgatctaaacgagggaccttgagttgt

SEQ ID NO: 225852 - DNA, 30 bp, Artificial Sequence
  Synthetic oligonucleotide
tatggaagcgggtaatcgtgttgtagttgt

SEQ ID NO: 225853 - DNA, 30 bp, Artificial Sequence
  Synthetic oligonucleotide
catcgatggagcacagattcataacgttgt

SEQ ID NO: 225854 - DNA, 30 bp, Artificial Sequence
  Synthetic oligonucleotide
gggagggatatttgagtgtggcgacgttgt

SEQ ID NO: 225855 - DNA, 30 bp, Artificial Sequence
  Synthetic oligonucleotide
tttagcaggattatcaataacatacgttgt

SEQ ID NO: 225856 - DNA, 30 bp, Artificial Sequence
  Synthetic oligonucleotide
ctggtgagcacgtggactgatagccgttgt

SEQ ID NO: 225857 - DNA, 30 bp, Artificial Sequence
  Synthetic oligonucleotide
gtcatcaagaggtggattcctttccgttgt

SEQ ID NO: 225858 - DNA, 30 bp, Artificial Sequence
  Synthetic oligonucleotide
ccaatggtctgtcaacaatggtagcgttgt

SEQ ID NO: 225859 - DNA, 30 bp, Artificial Sequence
  Synthetic oligonucleotide
ggagtcacacggggccaaacattgcgttgt

SEQ ID NO: 225860 - DNA, 30 bp, Artificial Sequence
  Synthetic oligonucleotide
agtgtcgtgagcacaatacctaaaggttgt

SEQ ID NO: 225861 - DNA, 30 bp, Artificial Sequence
  Synthetic oligonucleotide
gagcaaccgcgtaccaacaaaatgggttgt

SEQ ID NO: 225862 - DNA, 30 bp, Artificial Sequence
  Synthetic oligonucleotide
aaggctttcgatgagatcatatttggttgt

SEQ ID NO: 225863 - DNA, 30 bp, Artificial Sequence
  Synthetic oligonucleotide
ggggcagatttgaattctaggtgctgttgt

SEQ ID NO: 225864 - DNA, 30 bp, Artificial Sequence
  Synthetic oligonucleotide
gaaacgggtcattttagctgagtctgttgt

SEQ ID NO: 225865 - DNA, 30 bp, Artificial Sequence
  Synthetic oligonucleotide
agtccagtgacctcgttactccagtgttgt

SEQ ID NO: 225866 - DNA, 30 bp, Artificial Sequence
  Synthetic oligonucleotide
cgtactattaggactcttaacaatatttgt

SEQ ID NO: 225867 - DNA, 30 bp, Artificial Sequence
  Synthetic oligonucleotide
gttaatcctgcggtaaaaggacgtatttgt

SEQ ID NO: 225868 - DNA, 30 bp, Artificial Sequence
  Synthetic oligonucleotide
tcccgcgaacatctaattggtgtactttgt

SEQ ID NO: 225869 - DNA, 30 bp, Artificial Sequence
  Synthetic oligonucleotide
ttcactgaacaaatcattcttcccctttgt

SEQ ID NO: 225870 - DNA, 30 bp, Artificial Sequence
  Synthetic oligonucleotide
tggcgtgttggtcagtttattgggctttgt

SEQ ID NO: 225871 - DNA, 30 bp, Artificial Sequence
  Synthetic oligonucleotide
tcgcagtgtggcgtttcgaaagaagtttgt

SEQ ID NO: 225872 - DNA, 30 bp, Artificial Sequence
  Synthetic oligonucleotide
aacgcggagacctgagagcccgaagtttgt

SEQ ID NO: 225873 - DNA, 30 bp, Artificial Sequence
  Synthetic oligonucleotide
caaaccagaagtgacgctagtatagtttgt

SEQ ID NO: 225874 - DNA, 30 bp, Artificial Sequence
  Synthetic oligonucleotide
gggaaaccctccgagttgtctagcgtttgt

SEQ ID NO: 225875 - DNA, 30 bp, Artificial Sequence
  Synthetic oligonucleotide
aacgctaatcaccctttcaaattggtttgt

SEQ ID NO: 225876 - DNA, 30 bp, Artificial Sequence
  Synthetic oligonucleotide
aggggacatgtaatactcgatgctgtttgt

SEQ ID NO: 225877 - DNA, 30 bp, Artificial Sequence
  Synthetic oligonucleotide
ggttcgcaaggcacctcgagaaggttttgt

SEQ ID NO: 225878 - DNA, 30 bp, Artificial Sequence
  Synthetic oligonucleotide
tgttcgaagtaggttccggtaccaaaaatt

SEQ ID NO: 225879 - DNA, 30 bp, Artificial Sequence
  Synthetic oligonucleotide
ggggagaacggtctaaccataagaaaaatt

SEQ ID NO: 225880 - DNA, 30 bp, Artificial Sequence
  Synthetic oligonucleotide
gtgtaaaactcgtgtgcgaatgacaaaatt

SEQ ID NO: 225881 - DNA, 30 bp, Artificial Sequence
  Synthetic oligonucleotide
aaattaggcgcgctcttgtgtgggaaaatt

SEQ ID NO: 225882 - DNA, 30 bp, Artificial Sequence
  Synthetic oligonucleotide
ccgaagggtacgagtaaccatttgaaaatt

SEQ ID NO: 225883 - DNA, 30 bp, Artificial Sequence
  Synthetic oligonucleotide
tacgggtggaagtactcttggcgtaaaatt

SEQ ID NO: 225884 - DNA, 30 bp, Artificial Sequence
  Synthetic oligonucleotide
gatatacaagagcaaacgtttcaccaaatt

SEQ ID NO: 225885 - DNA, 30 bp, Artificial Sequence
  Synthetic oligonucleotide
taccgaaaattggtatggcaattccaaatt

SEQ ID NO: 225886 - DNA, 30 bp, Artificial Sequence
  Synthetic oligonucleotide
agtggaaggccttattacggatggcaaatt

SEQ ID NO: 225887 - DNA, 30 bp, Artificial Sequence
  Synthetic oligonucleotide
ggcctacggcaattcgcgttaatgcaaatt

SEQ ID NO: 225888 - DNA, 30 bp, Artificial Sequence
  Synthetic oligonucleotide
cgacacatcagtatctgccattttcaaatt

SEQ ID NO: 225889 - DNA, 30 bp, Artificial Sequence
  Synthetic oligonucleotide
catctattaaacgggtgagtggacgaaatt

SEQ ID NO: 225890 - DNA, 30 bp, Artificial Sequence
  Synthetic oligonucleotide
tgataatcacaggcgatcaattaggaaatt

SEQ ID NO: 225891 - DNA, 30 bp, Artificial Sequence
  Synthetic oligonucleotide
ggaggtggactatggatgccggatgaaatt

SEQ ID NO: 225892 - DNA, 30 bp, Artificial Sequence
  Synthetic oligonucleotide
gcatttgcaccgtcgtatctcagtgaaatt

SEQ ID NO: 225893 - DNA, 30 bp, Artificial Sequence
  Synthetic oligonucleotide
aactcatcgatgggtaggggaggctaaatt

SEQ ID NO: 225894 - DNA, 30 bp, Artificial Sequence
  Synthetic oligonucleotide
gccaacaatcggaattaggcgccgtaaatt

SEQ ID NO: 225895 - DNA, 30 bp, Artificial Sequence
  Synthetic oligonucleotide
gatcaaccaatgtagccggactcgtaaatt

SEQ ID NO: 225896 - DNA, 30 bp, Artificial Sequence
  Synthetic oligonucleotide
cactccctacacgcctacgcccggtaaatt

SEQ ID NO: 225897 - DNA, 30 bp, Artificial Sequence
  Synthetic oligonucleotide
tcttctgtatggatctatcttgattaaatt

SEQ ID NO: 225898 - DNA, 30 bp, Artificial Sequence
  Synthetic oligonucleotide
gggacagaaagtcgccaggacatttaaatt

SEQ ID NO: 225899 - DNA, 30 bp, Artificial Sequence
  Synthetic oligonucleotide
ggaccacaagtgactgtgaggaaaacaatt

SEQ ID NO: 225900 - DNA, 30 bp, Artificial Sequence
  Synthetic oligonucleotide
cggcacaagccaatctttggcaacacaatt

SEQ ID NO: 225901 - DNA, 30 bp, Artificial Sequence
  Synthetic oligonucleotide
gtcagggttgcataacatatttacacaatt

SEQ ID NO: 225902 - DNA, 30 bp, Artificial Sequence
  Synthetic oligonucleotide
cggatggttatccctatggcaaccacaatt

SEQ ID NO: 225903 - DNA, 30 bp, Artificial Sequence
  Synthetic oligonucleotide
catggaggagcggaattcggtgagacaatt

SEQ ID NO: 225904 - DNA, 30 bp, Artificial Sequence
  Synthetic oligonucleotide
atgatagaccataatcgtaaacggacaatt

SEQ ID NO: 225905 - DNA, 30 bp, Artificial Sequence
  Synthetic oligonucleotide
cttgctaactatatgagttgctggacaatt

SEQ ID NO: 225906 - DNA, 30 bp, Artificial Sequence
  Synthetic oligonucleotide
agaaggttaatggcataaacaaacccaatt

SEQ ID NO: 225907 - DNA, 30 bp, Artificial Sequence
  Synthetic oligonucleotide
attcagccatatggagtgctctccccaatt

SEQ ID NO: 225908 - DNA, 30 bp, Artificial Sequence
  Synthetic oligonucleotide
tagggagggcttactcccttgatcccaatt

SEQ ID NO: 225909 - DNA, 30 bp, Artificial Sequence
  Synthetic oligonucleotide
atattcgattctgtacactcatagccaatt

SEQ ID NO: 225910 - DNA, 30 bp, Artificial Sequence
  Synthetic oligonucleotide
tcgatgcccaccgatgccatcggtccaatt

SEQ ID NO: 225911 - DNA, 30 bp, Artificial Sequence
  Synthetic oligonucleotide
caagtctggagctggtcctgaagagcaatt

SEQ ID NO: 225912 - DNA, 30 bp, Artificial Sequence
  Synthetic oligonucleotide
ggacgtccgcatgtacgatagttagcaatt

SEQ ID NO: 225913 - DNA, 30 bp, Artificial Sequence
  Synthetic oligonucleotide
agatacttgtcagtgttgtagcacgcaatt

SEQ ID NO: 225914 - DNA, 30 bp, Artificial Sequence
  Synthetic oligonucleotide
taatactactcggatctaaacggcgcaatt

SEQ ID NO: 225915 - DNA, 30 bp, Artificial Sequence
  Synthetic oligonucleotide
gtgagttgagagcctgcgtagacctcaatt

SEQ ID NO: 225916 - DNA, 30 bp, Artificial Sequence
  Synthetic oligonucleotide
tggtggcgtaatcatgttacatggtcaatt

SEQ ID NO: 225917 - DNA, 30 bp, Artificial Sequence
  Synthetic oligonucleotide
aagtcatctgggtcgtgttccgtttcaatt

SEQ ID NO: 225918 - DNA, 30 bp, Artificial Sequence
  Synthetic oligonucleotide
tcgggccggaactcctcacagtaaagaatt

SEQ ID NO: 225919 - DNA, 30 bp, Artificial Sequence
  Synthetic oligonucleotide
cgtggcactgtgtaacattagtgcagaatt

SEQ ID NO: 225920 - DNA, 30 bp, Artificial Sequence
  Synthetic oligonucleotide
cgtatatgatcgggctcccaaggtagaatt

SEQ ID NO: 225921 - DNA, 29 bp, Artificial Sequence
  Synthetic oligonucleotide
cgcacgaggagtctagctgtgagcgaatt

SEQ ID NO: 225922 - DNA, 30 bp, Artificial Sequence
  Synthetic oligonucleotide
ggtacaacaacagcgggccagaatcgaatt

SEQ ID NO: 225923 - DNA, 30 bp, Artificial Sequence
  Synthetic oligonucleotide
aggcgtgggggcagccaagcgcaaggaatt

SEQ ID NO: 225924 - DNA, 30 bp, Artificial Sequence
  Synthetic oligonucleotide
atagatttggtcgactcctgtggaggaatt

SEQ ID NO: 225925 - DNA, 30 bp, Artificial Sequence
  Synthetic oligonucleotide
gataatgcatgaacaaataagagcggaatt

SEQ ID NO: 225926 - DNA, 30 bp, Artificial Sequence
  Synthetic oligonucleotide
attgtcgagtaactccacgattagggaatt

SEQ ID NO: 225927 - DNA, 30 bp, Artificial Sequence
  Synthetic oligonucleotide
gacaaatcaagttaatccgggctgggaatt

SEQ ID NO: 225928 - DNA, 30 bp, Artificial Sequence
  Synthetic oligonucleotide
ttattaagtgtgcgtgaccgaagatgaatt

SEQ ID NO: 225929 - DNA, 30 bp, Artificial Sequence
  Synthetic oligonucleotide
tacatacactactgcgcgctaagatgaatt

SEQ ID NO: 225930 - DNA, 30 bp, Artificial Sequence
  Synthetic oligonucleotide
gcacgatttccttagaatcggggatgaatt

SEQ ID NO: 225931 - DNA, 31 bp, Artificial Sequence
  Synthetic oligonucleotide
ctagcatcgcgtagattaaagtgtatgaatt

SEQ ID NO: 225932 - DNA, 30 bp, Artificial Sequence
  Synthetic oligonucleotide
gaatggaaggtacggtaagacatttgaatt

SEQ ID NO: 225933 - DNA, 30 bp, Artificial Sequence
  Synthetic oligonucleotide
ataggattgtggctcccatatctgataatt

SEQ ID NO: 225934 - DNA, 30 bp, Artificial Sequence
  Synthetic oligonucleotide
cctaaccaccgtgagttgtgagctataatt

SEQ ID NO: 225935 - DNA, 30 bp, Artificial Sequence
  Synthetic oligonucleotide
cggtagagttcatatatagcgggactaatt

SEQ ID NO: 225936 - DNA, 30 bp, Artificial Sequence
  Synthetic oligonucleotide
tatcgcacgagcgttgttcgcccgctaatt

SEQ ID NO: 225937 - DNA, 30 bp, Artificial Sequence
  Synthetic oligonucleotide
gctataccagattgagccttatggctaatt

SEQ ID NO: 225938 - DNA, 30 bp, Artificial Sequence
  Synthetic oligonucleotide
gccagattttcgaaatcttaaatgctaatt

SEQ ID NO: 225939 - DNA, 30 bp, Artificial Sequence
  Synthetic oligonucleotide
tgtgtcctaataggaactagcccagtaatt

SEQ ID NO: 225940 - DNA, 30 bp, Artificial Sequence
  Synthetic oligonucleotide
gttagggagcaagggctagagccagtaatt

SEQ ID NO: 225941 - DNA, 30 bp, Artificial Sequence
  Synthetic oligonucleotide
ggcaatttaggccattttaacagagtaatt

SEQ ID NO: 225942 - DNA, 31 bp, Artificial Sequence
  Synthetic oligonucleotide
aagtcgacccgggccgatcacaggcgtaatt

SEQ ID NO: 225943 - DNA, 30 bp, Artificial Sequence
  Synthetic oligonucleotide
gttgtcagatgccgtaaaggaggcgtaatt

SEQ ID NO: 225944 - DNA, 30 bp, Artificial Sequence
  Synthetic oligonucleotide
aatgaggaccctcggagccccgtcgtaatt

SEQ ID NO: 225945 - DNA, 30 bp, Artificial Sequence
  Synthetic oligonucleotide
cacatgtgagctgaaggctgctcggtaatt

SEQ ID NO: 225946 - DNA, 30 bp, Artificial Sequence
  Synthetic oligonucleotide
ggtttaacgcaatagcctgctaatgtaatt

SEQ ID NO: 225947 - DNA, 30 bp, Artificial Sequence
  Synthetic oligonucleotide
cgttcttaatggcttaggactagcttaatt

SEQ ID NO: 225948 - DNA, 30 bp, Artificial Sequence
  Synthetic oligonucleotide
gactagtcgcctagcatagtcgagttaatt

SEQ ID NO: 225949 - DNA, 30 bp, Artificial Sequence
  Synthetic oligonucleotide
tccggcgggtccggtctcgaacttttaatt

SEQ ID NO: 225950 - DNA, 30 bp, Artificial Sequence
  Synthetic oligonucleotide
gcagggctttaatcgcgactctacaacatt

SEQ ID NO: 225951 - DNA, 30 bp, Artificial Sequence
  Synthetic oligonucleotide
tggggtagggccaacaaatttggcaacatt

SEQ ID NO: 225952 - DNA, 30 bp, Artificial Sequence
  Synthetic oligonucleotide
tcaccccatcaacctaaactagtcaacatt

SEQ ID NO: 225953 - DNA, 30 bp, Artificial Sequence
  Synthetic oligonucleotide
ttccaccgtctgactgccccgccgaacatt

SEQ ID NO: 225954 - DNA, 30 bp, Artificial Sequence
  Synthetic oligonucleotide
caggggattaacatttcgcgcaggaacatt

SEQ ID NO: 225955 - DNA, 30 bp, Artificial Sequence
  Synthetic oligonucleotide
acggactcattaaccaggggggctaacatt

SEQ ID NO: 225956 - DNA, 30 bp, Artificial Sequence
  Synthetic oligonucleotide
ctatcattgggatatgaggcgtaacacatt

SEQ ID NO: 225957 - DNA, 30 bp, Artificial Sequence
  Synthetic oligonucleotide
gcgattatgcattaagtcggacaccacatt

SEQ ID NO: 225958 - DNA, 30 bp, Artificial Sequence
  Synthetic oligonucleotide
gtttgtgataaccggctcgtaaacgacatt

SEQ ID NO: 225959 - DNA, 30 bp, Artificial Sequence
  Synthetic oligonucleotide
gcacgagggcttattgtttcttgcgacatt

SEQ ID NO: 225960 - DNA, 30 bp, Artificial Sequence
  Synthetic oligonucleotide
taaggggttcgcacgttcagcctggacatt

SEQ ID NO: 225961 - DNA, 30 bp, Artificial Sequence
  Synthetic oligonucleotide
attactgtgtccatggggcaaagtgacatt

SEQ ID NO: 225962 - DNA, 30 bp, Artificial Sequence
  Synthetic oligonucleotide
gcgagtcggtgtagtcctggcttatacatt

SEQ ID NO: 225963 - DNA, 30 bp, Artificial Sequence
  Synthetic oligonucleotide
atgaccaaaggatacaaaacaaactacatt

SEQ ID NO: 225964 - DNA, 30 bp, Artificial Sequence
  Synthetic oligonucleotide
gcagaaccgctcgtgctgagacgttacatt

SEQ ID NO: 225965 - DNA, 30 bp, Artificial Sequence
  Synthetic oligonucleotide
cgcgttcaggttatagcaaatctttacatt

SEQ ID NO: 225966 - DNA, 30 bp, Artificial Sequence
  Synthetic oligonucleotide
ttcggccacactatataaagcctaaccatt

SEQ ID NO: 225967 - DNA, 30 bp, Artificial Sequence
  Synthetic oligonucleotide
agcgccaccaagggtcccatagtcaccatt

SEQ ID NO: 225968 - DNA, 30 bp, Artificial Sequence
  Synthetic oligonucleotide
agtaaagttcgtcgtgttcctgagaccatt

SEQ ID NO: 225969 - DNA, 30 bp, Artificial Sequence
  Synthetic oligonucleotide
cagggcattcgataggtctaaccctccatt

SEQ ID NO: 225970 - DNA, 30 bp, Artificial Sequence
  Synthetic oligonucleotide
cgtagatacaatacagtgttggattccatt

SEQ ID NO: 225971 - DNA, 30 bp, Artificial Sequence
  Synthetic oligonucleotide
cccacagatcgtatccgcacatcgagcatt

SEQ ID NO: 225972 - DNA, 30 bp, Artificial Sequence
  Synthetic oligonucleotide
tgagcacgactgacgcccgggtctagcatt

SEQ ID NO: 225973 - DNA, 30 bp, Artificial Sequence
  Synthetic oligonucleotide
caatgcgtaaggtgggtggacaaacgcatt

SEQ ID NO: 225974 - DNA, 30 bp, Artificial Sequence
  Synthetic oligonucleotide
cgtagacaactctcaacagtacatcgcatt

SEQ ID NO: 225975 - DNA, 30 bp, Artificial Sequence
  Synthetic oligonucleotide
acgagcaagccacaggccttcactcgcatt

SEQ ID NO: 225976 - DNA, 30 bp, Artificial Sequence
  Synthetic oligonucleotide
ctatcggttggctctaatatacgtcgcatt

SEQ ID NO: 225977 - DNA, 30 bp, Artificial Sequence
  Synthetic oligonucleotide
tggtctttgataagcgctattcaaggcatt

SEQ ID NO: 225978 - DNA, 30 bp, Artificial Sequence
  Synthetic oligonucleotide
agggtcaaaccagcacgtacgcgcggcatt

SEQ ID NO: 225979 - DNA, 30 bp, Artificial Sequence
  Synthetic oligonucleotide
cggtataaggggcacgagatgcgcggcatt

SEQ ID NO: 225980 - DNA, 30 bp, Artificial Sequence
  Synthetic oligonucleotide
gcacgacgcatatcgaaacggggcggcatt

SEQ ID NO: 225981 - DNA, 30 bp, Artificial Sequence
  Synthetic oligonucleotide
acttcgtgtacgagacgagggttcggcatt

SEQ ID NO: 225982 - DNA, 30 bp, Artificial Sequence
  Synthetic oligonucleotide
tgattaccagaagtatgcatgcagggcatt

SEQ ID NO: 225983 - DNA, 30 bp, Artificial Sequence
  Synthetic oligonucleotide
cgaaaaatcgaagaaactcttgtgggcatt

SEQ ID NO: 225984 - DNA, 30 bp, Artificial Sequence
  Synthetic oligonucleotide
tcaagagccaaatgatatacgtttggcatt

SEQ ID NO: 225985 - DNA, 30 bp, Artificial Sequence
  Synthetic oligonucleotide
ttgtttacgggggtgttagtctaatgcatt

SEQ ID NO: 225986 - DNA, 30 bp, Artificial Sequence
  Synthetic oligonucleotide
gaatcatgctccgaacgagccccatgcatt

SEQ ID NO: 225987 - DNA, 30 bp, Artificial Sequence
  Synthetic oligonucleotide
ttgtcttataccaagtttcaatcatgcatt

SEQ ID NO: 225988 - DNA, 30 bp, Artificial Sequence
  Synthetic oligonucleotide
ggaagaaaccacgacatctctgactgcatt

SEQ ID NO: 225989 - DNA, 30 bp, Artificial Sequence
  Synthetic oligonucleotide
tacgcaaaaaagaacacaggatcctgcatt

SEQ ID NO: 225990 - DNA, 30 bp, Artificial Sequence
  Synthetic oligonucleotide
cagtcaccttgactgcagtgcgtctgcatt

SEQ ID NO: 225991 - DNA, 30 bp, Artificial Sequence
  Synthetic oligonucleotide
ggtcatttgttacagtattcgccgatcatt

SEQ ID NO: 225992 - DNA, 30 bp, Artificial Sequence
  Synthetic oligonucleotide
gagagaaaccgtaaaggtagtccgatcatt

SEQ ID NO: 225993 - DNA, 30 bp, Artificial Sequence
  Synthetic oligonucleotide
gcggcgtcgggctgctacatcaatatcatt

SEQ ID NO: 225994 - DNA, 30 bp, Artificial Sequence
  Synthetic oligonucleotide
ggccgctcgtccgaggaccttcctatcatt

SEQ ID NO: 225995 - DNA, 30 bp, Artificial Sequence
  Synthetic oligonucleotide
cctagttatctttaacctgtccgtatcatt

SEQ ID NO: 225996 - DNA, 30 bp, Artificial Sequence
  Synthetic oligonucleotide
ccgatatcatacaaatccatttgcctcatt

SEQ ID NO: 225997 - DNA, 30 bp, Artificial Sequence
  Synthetic oligonucleotide
aagactttggacgcactaatcgcgctcatt

SEQ ID NO: 225998 - DNA, 30 bp, Artificial Sequence
  Synthetic oligonucleotide
aataacgcttcctcagtgttatcgctcatt

SEQ ID NO: 225999 - DNA, 30 bp, Artificial Sequence
  Synthetic oligonucleotide
ggccgttcgcttgcggggcaagaggtcatt

SEQ ID NO: 226000 - DNA, 30 bp, Artificial Sequence
  Synthetic oligonucleotide
ccttgatttatcatttgggtggaggtcatt

SEQ ID NO: 226001 - DNA, 30 bp, Artificial Sequence
  Synthetic oligonucleotide
ggcttaataagcccaagttatatattcatt

SEQ ID NO: 226002 - DNA, 30 bp, Artificial Sequence
  Synthetic oligonucleotide
tgcatgggcggcttaactcaggcgttcatt

SEQ ID NO: 226003 - DNA, 30 bp, Artificial Sequence
  Synthetic oligonucleotide
gcgaatcgtcggaaagtgggaaatttcatt

SEQ ID NO: 226004 - DNA, 30 bp, Artificial Sequence
  Synthetic oligonucleotide
catcctagatggtcatgtgggcgtttcatt

SEQ ID NO: 226005 - DNA, 30 bp, Artificial Sequence
  Synthetic oligonucleotide
acagatttgactttttcgtgccaaaagatt

SEQ ID NO: 226006 - DNA, 30 bp, Artificial Sequence
  Synthetic oligonucleotide
cggggtctgcggccccaacccaacaagatt

SEQ ID NO: 226007 - DNA, 30 bp, Artificial Sequence
  Synthetic oligonucleotide
atccccggacaatcggcaaaaagcaagatt

SEQ ID NO: 226008 - DNA, 30 bp, Artificial Sequence
  Synthetic oligonucleotide
ttagaatattacacggtccacttcaagatt

SEQ ID NO: 226009 - DNA, 30 bp, Artificial Sequence
  Synthetic oligonucleotide
caacagggggtaccactgaatgaccagatt

SEQ ID NO: 226010 - DNA, 30 bp, Artificial Sequence
  Synthetic oligonucleotide
ccgagaggatctataaggactcatcagatt

SEQ ID NO: 226011 - DNA, 30 bp, Artificial Sequence
  Synthetic oligonucleotide
acacttctcaaactatcgattcgagagatt

SEQ ID NO: 226012 - DNA, 30 bp, Artificial Sequence
  Synthetic oligonucleotide
aacgctctggactgtatcgggcgggagatt

SEQ ID NO: 226013 - DNA, 30 bp, Artificial Sequence
  Synthetic oligonucleotide
acgatgtacgacgcacagaaacatgagatt

SEQ ID NO: 226014 - DNA, 30 bp, Artificial Sequence
  Synthetic oligonucleotide
gctcgtgcctcaacctattaggactagatt

SEQ ID NO: 226015 - DNA, 30 bp, Artificial Sequence
  Synthetic oligonucleotide
cgcgagcagattatacccacggactagatt

SEQ ID NO: 226016 - DNA, 30 bp, Artificial Sequence
  Synthetic oligonucleotide
tccggccaataggtcgttttttactagatt

SEQ ID NO: 226017 - DNA, 30 bp, Artificial Sequence
  Synthetic oligonucleotide
atacatgcggtattctgtacaggctagatt

SEQ ID NO: 226018 - DNA, 30 bp, Artificial Sequence
  Synthetic oligonucleotide
ccactacaagggtggtagattccttagatt

SEQ ID NO: 226019 - DNA, 30 bp, Artificial Sequence
  Synthetic oligonucleotide
ggcggggacacacggcgagatttttagatt

SEQ ID NO: 226020 - DNA, 30 bp, Artificial Sequence
  Synthetic oligonucleotide
ctatgaggatggacaagtaactaaacgatt

SEQ ID NO: 226021 - DNA, 30 bp, Artificial Sequence
  Synthetic oligonucleotide
cagaagctagacggtgaagccccgacgatt

SEQ ID NO: 226022 - DNA, 30 bp, Artificial Sequence
  Synthetic oligonucleotide
cggtgaggatgggggttatggtaaccgatt

SEQ ID NO: 226023 - DNA, 30 bp, Artificial Sequence
  Synthetic oligonucleotide
gctccacatagcccacctggcaacccgatt

SEQ ID NO: 226024 - DNA, 30 bp, Artificial Sequence
  Synthetic oligonucleotide
aggttggattacgtcgaccactattcgatt

SEQ ID NO: 226025 - DNA, 30 bp, Artificial Sequence
  Synthetic oligonucleotide
gaatcgattcatatcggctccacttcgatt

SEQ ID NO: 226026 - DNA, 30 bp, Artificial Sequence
  Synthetic oligonucleotide
tgacgactacgagtcgatcatcgttcgatt

SEQ ID NO: 226027 - DNA, 30 bp, Artificial Sequence
  Synthetic oligonucleotide
atgtgtccaagtattccctaattttcgatt

SEQ ID NO: 226028 - DNA, 30 bp, Artificial Sequence
  Synthetic oligonucleotide
ctcaacaaaggcatattaggaaagaggatt

SEQ ID NO: 226029 - DNA, 30 bp, Artificial Sequence
  Synthetic oligonucleotide
tgccgtttgtgtttcgggctatcgaggatt

SEQ ID NO: 226030 - DNA, 30 bp, Artificial Sequence
  Synthetic oligonucleotide
aggtggttgaaagtatgtgtgtggaggatt

SEQ ID NO: 226031 - DNA, 30 bp, Artificial Sequence
  Synthetic oligonucleotide
gtgactagagtagggcctgtgtttaggatt

SEQ ID NO: 226032 - DNA, 30 bp, Artificial Sequence
  Synthetic oligonucleotide
aagtaaaactgggatttgagattacggatt

SEQ ID NO: 226033 - DNA, 30 bp, Artificial Sequence
  Synthetic oligonucleotide
acaggtctcgtaagacctggttagcggatt

SEQ ID NO: 226034 - DNA, 30 bp, Artificial Sequence
  Synthetic oligonucleotide
gtaggccgagctcgaccgtactcgcggatt

SEQ ID NO: 226035 - DNA, 30 bp, Artificial Sequence
  Synthetic oligonucleotide
tggctaaaaatgcggtgggattaggggatt

SEQ ID NO: 226036 - DNA, 30 bp, Artificial Sequence
  Synthetic oligonucleotide
tgggggcgggaccgggtactgacatggatt

SEQ ID NO: 226037 - DNA, 30 bp, Artificial Sequence
  Synthetic oligonucleotide
cgtaacactctggattagcaaccatggatt

SEQ ID NO: 226038 - DNA, 30 bp, Artificial Sequence
  Synthetic oligonucleotide
gaatactcccgaggaagaacgatatggatt

SEQ ID NO: 226039 - DNA, 30 bp, Artificial Sequence
  Synthetic oligonucleotide
gggggacaacacataataaaggactggatt

SEQ ID NO: 226040 - DNA, 30 bp, Artificial Sequence
  Synthetic oligonucleotide
cgggaccgtcaggcagaaaggtagtggatt

SEQ ID NO: 226041 - DNA, 30 bp, Artificial Sequence
  Synthetic oligonucleotide
gagcgtaacctaacttcgaaataaatgatt

SEQ ID NO: 226042 - DNA, 30 bp, Artificial Sequence
  Synthetic oligonucleotide
gctcggcaccaaaatccaatgacaatgatt

SEQ ID NO: 226043 - DNA, 30 bp, Artificial Sequence
  Synthetic oligonucleotide
agtccaaattaagcaaatcaggatatgatt

SEQ ID NO: 226044 - DNA, 30 bp, Artificial Sequence
  Synthetic oligonucleotide
tggtgtgcacagagagccatctgtatgatt

SEQ ID NO: 226045 - DNA, 30 bp, Artificial Sequence
  Synthetic oligonucleotide
tggactgaaagggttgaaccataactgatt

SEQ ID NO: 226046 - DNA, 30 bp, Artificial Sequence
  Synthetic oligonucleotide
attagggaggtcctatggaagttcctgatt

SEQ ID NO: 226047 - DNA, 30 bp, Artificial Sequence
  Synthetic oligonucleotide
agtgcctggagcgtctgacgaccgctgatt

SEQ ID NO: 226048 - DNA, 30 bp, Artificial Sequence
  Synthetic oligonucleotide
cacgcccttgcaaaggcggaattgctgatt

SEQ ID NO: 226049 - DNA, 30 bp, Artificial Sequence
  Synthetic oligonucleotide
aacagatcacgtgcgtataacgtcgtgatt

SEQ ID NO: 226050 - DNA, 30 bp, Artificial Sequence
  Synthetic oligonucleotide
agagtcgagccccatgaattctcggtgatt

SEQ ID NO: 226051 - DNA, 30 bp, Artificial Sequence
  Synthetic oligonucleotide
gacgcatgacgaccgagcatccttgtgatt

SEQ ID NO: 226052 - DNA, 30 bp, Artificial Sequence
  Synthetic oligonucleotide
ccaagattaaaagcaaccgatatattgatt

SEQ ID NO: 226053 - DNA, 30 bp, Artificial Sequence
  Synthetic oligonucleotide
gtgcagcagcgccattgtggagacttgatt

SEQ ID NO: 226054 - DNA, 30 bp, Artificial Sequence
  Synthetic oligonucleotide
aacggctgtttcgatacttattgcttgatt

SEQ ID NO: 226055 - DNA, 30 bp, Artificial Sequence
  Synthetic oligonucleotide
tgtgtcatactccggatgataaagttgatt

SEQ ID NO: 226056 - DNA, 30 bp, Artificial Sequence
  Synthetic oligonucleotide
tggcgagggttgtagaacgttaggttgatt

SEQ ID NO: 226057 - DNA, 30 bp, Artificial Sequence
  Synthetic oligonucleotide
aaagccgactcacggacacacgggttgatt

SEQ ID NO: 226058 - DNA, 30 bp, Artificial Sequence
  Synthetic oligonucleotide
ccacaccacttcggaattgcataaaatatt

SEQ ID NO: 226059 - DNA, 30 bp, Artificial Sequence
  Synthetic oligonucleotide
aaagagggggacgacgatagtggaaatatt

SEQ ID NO: 226060 - DNA, 30 bp, Artificial Sequence
  Synthetic oligonucleotide
cataggtgctccggtggtttgatcaatatt

SEQ ID NO: 226061 - DNA, 30 bp, Artificial Sequence
  Synthetic oligonucleotide
cccgcggcagtggagaaatccctcaatatt

SEQ ID NO: 226062 - DNA, 30 bp, Artificial Sequence
  Synthetic oligonucleotide
aacaaaagcccttttctgaaataccatatt

SEQ ID NO: 226063 - DNA, 30 bp, Artificial Sequence
  Synthetic oligonucleotide
tgtagatttaaggaacttagcgcgcatatt

SEQ ID NO: 226064 - DNA, 30 bp, Artificial Sequence
  Synthetic oligonucleotide
tcaaatcttgtgccacgaaagggagatatt

SEQ ID NO: 226065 - DNA, 30 bp, Artificial Sequence
  Synthetic oligonucleotide
aggcggcaagctggaaaacccatagatatt

SEQ ID NO: 226066 - DNA, 30 bp, Artificial Sequence
  Synthetic oligonucleotide
ccgcgaatgtataggcgtgacaccgatatt

SEQ ID NO: 226067 - DNA, 30 bp, Artificial Sequence
  Synthetic oligonucleotide
tagcctacgtggcatcagacgacggatatt

SEQ ID NO: 226068 - DNA, 30 bp, Artificial Sequence
  Synthetic oligonucleotide
ccagattatgagatggggggtatggatatt

SEQ ID NO: 226069 - DNA, 30 bp, Artificial Sequence
  Synthetic oligonucleotide
cacacaacaataacgtttgaacatgatatt

SEQ ID NO: 226070 - DNA, 30 bp, Artificial Sequence
  Synthetic oligonucleotide
atagcattaatagatgttagaagtgatatt

SEQ ID NO: 226071 - DNA, 30 bp, Artificial Sequence
  Synthetic oligonucleotide
ggtagaaggggctaaaaaacagactatatt

SEQ ID NO: 226072 - DNA, 30 bp, Artificial Sequence
  Synthetic oligonucleotide
cgtaagcgatgggaattagaatactatatt

SEQ ID NO: 226073 - DNA, 30 bp, Artificial Sequence
  Synthetic oligonucleotide
acggggtctagtggataggagtactatatt

SEQ ID NO: 226074 - DNA, 30 bp, Artificial Sequence
  Synthetic oligonucleotide
gatgttagcgctccgaaaaagaggtatatt

SEQ ID NO: 226075 - DNA, 30 bp, Artificial Sequence
  Synthetic oligonucleotide
gttggacaatcagagctgcggctgtatatt

SEQ ID NO: 226076 - DNA, 30 bp, Artificial Sequence
  Synthetic oligonucleotide
gccgtggaaagcgtgtttggattttatatt

SEQ ID NO: 226077 - DNA, 30 bp, Artificial Sequence
  Synthetic oligonucleotide
ttacataaacagagcgggtcagaaactatt

SEQ ID NO: 226078 - DNA, 30 bp, Artificial Sequence
  Synthetic oligonucleotide
tggctccaagtcagatcaggcgaaactatt

SEQ ID NO: 226079 - DNA, 30 bp, Artificial Sequence
  Synthetic oligonucleotide
gcgaatgtgttaacataggttcccactatt

SEQ ID NO: 226080 - DNA, 30 bp, Artificial Sequence
  Synthetic oligonucleotide
accaggtagccggtagtgcaacagactatt

SEQ ID NO: 226081 - DNA, 30 bp, Artificial Sequence
  Synthetic oligonucleotide
aacagacagctaaattcgataccgactatt

SEQ ID NO: 226082 - DNA, 30 bp, Artificial Sequence
  Synthetic oligonucleotide
ggtgtgggcccattgaggcaccatactatt

SEQ ID NO: 226083 - DNA, 30 bp, Artificial Sequence
  Synthetic oligonucleotide
agttttatacgataggacagtacatctatt

SEQ ID NO: 226084 - DNA, 30 bp, Artificial Sequence
  Synthetic oligonucleotide
ttacgggtggtccgagttattgactctatt

SEQ ID NO: 226085 - DNA, 30 bp, Artificial Sequence
  Synthetic oligonucleotide
ttgcaccattggaaaaaagaggcgtctatt

SEQ ID NO: 226086 - DNA, 30 bp, Artificial Sequence
  Synthetic oligonucleotide
tataggccggagacgtctctgagcagtatt

SEQ ID NO: 226087 - DNA, 30 bp, Artificial Sequence
  Synthetic oligonucleotide
tcggatacagatctaatttaagtcagtatt

SEQ ID NO: 226088 - DNA, 30 bp, Artificial Sequence
  Synthetic oligonucleotide
tttcgccgttctaagttcaggaggagtatt

SEQ ID NO: 226089 - DNA, 30 bp, Artificial Sequence
  Synthetic oligonucleotide
gtggcagatcataggagccctaaacgtatt

SEQ ID NO: 226090 - DNA, 30 bp, Artificial Sequence
  Synthetic oligonucleotide
ataacgtaccgcgttagaactttccgtatt

SEQ ID NO: 226091 - DNA, 30 bp, Artificial Sequence
  Synthetic oligonucleotide
acgcgcaagcaccatctgggtcggcgtatt

SEQ ID NO: 226092 - DNA, 30 bp, Artificial Sequence
  Synthetic oligonucleotide
taacgggtttgtcgtaggagatatcgtatt

SEQ ID NO: 226093 - DNA, 30 bp, Artificial Sequence
  Synthetic oligonucleotide
ggaccagcgtggtttcaccagaaaggtatt

SEQ ID NO: 226094 - DNA, 30 bp, Artificial Sequence
  Synthetic oligonucleotide
aaagggagggggctccgaggtagaggtatt

SEQ ID NO: 226095 - DNA, 30 bp, Artificial Sequence
  Synthetic oligonucleotide
cagtggctatcgggaaccattagcggtatt

SEQ ID NO: 226096 - DNA, 30 bp, Artificial Sequence
  Synthetic oligonucleotide
tcgggtggatatgaaaggaataatggtatt

SEQ ID NO: 226097 - DNA, 30 bp, Artificial Sequence
  Synthetic oligonucleotide
caggattagcagaaatggcgcaaatgtatt

SEQ ID NO: 226098 - DNA, 30 bp, Artificial Sequence
  Synthetic oligonucleotide
gatgctaaagactcttctagattatgtatt

SEQ ID NO: 226099 - DNA, 30 bp, Artificial Sequence
  Synthetic oligonucleotide
agcgcccaatgacgcgacgaatcgtgtatt

SEQ ID NO: 226100 - DNA, 30 bp, Artificial Sequence
  Synthetic oligonucleotide
agcgggtactcgaggtaagaattttgtatt

SEQ ID NO: 226101 - DNA, 30 bp, Artificial Sequence
  Synthetic oligonucleotide
acagtgctcaaccaggattatgtaattatt

SEQ ID NO: 226102 - DNA, 30 bp, Artificial Sequence
  Synthetic oligonucleotide
taggataatgggagttgaggggtgattatt

SEQ ID NO: 226103 - DNA, 30 bp, Artificial Sequence
  Synthetic oligonucleotide
actaatctgccaagtaaaccgggccttatt

SEQ ID NO: 226104 - DNA, 30 bp, Artificial Sequence
  Synthetic oligonucleotide
acgttcgaaagagaaacccactagcttatt

SEQ ID NO: 226105 - DNA, 30 bp, Artificial Sequence
  Synthetic oligonucleotide
tagctatgtggtatctataccccagttatt

SEQ ID NO: 226106 - DNA, 30 bp, Artificial Sequence
  Synthetic oligonucleotide
agccaaaacgtccacatcttccgagttatt

SEQ ID NO: 226107 - DNA, 30 bp, Artificial Sequence
  Synthetic oligonucleotide
tggttgcaagatacgaactgccatgttatt

SEQ ID NO: 226108 - DNA, 30 bp, Artificial Sequence
  Synthetic oligonucleotide
catgggtaccggggatccatacgatttatt

SEQ ID NO: 226109 - DNA, 30 bp, Artificial Sequence
  Synthetic oligonucleotide
taagcgtgttagtaaagtaacgtatttatt

SEQ ID NO: 226110 - DNA, 30 bp, Artificial Sequence
  Synthetic oligonucleotide
aaagtctggtcgaagggatctggctttatt

SEQ ID NO: 226111 - DNA, 30 bp, Artificial Sequence
  Synthetic oligonucleotide
aagtaacgcgtaggacctggcaattttatt

SEQ ID NO: 226112 - DNA, 30 bp, Artificial Sequence
  Synthetic oligonucleotide
acacggtacgcaacgtcatcgcgttttatt

SEQ ID NO: 226113 - DNA, 30 bp, Artificial Sequence
  Synthetic oligonucleotide
tgtagtcagctagcgactcaactttttatt

SEQ ID NO: 226114 - DNA, 30 bp, Artificial Sequence
  Synthetic oligonucleotide
acgtcaaaacaatatttctagaataaactt

SEQ ID NO: 226115 - DNA, 30 bp, Artificial Sequence
  Synthetic oligonucleotide
aacgaagagggaatcgctttcgtacaactt

SEQ ID NO: 226116 - DNA, 30 bp, Artificial Sequence
  Synthetic oligonucleotide
acggccactctttaactaatagaccaactt

SEQ ID NO: 226117 - DNA, 30 bp, Artificial Sequence
  Synthetic oligonucleotide
aggggattcacgcgacgatccaaagaactt

SEQ ID NO: 226118 - DNA, 30 bp, Artificial Sequence
  Synthetic oligonucleotide
ttcctgattctaggacacagaggagaactt

SEQ ID NO: 226119 - DNA, 30 bp, Artificial Sequence
  Synthetic oligonucleotide
gtcttagctcaaaaggttaatgaggaactt

SEQ ID NO: 226120 - DNA, 30 bp, Artificial Sequence
  Synthetic oligonucleotide
cagtacagagctggttatcaagcggaactt

SEQ ID NO: 226121 - DNA, 30 bp, Artificial Sequence
  Synthetic oligonucleotide
agttagtggacgagggtctcgagataactt

SEQ ID NO: 226122 - DNA, 30 bp, Artificial Sequence
  Synthetic oligonucleotide
gtgccgtcttagtaggggatgaactaactt

SEQ ID NO: 226123 - DNA, 30 bp, Artificial Sequence
  Synthetic oligonucleotide
tgggagccctatagattcagaccctaactt

SEQ ID NO: 226124 - DNA, 30 bp, Artificial Sequence
  Synthetic oligonucleotide
cttccgaaatccgacttacgtaagtaactt

SEQ ID NO: 226125 - DNA, 30 bp, Artificial Sequence
  Synthetic oligonucleotide
agacggtgggttacttgcgttcaaacactt

SEQ ID NO: 226126 - DNA, 30 bp, Artificial Sequence
  Synthetic oligonucleotide
atcatacagtaccagaactgcccaacactt

SEQ ID NO: 226127 - DNA, 30 bp, Artificial Sequence
  Synthetic oligonucleotide
atatcagtcagttagccaaagaggacactt

SEQ ID NO: 226128 - DNA, 30 bp, Artificial Sequence
  Synthetic oligonucleotide
tactcagacgcgctcatacgtgttacactt

SEQ ID NO: 226129 - DNA, 30 bp, Artificial Sequence
  Synthetic oligonucleotide
acggctctttcagggtcaagattaccactt

SEQ ID NO: 226130 - DNA, 30 bp, Artificial Sequence
  Synthetic oligonucleotide
ttcaccaattacataacggagagcccactt

SEQ ID NO: 226131 - DNA, 30 bp, Artificial Sequence
  Synthetic oligonucleotide
aaaccgacagagacggactcgtagccactt

SEQ ID NO: 226132 - DNA, 30 bp, Artificial Sequence
  Synthetic oligonucleotide
ccatagtcgtaactgatgacgggagcactt

SEQ ID NO: 226133 - DNA, 30 bp, Artificial Sequence
  Synthetic oligonucleotide
cggtttgaagcacaagcgggagtcgcactt

SEQ ID NO: 226134 - DNA, 30 bp, Artificial Sequence
  Synthetic oligonucleotide
aacaagatatccaacagtggtcgggcactt

SEQ ID NO: 226135 - DNA, 30 bp, Artificial Sequence
  Synthetic oligonucleotide
acggtaagcatgcgtgcgctgagtgcactt

SEQ ID NO: 226136 - DNA, 30 bp, Artificial Sequence
  Synthetic oligonucleotide
attaatcggaatagcgagtttggtgcactt

SEQ ID NO: 226137 - DNA, 30 bp, Artificial Sequence
  Synthetic oligonucleotide
tatgcccctcgtcgagggattcttgcactt

SEQ ID NO: 226138 - DNA, 30 bp, Artificial Sequence
  Synthetic oligonucleotide
tcgcgcaaattcggtgagtcagcctcactt

SEQ ID NO: 226139 - DNA, 30 bp, Artificial Sequence
  Synthetic oligonucleotide
actgatatcgggttcaaagcgctctcactt

SEQ ID NO: 226140 - DNA, 30 bp, Artificial Sequence
  Synthetic oligonucleotide
gcttaactttaaacagagacctagtcactt

SEQ ID NO: 226141 - DNA, 30 bp, Artificial Sequence
  Synthetic oligonucleotide
tttcagggcaaaaattgggattcacgactt

SEQ ID NO: 226142 - DNA, 30 bp, Artificial Sequence
  Synthetic oligonucleotide
ggcaggcgcatacatgtggctacccgactt

SEQ ID NO: 226143 - DNA, 30 bp, Artificial Sequence
  Synthetic oligonucleotide
tggatatggtgaacgacgtggtagcgactt

SEQ ID NO: 226144 - DNA, 30 bp, Artificial Sequence
  Synthetic oligonucleotide
ttccgcgtagtttggatgagggctcgactt

SEQ ID NO: 226145 - DNA, 30 bp, Artificial Sequence
  Synthetic oligonucleotide
ccgggtagaaaataactacctctcggactt

SEQ ID NO: 226146 - DNA, 30 bp, Artificial Sequence
  Synthetic oligonucleotide
gggtcaaagaaggatcacaggccgggactt

SEQ ID NO: 226147 - DNA, 30 bp, Artificial Sequence
  Synthetic oligonucleotide
gtctacaaccgagcattgagcggtggactt

SEQ ID NO: 226148 - DNA, 30 bp, Artificial Sequence
  Synthetic oligonucleotide
gctgataacaaagatattttagcctgactt

SEQ ID NO: 226149 - DNA, 30 bp, Artificial Sequence
  Synthetic oligonucleotide
tagtttgccgctttagaacaaaagtgactt

SEQ ID NO: 226150 - DNA, 30 bp, Artificial Sequence
  Synthetic oligonucleotide
gcggcttaaaagacatggaataattgactt

SEQ ID NO: 226151 - DNA, 30 bp, Artificial Sequence
  Synthetic oligonucleotide
ccgctgggggaaaataatgttcgttgactt

SEQ ID NO: 226152 - DNA, 30 bp, Artificial Sequence
  Synthetic oligonucleotide
cgttgttcattgttgaacaagatttgactt

SEQ ID NO: 226153 - DNA, 30 bp, Artificial Sequence
  Synthetic oligonucleotide
ggacgctatccgatatagtacctttgactt

SEQ ID NO: 226154 - DNA, 30 bp, Artificial Sequence
  Synthetic oligonucleotide
ctccggacaatcgagtgcgtgtcaatactt

SEQ ID NO: 226155 - DNA, 30 bp, Artificial Sequence
  Synthetic oligonucleotide
atagtgaagcatcaggacaccagaatactt

SEQ ID NO: 226156 - DNA, 30 bp, Artificial Sequence
  Synthetic oligonucleotide
acggtccacctcttaccgaccgacatactt

SEQ ID NO: 226157 - DNA, 30 bp, Artificial Sequence
  Synthetic oligonucleotide
ctgccatggggcgtacgaattatcatactt

SEQ ID NO: 226158 - DNA, 31 bp, Artificial Sequence
  Synthetic oligonucleotide
gtgggataccgtaaaccggggtacgatactt

SEQ ID NO: 226159 - DNA, 30 bp, Artificial Sequence
  Synthetic oligonucleotide
cttggctacgcgctagtcaaatcgatactt

SEQ ID NO: 226160 - DNA, 30 bp, Artificial Sequence
  Synthetic oligonucleotide
ggacaaaaacgtgaactgtcataactactt

SEQ ID NO: 226161 - DNA, 30 bp, Artificial Sequence
  Synthetic oligonucleotide
atctatccgaatcatctttgaacactactt

SEQ ID NO: 226162 - DNA, 30 bp, Artificial Sequence
  Synthetic oligonucleotide
ccgacgacttgcacagctggtcccctactt

SEQ ID NO: 226163 - DNA, 30 bp, Artificial Sequence
  Synthetic oligonucleotide
tcaacgatggtatcaccacgcaagctactt

SEQ ID NO: 226164 - DNA, 30 bp, Artificial Sequence
  Synthetic oligonucleotide
gacgtcagccaggtcggggatcagctactt

SEQ ID NO: 226165 - DNA, 30 bp, Artificial Sequence
  Synthetic oligonucleotide
aatatcagcggtgaataaagcgagctactt

SEQ ID NO: 226166 - DNA, 30 bp, Artificial Sequence
  Synthetic oligonucleotide
gtccgatgagaaaactggccaatgctactt

SEQ ID NO: 226167 - DNA, 30 bp, Artificial Sequence
  Synthetic oligonucleotide
acgagagccaagggcggaagccgcgtactt

SEQ ID NO: 226168 - DNA, 30 bp, Artificial Sequence
  Synthetic oligonucleotide
cgcacgttgagggtaacagagtaggtactt

SEQ ID NO: 226169 - DNA, 30 bp, Artificial Sequence
  Synthetic oligonucleotide
agctgttgttgctacgaccccacgttactt

SEQ ID NO: 226170 - DNA, 30 bp, Artificial Sequence
  Synthetic oligonucleotide
gcgggaacagcattccgatgggcgttactt

SEQ ID NO: 226171 - DNA, 30 bp, Artificial Sequence
  Synthetic oligonucleotide
tcttgtcatggattggacatactgttactt

SEQ ID NO: 226172 - DNA, 30 bp, Artificial Sequence
  Synthetic oligonucleotide
atcgatccgacggtcggcaacactttactt

SEQ ID NO: 226173 - DNA, 30 bp, Artificial Sequence
  Synthetic oligonucleotide
agctggacatcttccatccttggtttactt

SEQ ID NO: 226174 - DNA, 30 bp, Artificial Sequence
  Synthetic oligonucleotide
gggccccaaagggttgcgtctgccaacctt

SEQ ID NO: 226175 - DNA, 30 bp, Artificial Sequence
  Synthetic oligonucleotide
gccaagccttatcctgttaaagagaacctt

SEQ ID NO: 226176 - DNA, 30 bp, Artificial Sequence
  Synthetic oligonucleotide
ggggcaatgtgtgctgagttagcgaacctt

SEQ ID NO: 226177 - DNA, 30 bp, Artificial Sequence
  Synthetic oligonucleotide
gggtggacataaggtgacgcacgacacctt

SEQ ID NO: 226178 - DNA, 30 bp, Artificial Sequence
  Synthetic oligonucleotide
aaatttgcctttacgatggagagccacctt

SEQ ID NO: 226179 - DNA, 30 bp, Artificial Sequence
  Synthetic oligonucleotide
agttactaacccctggtccacaaggacctt

SEQ ID NO: 226180 - DNA, 30 bp, Artificial Sequence
  Synthetic oligonucleotide
agagtgcgagtctccgtttgttatgacctt

SEQ ID NO: 226181 - DNA, 30 bp, Artificial Sequence
  Synthetic oligonucleotide
gagtcccgtaaaaatatcgcgggtgacctt

SEQ ID NO: 226182 - DNA, 30 bp, Artificial Sequence
  Synthetic oligonucleotide
tgatctcagtaaatctaactgtgtgacctt

SEQ ID NO: 226183 - DNA, 30 bp, Artificial Sequence
  Synthetic oligonucleotide
ttgtccagcccattgatgcgtatatacctt

SEQ ID NO: 226184 - DNA, 30 bp, Artificial Sequence
  Synthetic oligonucleotide
ctaaaatgcccttagatacctttatacctt

SEQ ID NO: 226185 - DNA, 30 bp, Artificial Sequence
  Synthetic oligonucleotide
gagcgcacaatggatctgccgacctacctt

SEQ ID NO: 226186 - DNA, 30 bp, Artificial Sequence
  Synthetic oligonucleotide
actgatggctcaacgttgcaattctacctt

SEQ ID NO: 226187 - DNA, 30 bp, Artificial Sequence
  Synthetic oligonucleotide
gcatcatttcgaggaccgagggggtacctt

SEQ ID NO: 226188 - DNA, 30 bp, Artificial Sequence
  Synthetic oligonucleotide
tcaatcatgtttgattatccttccaccctt

SEQ ID NO: 226189 - DNA, 30 bp, Artificial Sequence
  Synthetic oligonucleotide
caagagatgctataattgtttatcaccctt

SEQ ID NO: 226190 - DNA, 30 bp, Artificial Sequence
  Synthetic oligonucleotide
gcagaggatctcaagcgccatcataccctt

SEQ ID NO: 226191 - DNA, 30 bp, Artificial Sequence
  Synthetic oligonucleotide
ctagcatcactttgatttttgtgtaccctt

SEQ ID NO: 226192 - DNA, 30 bp, Artificial Sequence
  Synthetic oligonucleotide
gaacgatagcatctagcccgccgacccctt

SEQ ID NO: 226193 - DNA, 30 bp, Artificial Sequence
  Synthetic oligonucleotide
tgaaatgccgatttaaaagaatgacccctt

SEQ ID NO: 226194 - DNA, 30 bp, Artificial Sequence
  Synthetic oligonucleotide
cgcacctcaggttcaagagcgacccccctt

SEQ ID NO: 226195 - DNA, 30 bp, Artificial Sequence
  Synthetic oligonucleotide
gtcatcaagtttagtccggattcccccctt

SEQ ID NO: 226196 - DNA, 30 bp, Artificial Sequence
  Synthetic oligonucleotide
tcatctggaatgtgaccggtttagcccctt

SEQ ID NO: 226197 - DNA, 30 bp, Artificial Sequence
  Synthetic oligonucleotide
tctgtccccctcttattagaggtggccctt

SEQ ID NO: 226198 - DNA, 30 bp, Artificial Sequence
  Synthetic oligonucleotide
tgtcatgtggatcccatcgatgtatccctt

SEQ ID NO: 226199 - DNA, 30 bp, Artificial Sequence
  Synthetic oligonucleotide
aggaccgtagctcgaaataggcgctccctt

SEQ ID NO: 226200 - DNA, 30 bp, Artificial Sequence
  Synthetic oligonucleotide
ggaacttgtaacgctctcgtgggcagcctt

SEQ ID NO: 226201 - DNA, 30 bp, Artificial Sequence
  Synthetic oligonucleotide
gggagtctagcgcacggcaaacagagcctt

SEQ ID NO: 226202 - DNA, 30 bp, Artificial Sequence
  Synthetic oligonucleotide
ctcaatcgtttaactcaagttgaacgcctt

SEQ ID NO: 226203 - DNA, 30 bp, Artificial Sequence
  Synthetic oligonucleotide
agagccagtagagcgactccgttacgcctt

SEQ ID NO: 226204 - DNA, 30 bp, Artificial Sequence
  Synthetic oligonucleotide
agtcgaaaccatcttaacctggcccgcctt

SEQ ID NO: 226205 - DNA, 30 bp, Artificial Sequence
  Synthetic oligonucleotide
attaaaggccgacacagcgaggagcgcctt

SEQ ID NO: 226206 - DNA, 30 bp, Artificial Sequence
  Synthetic oligonucleotide
atggtcgtcttaccgcgctaagcaggcctt

SEQ ID NO: 226207 - DNA, 30 bp, Artificial Sequence
  Synthetic oligonucleotide
cgatccccacatccggcatccggcggcctt

SEQ ID NO: 226208 - DNA, 30 bp, Artificial Sequence
  Synthetic oligonucleotide
gcgtcggagagaacttagagagaatgcctt

SEQ ID NO: 226209 - DNA, 30 bp, Artificial Sequence
  Synthetic oligonucleotide
tataagtcggtgatcgtgtagggctgcctt

SEQ ID NO: 226210 - DNA, 30 bp, Artificial Sequence
  Synthetic oligonucleotide
cctcacctcattgactgcgggtcgtgcctt

SEQ ID NO: 226211 - DNA, 30 bp, Artificial Sequence
  Synthetic oligonucleotide
taggattgtgcggaacaacgcgggtgcctt

SEQ ID NO: 226212 - DNA, 30 bp, Artificial Sequence
  Synthetic oligonucleotide
gcatgaagacccctgcagtcagcgatcctt

SEQ ID NO: 226213 - DNA, 30 bp, Artificial Sequence
  Synthetic oligonucleotide
gtcattgtatgtcccgacttaactatcctt

SEQ ID NO: 226214 - DNA, 30 bp, Artificial Sequence
  Synthetic oligonucleotide
ccaccgactgtccaagagatcaacctcctt

SEQ ID NO: 226215 - DNA, 30 bp, Artificial Sequence
  Synthetic oligonucleotide
cagggtgctaccatgaaattccgagtcctt

SEQ ID NO: 226216 - DNA, 30 bp, Artificial Sequence
  Synthetic oligonucleotide
atcaacgtagtatacgcaatatgagtcctt

SEQ ID NO: 226217 - DNA, 30 bp, Artificial Sequence
  Synthetic oligonucleotide
cacagaacggcatcgccgaggtgagtcctt

SEQ ID NO: 226218 - DNA, 30 bp, Artificial Sequence
  Synthetic oligonucleotide
acgtgcggcccaccgcgcactctattcctt

SEQ ID NO: 226219 - DNA, 30 bp, Artificial Sequence
  Synthetic oligonucleotide
gcacgaaaccctgacattagcggcttcctt

SEQ ID NO: 226220 - DNA, 30 bp, Artificial Sequence
  Synthetic oligonucleotide
agttagaggtctccagattgtaagttcctt

SEQ ID NO: 226221 - DNA, 30 bp, Artificial Sequence
  Synthetic oligonucleotide
tctgaacgacaaaaaaatgattctttcctt

SEQ ID NO: 226222 - DNA, 30 bp, Artificial Sequence
  Synthetic oligonucleotide
cgaaaacggggtcaggctttctgtttcctt

SEQ ID NO: 226223 - DNA, 30 bp, Artificial Sequence
  Synthetic oligonucleotide
ttcgtacgaaagaacacactgtgtttcctt

SEQ ID NO: 226224 - DNA, 30 bp, Artificial Sequence
  Synthetic oligonucleotide
gcccggaagcgatggaaccgtataaagctt

SEQ ID NO: 226225 - DNA, 30 bp, Artificial Sequence
  Synthetic oligonucleotide
ggcttgcataatcatagaaaaagtaagctt

SEQ ID NO: 226226 - DNA, 30 bp, Artificial Sequence
  Synthetic oligonucleotide
cgcatgagcagacggcgtaatgttaagctt

SEQ ID NO: 226227 - DNA, 30 bp, Artificial Sequence
  Synthetic oligonucleotide
ttctgaaaaagccgatcacatagacagctt

SEQ ID NO: 226228 - DNA, 30 bp, Artificial Sequence
  Synthetic oligonucleotide
tctctttcctgtcgtgacaaactccagctt

SEQ ID NO: 226229 - DNA, 30 bp, Artificial Sequence
  Synthetic oligonucleotide
tttcggagtgagcccgttgcgatagagctt

SEQ ID NO: 226230 - DNA, 30 bp, Artificial Sequence
  Synthetic oligonucleotide
agtagtcatccatatcaatatgtagagctt

SEQ ID NO: 226231 - DNA, 30 bp, Artificial Sequence
  Synthetic oligonucleotide
cagcgccactatggattgaatctggagctt

SEQ ID NO: 226232 - DNA, 30 bp, Artificial Sequence
  Synthetic oligonucleotide
acagttcctacggtacaccccttggagctt

SEQ ID NO: 226233 - DNA, 30 bp, Artificial Sequence
  Synthetic oligonucleotide
tcggaaagaggttatagcacttttgagctt

SEQ ID NO: 226234 - DNA, 30 bp, Artificial Sequence
  Synthetic oligonucleotide
tagaatgtctgatggtatgatcaatagctt

SEQ ID NO: 226235 - DNA, 30 bp, Artificial Sequence
  Synthetic oligonucleotide
gggcattaccgccgggaaagagaatagctt

SEQ ID NO: 226236 - DNA, 30 bp, Artificial Sequence
  Synthetic oligonucleotide
gcgaagcgctaaggactagccgcatagctt

SEQ ID NO: 226237 - DNA, 30 bp, Artificial Sequence
  Synthetic oligonucleotide
aagtagaaacgttagcccagcgcatagctt

SEQ ID NO: 226238 - DNA, 30 bp, Artificial Sequence
  Synthetic oligonucleotide
gcgagcaatggcctatgtagatactagctt

SEQ ID NO: 226239 - DNA, 30 bp, Artificial Sequence
  Synthetic oligonucleotide
ttccgacggtcatcccacttgccctagctt

SEQ ID NO: 226240 - DNA, 30 bp, Artificial Sequence
  Synthetic oligonucleotide
cgtattgtcgtaacaggacaagtctagctt

SEQ ID NO: 226241 - DNA, 30 bp, Artificial Sequence
  Synthetic oligonucleotide
gatgatacaggaagcgaagcttggtagctt

SEQ ID NO: 226242 - DNA, 30 bp, Artificial Sequence
  Synthetic oligonucleotide
gaagtaagcgaccagggcactatttagctt

SEQ ID NO: 226243 - DNA, 30 bp, Artificial Sequence
  Synthetic oligonucleotide
ccgaaggactttcaggtaaattaaccgctt

SEQ ID NO: 226244 - DNA, 30 bp, Artificial Sequence
  Synthetic oligonucleotide
gttcaggttgattactgagattcaccgctt

SEQ ID NO: 226245 - DNA, 30 bp, Artificial Sequence
  Synthetic oligonucleotide
tcattgtggtgacgtgtgtgctcgccgctt

SEQ ID NO: 226246 - DNA, 30 bp, Artificial Sequence
  Synthetic oligonucleotide
gccaagaaccggtcacgcatctgagcgctt

SEQ ID NO: 226247 - DNA, 30 bp, Artificial Sequence
  Synthetic oligonucleotide
gtcggtgtttgagcacacccggaatcgctt

SEQ ID NO: 226248 - DNA, 30 bp, Artificial Sequence
  Synthetic oligonucleotide
ccgatagataaatttcaaaccacgtcgctt

SEQ ID NO: 226249 - DNA, 30 bp, Artificial Sequence
  Synthetic oligonucleotide
tcaacttcctgaccatctacattttcgctt

SEQ ID NO: 226250 - DNA, 30 bp, Artificial Sequence
  Synthetic oligonucleotide
ctaccgtcaatcttcagcatgcaaaggctt

SEQ ID NO: 226251 - DNA, 30 bp, Artificial Sequence
  Synthetic oligonucleotide
ccaattagtttcaatatgaggtgtaggctt

SEQ ID NO: 226252 - DNA, 30 bp, Artificial Sequence
  Synthetic oligonucleotide
cggtgagtttggcacacaacactccggctt

SEQ ID NO: 226253 - DNA, 30 bp, Artificial Sequence
  Synthetic oligonucleotide
gacccatgatcgttgtatggtgtccggctt

SEQ ID NO: 226254 - DNA, 30 bp, Artificial Sequence
  Synthetic oligonucleotide
ccgaagcctggcataatggataaagggctt

SEQ ID NO: 226255 - DNA, 30 bp, Artificial Sequence
  Synthetic oligonucleotide
aacgctaggatcactttagcgcaagggctt

SEQ ID NO: 226256 - DNA, 30 bp, Artificial Sequence
  Synthetic oligonucleotide
gtcattgcattcggcgtcatcttggggctt

SEQ ID NO: 226257 - DNA, 30 bp, Artificial Sequence
  Synthetic oligonucleotide
cgccagacatcaaaggtggcgcaatggctt

SEQ ID NO: 226258 - DNA, 30 bp, Artificial Sequence
  Synthetic oligonucleotide
aaaaagttgactcggcgcactggatggctt

SEQ ID NO: 226259 - DNA, 30 bp, Artificial Sequence
  Synthetic oligonucleotide
cgcaaagacatccgaaatggtctatggctt

SEQ ID NO: 226260 - DNA, 30 bp, Artificial Sequence
  Synthetic oligonucleotide
aacaaattatcgtccggaggcctctggctt

SEQ ID NO: 226261 - DNA, 30 bp, Artificial Sequence
  Synthetic oligonucleotide
gttcaacttggccagcgagggcattggctt

SEQ ID NO: 226262 - DNA, 30 bp, Artificial Sequence
  Synthetic oligonucleotide
aaggactgaagtcaaagcattggttggctt

SEQ ID NO: 226263 - DNA, 30 bp, Artificial Sequence
  Synthetic oligonucleotide
tatcccatagtgtacgcctacaaaatgctt

SEQ ID NO: 226264 - DNA, 30 bp, Artificial Sequence
  Synthetic oligonucleotide
agcgctggtatggttctaggctacatgctt

SEQ ID NO: 226265 - DNA, 30 bp, Artificial Sequence
  Synthetic oligonucleotide
ttgcgcggtatcgtgagggtaagcatgctt

SEQ ID NO: 226266 - DNA, 30 bp, Artificial Sequence
  Synthetic oligonucleotide
tgcaacgtaaacggtgacacatgcatgctt

SEQ ID NO: 226267 - DNA, 30 bp, Artificial Sequence
  Synthetic oligonucleotide
tcgggcaccttggtaatcgcccttatgctt

SEQ ID NO: 226268 - DNA, 30 bp, Artificial Sequence
  Synthetic oligonucleotide
gttaagttatccagatgaaagctcctgctt

SEQ ID NO: 226269 - DNA, 30 bp, Artificial Sequence
  Synthetic oligonucleotide
tacatgtctgtcaatactttatagctgctt

SEQ ID NO: 226270 - DNA, 30 bp, Artificial Sequence
  Synthetic oligonucleotide
gcacaaggtcgtccattcatacggctgctt

SEQ ID NO: 226271 - DNA, 30 bp, Artificial Sequence
  Synthetic oligonucleotide
tacgacgagcgtaagccgaggaaagtgctt

SEQ ID NO: 226272 - DNA, 31 bp, Artificial Sequence
  Synthetic oligonucleotide
cttatgaggccacccccaggctaaagtgctt

SEQ ID NO: 226273 - DNA, 30 bp, Artificial Sequence
  Synthetic oligonucleotide
cctcattcctggaaagggaatacagtgctt

SEQ ID NO: 226274 - DNA, 30 bp, Artificial Sequence
  Synthetic oligonucleotide
gtccgtagcgtctcggaatgtatggtgctt

SEQ ID NO: 226275 - DNA, 30 bp, Artificial Sequence
  Synthetic oligonucleotide
actcgtcatagtctcctgttacctgtgctt

SEQ ID NO: 226276 - DNA, 30 bp, Artificial Sequence
  Synthetic oligonucleotide
gagacccattagtacgctcttctcttgctt

SEQ ID NO: 226277 - DNA, 30 bp, Artificial Sequence
  Synthetic oligonucleotide
accaggggcgccgtgggatccgatttgctt

SEQ ID NO: 226278 - DNA, 30 bp, Artificial Sequence
  Synthetic oligonucleotide
taggtccagtagtacactgtatgtttgctt

SEQ ID NO: 226279 - DNA, 30 bp, Artificial Sequence
  Synthetic oligonucleotide
tgcagttgtcgacttgggatgggaaatctt

SEQ ID NO: 226280 - DNA, 30 bp, Artificial Sequence
  Synthetic oligonucleotide
cgttccttcctcaacgtctccaccaatctt

SEQ ID NO: 226281 - DNA, 30 bp, Artificial Sequence
  Synthetic oligonucleotide
gcggccgggatcatttagggttgcaatctt

SEQ ID NO: 226282 - DNA, 30 bp, Artificial Sequence
  Synthetic oligonucleotide
acaagcactactaaatctgaggtcaatctt

SEQ ID NO: 226283 - DNA, 30 bp, Artificial Sequence
  Synthetic oligonucleotide
ggcaaatactaaaatatcgttccgcatctt

SEQ ID NO: 226284 - DNA, 30 bp, Artificial Sequence
  Synthetic oligonucleotide
gtcacgtcaggggcatatacctatcatctt

SEQ ID NO: 226285 - DNA, 30 bp, Artificial Sequence
  Synthetic oligonucleotide
agctgaaaataagatttatcttttcatctt

SEQ ID NO: 226286 - DNA, 30 bp, Artificial Sequence
  Synthetic oligonucleotide
tgctgaagggccgccgtggtcccagatctt

SEQ ID NO: 226287 - DNA, 30 bp, Artificial Sequence
  Synthetic oligonucleotide
tgcctcgcatggtgaacgcaaggggatctt

SEQ ID NO: 226288 - DNA, 30 bp, Artificial Sequence
  Synthetic oligonucleotide
cttgtgagcgcgaatcgtgtcatggatctt

SEQ ID NO: 226289 - DNA, 30 bp, Artificial Sequence
  Synthetic oligonucleotide
ggcacctacaggcggaagaaccctgatctt

SEQ ID NO: 226290 - DNA, 30 bp, Artificial Sequence
  Synthetic oligonucleotide
taacgcgaccctcgccacttgcacactctt

SEQ ID NO: 226291 - DNA, 30 bp, Artificial Sequence
  Synthetic oligonucleotide
tcaagggagtgctacatcgagttcactctt

SEQ ID NO: 226292 - DNA, 30 bp, Artificial Sequence
  Synthetic oligonucleotide
tagctaagagtaggctgcaaggggactctt

SEQ ID NO: 226293 - DNA, 30 bp, Artificial Sequence
  Synthetic oligonucleotide
tgaaggcactgattggtataaaggcctctt

SEQ ID NO: 226294 - DNA, 30 bp, Artificial Sequence
  Synthetic oligonucleotide
gcgaatttatggaaaaatcccttagctctt

SEQ ID NO: 226295 - DNA, 30 bp, Artificial Sequence
  Synthetic oligonucleotide
aggtgtttaacactaggtggggtggctctt

SEQ ID NO: 226296 - DNA, 30 bp, Artificial Sequence
  Synthetic oligonucleotide
tgatacggagtgtcacagtgtgatgctctt

SEQ ID NO: 226297 - DNA, 30 bp, Artificial Sequence
  Synthetic oligonucleotide
cctggtaccacaagcgtcgtgaattctctt

SEQ ID NO: 226298 - DNA, 30 bp, Artificial Sequence
  Synthetic oligonucleotide
ttgtagaaattgtcttcatggagttctctt

SEQ ID NO: 226299 - DNA, 30 bp, Artificial Sequence
  Synthetic oligonucleotide
catctaccgtcagcgaggccacccagtctt

SEQ ID NO: 226300 - DNA, 30 bp, Artificial Sequence
  Synthetic oligonucleotide
taagtccagcatcaacctcaatgtagtctt

SEQ ID NO: 226301 - DNA, 30 bp, Artificial Sequence
  Synthetic oligonucleotide
gacacgagatgcatcagagcactacgtctt

SEQ ID NO: 226302 - DNA, 30 bp, Artificial Sequence
  Synthetic oligonucleotide
cgcctgcaattagtggccttaaagcgtctt

SEQ ID NO: 226303 - DNA, 30 bp, Artificial Sequence
  Synthetic oligonucleotide
tgttgcgtccgagtcagcgtggggcgtctt

SEQ ID NO: 226304 - DNA, 30 bp, Artificial Sequence
  Synthetic oligonucleotide
aaaagcatccggtagagatcgtaaggtctt

SEQ ID NO: 226305 - DNA, 30 bp, Artificial Sequence
  Synthetic oligonucleotide
gcgttttgaacaaaattctcaagcggtctt

SEQ ID NO: 226306 - DNA, 30 bp, Artificial Sequence
  Synthetic oligonucleotide
ttatcgagtgtactgaagtgggctggtctt

SEQ ID NO: 226307 - DNA, 30 bp, Artificial Sequence
  Synthetic oligonucleotide
acggctgagccgtccttcttggctggtctt

SEQ ID NO: 226308 - DNA, 30 bp, Artificial Sequence
  Synthetic oligonucleotide
ggtcactttggtgtgttctcgcgtggtctt

SEQ ID NO: 226309 - DNA, 30 bp, Artificial Sequence
  Synthetic oligonucleotide
aggacactgcatcagtatgtgcttggtctt

SEQ ID NO: 226310 - DNA, 30 bp, Artificial Sequence
  Synthetic oligonucleotide
ccatcttgtatcgggttgggcccctgtctt

SEQ ID NO: 226311 - DNA, 30 bp, Artificial Sequence
  Synthetic oligonucleotide
ggcaataccgtatctttgctgccctgtctt

SEQ ID NO: 226312 - DNA, 30 bp, Artificial Sequence
  Synthetic oligonucleotide
gagcaaggggggaggagcttccgctgtctt

SEQ ID NO: 226313 - DNA, 30 bp, Artificial Sequence
  Synthetic oligonucleotide
atgagggccacctgggtaggggggtgtctt

SEQ ID NO: 226314 - DNA, 30 bp, Artificial Sequence
  Synthetic oligonucleotide
gttgttggccattggattatgtggtgtctt

SEQ ID NO: 226315 - DNA, 30 bp, Artificial Sequence
  Synthetic oligonucleotide
tgacggcaaataagaattcagtattgtctt

SEQ ID NO: 226316 - DNA, 30 bp, Artificial Sequence
  Synthetic oligonucleotide
aggacagtttagatgctctggccaattctt

SEQ ID NO: 226317 - DNA, 30 bp, Artificial Sequence
  Synthetic oligonucleotide
gaaaggtcttactgctggttaataattctt

SEQ ID NO: 226318 - DNA, 30 bp, Artificial Sequence
  Synthetic oligonucleotide
aaggttaaatatagcgtactctcgattctt

SEQ ID NO: 226319 - DNA, 30 bp, Artificial Sequence
  Synthetic oligonucleotide
gacccatcagcgggtggcgcaaaacttctt

SEQ ID NO: 226320 - DNA, 30 bp, Artificial Sequence
  Synthetic oligonucleotide
actggtgtgcaacccaaaacgatgcttctt

SEQ ID NO: 226321 - DNA, 30 bp, Artificial Sequence
  Synthetic oligonucleotide
atgcataggctatctgattgactagttctt

SEQ ID NO: 226322 - DNA, 30 bp, Artificial Sequence
  Synthetic oligonucleotide
actgtgctcgtacattgggtccgcgttctt

SEQ ID NO: 226323 - DNA, 30 bp, Artificial Sequence
  Synthetic oligonucleotide
catattctcaaggggtttatggtcgttctt

SEQ ID NO: 226324 - DNA, 30 bp, Artificial Sequence
  Synthetic oligonucleotide
gggggagacacgtttctcctagaatttctt

SEQ ID NO: 226325 - DNA, 30 bp, Artificial Sequence
  Synthetic oligonucleotide
tgaagtaggtccagcatcgcgcggtttctt

SEQ ID NO: 226326 - DNA, 30 bp, Artificial Sequence
  Synthetic oligonucleotide
tcgttcgtcgtagcgtgatttgtgtttctt

SEQ ID NO: 226327 - DNA, 30 bp, Artificial Sequence
  Synthetic oligonucleotide
tgtgggatgctgtcaggactgacaaaagtt

SEQ ID NO: 226328 - DNA, 30 bp, Artificial Sequence
  Synthetic oligonucleotide
ggaggtctagtctttataagctcaaaagtt

SEQ ID NO: 226329 - DNA, 30 bp, Artificial Sequence
  Synthetic oligonucleotide
cgattagtggacatgaacgctcacaaagtt

SEQ ID NO: 226330 - DNA, 30 bp, Artificial Sequence
  Synthetic oligonucleotide
tctcatacacttgcaaccattcccaaagtt

SEQ ID NO: 226331 - DNA, 30 bp, Artificial Sequence
  Synthetic oligonucleotide
actaggatctgtctttaaagaaataaagtt

SEQ ID NO: 226332 - DNA, 30 bp, Artificial Sequence
  Synthetic oligonucleotide
gcaggtaacccgtaagggaagtctaaagtt

SEQ ID NO: 226333 - DNA, 30 bp, Artificial Sequence
  Synthetic oligonucleotide
ttgggacccaagctagatgggccccaagtt

SEQ ID NO: 226334 - DNA, 30 bp, Artificial Sequence
  Synthetic oligonucleotide
atacagcagctagattaaatcttccaagtt

SEQ ID NO: 226335 - DNA, 30 bp, Artificial Sequence
  Synthetic oligonucleotide
acggttggcaggagggtctgtgctcaagtt

SEQ ID NO: 226336 - DNA, 30 bp, Artificial Sequence
  Synthetic oligonucleotide
ttacgggggaactcggtacatatcgaagtt

SEQ ID NO: 226337 - DNA, 30 bp, Artificial Sequence
  Synthetic oligonucleotide
taagctaggcgtcaggatacattcgaagtt

SEQ ID NO: 226338 - DNA, 30 bp, Artificial Sequence
  Synthetic oligonucleotide
tagccgccactcctcgacaagaaggaagtt

SEQ ID NO: 226339 - DNA, 30 bp, Artificial Sequence
  Synthetic oligonucleotide
ctcgtctggtcattgaaaacacgtgaagtt

SEQ ID NO: 226340 - DNA, 30 bp, Artificial Sequence
  Synthetic oligonucleotide
gtgcggatttggagcatgttttactaagtt

SEQ ID NO: 226341 - DNA, 30 bp, Artificial Sequence
  Synthetic oligonucleotide
gctataaaatcgcgagaacagacctaagtt

SEQ ID NO: 226342 - DNA, 30 bp, Artificial Sequence
  Synthetic oligonucleotide
gggcggacgtacaatgcacgtcagtaagtt

SEQ ID NO: 226343 - DNA, 30 bp, Artificial Sequence
  Synthetic oligonucleotide
gtcgtgggattatttccatcagcgtaagtt

SEQ ID NO: 226344 - DNA, 30 bp, Artificial Sequence
  Synthetic oligonucleotide
ggcattttcgcataatgagggtcgtaagtt

SEQ ID NO: 226345 - DNA, 30 bp, Artificial Sequence
  Synthetic oligonucleotide
ccgctcacaatggccagcgacatgtaagtt

SEQ ID NO: 226346 - DNA, 30 bp, Artificial Sequence
  Synthetic oligonucleotide
cctctctaaggtgaattgcgcatgtaagtt

SEQ ID NO: 226347 - DNA, 30 bp, Artificial Sequence
  Synthetic oligonucleotide
agaatcacagatctacgtggtttgtaagtt

SEQ ID NO: 226348 - DNA, 30 bp, Artificial Sequence
  Synthetic oligonucleotide
atattcaggcgggctacggagacttaagtt

SEQ ID NO: 226349 - DNA, 30 bp, Artificial Sequence
  Synthetic oligonucleotide
cccagcggcacagtatgagcgggttaagtt

SEQ ID NO: 226350 - DNA, 30 bp, Artificial Sequence
  Synthetic oligonucleotide
ccactttaacatataggcgtcataacagtt

SEQ ID NO: 226351 - DNA, 30 bp, Artificial Sequence
  Synthetic oligonucleotide
gcatcgaactaaggacgtaaacatacagtt

SEQ ID NO: 226352 - DNA, 30 bp, Artificial Sequence
  Synthetic oligonucleotide
caggctttggcaaggcttctgcgtacagtt

SEQ ID NO: 226353 - DNA, 30 bp, Artificial Sequence
  Synthetic oligonucleotide
tgacgcattacatacggggtggccccagtt

SEQ ID NO: 226354 - DNA, 30 bp, Artificial Sequence
  Synthetic oligonucleotide
ttcgagaaaaaggaacggtaaggcccagtt

SEQ ID NO: 226355 - DNA, 30 bp, Artificial Sequence
  Synthetic oligonucleotide
tgttggtggttgggacaagattgcccagtt

SEQ ID NO: 226356 - DNA, 30 bp, Artificial Sequence
  Synthetic oligonucleotide
gagctcaggggcgaggatcggtgtccagtt

SEQ ID NO: 226357 - DNA, 30 bp, Artificial Sequence
  Synthetic oligonucleotide
ggcctcattcaacacgagttcattccagtt

SEQ ID NO: 226358 - DNA, 30 bp, Artificial Sequence
  Synthetic oligonucleotide
tcacattagccatcttaaacacttccagtt

SEQ ID NO: 226359 - DNA, 30 bp, Artificial Sequence
  Synthetic oligonucleotide
gccacgcaagggtagaaaagggccgcagtt

SEQ ID NO: 226360 - DNA, 30 bp, Artificial Sequence
  Synthetic oligonucleotide
ttgtggcattatgtgatcgcccgctcagtt

SEQ ID NO: 226361 - DNA, 30 bp, Artificial Sequence
  Synthetic oligonucleotide
ctaaaagtgatctcaggttccgtctcagtt

SEQ ID NO: 226362 - DNA, 30 bp, Artificial Sequence
  Synthetic oligonucleotide
aacgaaggtgttcccgttcccacgtcagtt

SEQ ID NO: 226363 - DNA, 30 bp, Artificial Sequence
  Synthetic oligonucleotide
taatatgtaaattgcgtacaaaggtcagtt

SEQ ID NO: 226364 - DNA, 30 bp, Artificial Sequence
  Synthetic oligonucleotide
taggggagtcttaaactcacagggtcagtt

SEQ ID NO: 226365 - DNA, 31 bp, Artificial Sequence
  Synthetic oligonucleotide
tgcagcatgctggtaaacaaggccttcagtt

SEQ ID NO: 226366 - DNA, 30 bp, Artificial Sequence
  Synthetic oligonucleotide
cttcagtcatgcccacgtaagttttcagtt

SEQ ID NO: 226367 - DNA, 30 bp, Artificial Sequence
  Synthetic oligonucleotide
ctgttcgcatgtaggaatccaaaaagagtt

SEQ ID NO: 226368 - DNA, 30 bp, Artificial Sequence
  Synthetic oligonucleotide
aatgtccatgaatgatgaggaaaaagagtt

SEQ ID NO: 226369 - DNA, 30 bp, Artificial Sequence
  Synthetic oligonucleotide
cggtcctggatctatgaatgtggaagagtt

SEQ ID NO: 226370 - DNA, 30 bp, Artificial Sequence
  Synthetic oligonucleotide
aaataagtactggaccatctgggcagagtt

SEQ ID NO: 226371 - DNA, 30 bp, Artificial Sequence
  Synthetic oligonucleotide
ttgagatgggccctgtctactacgagagtt

SEQ ID NO: 226372 - DNA, 30 bp, Artificial Sequence
  Synthetic oligonucleotide
gccttggctaactccctaccggggagagtt

SEQ ID NO: 226373 - DNA, 30 bp, Artificial Sequence
  Synthetic oligonucleotide
cgaaccggtggagggtcacatcatagagtt

SEQ ID NO: 226374 - DNA, 30 bp, Artificial Sequence
  Synthetic oligonucleotide
gagggaagatagctattgtagacccgagtt

SEQ ID NO: 226375 - DNA, 30 bp, Artificial Sequence
  Synthetic oligonucleotide
aagtgttagggccattcatttaagcgagtt

SEQ ID NO: 226376 - DNA, 31 bp, Artificial Sequence
  Synthetic oligonucleotide
agactggtctccacggttactaatgcgagtt

SEQ ID NO: 226377 - DNA, 30 bp, Artificial Sequence
  Synthetic oligonucleotide
ggaccaaatcagttcctcagtcctcgagtt

SEQ ID NO: 226378 - DNA, 30 bp, Artificial Sequence
  Synthetic oligonucleotide
gtcagtcgatcatccagttgtgtaggagtt

SEQ ID NO: 226379 - DNA, 30 bp, Artificial Sequence
  Synthetic oligonucleotide
gggatcaacgctttgtgataccacggagtt

SEQ ID NO: 226380 - DNA, 30 bp, Artificial Sequence
  Synthetic oligonucleotide
acgggctccgggggaggtgaccgcggagtt

SEQ ID NO: 226381 - DNA, 30 bp, Artificial Sequence
  Synthetic oligonucleotide
gtgcatgattggccatccattctcggagtt

SEQ ID NO: 226382 - DNA, 30 bp, Artificial Sequence
  Synthetic oligonucleotide
ggtatcgctctaagcatggtggcgggagtt

SEQ ID NO: 226383 - DNA, 30 bp, Artificial Sequence
  Synthetic oligonucleotide
gagtcggagttaaagccagcaaggggagtt

SEQ ID NO: 226384 - DNA, 30 bp, Artificial Sequence
  Synthetic oligonucleotide
agcgcgagggtcatcgcaagatggggagtt

SEQ ID NO: 226385 - DNA, 30 bp, Artificial Sequence
  Synthetic oligonucleotide
tactatgacataaagggggaggtgggagtt

SEQ ID NO: 226386 - DNA, 30 bp, Artificial Sequence
  Synthetic oligonucleotide
gtcacacctgtttgagaacagcatggagtt

SEQ ID NO: 226387 - DNA, 30 bp, Artificial Sequence
  Synthetic oligonucleotide
taggtttcgcatatgagagatggatgagtt

SEQ ID NO: 226388 - DNA, 30 bp, Artificial Sequence
  Synthetic oligonucleotide
tacaggcacggctcaccactcatatgagtt

SEQ ID NO: 226389 - DNA, 30 bp, Artificial Sequence
  Synthetic oligonucleotide
ctgaccgcttacgggatttgtgtatgagtt

SEQ ID NO: 226390 - DNA, 30 bp, Artificial Sequence
  Synthetic oligonucleotide
ataaacccttaacttgcgacatactgagtt

SEQ ID NO: 226391 - DNA, 30 bp, Artificial Sequence
  Synthetic oligonucleotide
cccgtcagtataacttaaacgcagtgagtt

SEQ ID NO: 226392 - DNA, 30 bp, Artificial Sequence
  Synthetic oligonucleotide
aggtgtactttgctcatcgaggtgtgagtt

SEQ ID NO: 226393 - DNA, 30 bp, Artificial Sequence
  Synthetic oligonucleotide
gtcacaaacgaacggtctatggtaatagtt

SEQ ID NO: 226394 - DNA, 30 bp, Artificial Sequence
  Synthetic oligonucleotide
tttagacgaaggtaagagaggcccatagtt

SEQ ID NO: 226395 - DNA, 30 bp, Artificial Sequence
  Synthetic oligonucleotide
agtaggttatatggatagaatatcctagtt

SEQ ID NO: 226396 - DNA, 30 bp, Artificial Sequence
  Synthetic oligonucleotide
atgtcaggagtcaatggaatcaagctagtt

SEQ ID NO: 226397 - DNA, 30 bp, Artificial Sequence
  Synthetic oligonucleotide
tagccaatccgtccactatgcgcgctagtt

SEQ ID NO: 226398 - DNA, 30 bp, Artificial Sequence
  Synthetic oligonucleotide
attataggtgacaacatgtatcgtctagtt

SEQ ID NO: 226399 - DNA, 30 bp, Artificial Sequence
  Synthetic oligonucleotide
ttgggccaaatctgaggtctaagcgtagtt

SEQ ID NO: 226400 - DNA, 30 bp, Artificial Sequence
  Synthetic oligonucleotide
ccgctagggtcgctatattgtggcgtagtt

SEQ ID NO: 226401 - DNA, 30 bp, Artificial Sequence
  Synthetic oligonucleotide
tggaacattcttagtctcaactgcgtagtt

SEQ ID NO: 226402 - DNA, 30 bp, Artificial Sequence
  Synthetic oligonucleotide
caattcaaggcaagttttgtcacggtagtt

SEQ ID NO: 226403 - DNA, 30 bp, Artificial Sequence
  Synthetic oligonucleotide
ccggtgatcggggcgttagaatgtgtagtt

SEQ ID NO: 226404 - DNA, 30 bp, Artificial Sequence
  Synthetic oligonucleotide
ggctagaatctgttgtaaacactcttagtt

SEQ ID NO: 226405 - DNA, 30 bp, Artificial Sequence
  Synthetic oligonucleotide
ccaagtaatgtgagacgggaactgttagtt

SEQ ID NO: 226406 - DNA, 30 bp, Artificial Sequence
  Synthetic oligonucleotide
aaaagtcaggaaaaaggtaaggaaaacgtt

SEQ ID NO: 226407 - DNA, 30 bp, Artificial Sequence
  Synthetic oligonucleotide
cgtattagagagagacatactataaacgtt

SEQ ID NO: 226408 - DNA, 30 bp, Artificial Sequence
  Synthetic oligonucleotide
tggtccaagtcacgtatagggagcaacgtt

SEQ ID NO: 226409 - DNA, 30 bp, Artificial Sequence
  Synthetic oligonucleotide
tataatgcatggaagacggctgagaacgtt

SEQ ID NO: 226410 - DNA, 31 bp, Artificial Sequence
  Synthetic oligonucleotide
accgagtacgtctgtaaaggtaatgaacgtt

SEQ ID NO: 226411 - DNA, 30 bp, Artificial Sequence
  Synthetic oligonucleotide
agtaaaactacactagaatgcgataacgtt

SEQ ID NO: 226412 - DNA, 30 bp, Artificial Sequence
  Synthetic oligonucleotide
aaataagagtaaggtcattacgctaacgtt

SEQ ID NO: 226413 - DNA, 30 bp, Artificial Sequence
  Synthetic oligonucleotide
tagtgttcgcaagtacgagacattaacgtt

SEQ ID NO: 226414 - DNA, 30 bp, Artificial Sequence
  Synthetic oligonucleotide
gacaaccgctttcaccgaacgagacacgtt

SEQ ID NO: 226415 - DNA, 30 bp, Artificial Sequence
  Synthetic oligonucleotide
ggatcgttacccggggtaaaagtgcacgtt

SEQ ID NO: 226416 - DNA, 30 bp, Artificial Sequence
  Synthetic oligonucleotide
gatgattcatgatcgcataatggcgacgtt

SEQ ID NO: 226417 - DNA, 30 bp, Artificial Sequence
  Synthetic oligonucleotide
ttggttgtacgatttggtcgagaggacgtt

SEQ ID NO: 226418 - DNA, 30 bp, Artificial Sequence
  Synthetic oligonucleotide
ctgctaggcatggatagtaaggcggacgtt

SEQ ID NO: 226419 - DNA, 30 bp, Artificial Sequence
  Synthetic oligonucleotide
acaccttacgccaatgtggggagggacgtt

SEQ ID NO: 226420 - DNA, 30 bp, Artificial Sequence
  Synthetic oligonucleotide
ctacttagtttgccagggacccgggacgtt

SEQ ID NO: 226421 - DNA, 30 bp, Artificial Sequence
  Synthetic oligonucleotide
cttggctataggtttactaagcgggacgtt

SEQ ID NO: 226422 - DNA, 30 bp, Artificial Sequence
  Synthetic oligonucleotide
agcactggatctgcgtttcgaattgacgtt

SEQ ID NO: 226423 - DNA, 30 bp, Artificial Sequence
  Synthetic oligonucleotide
aagcccatcttgggatacggatactacgtt

SEQ ID NO: 226424 - DNA, 30 bp, Artificial Sequence
  Synthetic oligonucleotide
ctgacaatactatcatctctcgcctacgtt

SEQ ID NO: 226425 - DNA, 30 bp, Artificial Sequence
  Synthetic oligonucleotide
atggaaattaccatcgtgctcatgtacgtt

SEQ ID NO: 226426 - DNA, 30 bp, Artificial Sequence
  Synthetic oligonucleotide
ctcggacgtactcgatttgctcattacgtt

SEQ ID NO: 226427 - DNA, 30 bp, Artificial Sequence
  Synthetic oligonucleotide
ggcgcgattgagcatcggagttgaaccgtt

SEQ ID NO: 226428 - DNA, 30 bp, Artificial Sequence
  Synthetic oligonucleotide
ccgatgacgaatgaggatatatctaccgtt

SEQ ID NO: 226429 - DNA, 30 bp, Artificial Sequence
  Synthetic oligonucleotide
gctgagaatactccgcaagagttgcccgtt

SEQ ID NO: 226430 - DNA, 30 bp, Artificial Sequence
  Synthetic oligonucleotide
cggccccagcgtgactaatgtcgggccgtt

SEQ ID NO: 226431 - DNA, 30 bp, Artificial Sequence
  Synthetic oligonucleotide
cccaagtcagtgtaaaggcgcgtatccgtt

SEQ ID NO: 226432 - DNA, 30 bp, Artificial Sequence
  Synthetic oligonucleotide
agatcgagatcctgtaaccttccaagcgtt

SEQ ID NO: 226433 - DNA, 30 bp, Artificial Sequence
  Synthetic oligonucleotide
gcctgctatattgcgaaaccgtgaagcgtt

SEQ ID NO: 226434 - DNA, 30 bp, Artificial Sequence
  Synthetic oligonucleotide
cggcctcctctgggacgagaaaccagcgtt

SEQ ID NO: 226435 - DNA, 30 bp, Artificial Sequence
  Synthetic oligonucleotide
gggatcatcgctatcaccttgggcagcgtt

SEQ ID NO: 226436 - DNA, 30 bp, Artificial Sequence
  Synthetic oligonucleotide
caagtcaattgaaattggcaatatagcgtt

SEQ ID NO: 226437 - DNA, 30 bp, Artificial Sequence
  Synthetic oligonucleotide
aaagcgcgagtcaccattagagcccgcgtt

SEQ ID NO: 226438 - DNA, 30 bp, Artificial Sequence
  Synthetic oligonucleotide
tggggcagaaaggactggtaggagcgcgtt

SEQ ID NO: 226439 - DNA, 30 bp, Artificial Sequence
  Synthetic oligonucleotide
tggtgacaacggaggctgtgacaaggcgtt

SEQ ID NO: 226440 - DNA, 30 bp, Artificial Sequence
  Synthetic oligonucleotide
agcacctatttaggaagggctcacggcgtt

SEQ ID NO: 226441 - DNA, 30 bp, Artificial Sequence
  Synthetic oligonucleotide
tctattcccaactgtcaagggatgtgcgtt

SEQ ID NO: 226442 - DNA, 30 bp, Artificial Sequence
  Synthetic oligonucleotide
caaccgcaataagggttacatcgttgcgtt

SEQ ID NO: 226443 - DNA, 30 bp, Artificial Sequence
  Synthetic oligonucleotide
gcgggggtaggtcataatgttctttgcgtt

SEQ ID NO: 226444 - DNA, 30 bp, Artificial Sequence
  Synthetic oligonucleotide
tcctttcatgagtcggcacttttcatcgtt

SEQ ID NO: 226445 - DNA, 30 bp, Artificial Sequence
  Synthetic oligonucleotide
cagtgcctatcgaaacatatagagatcgtt

SEQ ID NO: 226446 - DNA, 30 bp, Artificial Sequence
  Synthetic oligonucleotide
gatagagggaggatatgaatatcgatcgtt

SEQ ID NO: 226447 - DNA, 30 bp, Artificial Sequence
  Synthetic oligonucleotide
ccaccagattgggtagagagaatgatcgtt

SEQ ID NO: 226448 - DNA, 30 bp, Artificial Sequence
  Synthetic oligonucleotide
tgtagaaggggaaaccatctgtgcctcgtt

SEQ ID NO: 226449 - DNA, 30 bp, Artificial Sequence
  Synthetic oligonucleotide
gcgaggcagggcaacagatacaggctcgtt

SEQ ID NO: 226450 - DNA, 30 bp, Artificial Sequence
  Synthetic oligonucleotide
tgataaaatgcgggctcggcagtggtcgtt

SEQ ID NO: 226451 - DNA, 30 bp, Artificial Sequence
  Synthetic oligonucleotide
atcaacctagaaggtctagtgtaattcgtt

SEQ ID NO: 226452 - DNA, 30 bp, Artificial Sequence
  Synthetic oligonucleotide
tgaacctatcacgacaggaccttcttcgtt

SEQ ID NO: 226453 - DNA, 30 bp, Artificial Sequence
  Synthetic oligonucleotide
cgagtagaagcaaactgaaagatgttcgtt

SEQ ID NO: 226454 - DNA, 30 bp, Artificial Sequence
  Synthetic oligonucleotide
accccagacttggcgatcagtgaaaaggtt

SEQ ID NO: 226455 - DNA, 30 bp, Artificial Sequence
  Synthetic oligonucleotide
ttgattccaatttcggggttagagaaggtt

SEQ ID NO: 226456 - DNA, 30 bp, Artificial Sequence
  Synthetic oligonucleotide
gaggattgatcaaaagtggaggataaggtt

SEQ ID NO: 226457 - DNA, 30 bp, Artificial Sequence
  Synthetic oligonucleotide
cagatcatgggtgtgagtggatctaaggtt

SEQ ID NO: 226458 - DNA, 30 bp, Artificial Sequence
  Synthetic oligonucleotide
ctggagtaacgtctgcatttgcgccaggtt

SEQ ID NO: 226459 - DNA, 30 bp, Artificial Sequence
  Synthetic oligonucleotide
gcaaggaatggtaatcactacctccaggtt

SEQ ID NO: 226460 - DNA, 30 bp, Artificial Sequence
  Synthetic oligonucleotide
tgtcagcaaggacaatgcccagtccaggtt

SEQ ID NO: 226461 - DNA, 30 bp, Artificial Sequence
  Synthetic oligonucleotide
ctgagtcggatattactccgtcagcaggtt

SEQ ID NO: 226462 - DNA, 30 bp, Artificial Sequence
  Synthetic oligonucleotide
atcggttagaagagtattcatattcaggtt

SEQ ID NO: 226463 - DNA, 30 bp, Artificial Sequence
  Synthetic oligonucleotide
ttcgatctaaacgtgcaatgataagaggtt

SEQ ID NO: 226464 - DNA, 30 bp, Artificial Sequence
  Synthetic oligonucleotide
ggtgtaagtaattccattaaccccgaggtt

SEQ ID NO: 226465 - DNA, 30 bp, Artificial Sequence
  Synthetic oligonucleotide
tacggaccgatgtatatgcgggccgaggtt

SEQ ID NO: 226466 - DNA, 30 bp, Artificial Sequence
  Synthetic oligonucleotide
gcagattgaagaagataaccgccggaggtt

SEQ ID NO: 226467 - DNA, 30 bp, Artificial Sequence
  Synthetic oligonucleotide
ccaacaatatcgggggcgggtgactaggtt

SEQ ID NO: 226468 - DNA, 30 bp, Artificial Sequence
  Synthetic oligonucleotide
ttcggcggagacggtcgctcggagtaggtt

SEQ ID NO: 226469 - DNA, 30 bp, Artificial Sequence
  Synthetic oligonucleotide
tcagagaccgtcctagcatcttagtaggtt

SEQ ID NO: 226470 - DNA, 30 bp, Artificial Sequence
  Synthetic oligonucleotide
ttgaggtttgaccagtgccatgattaggtt

SEQ ID NO: 226471 - DNA, 30 bp, Artificial Sequence
  Synthetic oligonucleotide
tgctgtgcatgtcccgtcatattttaggtt

SEQ ID NO: 226472 - DNA, 30 bp, Artificial Sequence
  Synthetic oligonucleotide
atgcctcacgatccgagacaacggacggtt

SEQ ID NO: 226473 - DNA, 30 bp, Artificial Sequence
  Synthetic oligonucleotide
tgtaaaccgcctgtgttcacgagtacggtt

SEQ ID NO: 226474 - DNA, 30 bp, Artificial Sequence
  Synthetic oligonucleotide
cagtcacaagtttgacagctaataccggtt

SEQ ID NO: 226475 - DNA, 30 bp, Artificial Sequence
  Synthetic oligonucleotide
aatgaacaagatatggcatgtctaccggtt

SEQ ID NO: 226476 - DNA, 30 bp, Artificial Sequence
  Synthetic oligonucleotide
cttagttgcgaatagccgcgtatcccggtt

SEQ ID NO: 226477 - DNA, 30 bp, Artificial Sequence
  Synthetic oligonucleotide
aatgtaaacgtatgccatttgtggccggtt

SEQ ID NO: 226478 - DNA, 30 bp, Artificial Sequence
  Synthetic oligonucleotide
cagggccgtaggtttcgtactgtgccggtt

SEQ ID NO: 226479 - DNA, 30 bp, Artificial Sequence
  Synthetic oligonucleotide
ggcgttaaacggagtgccgtctatccggtt

SEQ ID NO: 226480 - DNA, 30 bp, Artificial Sequence
  Synthetic oligonucleotide
ccgaggatattatgaggcctcccagcggtt

SEQ ID NO: 226481 - DNA, 30 bp, Artificial Sequence
  Synthetic oligonucleotide
gaaaacctttcgtcaaagtcaagagcggtt

SEQ ID NO: 226482 - DNA, 30 bp, Artificial Sequence
  Synthetic oligonucleotide
caattaggtggcagcactcggtacgcggtt

SEQ ID NO: 226483 - DNA, 30 bp, Artificial Sequence
  Synthetic oligonucleotide
gcctgcacaactaaccacattagggcggtt

SEQ ID NO: 226484 - DNA, 30 bp, Artificial Sequence
  Synthetic oligonucleotide
tagatcgatccaaagcgttacactgcggtt

SEQ ID NO: 226485 - DNA, 30 bp, Artificial Sequence
  Synthetic oligonucleotide
ggtaaagtgcatggccgtcgtactgcggtt

SEQ ID NO: 226486 - DNA, 30 bp, Artificial Sequence
  Synthetic oligonucleotide
ggtaagatatacttgttcaagagtgcggtt

SEQ ID NO: 226487 - DNA, 30 bp, Artificial Sequence
  Synthetic oligonucleotide
gtatggaacatgacaaacaaattatcggtt

SEQ ID NO: 226488 - DNA, 30 bp, Artificial Sequence
  Synthetic oligonucleotide
tgtacactggaacagatcatcttatcggtt

SEQ ID NO: 226489 - DNA, 30 bp, Artificial Sequence
  Synthetic oligonucleotide
catgatcgggggcagatcagattctcggtt

SEQ ID NO: 226490 - DNA, 30 bp, Artificial Sequence
  Synthetic oligonucleotide
cctaaatccgctggatatggccggtcggtt

SEQ ID NO: 226491 - DNA, 30 bp, Artificial Sequence
  Synthetic oligonucleotide
tcgatctactcaaaaagattgataagggtt

SEQ ID NO: 226492 - DNA, 30 bp, Artificial Sequence
  Synthetic oligonucleotide
agttcatcgtaggatcgggacttaagggtt

SEQ ID NO: 226493 - DNA, 30 bp, Artificial Sequence
  Synthetic oligonucleotide
ctcagctcggctgagtacggtattagggtt

SEQ ID NO: 226494 - DNA, 30 bp, Artificial Sequence
  Synthetic oligonucleotide
cgaggagttgacccctggaaaccccgggtt

SEQ ID NO: 226495 - DNA, 30 bp, Artificial Sequence
  Synthetic oligonucleotide
ctgctattcattagctgttaaagtcgggtt

SEQ ID NO: 226496 - DNA, 30 bp, Artificial Sequence
  Synthetic oligonucleotide
cctaggtcgttgtcgacatacaaaggggtt

SEQ ID NO: 226497 - DNA, 30 bp, Artificial Sequence
  Synthetic oligonucleotide
ccacggcctcatattgcatcagatggggtt

SEQ ID NO: 226498 - DNA, 30 bp, Artificial Sequence
  Synthetic oligonucleotide
gtaagcaagccacgaatcgttcttggggtt

SEQ ID NO: 226499 - DNA, 30 bp, Artificial Sequence
  Synthetic oligonucleotide
gtgataactcagggacttgacgaatgggtt

SEQ ID NO: 226500 - DNA, 30 bp, Artificial Sequence
  Synthetic oligonucleotide
aatggatggctggaggttcagatatgggtt

SEQ ID NO: 226501 - DNA, 30 bp, Artificial Sequence
  Synthetic oligonucleotide
tctattaatgcacaacttatcgggtgggtt

SEQ ID NO: 226502 - DNA, 30 bp, Artificial Sequence
  Synthetic oligonucleotide
gggtaccgagatcgaagtaacctgtgggtt

SEQ ID NO: 226503 - DNA, 30 bp, Artificial Sequence
  Synthetic oligonucleotide
gcgcaggcgaagtacaactgatcttgggtt

SEQ ID NO: 226504 - DNA, 30 bp, Artificial Sequence
  Synthetic oligonucleotide
acgcattcgaacctactatacgaaatggtt

SEQ ID NO: 226505 - DNA, 30 bp, Artificial Sequence
  Synthetic oligonucleotide
acctaagtaccacttggaacacacatggtt

SEQ ID NO: 226506 - DNA, 30 bp, Artificial Sequence
  Synthetic oligonucleotide
acataaagccggtggtccagcgccatggtt

SEQ ID NO: 226507 - DNA, 30 bp, Artificial Sequence
  Synthetic oligonucleotide
agggaaatgccattactcgtcgagatggtt

SEQ ID NO: 226508 - DNA, 30 bp, Artificial Sequence
  Synthetic oligonucleotide
gagagttggggagtcaaatccacgatggtt

SEQ ID NO: 226509 - DNA, 31 bp, Artificial Sequence
  Synthetic oligonucleotide
gttgagcctaggctttctatcccaactggtt

SEQ ID NO: 226510 - DNA, 30 bp, Artificial Sequence
  Synthetic oligonucleotide
gactaatcattgtctgccgccctcctggtt

SEQ ID NO: 226511 - DNA, 30 bp, Artificial Sequence
  Synthetic oligonucleotide
ttcaggtgccgagtggtttggcagctggtt

SEQ ID NO: 226512 - DNA, 30 bp, Artificial Sequence
  Synthetic oligonucleotide
accacatgcccatccagtagccaagtggtt

SEQ ID NO: 226513 - DNA, 30 bp, Artificial Sequence
  Synthetic oligonucleotide
acagtacattcatccggtcctcaagtggtt

SEQ ID NO: 226514 - DNA, 30 bp, Artificial Sequence
  Synthetic oligonucleotide
cagctggatcagagtagcatccacgtggtt

SEQ ID NO: 226515 - DNA, 30 bp, Artificial Sequence
  Synthetic oligonucleotide
gtaaaggtagcggcacgaggtatcgtggtt

SEQ ID NO: 226516 - DNA, 30 bp, Artificial Sequence
  Synthetic oligonucleotide
gaggtcatatccgaaggaggtgtggtggtt

SEQ ID NO: 226517 - DNA, 30 bp, Artificial Sequence
  Synthetic oligonucleotide
gtcagtggtcctggcaagtggttggtggtt

SEQ ID NO: 226518 - DNA, 30 bp, Artificial Sequence
  Synthetic oligonucleotide
gatctagcttggttgggtacaggtgtggtt

SEQ ID NO: 226519 - DNA, 30 bp, Artificial Sequence
  Synthetic oligonucleotide
ttagggttgctagagtcgcctgcattggtt

SEQ ID NO: 226520 - DNA, 30 bp, Artificial Sequence
  Synthetic oligonucleotide
agtacgttttgcccgggccaagccttggtt

SEQ ID NO: 226521 - DNA, 30 bp, Artificial Sequence
  Synthetic oligonucleotide
gcgattggtactatatcataagccttggtt

SEQ ID NO: 226522 - DNA, 30 bp, Artificial Sequence
  Synthetic oligonucleotide
tgccaccagtatcatctcgacggcttggtt

SEQ ID NO: 226523 - DNA, 30 bp, Artificial Sequence
  Synthetic oligonucleotide
ttcttaccaggcagatctagcacgttggtt

SEQ ID NO: 226524 - DNA, 30 bp, Artificial Sequence
  Synthetic oligonucleotide
cgtaaagacgactgattagaaccgttggtt

SEQ ID NO: 226525 - DNA, 30 bp, Artificial Sequence
  Synthetic oligonucleotide
tcatcagtgagaagtcaccgtctaaatgtt

SEQ ID NO: 226526 - DNA, 31 bp, Artificial Sequence
  Synthetic oligonucleotide
agagacgagtatcgattgactcgggaatgtt

SEQ ID NO: 226527 - DNA, 30 bp, Artificial Sequence
  Synthetic oligonucleotide
ttcttaacggaacggaaatagcaacatgtt

SEQ ID NO: 226528 - DNA, 30 bp, Artificial Sequence
  Synthetic oligonucleotide
gatgtaagggaccgccttgagccacatgtt

SEQ ID NO: 226529 - DNA, 30 bp, Artificial Sequence
  Synthetic oligonucleotide
aaacagggatcctaaaactcagcacatgtt

SEQ ID NO: 226530 - DNA, 30 bp, Artificial Sequence
  Synthetic oligonucleotide
gttctccgttagcggtcgaccttacatgtt

SEQ ID NO: 226531 - DNA, 30 bp, Artificial Sequence
  Synthetic oligonucleotide
caatatctcctggcgataataagccatgtt

SEQ ID NO: 226532 - DNA, 30 bp, Artificial Sequence
  Synthetic oligonucleotide
atccgaacgctacactgttccatccatgtt

SEQ ID NO: 226533 - DNA, 30 bp, Artificial Sequence
  Synthetic oligonucleotide
tcgcgaattgtcctatttgagctgcatgtt

SEQ ID NO: 226534 - DNA, 30 bp, Artificial Sequence
  Synthetic oligonucleotide
actacagtggctcaagcttgatctcatgtt

SEQ ID NO: 226535 - DNA, 30 bp, Artificial Sequence
  Synthetic oligonucleotide
tttactcgcgaccggtcggggggtcatgtt

SEQ ID NO: 226536 - DNA, 30 bp, Artificial Sequence
  Synthetic oligonucleotide
agcgcatcatttggtctggttgttcatgtt

SEQ ID NO: 226537 - DNA, 30 bp, Artificial Sequence
  Synthetic oligonucleotide
gaagtacgtcttaggaccatagtggatgtt

SEQ ID NO: 226538 - DNA, 30 bp, Artificial Sequence
  Synthetic oligonucleotide
tacgcatttgctctaaactgagatgatgtt

SEQ ID NO: 226539 - DNA, 30 bp, Artificial Sequence
  Synthetic oligonucleotide
cagaattattcaggagaaaaaattgatgtt

SEQ ID NO: 226540 - DNA, 30 bp, Artificial Sequence
  Synthetic oligonucleotide
cgcgcattttacgtcgatcctttatatgtt

SEQ ID NO: 226541 - DNA, 30 bp, Artificial Sequence
  Synthetic oligonucleotide
atcgaaaccctgcttccaaaaggctatgtt

SEQ ID NO: 226542 - DNA, 30 bp, Artificial Sequence
  Synthetic oligonucleotide
tctattgtagagaaattcgccgtctatgtt

SEQ ID NO: 226543 - DNA, 30 bp, Artificial Sequence
  Synthetic oligonucleotide
ggcggaaggtttctaccagtagcgtatgtt

SEQ ID NO: 226544 - DNA, 30 bp, Artificial Sequence
  Synthetic oligonucleotide
ctggcgtaattaacagtgacgccaactgtt

SEQ ID NO: 226545 - DNA, 30 bp, Artificial Sequence
  Synthetic oligonucleotide
ccatatatgaacaaacacggaaacactgtt

SEQ ID NO: 226546 - DNA, 30 bp, Artificial Sequence
  Synthetic oligonucleotide
ctacaaatcaaaagctagcagttcactgtt

SEQ ID NO: 226547 - DNA, 30 bp, Artificial Sequence
  Synthetic oligonucleotide
tggccgactcatgggcattcaaaccctgtt

SEQ ID NO: 226548 - DNA, 30 bp, Artificial Sequence
  Synthetic oligonucleotide
gacttacgattcttatggactgagcctgtt

SEQ ID NO: 226549 - DNA, 30 bp, Artificial Sequence
  Synthetic oligonucleotide
tattcaaaacatgaatatcaatcagctgtt

SEQ ID NO: 226550 - DNA, 30 bp, Artificial Sequence
  Synthetic oligonucleotide
tggagaggcttcagatctacatcggctgtt

SEQ ID NO: 226551 - DNA, 29 bp, Artificial Sequence
  Synthetic oligonucleotide
tccgtcacgaaataagatcgactgctgtt

SEQ ID NO: 226552 - DNA, 30 bp, Artificial Sequence
  Synthetic oligonucleotide
gggccatgcgaccgctgcccccaatctgtt

SEQ ID NO: 226553 - DNA, 30 bp, Artificial Sequence
  Synthetic oligonucleotide
ccgagatttgttaaacatactcagtctgtt

SEQ ID NO: 226554 - DNA, 30 bp, Artificial Sequence
  Synthetic oligonucleotide
aataggaacttagagcctgaagcgtctgtt

SEQ ID NO: 226555 - DNA, 30 bp, Artificial Sequence
  Synthetic oligonucleotide
ctgaaacgcaactcgttcccgaaaagtgtt

SEQ ID NO: 226556 - DNA, 30 bp, Artificial Sequence
  Synthetic oligonucleotide
ctcaaacgcaaggatggcatgtgaagtgtt

SEQ ID NO: 226557 - DNA, 30 bp, Artificial Sequence
  Synthetic oligonucleotide
cacactggcatcggcacccccgtgagtgtt

SEQ ID NO: 226558 - DNA, 30 bp, Artificial Sequence
  Synthetic oligonucleotide
gtcaacgactgcgcgctcatggttagtgtt

SEQ ID NO: 226559 - DNA, 30 bp, Artificial Sequence
  Synthetic oligonucleotide
gttaatcgaacgctaatgacgggacgtgtt

SEQ ID NO: 226560 - DNA, 30 bp, Artificial Sequence
  Synthetic oligonucleotide
gccgatttacgtaagacacaaaagcgtgtt

SEQ ID NO: 226561 - DNA, 30 bp, Artificial Sequence
  Synthetic oligonucleotide
aaggcctctcatgttccccaacggcgtgtt

SEQ ID NO: 226562 - DNA, 30 bp, Artificial Sequence
  Synthetic oligonucleotide
gggcccaccagaatcaaagtaaaaggtgtt

SEQ ID NO: 226563 - DNA, 30 bp, Artificial Sequence
  Synthetic oligonucleotide
ttgtagcacacgggaggacatttcggtgtt

SEQ ID NO: 226564 - DNA, 30 bp, Artificial Sequence
  Synthetic oligonucleotide
ggtgggggcgtatatgctttctggggtgtt

SEQ ID NO: 226565 - DNA, 30 bp, Artificial Sequence
  Synthetic oligonucleotide
ttcgatcgtccgcacgtggttttatgtgtt

SEQ ID NO: 226566 - DNA, 30 bp, Artificial Sequence
  Synthetic oligonucleotide
ggaatactccgctaagcacgatcctgtgtt

SEQ ID NO: 226567 - DNA, 30 bp, Artificial Sequence
  Synthetic oligonucleotide
taagggctgtttttaggcgccatctgtgtt

SEQ ID NO: 226568 - DNA, 30 bp, Artificial Sequence
  Synthetic oligonucleotide
catgcctcgctggtggccgacacgtgtgtt

SEQ ID NO: 226569 - DNA, 30 bp, Artificial Sequence
  Synthetic oligonucleotide
tggtaccgcctgcgaagcatcccaattgtt

SEQ ID NO: 226570 - DNA, 30 bp, Artificial Sequence
  Synthetic oligonucleotide
cagacatgggtgctataggattcaattgtt

SEQ ID NO: 226571 - DNA, 30 bp, Artificial Sequence
  Synthetic oligonucleotide
acgacccgtcaactgatcaatagaattgtt

SEQ ID NO: 226572 - DNA, 30 bp, Artificial Sequence
  Synthetic oligonucleotide
acagcatatgacgtgacaagtgcgattgtt

SEQ ID NO: 226573 - DNA, 30 bp, Artificial Sequence
  Synthetic oligonucleotide
taaaatcaattggtgcggtataaacttgtt

SEQ ID NO: 226574 - DNA, 30 bp, Artificial Sequence
  Synthetic oligonucleotide
agacactgcgtctgtagcctgattcttgtt

SEQ ID NO: 226575 - DNA, 30 bp, Artificial Sequence
  Synthetic oligonucleotide
tgaaaattaggagtcccgtaatcagttgtt

SEQ ID NO: 226576 - DNA, 30 bp, Artificial Sequence
  Synthetic oligonucleotide
tcgaattgtcgctctagagtgagcgttgtt

SEQ ID NO: 226577 - DNA, 30 bp, Artificial Sequence
  Synthetic oligonucleotide
accgacaatcagcgatgcgctatcgttgtt

SEQ ID NO: 226578 - DNA, 30 bp, Artificial Sequence
  Synthetic oligonucleotide
tcaccggaaattccgagcactcaggttgtt

SEQ ID NO: 226579 - DNA, 30 bp, Artificial Sequence
  Synthetic oligonucleotide
tcgccgtatcacaagtgccggtgtgttgtt

SEQ ID NO: 226580 - DNA, 30 bp, Artificial Sequence
  Synthetic oligonucleotide
catctaataaacggttttccccactttgtt

SEQ ID NO: 226581 - DNA, 30 bp, Artificial Sequence
  Synthetic oligonucleotide
ccatcactctaggcaacgaaaagttttgtt

SEQ ID NO: 226582 - DNA, 30 bp, Artificial Sequence
  Synthetic oligonucleotide
ccaacgtactgccatgttctttgttttgtt

SEQ ID NO: 226583 - DNA, 30 bp, Artificial Sequence
  Synthetic oligonucleotide
acgtctgagcaagtagatcttctaaaattt

SEQ ID NO: 226584 - DNA, 30 bp, Artificial Sequence
  Synthetic oligonucleotide
agagggagcgccgtgtctgatcacaaattt

SEQ ID NO: 226585 - DNA, 29 bp, Artificial Sequence
  Synthetic oligonucleotide
gccaatctcaagggcgggagactaaattt

SEQ ID NO: 226586 - DNA, 30 bp, Artificial Sequence
  Synthetic oligonucleotide
ccaagagtcacagattgacggtctaaattt

SEQ ID NO: 226587 - DNA, 30 bp, Artificial Sequence
  Synthetic oligonucleotide
taccgactccattacaattcttctaaattt

SEQ ID NO: 226588 - DNA, 30 bp, Artificial Sequence
  Synthetic oligonucleotide
atgcggagttactgattcggttcacaattt

SEQ ID NO: 226589 - DNA, 30 bp, Artificial Sequence
  Synthetic oligonucleotide
cggtgcgtagaacagagggacagccaattt

SEQ ID NO: 226590 - DNA, 30 bp, Artificial Sequence
  Synthetic oligonucleotide
acgcagagggcctcgtaagataagcaattt

SEQ ID NO: 226591 - DNA, 30 bp, Artificial Sequence
  Synthetic oligonucleotide
tattctttgcagttaagaagctgagaattt

SEQ ID NO: 226592 - DNA, 30 bp, Artificial Sequence
  Synthetic oligonucleotide
tcgacgcgacatcgtgaacgccctgaattt

SEQ ID NO: 226593 - DNA, 30 bp, Artificial Sequence
  Synthetic oligonucleotide
agcgttatgatggagattcgaaagtaattt

SEQ ID NO: 226594 - DNA, 30 bp, Artificial Sequence
  Synthetic oligonucleotide
caacatattcttagaatacaccagtaattt

SEQ ID NO: 226595 - DNA, 30 bp, Artificial Sequence
  Synthetic oligonucleotide
ttccagacgtgaatgaagatggcgtaattt

SEQ ID NO: 226596 - DNA, 30 bp, Artificial Sequence
  Synthetic oligonucleotide
tcagtagtatataaaaatgattgttaattt

SEQ ID NO: 226597 - DNA, 30 bp, Artificial Sequence
  Synthetic oligonucleotide
agctccgcctccctagcacggttaacattt

SEQ ID NO: 226598 - DNA, 30 bp, Artificial Sequence
  Synthetic oligonucleotide
gagaaggaaaccagtagtcaaatgacattt

SEQ ID NO: 226599 - DNA, 30 bp, Artificial Sequence
  Synthetic oligonucleotide
gggggcactttagaccttacctatacattt

SEQ ID NO: 226600 - DNA, 30 bp, Artificial Sequence
  Synthetic oligonucleotide
tcaatacggtcaatgcgaaacagcccattt

SEQ ID NO: 226601 - DNA, 30 bp, Artificial Sequence
  Synthetic oligonucleotide
actagtccggaaaggcgactcaagccattt

SEQ ID NO: 226602 - DNA, 30 bp, Artificial Sequence
  Synthetic oligonucleotide
tgagacggcacattttgttgcgcgccattt

SEQ ID NO: 226603 - DNA, 29 bp, Artificial Sequence
  Synthetic oligonucleotide
catcacggtgagagcgtactatgccattt

SEQ ID NO: 226604 - DNA, 30 bp, Artificial Sequence
  Synthetic oligonucleotide
ccggaaatcaaaatgttacggaatccattt

SEQ ID NO: 226605 - DNA, 30 bp, Artificial Sequence
  Synthetic oligonucleotide
gataagccgcaatgtgtattacttgcattt

SEQ ID NO: 226606 - DNA, 30 bp, Artificial Sequence
  Synthetic oligonucleotide
ctcgacaatgtcgtagagagcaaatcattt

SEQ ID NO: 226607 - DNA, 30 bp, Artificial Sequence
  Synthetic oligonucleotide
taaatcgccttggtggtccacgtatcattt

SEQ ID NO: 226608 - DNA, 30 bp, Artificial Sequence
  Synthetic oligonucleotide
aatgggctgttcggcggagtgatctcattt

SEQ ID NO: 226609 - DNA, 30 bp, Artificial Sequence
  Synthetic oligonucleotide
gcttaccggtaggggcacgcttcaagattt

SEQ ID NO: 226610 - DNA, 30 bp, Artificial Sequence
  Synthetic oligonucleotide
tggaaggccatcgtagtctgtggtagattt

SEQ ID NO: 226611 - DNA, 30 bp, Artificial Sequence
  Synthetic oligonucleotide
cgctgagatggagcccatattcgccgattt

SEQ ID NO: 226612 - DNA, 30 bp, Artificial Sequence
  Synthetic oligonucleotide
acgggctcccgggaactaccagctcgattt

SEQ ID NO: 226613 - DNA, 30 bp, Artificial Sequence
  Synthetic oligonucleotide
atggtggcggattagggtttgtctcgattt

SEQ ID NO: 226614 - DNA, 30 bp, Artificial Sequence
  Synthetic oligonucleotide
aagggtagggtagcatggtgggaaggattt

SEQ ID NO: 226615 - DNA, 30 bp, Artificial Sequence
  Synthetic oligonucleotide
taggcttaaagtctcagaataggaggattt

SEQ ID NO: 226616 - DNA, 30 bp, Artificial Sequence
  Synthetic oligonucleotide
gagtacacatcgacagtcgttaagggattt

SEQ ID NO: 226617 - DNA, 30 bp, Artificial Sequence
  Synthetic oligonucleotide
gggagttaaggtgacattcatgagggattt

SEQ ID NO: 226618 - DNA, 30 bp, Artificial Sequence
  Synthetic oligonucleotide
tatgggaagaggcggatattaattggattt

SEQ ID NO: 226619 - DNA, 30 bp, Artificial Sequence
  Synthetic oligonucleotide
cctgggatggccggcttatgtaaatgattt

SEQ ID NO: 226620 - DNA, 30 bp, Artificial Sequence
  Synthetic oligonucleotide
tagatttcagagagcagtcttgaatgattt

SEQ ID NO: 226621 - DNA, 30 bp, Artificial Sequence
  Synthetic oligonucleotide
ctaccacgcacaccgaaaggactatgattt

SEQ ID NO: 226622 - DNA, 30 bp, Artificial Sequence
  Synthetic oligonucleotide
gaactagtgactgcgccgtagaactgattt

SEQ ID NO: 226623 - DNA, 30 bp, Artificial Sequence
  Synthetic oligonucleotide
tagctaagtcgcactgggtctaactgattt

SEQ ID NO: 226624 - DNA, 30 bp, Artificial Sequence
  Synthetic oligonucleotide
gatgtctacgtgttgggtttgtactgattt

SEQ ID NO: 226625 - DNA, 30 bp, Artificial Sequence
  Synthetic oligonucleotide
aggtcatataggctcgagtcaaggtgattt

SEQ ID NO: 226626 - DNA, 30 bp, Artificial Sequence
  Synthetic oligonucleotide
ggtcaatgacgggcgattcagtgaatattt

SEQ ID NO: 226627 - DNA, 30 bp, Artificial Sequence
  Synthetic oligonucleotide
attctccgcaagttgtaagggtacatattt

SEQ ID NO: 226628 - DNA, 30 bp, Artificial Sequence
  Synthetic oligonucleotide
ctgcgggcgacactgaaggagtagatattt

SEQ ID NO: 226629 - DNA, 30 bp, Artificial Sequence
  Synthetic oligonucleotide
atacgaacatcggcataagaaacgatattt

SEQ ID NO: 226630 - DNA, 30 bp, Artificial Sequence
  Synthetic oligonucleotide
aaaataactatatgcaatgcgccgatattt

SEQ ID NO: 226631 - DNA, 30 bp, Artificial Sequence
  Synthetic oligonucleotide
gggcagttagggcctgctgtgccgatattt

SEQ ID NO: 226632 - DNA, 30 bp, Artificial Sequence
  Synthetic oligonucleotide
tccttgaatgccgggccaatgatgatattt

SEQ ID NO: 226633 - DNA, 30 bp, Artificial Sequence
  Synthetic oligonucleotide
acggttatcaggaagtgctgaattatattt

SEQ ID NO: 226634 - DNA, 30 bp, Artificial Sequence
  Synthetic oligonucleotide
gaggccaacgtcagcggtaagtaactattt

SEQ ID NO: 226635 - DNA, 30 bp, Artificial Sequence
  Synthetic oligonucleotide
ggaacgaatggaatgccgaacgcactattt

SEQ ID NO: 226636 - DNA, 30 bp, Artificial Sequence
  Synthetic oligonucleotide
ttgttttgtacgtatatgatcatcctattt

SEQ ID NO: 226637 - DNA, 30 bp, Artificial Sequence
  Synthetic oligonucleotide
aggtttgccaggttcaggcatacgctattt

SEQ ID NO: 226638 - DNA, 30 bp, Artificial Sequence
  Synthetic oligonucleotide
aagtggttaagcgatgtcggggggctattt

SEQ ID NO: 226639 - DNA, 30 bp, Artificial Sequence
  Synthetic oligonucleotide
gcgaacaatatcaacaattaccgattattt

SEQ ID NO: 226640 - DNA, 30 bp, Artificial Sequence
  Synthetic oligonucleotide
acataatgggagtcagagcctatattattt

SEQ ID NO: 226641 - DNA, 30 bp, Artificial Sequence
  Synthetic oligonucleotide
cgtcgagattacactgtggaatacttattt

SEQ ID NO: 226642 - DNA, 30 bp, Artificial Sequence
  Synthetic oligonucleotide
catagtgggggtgaatgtttgggcttattt

SEQ ID NO: 226643 - DNA, 30 bp, Artificial Sequence
  Synthetic oligonucleotide
gaccattgaacccattggatccaaaacttt

SEQ ID NO: 226644 - DNA, 30 bp, Artificial Sequence
  Synthetic oligonucleotide
gttcgctattggcgcgatgttatgaacttt

SEQ ID NO: 226645 - DNA, 30 bp, Artificial Sequence
  Synthetic oligonucleotide
cgggaattagctaggtgggagaaacacttt

SEQ ID NO: 226646 - DNA, 30 bp, Artificial Sequence
  Synthetic oligonucleotide
tagcgatcgctgcgtaaatgccgacacttt

SEQ ID NO: 226647 - DNA, 30 bp, Artificial Sequence
  Synthetic oligonucleotide
ctcgactcgtaggccagcgtcccccacttt

SEQ ID NO: 226648 - DNA, 30 bp, Artificial Sequence
  Synthetic oligonucleotide
cggaccgtatggttaatgggtctccacttt

SEQ ID NO: 226649 - DNA, 30 bp, Artificial Sequence
  Synthetic oligonucleotide
ggatgctcaaggcaccgatcagagcacttt

SEQ ID NO: 226650 - DNA, 30 bp, Artificial Sequence
  Synthetic oligonucleotide
tgccttggccttcaagctcagtagcacttt

SEQ ID NO: 226651 - DNA, 30 bp, Artificial Sequence
  Synthetic oligonucleotide
aagcgacggagtgtcgacgtatatcacttt

SEQ ID NO: 226652 - DNA, 30 bp, Artificial Sequence
  Synthetic oligonucleotide
tgtctaaaataaacactactctccgacttt

SEQ ID NO: 226653 - DNA, 30 bp, Artificial Sequence
  Synthetic oligonucleotide
agaatagaagttgggttggtaggcgacttt

SEQ ID NO: 226654 - DNA, 30 bp, Artificial Sequence
  Synthetic oligonucleotide
taaacccattgaatagtgtcaatcgacttt

SEQ ID NO: 226655 - DNA, 30 bp, Artificial Sequence
  Synthetic oligonucleotide
taagatccacttgacaggtacaaggacttt

SEQ ID NO: 226656 - DNA, 30 bp, Artificial Sequence
  Synthetic oligonucleotide
gacggaaacattattaggaaaacggacttt

SEQ ID NO: 226657 - DNA, 30 bp, Artificial Sequence
  Synthetic oligonucleotide
atggggaagtaagtaggtacgtctgacttt

SEQ ID NO: 226658 - DNA, 30 bp, Artificial Sequence
  Synthetic oligonucleotide
aggcatagtaatttgaagaaaggtgacttt

SEQ ID NO: 226659 - DNA, 30 bp, Artificial Sequence
  Synthetic oligonucleotide
cgcctaacgctatcgagagcgattgacttt

SEQ ID NO: 226660 - DNA, 30 bp, Artificial Sequence
  Synthetic oligonucleotide
taccgaaccaaaagggcatgtggatacttt

SEQ ID NO: 226661 - DNA, 30 bp, Artificial Sequence
  Synthetic oligonucleotide
gattatagcattgtgatactcgcgtacttt

SEQ ID NO: 226662 - DNA, 30 bp, Artificial Sequence
  Synthetic oligonucleotide
gtcctatgaccctgggagagtcggtacttt

SEQ ID NO: 226663 - DNA, 30 bp, Artificial Sequence
  Synthetic oligonucleotide
aagatctaaacgccagtaatcagttacttt

SEQ ID NO: 226664 - DNA, 30 bp, Artificial Sequence
  Synthetic oligonucleotide
tgtacatggagacgtgatagctgcaccttt

SEQ ID NO: 226665 - DNA, 30 bp, Artificial Sequence
  Synthetic oligonucleotide
cgggtatgtgaaacggacatgcggaccttt

SEQ ID NO: 226666 - DNA, 30 bp, Artificial Sequence
  Synthetic oligonucleotide
ggcaatcgtgcattattaatctgccccttt

SEQ ID NO: 226667 - DNA, 30 bp, Artificial Sequence
  Synthetic oligonucleotide
cacgtagcttagagtagggatgtccccttt

SEQ ID NO: 226668 - DNA, 30 bp, Artificial Sequence
  Synthetic oligonucleotide
gttacttatcaacccgatgagtatcccttt

SEQ ID NO: 226669 - DNA, 30 bp, Artificial Sequence
  Synthetic oligonucleotide
gttaagcagacctagtgccatgttcccttt

SEQ ID NO: 226670 - DNA, 30 bp, Artificial Sequence
  Synthetic oligonucleotide
caccgggtttgggtcatcctcaacgccttt

SEQ ID NO: 226671 - DNA, 30 bp, Artificial Sequence
  Synthetic oligonucleotide
accataaatagtcctgcatggtcatccttt

SEQ ID NO: 226672 - DNA, 30 bp, Artificial Sequence
  Synthetic oligonucleotide
gaaaggggaacataggtttgaggatccttt

SEQ ID NO: 226673 - DNA, 30 bp, Artificial Sequence
  Synthetic oligonucleotide
gttgtcatcggatggagttttaccagcttt

SEQ ID NO: 226674 - DNA, 30 bp, Artificial Sequence
  Synthetic oligonucleotide
acgaggaatttagtctttgcatcgagcttt

SEQ ID NO: 226675 - DNA, 30 bp, Artificial Sequence
  Synthetic oligonucleotide
ttgtcgtaagacaaggtagcaattagcttt

SEQ ID NO: 226676 - DNA, 30 bp, Artificial Sequence
  Synthetic oligonucleotide
tacccagatcaacggaagcaacttagcttt

SEQ ID NO: 226677 - DNA, 30 bp, Artificial Sequence
  Synthetic oligonucleotide
gacgaggatgcatcagagatgttacgcttt

SEQ ID NO: 226678 - DNA, 30 bp, Artificial Sequence
  Synthetic oligonucleotide
gtctaagtgcataggctcctccctggcttt

SEQ ID NO: 226679 - DNA, 30 bp, Artificial Sequence
  Synthetic oligonucleotide
aactgttggaagggagtatgcagctgcttt

SEQ ID NO: 226680 - DNA, 30 bp, Artificial Sequence
  Synthetic oligonucleotide
gcagtccacggggcgatataaggctgcttt

SEQ ID NO: 226681 - DNA, 30 bp, Artificial Sequence
  Synthetic oligonucleotide
gtgtgttaggttacgactgttgtgtgcttt

SEQ ID NO: 226682 - DNA, 30 bp, Artificial Sequence
  Synthetic oligonucleotide
ccgaacgcccctgtgatagatgtttgcttt

SEQ ID NO: 226683 - DNA, 30 bp, Artificial Sequence
  Synthetic oligonucleotide
gtatggaaccagggagattgattttgcttt

SEQ ID NO: 226684 - DNA, 30 bp, Artificial Sequence
  Synthetic oligonucleotide
cttgtagtcatgggagcgggtaaaatcttt

SEQ ID NO: 226685 - DNA, 30 bp, Artificial Sequence
  Synthetic oligonucleotide
ctggagacggtgagattcggtcaaatcttt

SEQ ID NO: 226686 - DNA, 30 bp, Artificial Sequence
  Synthetic oligonucleotide
gggccttccggcaagcagttgttaatcttt

SEQ ID NO: 226687 - DNA, 30 bp, Artificial Sequence
  Synthetic oligonucleotide
ggccaatcttgacagctccctaacatcttt

SEQ ID NO: 226688 - DNA, 30 bp, Artificial Sequence
  Synthetic oligonucleotide
tccgctaatgaatttcatggcgacatcttt

SEQ ID NO: 226689 - DNA, 30 bp, Artificial Sequence
  Synthetic oligonucleotide
ggagtagcttatggtacggcctacatcttt

SEQ ID NO: 226690 - DNA, 30 bp, Artificial Sequence
  Synthetic oligonucleotide
cttctggtcattgggtctagaggtatcttt

SEQ ID NO: 226691 - DNA, 30 bp, Artificial Sequence
  Synthetic oligonucleotide
ctgtaggacgcgaccgattagtaactcttt

SEQ ID NO: 226692 - DNA, 30 bp, Artificial Sequence
  Synthetic oligonucleotide
ttagtaagcgtaaaaggaaatggactcttt

SEQ ID NO: 226693 - DNA, 30 bp, Artificial Sequence
  Synthetic oligonucleotide
tggatagtcttaacctgatggcacctcttt

SEQ ID NO: 226694 - DNA, 30 bp, Artificial Sequence
  Synthetic oligonucleotide
catcgaatgtgcgtcgtttataaagtcttt

SEQ ID NO: 226695 - DNA, 29 bp, Artificial Sequence
  Synthetic oligonucleotide
agtccatgaggtcggggtatatagtcttt

SEQ ID NO: 226696 - DNA, 30 bp, Artificial Sequence
  Synthetic oligonucleotide
actcgttgcgcgtgacaacattgggtcttt

SEQ ID NO: 226697 - DNA, 30 bp, Artificial Sequence
  Synthetic oligonucleotide
ctccgcgagaacgattaagaggttgtcttt

SEQ ID NO: 226698 - DNA, 30 bp, Artificial Sequence
  Synthetic oligonucleotide
ggacaggctgaggtatagaatagattcttt

SEQ ID NO: 226699 - DNA, 30 bp, Artificial Sequence
  Synthetic oligonucleotide
ttggcacgatgacttggaagagtattcttt

SEQ ID NO: 226700 - DNA, 30 bp, Artificial Sequence
  Synthetic oligonucleotide
agtgttgccacgggccccgtttgcttcttt

SEQ ID NO: 226701 - DNA, 30 bp, Artificial Sequence
  Synthetic oligonucleotide
cgaccctagcgagacaccactatcttcttt

SEQ ID NO: 226702 - DNA, 30 bp, Artificial Sequence
  Synthetic oligonucleotide
ccatgccccagctggtcgagatcgttcttt

SEQ ID NO: 226703 - DNA, 31 bp, Artificial Sequence
  Synthetic oligonucleotide
ttgttgtgtaggttcactcatatatttcttt

SEQ ID NO: 226704 - DNA, 30 bp, Artificial Sequence
  Synthetic oligonucleotide
ccggaccgcgttaacacagattatttcttt

SEQ ID NO: 226705 - DNA, 30 bp, Artificial Sequence
  Synthetic oligonucleotide
ctacatacggcaagcttattggttttcttt

SEQ ID NO: 226706 - DNA, 30 bp, Artificial Sequence
  Synthetic oligonucleotide
gaacaaattggattggtccggcaaaagttt

SEQ ID NO: 226707 - DNA, 30 bp, Artificial Sequence
  Synthetic oligonucleotide
tacgctatgaaccgttgacaggtcaagttt

SEQ ID NO: 226708 - DNA, 30 bp, Artificial Sequence
  Synthetic oligonucleotide
gccggctccaccaggctggtattgaagttt

SEQ ID NO: 226709 - DNA, 30 bp, Artificial Sequence
  Synthetic oligonucleotide
tatgcggtacactagtgtgctctacagttt

SEQ ID NO: 226710 - DNA, 30 bp, Artificial Sequence
  Synthetic oligonucleotide
tcacggatgcacttctcgtgtcagcagttt

SEQ ID NO: 226711 - DNA, 30 bp, Artificial Sequence
  Synthetic oligonucleotide
gctgccgggtcgatcaaggagtttcagttt

SEQ ID NO: 226712 - DNA, 30 bp, Artificial Sequence
  Synthetic oligonucleotide
gtgcttcacgaggtgtgtgatgaagagttt

SEQ ID NO: 226713 - DNA, 30 bp, Artificial Sequence
  Synthetic oligonucleotide
gctagcaagagttataagttagcagagttt

SEQ ID NO: 226714 - DNA, 30 bp, Artificial Sequence
  Synthetic oligonucleotide
gacgacagtatgcgtggagccccatagttt

SEQ ID NO: 226715 - DNA, 30 bp, Artificial Sequence
  Synthetic oligonucleotide
attgggaagccagaaacacgtacgtagttt

SEQ ID NO: 226716 - DNA, 30 bp, Artificial Sequence
  Synthetic oligonucleotide
aacgacaaaagggcgtacagtttttagttt

SEQ ID NO: 226717 - DNA, 30 bp, Artificial Sequence
  Synthetic oligonucleotide
acaagatattcgattcgctaccgaacgttt

SEQ ID NO: 226718 - DNA, 30 bp, Artificial Sequence
  Synthetic oligonucleotide
atgtaagatggcatttcattccccacgttt

SEQ ID NO: 226719 - DNA, 30 bp, Artificial Sequence
  Synthetic oligonucleotide
ccgcctctagcgtaaatggctgtcacgttt

SEQ ID NO: 226720 - DNA, 30 bp, Artificial Sequence
  Synthetic oligonucleotide
tagtgtgtcgtacctaatctcccgacgttt

SEQ ID NO: 226721 - DNA, 30 bp, Artificial Sequence
  Synthetic oligonucleotide
cgtccgtgaattctcgactgtgcgacgttt

SEQ ID NO: 226722 - DNA, 30 bp, Artificial Sequence
  Synthetic oligonucleotide
ggacgcgatgttctcctccattcgacgttt

SEQ ID NO: 226723 - DNA, 30 bp, Artificial Sequence
  Synthetic oligonucleotide
cggctcggtacgacggcattatggacgttt

SEQ ID NO: 226724 - DNA, 30 bp, Artificial Sequence
  Synthetic oligonucleotide
aaccccagtggttgcaaggaagacccgttt

SEQ ID NO: 226725 - DNA, 30 bp, Artificial Sequence
  Synthetic oligonucleotide
cagggcgcaattatgtccaaactagcgttt

SEQ ID NO: 226726 - DNA, 30 bp, Artificial Sequence
  Synthetic oligonucleotide
cgcggtatgtcactgcctgcagtagcgttt

SEQ ID NO: 226727 - DNA, 30 bp, Artificial Sequence
  Synthetic oligonucleotide
tcgacatagcaaggtcatacaaacgcgttt

SEQ ID NO: 226728 - DNA, 30 bp, Artificial Sequence
  Synthetic oligonucleotide
aattcagtccggcagacgtgatacgcgttt

SEQ ID NO: 226729 - DNA, 30 bp, Artificial Sequence
  Synthetic oligonucleotide
accagttagggcacatcaagtcgggcgttt

SEQ ID NO: 226730 - DNA, 30 bp, Artificial Sequence
  Synthetic oligonucleotide
tcaccggaagcaccatggttctgggcgttt

SEQ ID NO: 226731 - DNA, 30 bp, Artificial Sequence
  Synthetic oligonucleotide
actagccgctggacttattgagtatcgttt

SEQ ID NO: 226732 - DNA, 30 bp, Artificial Sequence
  Synthetic oligonucleotide
gctgtcaaatgaactcactgtaattcgttt

SEQ ID NO: 226733 - DNA, 30 bp, Artificial Sequence
  Synthetic oligonucleotide
gtataggtactctgcagggcagggaggttt

SEQ ID NO: 226734 - DNA, 30 bp, Artificial Sequence
  Synthetic oligonucleotide
aacagagggtttacccagtcaggccggttt

SEQ ID NO: 226735 - DNA, 30 bp, Artificial Sequence
  Synthetic oligonucleotide
atagcacagtcatggaaggttaggcggttt

SEQ ID NO: 226736 - DNA, 30 bp, Artificial Sequence
  Synthetic oligonucleotide
ttgctgctcattaatgtcgtctggcggttt

SEQ ID NO: 226737 - DNA, 30 bp, Artificial Sequence
  Synthetic oligonucleotide
tctagcacaacgtgcgacagcggtcggttt

SEQ ID NO: 226738 - DNA, 30 bp, Artificial Sequence
  Synthetic oligonucleotide
aaaacaatattagcataagatggtcggttt

SEQ ID NO: 226739 - DNA, 30 bp, Artificial Sequence
  Synthetic oligonucleotide
acacgcgcccaagcacctcagacggggttt

SEQ ID NO: 226740 - DNA, 30 bp, Artificial Sequence
  Synthetic oligonucleotide
cttataaactggcaaacaagggcggggttt

SEQ ID NO: 226741 - DNA, 30 bp, Artificial Sequence
  Synthetic oligonucleotide
tagcgaacgccatcatcagtaatggggttt

SEQ ID NO: 226742 - DNA, 30 bp, Artificial Sequence
  Synthetic oligonucleotide
gaccggatttcgtaggatatcgtggggttt

SEQ ID NO: 226743 - DNA, 30 bp, Artificial Sequence
  Synthetic oligonucleotide
tgccataagcaatagagccagttggggttt

SEQ ID NO: 226744 - DNA, 30 bp, Artificial Sequence
  Synthetic oligonucleotide
cacggcgttataagtgaagtccatgggttt

SEQ ID NO: 226745 - DNA, 30 bp, Artificial Sequence
  Synthetic oligonucleotide
ttgtcaatcagacttcctacatctgggttt

SEQ ID NO: 226746 - DNA, 30 bp, Artificial Sequence
  Synthetic oligonucleotide
cgctttcgaacgttggcgcgggtatggttt

SEQ ID NO: 226747 - DNA, 30 bp, Artificial Sequence
  Synthetic oligonucleotide
caacatggctctaacatctgtcaaatgttt

SEQ ID NO: 226748 - DNA, 30 bp, Artificial Sequence
  Synthetic oligonucleotide
tggatctgtggaataagcggtgtaatgttt

SEQ ID NO: 226749 - DNA, 30 bp, Artificial Sequence
  Synthetic oligonucleotide
catatctatcggaaagcactgcacatgttt

SEQ ID NO: 226750 - DNA, 30 bp, Artificial Sequence
  Synthetic oligonucleotide
cccgaggagtacagggtcggaaccatgttt

SEQ ID NO: 226751 - DNA, 30 bp, Artificial Sequence
  Synthetic oligonucleotide
tattccataagcgtcagcgggacgatgttt

SEQ ID NO: 226752 - DNA, 30 bp, Artificial Sequence
  Synthetic oligonucleotide
taggtattactattgatagaatcgatgttt

SEQ ID NO: 226753 - DNA, 30 bp, Artificial Sequence
  Synthetic oligonucleotide
gaggaatatccagcagtatggcgtatgttt

SEQ ID NO: 226754 - DNA, 30 bp, Artificial Sequence
  Synthetic oligonucleotide
ctgcaggcaccagtatggtggcttatgttt

SEQ ID NO: 226755 - DNA, 30 bp, Artificial Sequence
  Synthetic oligonucleotide
gagggataccgaggggcgggaaacctgttt

SEQ ID NO: 226756 - DNA, 30 bp, Artificial Sequence
  Synthetic oligonucleotide
cgggagtttgtacgtatcaggcacctgttt

SEQ ID NO: 226757 - DNA, 30 bp, Artificial Sequence
  Synthetic oligonucleotide
tgcaatctgagctgctcaatgagattgttt

SEQ ID NO: 226758 - DNA, 30 bp, Artificial Sequence
  Synthetic oligonucleotide
gacagagtcttccactatcaacgattgttt

SEQ ID NO: 226759 - DNA, 30 bp, Artificial Sequence
  Synthetic oligonucleotide
atgagcctgagcccatttatggtcttgttt

SEQ ID NO: 226760 - DNA, 30 bp, Artificial Sequence
  Synthetic oligonucleotide
gtagggtaaatatgtaatcacctcaatttt

SEQ ID NO: 226761 - DNA, 30 bp, Artificial Sequence
  Synthetic oligonucleotide
tcccatgactaggttgaatgatctaatttt

SEQ ID NO: 226762 - DNA, 30 bp, Artificial Sequence
  Synthetic oligonucleotide
gtaaaggcgatctagactattggacatttt

SEQ ID NO: 226763 - DNA, 30 bp, Artificial Sequence
  Synthetic oligonucleotide
ctcagacatcaggatttaatcccccatttt

SEQ ID NO: 226764 - DNA, 30 bp, Artificial Sequence
  Synthetic oligonucleotide
ggaggaccagagcagcatacgtagcatttt

SEQ ID NO: 226765 - DNA, 30 bp, Artificial Sequence
  Synthetic oligonucleotide
ggactaccatgctattgtccaccgcatttt

SEQ ID NO: 226766 - DNA, 30 bp, Artificial Sequence
  Synthetic oligonucleotide
gttcggctccaaatggactcggttcatttt

SEQ ID NO: 226767 - DNA, 30 bp, Artificial Sequence
  Synthetic oligonucleotide
cggaggattctattcttcaaataagatttt

SEQ ID NO: 226768 - DNA, 30 bp, Artificial Sequence
  Synthetic oligonucleotide
agagacacaatgtggcctgttaccgatttt

SEQ ID NO: 226769 - DNA, 30 bp, Artificial Sequence
  Synthetic oligonucleotide
ccagaacctaaagtgatgtttttcgatttt

SEQ ID NO: 226770 - DNA, 30 bp, Artificial Sequence
  Synthetic oligonucleotide
tgttcggatatggagatcttgtatgatttt

SEQ ID NO: 226771 - DNA, 30 bp, Artificial Sequence
  Synthetic oligonucleotide
ccatgcccgcaacctaggtgccctgatttt

SEQ ID NO: 226772 - DNA, 30 bp, Artificial Sequence
  Synthetic oligonucleotide
tgacacaccgagggggctttcgctgatttt

SEQ ID NO: 226773 - DNA, 30 bp, Artificial Sequence
  Synthetic oligonucleotide
tgcgccaaaaggttatgttaacactatttt

SEQ ID NO: 226774 - DNA, 30 bp, Artificial Sequence
  Synthetic oligonucleotide
aggccaggtatttcaggagggatctatttt

SEQ ID NO: 226775 - DNA, 30 bp, Artificial Sequence
  Synthetic oligonucleotide
ggctcatagaggcgtacaaggagaactttt

SEQ ID NO: 226776 - DNA, 30 bp, Artificial Sequence
  Synthetic oligonucleotide
agttctgaaccgtcggtcatgtacactttt

SEQ ID NO: 226777 - DNA, 30 bp, Artificial Sequence
  Synthetic oligonucleotide
cacagtggatgcggcagcagctctactttt

SEQ ID NO: 226778 - DNA, 30 bp, Artificial Sequence
  Synthetic oligonucleotide
agaaggagaccgttcaaagttatgcctttt

SEQ ID NO: 226779 - DNA, 30 bp, Artificial Sequence
  Synthetic oligonucleotide
actagacggtccgacaacgaacattctttt

SEQ ID NO: 226780 - DNA, 30 bp, Artificial Sequence
  Synthetic oligonucleotide
ccacccgctaagttagtcggtccaagtttt

SEQ ID NO: 226781 - DNA, 30 bp, Artificial Sequence
  Synthetic oligonucleotide
gagggcataccgtattcataaggaagtttt

SEQ ID NO: 226782 - DNA, 30 bp, Artificial Sequence
  Synthetic oligonucleotide
tagagcgtcgcaatcggaagaggaagtttt

SEQ ID NO: 226783 - DNA, 30 bp, Artificial Sequence
  Synthetic oligonucleotide
tgctgtatttctcaaacataacacagtttt

SEQ ID NO: 226784 - DNA, 30 bp, Artificial Sequence
  Synthetic oligonucleotide
caatcggccaagttgacagactagagtttt

SEQ ID NO: 226785 - DNA, 30 bp, Artificial Sequence
  Synthetic oligonucleotide
accggctaaaggataccagattatagtttt

SEQ ID NO: 226786 - DNA, 30 bp, Artificial Sequence
  Synthetic oligonucleotide
gtaggtggattctatcccttaagacgtttt

SEQ ID NO: 226787 - DNA, 30 bp, Artificial Sequence
  Synthetic oligonucleotide
gcctggtctaagaaagtatccaatcgtttt

SEQ ID NO: 226788 - DNA, 30 bp, Artificial Sequence
  Synthetic oligonucleotide
aagataagcaagacaagaatcaagggtttt

SEQ ID NO: 226789 - DNA, 26 bp, Artificial Sequence
  Synthetic oligonucleotide
gcaatgaagtgtggaaagtgggtttt

SEQ ID NO: 226790 - DNA, 30 bp, Artificial Sequence
  Synthetic oligonucleotide
tgtctagaaccagggtacaacaaatgtttt

SEQ ID NO: 226791 - DNA, 30 bp, Artificial Sequence
  Synthetic oligonucleotide
acgaacgcacgttcggtattgtcatgtttt

SEQ ID NO: 226792 - DNA, 30 bp, Artificial Sequence
  Synthetic oligonucleotide
gagaacagtaacaatatggtgaactgtttt

SEQ ID NO: 226793 - DNA, 30 bp, Artificial Sequence
  Synthetic oligonucleotide
gcactctccgaaaaaaggaattagtgtttt

SEQ ID NO: 226794 - DNA, 30 bp, Artificial Sequence
  Synthetic oligonucleotide
gatggttgacacagatattccacaattttt

SEQ ID NO: 226795 - DNA, 30 bp, Artificial Sequence
  Synthetic oligonucleotide
ggacctcattaaataagtagggcaattttt

SEQ ID NO: 226796 - DNA, 30 bp, Artificial Sequence
  Synthetic oligonucleotide
tctccatcagcgaaaagaacaggcattttt

SEQ ID NO: 226797 - DNA, 30 bp, Artificial Sequence
  Synthetic oligonucleotide
gtgtgagaagcggagtagctgttacttttt

SEQ ID NO: 226798 - DNA, 30 bp, Artificial Sequence
  Synthetic oligonucleotide
ttgttgattcaagacattgctgaccttttt

SEQ ID NO: 226799 - DNA, 30 bp, Artificial Sequence
  Synthetic oligonucleotide
tgcccaaagtgatggcacataagccttttt

SEQ ID NO: 226800 - DNA, 30 bp, Artificial Sequence
  Synthetic oligonucleotide
tggggcaccacgcccgtcacacaatttttt

SEQ ID NO: 226801 - DNA, 30 bp, Artificial Sequence
  Synthetic oligonucleotide
agccgtcagtgtctgtcagctaagtttttt

SEQ ID NO: 226802 - DNA, 30 bp, Artificial Sequence
  Synthetic oligonucleotide
ttacgtctcaggatggccgaccggtttttt

SEQ ID NO: 226803 - DNA, 30 bp, Artificial Sequence
  Synthetic oligonucleotide
accaagcttttaaggaacagttaaaaaaaa

SEQ ID NO: 226804 - DNA, 30 bp, Artificial Sequence
  Synthetic oligonucleotide
gcttatagatcaactctccggcccaaaaaa

SEQ ID NO: 226805 - DNA, 30 bp, Artificial Sequence
  Synthetic oligonucleotide
tcgcatgctacgcaatggccagggaaaaaa

SEQ ID NO: 226806 - DNA, 30 bp, Artificial Sequence
  Synthetic oligonucleotide
taccactgtgatctcgatggtcgtaaaaaa

SEQ ID NO: 226807 - DNA, 30 bp, Artificial Sequence
  Synthetic oligonucleotide
cctgcgtacagctctcggggacttaaaaaa

SEQ ID NO: 226808 - DNA, 30 bp, Artificial Sequence
  Synthetic oligonucleotide
aatggaagtgttgttgatacgagacaaaaa

SEQ ID NO: 226809 - DNA, 30 bp, Artificial Sequence
  Synthetic oligonucleotide
acaacaagaaaagggagatatgtacaaaaa

SEQ ID NO: 226810 - DNA, 30 bp, Artificial Sequence
  Synthetic oligonucleotide
ccgcgtgatgaaagaccagagttacaaaaa

SEQ ID NO: 226811 - DNA, 30 bp, Artificial Sequence
  Synthetic oligonucleotide
gtgcgtccgtattaactttgccaccaaaaa

SEQ ID NO: 226812 - DNA, 30 bp, Artificial Sequence
  Synthetic oligonucleotide
acgcatcgtctgagtcacataatccaaaaa

SEQ ID NO: 226813 - DNA, 30 bp, Artificial Sequence
  Synthetic oligonucleotide
gcgggacctggacggagagcgttccaaaaa

SEQ ID NO: 226814 - DNA, 30 bp, Artificial Sequence
  Synthetic oligonucleotide
ttgaaggtagagacttctatgccgcaaaaa

SEQ ID NO: 226815 - DNA, 30 bp, Artificial Sequence
  Synthetic oligonucleotide
tgttgccaattcgttacaattatgcaaaaa

SEQ ID NO: 226816 - DNA, 30 bp, Artificial Sequence
  Synthetic oligonucleotide
tgattgctgagctcaggctttgtgcaaaaa

SEQ ID NO: 226817 - DNA, 30 bp, Artificial Sequence
  Synthetic oligonucleotide
gagactatcgacttagaccttacagaaaaa

SEQ ID NO: 226818 - DNA, 30 bp, Artificial Sequence
  Synthetic oligonucleotide
agcttctccacaaccgcatgaagagaaaaa

SEQ ID NO: 226819 - DNA, 30 bp, Artificial Sequence
  Synthetic oligonucleotide
gtccaaagtttaaacgctgcgcccgaaaaa

SEQ ID NO: 226820 - DNA, 30 bp, Artificial Sequence
  Synthetic oligonucleotide
tgattactctcaaattccaggctcgaaaaa

SEQ ID NO: 226821 - DNA, 30 bp, Artificial Sequence
  Synthetic oligonucleotide
agggtttcgtgagcattccgggtcgaaaaa

SEQ ID NO: 226822 - DNA, 30 bp, Artificial Sequence
  Synthetic oligonucleotide
ccatgtcaaatcgcgggtttactggaaaaa

SEQ ID NO: 226823 - DNA, 30 bp, Artificial Sequence
  Synthetic oligonucleotide
gtcgatatttatacgtaagtgtatgaaaaa

SEQ ID NO: 226824 - DNA, 30 bp, Artificial Sequence
  Synthetic oligonucleotide
agattagtttcagcttgggtaagataaaaa

SEQ ID NO: 226825 - DNA, 30 bp, Artificial Sequence
  Synthetic oligonucleotide
caatcttctttgctaagagggcactaaaaa

SEQ ID NO: 226826 - DNA, 30 bp, Artificial Sequence
  Synthetic oligonucleotide
acgtactgtaatccggaaggtacctaaaaa

SEQ ID NO: 226827 - DNA, 30 bp, Artificial Sequence
  Synthetic oligonucleotide
attaatgtagtcatggatatggtgtaaaaa

SEQ ID NO: 226828 - DNA, 30 bp, Artificial Sequence
  Synthetic oligonucleotide
gtggttaatggtgaccaggtagaaacaaaa

SEQ ID NO: 226829 - DNA, 30 bp, Artificial Sequence
  Synthetic oligonucleotide
taccctgtatggtccgaccggctcacaaaa

SEQ ID NO: 226830 - DNA, 30 bp, Artificial Sequence
  Synthetic oligonucleotide
aagacacgcccgtgattaatttagacaaaa

SEQ ID NO: 226831 - DNA, 30 bp, Artificial Sequence
  Synthetic oligonucleotide
gactttgcggtcgttcgctcacctacaaaa

SEQ ID NO: 226832 - DNA, 30 bp, Artificial Sequence
  Synthetic oligonucleotide
gagggagccaagtacggtgtatgtacaaaa

SEQ ID NO: 226833 - DNA, 30 bp, Artificial Sequence
  Synthetic oligonucleotide
tgggggaaatagactccgggtgtaccaaaa

SEQ ID NO: 226834 - DNA, 30 bp, Artificial Sequence
  Synthetic oligonucleotide
gcgctctaagatagcttcggtatgccaaaa

SEQ ID NO: 226835 - DNA, 30 bp, Artificial Sequence
  Synthetic oligonucleotide
agtaagtgatgaggcgaacctctgccaaaa

SEQ ID NO: 226836 - DNA, 30 bp, Artificial Sequence
  Synthetic oligonucleotide
cccggacaatttaatccacataaagcaaaa

SEQ ID NO: 226837 - DNA, 30 bp, Artificial Sequence
  Synthetic oligonucleotide
ttggtctgttgagacatccgtaaagcaaaa

SEQ ID NO: 226838 - DNA, 30 bp, Artificial Sequence
  Synthetic oligonucleotide
gaatgaatggagggcaggggagcagcaaaa

SEQ ID NO: 226839 - DNA, 30 bp, Artificial Sequence
  Synthetic oligonucleotide
ataatatgaactatggtcaagcgagcaaaa

SEQ ID NO: 226840 - DNA, 30 bp, Artificial Sequence
  Synthetic oligonucleotide
gacaaagcccacgcatctcggatcgcaaaa

SEQ ID NO: 226841 - DNA, 30 bp, Artificial Sequence
  Synthetic oligonucleotide
gttgtatacggcctggaatgtgtggcaaaa

SEQ ID NO: 226842 - DNA, 30 bp, Artificial Sequence
  Synthetic oligonucleotide
gaacggcacggggtgtgccgctatgcaaaa

SEQ ID NO: 226843 - DNA, 30 bp, Artificial Sequence
  Synthetic oligonucleotide
gaccgaactgtgtaacgtgtacgtgcaaaa

SEQ ID NO: 226844 - DNA, 30 bp, Artificial Sequence
  Synthetic oligonucleotide
actagttcgaattggacagtcattgcaaaa

SEQ ID NO: 226845 - DNA, 30 bp, Artificial Sequence
  Synthetic oligonucleotide
tgagccggtctgctagcgggtgtatcaaaa

SEQ ID NO: 226846 - DNA, 30 bp, Artificial Sequence
  Synthetic oligonucleotide
cataggagtacaagaatgaaggtctcaaaa

SEQ ID NO: 226847 - DNA, 30 bp, Artificial Sequence
  Synthetic oligonucleotide
gttgctgtgatattgcgagaaaagtcaaaa

SEQ ID NO: 226848 - DNA, 30 bp, Artificial Sequence
  Synthetic oligonucleotide
atcaacgcacaattacctggagagtcaaaa

SEQ ID NO: 226849 - DNA, 30 bp, Artificial Sequence
  Synthetic oligonucleotide
tgaatagatagacactgctgaacgtcaaaa

SEQ ID NO: 226850 - DNA, 30 bp, Artificial Sequence
  Synthetic oligonucleotide
ggcaaccagtaactgcaggtaacgtcaaaa

SEQ ID NO: 226851 - DNA, 30 bp, Artificial Sequence
  Synthetic oligonucleotide
acatggatgggctaagactaaaattcaaaa

SEQ ID NO: 226852 - DNA, 30 bp, Artificial Sequence
  Synthetic oligonucleotide
ccctgtgctaacacaatcgtgcgaagaaaa

SEQ ID NO: 226853 - DNA, 30 bp, Artificial Sequence
  Synthetic oligonucleotide
cttagttcagcggtaaggtgcgtaagaaaa

SEQ ID NO: 226854 - DNA, 30 bp, Artificial Sequence
  Synthetic oligonucleotide
actctcactactatggagggttgcagaaaa

SEQ ID NO: 226855 - DNA, 30 bp, Artificial Sequence
  Synthetic oligonucleotide
gaggctggcaggcgcgtgacgtagagaaaa

SEQ ID NO: 226856 - DNA, 30 bp, Artificial Sequence
  Synthetic oligonucleotide
gataatagcgttcaaaattttacgagaaaa

SEQ ID NO: 226857 - DNA, 30 bp, Artificial Sequence
  Synthetic oligonucleotide
gcacatgccggggctccgatcgctagaaaa

SEQ ID NO: 226858 - DNA, 30 bp, Artificial Sequence
  Synthetic oligonucleotide
ggctagcggtaccctgtcaaaagtagaaaa

SEQ ID NO: 226859 - DNA, 30 bp, Artificial Sequence
  Synthetic oligonucleotide
caaagatactcatcagctggttgtagaaaa

SEQ ID NO: 226860 - DNA, 30 bp, Artificial Sequence
  Synthetic oligonucleotide
ctgcctacgggagaattaatcgaacgaaaa

SEQ ID NO: 226861 - DNA, 30 bp, Artificial Sequence
  Synthetic oligonucleotide
gcgtgcgttcgccagctgttgggacgaaaa

SEQ ID NO: 226862 - DNA, 30 bp, Artificial Sequence
  Synthetic oligonucleotide
atcagctgacttccgggctatttacgaaaa

SEQ ID NO: 226863 - DNA, 30 bp, Artificial Sequence
  Synthetic oligonucleotide
gcacgcgtccattggaggcgaaaccgaaaa

SEQ ID NO: 226864 - DNA, 30 bp, Artificial Sequence
  Synthetic oligonucleotide
cgccatgggcgcgcgagcggacaccgaaaa

SEQ ID NO: 226865 - DNA, 30 bp, Artificial Sequence
  Synthetic oligonucleotide
agcccggattccctttcctcgccgcgaaaa

SEQ ID NO: 226866 - DNA, 30 bp, Artificial Sequence
  Synthetic oligonucleotide
ggccaattcgagataagattatcgcgaaaa

SEQ ID NO: 226867 - DNA, 30 bp, Artificial Sequence
  Synthetic oligonucleotide
gttgaggtctacggtatccacgcaggaaaa

SEQ ID NO: 226868 - DNA, 30 bp, Artificial Sequence
  Synthetic oligonucleotide
cacatatagtgatcagtctcccgcggaaaa

SEQ ID NO: 226869 - DNA, 30 bp, Artificial Sequence
  Synthetic oligonucleotide
cgtcaggcctctctttttaacctcggaaaa

SEQ ID NO: 226870 - DNA, 30 bp, Artificial Sequence
  Synthetic oligonucleotide
attgaaatttgtatacgtaacaagggaaaa

SEQ ID NO: 226871 - DNA, 30 bp, Artificial Sequence
  Synthetic oligonucleotide
aaactccactcgccctaagaagcgggaaaa

SEQ ID NO: 226872 - DNA, 30 bp, Artificial Sequence
  Synthetic oligonucleotide
gtttaacaaaagcctattagcgtgggaaaa

SEQ ID NO: 226873 - DNA, 30 bp, Artificial Sequence
  Synthetic oligonucleotide
taggacaaactggggagagctttgggaaaa

SEQ ID NO: 226874 - DNA, 30 bp, Artificial Sequence
  Synthetic oligonucleotide
agtccagtgttgggccgcaacaatggaaaa

SEQ ID NO: 226875 - DNA, 30 bp, Artificial Sequence
  Synthetic oligonucleotide
aatacgaggaggcacctaggcaatggaaaa

SEQ ID NO: 226876 - DNA, 30 bp, Artificial Sequence
  Synthetic oligonucleotide
ctcagagtgctgtaatttgcttatggaaaa

SEQ ID NO: 226877 - DNA, 30 bp, Artificial Sequence
  Synthetic oligonucleotide
gtgtatacttcggaagtatgcggtggaaaa

SEQ ID NO: 226878 - DNA, 30 bp, Artificial Sequence
  Synthetic oligonucleotide
tgtcggatcggctcaacattagttggaaaa

SEQ ID NO: 226879 - DNA, 30 bp, Artificial Sequence
  Synthetic oligonucleotide
gcgttctaaaacaaatattctgttggaaaa

SEQ ID NO: 226880 - DNA, 30 bp, Artificial Sequence
  Synthetic oligonucleotide
cttgggtcaacaaactctgacacatgaaaa

SEQ ID NO: 226881 - DNA, 30 bp, Artificial Sequence
  Synthetic oligonucleotide
tgttcacacggaggggttagctgctgaaaa

SEQ ID NO: 226882 - DNA, 30 bp, Artificial Sequence
  Synthetic oligonucleotide
tgaatagtgctgagaaagcccctttgaaaa

SEQ ID NO: 226883 - DNA, 30 bp, Artificial Sequence
  Synthetic oligonucleotide
tcggtatatcggtcagctgattaaataaaa

SEQ ID NO: 226884 - DNA, 30 bp, Artificial Sequence
  Synthetic oligonucleotide
ataaataggagcggcccgaaagcaataaaa

SEQ ID NO: 226885 - DNA, 30 bp, Artificial Sequence
  Synthetic oligonucleotide
acacgagtggcaactcacgcagacataaaa

SEQ ID NO: 226886 - DNA, 30 bp, Artificial Sequence
  Synthetic oligonucleotide
gtgaaaattaatcggggaatgagcataaaa

SEQ ID NO: 226887 - DNA, 30 bp, Artificial Sequence
  Synthetic oligonucleotide
ctggatgaagacatcggtgtactcataaaa

SEQ ID NO: 226888 - DNA, 30 bp, Artificial Sequence
  Synthetic oligonucleotide
acggggagattgcgccttgtcgatataaaa

SEQ ID NO: 226889 - DNA, 30 bp, Artificial Sequence
  Synthetic oligonucleotide
tcatttcgcatattgccagaggatataaaa

SEQ ID NO: 226890 - DNA, 30 bp, Artificial Sequence
  Synthetic oligonucleotide
aatgatatgggggtctgctctgctataaaa

SEQ ID NO: 226891 - DNA, 30 bp, Artificial Sequence
  Synthetic oligonucleotide
cgtcatacatgtctaagatcagaactaaaa

SEQ ID NO: 226892 - DNA, 30 bp, Artificial Sequence
  Synthetic oligonucleotide
ggacccacgaaccacagcctaggactaaaa

SEQ ID NO: 226893 - DNA, 30 bp, Artificial Sequence
  Synthetic oligonucleotide
ttaaaaagcgggggtccagcacgcctaaaa

SEQ ID NO: 226894 - DNA, 30 bp, Artificial Sequence
  Synthetic oligonucleotide
tgtgcgaaacgtgtcgcgtctctcctaaaa

SEQ ID NO: 226895 - DNA, 30 bp, Artificial Sequence
  Synthetic oligonucleotide
gaacaaaagctaacaaaagagacgctaaaa

SEQ ID NO: 226896 - DNA, 30 bp, Artificial Sequence
  Synthetic oligonucleotide
agcatggcatgcgctctaggaatgctaaaa

SEQ ID NO: 226897 - DNA, 30 bp, Artificial Sequence
  Synthetic oligonucleotide
gtctcgggggtatagaccggtgctctaaaa

SEQ ID NO: 226898 - DNA, 30 bp, Artificial Sequence
  Synthetic oligonucleotide
gctatcggtatcaacgataagcttctaaaa

SEQ ID NO: 226899 - DNA, 30 bp, Artificial Sequence
  Synthetic oligonucleotide
gctaatgtctacgccagatgaggagtaaaa

SEQ ID NO: 226900 - DNA, 30 bp, Artificial Sequence
  Synthetic oligonucleotide
ctgtataggaggggcaggacttgcgtaaaa

SEQ ID NO: 226901 - DNA, 30 bp, Artificial Sequence
  Synthetic oligonucleotide
cgccatttccatatagttcatcaggtaaaa

SEQ ID NO: 226902 - DNA, 30 bp, Artificial Sequence
  Synthetic oligonucleotide
ttcgttacgtatttagtataggatgtaaaa

SEQ ID NO: 226903 - DNA, 30 bp, Artificial Sequence
  Synthetic oligonucleotide
attagactggcaaacaagtggtatgtaaaa

SEQ ID NO: 226904 - DNA, 30 bp, Artificial Sequence
  Synthetic oligonucleotide
gagcgacttgctcacctcctcattgtaaaa

SEQ ID NO: 226905 - DNA, 30 bp, Artificial Sequence
  Synthetic oligonucleotide
ctttatagggacatatacgtatagttaaaa

SEQ ID NO: 226906 - DNA, 30 bp, Artificial Sequence
  Synthetic oligonucleotide
cctctagataacagtgaaccagggttaaaa

SEQ ID NO: 226907 - DNA, 30 bp, Artificial Sequence
  Synthetic oligonucleotide
gcgaagatgtttgctactacatgtttaaaa

SEQ ID NO: 226908 - DNA, 30 bp, Artificial Sequence
  Synthetic oligonucleotide
tgcgcggagaagtcatattctaaaaacaaa

SEQ ID NO: 226909 - DNA, 30 bp, Artificial Sequence
  Synthetic oligonucleotide
ttacgacgggtaatgacgtgcgacaacaaa

SEQ ID NO: 226910 - DNA, 30 bp, Artificial Sequence
  Synthetic oligonucleotide
gtactcaacaacgttgaccggcgcaacaaa

SEQ ID NO: 226911 - DNA, 30 bp, Artificial Sequence
  Synthetic oligonucleotide
tacgtgactagattgggcgcatagaacaaa

SEQ ID NO: 226912 - DNA, 30 bp, Artificial Sequence
  Synthetic oligonucleotide
aatggggcggatctcctcagtccgaacaaa

SEQ ID NO: 226913 - DNA, 30 bp, Artificial Sequence
  Synthetic oligonucleotide
tactgcgaattgcgaactccccttaacaaa

SEQ ID NO: 226914 - DNA, 30 bp, Artificial Sequence
  Synthetic oligonucleotide
ccttaatggatggtcggcgaggaccacaaa

SEQ ID NO: 226915 - DNA, 30 bp, Artificial Sequence
  Synthetic oligonucleotide
ttcatacgaaacgctagagtaacgcacaaa

SEQ ID NO: 226916 - DNA, 30 bp, Artificial Sequence
  Synthetic oligonucleotide
tgggcgccatcgcaccaaaaaaatcacaaa

SEQ ID NO: 226917 - DNA, 30 bp, Artificial Sequence
  Synthetic oligonucleotide
gccgcggtacctgatcagaatattcacaaa

SEQ ID NO: 226918 - DNA, 30 bp, Artificial Sequence
  Synthetic oligonucleotide
ccactgtttgaaattggtggcgaagacaaa

SEQ ID NO: 226919 - DNA, 30 bp, Artificial Sequence
  Synthetic oligonucleotide
tccgtaccgacacgaaagggttacgacaaa

SEQ ID NO: 226920 - DNA, 30 bp, Artificial Sequence
  Synthetic oligonucleotide
acaacatgtctcaattttcagtgggacaaa

SEQ ID NO: 226921 - DNA, 30 bp, Artificial Sequence
  Synthetic oligonucleotide
tcaacaaaatgtggtgtcgctctggacaaa

SEQ ID NO: 226922 - DNA, 30 bp, Artificial Sequence
  Synthetic oligonucleotide
cctccgtgtatagactaatcctaatacaaa

SEQ ID NO: 226923 - DNA, 30 bp, Artificial Sequence
  Synthetic oligonucleotide
tatcaacggtacgggactaagtaatacaaa

SEQ ID NO: 226924 - DNA, 30 bp, Artificial Sequence
  Synthetic oligonucleotide
gcccccgggcgagcctaatcagagtacaaa

SEQ ID NO: 226925 - DNA, 30 bp, Artificial Sequence
  Synthetic oligonucleotide
tagcaagtcacacagagcagaccgtacaaa

SEQ ID NO: 226926 - DNA, 30 bp, Artificial Sequence
  Synthetic oligonucleotide
gtggatagtaatcagtcgggcgcgtacaaa

SEQ ID NO: 226927 - DNA, 30 bp, Artificial Sequence
  Synthetic oligonucleotide
aaaactgttcttatggtggaagggtacaaa

SEQ ID NO: 226928 - DNA, 30 bp, Artificial Sequence
  Synthetic oligonucleotide
agttgacccggatggaaatactcttacaaa

SEQ ID NO: 226929 - DNA, 30 bp, Artificial Sequence
  Synthetic oligonucleotide
tgccttgtaagggcgccgatcctaaccaaa

SEQ ID NO: 226930 - DNA, 30 bp, Artificial Sequence
  Synthetic oligonucleotide
gaatgtcgagtcagaagaccgctaaccaaa

SEQ ID NO: 226931 - DNA, 30 bp, Artificial Sequence
  Synthetic oligonucleotide
acgagttttatcatgtattttgtaaccaaa

SEQ ID NO: 226932 - DNA, 30 bp, Artificial Sequence
  Synthetic oligonucleotide
aggcggtcctagctggtagatgccaccaaa

SEQ ID NO: 226933 - DNA, 30 bp, Artificial Sequence
  Synthetic oligonucleotide
gacgacccgtcactatgcgaatataccaaa

SEQ ID NO: 226934 - DNA, 30 bp, Artificial Sequence
  Synthetic oligonucleotide
ttccgatttgcaagaaacaggcgtaccaaa

SEQ ID NO: 226935 - DNA, 30 bp, Artificial Sequence
  Synthetic oligonucleotide
cgatgactcgtgcccgactcagcacccaaa

SEQ ID NO: 226936 - DNA, 30 bp, Artificial Sequence
  Synthetic oligonucleotide
actgagagacaggacgtgtcttcacccaaa

SEQ ID NO: 226937 - DNA, 30 bp, Artificial Sequence
  Synthetic oligonucleotide
ccgcggcagactgagcggcagagccccaaa

SEQ ID NO: 226938 - DNA, 30 bp, Artificial Sequence
  Synthetic oligonucleotide
ggctattcccgaattcagggtggccccaaa

SEQ ID NO: 226939 - DNA, 30 bp, Artificial Sequence
  Synthetic oligonucleotide
ccttgacaaaatacgggtaggatccccaaa

SEQ ID NO: 226940 - DNA, 30 bp, Artificial Sequence
  Synthetic oligonucleotide
cgcttgacgtgttagaaaccccagcccaaa

SEQ ID NO: 226941 - DNA, 30 bp, Artificial Sequence
  Synthetic oligonucleotide
cacttaaacgctcagtgacatgagcccaaa

SEQ ID NO: 226942 - DNA, 30 bp, Artificial Sequence
  Synthetic oligonucleotide
ccatgggcacacagtcagcgcgggcccaaa

SEQ ID NO: 226943 - DNA, 30 bp, Artificial Sequence
  Synthetic oligonucleotide
ggacaacaacatcgactgcaccatcccaaa

SEQ ID NO: 226944 - DNA, 30 bp, Artificial Sequence
  Synthetic oligonucleotide
cctggactacttacctcagaacttcccaaa

SEQ ID NO: 226945 - DNA, 30 bp, Artificial Sequence
  Synthetic oligonucleotide
catttcttaaaagtcttaagttacgccaaa

SEQ ID NO: 226946 - DNA, 30 bp, Artificial Sequence
  Synthetic oligonucleotide
tcatatattagttcgatattagtcgccaaa

SEQ ID NO: 226947 - DNA, 30 bp, Artificial Sequence
  Synthetic oligonucleotide
gataaggccgcaaaatcaagggtcgccaaa

SEQ ID NO: 226948 - DNA, 30 bp, Artificial Sequence
  Synthetic oligonucleotide
cttacagaaggtagatgtactagggccaaa

SEQ ID NO: 226949 - DNA, 30 bp, Artificial Sequence
  Synthetic oligonucleotide
ttcagtatggcctacaaacaggtggccaaa

SEQ ID NO: 226950 - DNA, 30 bp, Artificial Sequence
  Synthetic oligonucleotide
gctcgaacctaacctcagagtcttgccaaa

SEQ ID NO: 226951 - DNA, 30 bp, Artificial Sequence
  Synthetic oligonucleotide
catagacctgactaacgcttgcactccaaa

SEQ ID NO: 226952 - DNA, 30 bp, Artificial Sequence
  Synthetic oligonucleotide
aaacagcaagcgtggcagctgaggtccaaa

SEQ ID NO: 226953 - DNA, 30 bp, Artificial Sequence
  Synthetic oligonucleotide
agaatatgatgacagatattgagttccaaa

SEQ ID NO: 226954 - DNA, 30 bp, Artificial Sequence
  Synthetic oligonucleotide
tgcagtgtaagggcctaatatttttccaaa

SEQ ID NO: 226955 - DNA, 30 bp, Artificial Sequence
  Synthetic oligonucleotide
atagaccccaatgcttttctcctaagcaaa

SEQ ID NO: 226956 - DNA, 30 bp, Artificial Sequence
  Synthetic oligonucleotide
cttacgggcatacaacattgcttaagcaaa

SEQ ID NO: 226957 - DNA, 30 bp, Artificial Sequence
  Synthetic oligonucleotide
aagcagccctgcacaacagataacagcaaa

SEQ ID NO: 226958 - DNA, 30 bp, Artificial Sequence
  Synthetic oligonucleotide
ccccctctcgggaccaaatttgccagcaaa

SEQ ID NO: 226959 - DNA, 30 bp, Artificial Sequence
  Synthetic oligonucleotide
ttgcatgagatggccagagcgttcagcaaa

SEQ ID NO: 226960 - DNA, 30 bp, Artificial Sequence
  Synthetic oligonucleotide
ggatgcgttgcaccattcaagacccgcaaa

SEQ ID NO: 226961 - DNA, 30 bp, Artificial Sequence
  Synthetic oligonucleotide
tcgggggagataagaaagccgtcgcgcaaa

SEQ ID NO: 226962 - DNA, 30 bp, Artificial Sequence
  Synthetic oligonucleotide
tctcggtccaacaccggctacaccggcaaa

SEQ ID NO: 226963 - DNA, 31 bp, Artificial Sequence
  Synthetic oligonucleotide
ctttggaataacgcgcaagatcttcggcaaa

SEQ ID NO: 226964 - DNA, 30 bp, Artificial Sequence
  Synthetic oligonucleotide
tgtggcaggggatgtatcgtgcatggcaaa

SEQ ID NO: 226965 - DNA, 30 bp, Artificial Sequence
  Synthetic oligonucleotide
tatatctacggaacaacaccgcgtggcaaa

SEQ ID NO: 226966 - DNA, 30 bp, Artificial Sequence
  Synthetic oligonucleotide
aactgtcatgcgatttgactgattggcaaa

SEQ ID NO: 226967 - DNA, 30 bp, Artificial Sequence
  Synthetic oligonucleotide
gtcactctatggagttaaaagtaatgcaaa

SEQ ID NO: 226968 - DNA, 30 bp, Artificial Sequence
  Synthetic oligonucleotide
atacaggcaaagcattgtagatcatgcaaa

SEQ ID NO: 226969 - DNA, 30 bp, Artificial Sequence
  Synthetic oligonucleotide
gacaaatagattccatggggcatgtgcaaa

SEQ ID NO: 226970 - DNA, 30 bp, Artificial Sequence
  Synthetic oligonucleotide
gcgtcaggaaagatggtaacatcttgcaaa

SEQ ID NO: 226971 - DNA, 30 bp, Artificial Sequence
  Synthetic oligonucleotide
aaaggctcgcccgagattgagatttgcaaa

SEQ ID NO: 226972 - DNA, 30 bp, Artificial Sequence
  Synthetic oligonucleotide
tgacatcttggcgcgagcgtagtcatcaaa

SEQ ID NO: 226973 - DNA, 30 bp, Artificial Sequence
  Synthetic oligonucleotide
ggtagataatgatctaaagtggcgatcaaa

SEQ ID NO: 226974 - DNA, 31 bp, Artificial Sequence
  Synthetic oligonucleotide
gctaaactatactaagtccgcgctgatcaaa

SEQ ID NO: 226975 - DNA, 30 bp, Artificial Sequence
  Synthetic oligonucleotide
aaagctgtatcagccgataagaatatcaaa

SEQ ID NO: 226976 - DNA, 30 bp, Artificial Sequence
  Synthetic oligonucleotide
taaggctagtgggctggacgtaatatcaaa

SEQ ID NO: 226977 - DNA, 30 bp, Artificial Sequence
  Synthetic oligonucleotide
aggcctcggggagatttgtcgcatatcaaa

SEQ ID NO: 226978 - DNA, 30 bp, Artificial Sequence
  Synthetic oligonucleotide
ccctggctcacgaggtgacactctatcaaa

SEQ ID NO: 226979 - DNA, 30 bp, Artificial Sequence
  Synthetic oligonucleotide
aggcaacgcgattaggaagacggtatcaaa

SEQ ID NO: 226980 - DNA, 30 bp, Artificial Sequence
  Synthetic oligonucleotide
ggggtcaaaaactttcatcggtgactcaaa

SEQ ID NO: 226981 - DNA, 25 bp, Artificial Sequence
  Synthetic oligonucleotide
cgtaatgtgccgtctggtactcaaa

SEQ ID NO: 226982 - DNA, 30 bp, Artificial Sequence
  Synthetic oligonucleotide
ggacctccctatcaagtttagggcctcaaa

SEQ ID NO: 226983 - DNA, 30 bp, Artificial Sequence
  Synthetic oligonucleotide
gcgagtagatggatgagataacatctcaaa

SEQ ID NO: 226984 - DNA, 30 bp, Artificial Sequence
  Synthetic oligonucleotide
ggaaaacacttgaactagaattttctcaaa

SEQ ID NO: 226985 - DNA, 30 bp, Artificial Sequence
  Synthetic oligonucleotide
gtattgcgtcagacccacagtcaagtcaaa

SEQ ID NO: 226986 - DNA, 30 bp, Artificial Sequence
  Synthetic oligonucleotide
gtctgttcaaaatgaatgcaatgagtcaaa

SEQ ID NO: 226987 - DNA, 30 bp, Artificial Sequence
  Synthetic oligonucleotide
cctcgttttaagggccggcctggggtcaaa

SEQ ID NO: 226988 - DNA, 30 bp, Artificial Sequence
  Synthetic oligonucleotide
gcattagaacttagtcgggtacatgtcaaa

SEQ ID NO: 226989 - DNA, 30 bp, Artificial Sequence
  Synthetic oligonucleotide
gtggtgtgtgcccgaaccacgtatgtcaaa

SEQ ID NO: 226990 - DNA, 30 bp, Artificial Sequence
  Synthetic oligonucleotide
cgtttctccgagaacattaaaccattcaaa

SEQ ID NO: 226991 - DNA, 30 bp, Artificial Sequence
  Synthetic oligonucleotide
tggcgcggaaatataacgccgggattcaaa

SEQ ID NO: 226992 - DNA, 30 bp, Artificial Sequence
  Synthetic oligonucleotide
gtcgaaacccgacgtaacccgctcttcaaa

SEQ ID NO: 226993 - DNA, 30 bp, Artificial Sequence
  Synthetic oligonucleotide
gcggtatgctggttctcaatgtcgttcaaa

SEQ ID NO: 226994 - DNA, 30 bp, Artificial Sequence
  Synthetic oligonucleotide
gcaatcccaaggagtgttaagaatttcaaa

SEQ ID NO: 226995 - DNA, 30 bp, Artificial Sequence
  Synthetic oligonucleotide
gcactaggagatagaggaccacaaaagaaa

SEQ ID NO: 226996 - DNA, 30 bp, Artificial Sequence
  Synthetic oligonucleotide
atcaacaaggccgttacgagactaaagaaa

SEQ ID NO: 226997 - DNA, 30 bp, Artificial Sequence
  Synthetic oligonucleotide
atcgttaaagggatgtgatcagtaaagaaa

SEQ ID NO: 226998 - DNA, 30 bp, Artificial Sequence
  Synthetic oligonucleotide
gttactcgcggtcacacttaagcgaagaaa

SEQ ID NO: 226999 - DNA, 30 bp, Artificial Sequence
  Synthetic oligonucleotide
acttatgtggttgatagtacgtcgaagaaa

SEQ ID NO: 227000 - DNA, 30 bp, Artificial Sequence
  Synthetic oligonucleotide
aaccgtgtgtaggcagtacggcggaagaaa

SEQ ID NO: 227001 - DNA, 30 bp, Artificial Sequence
  Synthetic oligonucleotide
ttcattggcgacaagggtctgtgtaagaaa

SEQ ID NO: 227002 - DNA, 30 bp, Artificial Sequence
  Synthetic oligonucleotide
ctcgaccacaaacgtcactgggttaagaaa

SEQ ID NO: 227003 - DNA, 30 bp, Artificial Sequence
  Synthetic oligonucleotide
gttataacaatgcgatagacacgacagaaa

SEQ ID NO: 227004 - DNA, 30 bp, Artificial Sequence
  Synthetic oligonucleotide
agtgacaaatgaatgcgcgaacaccagaaa

SEQ ID NO: 227005 - DNA, 30 bp, Artificial Sequence
  Synthetic oligonucleotide
tactaggttgggacctcattgtcccagaaa

SEQ ID NO: 227006 - DNA, 30 bp, Artificial Sequence
  Synthetic oligonucleotide
aggagccagcaggagctgttcggccagaaa

SEQ ID NO: 227007 - DNA, 30 bp, Artificial Sequence
  Synthetic oligonucleotide
agcctgagaccctgatggtatatccagaaa

SEQ ID NO: 227008 - DNA, 30 bp, Artificial Sequence
  Synthetic oligonucleotide
tttatggttgcgattcaggaatagcagaaa

SEQ ID NO: 227009 - DNA, 30 bp, Artificial Sequence
  Synthetic oligonucleotide
gtgtccttatagggttaaacccggcagaaa

SEQ ID NO: 227010 - DNA, 30 bp, Artificial Sequence
  Synthetic oligonucleotide
tcgccggtcccatcatcgcgactgcagaaa

SEQ ID NO: 227011 - DNA, 30 bp, Artificial Sequence
  Synthetic oligonucleotide
gacgtgaagacccagcggataagtcagaaa

SEQ ID NO: 227012 - DNA, 30 bp, Artificial Sequence
  Synthetic oligonucleotide
gctaagggctcgcctaagagcatagagaaa

SEQ ID NO: 227013 - DNA, 30 bp, Artificial Sequence
  Synthetic oligonucleotide
ccgaatgcgcggagaccgttgctagagaaa

SEQ ID NO: 227014 - DNA, 30 bp, Artificial Sequence
  Synthetic oligonucleotide
gacaagcccggcggtgtgtcagaggagaaa

SEQ ID NO: 227015 - DNA, 30 bp, Artificial Sequence
  Synthetic oligonucleotide
ctgaagtcgtgcgtttgacacacggagaaa

SEQ ID NO: 227016 - DNA, 30 bp, Artificial Sequence
  Synthetic oligonucleotide
atggcatttaatgacctgtctagggagaaa

SEQ ID NO: 227017 - DNA, 30 bp, Artificial Sequence
  Synthetic oligonucleotide
tctacgtgctagttttccgtcttggagaaa

SEQ ID NO: 227018 - DNA, 30 bp, Artificial Sequence
  Synthetic oligonucleotide
tcagagtacattgaaatgggcgatgagaaa

SEQ ID NO: 227019 - DNA, 30 bp, Artificial Sequence
  Synthetic oligonucleotide
gattatcgactgtctagggtagaatagaaa

SEQ ID NO: 227020 - DNA, 30 bp, Artificial Sequence
  Synthetic oligonucleotide
aaatagactttcaggacaccgagatagaaa

SEQ ID NO: 227021 - DNA, 30 bp, Artificial Sequence
  Synthetic oligonucleotide
tagaaaggtacgccgacatcctcctagaaa

SEQ ID NO: 227022 - DNA, 30 bp, Artificial Sequence
  Synthetic oligonucleotide
tacgcgacccatgctttaggcagctagaaa

SEQ ID NO: 227023 - DNA, 30 bp, Artificial Sequence
  Synthetic oligonucleotide
actttgggatggcgcttacggttctagaaa

SEQ ID NO: 227024 - DNA, 30 bp, Artificial Sequence
  Synthetic oligonucleotide
gtgcaattatgaaatgtgctcttgtagaaa

SEQ ID NO: 227025 - DNA, 30 bp, Artificial Sequence
  Synthetic oligonucleotide
tttgatgacggttcaagtggcgattagaaa

SEQ ID NO: 227026 - DNA, 30 bp, Artificial Sequence
  Synthetic oligonucleotide
gcttgtagtattctaactttacaaacgaaa

SEQ ID NO: 227027 - DNA, 30 bp, Artificial Sequence
  Synthetic oligonucleotide
atgggttaatcactatattaccaaacgaaa

SEQ ID NO: 227028 - DNA, 30 bp, Artificial Sequence
  Synthetic oligonucleotide
gctcacaccttggaggtttcctgaacgaaa

SEQ ID NO: 227029 - DNA, 30 bp, Artificial Sequence
  Synthetic oligonucleotide
tgccatgcttatgctgtaacatagacgaaa

SEQ ID NO: 227030 - DNA, 30 bp, Artificial Sequence
  Synthetic oligonucleotide
ctagaatgaaatgactggcaaacgacgaaa

SEQ ID NO: 227031 - DNA, 30 bp, Artificial Sequence
  Synthetic oligonucleotide
cagctaaacgggtctaattaagtgacgaaa

SEQ ID NO: 227032 - DNA, 30 bp, Artificial Sequence
  Synthetic oligonucleotide
gagtaaaggcaagtacaaaagccaccgaaa

SEQ ID NO: 227033 - DNA, 30 bp, Artificial Sequence
  Synthetic oligonucleotide
catcatgtactaccgttagcgcgaccgaaa

SEQ ID NO: 227034 - DNA, 30 bp, Artificial Sequence
  Synthetic oligonucleotide
ataccgaaatccggaagcatcctaccgaaa

SEQ ID NO: 227035 - DNA, 30 bp, Artificial Sequence
  Synthetic oligonucleotide
aagtaggacagcaacctagaatgcccgaaa

SEQ ID NO: 227036 - DNA, 30 bp, Artificial Sequence
  Synthetic oligonucleotide
acctaaagcatagccattatgcggccgaaa

SEQ ID NO: 227037 - DNA, 30 bp, Artificial Sequence
  Synthetic oligonucleotide
aacatagccgccagtgaagccatgccgaaa

SEQ ID NO: 227038 - DNA, 30 bp, Artificial Sequence
  Synthetic oligonucleotide
aggaaggaatctgtaacgattcgagcgaaa

SEQ ID NO: 227039 - DNA, 30 bp, Artificial Sequence
  Synthetic oligonucleotide
tgtgttgcgagtcatgccgttggagcgaaa

SEQ ID NO: 227040 - DNA, 30 bp, Artificial Sequence
  Synthetic oligonucleotide
atacggtacgtctctgagcagatagcgaaa

SEQ ID NO: 227041 - DNA, 30 bp, Artificial Sequence
  Synthetic oligonucleotide
gtgccttgtgaggttctgggattagcgaaa

SEQ ID NO: 227042 - DNA, 30 bp, Artificial Sequence
  Synthetic oligonucleotide
cacgtctgtcctcatcgacgttacgcgaaa

SEQ ID NO: 227043 - DNA, 30 bp, Artificial Sequence
  Synthetic oligonucleotide
ctcgctcatcatttgttgggagccgcgaaa

SEQ ID NO: 227044 - DNA, 30 bp, Artificial Sequence
  Synthetic oligonucleotide
agaacgttattttgtatgtggactgcgaaa

SEQ ID NO: 227045 - DNA, 30 bp, Artificial Sequence
  Synthetic oligonucleotide
gctattacgcaagacataacagaatcgaaa

SEQ ID NO: 227046 - DNA, 30 bp, Artificial Sequence
  Synthetic oligonucleotide
gcgggggcaagggttgaaaacccatcgaaa

SEQ ID NO: 227047 - DNA, 30 bp, Artificial Sequence
  Synthetic oligonucleotide
gatgtgtagagcacgttttgagtatcgaaa

SEQ ID NO: 227048 - DNA, 30 bp, Artificial Sequence
  Synthetic oligonucleotide
tatcaggcagaaaccaagtcggattcgaaa

SEQ ID NO: 227049 - DNA, 30 bp, Artificial Sequence
  Synthetic oligonucleotide
cacaactgtgacccagagcttaaaaggaaa

SEQ ID NO: 227050 - DNA, 30 bp, Artificial Sequence
  Synthetic oligonucleotide
gcagttccagggttaaacgaagtaaggaaa

SEQ ID NO: 227051 - DNA, 30 bp, Artificial Sequence
  Synthetic oligonucleotide
tagataaaataccgtcagaaacacaggaaa

SEQ ID NO: 227052 - DNA, 30 bp, Artificial Sequence
  Synthetic oligonucleotide
aaacacgagttagataagtggtggaggaaa

SEQ ID NO: 227053 - DNA, 30 bp, Artificial Sequence
  Synthetic oligonucleotide
cgacactggagtatggatataaaacggaaa

SEQ ID NO: 227054 - DNA, 30 bp, Artificial Sequence
  Synthetic oligonucleotide
caaagggttggaggtgtgcttgaacggaaa

SEQ ID NO: 227055 - DNA, 30 bp, Artificial Sequence
  Synthetic oligonucleotide
gtgaagacgctgcaatagcacgtacggaaa

SEQ ID NO: 227056 - DNA, 30 bp, Artificial Sequence
  Synthetic oligonucleotide
gacaatggcatatagatatgtgaccggaaa

SEQ ID NO: 227057 - DNA, 30 bp, Artificial Sequence
  Synthetic oligonucleotide
ttaacatgcgataaccaccagtggcggaaa

SEQ ID NO: 227058 - DNA, 30 bp, Artificial Sequence
  Synthetic oligonucleotide
attggggcaaagatgggccaacaagggaaa

SEQ ID NO: 227059 - DNA, 30 bp, Artificial Sequence
  Synthetic oligonucleotide
gtatttcgggcatgaagtgctcaagggaaa

SEQ ID NO: 227060 - DNA, 30 bp, Artificial Sequence
  Synthetic oligonucleotide
cgttcaaacccttcttaaccgggagggaaa

SEQ ID NO: 227061 - DNA, 30 bp, Artificial Sequence
  Synthetic oligonucleotide
cggtcgcctacgccggacatcggggggaaa

SEQ ID NO: 227062 - DNA, 30 bp, Artificial Sequence
  Synthetic oligonucleotide
cttgtcccgtaagggtcctgcagtgggaaa

SEQ ID NO: 227063 - DNA, 30 bp, Artificial Sequence
  Synthetic oligonucleotide
aaatggaccggtcggtccagtgaatggaaa

SEQ ID NO: 227064 - DNA, 30 bp, Artificial Sequence
  Synthetic oligonucleotide
tgtcgaactagtaatacgctatcatggaaa

SEQ ID NO: 227065 - DNA, 30 bp, Artificial Sequence
  Synthetic oligonucleotide
tagagccgtatcaataggcagttatggaaa

SEQ ID NO: 227066 - DNA, 30 bp, Artificial Sequence
  Synthetic oligonucleotide
agagtagcacgtaatgcaccgccaatgaaa

SEQ ID NO: 227067 - DNA, 30 bp, Artificial Sequence
  Synthetic oligonucleotide
ccatttatcgctgagatatgtgtaatgaaa

SEQ ID NO: 227068 - DNA, 30 bp, Artificial Sequence
  Synthetic oligonucleotide
aaggaatctggaagtagtaatttaatgaaa

SEQ ID NO: 227069 - DNA, 30 bp, Artificial Sequence
  Synthetic oligonucleotide
ctgaataggatacagcgtatttccatgaaa

SEQ ID NO: 227070 - DNA, 30 bp, Artificial Sequence
  Synthetic oligonucleotide
gggtaccggtggtatagcggaggcatgaaa

SEQ ID NO: 227071 - DNA, 30 bp, Artificial Sequence
  Synthetic oligonucleotide
cgcatacatgattgccggaaagagatgaaa

SEQ ID NO: 227072 - DNA, 30 bp, Artificial Sequence
  Synthetic oligonucleotide
ggatgaagcggcaactcgacatgtatgaaa

SEQ ID NO: 227073 - DNA, 30 bp, Artificial Sequence
  Synthetic oligonucleotide
aacggagcagtaacgcgtttcgttatgaaa

SEQ ID NO: 227074 - DNA, 30 bp, Artificial Sequence
  Synthetic oligonucleotide
aatcaggggacaccaatcaaatcactgaaa

SEQ ID NO: 227075 - DNA, 30 bp, Artificial Sequence
  Synthetic oligonucleotide
gaggaattgtaacatatccggggactgaaa

SEQ ID NO: 227076 - DNA, 30 bp, Artificial Sequence
  Synthetic oligonucleotide
atacctagatggccagtatgaatactgaaa

SEQ ID NO: 227077 - DNA, 30 bp, Artificial Sequence
  Synthetic oligonucleotide
tccacatgatggttcatcaggaggctgaaa

SEQ ID NO: 227078 - DNA, 30 bp, Artificial Sequence
  Synthetic oligonucleotide
catagctaggggagagtactgtgtctgaaa

SEQ ID NO: 227079 - DNA, 30 bp, Artificial Sequence
  Synthetic oligonucleotide
aaaggttggtctctcgctgcttgtctgaaa

SEQ ID NO: 227080 - DNA, 30 bp, Artificial Sequence
  Synthetic oligonucleotide
aacgggttagatcgttcaggcaaagtgaaa

SEQ ID NO: 227081 - DNA, 30 bp, Artificial Sequence
  Synthetic oligonucleotide
ttgctgcaggatggacgtgacggagtgaaa

SEQ ID NO: 227082 - DNA, 30 bp, Artificial Sequence
  Synthetic oligonucleotide
tgctttcaagcccggtagtttaccgtgaaa

SEQ ID NO: 227083 - DNA, 30 bp, Artificial Sequence
  Synthetic oligonucleotide
ctgggggaaatcactaggccggccgtgaaa

SEQ ID NO: 227084 - DNA, 30 bp, Artificial Sequence
  Synthetic oligonucleotide
gcttgaaagctccgttcacatatcgtgaaa

SEQ ID NO: 227085 - DNA, 30 bp, Artificial Sequence
  Synthetic oligonucleotide
tcgacagtgaataattgcggctcggtgaaa

SEQ ID NO: 227086 - DNA, 30 bp, Artificial Sequence
  Synthetic oligonucleotide
acattttaaaatgttaaggcggtggtgaaa

SEQ ID NO: 227087 - DNA, 30 bp, Artificial Sequence
  Synthetic oligonucleotide
taaagagccctaaccacgcacgatgtgaaa

SEQ ID NO: 227088 - DNA, 30 bp, Artificial Sequence
  Synthetic oligonucleotide
gtggtgatcgggccatcaatgctattgaaa

SEQ ID NO: 227089 - DNA, 30 bp, Artificial Sequence
  Synthetic oligonucleotide
gcaaatatgggagacgcaaatatgttgaaa

SEQ ID NO: 227090 - DNA, 29 bp, Artificial Sequence
  Synthetic oligonucleotide
tgtggagtatagctgggcaaaaaaataaa

SEQ ID NO: 227091 - DNA, 30 bp, Artificial Sequence
  Synthetic oligonucleotide
tacagaagccctgaggggcgccaaaataaa

SEQ ID NO: 227092 - DNA, 30 bp, Artificial Sequence
  Synthetic oligonucleotide
agcagggtagctgtacacgttccaaataaa

SEQ ID NO: 227093 - DNA, 30 bp, Artificial Sequence
  Synthetic oligonucleotide
acagttgctgcaaacaaatagtcaaataaa

SEQ ID NO: 227094 - DNA, 30 bp, Artificial Sequence
  Synthetic oligonucleotide
aggtcagtgctagaccgtgacatgaataaa

SEQ ID NO: 227095 - DNA, 30 bp, Artificial Sequence
  Synthetic oligonucleotide
acaaagcagatagacgcctacgataataaa

SEQ ID NO: 227096 - DNA, 30 bp, Artificial Sequence
  Synthetic oligonucleotide
cgtgtgaacgagcccataactcctaataaa

SEQ ID NO: 227097 - DNA, 30 bp, Artificial Sequence
  Synthetic oligonucleotide
gcactccaggagaggtagtgtacccataaa

SEQ ID NO: 227098 - DNA, 30 bp, Artificial Sequence
  Synthetic oligonucleotide
gggactggtttattccaaaggagccataaa

SEQ ID NO: 227099 - DNA, 30 bp, Artificial Sequence
  Synthetic oligonucleotide
accgcagaagcatctcaacaatagcataaa

SEQ ID NO: 227100 - DNA, 30 bp, Artificial Sequence
  Synthetic oligonucleotide
aatgacaattctcattggagcaggcataaa

SEQ ID NO: 227101 - DNA, 30 bp, Artificial Sequence
  Synthetic oligonucleotide
gagggccgaaggccgagaactcctcataaa

SEQ ID NO: 227102 - DNA, 30 bp, Artificial Sequence
  Synthetic oligonucleotide
agaccttagtttttgccataagcagataaa

SEQ ID NO: 227103 - DNA, 30 bp, Artificial Sequence
  Synthetic oligonucleotide
acaacgcaatcgtaggtagtacgagataaa

SEQ ID NO: 227104 - DNA, 30 bp, Artificial Sequence
  Synthetic oligonucleotide
taatgcgccactttagctgactccgataaa

SEQ ID NO: 227105 - DNA, 30 bp, Artificial Sequence
  Synthetic oligonucleotide
ggagaatatagtgttcctagtttcgataaa

SEQ ID NO: 227106 - DNA, 30 bp, Artificial Sequence
  Synthetic oligonucleotide
cgctcggctgcagatgggattttcgataaa

SEQ ID NO: 227107 - DNA, 30 bp, Artificial Sequence
  Synthetic oligonucleotide
aggtacttgaaataggatattgatgataaa

SEQ ID NO: 227108 - DNA, 30 bp, Artificial Sequence
  Synthetic oligonucleotide
tattaggacacatcggacgatacatataaa

SEQ ID NO: 227109 - DNA, 30 bp, Artificial Sequence
  Synthetic oligonucleotide
gtatagctctccaggcagctcacctataaa

SEQ ID NO: 227110 - DNA, 30 bp, Artificial Sequence
  Synthetic oligonucleotide
acgaaggtggtgttgttttcattctataaa

SEQ ID NO: 227111 - DNA, 29 bp, Artificial Sequence
  Synthetic oligonucleotide
tttgttgtgtatgtttactcccgtataaa

SEQ ID NO: 227112 - DNA, 30 bp, Artificial Sequence
  Synthetic oligonucleotide
agaaatgctttaaagactcagtcgtataaa

SEQ ID NO: 227113 - DNA, 30 bp, Artificial Sequence
  Synthetic oligonucleotide
gtgtttgggaagagctggacggggtataaa

SEQ ID NO: 227114 - DNA, 30 bp, Artificial Sequence
  Synthetic oligonucleotide
gagtagtagcttacaggcgacggttataaa

SEQ ID NO: 227115 - DNA, 30 bp, Artificial Sequence
  Synthetic oligonucleotide
acctggtgtccagggtggatccgaactaaa

SEQ ID NO: 227116 - DNA, 30 bp, Artificial Sequence
  Synthetic oligonucleotide
acactgcctaggctcagccagcgaactaaa

SEQ ID NO: 227117 - DNA, 30 bp, Artificial Sequence
  Synthetic oligonucleotide
ccggttgtatattccggttagcacactaaa

SEQ ID NO: 227118 - DNA, 30 bp, Artificial Sequence
  Synthetic oligonucleotide
ggaatagtaggcagctcgtccctcactaaa

SEQ ID NO: 227119 - DNA, 30 bp, Artificial Sequence
  Synthetic oligonucleotide
tctcaagagaatcataaagtaaatactaaa

SEQ ID NO: 227120 - DNA, 30 bp, Artificial Sequence
  Synthetic oligonucleotide
cgcatccacggcgtgacgttcgatactaaa

SEQ ID NO: 227121 - DNA, 30 bp, Artificial Sequence
  Synthetic oligonucleotide
accgcaataagtagagttccgtatactaaa

SEQ ID NO: 227122 - DNA, 30 bp, Artificial Sequence
  Synthetic oligonucleotide
tcctggctcatatgtaacggatggcctaaa

SEQ ID NO: 227123 - DNA, 30 bp, Artificial Sequence
  Synthetic oligonucleotide
ggatgcatgatgaagccaaccctagctaaa

SEQ ID NO: 227124 - DNA, 30 bp, Artificial Sequence
  Synthetic oligonucleotide
ctccttgtaggtcgggacaatgaggctaaa

SEQ ID NO: 227125 - DNA, 30 bp, Artificial Sequence
  Synthetic oligonucleotide
cagagtaattaacttactgtatctgctaaa

SEQ ID NO: 227126 - DNA, 30 bp, Artificial Sequence
  Synthetic oligonucleotide
acaagtaccgaagttcgcttaaactctaaa

SEQ ID NO: 227127 - DNA, 30 bp, Artificial Sequence
  Synthetic oligonucleotide
tgggggctataaggacaagtgacgtctaaa

SEQ ID NO: 227128 - DNA, 30 bp, Artificial Sequence
  Synthetic oligonucleotide
gcacaccacgtgaagagtaaaaaaagtaaa

SEQ ID NO: 227129 - DNA, 30 bp, Artificial Sequence
  Synthetic oligonucleotide
agggcacctttaacgtcaagaaacagtaaa

SEQ ID NO: 227130 - DNA, 30 bp, Artificial Sequence
  Synthetic oligonucleotide
tatagcaaacatgttcatcaagacagtaaa

SEQ ID NO: 227131 - DNA, 30 bp, Artificial Sequence
  Synthetic oligonucleotide
catacggtagccgctctaatgtccagtaaa

SEQ ID NO: 227132 - DNA, 30 bp, Artificial Sequence
  Synthetic oligonucleotide
agtagcaccatgtacgactagttgagtaaa

SEQ ID NO: 227133 - DNA, 30 bp, Artificial Sequence
  Synthetic oligonucleotide
ctacagaataagaagtcgcggcttagtaaa

SEQ ID NO: 227134 - DNA, 30 bp, Artificial Sequence
  Synthetic oligonucleotide
cattggtgcactacaggagacccgcgtaaa

SEQ ID NO: 227135 - DNA, 30 bp, Artificial Sequence
  Synthetic oligonucleotide
tcgtactgcccatgctcgatgcggcgtaaa

SEQ ID NO: 227136 - DNA, 30 bp, Artificial Sequence
  Synthetic oligonucleotide
taccttaagatacgtgatattaaaggtaaa

SEQ ID NO: 227137 - DNA, 30 bp, Artificial Sequence
  Synthetic oligonucleotide
atgttccgtacacctcggagataaggtaaa

SEQ ID NO: 227138 - DNA, 30 bp, Artificial Sequence
  Synthetic oligonucleotide
tctcgaagtcacccagccttatgaggtaaa

SEQ ID NO: 227139 - DNA, 30 bp, Artificial Sequence
  Synthetic oligonucleotide
ataaccgaagtataatgcctctgaggtaaa

SEQ ID NO: 227140 - DNA, 30 bp, Artificial Sequence
  Synthetic oligonucleotide
gacgttggacaatcacaagacaccggtaaa

SEQ ID NO: 227141 - DNA, 30 bp, Artificial Sequence
  Synthetic oligonucleotide
ttaccgtcgacatgtaggtacagcggtaaa

SEQ ID NO: 227142 - DNA, 30 bp, Artificial Sequence
  Synthetic oligonucleotide
gaagggttcgggggtaccggcctgggtaaa

SEQ ID NO: 227143 - DNA, 30 bp, Artificial Sequence
  Synthetic oligonucleotide
gtgaaagttaaggggaattatgtgggtaaa

SEQ ID NO: 227144 - DNA, 30 bp, Artificial Sequence
  Synthetic oligonucleotide
ctcattgtatgggtcaggcccttgggtaaa

SEQ ID NO: 227145 - DNA, 30 bp, Artificial Sequence
  Synthetic oligonucleotide
gtacagggatcgtcataacgtcatggtaaa

SEQ ID NO: 227146 - DNA, 30 bp, Artificial Sequence
  Synthetic oligonucleotide
aaatacggaactaggaacgaatgtggtaaa

SEQ ID NO: 227147 - DNA, 30 bp, Artificial Sequence
  Synthetic oligonucleotide
tactagttatcagatccggattgtggtaaa

SEQ ID NO: 227148 - DNA, 30 bp, Artificial Sequence
  Synthetic oligonucleotide
attaactaatgacatcactactgatgtaaa

SEQ ID NO: 227149 - DNA, 30 bp, Artificial Sequence
  Synthetic oligonucleotide
gttcagttcaggatcttcgaactctgtaaa

SEQ ID NO: 227150 - DNA, 30 bp, Artificial Sequence
  Synthetic oligonucleotide
ctgacagagactccgtccggggtgtgtaaa

SEQ ID NO: 227151 - DNA, 30 bp, Artificial Sequence
  Synthetic oligonucleotide
atcgtgtatggatttacttgcgattgtaaa

SEQ ID NO: 227152 - DNA, 30 bp, Artificial Sequence
  Synthetic oligonucleotide
acttgagttatcacaaaagtatcttgtaaa

SEQ ID NO: 227153 - DNA, 30 bp, Artificial Sequence
  Synthetic oligonucleotide
cacaatgtagcagggcggctctcttgtaaa

SEQ ID NO: 227154 - DNA, 30 bp, Artificial Sequence
  Synthetic oligonucleotide
gaacgttggtgtatatagcgaatttgtaaa

SEQ ID NO: 227155 - DNA, 30 bp, Artificial Sequence
  Synthetic oligonucleotide
ctggccatatggccacaatgcatttgtaaa

SEQ ID NO: 227156 - DNA, 30 bp, Artificial Sequence
  Synthetic oligonucleotide
gggagcctagatcggtgtaaggaaattaaa

SEQ ID NO: 227157 - DNA, 30 bp, Artificial Sequence
  Synthetic oligonucleotide
catggacttctcttatcgaaccgaattaaa

SEQ ID NO: 227158 - DNA, 30 bp, Artificial Sequence
  Synthetic oligonucleotide
aggtacgaactagttcattatggaattaaa

SEQ ID NO: 227159 - DNA, 30 bp, Artificial Sequence
  Synthetic oligonucleotide
tgaaggctgaagttggcacccgtcattaaa

SEQ ID NO: 227160 - DNA, 30 bp, Artificial Sequence
  Synthetic oligonucleotide
atggtaactgaggcgctgtggagtattaaa

SEQ ID NO: 227161 - DNA, 30 bp, Artificial Sequence
  Synthetic oligonucleotide
gcgtaatcgtcagtatgtagtcgtattaaa

SEQ ID NO: 227162 - DNA, 30 bp, Artificial Sequence
  Synthetic oligonucleotide
cctaagttcacgggcgtccagattattaaa

SEQ ID NO: 227163 - DNA, 30 bp, Artificial Sequence
  Synthetic oligonucleotide
ataagactacgccagcaagcagcacttaaa

SEQ ID NO: 227164 - DNA, 30 bp, Artificial Sequence
  Synthetic oligonucleotide
gccgagctatctagtaaacctatacttaaa

SEQ ID NO: 227165 - DNA, 30 bp, Artificial Sequence
  Synthetic oligonucleotide
ctgataaacacttgttggccgtaccttaaa

SEQ ID NO: 227166 - DNA, 30 bp, Artificial Sequence
  Synthetic oligonucleotide
tctggtattaggccgttcaatcgccttaaa

SEQ ID NO: 227167 - DNA, 30 bp, Artificial Sequence
  Synthetic oligonucleotide
tacattgcaatgtttaccataggccttaaa

SEQ ID NO: 227168 - DNA, 30 bp, Artificial Sequence
  Synthetic oligonucleotide
atctcccactgtttaccaccctgtcttaaa

SEQ ID NO: 227169 - DNA, 30 bp, Artificial Sequence
  Synthetic oligonucleotide
gaggattttcgagaacaatcggccgttaaa

SEQ ID NO: 227170 - DNA, 30 bp, Artificial Sequence
  Synthetic oligonucleotide
gcgaccttccacgtaagaactccggttaaa

SEQ ID NO: 227171 - DNA, 30 bp, Artificial Sequence
  Synthetic oligonucleotide
ctctacggcccaagcctgaggagtgttaaa

SEQ ID NO: 227172 - DNA, 30 bp, Artificial Sequence
  Synthetic oligonucleotide
tataggcatctgccagagggtaaatttaaa

SEQ ID NO: 227173 - DNA, 30 bp, Artificial Sequence
  Synthetic oligonucleotide
ttggatgttgatgtatcggctagatttaaa

SEQ ID NO: 227174 - DNA, 30 bp, Artificial Sequence
  Synthetic oligonucleotide
attgtcgtcattctttccgccaactttaaa

SEQ ID NO: 227175 - DNA, 30 bp, Artificial Sequence
  Synthetic oligonucleotide
cgtagaaaagggtacccctacagctttaaa

SEQ ID NO: 227176 - DNA, 30 bp, Artificial Sequence
  Synthetic oligonucleotide
caccccgagaccaacaatatggagtttaaa

SEQ ID NO: 227177 - DNA, 30 bp, Artificial Sequence
  Synthetic oligonucleotide
caggaggggtcaggcccgtggcggtttaaa

SEQ ID NO: 227178 - DNA, 30 bp, Artificial Sequence
  Synthetic oligonucleotide
gtagggaaaaagcgtctagactggtttaaa

SEQ ID NO: 227179 - DNA, 30 bp, Artificial Sequence
  Synthetic oligonucleotide
tcggacagaggcaggggtgcgatttttaaa

SEQ ID NO: 227180 - DNA, 30 bp, Artificial Sequence
  Synthetic oligonucleotide
tccgccggaaattctggagtaaaaaaacaa

SEQ ID NO: 227181 - DNA, 30 bp, Artificial Sequence
  Synthetic oligonucleotide
atattattcagaggcacgggatcaaaacaa

SEQ ID NO: 227182 - DNA, 30 bp, Artificial Sequence
  Synthetic oligonucleotide
tcctatctaatagaaaggctacacaaacaa

SEQ ID NO: 227183 - DNA, 30 bp, Artificial Sequence
  Synthetic oligonucleotide
tacgcgcgtggtaccactgaagccaaacaa

SEQ ID NO: 227184 - DNA, 30 bp, Artificial Sequence
  Synthetic oligonucleotide
agtggccgagggattatcggcctcaaacaa

SEQ ID NO: 227185 - DNA, 30 bp, Artificial Sequence
  Synthetic oligonucleotide
gtgtggatggtgacggataggctcaaacaa

SEQ ID NO: 227186 - DNA, 30 bp, Artificial Sequence
  Synthetic oligonucleotide
atcaattgtaatatcgccaccacgaaacaa

SEQ ID NO: 227187 - DNA, 30 bp, Artificial Sequence
  Synthetic oligonucleotide
cccagcggaccgcccacgtggacgaaacaa

SEQ ID NO: 227188 - DNA, 30 bp, Artificial Sequence
  Synthetic oligonucleotide
acgctgccggcgatgcacgcattgaaacaa

SEQ ID NO: 227189 - DNA, 30 bp, Artificial Sequence
  Synthetic oligonucleotide
tcgggaaaatccgaatacggtcctaaacaa

SEQ ID NO: 227190 - DNA, 30 bp, Artificial Sequence
  Synthetic oligonucleotide
aaggggtgaaattcaatcggtaaccaacaa

SEQ ID NO: 227191 - DNA, 30 bp, Artificial Sequence
  Synthetic oligonucleotide
ccctacatcactgctacgagataccaacaa

SEQ ID NO: 227192 - DNA, 30 bp, Artificial Sequence
  Synthetic oligonucleotide
cacataaacggattacaatggccccaacaa

SEQ ID NO: 227193 - DNA, 30 bp, Artificial Sequence
  Synthetic oligonucleotide
gatgtccgattaatttgcaccagccaacaa

SEQ ID NO: 227194 - DNA, 30 bp, Artificial Sequence
  Synthetic oligonucleotide
gattgtgcagaccgcgtgttacgccaacaa

SEQ ID NO: 227195 - DNA, 30 bp, Artificial Sequence
  Synthetic oligonucleotide
agtctagatgacgattccaaggggcaacaa

SEQ ID NO: 227196 - DNA, 30 bp, Artificial Sequence
  Synthetic oligonucleotide
tataaacgagaacgatcggtatatcaacaa

SEQ ID NO: 227197 - DNA, 31 bp, Artificial Sequence
  Synthetic oligonucleotide
cgatatctactttgggtaagttactcaacaa

SEQ ID NO: 227198 - DNA, 30 bp, Artificial Sequence
  Synthetic oligonucleotide
ggacgtatagatgccagatattaagaacaa

SEQ ID NO: 227199 - DNA, 30 bp, Artificial Sequence
  Synthetic oligonucleotide
cgattcggtattgttcacctggtggaacaa

SEQ ID NO: 227200 - DNA, 30 bp, Artificial Sequence
  Synthetic oligonucleotide
gaagagacttgtttagagggtttggaacaa

SEQ ID NO: 227201 - DNA, 30 bp, Artificial Sequence
  Synthetic oligonucleotide
tcttgcgaagctcattagggatttgaacaa

SEQ ID NO: 227202 - DNA, 30 bp, Artificial Sequence
  Synthetic oligonucleotide
caccggaatttcgcgaacgtcgcataacaa

SEQ ID NO: 227203 - DNA, 30 bp, Artificial Sequence
  Synthetic oligonucleotide
tcgcgtccgagcaggcctgcgaggtaacaa

SEQ ID NO: 227204 - DNA, 30 bp, Artificial Sequence
  Synthetic oligonucleotide
gaacgttccacgttttaaaccctgtaacaa

SEQ ID NO: 227205 - DNA, 30 bp, Artificial Sequence
  Synthetic oligonucleotide
aacactgcgagctctcggatctattaacaa

SEQ ID NO: 227206 - DNA, 30 bp, Artificial Sequence
  Synthetic oligonucleotide
atacatcctacatagcttaaagccacacaa

SEQ ID NO: 227207 - DNA, 30 bp, Artificial Sequence
  Synthetic oligonucleotide
gtggtacgtctatgcgcaatgtagacacaa

SEQ ID NO: 227208 - DNA, 30 bp, Artificial Sequence
  Synthetic oligonucleotide
ttagcccgtccagggagggcaaggacacaa

SEQ ID NO: 227209 - DNA, 30 bp, Artificial Sequence
  Synthetic oligonucleotide
tgcatcgaaattaaaggtgagaggacacaa

SEQ ID NO: 227210 - DNA, 30 bp, Artificial Sequence
  Synthetic oligonucleotide
ggaatgcgataccaagtatgtcgtacacaa

SEQ ID NO: 227211 - DNA, 30 bp, Artificial Sequence
  Synthetic oligonucleotide
gtggtcatgacgcgtggtaagccgccacaa

SEQ ID NO: 227212 - DNA, 30 bp, Artificial Sequence
  Synthetic oligonucleotide
cgtggatagctttagcttatctcgccacaa

SEQ ID NO: 227213 - DNA, 30 bp, Artificial Sequence
  Synthetic oligonucleotide
ggagagacggagtctactatggggccacaa

SEQ ID NO: 227214 - DNA, 27 bp, Artificial Sequence
  Synthetic oligonucleotide
cggtcctggaacggcacgaaagcacaa

SEQ ID NO: 227215 - DNA, 30 bp, Artificial Sequence
  Synthetic oligonucleotide
agaatagcaattttaccgttcgaagcacaa

SEQ ID NO: 227216 - DNA, 30 bp, Artificial Sequence
  Synthetic oligonucleotide
aggggactgaccttccagatcagagcacaa

SEQ ID NO: 227217 - DNA, 30 bp, Artificial Sequence
  Synthetic oligonucleotide
ccgttcgatctggaatagtgtctagcacaa

SEQ ID NO: 227218 - DNA, 30 bp, Artificial Sequence
  Synthetic oligonucleotide
ttagtctatatatagaataggaacgcacaa

SEQ ID NO: 227219 - DNA, 30 bp, Artificial Sequence
  Synthetic oligonucleotide
gcgcagaatggaacgacttgggcggcacaa

SEQ ID NO: 227220 - DNA, 30 bp, Artificial Sequence
  Synthetic oligonucleotide
aaatcggatcgcatttggcgagtggcacaa

SEQ ID NO: 227221 - DNA, 30 bp, Artificial Sequence
  Synthetic oligonucleotide
aaggggcctgggttatgggagaatgcacaa

SEQ ID NO: 227222 - DNA, 30 bp, Artificial Sequence
  Synthetic oligonucleotide
cctaggaccgatattatagtggactcacaa

SEQ ID NO: 227223 - DNA, 30 bp, Artificial Sequence
  Synthetic oligonucleotide
gttcagacttatttacagcgatcctcacaa

SEQ ID NO: 227224 - DNA, 30 bp, Artificial Sequence
  Synthetic oligonucleotide
tacctaaattttctagaacagtcctcacaa

SEQ ID NO: 227225 - DNA, 30 bp, Artificial Sequence
  Synthetic oligonucleotide
gtctcccatcccgccttgccaacgtcacaa

SEQ ID NO: 227226 - DNA, 30 bp, Artificial Sequence
  Synthetic oligonucleotide
tccccgaccctcgcaccaaagacgtcacaa

SEQ ID NO: 227227 - DNA, 30 bp, Artificial Sequence
  Synthetic oligonucleotide
gaataaacatattacaggagcgtgtcacaa

SEQ ID NO: 227228 - DNA, 30 bp, Artificial Sequence
  Synthetic oligonucleotide
gcttagcaaataaggcctacccaaagacaa

SEQ ID NO: 227229 - DNA, 30 bp, Artificial Sequence
  Synthetic oligonucleotide
catgccggttctccgcagccggacagacaa

SEQ ID NO: 227230 - DNA, 30 bp, Artificial Sequence
  Synthetic oligonucleotide
gaacgctggaacgcgtgcctgcaacgacaa

SEQ ID NO: 227231 - DNA, 30 bp, Artificial Sequence
  Synthetic oligonucleotide
agctacaagctagtccactaccaccgacaa

SEQ ID NO: 227232 - DNA, 30 bp, Artificial Sequence
  Synthetic oligonucleotide
cccaggctgattattcaatccagtcgacaa

SEQ ID NO: 227233 - DNA, 30 bp, Artificial Sequence
  Synthetic oligonucleotide
catacaaaatgctccggagttccaggacaa

SEQ ID NO: 227234 - DNA, 30 bp, Artificial Sequence
  Synthetic oligonucleotide
atgtcctggtatagggcaccgctaggacaa

SEQ ID NO: 227235 - DNA, 30 bp, Artificial Sequence
  Synthetic oligonucleotide
gtcagaaatctaagctaggccttaggacaa

SEQ ID NO: 227236 - DNA, 30 bp, Artificial Sequence
  Synthetic oligonucleotide
ccccgcctgtagcgacatgttaccggacaa

SEQ ID NO: 227237 - DNA, 30 bp, Artificial Sequence
  Synthetic oligonucleotide
taacagttttataatgcagaggccggacaa

SEQ ID NO: 227238 - DNA, 30 bp, Artificial Sequence
  Synthetic oligonucleotide
gttggttggtgattagagcataagggacaa

SEQ ID NO: 227239 - DNA, 30 bp, Artificial Sequence
  Synthetic oligonucleotide
tcattgggccacacaatggttaagggacaa

SEQ ID NO: 227240 - DNA, 30 bp, Artificial Sequence
  Synthetic oligonucleotide
tataacgcgcaaggcaatgcttggggacaa

SEQ ID NO: 227241 - DNA, 30 bp, Artificial Sequence
  Synthetic oligonucleotide
atgcagagtagcaatccgtacggtggacaa

SEQ ID NO: 227242 - DNA, 30 bp, Artificial Sequence
  Synthetic oligonucleotide
acgtatatttgttcgttcggagactgacaa

SEQ ID NO: 227243 - DNA, 30 bp, Artificial Sequence
  Synthetic oligonucleotide
ggaaagagttcccggctaaataagtgacaa

SEQ ID NO: 227244 - DNA, 30 bp, Artificial Sequence
  Synthetic oligonucleotide
aaaggctactctacctgagtacaaatacaa

SEQ ID NO: 227245 - DNA, 30 bp, Artificial Sequence
  Synthetic oligonucleotide
cgaatgttatgtcctggtagcgaaatacaa

SEQ ID NO: 227246 - DNA, 30 bp, Artificial Sequence
  Synthetic oligonucleotide
gaatcaccgtggtcctgaggcctaatacaa

SEQ ID NO: 227247 - DNA, 30 bp, Artificial Sequence
  Synthetic oligonucleotide
tgttgtcggtggctgatgttgctcatacaa

SEQ ID NO: 227248 - DNA, 30 bp, Artificial Sequence
  Synthetic oligonucleotide
ttatgcgtccagatattgagctcgatacaa

SEQ ID NO: 227249 - DNA, 30 bp, Artificial Sequence
  Synthetic oligonucleotide
tccgggtgtaacgggtccgatgggatacaa

SEQ ID NO: 227250 - DNA, 30 bp, Artificial Sequence
  Synthetic oligonucleotide
gcgaagcgtatgttactataattgatacaa

SEQ ID NO: 227251 - DNA, 31 bp, Artificial Sequence
  Synthetic oligonucleotide
gaagtgatcgactggcgtattctccctacaa

SEQ ID NO: 227252 - DNA, 30 bp, Artificial Sequence
  Synthetic oligonucleotide
acccctggccgcataatgggaaggctacaa

SEQ ID NO: 227253 - DNA, 30 bp, Artificial Sequence
  Synthetic oligonucleotide
ttgaatgtggaagtctaaggtaggctacaa

SEQ ID NO: 227254 - DNA, 30 bp, Artificial Sequence
  Synthetic oligonucleotide
agatcagactactcctttggaagagtacaa

SEQ ID NO: 227255 - DNA, 30 bp, Artificial Sequence
  Synthetic oligonucleotide
gcggggagcttatagattagtctagtacaa

SEQ ID NO: 227256 - DNA, 30 bp, Artificial Sequence
  Synthetic oligonucleotide
gctgagtaccgctcttgggtacgcgtacaa

SEQ ID NO: 227257 - DNA, 30 bp, Artificial Sequence
  Synthetic oligonucleotide
tatgttggttggcggtcattagaggtacaa

SEQ ID NO: 227258 - DNA, 30 bp, Artificial Sequence
  Synthetic oligonucleotide
gactccgagggacgcacggaactggtacaa

SEQ ID NO: 227259 - DNA, 30 bp, Artificial Sequence
  Synthetic oligonucleotide
atccacatggtagcaacgacccatgtacaa

SEQ ID NO: 227260 - DNA, 30 bp, Artificial Sequence
  Synthetic oligonucleotide
agccccgactctttacgggtggatgtacaa

SEQ ID NO: 227261 - DNA, 30 bp, Artificial Sequence
  Synthetic oligonucleotide
gcgattgctctagcattaataattgtacaa

SEQ ID NO: 227262 - DNA, 30 bp, Artificial Sequence
  Synthetic oligonucleotide
tatactaaaattgagtccgatacattacaa

SEQ ID NO: 227263 - DNA, 30 bp, Artificial Sequence
  Synthetic oligonucleotide
cattgtcgggtgattccgccaatcttacaa

SEQ ID NO: 227264 - DNA, 30 bp, Artificial Sequence
  Synthetic oligonucleotide
cattctaacagggtcaagactaggttacaa

SEQ ID NO: 227265 - DNA, 30 bp, Artificial Sequence
  Synthetic oligonucleotide
caatgtcaagttaggcattgtaatttacaa

SEQ ID NO: 227266 - DNA, 30 bp, Artificial Sequence
  Synthetic oligonucleotide
cgcgtgggagggtcccactccaacaaccaa

SEQ ID NO: 227267 - DNA, 30 bp, Artificial Sequence
  Synthetic oligonucleotide
aggtacgggatccttcatggtggtcaccaa

SEQ ID NO: 227268 - DNA, 30 bp, Artificial Sequence
  Synthetic oligonucleotide
tagcggtcgggataataaaatgttcaccaa

SEQ ID NO: 227269 - DNA, 30 bp, Artificial Sequence
  Synthetic oligonucleotide
taaggtttgtaggtgaaggagtttcaccaa

SEQ ID NO: 227270 - DNA, 30 bp, Artificial Sequence
  Synthetic oligonucleotide
atcgcttttgtcatctggcagagcgaccaa

SEQ ID NO: 227271 - DNA, 30 bp, Artificial Sequence
  Synthetic oligonucleotide
caggggcatcgaatgcatatttcggaccaa

SEQ ID NO: 227272 - DNA, 30 bp, Artificial Sequence
  Synthetic oligonucleotide
ataactgtcacaggaatgtcaatataccaa

SEQ ID NO: 227273 - DNA, 30 bp, Artificial Sequence
  Synthetic oligonucleotide
cgacgaacggggcgcctccactattaccaa

SEQ ID NO: 227274 - DNA, 30 bp, Artificial Sequence
  Synthetic oligonucleotide
gccacggctatacaggaagacagttaccaa

SEQ ID NO: 227275 - DNA, 30 bp, Artificial Sequence
  Synthetic oligonucleotide
gcgtgtaacacgacggttgggcgaacccaa

SEQ ID NO: 227276 - DNA, 30 bp, Artificial Sequence
  Synthetic oligonucleotide
cgcgtctatttatcatactttgtcacccaa

SEQ ID NO: 227277 - DNA, 30 bp, Artificial Sequence
  Synthetic oligonucleotide
agttggcagttaatatatttatgcccccaa

SEQ ID NO: 227278 - DNA, 30 bp, Artificial Sequence
  Synthetic oligonucleotide
agattgaatacattcaatcgggaggcccaa

SEQ ID NO: 227279 - DNA, 30 bp, Artificial Sequence
  Synthetic oligonucleotide
accggtgccgttggatgtagtggggcccaa

SEQ ID NO: 227280 - DNA, 30 bp, Artificial Sequence
  Synthetic oligonucleotide
caaatgtaaggaggtcaattgggatcccaa

SEQ ID NO: 227281 - DNA, 30 bp, Artificial Sequence
  Synthetic oligonucleotide
gggaagaggttttcgatatctaagtcccaa

SEQ ID NO: 227282 - DNA, 30 bp, Artificial Sequence
  Synthetic oligonucleotide
agctcacttggaagaagcgagcagtcccaa

SEQ ID NO: 227283 - DNA, 30 bp, Artificial Sequence
  Synthetic oligonucleotide
tagtatcttagccgcccaaacataagccaa

SEQ ID NO: 227284 - DNA, 30 bp, Artificial Sequence
  Synthetic oligonucleotide
ctcggatcttaacagaatagagtcagccaa

SEQ ID NO: 227285 - DNA, 30 bp, Artificial Sequence
  Synthetic oligonucleotide
attgattcggagtgcctactcccgagccaa

SEQ ID NO: 227286 - DNA, 30 bp, Artificial Sequence
  Synthetic oligonucleotide
gggatgatagggcctctattctatagccaa

SEQ ID NO: 227287 - DNA, 30 bp, Artificial Sequence
  Synthetic oligonucleotide
gtaaaggaatacgctgaagaagttcgccaa

SEQ ID NO: 227288 - DNA, 30 bp, Artificial Sequence
  Synthetic oligonucleotide
cctttgaaggttaatatacagtaaggccaa

SEQ ID NO: 227289 - DNA, 30 bp, Artificial Sequence
  Synthetic oligonucleotide
acaaattaacgactgaagcgggccggccaa

SEQ ID NO: 227290 - DNA, 30 bp, Artificial Sequence
  Synthetic oligonucleotide
gtactgcgttggagtgtatgtttcggccaa

SEQ ID NO: 227291 - DNA, 30 bp, Artificial Sequence
  Synthetic oligonucleotide
aaatggcataactcacctactgggggccaa

SEQ ID NO: 227292 - DNA, 30 bp, Artificial Sequence
  Synthetic oligonucleotide
ggcccacattagttagaccggttgggccaa

SEQ ID NO: 227293 - DNA, 30 bp, Artificial Sequence
  Synthetic oligonucleotide
atcaagtagatgagtacacatgttggccaa

SEQ ID NO: 227294 - DNA, 30 bp, Artificial Sequence
  Synthetic oligonucleotide
cgcgcccctaggcagggagccgggatccaa

SEQ ID NO: 227295 - DNA, 30 bp, Artificial Sequence
  Synthetic oligonucleotide
ctaaaatgccattgttgccgagatatccaa

SEQ ID NO: 227296 - DNA, 30 bp, Artificial Sequence
  Synthetic oligonucleotide
gcaaagtgcaattcctaatagggtatccaa

SEQ ID NO: 227297 - DNA, 30 bp, Artificial Sequence
  Synthetic oligonucleotide
ccccgaaacggggggctttaggcactccaa

SEQ ID NO: 227298 - DNA, 30 bp, Artificial Sequence
  Synthetic oligonucleotide
atgctgtgggacgcttatagcactctccaa

SEQ ID NO: 227299 - DNA, 34 bp, Artificial Sequence
  Synthetic oligonucleotide
gatgttaggtcgaaattgccaacccccggtccaa

SEQ ID NO: 227300 - DNA, 30 bp, Artificial Sequence
  Synthetic oligonucleotide
taatgaggaaatctctctgaggtggtccaa

SEQ ID NO: 227301 - DNA, 30 bp, Artificial Sequence
  Synthetic oligonucleotide
tggccaggaatcacaggcaaatgtgtccaa

SEQ ID NO: 227302 - DNA, 30 bp, Artificial Sequence
  Synthetic oligonucleotide
tcacgaatatttagggcgatatttgtccaa

SEQ ID NO: 227303 - DNA, 30 bp, Artificial Sequence
  Synthetic oligonucleotide
ggcattgccagttattaggaggtcttccaa

SEQ ID NO: 227304 - DNA, 30 bp, Artificial Sequence
  Synthetic oligonucleotide
aggcataatcagtgaatcagtagtttccaa

SEQ ID NO: 227305 - DNA, 30 bp, Artificial Sequence
  Synthetic oligonucleotide
gacatcccggggcaccttcatgaaaagcaa

SEQ ID NO: 227306 - DNA, 30 bp, Artificial Sequence
  Synthetic oligonucleotide
gactagcctgggagcgagttcagaaagcaa

SEQ ID NO: 227307 - DNA, 30 bp, Artificial Sequence
  Synthetic oligonucleotide
taactgctgacgtttcggtgttgaaagcaa

SEQ ID NO: 227308 - DNA, 30 bp, Artificial Sequence
  Synthetic oligonucleotide
gctaagggagggacctttcggcccaagcaa

SEQ ID NO: 227309 - DNA, 30 bp, Artificial Sequence
  Synthetic oligonucleotide
aatgctatcggcggctcgcgtggcaagcaa

SEQ ID NO: 227310 - DNA, 30 bp, Artificial Sequence
  Synthetic oligonucleotide
aagtatagttgaatgtaacaagtcaagcaa

SEQ ID NO: 227311 - DNA, 30 bp, Artificial Sequence
  Synthetic oligonucleotide
gtcgcgagttgtctctgcagggtcaagcaa

SEQ ID NO: 227312 - DNA, 30 bp, Artificial Sequence
  Synthetic oligonucleotide
ggcacaagcaattgctacacgatgaagcaa

SEQ ID NO: 227313 - DNA, 30 bp, Artificial Sequence
  Synthetic oligonucleotide
catactcggacttccaagcacacacagcaa

SEQ ID NO: 227314 - DNA, 30 bp, Artificial Sequence
  Synthetic oligonucleotide
ttcggatcgtcgtcgtaagcgagacagcaa

SEQ ID NO: 227315 - DNA, 30 bp, Artificial Sequence
  Synthetic oligonucleotide
acctctcacacgtgtgattggatacagcaa

SEQ ID NO: 227316 - DNA, 30 bp, Artificial Sequence
  Synthetic oligonucleotide
acgcgtctatggtttcgttactgccagcaa

SEQ ID NO: 227317 - DNA, 30 bp, Artificial Sequence
  Synthetic oligonucleotide
tcctgggaaactgctaattattgccagcaa

SEQ ID NO: 227318 - DNA, 30 bp, Artificial Sequence
  Synthetic oligonucleotide
tgctaaaatatagagcaacttggtcagcaa

SEQ ID NO: 227319 - DNA, 30 bp, Artificial Sequence
  Synthetic oligonucleotide
tctgaatgtactaccagcgatggcgagcaa

SEQ ID NO: 227320 - DNA, 30 bp, Artificial Sequence
  Synthetic oligonucleotide
gtgacttagtgaccatacattcgtgagcaa

SEQ ID NO: 227321 - DNA, 30 bp, Artificial Sequence
  Synthetic oligonucleotide
tatactccatcgtcgtctacgtcgtagcaa

SEQ ID NO: 227322 - DNA, 30 bp, Artificial Sequence
  Synthetic oligonucleotide
gtcgaggatactacggcgcaattttagcaa

SEQ ID NO: 227323 - DNA, 30 bp, Artificial Sequence
  Synthetic oligonucleotide
ccgagtgagacaccatggacgcccacgcaa

SEQ ID NO: 227324 - DNA, 30 bp, Artificial Sequence
  Synthetic oligonucleotide
tcgtacattcgatattcggttgccacgcaa

SEQ ID NO: 227325 - DNA, 30 bp, Artificial Sequence
  Synthetic oligonucleotide
atgtcaggcaacgcttgagcgggcccgcaa

SEQ ID NO: 227326 - DNA, 30 bp, Artificial Sequence
  Synthetic oligonucleotide
atccgaactactaatacagggttcccgcaa

SEQ ID NO: 227327 - DNA, 30 bp, Artificial Sequence
  Synthetic oligonucleotide
ggttacagtgatctcgctcacgagccgcaa

SEQ ID NO: 227328 - DNA, 30 bp, Artificial Sequence
  Synthetic oligonucleotide
cacgggtaatagggcgccatttagccgcaa

SEQ ID NO: 227329 - DNA, 30 bp, Artificial Sequence
  Synthetic oligonucleotide
gatacgaccgcgaggttccccgtgccgcaa

SEQ ID NO: 227330 - DNA, 30 bp, Artificial Sequence
  Synthetic oligonucleotide
aaaatgaagcttaatgactaatctccgcaa

SEQ ID NO: 227331 - DNA, 30 bp, Artificial Sequence
  Synthetic oligonucleotide
tcagccaatgccagaccatgtgcagcgcaa

SEQ ID NO: 227332 - DNA, 30 bp, Artificial Sequence
  Synthetic oligonucleotide
tcgcggcgcagtcgcgtagtttcagcgcaa

SEQ ID NO: 227333 - DNA, 30 bp, Artificial Sequence
  Synthetic oligonucleotide
taaagttccacggctgaacgacgagcgcaa

SEQ ID NO: 227334 - DNA, 30 bp, Artificial Sequence
  Synthetic oligonucleotide
tacacgattgatcgggtatacttcgcgcaa

SEQ ID NO: 227335 - DNA, 30 bp, Artificial Sequence
  Synthetic oligonucleotide
acatgaacatgctcgctactagaggcgcaa

SEQ ID NO: 227336 - DNA, 30 bp, Artificial Sequence
  Synthetic oligonucleotide
gatgatgcaaagtattggagatctgcgcaa

SEQ ID NO: 227337 - DNA, 30 bp, Artificial Sequence
  Synthetic oligonucleotide
agagcatacctgtgcacaacccgtgcgcaa

SEQ ID NO: 227338 - DNA, 30 bp, Artificial Sequence
  Synthetic oligonucleotide
ctagagaaagccgtggcatgtaaatcgcaa

SEQ ID NO: 227339 - DNA, 30 bp, Artificial Sequence
  Synthetic oligonucleotide
tgcccggtagcagaggccgttgcatcgcaa

SEQ ID NO: 227340 - DNA, 30 bp, Artificial Sequence
  Synthetic oligonucleotide
ttcagtaaggcggcgtgctcgctctcgcaa

SEQ ID NO: 227341 - DNA, 30 bp, Artificial Sequence
  Synthetic oligonucleotide
taagatacttaagtcccgcgtttgtcgcaa

SEQ ID NO: 227342 - DNA, 30 bp, Artificial Sequence
  Synthetic oligonucleotide
aacgtcttgccttctaagggggaaaggcaa

SEQ ID NO: 227343 - DNA, 30 bp, Artificial Sequence
  Synthetic oligonucleotide
agtacccttgagagtgtgaaccgcaggcaa

SEQ ID NO: 227344 - DNA, 30 bp, Artificial Sequence
  Synthetic oligonucleotide
cattcgccgagctgtgattcgcgcaggcaa

SEQ ID NO: 227345 - DNA, 30 bp, Artificial Sequence
  Synthetic oligonucleotide
gggtgaacggcttagacccgtatcaggcaa

SEQ ID NO: 227346 - DNA, 30 bp, Artificial Sequence
  Synthetic oligonucleotide
cgaggggcggccactggcaagctcaggcaa

SEQ ID NO: 227347 - DNA, 30 bp, Artificial Sequence
  Synthetic oligonucleotide
gcgggtccccacaccttgactgtcaggcaa

SEQ ID NO: 227348 - DNA, 30 bp, Artificial Sequence
  Synthetic oligonucleotide
agatttaactatccatgatgatcgaggcaa

SEQ ID NO: 227349 - DNA, 30 bp, Artificial Sequence
  Synthetic oligonucleotide
aaaattctacatcagttaggagggaggcaa

SEQ ID NO: 227350 - DNA, 30 bp, Artificial Sequence
  Synthetic oligonucleotide
tggcgtttgccatatttatagattaggcaa

SEQ ID NO: 227351 - DNA, 30 bp, Artificial Sequence
  Synthetic oligonucleotide
tctgcatcctcagaggttccctcccggcaa

SEQ ID NO: 227352 - DNA, 30 bp, Artificial Sequence
  Synthetic oligonucleotide
cagggaaatgcaacagaacgacgccggcaa

SEQ ID NO: 227353 - DNA, 30 bp, Artificial Sequence
  Synthetic oligonucleotide
tgtactgaatattttagtaagtgccggcaa

SEQ ID NO: 227354 - DNA, 30 bp, Artificial Sequence
  Synthetic oligonucleotide
cggcagagggccgagaaacggggtcggcaa

SEQ ID NO: 227355 - DNA, 30 bp, Artificial Sequence
  Synthetic oligonucleotide
cgcctctggaatataggaactcaagggcaa

SEQ ID NO: 227356 - DNA, 30 bp, Artificial Sequence
  Synthetic oligonucleotide
ctgagtgtgcatggccgaggctaagggcaa

SEQ ID NO: 227357 - DNA, 30 bp, Artificial Sequence
  Synthetic oligonucleotide
cagcctacagacctgcataacacagggcaa

SEQ ID NO: 227358 - DNA, 30 bp, Artificial Sequence
  Synthetic oligonucleotide
taatcgacgcgtaagttctttccagggcaa

SEQ ID NO: 227359 - DNA, 30 bp, Artificial Sequence
  Synthetic oligonucleotide
agagcgatcgtaagaatttactgagggcaa

SEQ ID NO: 227360 - DNA, 30 bp, Artificial Sequence
  Synthetic oligonucleotide
ctccaagtggctgcacccacgcaatggcaa

SEQ ID NO: 227361 - DNA, 30 bp, Artificial Sequence
  Synthetic oligonucleotide
ctaactaactgcctctcgtcggcatggcaa

SEQ ID NO: 227362 - DNA, 30 bp, Artificial Sequence
  Synthetic oligonucleotide
ttcgcgggtccattatgcggtcgatggcaa

SEQ ID NO: 227363 - DNA, 30 bp, Artificial Sequence
  Synthetic oligonucleotide
gactttggaaggaattcgctgccgtggcaa

SEQ ID NO: 227364 - DNA, 30 bp, Artificial Sequence
  Synthetic oligonucleotide
ggtgggatataagaaggccaccattggcaa

SEQ ID NO: 227365 - DNA, 30 bp, Artificial Sequence
  Synthetic oligonucleotide
tgcgggtgggctgtggaaggttcttggcaa

SEQ ID NO: 227366 - DNA, 30 bp, Artificial Sequence
  Synthetic oligonucleotide
actgtccactgttagcgagactaaatgcaa

SEQ ID NO: 227367 - DNA, 30 bp, Artificial Sequence
  Synthetic oligonucleotide
tggtaactttaaactggatccctaatgcaa

SEQ ID NO: 227368 - DNA, 30 bp, Artificial Sequence
  Synthetic oligonucleotide
gtcatggccctacatacatcccgcatgcaa

SEQ ID NO: 227369 - DNA, 30 bp, Artificial Sequence
  Synthetic oligonucleotide
gtgcgaattccgacgctcttagtcatgcaa

SEQ ID NO: 227370 - DNA, 30 bp, Artificial Sequence
  Synthetic oligonucleotide
cacctagttgatttaatcattagtatgcaa

SEQ ID NO: 227371 - DNA, 30 bp, Artificial Sequence
  Synthetic oligonucleotide
ttcgtgaaggttgtacgtgttgaactgcaa

SEQ ID NO: 227372 - DNA, 30 bp, Artificial Sequence
  Synthetic oligonucleotide
cacctcatcacggacgatgtccgactgcaa

SEQ ID NO: 227373 - DNA, 30 bp, Artificial Sequence
  Synthetic oligonucleotide
aggatccgccttcggatgcgacacctgcaa

SEQ ID NO: 227374 - DNA, 30 bp, Artificial Sequence
  Synthetic oligonucleotide
agtccgccgcggtaattataaagcgtgcaa

SEQ ID NO: 227375 - DNA, 30 bp, Artificial Sequence
  Synthetic oligonucleotide
tgatggcgcacctttgagtgcacggtgcaa

SEQ ID NO: 227376 - DNA, 30 bp, Artificial Sequence
  Synthetic oligonucleotide
ggcgcatgcaggctgacgtgcgtggtgcaa

SEQ ID NO: 227377 - DNA, 30 bp, Artificial Sequence
  Synthetic oligonucleotide
acatgttgagagatttcagcgactgtgcaa

SEQ ID NO: 227378 - DNA, 30 bp, Artificial Sequence
  Synthetic oligonucleotide
tcacataaccataacgtgttgtcgttgcaa

SEQ ID NO: 227379 - DNA, 30 bp, Artificial Sequence
  Synthetic oligonucleotide
atcattaataaaaatgccattccaaatcaa

SEQ ID NO: 227380 - DNA, 30 bp, Artificial Sequence
  Synthetic oligonucleotide
acagaatccaacctccgttaagcaaatcaa

SEQ ID NO: 227381 - DNA, 30 bp, Artificial Sequence
  Synthetic oligonucleotide
gttatgagggggaaaagaatcttaaatcaa

SEQ ID NO: 227382 - DNA, 30 bp, Artificial Sequence
  Synthetic oligonucleotide
caggcagaacacgcgaaaggccacaatcaa

SEQ ID NO: 227383 - DNA, 30 bp, Artificial Sequence
  Synthetic oligonucleotide
ttgagtgtaaactaggccggtaggaatcaa

SEQ ID NO: 227384 - DNA, 30 bp, Artificial Sequence
  Synthetic oligonucleotide
gtagcagttattaagatagcagggaatcaa

SEQ ID NO: 227385 - DNA, 30 bp, Artificial Sequence
  Synthetic oligonucleotide
aggaaggcttgggcatattctacccatcaa

SEQ ID NO: 227386 - DNA, 30 bp, Artificial Sequence
  Synthetic oligonucleotide
tcggaacgggcccgaggcctcagccatcaa

SEQ ID NO: 227387 - DNA, 30 bp, Artificial Sequence
  Synthetic oligonucleotide
cataaagggttttactagaaccagcatcaa

SEQ ID NO: 227388 - DNA, 30 bp, Artificial Sequence
  Synthetic oligonucleotide
tcataacggaaactatttaaatcgcatcaa

SEQ ID NO: 227389 - DNA, 30 bp, Artificial Sequence
  Synthetic oligonucleotide
cacggctttggtaaactgtatgttcatcaa

SEQ ID NO: 227390 - DNA, 30 bp, Artificial Sequence
  Synthetic oligonucleotide
agcaccatacgaagctagtctgttcatcaa

SEQ ID NO: 227391 - DNA, 30 bp, Artificial Sequence
  Synthetic oligonucleotide
cgattaatctgcccaagatacgtagatcaa

SEQ ID NO: 227392 - DNA, 30 bp, Artificial Sequence
  Synthetic oligonucleotide
cccgctggaggacgggatatttaggatcaa

SEQ ID NO: 227393 - DNA, 30 bp, Artificial Sequence
  Synthetic oligonucleotide
ccacgcacattcacccgaatgccggatcaa

SEQ ID NO: 227394 - DNA, 30 bp, Artificial Sequence
  Synthetic oligonucleotide
gctgaaattaaatgtaagctaaaatatcaa

SEQ ID NO: 227395 - DNA, 30 bp, Artificial Sequence
  Synthetic oligonucleotide
gcattcactgcaaatgtttctgcctatcaa

SEQ ID NO: 227396 - DNA, 30 bp, Artificial Sequence
  Synthetic oligonucleotide
gctatggattcgcctcaccgagtgtatcaa

SEQ ID NO: 227397 - DNA, 30 bp, Artificial Sequence
  Synthetic oligonucleotide
tggtcggcacgcacttcgggagtttatcaa

SEQ ID NO: 227398 - DNA, 30 bp, Artificial Sequence
  Synthetic oligonucleotide
aaagattaaacctacgtaaaaacaactcaa

SEQ ID NO: 227399 - DNA, 30 bp, Artificial Sequence
  Synthetic oligonucleotide
tcgagttaaattactgtgctttacactcaa

SEQ ID NO: 227400 - DNA, 30 bp, Artificial Sequence
  Synthetic oligonucleotide
aattgtcatcgagacacgatagtcactcaa

SEQ ID NO: 227401 - DNA, 30 bp, Artificial Sequence
  Synthetic oligonucleotide
agcaatcgaaagctgcatatattcactcaa

SEQ ID NO: 227402 - DNA, 30 bp, Artificial Sequence
  Synthetic oligonucleotide
gatctatagtcgagatcttgacagactcaa

SEQ ID NO: 227403 - DNA, 30 bp, Artificial Sequence
  Synthetic oligonucleotide
gtgaagtgttcgccgttgttctcgactcaa

SEQ ID NO: 227404 - DNA, 30 bp, Artificial Sequence
  Synthetic oligonucleotide
gataaggtgggccaagacagctggactcaa

SEQ ID NO: 227405 - DNA, 30 bp, Artificial Sequence
  Synthetic oligonucleotide
agacttatatccacctgcacacatactcaa

SEQ ID NO: 227406 - DNA, 30 bp, Artificial Sequence
  Synthetic oligonucleotide
ggttatagcctgtattttaaccctactcaa

SEQ ID NO: 227407 - DNA, 30 bp, Artificial Sequence
  Synthetic oligonucleotide
ggcttgttacgcccctgcatagcgcctcaa

SEQ ID NO: 227408 - DNA, 30 bp, Artificial Sequence
  Synthetic oligonucleotide
gactctcgataacaagcactacggcctcaa

SEQ ID NO: 227409 - DNA, 30 bp, Artificial Sequence
  Synthetic oligonucleotide
ggaaaaatccaatcttttatgttgcctcaa

SEQ ID NO: 227410 - DNA, 30 bp, Artificial Sequence
  Synthetic oligonucleotide
cgtcatgtggaattctaatcgtgtcctcaa

SEQ ID NO: 227411 - DNA, 30 bp, Artificial Sequence
  Synthetic oligonucleotide
tagaagtataagcttgactgagaagctcaa

SEQ ID NO: 227412 - DNA, 30 bp, Artificial Sequence
  Synthetic oligonucleotide
gaacggtcttaagggtcatatcgcgctcaa

SEQ ID NO: 227413 - DNA, 30 bp, Artificial Sequence
  Synthetic oligonucleotide
tgagggtcgctaacgaccttgagggctcaa

SEQ ID NO: 227414 - DNA, 30 bp, Artificial Sequence
  Synthetic oligonucleotide
aaactgatcggatcagttccgggggctcaa

SEQ ID NO: 227415 - DNA, 30 bp, Artificial Sequence
  Synthetic oligonucleotide
gtgaccgtgatgaagtggggattggctcaa

SEQ ID NO: 227416 - DNA, 30 bp, Artificial Sequence
  Synthetic oligonucleotide
gtgctaagttgccgctcagccaatgctcaa

SEQ ID NO: 227417 - DNA, 30 bp, Artificial Sequence
  Synthetic oligonucleotide
actatccagcgtgctgtgcctactgctcaa

SEQ ID NO: 227418 - DNA, 30 bp, Artificial Sequence
  Synthetic oligonucleotide
gttacccgcctaagtaccaccggtgctcaa

SEQ ID NO: 227419 - DNA, 30 bp, Artificial Sequence
  Synthetic oligonucleotide
cattgcattcatttttggtgctcatctcaa

SEQ ID NO: 227420 - DNA, 30 bp, Artificial Sequence
  Synthetic oligonucleotide
ttacgttcaaagataccggagtcctctcaa

SEQ ID NO: 227421 - DNA, 30 bp, Artificial Sequence
  Synthetic oligonucleotide
aataatgggggctgtacattaatgtctcaa

SEQ ID NO: 227422 - DNA, 30 bp, Artificial Sequence
  Synthetic oligonucleotide
ttcgcagaggcacctacagatagaagtcaa

SEQ ID NO: 227423 - DNA, 30 bp, Artificial Sequence
  Synthetic oligonucleotide
tatatggtaacacggggtcttagaagtcaa

SEQ ID NO: 227424 - DNA, 30 bp, Artificial Sequence
  Synthetic oligonucleotide
caggaaattctacggcaggccaccagtcaa

SEQ ID NO: 227425 - DNA, 30 bp, Artificial Sequence
  Synthetic oligonucleotide
aattggacacagatagaaaagctcagtcaa

SEQ ID NO: 227426 - DNA, 30 bp, Artificial Sequence
  Synthetic oligonucleotide
cagaaacctttggggtcatcgctcagtcaa

SEQ ID NO: 227427 - DNA, 30 bp, Artificial Sequence
  Synthetic oligonucleotide
gtgatcgaaatggagtcaaatacgagtcaa

SEQ ID NO: 227428 - DNA, 30 bp, Artificial Sequence
  Synthetic oligonucleotide
acaagtcagcatgtccaattaatgagtcaa

SEQ ID NO: 227429 - DNA, 30 bp, Artificial Sequence
  Synthetic oligonucleotide
tttgggctaccaaaatacaatgctagtcaa

SEQ ID NO: 227430 - DNA, 30 bp, Artificial Sequence
  Synthetic oligonucleotide
ggtaattagggtcgggggccgtctagtcaa

SEQ ID NO: 227431 - DNA, 30 bp, Artificial Sequence
  Synthetic oligonucleotide
caggcttggctgggtctgtacagtagtcaa

SEQ ID NO: 227432 - DNA, 30 bp, Artificial Sequence
  Synthetic oligonucleotide
cacgccgtgctctatatctcctgtagtcaa

SEQ ID NO: 227433 - DNA, 30 bp, Artificial Sequence
  Synthetic oligonucleotide
gagtaggaaaaggtcccgcatgtacgtcaa

SEQ ID NO: 227434 - DNA, 30 bp, Artificial Sequence
  Synthetic oligonucleotide
gaagttcacccaggaatggggacgcgtcaa

SEQ ID NO: 227435 - DNA, 30 bp, Artificial Sequence
  Synthetic oligonucleotide
aagcatatcgggtactatgggaatcgtcaa

SEQ ID NO: 227436 - DNA, 30 bp, Artificial Sequence
  Synthetic oligonucleotide
caccgacctcaattaagcacgcgtcgtcaa

SEQ ID NO: 227437 - DNA, 30 bp, Artificial Sequence
  Synthetic oligonucleotide
gcctggccctaggagtaaaccggtcgtcaa

SEQ ID NO: 227438 - DNA, 30 bp, Artificial Sequence
  Synthetic oligonucleotide
cagctgatcgctttctcggtcaaaggtcaa

SEQ ID NO: 227439 - DNA, 30 bp, Artificial Sequence
  Synthetic oligonucleotide
gtgaaatgagagctcaattgctaaggtcaa

SEQ ID NO: 227440 - DNA, 30 bp, Artificial Sequence
  Synthetic oligonucleotide
tgagtaagacgtcacaacctgagaggtcaa

SEQ ID NO: 227441 - DNA, 30 bp, Artificial Sequence
  Synthetic oligonucleotide
tttcgaaggtggagtgataagatgggtcaa

SEQ ID NO: 227442 - DNA, 30 bp, Artificial Sequence
  Synthetic oligonucleotide
atgtaaatcctaacagagcgtcctggtcaa

SEQ ID NO: 227443 - DNA, 30 bp, Artificial Sequence
  Synthetic oligonucleotide
accatactatatgtgtcaccgtcatgtcaa

SEQ ID NO: 227444 - DNA, 30 bp, Artificial Sequence
  Synthetic oligonucleotide
cattcgactatagaagtgggcctctgtcaa

SEQ ID NO: 227445 - DNA, 30 bp, Artificial Sequence
  Synthetic oligonucleotide
caaaaagtaaccggtgcgctattctgtcaa

SEQ ID NO: 227446 - DNA, 30 bp, Artificial Sequence
  Synthetic oligonucleotide
cccacctctacgagtggagtcccgtgtcaa

SEQ ID NO: 227447 - DNA, 30 bp, Artificial Sequence
  Synthetic oligonucleotide
acaagtcgggcaggcggcttgggttgtcaa

SEQ ID NO: 227448 - DNA, 30 bp, Artificial Sequence
  Synthetic oligonucleotide
accgagtttcagattagggcgccaattcaa

SEQ ID NO: 227449 - DNA, 30 bp, Artificial Sequence
  Synthetic oligonucleotide
cgcagacccttgagaaagaggataattcaa

SEQ ID NO: 227450 - DNA, 30 bp, Artificial Sequence
  Synthetic oligonucleotide
gccaactttaggtagtcgactacgattcaa

SEQ ID NO: 227451 - DNA, 30 bp, Artificial Sequence
  Synthetic oligonucleotide
gcggaactaggcattacatgggcgattcaa

SEQ ID NO: 227452 - DNA, 30 bp, Artificial Sequence
  Synthetic oligonucleotide
gtcggtatggttccccaccttgctattcaa

SEQ ID NO: 227453 - DNA, 30 bp, Artificial Sequence
  Synthetic oligonucleotide
tcaagtgtcagaaaggggtcctgacttcaa

SEQ ID NO: 227454 - DNA, 30 bp, Artificial Sequence
  Synthetic oligonucleotide
tgggaggctctggtgagccagtctcttcaa

SEQ ID NO: 227455 - DNA, 30 bp, Artificial Sequence
  Synthetic oligonucleotide
ctacaccccagcccttgagacagtcttcaa

SEQ ID NO: 227456 - DNA, 30 bp, Artificial Sequence
  Synthetic oligonucleotide
agcaactttagccgacgagttaaagttcaa

SEQ ID NO: 227457 - DNA, 30 bp, Artificial Sequence
  Synthetic oligonucleotide
cgctacattcagggattactgtacgttcaa

SEQ ID NO: 227458 - DNA, 30 bp, Artificial Sequence
  Synthetic oligonucleotide
cttaagctataacagaggtgagtcgttcaa

SEQ ID NO: 227459 - DNA, 30 bp, Artificial Sequence
  Synthetic oligonucleotide
taaaggaccctggcataccgtaaggttcaa

SEQ ID NO: 227460 - DNA, 30 bp, Artificial Sequence
  Synthetic oligonucleotide
tacgaggcggccggtgagtgaaaatttcaa

SEQ ID NO: 227461 - DNA, 30 bp, Artificial Sequence
  Synthetic oligonucleotide
gggagagcgtgaacgcccggagaatttcaa

SEQ ID NO: 227462 - DNA, 30 bp, Artificial Sequence
  Synthetic oligonucleotide
ccaatacacgggaatggaattatatttcaa

SEQ ID NO: 227463 - DNA, 30 bp, Artificial Sequence
  Synthetic oligonucleotide
gcttcgtttgaaagtcccagtatctttcaa

SEQ ID NO: 227464 - DNA, 30 bp, Artificial Sequence
  Synthetic oligonucleotide
tgacaatctaagccaatgcgagagtttcaa

SEQ ID NO: 227465 - DNA, 30 bp, Artificial Sequence
  Synthetic oligonucleotide
cgatcgaccgcagagggagtggagtttcaa

SEQ ID NO: 227466 - DNA, 30 bp, Artificial Sequence
  Synthetic oligonucleotide
accatgggtggaagaaaatgttgttttcaa

SEQ ID NO: 227467 - DNA, 30 bp, Artificial Sequence
  Synthetic oligonucleotide
taaaaacgcttacagagcctaacaaaagaa

SEQ ID NO: 227468 - DNA, 30 bp, Artificial Sequence
  Synthetic oligonucleotide
agaagggtgccggccactcagcacaaagaa

SEQ ID NO: 227469 - DNA, 30 bp, Artificial Sequence
  Synthetic oligonucleotide
atgttgaggttttcctggaaccctaaagaa

SEQ ID NO: 227470 - DNA, 30 bp, Artificial Sequence
  Synthetic oligonucleotide
aatgagtctactcaaccatcggaacaagaa

SEQ ID NO: 227471 - DNA, 30 bp, Artificial Sequence
  Synthetic oligonucleotide
ggaaggctaaccagtgccgtggaacaagaa

SEQ ID NO: 227472 - DNA, 30 bp, Artificial Sequence
  Synthetic oligonucleotide
acggggtcattatgattggatccacaagaa

SEQ ID NO: 227473 - DNA, 30 bp, Artificial Sequence
  Synthetic oligonucleotide
cgcgtgcccgcaagccatatattacaagaa

SEQ ID NO: 227474 - DNA, 30 bp, Artificial Sequence
  Synthetic oligonucleotide
gtagtaagtacctctaatatatagcaagaa

SEQ ID NO: 227475 - DNA, 30 bp, Artificial Sequence
  Synthetic oligonucleotide
aagacctatttccgttcttgttagcaagaa

SEQ ID NO: 227476 - DNA, 30 bp, Artificial Sequence
  Synthetic oligonucleotide
aaagctaatggttcgtcgaaagctcaagaa

SEQ ID NO: 227477 - DNA, 30 bp, Artificial Sequence
  Synthetic oligonucleotide
tcttgattcacgattaccgaaggggaagaa

SEQ ID NO: 227478 - DNA, 30 bp, Artificial Sequence
  Synthetic oligonucleotide
tcccacggctgggcgccaacacatgaagaa

SEQ ID NO: 227479 - DNA, 30 bp, Artificial Sequence
  Synthetic oligonucleotide
ataaggggtgcattctaggttaagtaagaa

SEQ ID NO: 227480 - DNA, 30 bp, Artificial Sequence
  Synthetic oligonucleotide
tagctcagttaggaaaacggggacacagaa

SEQ ID NO: 227481 - DNA, 30 bp, Artificial Sequence
  Synthetic oligonucleotide
tcgaccgcgtgaggaacgaacaccacagaa

SEQ ID NO: 227482 - DNA, 30 bp, Artificial Sequence
  Synthetic oligonucleotide
gtcttacaccagtagatgccacggacagaa

SEQ ID NO: 227483 - DNA, 30 bp, Artificial Sequence
  Synthetic oligonucleotide
gccatgataagggcgccctaagatacagaa

SEQ ID NO: 227484 - DNA, 30 bp, Artificial Sequence
  Synthetic oligonucleotide
gctaggcgctttcattacggtggtacagaa

SEQ ID NO: 227485 - DNA, 30 bp, Artificial Sequence
  Synthetic oligonucleotide
cgttattgaactcgtgttgggtaaccagaa

SEQ ID NO: 227486 - DNA, 30 bp, Artificial Sequence
  Synthetic oligonucleotide
ggacagggcgggcatatggcactcccagaa

SEQ ID NO: 227487 - DNA, 30 bp, Artificial Sequence
  Synthetic oligonucleotide
tgcctgcattcgttcgcatttttcccagaa

SEQ ID NO: 227488 - DNA, 30 bp, Artificial Sequence
  Synthetic oligonucleotide
actgtggttcctgtacagttgtcgccagaa

SEQ ID NO: 227489 - DNA, 30 bp, Artificial Sequence
  Synthetic oligonucleotide
ctcagccggaggcacgcggtttggccagaa

SEQ ID NO: 227490 - DNA, 30 bp, Artificial Sequence
  Synthetic oligonucleotide
gcacgatttttcacaatttttgtgccagaa

SEQ ID NO: 227491 - DNA, 30 bp, Artificial Sequence
  Synthetic oligonucleotide
caacccagacgacgcaggtcacgtccagaa

SEQ ID NO: 227492 - DNA, 30 bp, Artificial Sequence
  Synthetic oligonucleotide
tcggaactttcacgacaacacgctgcagaa

SEQ ID NO: 227493 - DNA, 30 bp, Artificial Sequence
  Synthetic oligonucleotide
aggggagcagctggcactgatagatcagaa

SEQ ID NO: 227494 - DNA, 30 bp, Artificial Sequence
  Synthetic oligonucleotide
gaattacatagtggatgttcatgatcagaa

SEQ ID NO: 227495 - DNA, 30 bp, Artificial Sequence
  Synthetic oligonucleotide
cagggcatggtccgcttaagtagctcagaa

SEQ ID NO: 227496 - DNA, 30 bp, Artificial Sequence
  Synthetic oligonucleotide
ctaccagactcatttgcagggacgtcagaa

SEQ ID NO: 227497 - DNA, 30 bp, Artificial Sequence
  Synthetic oligonucleotide
caggaaaggatttttgacgtggtgtcagaa

SEQ ID NO: 227498 - DNA, 30 bp, Artificial Sequence
  Synthetic oligonucleotide
gagcgtagtcccacacatccgttgtcagaa

SEQ ID NO: 227499 - DNA, 30 bp, Artificial Sequence
  Synthetic oligonucleotide
aatcgggccgtccgtgcatggttgtcagaa

SEQ ID NO: 227500 - DNA, 30 bp, Artificial Sequence
  Synthetic oligonucleotide
aattcgacggatggtcgaggttattcagaa

SEQ ID NO: 227501 - DNA, 30 bp, Artificial Sequence
  Synthetic oligonucleotide
gtcctagtgtatgaggtccgctgcagagaa

SEQ ID NO: 227502 - DNA, 30 bp, Artificial Sequence
  Synthetic oligonucleotide
atacaaaggaactaataaataaagagagaa

SEQ ID NO: 227503 - DNA, 30 bp, Artificial Sequence
  Synthetic oligonucleotide
atgggcccacgcgacgctttacatagagaa

SEQ ID NO: 227504 - DNA, 30 bp, Artificial Sequence
  Synthetic oligonucleotide
gtaagtgttaatgaattagtttatagagaa

SEQ ID NO: 227505 - DNA, 30 bp, Artificial Sequence
  Synthetic oligonucleotide
cacgttgacagaaccgcatggtttagagaa

SEQ ID NO: 227506 - DNA, 30 bp, Artificial Sequence
  Synthetic oligonucleotide
atgctaataagctttacgcgcccgcgagaa

SEQ ID NO: 227507 - DNA, 30 bp, Artificial Sequence
  Synthetic oligonucleotide
cagtagcgttcaaccttgaaccgtcgagaa

SEQ ID NO: 227508 - DNA, 30 bp, Artificial Sequence
  Synthetic oligonucleotide
tagagctcctggtgtaagggcggcggagaa

SEQ ID NO: 227509 - DNA, 30 bp, Artificial Sequence
  Synthetic oligonucleotide
actttaaggcgttacgggtaactcggagaa

SEQ ID NO: 227510 - DNA, 30 bp, Artificial Sequence
  Synthetic oligonucleotide
ggatctaccggctggtgaacggagggagaa

SEQ ID NO: 227511 - DNA, 30 bp, Artificial Sequence
  Synthetic oligonucleotide
gcagagtccccagcgcaattacggggagaa

SEQ ID NO: 227512 - DNA, 30 bp, Artificial Sequence
  Synthetic oligonucleotide
tgatcacgttgggttagagttttgggagaa

SEQ ID NO: 227513 - DNA, 30 bp, Artificial Sequence
  Synthetic oligonucleotide
atatccgcgctatagagcctaaatggagaa

SEQ ID NO: 227514 - DNA, 30 bp, Artificial Sequence
  Synthetic oligonucleotide
tgtattttaaagctgcgacatcgtggagaa

SEQ ID NO: 227515 - DNA, 30 bp, Artificial Sequence
  Synthetic oligonucleotide
ccgttccttttctcaaaaaaagcgtgagaa

SEQ ID NO: 227516 - DNA, 30 bp, Artificial Sequence
  Synthetic oligonucleotide
ctacggtggtcgtcacctacgccttgagaa

SEQ ID NO: 227517 - DNA, 30 bp, Artificial Sequence
  Synthetic oligonucleotide
tattgagttcattaattgaactcttgagaa

SEQ ID NO: 227518 - DNA, 30 bp, Artificial Sequence
  Synthetic oligonucleotide
gccgctgcggaacgagctctaacactagaa

SEQ ID NO: 227519 - DNA, 30 bp, Artificial Sequence
  Synthetic oligonucleotide
gattcggtcggcgtgcaataggcactagaa

SEQ ID NO: 227520 - DNA, 30 bp, Artificial Sequence
  Synthetic oligonucleotide
ctaagaaattctgccacaccttgcctagaa

SEQ ID NO: 227521 - DNA, 30 bp, Artificial Sequence
  Synthetic oligonucleotide
gccgaccctatcgaggagctggggctagaa

SEQ ID NO: 227522 - DNA, 30 bp, Artificial Sequence
  Synthetic oligonucleotide
ctcctgaatttgggttctctagtgctagaa

SEQ ID NO: 227523 - DNA, 30 bp, Artificial Sequence
  Synthetic oligonucleotide
atccgtcaattgcgctctaagaatctagaa

SEQ ID NO: 227524 - DNA, 30 bp, Artificial Sequence
  Synthetic oligonucleotide
ggggcggtgggacacgcgtggaaggtagaa

SEQ ID NO: 227525 - DNA, 30 bp, Artificial Sequence
  Synthetic oligonucleotide
gtcatttgtgaaatcaagagtttggtagaa

SEQ ID NO: 227526 - DNA, 30 bp, Artificial Sequence
  Synthetic oligonucleotide
tgtgtagagtaagtagttttcattgtagaa

SEQ ID NO: 227527 - DNA, 30 bp, Artificial Sequence
  Synthetic oligonucleotide
tacactcgcgatactagcggcacattagaa

SEQ ID NO: 227528 - DNA, 30 bp, Artificial Sequence
  Synthetic oligonucleotide
cagtggtctttcaggtgacttctgttagaa

SEQ ID NO: 227529 - DNA, 30 bp, Artificial Sequence
  Synthetic oligonucleotide
gctgcgcgcttgagtctgagggatttagaa

SEQ ID NO: 227530 - DNA, 30 bp, Artificial Sequence
  Synthetic oligonucleotide
gtgtacggaaaatacgcgttatatttagaa

SEQ ID NO: 227531 - DNA, 30 bp, Artificial Sequence
  Synthetic oligonucleotide
tcaccttagattgttaagcgaactttagaa

SEQ ID NO: 227532 - DNA, 30 bp, Artificial Sequence
  Synthetic oligonucleotide
tcttattacgattaataggagcctttagaa

SEQ ID NO: 227533 - DNA, 30 bp, Artificial Sequence
  Synthetic oligonucleotide
agttaaggcgtactgtaaaaagctttagaa

SEQ ID NO: 227534 - DNA, 30 bp, Artificial Sequence
  Synthetic oligonucleotide
acataataagatatggtgtggagtttagaa

SEQ ID NO: 227535 - DNA, 30 bp, Artificial Sequence
  Synthetic oligonucleotide
ctagcttttgacggtattgagtaaaacgaa

SEQ ID NO: 227536 - DNA, 30 bp, Artificial Sequence
  Synthetic oligonucleotide
gtgtcctcgaaagttccgggtccaaacgaa

SEQ ID NO: 227537 - DNA, 30 bp, Artificial Sequence
  Synthetic oligonucleotide
tggctaggatggggcccggacggaaacgaa

SEQ ID NO: 227538 - DNA, 30 bp, Artificial Sequence
  Synthetic oligonucleotide
aaccagatctaatggccgccgaacaacgaa

SEQ ID NO: 227539 - DNA, 30 bp, Artificial Sequence
  Synthetic oligonucleotide
tcaccttgataactatacgttaagaacgaa

SEQ ID NO: 227540 - DNA, 30 bp, Artificial Sequence
  Synthetic oligonucleotide
tcctcgaatacaccattgtccctgaacgaa

SEQ ID NO: 227541 - DNA, 30 bp, Artificial Sequence
  Synthetic oligonucleotide
gccgaataacggttaccagtgctgaacgaa

SEQ ID NO: 227542 - DNA, 30 bp, Artificial Sequence
  Synthetic oligonucleotide
ggaagccattaagcaagtctggttaacgaa

SEQ ID NO: 227543 - DNA, 30 bp, Artificial Sequence
  Synthetic oligonucleotide
ctaaggtcaaacagacgtctctttaacgaa

SEQ ID NO: 227544 - DNA, 30 bp, Artificial Sequence
  Synthetic oligonucleotide
cgaatttaagagagtcagtacatacacgaa

SEQ ID NO: 227545 - DNA, 30 bp, Artificial Sequence
  Synthetic oligonucleotide
ttgtcattggtttcttaagatccccacgaa

SEQ ID NO: 227546 - DNA, 30 bp, Artificial Sequence
  Synthetic oligonucleotide
ttataccagaacattacgcgccggcacgaa

SEQ ID NO: 227547 - DNA, 30 bp, Artificial Sequence
  Synthetic oligonucleotide
agagtgcaggtcgtgactgacgtgcacgaa

SEQ ID NO: 227548 - DNA, 30 bp, Artificial Sequence
  Synthetic oligonucleotide
aaaatgcattggaccgtgctaaatcacgaa

SEQ ID NO: 227549 - DNA, 30 bp, Artificial Sequence
  Synthetic oligonucleotide
tccatggaaagggcgcagcgatgtcacgaa

SEQ ID NO: 227550 - DNA, 30 bp, Artificial Sequence
  Synthetic oligonucleotide
cgggctgcgcgcggtgacgattgggacgaa

SEQ ID NO: 227551 - DNA, 30 bp, Artificial Sequence
  Synthetic oligonucleotide
ggtcgcgcatgatactatcatttggacgaa

SEQ ID NO: 227552 - DNA, 30 bp, Artificial Sequence
  Synthetic oligonucleotide
agtaccgccgacagtatgactcgctacgaa

SEQ ID NO: 227553 - DNA, 30 bp, Artificial Sequence
  Synthetic oligonucleotide
ctaagggggttcgaacaacttagttacgaa

SEQ ID NO: 227554 - DNA, 30 bp, Artificial Sequence
  Synthetic oligonucleotide
tgaagttcaaggaatgcataaatttacgaa

SEQ ID NO: 227555 - DNA, 30 bp, Artificial Sequence
  Synthetic oligonucleotide
ggatagggactggctaatcagttttacgaa

SEQ ID NO: 227556 - DNA, 30 bp, Artificial Sequence
  Synthetic oligonucleotide
tcgactctggttgagtccacggacaccgaa

SEQ ID NO: 227557 - DNA, 30 bp, Artificial Sequence
  Synthetic oligonucleotide
aacatgaaggtggcaagttctgacaccgaa

SEQ ID NO: 227558 - DNA, 30 bp, Artificial Sequence
  Synthetic oligonucleotide
gggggtcacgggatttacccatagaccgaa

SEQ ID NO: 227559 - DNA, 30 bp, Artificial Sequence
  Synthetic oligonucleotide
ggaagggacttgttgcgttgtacgaccgaa

SEQ ID NO: 227560 - DNA, 30 bp, Artificial Sequence
  Synthetic oligonucleotide
gcttatgatgagatttcctgagtgaccgaa

SEQ ID NO: 227561 - DNA, 30 bp, Artificial Sequence
  Synthetic oligonucleotide
cggccggagactgcggtgggactacccgaa

SEQ ID NO: 227562 - DNA, 30 bp, Artificial Sequence
  Synthetic oligonucleotide
tgcactattgtgccggtaaaaaaccccgaa

SEQ ID NO: 227563 - DNA, 30 bp, Artificial Sequence
  Synthetic oligonucleotide
tggtttaagatcaggcggtctcaccccgaa

SEQ ID NO: 227564 - DNA, 30 bp, Artificial Sequence
  Synthetic oligonucleotide
cctggtattaatatacctgaccccgccgaa

SEQ ID NO: 227565 - DNA, 31 bp, Artificial Sequence
  Synthetic oligonucleotide
cagtcccaggtactcttacatcctcgccgaa

SEQ ID NO: 227566 - DNA, 30 bp, Artificial Sequence
  Synthetic oligonucleotide
tgcaatagggctttcaggcacgtcgccgaa

SEQ ID NO: 227567 - DNA, 30 bp, Artificial Sequence
  Synthetic oligonucleotide
tgcataaggtccgtcgtaccttcggccgaa

SEQ ID NO: 227568 - DNA, 30 bp, Artificial Sequence
  Synthetic oligonucleotide
agtagtagcggcgatcgccaaggggccgaa

SEQ ID NO: 227569 - DNA, 30 bp, Artificial Sequence
  Synthetic oligonucleotide
catagcgatcgcaaatcaaaatcatccgaa

SEQ ID NO: 227570 - DNA, 30 bp, Artificial Sequence
  Synthetic oligonucleotide
tcatgtaatattacatctggccgatccgaa

SEQ ID NO: 227571 - DNA, 30 bp, Artificial Sequence
  Synthetic oligonucleotide
ccaccgttccttcctacgattggctccgaa

SEQ ID NO: 227572 - DNA, 30 bp, Artificial Sequence
  Synthetic oligonucleotide
ctttcagactcagattgagtggggtccgaa

SEQ ID NO: 227573 - DNA, 30 bp, Artificial Sequence
  Synthetic oligonucleotide
gagcataccgggctggtagaggattccgaa

SEQ ID NO: 227574 - DNA, 30 bp, Artificial Sequence
  Synthetic oligonucleotide
tcgggtcgaaggagtctgtgttgttccgaa

SEQ ID NO: 227575 - DNA, 30 bp, Artificial Sequence
  Synthetic oligonucleotide
agagggcaatccttagagttctcaagcgaa

SEQ ID NO: 227576 - DNA, 30 bp, Artificial Sequence
  Synthetic oligonucleotide
gaaatagcttaacattcaaccatgagcgaa

SEQ ID NO: 227577 - DNA, 30 bp, Artificial Sequence
  Synthetic oligonucleotide
gaatatgggaatctgggactgcatagcgaa

SEQ ID NO: 227578 - DNA, 30 bp, Artificial Sequence
  Synthetic oligonucleotide
atggcggatgcgtctttacaataacgcgaa

SEQ ID NO: 227579 - DNA, 30 bp, Artificial Sequence
  Synthetic oligonucleotide
ctgcccgtagagagatgtgagtaacgcgaa

SEQ ID NO: 227580 - DNA, 30 bp, Artificial Sequence
  Synthetic oligonucleotide
gtaggtgtataggggaacatacgacgcgaa

SEQ ID NO: 227581 - DNA, 30 bp, Artificial Sequence
  Synthetic oligonucleotide
tgtcccaagttaaaggggtagcgacgcgaa

SEQ ID NO: 227582 - DNA, 31 bp, Artificial Sequence
  Synthetic oligonucleotide
gcctttgaactggagctgcaaactacgcgaa

SEQ ID NO: 227583 - DNA, 30 bp, Artificial Sequence
  Synthetic oligonucleotide
gttagtccgggaagaaactattgaggcgaa

SEQ ID NO: 227584 - DNA, 30 bp, Artificial Sequence
  Synthetic oligonucleotide
gtaaagccgtacgaatgcgttctcggcgaa

SEQ ID NO: 227585 - DNA, 30 bp, Artificial Sequence
  Synthetic oligonucleotide
caattctagactaactgattttcgggcgaa

SEQ ID NO: 227586 - DNA, 30 bp, Artificial Sequence
  Synthetic oligonucleotide
tgagtactaattggcaccgcatggggcgaa

SEQ ID NO: 227587 - DNA, 30 bp, Artificial Sequence
  Synthetic oligonucleotide
gtccggggtgaaagaacgccgatgggcgaa

SEQ ID NO: 227588 - DNA, 30 bp, Artificial Sequence
  Synthetic oligonucleotide
ctagcgggaaatagtatggcgagtggcgaa

SEQ ID NO: 227589 - DNA, 30 bp, Artificial Sequence
  Synthetic oligonucleotide
gtcagagcattcggctaccctgaatgcgaa

SEQ ID NO: 227590 - DNA, 30 bp, Artificial Sequence
  Synthetic oligonucleotide
aacatcccaatggcgttgtattcatgcgaa

SEQ ID NO: 227591 - DNA, 30 bp, Artificial Sequence
  Synthetic oligonucleotide
gttgggagcgaagtgcgaccgtcctgcgaa

SEQ ID NO: 227592 - DNA, 30 bp, Artificial Sequence
  Synthetic oligonucleotide
cttatggaatggttcttactgtaaatcgaa

SEQ ID NO: 227593 - DNA, 30 bp, Artificial Sequence
  Synthetic oligonucleotide
agcactgccatccgaaccggacgaatcgaa

SEQ ID NO: 227594 - DNA, 30 bp, Artificial Sequence
  Synthetic oligonucleotide
cacgtggttacggattccacgaagatcgaa

SEQ ID NO: 227595 - DNA, 30 bp, Artificial Sequence
  Synthetic oligonucleotide
gcgtcggaatcgagacctgatcgactcgaa

SEQ ID NO: 227596 - DNA, 30 bp, Artificial Sequence
  Synthetic oligonucleotide
ctccaatgggtccaccggtaccacctcgaa

SEQ ID NO: 227597 - DNA, 30 bp, Artificial Sequence
  Synthetic oligonucleotide
gcgtcaggcaaggattacgttttcctcgaa

SEQ ID NO: 227598 - DNA, 30 bp, Artificial Sequence
  Synthetic oligonucleotide
atggtccgcgcatatgtgatatggctcgaa

SEQ ID NO: 227599 - DNA, 30 bp, Artificial Sequence
  Synthetic oligonucleotide
gacgtacgcacggactagcacggtctcgaa

SEQ ID NO: 227600 - DNA, 30 bp, Artificial Sequence
  Synthetic oligonucleotide
gccgccgccggtcggtcatgaaaagtcgaa

SEQ ID NO: 227601 - DNA, 30 bp, Artificial Sequence
  Synthetic oligonucleotide
tctatacaatctgcgttatacagagtcgaa

SEQ ID NO: 227602 - DNA, 30 bp, Artificial Sequence
  Synthetic oligonucleotide
tcatgactggtaggtatcacccgggtcgaa

SEQ ID NO: 227603 - DNA, 30 bp, Artificial Sequence
  Synthetic oligonucleotide
tcacatgtcccgttcttctggatggtcgaa

SEQ ID NO: 227604 - DNA, 30 bp, Artificial Sequence
  Synthetic oligonucleotide
cgcccgggagagcgcacctttcatgtcgaa

SEQ ID NO: 227605 - DNA, 30 bp, Artificial Sequence
  Synthetic oligonucleotide
gccgtagtgcttggtgttcggagtgtcgaa

SEQ ID NO: 227606 - DNA, 30 bp, Artificial Sequence
  Synthetic oligonucleotide
gacatataacaaagtcatcgggcattcgaa

SEQ ID NO: 227607 - DNA, 30 bp, Artificial Sequence
  Synthetic oligonucleotide
cgagtaatgttttcccttggtcgattcgaa

SEQ ID NO: 227608 - DNA, 30 bp, Artificial Sequence
  Synthetic oligonucleotide
ctcttcgttggagattgctgtgacttcgaa

SEQ ID NO: 227609 - DNA, 30 bp, Artificial Sequence
  Synthetic oligonucleotide
tgggttagtccggtggtagtatgcttcgaa

SEQ ID NO: 227610 - DNA, 30 bp, Artificial Sequence
  Synthetic oligonucleotide
aggcgcaccgatacgtgcctagtcttcgaa

SEQ ID NO: 227611 - DNA, 30 bp, Artificial Sequence
  Synthetic oligonucleotide
gtcactatcgaaggatcatataggttcgaa

SEQ ID NO: 227612 - DNA, 30 bp, Artificial Sequence
  Synthetic oligonucleotide
gttgcgttcaccgctttcatcttaaaggaa

SEQ ID NO: 227613 - DNA, 30 bp, Artificial Sequence
  Synthetic oligonucleotide
acctaaatatactacgaagccatcaaggaa

SEQ ID NO: 227614 - DNA, 30 bp, Artificial Sequence
  Synthetic oligonucleotide
tcagggccgcttgtttacatcatcaaggaa

SEQ ID NO: 227615 - DNA, 30 bp, Artificial Sequence
  Synthetic oligonucleotide
tacatgagatatgcgtgataaaagaaggaa

SEQ ID NO: 227616 - DNA, 30 bp, Artificial Sequence
  Synthetic oligonucleotide
gccgttgagaatatgtaaatcacgaaggaa

SEQ ID NO: 227617 - DNA, 30 bp, Artificial Sequence
  Synthetic oligonucleotide
ttggggttgaggggctgtccgttgaaggaa

SEQ ID NO: 227618 - DNA, 30 bp, Artificial Sequence
  Synthetic oligonucleotide
ttacctaaaaaagcaattgccaataaggaa

SEQ ID NO: 227619 - DNA, 30 bp, Artificial Sequence
  Synthetic oligonucleotide
agggtatcccgactttacggataacaggaa

SEQ ID NO: 227620 - DNA, 30 bp, Artificial Sequence
  Synthetic oligonucleotide
tctgctcatattccgcacgtaatccaggaa

SEQ ID NO: 227621 - DNA, 30 bp, Artificial Sequence
  Synthetic oligonucleotide
tataggggcggtgcctgtcaaatgcaggaa

SEQ ID NO: 227622 - DNA, 30 bp, Artificial Sequence
  Synthetic oligonucleotide
tatattatctcgaacaaatggattcaggaa

SEQ ID NO: 227623 - DNA, 30 bp, Artificial Sequence
  Synthetic oligonucleotide
cgaaggacgcatgttatgttcacagaggaa

SEQ ID NO: 227624 - DNA, 30 bp, Artificial Sequence
  Synthetic oligonucleotide
gttgtccggtatgtttacgtttgagaggaa

SEQ ID NO: 227625 - DNA, 31 bp, Artificial Sequence
  Synthetic oligonucleotide
tgccctgctatcgtcccacggcctagaggaa

SEQ ID NO: 227626 - DNA, 30 bp, Artificial Sequence
  Synthetic oligonucleotide
tgttgccagcggcaagctgcgcacgaggaa

SEQ ID NO: 227627 - DNA, 30 bp, Artificial Sequence
  Synthetic oligonucleotide
cacattaaccgaaacttgatggccgaggaa

SEQ ID NO: 227628 - DNA, 30 bp, Artificial Sequence
  Synthetic oligonucleotide
cctactaatgccttatagcaactcgaggaa

SEQ ID NO: 227629 - DNA, 30 bp, Artificial Sequence
  Synthetic oligonucleotide
tgttacgtatcgctcagtacacaggaggaa

SEQ ID NO: 227630 - DNA, 30 bp, Artificial Sequence
  Synthetic oligonucleotide
gtagtgacacgatgcaagcagcaggaggaa

SEQ ID NO: 227631 - DNA, 30 bp, Artificial Sequence
  Synthetic oligonucleotide
tcagtaaatgaatttatactgtcggaggaa

SEQ ID NO: 227632 - DNA, 30 bp, Artificial Sequence
  Synthetic oligonucleotide
tgagtcataacccgatgggcgcgggaggaa

SEQ ID NO: 227633 - DNA, 30 bp, Artificial Sequence
  Synthetic oligonucleotide
cactgtgggtctggctatccatgggaggaa

SEQ ID NO: 227634 - DNA, 30 bp, Artificial Sequence
  Synthetic oligonucleotide
ctaagttgaaagcaagcccaatgtgaggaa

SEQ ID NO: 227635 - DNA, 30 bp, Artificial Sequence
  Synthetic oligonucleotide
tctgtatcagttaatttacgtgttgaggaa

SEQ ID NO: 227636 - DNA, 30 bp, Artificial Sequence
  Synthetic oligonucleotide
tgcgggttaagcgccggggaatgataggaa

SEQ ID NO: 227637 - DNA, 30 bp, Artificial Sequence
  Synthetic oligonucleotide
gggtgcgcatttacttaactaggctaggaa

SEQ ID NO: 227638 - DNA, 30 bp, Artificial Sequence
  Synthetic oligonucleotide
gttgaaggagtcatcctcggattgtaggaa

SEQ ID NO: 227639 - DNA, 30 bp, Artificial Sequence
  Synthetic oligonucleotide
gcaatcgggtaaaaatcgtttgggacggaa

SEQ ID NO: 227640 - DNA, 30 bp, Artificial Sequence
  Synthetic oligonucleotide
tgcttgatttatataaactacacaccggaa

SEQ ID NO: 227641 - DNA, 30 bp, Artificial Sequence
  Synthetic oligonucleotide
atagcagaccttactccttgtccaccggaa

SEQ ID NO: 227642 - DNA, 30 bp, Artificial Sequence
  Synthetic oligonucleotide
tatactaacgggggcccaacagacccggaa

SEQ ID NO: 227643 - DNA, 30 bp, Artificial Sequence
  Synthetic oligonucleotide
tgtaggagggaggaagctgggtagccggaa

SEQ ID NO: 227644 - DNA, 30 bp, Artificial Sequence
  Synthetic oligonucleotide
cgccggcacgcaccatcgcgaatgccggaa

SEQ ID NO: 227645 - DNA, 30 bp, Artificial Sequence
  Synthetic oligonucleotide
cgtgtgatacaagacaactcacacgcggaa

SEQ ID NO: 227646 - DNA, 30 bp, Artificial Sequence
  Synthetic oligonucleotide
ataaggactcgactagcgggtcgcgcggaa

SEQ ID NO: 227647 - DNA, 30 bp, Artificial Sequence
  Synthetic oligonucleotide
ataccgctatagtatattcaaaatgcggaa

SEQ ID NO: 227648 - DNA, 30 bp, Artificial Sequence
  Synthetic oligonucleotide
gacgatccagcgatacgggatgatgcggaa

SEQ ID NO: 227649 - DNA, 30 bp, Artificial Sequence
  Synthetic oligonucleotide
cagctcttacaccaggctaggatatcggaa

SEQ ID NO: 227650 - DNA, 30 bp, Artificial Sequence
  Synthetic oligonucleotide
cagatgagtcgatcatagttgttatcggaa

SEQ ID NO: 227651 - DNA, 30 bp, Artificial Sequence
  Synthetic oligonucleotide
gtaaccaccacagcgtctcccacctcggaa

SEQ ID NO: 227652 - DNA, 30 bp, Artificial Sequence
  Synthetic oligonucleotide
tattacgaccttaagtgtgcctgctcggaa

SEQ ID NO: 227653 - DNA, 30 bp, Artificial Sequence
  Synthetic oligonucleotide
aatcgggaatccaccgtttttgcgtcggaa

SEQ ID NO: 227654 - DNA, 30 bp, Artificial Sequence
  Synthetic oligonucleotide
tcgctaaacaacctacgtctactgtcggaa

SEQ ID NO: 227655 - DNA, 30 bp, Artificial Sequence
  Synthetic oligonucleotide
gtaaggcgcgcccgagcattcagttcggaa

SEQ ID NO: 227656 - DNA, 30 bp, Artificial Sequence
  Synthetic oligonucleotide
tgggaacagatttagacatatagttcggaa

SEQ ID NO: 227657 - DNA, 30 bp, Artificial Sequence
  Synthetic oligonucleotide
acggggaatgttggattcggagaaagggaa

SEQ ID NO: 227658 - DNA, 30 bp, Artificial Sequence
  Synthetic oligonucleotide
gcatgtcttctagcaactcggtaaagggaa

SEQ ID NO: 227659 - DNA, 30 bp, Artificial Sequence
  Synthetic oligonucleotide
gtttggccaagctataggcagataagggaa

SEQ ID NO: 227660 - DNA, 30 bp, Artificial Sequence
  Synthetic oligonucleotide
ggtagaactggcagaaggcggctaagggaa

SEQ ID NO: 227661 - DNA, 30 bp, Artificial Sequence
  Synthetic oligonucleotide
acagctgttgatggcaccgggcagagggaa

SEQ ID NO: 227662 - DNA, 30 bp, Artificial Sequence
  Synthetic oligonucleotide
ttcacttgagtggtataaaagccgagggaa

SEQ ID NO: 227663 - DNA, 30 bp, Artificial Sequence
  Synthetic oligonucleotide
tcgccaaaacgtaacagttcattgagggaa

SEQ ID NO: 227664 - DNA, 30 bp, Artificial Sequence
  Synthetic oligonucleotide
ccttttattattgatgttactaatagggaa

SEQ ID NO: 227665 - DNA, 30 bp, Artificial Sequence
  Synthetic oligonucleotide
gcgccgcgtgcatgagcgttccttagggaa

SEQ ID NO: 227666 - DNA, 30 bp, Artificial Sequence
  Synthetic oligonucleotide
cttggttccggtgttgacaaaaaacgggaa

SEQ ID NO: 227667 - DNA, 30 bp, Artificial Sequence
  Synthetic oligonucleotide
ctttcgcaagggtaaccttggaaacgggaa

SEQ ID NO: 227668 - DNA, 30 bp, Artificial Sequence
  Synthetic oligonucleotide
aacgggcatccgcgatacacgtgacgggaa

SEQ ID NO: 227669 - DNA, 30 bp, Artificial Sequence
  Synthetic oligonucleotide
gttagggagtaacgagtttggtaccgggaa

SEQ ID NO: 227670 - DNA, 30 bp, Artificial Sequence
  Synthetic oligonucleotide
tgacagaaccatgtaccgagtgcccgggaa

SEQ ID NO: 227671 - DNA, 30 bp, Artificial Sequence
  Synthetic oligonucleotide
cgtggatttctgtgactcgtctggcgggaa

SEQ ID NO: 227672 - DNA, 30 bp, Artificial Sequence
  Synthetic oligonucleotide
ccgggatcgaaatgtattttggatcgggaa

SEQ ID NO: 227673 - DNA, 30 bp, Artificial Sequence
  Synthetic oligonucleotide
tcatttcggagtaatcgctaaggaggggaa

SEQ ID NO: 227674 - DNA, 30 bp, Artificial Sequence
  Synthetic oligonucleotide
agtgcaccgcgctggtagtgactaggggaa

SEQ ID NO: 227675 - DNA, 30 bp, Artificial Sequence
  Synthetic oligonucleotide
gaagttgaccatctctcttcctacggggaa

SEQ ID NO: 227676 - DNA, 30 bp, Artificial Sequence
  Synthetic oligonucleotide
gaccgccctcagtgaacgtcagagggggaa

SEQ ID NO: 227677 - DNA, 30 bp, Artificial Sequence
  Synthetic oligonucleotide
aatgagccctccgtttaagcgatgggggaa

SEQ ID NO: 227678 - DNA, 30 bp, Artificial Sequence
  Synthetic oligonucleotide
ccctcactatcaaaaatatgtgcatgggaa

SEQ ID NO: 227679 - DNA, 30 bp, Artificial Sequence
  Synthetic oligonucleotide
cattctgcgtgactcgtatgtggctgggaa

SEQ ID NO: 227680 - DNA, 30 bp, Artificial Sequence
  Synthetic oligonucleotide
ggtgggaggactgtcccttataagtgggaa

SEQ ID NO: 227681 - DNA, 30 bp, Artificial Sequence
  Synthetic oligonucleotide
tcaggccactagattacgtacacgtgggaa

SEQ ID NO: 227682 - DNA, 30 bp, Artificial Sequence
  Synthetic oligonucleotide
aaggtggtggtaattcatggttggtgggaa

SEQ ID NO: 227683 - DNA, 30 bp, Artificial Sequence
  Synthetic oligonucleotide
aaacgggacgtaaactgggtccattgggaa

SEQ ID NO: 227684 - DNA, 30 bp, Artificial Sequence
  Synthetic oligonucleotide
gcctgtttaaattcaagcctgacttgggaa

SEQ ID NO: 227685 - DNA, 31 bp, Artificial Sequence
  Synthetic oligonucleotide
tgtaatcctgctatcgactttataaatggaa

SEQ ID NO: 227686 - DNA, 30 bp, Artificial Sequence
  Synthetic oligonucleotide
tcgctcgcgatgaccgctatcggaatggaa

SEQ ID NO: 227687 - DNA, 25 bp, Artificial Sequence
  Synthetic oligonucleotide
aaacgataggttgttatgaatggaa

SEQ ID NO: 227688 - DNA, 30 bp, Artificial Sequence
  Synthetic oligonucleotide
aatcaccgcgcccgagctatcgtaatggaa

SEQ ID NO: 227689 - DNA, 30 bp, Artificial Sequence
  Synthetic oligonucleotide
cttagatgatagttcaaactcgagatggaa

SEQ ID NO: 227690 - DNA, 30 bp, Artificial Sequence
  Synthetic oligonucleotide
acactttgactagtagacagtgagatggaa

SEQ ID NO: 227691 - DNA, 30 bp, Artificial Sequence
  Synthetic oligonucleotide
catggaatgtgcgaagttgcttagatggaa

SEQ ID NO: 227692 - DNA, 30 bp, Artificial Sequence
  Synthetic oligonucleotide
aggactcgttgtagaaggggtagtatggaa

SEQ ID NO: 227693 - DNA, 30 bp, Artificial Sequence
  Synthetic oligonucleotide
actactagctagcgggtcgtagaactggaa

SEQ ID NO: 227694 - DNA, 30 bp, Artificial Sequence
  Synthetic oligonucleotide
tgtttacaatttgcctcaacgggactggaa

SEQ ID NO: 227695 - DNA, 30 bp, Artificial Sequence
  Synthetic oligonucleotide
tatacatccaggggcacccaattcctggaa

SEQ ID NO: 227696 - DNA, 30 bp, Artificial Sequence
  Synthetic oligonucleotide
gatatgccggggccttaagcactgctggaa

SEQ ID NO: 227697 - DNA, 30 bp, Artificial Sequence
  Synthetic oligonucleotide
ctcgattcgtggctgtggatgagtctggaa

SEQ ID NO: 227698 - DNA, 30 bp, Artificial Sequence
  Synthetic oligonucleotide
accgtcgggggggccgggtaggaagtggaa

SEQ ID NO: 227699 - DNA, 30 bp, Artificial Sequence
  Synthetic oligonucleotide
gcattacgctcgtcaggagtccaggtggaa

SEQ ID NO: 227700 - DNA, 30 bp, Artificial Sequence
  Synthetic oligonucleotide
actcagtagaccgcgaatcaggaattggaa

SEQ ID NO: 227701 - DNA, 30 bp, Artificial Sequence
  Synthetic oligonucleotide
gatggattgagatggtgtggtccgttggaa

SEQ ID NO: 227702 - DNA, 30 bp, Artificial Sequence
  Synthetic oligonucleotide
gcagacttagcttagtgatgatggttggaa

SEQ ID NO: 227703 - DNA, 30 bp, Artificial Sequence
  Synthetic oligonucleotide
aacggaaaaaaaacgctggcgtggttggaa

SEQ ID NO: 227704 - DNA, 30 bp, Artificial Sequence
  Synthetic oligonucleotide
gtgtttttgaggatgggaggctctttggaa

SEQ ID NO: 227705 - DNA, 30 bp, Artificial Sequence
  Synthetic oligonucleotide
ggcgtacgggaccctatcgtgtgaaatgaa

SEQ ID NO: 227706 - DNA, 30 bp, Artificial Sequence
  Synthetic oligonucleotide
gaaagttatcgggacaagaacctaaatgaa

SEQ ID NO: 227707 - DNA, 31 bp, Artificial Sequence
  Synthetic oligonucleotide
ccattgattatgtatcactttcaccaatgaa

SEQ ID NO: 227708 - DNA, 30 bp, Artificial Sequence
  Synthetic oligonucleotide
ctccgatgtgttagtagcgtgtgcaatgaa

SEQ ID NO: 227709 - DNA, 30 bp, Artificial Sequence
  Synthetic oligonucleotide
ttagcataagtgtgcgattggcggaatgaa

SEQ ID NO: 227710 - DNA, 30 bp, Artificial Sequence
  Synthetic oligonucleotide
aagctgggtcagaagggtaattctaatgaa

SEQ ID NO: 227711 - DNA, 30 bp, Artificial Sequence
  Synthetic oligonucleotide
gtgtaagtcgttacggaaaagcaacatgaa

SEQ ID NO: 227712 - DNA, 30 bp, Artificial Sequence
  Synthetic oligonucleotide
gttgttaccaagcggcaggtacaccatgaa

SEQ ID NO: 227713 - DNA, 30 bp, Artificial Sequence
  Synthetic oligonucleotide
gcgtacttgtccagcacggagaggcatgaa

SEQ ID NO: 227714 - DNA, 30 bp, Artificial Sequence
  Synthetic oligonucleotide
gacaaagagagtgaccctctagggcatgaa

SEQ ID NO: 227715 - DNA, 30 bp, Artificial Sequence
  Synthetic oligonucleotide
agtcgtaaggggcagtggtgctggcatgaa

SEQ ID NO: 227716 - DNA, 30 bp, Artificial Sequence
  Synthetic oligonucleotide
gtaccgttggatctagacccccgtcatgaa

SEQ ID NO: 227717 - DNA, 30 bp, Artificial Sequence
  Synthetic oligonucleotide
attatctgtagtgggcacaagggtcatgaa

SEQ ID NO: 227718 - DNA, 30 bp, Artificial Sequence
  Synthetic oligonucleotide
gaaaattaaataaaattcggagttcatgaa

SEQ ID NO: 227719 - DNA, 30 bp, Artificial Sequence
  Synthetic oligonucleotide
acatgaagtgcccctgtgaggcaagatgaa

SEQ ID NO: 227720 - DNA, 30 bp, Artificial Sequence
  Synthetic oligonucleotide
ttccgtcgaatgggtgtctgcgaagatgaa

SEQ ID NO: 227721 - DNA, 30 bp, Artificial Sequence
  Synthetic oligonucleotide
tgtcgaggaatggttagctccacagatgaa

SEQ ID NO: 227722 - DNA, 30 bp, Artificial Sequence
  Synthetic oligonucleotide
acacatagaagatgttcgagtcgagatgaa

SEQ ID NO: 227723 - DNA, 30 bp, Artificial Sequence
  Synthetic oligonucleotide
tggatatggagaaaacatgtcaacgatgaa

SEQ ID NO: 227724 - DNA, 30 bp, Artificial Sequence
  Synthetic oligonucleotide
ggcccggctgaagaccgtaaactcgatgaa

SEQ ID NO: 227725 - DNA, 30 bp, Artificial Sequence
  Synthetic oligonucleotide
cttctggcggcagattcaggtctggatgaa

SEQ ID NO: 227726 - DNA, 30 bp, Artificial Sequence
  Synthetic oligonucleotide
aagcgaaaaaccgccgggataacatatgaa

SEQ ID NO: 227727 - DNA, 30 bp, Artificial Sequence
  Synthetic oligonucleotide
ctataagcgtgtgccgtaatatgatatgaa

SEQ ID NO: 227728 - DNA, 30 bp, Artificial Sequence
  Synthetic oligonucleotide
aacgcctcagcgttactgggtgtatatgaa

SEQ ID NO: 227729 - DNA, 30 bp, Artificial Sequence
  Synthetic oligonucleotide
tagtgaaccgaggttagcagcacctatgaa

SEQ ID NO: 227730 - DNA, 30 bp, Artificial Sequence
  Synthetic oligonucleotide
gaacaactacaagctcctgaagagtatgaa

SEQ ID NO: 227731 - DNA, 30 bp, Artificial Sequence
  Synthetic oligonucleotide
tatgctgactacactcatgacacgtatgaa

SEQ ID NO: 227732 - DNA, 30 bp, Artificial Sequence
  Synthetic oligonucleotide
cgtgaatcgtgtctatacccaaattatgaa

SEQ ID NO: 227733 - DNA, 30 bp, Artificial Sequence
  Synthetic oligonucleotide
agctattgatctgtaaggttttattatgaa

SEQ ID NO: 227734 - DNA, 30 bp, Artificial Sequence
  Synthetic oligonucleotide
tagttggaagctatatccgctaaaactgaa

SEQ ID NO: 227735 - DNA, 30 bp, Artificial Sequence
  Synthetic oligonucleotide
gatatagtatatatcccggtacagactgaa

SEQ ID NO: 227736 - DNA, 30 bp, Artificial Sequence
  Synthetic oligonucleotide
ttctagaagaactcattaaaccgtactgaa

SEQ ID NO: 227737 - DNA, 31 bp, Artificial Sequence
  Synthetic oligonucleotide
ccgcttcgggatagcggttacaaaacctgaa

SEQ ID NO: 227738 - DNA, 30 bp, Artificial Sequence
  Synthetic oligonucleotide
ctgggatggttaaggtgagtcttccctgaa

SEQ ID NO: 227739 - DNA, 30 bp, Artificial Sequence
  Synthetic oligonucleotide
gattacactggtcataatagggggcctgaa

SEQ ID NO: 227740 - DNA, 30 bp, Artificial Sequence
  Synthetic oligonucleotide
ggtgaatcacaatcgtgtaaacgagctgaa

SEQ ID NO: 227741 - DNA, 30 bp, Artificial Sequence
  Synthetic oligonucleotide
tgggacaattacgtaaggacgccggctgaa

SEQ ID NO: 227742 - DNA, 30 bp, Artificial Sequence
  Synthetic oligonucleotide
gggcttcattggttaggcaggggggctgaa

SEQ ID NO: 227743 - DNA, 30 bp, Artificial Sequence
  Synthetic oligonucleotide
cccgagggaattcgcatactccgtgctgaa

SEQ ID NO: 227744 - DNA, 30 bp, Artificial Sequence
  Synthetic oligonucleotide
acaataaaatgactatccagaggtgctgaa

SEQ ID NO: 227745 - DNA, 30 bp, Artificial Sequence
  Synthetic oligonucleotide
gctcgagataccacacacaggtcatctgaa

SEQ ID NO: 227746 - DNA, 30 bp, Artificial Sequence
  Synthetic oligonucleotide
gcaagctatcgttatgcgctcctatctgaa

SEQ ID NO: 227747 - DNA, 30 bp, Artificial Sequence
  Synthetic oligonucleotide
ttcatcaggactatttcctatcggtctgaa

SEQ ID NO: 227748 - DNA, 30 bp, Artificial Sequence
  Synthetic oligonucleotide
tccatggagaaaatgtcacttgaaagtgaa

SEQ ID NO: 227749 - DNA, 30 bp, Artificial Sequence
  Synthetic oligonucleotide
cccgtgtgaaaaaccgcgcccaacagtgaa

SEQ ID NO: 227750 - DNA, 31 bp, Artificial Sequence
  Synthetic oligonucleotide
cggacgatatggatgtgggaagggcagtgaa

SEQ ID NO: 227751 - DNA, 30 bp, Artificial Sequence
  Synthetic oligonucleotide
atgcaggatcaaccctccttgatcagtgaa

SEQ ID NO: 227752 - DNA, 30 bp, Artificial Sequence
  Synthetic oligonucleotide
tgtaggctctgtaaaaatatacctagtgaa

SEQ ID NO: 227753 - DNA, 30 bp, Artificial Sequence
  Synthetic oligonucleotide
tgagggtgtacggatttcatttctagtgaa

SEQ ID NO: 227754 - DNA, 30 bp, Artificial Sequence
  Synthetic oligonucleotide
ttggatcccacgtcatctcatggtagtgaa

SEQ ID NO: 227755 - DNA, 30 bp, Artificial Sequence
  Synthetic oligonucleotide
ccaagttagtgaaaggagtaataacgtgaa

SEQ ID NO: 227756 - DNA, 30 bp, Artificial Sequence
  Synthetic oligonucleotide
agtgaaggccactccgggtatgtacgtgaa

SEQ ID NO: 227757 - DNA, 29 bp, Artificial Sequence
  Synthetic oligonucleotide
ccgaaccgcctaatgctaaccaaggtgaa

SEQ ID NO: 227758 - DNA, 30 bp, Artificial Sequence
  Synthetic oligonucleotide
gtgacccaactgaagaacgtttaaggtgaa

SEQ ID NO: 227759 - DNA, 30 bp, Artificial Sequence
  Synthetic oligonucleotide
atggtggatcagcttccccctccaggtgaa

SEQ ID NO: 227760 - DNA, 30 bp, Artificial Sequence
  Synthetic oligonucleotide
tcgagtattgaccgacacggcgcaggtgaa

SEQ ID NO: 227761 - DNA, 30 bp, Artificial Sequence
  Synthetic oligonucleotide
ggctcttcagggggtcaacatctcggtgaa

SEQ ID NO: 227762 - DNA, 30 bp, Artificial Sequence
  Synthetic oligonucleotide
tagactcggctcctgaattggaagggtgaa

SEQ ID NO: 227763 - DNA, 30 bp, Artificial Sequence
  Synthetic oligonucleotide
attgatcactgccctcacggttggggtgaa

SEQ ID NO: 227764 - DNA, 30 bp, Artificial Sequence
  Synthetic oligonucleotide
catgaggcattgaggcttgctctgggtgaa

SEQ ID NO: 227765 - DNA, 30 bp, Artificial Sequence
  Synthetic oligonucleotide
gttacagattaatgagattacgtgggtgaa

SEQ ID NO: 227766 - DNA, 30 bp, Artificial Sequence
  Synthetic oligonucleotide
cttgggtcacatttagtaaatgttggtgaa

SEQ ID NO: 227767 - DNA, 30 bp, Artificial Sequence
  Synthetic oligonucleotide
gaaaagtgagatctgtggcgctttggtgaa

SEQ ID NO: 227768 - DNA, 30 bp, Artificial Sequence
  Synthetic oligonucleotide
ggaagcccggtatcaggacggcgatgtgaa

SEQ ID NO: 227769 - DNA, 30 bp, Artificial Sequence
  Synthetic oligonucleotide
ggatgcatgataattcactaattatgtgaa

SEQ ID NO: 227770 - DNA, 30 bp, Artificial Sequence
  Synthetic oligonucleotide
atggtcggtaccgaagtatccgcctgtgaa

SEQ ID NO: 227771 - DNA, 30 bp, Artificial Sequence
  Synthetic oligonucleotide
gtgtaggccgaaccatattcggtctgtgaa

SEQ ID NO: 227772 - DNA, 30 bp, Artificial Sequence
  Synthetic oligonucleotide
gttcagcggttgagggctgaacagtgtgaa

SEQ ID NO: 227773 - DNA, 30 bp, Artificial Sequence
  Synthetic oligonucleotide
atgctgacaagccctagggataggtgtgaa

SEQ ID NO: 227774 - DNA, 30 bp, Artificial Sequence
  Synthetic oligonucleotide
ggtgcagaacacgtgaatcagagttgtgaa

SEQ ID NO: 227775 - DNA, 30 bp, Artificial Sequence
  Synthetic oligonucleotide
ggcgatcagtagcgggagcggggttgtgaa

SEQ ID NO: 227776 - DNA, 30 bp, Artificial Sequence
  Synthetic oligonucleotide
ggctgggaatacgttttgatggtttgtgaa

SEQ ID NO: 227777 - DNA, 30 bp, Artificial Sequence
  Synthetic oligonucleotide
cgcggacgaaggatgctccttcatattgaa

SEQ ID NO: 227778 - DNA, 30 bp, Artificial Sequence
  Synthetic oligonucleotide
cattcccgtattgtgcgtgggtgtattgaa

SEQ ID NO: 227779 - DNA, 30 bp, Artificial Sequence
  Synthetic oligonucleotide
actctgcgctggtggtgtgatgttattgaa

SEQ ID NO: 227780 - DNA, 30 bp, Artificial Sequence
  Synthetic oligonucleotide
tgccgggcataggacttaaaagaacttgaa

SEQ ID NO: 227781 - DNA, 30 bp, Artificial Sequence
  Synthetic oligonucleotide
cgataaccaagggcgctttgctcacttgaa

SEQ ID NO: 227782 - DNA, 30 bp, Artificial Sequence
  Synthetic oligonucleotide
agcttgctaacgtctcttcgcctgcttgaa

SEQ ID NO: 227783 - DNA, 30 bp, Artificial Sequence
  Synthetic oligonucleotide
tcacgtgagcgttataaggaccatcttgaa

SEQ ID NO: 227784 - DNA, 30 bp, Artificial Sequence
  Synthetic oligonucleotide
agaaggcaaaaagtgtccgttcacgttgaa

SEQ ID NO: 227785 - DNA, 30 bp, Artificial Sequence
  Synthetic oligonucleotide
tatattggggcgtgttgagtggccgttgaa

SEQ ID NO: 227786 - DNA, 30 bp, Artificial Sequence
  Synthetic oligonucleotide
gggtgggagaactatgaagtacgggttgaa

SEQ ID NO: 227787 - DNA, 30 bp, Artificial Sequence
  Synthetic oligonucleotide
gctctcttaaaatggatctaacatgttgaa

SEQ ID NO: 227788 - DNA, 30 bp, Artificial Sequence
  Synthetic oligonucleotide
cgggtgatagagttaggctcgggtgttgaa

SEQ ID NO: 227789 - DNA, 30 bp, Artificial Sequence
  Synthetic oligonucleotide
ggtactccacaggctgaaagcccatttgaa

SEQ ID NO: 227790 - DNA, 30 bp, Artificial Sequence
  Synthetic oligonucleotide
tataaagcaaacgggctttaacgatttgaa

SEQ ID NO: 227791 - DNA, 30 bp, Artificial Sequence
  Synthetic oligonucleotide
aggagatcggatagaaaaatccgctttgaa

SEQ ID NO: 227792 - DNA, 30 bp, Artificial Sequence
  Synthetic oligonucleotide
ctaatagggacgcatcgctctttgtttgaa

SEQ ID NO: 227793 - DNA, 30 bp, Artificial Sequence
  Synthetic oligonucleotide
cggagtatggcggtagtatacgtttttgaa

SEQ ID NO: 227794 - DNA, 30 bp, Artificial Sequence
  Synthetic oligonucleotide
tcatccgacgggtgtttatcaacaaaataa

SEQ ID NO: 227795 - DNA, 30 bp, Artificial Sequence
  Synthetic oligonucleotide
gagtttctaacggggtaacatggaaaataa

SEQ ID NO: 227796 - DNA, 30 bp, Artificial Sequence
  Synthetic oligonucleotide
acgggcgccggaacacttttaaacaaataa

SEQ ID NO: 227797 - DNA, 30 bp, Artificial Sequence
  Synthetic oligonucleotide
ctaatcagtattctctgaacccccaaataa

SEQ ID NO: 227798 - DNA, 30 bp, Artificial Sequence
  Synthetic oligonucleotide
cacacatctatgaccgtcacaatcaaataa

SEQ ID NO: 227799 - DNA, 30 bp, Artificial Sequence
  Synthetic oligonucleotide
gcgatgttgtcgacgtaaacgatcaaataa

SEQ ID NO: 227800 - DNA, 30 bp, Artificial Sequence
  Synthetic oligonucleotide
caaaactatcccaactttactacgaaataa

SEQ ID NO: 227801 - DNA, 30 bp, Artificial Sequence
  Synthetic oligonucleotide
tggtcaaacgtgttgagatttgcgaaataa

SEQ ID NO: 227802 - DNA, 30 bp, Artificial Sequence
  Synthetic oligonucleotide
ggaatcacgtctgtaggagaatctaaataa

SEQ ID NO: 227803 - DNA, 30 bp, Artificial Sequence
  Synthetic oligonucleotide
ttgacttcggcgatcgtcgtgggtaaataa

SEQ ID NO: 227804 - DNA, 30 bp, Artificial Sequence
  Synthetic oligonucleotide
tacaaggagctgactcatcgtggtaaataa

SEQ ID NO: 227805 - DNA, 30 bp, Artificial Sequence
  Synthetic oligonucleotide
actcagaccagttaagctggccaccaataa

SEQ ID NO: 227806 - DNA, 30 bp, Artificial Sequence
  Synthetic oligonucleotide
gggacacccttaagggatgtataccaataa

SEQ ID NO: 227807 - DNA, 30 bp, Artificial Sequence
  Synthetic oligonucleotide
tcttctccgtccacgatggggctccaataa

SEQ ID NO: 227808 - DNA, 30 bp, Artificial Sequence
  Synthetic oligonucleotide
acgggaccgcagaggaactaaaatcaataa

SEQ ID NO: 227809 - DNA, 30 bp, Artificial Sequence
  Synthetic oligonucleotide
aagccagctaacagtgtacctcgtcaataa

SEQ ID NO: 227810 - DNA, 30 bp, Artificial Sequence
  Synthetic oligonucleotide
cctttccaattaaaaaaatcgggtcaataa

SEQ ID NO: 227811 - DNA, 30 bp, Artificial Sequence
  Synthetic oligonucleotide
tgacctaggaactcgtacagcgtagaataa

SEQ ID NO: 227812 - DNA, 30 bp, Artificial Sequence
  Synthetic oligonucleotide
cgggcaaatctgaacgccatggtagaataa

SEQ ID NO: 227813 - DNA, 30 bp, Artificial Sequence
  Synthetic oligonucleotide
cttgctggcaagcaaaacctgaacgaataa

SEQ ID NO: 227814 - DNA, 30 bp, Artificial Sequence
  Synthetic oligonucleotide
aattgagacgggaactagagatcggaataa

SEQ ID NO: 227815 - DNA, 30 bp, Artificial Sequence
  Synthetic oligonucleotide
aattgtccagaattgtagttgggggaataa

SEQ ID NO: 227816 - DNA, 30 bp, Artificial Sequence
  Synthetic oligonucleotide
tcgctaaggggtgcagcctctagtgaataa

SEQ ID NO: 227817 - DNA, 30 bp, Artificial Sequence
  Synthetic oligonucleotide
gcccaggatgggaaaagttagcgtgaataa

SEQ ID NO: 227818 - DNA, 30 bp, Artificial Sequence
  Synthetic oligonucleotide
agcactactcacagtcaccccagataataa

SEQ ID NO: 227819 - DNA, 30 bp, Artificial Sequence
  Synthetic oligonucleotide
tggccacttataaggcgcgttatctaataa

SEQ ID NO: 227820 - DNA, 30 bp, Artificial Sequence
  Synthetic oligonucleotide
gctgaactccatggatagaggctctaataa

SEQ ID NO: 227821 - DNA, 30 bp, Artificial Sequence
  Synthetic oligonucleotide
cattttgggcaatcccgggggctgtaataa

SEQ ID NO: 227822 - DNA, 30 bp, Artificial Sequence
  Synthetic oligonucleotide
cacaccgtatacagcctccgtgattaataa

SEQ ID NO: 227823 - DNA, 30 bp, Artificial Sequence
  Synthetic oligonucleotide
caacgtcgtttccgtaattgtgtttaataa

SEQ ID NO: 227824 - DNA, 30 bp, Artificial Sequence
  Synthetic oligonucleotide
cggaatttaggggtttaggttccaacataa

SEQ ID NO: 227825 - DNA, 30 bp, Artificial Sequence
  Synthetic oligonucleotide
atcctaaatttcacccagtataacacataa

SEQ ID NO: 227826 - DNA, 30 bp, Artificial Sequence
  Synthetic oligonucleotide
aacgaccaattggaggttaatcacacataa

SEQ ID NO: 227827 - DNA, 30 bp, Artificial Sequence
  Synthetic oligonucleotide
cgattgagtaaattattacagcagacataa

SEQ ID NO: 227828 - DNA, 30 bp, Artificial Sequence
  Synthetic oligonucleotide
gataatgctataaaagtctggacgacataa

SEQ ID NO: 227829 - DNA, 30 bp, Artificial Sequence
  Synthetic oligonucleotide
agtctagacggtaactgtgctctgacataa

SEQ ID NO: 227830 - DNA, 30 bp, Artificial Sequence
  Synthetic oligonucleotide
aaagaatcaactttctccgtcttgacataa

SEQ ID NO: 227831 - DNA, 30 bp, Artificial Sequence
  Synthetic oligonucleotide
aatgggtccgacggtactggtgctacataa

SEQ ID NO: 227832 - DNA, 30 bp, Artificial Sequence
  Synthetic oligonucleotide
agtggtttaccaggtaggctcgaagcataa

SEQ ID NO: 227833 - DNA, 30 bp, Artificial Sequence
  Synthetic oligonucleotide
atcgaaagaggctgcgactgtagagcataa

SEQ ID NO: 227834 - DNA, 30 bp, Artificial Sequence
  Synthetic oligonucleotide
cgggacagttcgacggggtggctagcataa

SEQ ID NO: 227835 - DNA, 30 bp, Artificial Sequence
  Synthetic oligonucleotide
gacaccagtcggcactcaatttacgcataa

SEQ ID NO: 227836 - DNA, 30 bp, Artificial Sequence
  Synthetic oligonucleotide
gacggggcattgctgtaaacaagggcataa

SEQ ID NO: 227837 - DNA, 30 bp, Artificial Sequence
  Synthetic oligonucleotide
ggatcagaggcaacgtcctgggatgcataa

SEQ ID NO: 227838 - DNA, 30 bp, Artificial Sequence
  Synthetic oligonucleotide
aacgtgggggcgggttaaggcgttgcataa

SEQ ID NO: 227839 - DNA, 30 bp, Artificial Sequence
  Synthetic oligonucleotide
gaagtgatatgagaattaatttttgcataa

SEQ ID NO: 227840 - DNA, 30 bp, Artificial Sequence
  Synthetic oligonucleotide
gtcgaagtctggtatttgcgggcatcataa

SEQ ID NO: 227841 - DNA, 30 bp, Artificial Sequence
  Synthetic oligonucleotide
tatgcttgcattcggacaagaagatcataa

SEQ ID NO: 227842 - DNA, 30 bp, Artificial Sequence
  Synthetic oligonucleotide
gatctcaaagcgtgggcatcctcgtcataa

SEQ ID NO: 227843 - DNA, 30 bp, Artificial Sequence
  Synthetic oligonucleotide
aatgaaaagtaaagacggaggtattcataa

SEQ ID NO: 227844 - DNA, 30 bp, Artificial Sequence
  Synthetic oligonucleotide
ctcgtcaaatgtaaggttggcccttcataa

SEQ ID NO: 227845 - DNA, 30 bp, Artificial Sequence
  Synthetic oligonucleotide
tgaagagtcctcatacctcgccacagataa

SEQ ID NO: 227846 - DNA, 30 bp, Artificial Sequence
  Synthetic oligonucleotide
acgcaagatctctcagaattagatagataa

SEQ ID NO: 227847 - DNA, 30 bp, Artificial Sequence
  Synthetic oligonucleotide
tcagcagacttcgtacatcctaaacgataa

SEQ ID NO: 227848 - DNA, 30 bp, Artificial Sequence
  Synthetic oligonucleotide
gtcctacggttcttggatatgtcacgataa

SEQ ID NO: 227849 - DNA, 30 bp, Artificial Sequence
  Synthetic oligonucleotide
tcgtctacgctgtgtagaggggtacgataa

SEQ ID NO: 227850 - DNA, 30 bp, Artificial Sequence
  Synthetic oligonucleotide
gaaggttacaagttagtgactaaccgataa

SEQ ID NO: 227851 - DNA, 30 bp, Artificial Sequence
  Synthetic oligonucleotide
atatcctcgagggcatcgtcttaccgataa

SEQ ID NO: 227852 - DNA, 30 bp, Artificial Sequence
  Synthetic oligonucleotide
taggtttgaacggaacgcttcacgcgataa

SEQ ID NO: 227853 - DNA, 30 bp, Artificial Sequence
  Synthetic oligonucleotide
gacgtcagtgcccaaacacaagggcgataa

SEQ ID NO: 227854 - DNA, 30 bp, Artificial Sequence
  Synthetic oligonucleotide
ttcaattacgtaggttactgcgatcgataa

SEQ ID NO: 227855 - DNA, 30 bp, Artificial Sequence
  Synthetic oligonucleotide
gaaaggtcaagggtgcgaatatatcgataa

SEQ ID NO: 227856 - DNA, 30 bp, Artificial Sequence
  Synthetic oligonucleotide
gggatcaaagggatccgctttcctcgataa

SEQ ID NO: 227857 - DNA, 30 bp, Artificial Sequence
  Synthetic oligonucleotide
taacctccattcaagaataattctcgataa

SEQ ID NO: 227858 - DNA, 30 bp, Artificial Sequence
  Synthetic oligonucleotide
ttaacttagttgcaaccgatatgtcgataa

SEQ ID NO: 227859 - DNA, 30 bp, Artificial Sequence
  Synthetic oligonucleotide
ataggaagcttggaatgtagacaaggataa

SEQ ID NO: 227860 - DNA, 30 bp, Artificial Sequence
  Synthetic oligonucleotide
tcaaccattagagtagggcctccaggataa

SEQ ID NO: 227861 - DNA, 30 bp, Artificial Sequence
  Synthetic oligonucleotide
caagtacccgatgtcgggatacgcggataa

SEQ ID NO: 227862 - DNA, 30 bp, Artificial Sequence
  Synthetic oligonucleotide
tggttcagcaaagcttctagtgggggataa

SEQ ID NO: 227863 - DNA, 30 bp, Artificial Sequence
  Synthetic oligonucleotide
ctaaacgcctagctgtagctgagtggataa

SEQ ID NO: 227864 - DNA, 30 bp, Artificial Sequence
  Synthetic oligonucleotide
aatcacggatagtgtcatcaagttggataa

SEQ ID NO: 227865 - DNA, 30 bp, Artificial Sequence
  Synthetic oligonucleotide
gtcgccatagggggcgcatcggtatgataa

SEQ ID NO: 227866 - DNA, 30 bp, Artificial Sequence
  Synthetic oligonucleotide
tagcttgccgcaattacggagtgctgataa

SEQ ID NO: 227867 - DNA, 31 bp, Artificial Sequence
  Synthetic oligonucleotide
gtagaggttgcccatgaaaggattctgataa

SEQ ID NO: 227868 - DNA, 30 bp, Artificial Sequence
  Synthetic oligonucleotide
atggctctcctatgagaagctaagtgataa

SEQ ID NO: 227869 - DNA, 30 bp, Artificial Sequence
  Synthetic oligonucleotide
tctgtaatcaggaacgcaaggaggtgataa

SEQ ID NO: 227870 - DNA, 30 bp, Artificial Sequence
  Synthetic oligonucleotide
gttatggtgcagggtgctatatattgataa

SEQ ID NO: 227871 - DNA, 30 bp, Artificial Sequence
  Synthetic oligonucleotide
tcgaccctgttaaagacctgctattgataa

SEQ ID NO: 227872 - DNA, 30 bp, Artificial Sequence
  Synthetic oligonucleotide
ctggaagaccggcatgggcctcgaatataa

SEQ ID NO: 227873 - DNA, 30 bp, Artificial Sequence
  Synthetic oligonucleotide
cggtgcctagagggaacgtttatgatataa

SEQ ID NO: 227874 - DNA, 30 bp, Artificial Sequence
  Synthetic oligonucleotide
gcatcgacgcttcaggggtaggtgatataa

SEQ ID NO: 227875 - DNA, 30 bp, Artificial Sequence
  Synthetic oligonucleotide
gatagatgttccgaatgttaacatatataa

SEQ ID NO: 227876 - DNA, 30 bp, Artificial Sequence
  Synthetic oligonucleotide
ggtgatccccatatgcccaatcatatataa

SEQ ID NO: 227877 - DNA, 30 bp, Artificial Sequence
  Synthetic oligonucleotide
ccagtggataggtcttagcagcgtatataa

SEQ ID NO: 227878 - DNA, 30 bp, Artificial Sequence
  Synthetic oligonucleotide
ctcgccagaagcggatacaactgtatataa

SEQ ID NO: 227879 - DNA, 30 bp, Artificial Sequence
  Synthetic oligonucleotide
tcctcgcaaacgaacttctgcgttatataa

SEQ ID NO: 227880 - DNA, 30 bp, Artificial Sequence
  Synthetic oligonucleotide
gtccaagtagcctaccgattcttactataa

SEQ ID NO: 227881 - DNA, 30 bp, Artificial Sequence
  Synthetic oligonucleotide
ggcaaattcttcggggattgggacctataa

SEQ ID NO: 227882 - DNA, 30 bp, Artificial Sequence
  Synthetic oligonucleotide
gtgaggggatgttaggtaggggtgctataa

SEQ ID NO: 227883 - DNA, 30 bp, Artificial Sequence
  Synthetic oligonucleotide
agcctaataagacgggccaccctagtataa

SEQ ID NO: 227884 - DNA, 30 bp, Artificial Sequence
  Synthetic oligonucleotide
agaaggaatgttgacaaggaggacgtataa

SEQ ID NO: 227885 - DNA, 30 bp, Artificial Sequence
  Synthetic oligonucleotide
gcatccgacttacatgtgtgctacgtataa

SEQ ID NO: 227886 - DNA, 30 bp, Artificial Sequence
  Synthetic oligonucleotide
cgatctgggagggagtaatgtatcgtataa

SEQ ID NO: 227887 - DNA, 30 bp, Artificial Sequence
  Synthetic oligonucleotide
atgctaagaggccgatggtccccggtataa

SEQ ID NO: 227888 - DNA, 30 bp, Artificial Sequence
  Synthetic oligonucleotide
gtgggacacaatactactctatgtgtataa

SEQ ID NO: 227889 - DNA, 30 bp, Artificial Sequence
  Synthetic oligonucleotide
tctcgaaaaagggttcacatttaattataa

SEQ ID NO: 227890 - DNA, 30 bp, Artificial Sequence
  Synthetic oligonucleotide
gcatcggggatctacatgtgtcacttataa

SEQ ID NO: 227891 - DNA, 30 bp, Artificial Sequence
  Synthetic oligonucleotide
cgcgaattagggatctagatatagttataa

SEQ ID NO: 227892 - DNA, 30 bp, Artificial Sequence
  Synthetic oligonucleotide
cgtcttcaggggacacttcacggcaactaa

SEQ ID NO: 227893 - DNA, 30 bp, Artificial Sequence
  Synthetic oligonucleotide
tgctaactcttggcggtaggtcagaactaa

SEQ ID NO: 227894 - DNA, 30 bp, Artificial Sequence
  Synthetic oligonucleotide
gaacatatccggagacgagcagagaactaa

SEQ ID NO: 227895 - DNA, 30 bp, Artificial Sequence
  Synthetic oligonucleotide
tcgtatacccctctgcaactcacgaactaa

SEQ ID NO: 227896 - DNA, 30 bp, Artificial Sequence
  Synthetic oligonucleotide
aggtcatctaaccttgtagactcgaactaa

SEQ ID NO: 227897 - DNA, 30 bp, Artificial Sequence
  Synthetic oligonucleotide
cctagcagccaacaacgctagttgaactaa

SEQ ID NO: 227898 - DNA, 30 bp, Artificial Sequence
  Synthetic oligonucleotide
actacttggggttctggagctggccactaa

SEQ ID NO: 227899 - DNA, 30 bp, Artificial Sequence
  Synthetic oligonucleotide
cggaccagcccctcctacagtatccactaa

SEQ ID NO: 227900 - DNA, 30 bp, Artificial Sequence
  Synthetic oligonucleotide
tgcgttgttcatgattgtcgggagcactaa

SEQ ID NO: 227901 - DNA, 30 bp, Artificial Sequence
  Synthetic oligonucleotide
cagttttccgagtgctttaagccgcactaa

SEQ ID NO: 227902 - DNA, 30 bp, Artificial Sequence
  Synthetic oligonucleotide
ctcagcgtgtacgtctaacgtgcgcactaa

SEQ ID NO: 227903 - DNA, 30 bp, Artificial Sequence
  Synthetic oligonucleotide
gtgttggcagagatcgatgcttggcactaa

SEQ ID NO: 227904 - DNA, 30 bp, Artificial Sequence
  Synthetic oligonucleotide
cctgacctagaaggtcggcccagtcactaa

SEQ ID NO: 227905 - DNA, 30 bp, Artificial Sequence
  Synthetic oligonucleotide
actagtacctaacaacggcttgaagactaa

SEQ ID NO: 227906 - DNA, 30 bp, Artificial Sequence
  Synthetic oligonucleotide
taggctataaattcaggaatcccagactaa

SEQ ID NO: 227907 - DNA, 30 bp, Artificial Sequence
  Synthetic oligonucleotide
ggcagtaatcatgtagaaactaacgactaa

SEQ ID NO: 227908 - DNA, 30 bp, Artificial Sequence
  Synthetic oligonucleotide
gtatgtgggagagcacaggtctgcgactaa

SEQ ID NO: 227909 - DNA, 30 bp, Artificial Sequence
  Synthetic oligonucleotide
gcattcctgcctgtgcgtatttcggactaa

SEQ ID NO: 227910 - DNA, 30 bp, Artificial Sequence
  Synthetic oligonucleotide
acgggagggatggacacgaaccgtgactaa

SEQ ID NO: 227911 - DNA, 30 bp, Artificial Sequence
  Synthetic oligonucleotide
caatgattgacataacatcttctatactaa

SEQ ID NO: 227912 - DNA, 30 bp, Artificial Sequence
  Synthetic oligonucleotide
tcttagccgtagatttcatctaactactaa

SEQ ID NO: 227913 - DNA, 30 bp, Artificial Sequence
  Synthetic oligonucleotide
caaattgattagcagaaaaagagctactaa

SEQ ID NO: 227914 - DNA, 31 bp, Artificial Sequence
  Synthetic oligonucleotide
cgcgactaagctctagtgcaaaatctactaa

SEQ ID NO: 227915 - DNA, 30 bp, Artificial Sequence
  Synthetic oligonucleotide
gcgattatctcagaatgtagcttctactaa

SEQ ID NO: 227916 - DNA, 30 bp, Artificial Sequence
  Synthetic oligonucleotide
acatgttaatcgggcagtaccacgtactaa

SEQ ID NO: 227917 - DNA, 30 bp, Artificial Sequence
  Synthetic oligonucleotide
tgctcagaatggccacctatgacgtactaa

SEQ ID NO: 227918 - DNA, 30 bp, Artificial Sequence
  Synthetic oligonucleotide
caaataacgaggttaactttaaggtactaa

SEQ ID NO: 227919 - DNA, 30 bp, Artificial Sequence
  Synthetic oligonucleotide
cagaattaacgttgcgctattctgtactaa

SEQ ID NO: 227920 - DNA, 30 bp, Artificial Sequence
  Synthetic oligonucleotide
caaacatggggttcagacaagcaaacctaa

SEQ ID NO: 227921 - DNA, 30 bp, Artificial Sequence
  Synthetic oligonucleotide
ggaccacacgcagtgccctgcataacctaa

SEQ ID NO: 227922 - DNA, 30 bp, Artificial Sequence
  Synthetic oligonucleotide
acttaactctagcgacttgtactaacctaa

SEQ ID NO: 227923 - DNA, 30 bp, Artificial Sequence
  Synthetic oligonucleotide
tgcgatactgtggagtgcattgtcacctaa

SEQ ID NO: 227924 - DNA, 30 bp, Artificial Sequence
  Synthetic oligonucleotide
ggttactgtctgcccatgttttcagcctaa

SEQ ID NO: 227925 - DNA, 30 bp, Artificial Sequence
  Synthetic oligonucleotide
caatactgtccagtctggaggggagcctaa

SEQ ID NO: 227926 - DNA, 30 bp, Artificial Sequence
  Synthetic oligonucleotide
atcggacgcggtagcggtgagaccgcctaa

SEQ ID NO: 227927 - DNA, 30 bp, Artificial Sequence
  Synthetic oligonucleotide
gcagtgaaatctctatggtcacccgcctaa

SEQ ID NO: 227928 - DNA, 30 bp, Artificial Sequence
  Synthetic oligonucleotide
gcgtgtgagtctaagtaatttcgcgcctaa

SEQ ID NO: 227929 - DNA, 30 bp, Artificial Sequence
  Synthetic oligonucleotide
tccatttgcttacccactcataaggcctaa

SEQ ID NO: 227930 - DNA, 31 bp, Artificial Sequence
  Synthetic oligonucleotide
ccgcgtagctgtcgcgtaagagtctgcctaa

SEQ ID NO: 227931 - DNA, 30 bp, Artificial Sequence
  Synthetic oligonucleotide
tcagacgtgggagatcaagttggatcctaa

SEQ ID NO: 227932 - DNA, 30 bp, Artificial Sequence
  Synthetic oligonucleotide
caatttagttccgtgcttggtgggtcctaa

SEQ ID NO: 227933 - DNA, 30 bp, Artificial Sequence
  Synthetic oligonucleotide
ggcacaacgcattgcctccagttgtcctaa

SEQ ID NO: 227934 - DNA, 30 bp, Artificial Sequence
  Synthetic oligonucleotide
tgatgtaccacctacgattgccattcctaa

SEQ ID NO: 227935 - DNA, 30 bp, Artificial Sequence
  Synthetic oligonucleotide
ggttcctaatgttcattgaggttttcctaa

SEQ ID NO: 227936 - DNA, 30 bp, Artificial Sequence
  Synthetic oligonucleotide
gatcgaaaacttccgtcgggtagaagctaa

SEQ ID NO: 227937 - DNA, 30 bp, Artificial Sequence
  Synthetic oligonucleotide
tcaatagtacaggtgaacactacgagctaa

SEQ ID NO: 227938 - DNA, 30 bp, Artificial Sequence
  Synthetic oligonucleotide
ttgattctgcatggatcacgccggagctaa

SEQ ID NO: 227939 - DNA, 30 bp, Artificial Sequence
  Synthetic oligonucleotide
atcacatgagttatgtgaccacgccgctaa

SEQ ID NO: 227940 - DNA, 30 bp, Artificial Sequence
  Synthetic oligonucleotide
gagcgtaaggtctgaattcacgtccgctaa

SEQ ID NO: 227941 - DNA, 30 bp, Artificial Sequence
  Synthetic oligonucleotide
tgccatgagtgtggagatatgtcgcgctaa

SEQ ID NO: 227942 - DNA, 30 bp, Artificial Sequence
  Synthetic oligonucleotide
aggaacaatatagacgctagcaggcgctaa

SEQ ID NO: 227943 - DNA, 30 bp, Artificial Sequence
  Synthetic oligonucleotide
tgatttaggaaccgatttagcaacggctaa

SEQ ID NO: 227944 - DNA, 30 bp, Artificial Sequence
  Synthetic oligonucleotide
catcctcatgggtatttctagcccggctaa

SEQ ID NO: 227945 - DNA, 30 bp, Artificial Sequence
  Synthetic oligonucleotide
tctaatgggaatgttgttccactcggctaa

SEQ ID NO: 227946 - DNA, 30 bp, Artificial Sequence
  Synthetic oligonucleotide
tcgcttgaaatgcagctcggtgagggctaa

SEQ ID NO: 227947 - DNA, 30 bp, Artificial Sequence
  Synthetic oligonucleotide
catgtacacgcaggagtcattgcgggctaa

SEQ ID NO: 227948 - DNA, 30 bp, Artificial Sequence
  Synthetic oligonucleotide
cctctagcttaacagggaaggcatggctaa

SEQ ID NO: 227949 - DNA, 30 bp, Artificial Sequence
  Synthetic oligonucleotide
gcgcgtaatttgatggagcgtaagtgctaa

SEQ ID NO: 227950 - DNA, 30 bp, Artificial Sequence
  Synthetic oligonucleotide
ccccaagtaggcccccgtaacacttgctaa

SEQ ID NO: 227951 - DNA, 30 bp, Artificial Sequence
  Synthetic oligonucleotide
cgcaagagtgcggctcaaagcacttgctaa

SEQ ID NO: 227952 - DNA, 30 bp, Artificial Sequence
  Synthetic oligonucleotide
acctctttagaggcgtgtagttaaatctaa

SEQ ID NO: 227953 - DNA, 30 bp, Artificial Sequence
  Synthetic oligonucleotide
atctggggatagggctcggagataatctaa

SEQ ID NO: 227954 - DNA, 30 bp, Artificial Sequence
  Synthetic oligonucleotide
tgcgtgtacgattacaagccgtagatctaa

SEQ ID NO: 227955 - DNA, 30 bp, Artificial Sequence
  Synthetic oligonucleotide
cgaccttgagacaactttgtcatgatctaa

SEQ ID NO: 227956 - DNA, 30 bp, Artificial Sequence
  Synthetic oligonucleotide
agagtctaactattacccgagtatatctaa

SEQ ID NO: 227957 - DNA, 30 bp, Artificial Sequence
  Synthetic oligonucleotide
gttcggtagtgtgacagaaggccactctaa

SEQ ID NO: 227958 - DNA, 30 bp, Artificial Sequence
  Synthetic oligonucleotide
cacgacaatacgtgatcgtctgtactctaa

SEQ ID NO: 227959 - DNA, 30 bp, Artificial Sequence
  Synthetic oligonucleotide
ggcgaaatcccatggtcctttgcgctctaa

SEQ ID NO: 227960 - DNA, 30 bp, Artificial Sequence
  Synthetic oligonucleotide
tggcgaactccgggatcatgggggctctaa

SEQ ID NO: 227961 - DNA, 30 bp, Artificial Sequence
  Synthetic oligonucleotide
gagaggagaaaatgtttttcaaatctctaa

SEQ ID NO: 227962 - DNA, 30 bp, Artificial Sequence
  Synthetic oligonucleotide
acgcgtaatggtaggcaacatccagtctaa

SEQ ID NO: 227963 - DNA, 30 bp, Artificial Sequence
  Synthetic oligonucleotide
acgagtgttttgcgaagcccaggcgtctaa

SEQ ID NO: 227964 - DNA, 30 bp, Artificial Sequence
  Synthetic oligonucleotide
cctgaacgtaattagagtgcgggcgtctaa

SEQ ID NO: 227965 - DNA, 30 bp, Artificial Sequence
  Synthetic oligonucleotide
aaaggtaatgacgagaatacgcaggtctaa

SEQ ID NO: 227966 - DNA, 30 bp, Artificial Sequence
  Synthetic oligonucleotide
gcgtttcatacgctaatacatcaattctaa

SEQ ID NO: 227967 - DNA, 30 bp, Artificial Sequence
  Synthetic oligonucleotide
agtgccgagatgacggcaattttcttctaa

SEQ ID NO: 227968 - DNA, 30 bp, Artificial Sequence
  Synthetic oligonucleotide
ttagggtagtgtcgaagaactatgttctaa

SEQ ID NO: 227969 - DNA, 30 bp, Artificial Sequence
  Synthetic oligonucleotide
cggattagggactcccgccgtggtttctaa

SEQ ID NO: 227970 - DNA, 30 bp, Artificial Sequence
  Synthetic oligonucleotide
atctacagtgccccatcgcaaagaaagtaa

SEQ ID NO: 227971 - DNA, 30 bp, Artificial Sequence
  Synthetic oligonucleotide
ctgaggttctgtccaacataagtaaagtaa

SEQ ID NO: 227972 - DNA, 30 bp, Artificial Sequence
  Synthetic oligonucleotide
agcgtcctcctagacgcccaaaacaagtaa

SEQ ID NO: 227973 - DNA, 30 bp, Artificial Sequence
  Synthetic oligonucleotide
cattgacgggtcggagtcgttttcaagtaa

SEQ ID NO: 227974 - DNA, 30 bp, Artificial Sequence
  Synthetic oligonucleotide
aattagtcaggacatggaccggggaagtaa

SEQ ID NO: 227975 - DNA, 30 bp, Artificial Sequence
  Synthetic oligonucleotide
cccatcaggtaagcaaagccttataagtaa

SEQ ID NO: 227976 - DNA, 30 bp, Artificial Sequence
  Synthetic oligonucleotide
cgcgcgtggcgcatcgccagtcctaagtaa

SEQ ID NO: 227977 - DNA, 30 bp, Artificial Sequence
  Synthetic oligonucleotide
tagtaggacaaactggggtgtgttaagtaa

SEQ ID NO: 227978 - DNA, 30 bp, Artificial Sequence
  Synthetic oligonucleotide
tgcaacaccgcttacactagtccacagtaa

SEQ ID NO: 227979 - DNA, 30 bp, Artificial Sequence
  Synthetic oligonucleotide
tgagtctctcctacgactgtgttccagtaa

SEQ ID NO: 227980 - DNA, 30 bp, Artificial Sequence
  Synthetic oligonucleotide
agtaagagttccatgctttaagtgcagtaa

SEQ ID NO: 227981 - DNA, 30 bp, Artificial Sequence
  Synthetic oligonucleotide
ctagtcaaaagtgggggttcctgagagtaa

SEQ ID NO: 227982 - DNA, 30 bp, Artificial Sequence
  Synthetic oligonucleotide
tcacgagcctgagtgcggttagctgagtaa

SEQ ID NO: 227983 - DNA, 30 bp, Artificial Sequence
  Synthetic oligonucleotide
aaaacgcttaggaccatacaggttgagtaa

SEQ ID NO: 227984 - DNA, 30 bp, Artificial Sequence
  Synthetic oligonucleotide
gaggggatatgatcccgcgaagaatagtaa

SEQ ID NO: 227985 - DNA, 30 bp, Artificial Sequence
  Synthetic oligonucleotide
gagaacgatgtacttaaaggcctatagtaa

SEQ ID NO: 227986 - DNA, 29 bp, Artificial Sequence
  Synthetic oligonucleotide
ataatccgcaccgtttgtccatgtagtaa

SEQ ID NO: 227987 - DNA, 30 bp, Artificial Sequence
  Synthetic oligonucleotide
aaaggagtccgtttctccacccattagtaa

SEQ ID NO: 227988 - DNA, 30 bp, Artificial Sequence
  Synthetic oligonucleotide
ttagctatagggcataggtatcattagtaa

SEQ ID NO: 227989 - DNA, 30 bp, Artificial Sequence
  Synthetic oligonucleotide
agcccctcgtggttagagaagcgttagtaa

SEQ ID NO: 227990 - DNA, 30 bp, Artificial Sequence
  Synthetic oligonucleotide
ctcggacaatttgaaagtgggtcaacgtaa

SEQ ID NO: 227991 - DNA, 30 bp, Artificial Sequence
  Synthetic oligonucleotide
ccgtcacttcaatgggtaaataacacgtaa

SEQ ID NO: 227992 - DNA, 30 bp, Artificial Sequence
  Synthetic oligonucleotide
gcataaccctctgattggtttaacacgtaa

SEQ ID NO: 227993 - DNA, 30 bp, Artificial Sequence
  Synthetic oligonucleotide
tactaaggttcgagtcgcaggcacacgtaa

SEQ ID NO: 227994 - DNA, 30 bp, Artificial Sequence
  Synthetic oligonucleotide
cctggcggcggtacggatagagccacgtaa

SEQ ID NO: 227995 - DNA, 30 bp, Artificial Sequence
  Synthetic oligonucleotide
ataccccgccaccgaccatgcaagacgtaa

SEQ ID NO: 227996 - DNA, 30 bp, Artificial Sequence
  Synthetic oligonucleotide
gttgattgacttgggtcaccagtgacgtaa

SEQ ID NO: 227997 - DNA, 30 bp, Artificial Sequence
  Synthetic oligonucleotide
ccaggcgatttctgagacggatgtacgtaa

SEQ ID NO: 227998 - DNA, 30 bp, Artificial Sequence
  Synthetic oligonucleotide
gggatataaaacagggggaagaaaccgtaa

SEQ ID NO: 227999 - DNA, 30 bp, Artificial Sequence
  Synthetic oligonucleotide
aatggcacgcatgctattgcccaaccgtaa

SEQ ID NO: 228000 - DNA, 30 bp, Artificial Sequence
  Synthetic oligonucleotide
tgtaagtgtataccacatgccaccccgtaa

SEQ ID NO: 228001 - DNA, 30 bp, Artificial Sequence
  Synthetic oligonucleotide
ccaggctgacaaatacgtcaatccccgtaa

SEQ ID NO: 228002 - DNA, 30 bp, Artificial Sequence
  Synthetic oligonucleotide
gctggcattcctgaccggagcccgccgtaa

SEQ ID NO: 228003 - DNA, 30 bp, Artificial Sequence
  Synthetic oligonucleotide
tgtcccggcattcagcgtgctactccgtaa

SEQ ID NO: 228004 - DNA, 30 bp, Artificial Sequence
  Synthetic oligonucleotide
gcaccagctcgactgctttgtgtagcgtaa

SEQ ID NO: 228005 - DNA, 30 bp, Artificial Sequence
  Synthetic oligonucleotide
cacgagcggcttaggcgaatctacgcgtaa

SEQ ID NO: 228006 - DNA, 30 bp, Artificial Sequence
  Synthetic oligonucleotide
atcagagcccaaacgccaagacgcgcgtaa

SEQ ID NO: 228007 - DNA, 30 bp, Artificial Sequence
  Synthetic oligonucleotide
aggttaaaaggcacagtgtgtcaggcgtaa

SEQ ID NO: 228008 - DNA, 30 bp, Artificial Sequence
  Synthetic oligonucleotide
cgtcaaggacatctattctggagtgcgtaa

SEQ ID NO: 228009 - DNA, 30 bp, Artificial Sequence
  Synthetic oligonucleotide
gtcatctacacctcaatgtagattgcgtaa

SEQ ID NO: 228010 - DNA, 30 bp, Artificial Sequence
  Synthetic oligonucleotide
caagtggacattatacatccgattgcgtaa

SEQ ID NO: 228011 - DNA, 30 bp, Artificial Sequence
  Synthetic oligonucleotide
tgatacgccactggtctagggtaatcgtaa

SEQ ID NO: 228012 - DNA, 30 bp, Artificial Sequence
  Synthetic oligonucleotide
gccacgcaaaggtcccctttatcatcgtaa

SEQ ID NO: 228013 - DNA, 30 bp, Artificial Sequence
  Synthetic oligonucleotide
actagacagccgaatcgactaagatcgtaa

SEQ ID NO: 228014 - DNA, 30 bp, Artificial Sequence
  Synthetic oligonucleotide
gttacacgccagcaagagactcgatcgtaa

SEQ ID NO: 228015 - DNA, 30 bp, Artificial Sequence
  Synthetic oligonucleotide
acaagcggtagggtttaacaccactcgtaa

SEQ ID NO: 228016 - DNA, 30 bp, Artificial Sequence
  Synthetic oligonucleotide
catgacgcacgttattatcatgggtcgtaa

SEQ ID NO: 228017 - DNA, 30 bp, Artificial Sequence
  Synthetic oligonucleotide
acggcgttgacacttgtgaacaaaaggtaa

SEQ ID NO: 228018 - DNA, 30 bp, Artificial Sequence
  Synthetic oligonucleotide
atcggacctaagcgtcacgcaataaggtaa

SEQ ID NO: 228019 - DNA, 30 bp, Artificial Sequence
  Synthetic oligonucleotide
gtatacacatctccgcaagtaaccaggtaa

SEQ ID NO: 228020 - DNA, 30 bp, Artificial Sequence
  Synthetic oligonucleotide
tgtcacttgatcttaaaacttcaccggtaa

SEQ ID NO: 228021 - DNA, 30 bp, Artificial Sequence
  Synthetic oligonucleotide
ggaatcagcacagagggttcacatcggtaa

SEQ ID NO: 228022 - DNA, 30 bp, Artificial Sequence
  Synthetic oligonucleotide
tcttgagtaaaaatttacggagctcggtaa

SEQ ID NO: 228023 - DNA, 30 bp, Artificial Sequence
  Synthetic oligonucleotide
taaggctcttttttggaggacgtcgggtaa

SEQ ID NO: 228024 - DNA, 30 bp, Artificial Sequence
  Synthetic oligonucleotide
cactgcccgtcattgatgcatgcggggtaa

SEQ ID NO: 228025 - DNA, 30 bp, Artificial Sequence
  Synthetic oligonucleotide
gtcgcatgtgtagtcatgttttgggggtaa

SEQ ID NO: 228026 - DNA, 30 bp, Artificial Sequence
  Synthetic oligonucleotide
cagccccaagtacaaaggacccatgggtaa

SEQ ID NO: 228027 - DNA, 30 bp, Artificial Sequence
  Synthetic oligonucleotide
tgggctttgccgatacctcgcagtgggtaa

SEQ ID NO: 228028 - DNA, 30 bp, Artificial Sequence
  Synthetic oligonucleotide
gggcgtgagccgcacagctaccgtgggtaa

SEQ ID NO: 228029 - DNA, 30 bp, Artificial Sequence
  Synthetic oligonucleotide
agctgttatcagtagcgaccgattgggtaa

SEQ ID NO: 228030 - DNA, 30 bp, Artificial Sequence
  Synthetic oligonucleotide
cccacactccgcgattcgacggaatggtaa

SEQ ID NO: 228031 - DNA, 30 bp, Artificial Sequence
  Synthetic oligonucleotide
ggggacattcaacgcggcgtggaatggtaa

SEQ ID NO: 228032 - DNA, 30 bp, Artificial Sequence
  Synthetic oligonucleotide
aaatcggtctgtaacctaaactactggtaa

SEQ ID NO: 228033 - DNA, 30 bp, Artificial Sequence
  Synthetic oligonucleotide
tagctccagtatgagacttttgtctggtaa

SEQ ID NO: 228034 - DNA, 30 bp, Artificial Sequence
  Synthetic oligonucleotide
tgacaccaggcggatgaagtcgtgtggtaa

SEQ ID NO: 228035 - DNA, 30 bp, Artificial Sequence
  Synthetic oligonucleotide
gatggttatggaaagggactggattggtaa

SEQ ID NO: 228036 - DNA, 30 bp, Artificial Sequence
  Synthetic oligonucleotide
tctttgctggcgggatggtcgggttggtaa

SEQ ID NO: 228037 - DNA, 30 bp, Artificial Sequence
  Synthetic oligonucleotide
ctggatggatctccagagttagaaatgtaa

SEQ ID NO: 228038 - DNA, 30 bp, Artificial Sequence
  Synthetic oligonucleotide
tagacttaggtgtgcaaccatggaatgtaa

SEQ ID NO: 228039 - DNA, 30 bp, Artificial Sequence
  Synthetic oligonucleotide
attggttcggtacctctaaagataatgtaa

SEQ ID NO: 228040 - DNA, 30 bp, Artificial Sequence
  Synthetic oligonucleotide
ggatacagcggtcgcggtagcctgatgtaa

SEQ ID NO: 228041 - DNA, 30 bp, Artificial Sequence
  Synthetic oligonucleotide
ccagggccatgggggctacaaaacctgtaa

SEQ ID NO: 228042 - DNA, 30 bp, Artificial Sequence
  Synthetic oligonucleotide
cccatatgtgtatgtttagcaatcctgtaa

SEQ ID NO: 228043 - DNA, 30 bp, Artificial Sequence
  Synthetic oligonucleotide
aaatcttggtcaacaaggggtcagctgtaa

SEQ ID NO: 228044 - DNA, 30 bp, Artificial Sequence
  Synthetic oligonucleotide
tgaagctgcatggggagctgtgatctgtaa

SEQ ID NO: 228045 - DNA, 30 bp, Artificial Sequence
  Synthetic oligonucleotide
tacaaaacacctgaccatacatctctgtaa

SEQ ID NO: 228046 - DNA, 30 bp, Artificial Sequence
  Synthetic oligonucleotide
acacgctacggatatatgagtattctgtaa

SEQ ID NO: 228047 - DNA, 30 bp, Artificial Sequence
  Synthetic oligonucleotide
caacggtgaatatcttttaatgtagtgtaa

SEQ ID NO: 228048 - DNA, 30 bp, Artificial Sequence
  Synthetic oligonucleotide
cgggaggtccggtcgaatgtctaggtgtaa

SEQ ID NO: 228049 - DNA, 30 bp, Artificial Sequence
  Synthetic oligonucleotide
ctaagacaatccggtcaaatccaattgtaa

SEQ ID NO: 228050 - DNA, 30 bp, Artificial Sequence
  Synthetic oligonucleotide
acagcaggagaaatgtatacaatattgtaa

SEQ ID NO: 228051 - DNA, 30 bp, Artificial Sequence
  Synthetic oligonucleotide
tactccaaaggtctactcatcgacttgtaa

SEQ ID NO: 228052 - DNA, 30 bp, Artificial Sequence
  Synthetic oligonucleotide
acccaccagggttcccaatacacgttgtaa

SEQ ID NO: 228053 - DNA, 30 bp, Artificial Sequence
  Synthetic oligonucleotide
cgattggaagtacccgtcagccaaaattaa

SEQ ID NO: 228054 - DNA, 30 bp, Artificial Sequence
  Synthetic oligonucleotide
tctagatgaagataagggattgtaaattaa

SEQ ID NO: 228055 - DNA, 30 bp, Artificial Sequence
  Synthetic oligonucleotide
gcaagagtttgggcgtctaggtgcaattaa

SEQ ID NO: 228056 - DNA, 30 bp, Artificial Sequence
  Synthetic oligonucleotide
caaaaagcgtgtacttatacagagaattaa

SEQ ID NO: 228057 - DNA, 30 bp, Artificial Sequence
  Synthetic oligonucleotide
agtccgaagtgtgttgttcatacgaattaa

SEQ ID NO: 228058 - DNA, 30 bp, Artificial Sequence
  Synthetic oligonucleotide
gcttggtagagtcgtaatctgtgtaattaa

SEQ ID NO: 228059 - DNA, 30 bp, Artificial Sequence
  Synthetic oligonucleotide
ggatgtggagcaaagtgtaggccacattaa

SEQ ID NO: 228060 - DNA, 30 bp, Artificial Sequence
  Synthetic oligonucleotide
gcgatgggaatagcacgcctgttgcattaa

SEQ ID NO: 228061 - DNA, 30 bp, Artificial Sequence
  Synthetic oligonucleotide
tttggctgtccagaacagtgggatgattaa

SEQ ID NO: 228062 - DNA, 30 bp, Artificial Sequence
  Synthetic oligonucleotide
ctgacaactacacttgcaatgactgattaa

SEQ ID NO: 228063 - DNA, 30 bp, Artificial Sequence
  Synthetic oligonucleotide
ccctggtttgagcgtctagcggctgattaa

SEQ ID NO: 228064 - DNA, 30 bp, Artificial Sequence
  Synthetic oligonucleotide
tatggcaggcttcataagctaattgattaa

SEQ ID NO: 228065 - DNA, 30 bp, Artificial Sequence
  Synthetic oligonucleotide
tagaatccgggcacaaggtacgaatattaa

SEQ ID NO: 228066 - DNA, 30 bp, Artificial Sequence
  Synthetic oligonucleotide
ctgctggcaaaccttagtggcgcgtattaa

SEQ ID NO: 228067 - DNA, 30 bp, Artificial Sequence
  Synthetic oligonucleotide
ctacagatgctactgttagcgatgtattaa

SEQ ID NO: 228068 - DNA, 30 bp, Artificial Sequence
  Synthetic oligonucleotide
agataccgcatgtccccaaggatgtattaa

SEQ ID NO: 228069 - DNA, 30 bp, Artificial Sequence
  Synthetic oligonucleotide
cattgcttataatcgaaggccctgtattaa

SEQ ID NO: 228070 - DNA, 30 bp, Artificial Sequence
  Synthetic oligonucleotide
gtgatggaagcacgtggacggaattattaa

SEQ ID NO: 228071 - DNA, 30 bp, Artificial Sequence
  Synthetic oligonucleotide
tcataagttatgtatcagttcagttattaa

SEQ ID NO: 228072 - DNA, 30 bp, Artificial Sequence
  Synthetic oligonucleotide
atcgcctctacgaaccctaatggttattaa

SEQ ID NO: 228073 - DNA, 30 bp, Artificial Sequence
  Synthetic oligonucleotide
atagcgtaatcgtgatgtgtggtttattaa

SEQ ID NO: 228074 - DNA, 30 bp, Artificial Sequence
  Synthetic oligonucleotide
ggaaaatcaatcataactgtcgcaacttaa

SEQ ID NO: 228075 - DNA, 30 bp, Artificial Sequence
  Synthetic oligonucleotide
gagagggcgggtttacgtcacataacttaa

SEQ ID NO: 228076 - DNA, 30 bp, Artificial Sequence
  Synthetic oligonucleotide
acggttcaaacttaggcggggctaacttaa

SEQ ID NO: 228077 - DNA, 30 bp, Artificial Sequence
  Synthetic oligonucleotide
tatttaaccgaaaagcgcgccaacacttaa

SEQ ID NO: 228078 - DNA, 30 bp, Artificial Sequence
  Synthetic oligonucleotide
tccgggatcgttggggcgacgatgacttaa

SEQ ID NO: 228079 - DNA, 30 bp, Artificial Sequence
  Synthetic oligonucleotide
caggtttgcgggttcggtgtggaagcttaa

SEQ ID NO: 228080 - DNA, 30 bp, Artificial Sequence
  Synthetic oligonucleotide
aggaaccgtggggtgtatgttcgcgcttaa

SEQ ID NO: 228081 - DNA, 28 bp, Artificial Sequence
  Synthetic oligonucleotide
agcacccaaagagttccgaatcgcttaa

SEQ ID NO: 228082 - DNA, 30 bp, Artificial Sequence
  Synthetic oligonucleotide
aaggctccagggtgtcgtgagggatcttaa

SEQ ID NO: 228083 - DNA, 30 bp, Artificial Sequence
  Synthetic oligonucleotide
agagttagatagggtaggagatgctcttaa

SEQ ID NO: 228084 - DNA, 30 bp, Artificial Sequence
  Synthetic oligonucleotide
gtctcctcaggggaaactgggtattcttaa

SEQ ID NO: 228085 - DNA, 30 bp, Artificial Sequence
  Synthetic oligonucleotide
caacgcgcagcagcgctagcaggaagttaa

SEQ ID NO: 228086 - DNA, 30 bp, Artificial Sequence
  Synthetic oligonucleotide
cttagctaggcgccgaagctggtaagttaa

SEQ ID NO: 228087 - DNA, 30 bp, Artificial Sequence
  Synthetic oligonucleotide
cgccccggtcaaggcttcagttacagttaa

SEQ ID NO: 228088 - DNA, 30 bp, Artificial Sequence
  Synthetic oligonucleotide
ctaaagggggcacccgattataccagttaa

SEQ ID NO: 228089 - DNA, 30 bp, Artificial Sequence
  Synthetic oligonucleotide
tgctgaacggaatcggctggttccagttaa

SEQ ID NO: 228090 - DNA, 30 bp, Artificial Sequence
  Synthetic oligonucleotide
cgaaaaatttccaagagcaacagcagttaa

SEQ ID NO: 228091 - DNA, 30 bp, Artificial Sequence
  Synthetic oligonucleotide
ccacttacccaacctaatcgtcagagttaa

SEQ ID NO: 228092 - DNA, 30 bp, Artificial Sequence
  Synthetic oligonucleotide
tagaattagctatggcgtaatctgagttaa

SEQ ID NO: 228093 - DNA, 30 bp, Artificial Sequence
  Synthetic oligonucleotide
ctaaacctctgttgcgagatgtcacgttaa

SEQ ID NO: 228094 - DNA, 30 bp, Artificial Sequence
  Synthetic oligonucleotide
aagtagtggctttggacaaaaagccgttaa

SEQ ID NO: 228095 - DNA, 30 bp, Artificial Sequence
  Synthetic oligonucleotide
tagcaacaaaaaaaccgttcgcaaggttaa

SEQ ID NO: 228096 - DNA, 30 bp, Artificial Sequence
  Synthetic oligonucleotide
ccgcgaggttaaatggaaactcgaggttaa

SEQ ID NO: 228097 - DNA, 30 bp, Artificial Sequence
  Synthetic oligonucleotide
gagcaacggcacgcaggtggcgccggttaa

SEQ ID NO: 228098 - DNA, 30 bp, Artificial Sequence
  Synthetic oligonucleotide
acccgtagacataatggagtatctggttaa

SEQ ID NO: 228099 - DNA, 30 bp, Artificial Sequence
  Synthetic oligonucleotide
ttctagacggacccggtcaggtggtgttaa

SEQ ID NO: 228100 - DNA, 30 bp, Artificial Sequence
  Synthetic oligonucleotide
cccactcacaaaactgaaacacaaatttaa

SEQ ID NO: 228101 - DNA, 30 bp, Artificial Sequence
  Synthetic oligonucleotide
ttgagcagttgcgatgaatcacaaatttaa

SEQ ID NO: 228102 - DNA, 30 bp, Artificial Sequence
  Synthetic oligonucleotide
ccggccccgtaaccctaccggcgaatttaa

SEQ ID NO: 228103 - DNA, 30 bp, Artificial Sequence
  Synthetic oligonucleotide
gattaggtaggacatacagaaaagatttaa

SEQ ID NO: 228104 - DNA, 30 bp, Artificial Sequence
  Synthetic oligonucleotide
gtggggatagcaatggacaacggtatttaa

SEQ ID NO: 228105 - DNA, 30 bp, Artificial Sequence
  Synthetic oligonucleotide
atccctcaaagagaacagggtggtatttaa

SEQ ID NO: 228106 - DNA, 30 bp, Artificial Sequence
  Synthetic oligonucleotide
tgccgtacgtattggtgaagggcactttaa

SEQ ID NO: 228107 - DNA, 30 bp, Artificial Sequence
  Synthetic oligonucleotide
ccaatcaccaggcgattccgtcacctttaa

SEQ ID NO: 228108 - DNA, 30 bp, Artificial Sequence
  Synthetic oligonucleotide
cgttgggaagtcccccgatggtacctttaa

SEQ ID NO: 228109 - DNA, 30 bp, Artificial Sequence
  Synthetic oligonucleotide
cgtatggatcggaatgaagaccagctttaa

SEQ ID NO: 228110 - DNA, 30 bp, Artificial Sequence
  Synthetic oligonucleotide
ctacgccacgaatgcatccacgagctttaa

SEQ ID NO: 228111 - DNA, 30 bp, Artificial Sequence
  Synthetic oligonucleotide
ggagcccgataggcgacgtcgctgctttaa

SEQ ID NO: 228112 - DNA, 30 bp, Artificial Sequence
  Synthetic oligonucleotide
gatgattaattcggagtaacgtctctttaa

SEQ ID NO: 228113 - DNA, 30 bp, Artificial Sequence
  Synthetic oligonucleotide
gaaaccgtgtttgcggaatagcttctttaa

SEQ ID NO: 228114 - DNA, 30 bp, Artificial Sequence
  Synthetic oligonucleotide
gagagaccacgatcattcgataacgtttaa

SEQ ID NO: 228115 - DNA, 30 bp, Artificial Sequence
  Synthetic oligonucleotide
ggtaatttagctatttgtaagtgcgtttaa

SEQ ID NO: 228116 - DNA, 30 bp, Artificial Sequence
  Synthetic oligonucleotide
ttcaggtgaacgttatctgtgcctgtttaa

SEQ ID NO: 228117 - DNA, 30 bp, Artificial Sequence
  Synthetic oligonucleotide
gaagatgcatttggagataggcacttttaa

SEQ ID NO: 228118 - DNA, 30 bp, Artificial Sequence
  Synthetic oligonucleotide
gcacgtctaacactaagaggctagttttaa

SEQ ID NO: 228119 - DNA, 30 bp, Artificial Sequence
  Synthetic oligonucleotide
acattcgccgcggacgaatcgacgttttaa

SEQ ID NO: 228120 - DNA, 30 bp, Artificial Sequence
  Synthetic oligonucleotide
cgtatttaggtttagatttaagatttttaa

SEQ ID NO: 228121 - DNA, 30 bp, Artificial Sequence
  Synthetic oligonucleotide
agttaagagatggggacatcggctttttaa

SEQ ID NO: 228122 - DNA, 30 bp, Artificial Sequence
  Synthetic oligonucleotide
gcgcacccagacggaaatctttctttttaa

SEQ ID NO: 228123 - DNA, 30 bp, Artificial Sequence
  Synthetic oligonucleotide
ttgacgtaacgtatctcggccaaaaaaaca

SEQ ID NO: 228124 - DNA, 30 bp, Artificial Sequence
  Synthetic oligonucleotide
cggcattagtagtcgtaccagataaaaaca

SEQ ID NO: 228125 - DNA, 30 bp, Artificial Sequence
  Synthetic oligonucleotide
gaagatttgcgtgcatttagtaacaaaaca

SEQ ID NO: 228126 - DNA, 30 bp, Artificial Sequence
  Synthetic oligonucleotide
aacagtacggaataggcggccctcaaaaca

SEQ ID NO: 228127 - DNA, 31 bp, Artificial Sequence
  Synthetic oligonucleotide
aataatcgatgggcgtggccacgtcaaaaca

SEQ ID NO: 228128 - DNA, 30 bp, Artificial Sequence
  Synthetic oligonucleotide
ccgagcgcccgctagtcgagtttgaaaaca

SEQ ID NO: 228129 - DNA, 30 bp, Artificial Sequence
  Synthetic oligonucleotide
tatcagggaccttaatacgcggctaaaaca

SEQ ID NO: 228130 - DNA, 30 bp, Artificial Sequence
  Synthetic oligonucleotide
tctgccaggcataacggctctcgccaaaca

SEQ ID NO: 228131 - DNA, 30 bp, Artificial Sequence
  Synthetic oligonucleotide
aaaaaaacttagggaccgaggctccaaaca

SEQ ID NO: 228132 - DNA, 30 bp, Artificial Sequence
  Synthetic oligonucleotide
aaactactgccgaatttcaactagcaaaca

SEQ ID NO: 228133 - DNA, 30 bp, Artificial Sequence
  Synthetic oligonucleotide
tgggatcatgaccataggctttagcaaaca

SEQ ID NO: 228134 - DNA, 30 bp, Artificial Sequence
  Synthetic oligonucleotide
ccggaggcctcagtatctccaaggcaaaca

SEQ ID NO: 228135 - DNA, 30 bp, Artificial Sequence
  Synthetic oligonucleotide
gccatattggtacggttgccagccgaaaca

SEQ ID NO: 228136 - DNA, 30 bp, Artificial Sequence
  Synthetic oligonucleotide
gggtacgatggcaaggcgtacggggaaaca

SEQ ID NO: 228137 - DNA, 30 bp, Artificial Sequence
  Synthetic oligonucleotide
tctataatccctagaacggggggataaaca

SEQ ID NO: 228138 - DNA, 30 bp, Artificial Sequence
  Synthetic oligonucleotide
atgacaggcctcagtttccagcagtaaaca

SEQ ID NO: 228139 - DNA, 30 bp, Artificial Sequence
  Synthetic oligonucleotide
ctcggtcggagagccggagccaggtaaaca

SEQ ID NO: 228140 - DNA, 30 bp, Artificial Sequence
  Synthetic oligonucleotide
ttgagtatataccctctcaaagtgtaaaca

SEQ ID NO: 228141 - DNA, 30 bp, Artificial Sequence
  Synthetic oligonucleotide
ctgacacaaataatagacgattattaaaca

SEQ ID NO: 228142 - DNA, 30 bp, Artificial Sequence
  Synthetic oligonucleotide
agaaaccgtgaaatggagctcctttaaaca

SEQ ID NO: 228143 - DNA, 30 bp, Artificial Sequence
  Synthetic oligonucleotide
gcccagtctaggaccggctggcaaacaaca

SEQ ID NO: 228144 - DNA, 30 bp, Artificial Sequence
  Synthetic oligonucleotide
ccttggcactacgctcatcaggaaacaaca

SEQ ID NO: 228145 - DNA, 30 bp, Artificial Sequence
  Synthetic oligonucleotide
ggttatgacagtctcaaggaaggcacaaca

SEQ ID NO: 228146 - DNA, 30 bp, Artificial Sequence
  Synthetic oligonucleotide
aggcctaccataatggtcaggctcacaaca

SEQ ID NO: 228147 - DNA, 30 bp, Artificial Sequence
  Synthetic oligonucleotide
taagatgcctttcaatgagtctatacaaca

SEQ ID NO: 228148 - DNA, 30 bp, Artificial Sequence
  Synthetic oligonucleotide
ctctatccgcgaacaacgactggtacaaca

SEQ ID NO: 228149 - DNA, 30 bp, Artificial Sequence
  Synthetic oligonucleotide
gcttgttatgcgatgatatacgtaccaaca

SEQ ID NO: 228150 - DNA, 30 bp, Artificial Sequence
  Synthetic oligonucleotide
ccagttagcaccttctaaagttgcccaaca

SEQ ID NO: 228151 - DNA, 30 bp, Artificial Sequence
  Synthetic oligonucleotide
cgcaaaaattgttgcgaagatctgccaaca

SEQ ID NO: 228152 - DNA, 30 bp, Artificial Sequence
  Synthetic oligonucleotide
aagcgggtccatgctgtttcacatccaaca

SEQ ID NO: 228153 - DNA, 30 bp, Artificial Sequence
  Synthetic oligonucleotide
catccaatgataactggcggcgctccaaca

SEQ ID NO: 228154 - DNA, 30 bp, Artificial Sequence
  Synthetic oligonucleotide
gatggctctccgtacgtgcacagtccaaca

SEQ ID NO: 228155 - DNA, 30 bp, Artificial Sequence
  Synthetic oligonucleotide
aatagggcgtactatggcgagattccaaca

SEQ ID NO: 228156 - DNA, 31 bp, Artificial Sequence
  Synthetic oligonucleotide
agtcatattatcgggcgtaagataagcaaca

SEQ ID NO: 228157 - DNA, 30 bp, Artificial Sequence
  Synthetic oligonucleotide
ccaattgccctaggcaaaggcaaggcaaca

SEQ ID NO: 228158 - DNA, 30 bp, Artificial Sequence
  Synthetic oligonucleotide
agacttaaattattaaagtaggaggcaaca

SEQ ID NO: 228159 - DNA, 30 bp, Artificial Sequence
  Synthetic oligonucleotide
ctatcattcggctccaagcagatggcaaca

SEQ ID NO: 228160 - DNA, 31 bp, Artificial Sequence
  Synthetic oligonucleotide
catagtaagatatggatcacgcttatcaaca

SEQ ID NO: 228161 - DNA, 30 bp, Artificial Sequence
  Synthetic oligonucleotide
acagtctatagcgcccagatgaactcaaca

SEQ ID NO: 228162 - DNA, 30 bp, Artificial Sequence
  Synthetic oligonucleotide
ctactgagtaagctgtaaaggtgctcaaca

SEQ ID NO: 228163 - DNA, 30 bp, Artificial Sequence
  Synthetic oligonucleotide
aatagggtcgagaacgaggcaacgtcaaca

SEQ ID NO: 228164 - DNA, 30 bp, Artificial Sequence
  Synthetic oligonucleotide
ccaccggcacacagtggggacaggtcaaca

SEQ ID NO: 228165 - DNA, 30 bp, Artificial Sequence
  Synthetic oligonucleotide
aaaagatggcaggagtgtctgggttcaaca

SEQ ID NO: 228166 - DNA, 30 bp, Artificial Sequence
  Synthetic oligonucleotide
gtgggagtaatcagtctttttgtaagaaca

SEQ ID NO: 228167 - DNA, 30 bp, Artificial Sequence
  Synthetic oligonucleotide
taatggtaggctaacaaatgacggagaaca

SEQ ID NO: 228168 - DNA, 30 bp, Artificial Sequence
  Synthetic oligonucleotide
ctcctagtacttgattacccaattagaaca

SEQ ID NO: 228169 - DNA, 30 bp, Artificial Sequence
  Synthetic oligonucleotide
ggcggtctgctgcagcgtgtcccacgaaca

SEQ ID NO: 228170 - DNA, 30 bp, Artificial Sequence
  Synthetic oligonucleotide
tagggcgtttgacatcagctagcacgaaca

SEQ ID NO: 228171 - DNA, 30 bp, Artificial Sequence
  Synthetic oligonucleotide
ccctatgttaaagtgccaaatggccgaaca

SEQ ID NO: 228172 - DNA, 30 bp, Artificial Sequence
  Synthetic oligonucleotide
ctcgtttaccttgaagctcttcagcgaaca

SEQ ID NO: 228173 - DNA, 30 bp, Artificial Sequence
  Synthetic oligonucleotide
ttgagtaaccagatcaaagcttagcgaaca

SEQ ID NO: 228174 - DNA, 30 bp, Artificial Sequence
  Synthetic oligonucleotide
aaccgctttctgtcgtcgtttctgcgaaca

SEQ ID NO: 228175 - DNA, 30 bp, Artificial Sequence
  Synthetic oligonucleotide
tagagggactcctggcgtcaattaggaaca

SEQ ID NO: 228176 - DNA, 30 bp, Artificial Sequence
  Synthetic oligonucleotide
gctgaccccgagtcttggggagatggaaca

SEQ ID NO: 228177 - DNA, 30 bp, Artificial Sequence
  Synthetic oligonucleotide
ctaataaaaattggcacagatggtggaaca

SEQ ID NO: 228178 - DNA, 30 bp, Artificial Sequence
  Synthetic oligonucleotide
ctgccgaaaggggtacggcatattggaaca

SEQ ID NO: 228179 - DNA, 30 bp, Artificial Sequence
  Synthetic oligonucleotide
tggagaggaactcgggcaggggttggaaca

SEQ ID NO: 228180 - DNA, 30 bp, Artificial Sequence
  Synthetic oligonucleotide
ctataaagtaaggattttatgcgctgaaca

SEQ ID NO: 228181 - DNA, 30 bp, Artificial Sequence
  Synthetic oligonucleotide
gtggagaaaccagttgaataacgttgaaca

SEQ ID NO: 228182 - DNA, 30 bp, Artificial Sequence
  Synthetic oligonucleotide
caggggcatatattatctagaaaaataaca

SEQ ID NO: 228183 - DNA, 30 bp, Artificial Sequence
  Synthetic oligonucleotide
agacgcgtgtcagggacctatgacataaca

SEQ ID NO: 228184 - DNA, 30 bp, Artificial Sequence
  Synthetic oligonucleotide
tccacccaacaccaaccagcgcagataaca

SEQ ID NO: 228185 - DNA, 30 bp, Artificial Sequence
  Synthetic oligonucleotide
atttccagtgttctcagaatcgagataaca

SEQ ID NO: 228186 - DNA, 30 bp, Artificial Sequence
  Synthetic oligonucleotide
ccatcccgcccgccctcagatacgataaca

SEQ ID NO: 228187 - DNA, 30 bp, Artificial Sequence
  Synthetic oligonucleotide
gaccgtatgagcttcgagagacatataaca

SEQ ID NO: 228188 - DNA, 30 bp, Artificial Sequence
  Synthetic oligonucleotide
agtgtagtgctaagttcgcgtcctataaca

SEQ ID NO: 228189 - DNA, 30 bp, Artificial Sequence
  Synthetic oligonucleotide
cgttaaagtcagcatgaccggcaactaaca

SEQ ID NO: 228190 - DNA, 30 bp, Artificial Sequence
  Synthetic oligonucleotide
gggaacataaggatggatgctagcctaaca

SEQ ID NO: 228191 - DNA, 30 bp, Artificial Sequence
  Synthetic oligonucleotide
tgggtctatggtagccagacatcgctaaca

SEQ ID NO: 228192 - DNA, 30 bp, Artificial Sequence
  Synthetic oligonucleotide
tggcacctatgagaaacttgggatctaaca

SEQ ID NO: 228193 - DNA, 30 bp, Artificial Sequence
  Synthetic oligonucleotide
gggtcagtagtgtcgagtacacgtctaaca

SEQ ID NO: 228194 - DNA, 30 bp, Artificial Sequence
  Synthetic oligonucleotide
gttaatgtatggattcacggacttctaaca

SEQ ID NO: 228195 - DNA, 30 bp, Artificial Sequence
  Synthetic oligonucleotide
taggttagaatatgagtcagaaaagtaaca

SEQ ID NO: 228196 - DNA, 30 bp, Artificial Sequence
  Synthetic oligonucleotide
ggctaatatagtccgactactgaagtaaca

SEQ ID NO: 228197 - DNA, 30 bp, Artificial Sequence
  Synthetic oligonucleotide
cataacttgacgatgtcctgttaagtaaca

SEQ ID NO: 228198 - DNA, 30 bp, Artificial Sequence
  Synthetic oligonucleotide
ccaagccgcgatgtgtgcgtgctagtaaca

SEQ ID NO: 228199 - DNA, 30 bp, Artificial Sequence
  Synthetic oligonucleotide
gggctctacgtgtgtactgctttagtaaca

SEQ ID NO: 228200 - DNA, 30 bp, Artificial Sequence
  Synthetic oligonucleotide
cggacagacgagtatttgaatcacgtaaca

SEQ ID NO: 228201 - DNA, 30 bp, Artificial Sequence
  Synthetic oligonucleotide
accgtcgttcagtatggcccaaatgtaaca

SEQ ID NO: 228202 - DNA, 30 bp, Artificial Sequence
  Synthetic oligonucleotide
taatccggcgtaggatccatcgacttaaca

SEQ ID NO: 228203 - DNA, 30 bp, Artificial Sequence
  Synthetic oligonucleotide
tgtccgcattactgggggtcgatcttaaca

SEQ ID NO: 228204 - DNA, 30 bp, Artificial Sequence
  Synthetic oligonucleotide
agtaatattgggtacaaataggagttaaca

SEQ ID NO: 228205 - DNA, 30 bp, Artificial Sequence
  Synthetic oligonucleotide
acgatgtctgtctttcagaggccgttaaca

SEQ ID NO: 228206 - DNA, 30 bp, Artificial Sequence
  Synthetic oligonucleotide
gcaatgagaccccagtgtttacttttaaca

SEQ ID NO: 228207 - DNA, 30 bp, Artificial Sequence
  Synthetic oligonucleotide
cggcgcgtttccggatcctgaacaaacaca

SEQ ID NO: 228208 - DNA, 30 bp, Artificial Sequence
  Synthetic oligonucleotide
ctaaactgtaggccgcaagccacaaacaca

SEQ ID NO: 228209 - DNA, 30 bp, Artificial Sequence
  Synthetic oligonucleotide
gtagagagaccaattttattatgaaacaca

SEQ ID NO: 228210 - DNA, 30 bp, Artificial Sequence
  Synthetic oligonucleotide
aagaaaaggtattactaaatcctaaacaca

SEQ ID NO: 228211 - DNA, 30 bp, Artificial Sequence
  Synthetic oligonucleotide
aagaaaacaacggcggtgcggttaaacaca

SEQ ID NO: 228212 - DNA, 30 bp, Artificial Sequence
  Synthetic oligonucleotide
ggttcctaacatctcacgggaaacaacaca

SEQ ID NO: 228213 - DNA, 30 bp, Artificial Sequence
  Synthetic oligonucleotide
aaaagaaagggcctagaccaaaccaacaca

SEQ ID NO: 228214 - DNA, 30 bp, Artificial Sequence
  Synthetic oligonucleotide
aaatggggttgatgccaacgaccgaacaca

SEQ ID NO: 228215 - DNA, 30 bp, Artificial Sequence
  Synthetic oligonucleotide
cacatacgcacaactagggtagataacaca

SEQ ID NO: 228216 - DNA, 30 bp, Artificial Sequence
  Synthetic oligonucleotide
gattacacccaattccgggaaagtaacaca

SEQ ID NO: 228217 - DNA, 30 bp, Artificial Sequence
  Synthetic oligonucleotide
gcgccgtggatgctagcacgaggtaacaca

SEQ ID NO: 228218 - DNA, 31 bp, Artificial Sequence
  Synthetic oligonucleotide
gacacccttataggacccgcggggtaacaca

SEQ ID NO: 228219 - DNA, 30 bp, Artificial Sequence
  Synthetic oligonucleotide
tgctgtgagccctgtaggaatgaccacaca

SEQ ID NO: 228220 - DNA, 30 bp, Artificial Sequence
  Synthetic oligonucleotide
tttgaggatccgcgccaagcaacgcacaca

SEQ ID NO: 228221 - DNA, 30 bp, Artificial Sequence
  Synthetic oligonucleotide
gatgtcgtcacataggcacagtcgcacaca

SEQ ID NO: 228222 - DNA, 30 bp, Artificial Sequence
  Synthetic oligonucleotide
catctggcgttacaggttaacacagacaca

SEQ ID NO: 228223 - DNA, 30 bp, Artificial Sequence
  Synthetic oligonucleotide
gaaggtaactagggaggggtactagacaca

SEQ ID NO: 228224 - DNA, 30 bp, Artificial Sequence
  Synthetic oligonucleotide
atgagcaattttactaagacataggacaca

SEQ ID NO: 228225 - DNA, 30 bp, Artificial Sequence
  Synthetic oligonucleotide
agcactggtagcacgatgtatggggacaca

SEQ ID NO: 228226 - DNA, 30 bp, Artificial Sequence
  Synthetic oligonucleotide
tttagagagattttccccggcatggacaca

SEQ ID NO: 228227 - DNA, 30 bp, Artificial Sequence
  Synthetic oligonucleotide
atgaaatatttaaataggccattggacaca

SEQ ID NO: 228228 - DNA, 30 bp, Artificial Sequence
  Synthetic oligonucleotide
gctgactggaaatgtgaaaacatctacaca

SEQ ID NO: 228229 - DNA, 30 bp, Artificial Sequence
  Synthetic oligonucleotide
aacgcgacatctcgctgcacccagtacaca

SEQ ID NO: 228230 - DNA, 30 bp, Artificial Sequence
  Synthetic oligonucleotide
ggggcatgtcgtatctgcgtccggtacaca

SEQ ID NO: 228231 - DNA, 30 bp, Artificial Sequence
  Synthetic oligonucleotide
aaggcaatcgcgctagtgctcatgtacaca

SEQ ID NO: 228232 - DNA, 30 bp, Artificial Sequence
  Synthetic oligonucleotide
tgcaaaatagtagatttcttcgtgtacaca

SEQ ID NO: 228233 - DNA, 30 bp, Artificial Sequence
  Synthetic oligonucleotide
aatgttcaaatatgacttactacttacaca

SEQ ID NO: 228234 - DNA, 30 bp, Artificial Sequence
  Synthetic oligonucleotide
agtttgcgacaactgcacaactgaaccaca

SEQ ID NO: 228235 - DNA, 30 bp, Artificial Sequence
  Synthetic oligonucleotide
tgaggcggggttcagaacgcacacaccaca

SEQ ID NO: 228236 - DNA, 30 bp, Artificial Sequence
  Synthetic oligonucleotide
tgacgcgcctacccatgcgcgcacaccaca

SEQ ID NO: 228237 - DNA, 30 bp, Artificial Sequence
  Synthetic oligonucleotide
taaatggctattcgccactatgacaccaca

SEQ ID NO: 228238 - DNA, 30 bp, Artificial Sequence
  Synthetic oligonucleotide
agttggctccgctaaaggaaactcaccaca

SEQ ID NO: 228239 - DNA, 30 bp, Artificial Sequence
  Synthetic oligonucleotide
cttccgggcctcggaattgagtaccccaca

SEQ ID NO: 228240 - DNA, 30 bp, Artificial Sequence
  Synthetic oligonucleotide
gccaagttggacagtgcaatcacgcccaca

SEQ ID NO: 228241 - DNA, 30 bp, Artificial Sequence
  Synthetic oligonucleotide
gatgcagtgtcggcttggttgactcccaca

SEQ ID NO: 228242 - DNA, 30 bp, Artificial Sequence
  Synthetic oligonucleotide
ggcctcaaaatcattgcctcgggtcccaca

SEQ ID NO: 228243 - DNA, 30 bp, Artificial Sequence
  Synthetic oligonucleotide
agattaagcggaagtatctagtgtcccaca

SEQ ID NO: 228244 - DNA, 30 bp, Artificial Sequence
  Synthetic oligonucleotide
tctctttagaatcccaatcgctgagccaca

SEQ ID NO: 228245 - DNA, 30 bp, Artificial Sequence
  Synthetic oligonucleotide
tgtaatctgggatctatggtctgcgccaca

SEQ ID NO: 228246 - DNA, 30 bp, Artificial Sequence
  Synthetic oligonucleotide
gcaccattaatgttgctaacgtaggccaca

SEQ ID NO: 228247 - DNA, 30 bp, Artificial Sequence
  Synthetic oligonucleotide
gcggtacagcgcacgcttcctggtgccaca

SEQ ID NO: 228248 - DNA, 30 bp, Artificial Sequence
  Synthetic oligonucleotide
gaataagacagtatgggaagactatccaca

SEQ ID NO: 228249 - DNA, 30 bp, Artificial Sequence
  Synthetic oligonucleotide
gcacatcaaaccatgatatataggtccaca

SEQ ID NO: 228250 - DNA, 30 bp, Artificial Sequence
  Synthetic oligonucleotide
gattggtatgtaagataggagaaaagcaca

SEQ ID NO: 228251 - DNA, 30 bp, Artificial Sequence
  Synthetic oligonucleotide
gacggtaaggcgccaggtcggccaagcaca

SEQ ID NO: 228252 - DNA, 30 bp, Artificial Sequence
  Synthetic oligonucleotide
tgagttggaagaattgaggttgtaagcaca

SEQ ID NO: 228253 - DNA, 30 bp, Artificial Sequence
  Synthetic oligonucleotide
gtaagtcgggggcactggtcaacgagcaca

SEQ ID NO: 228254 - DNA, 30 bp, Artificial Sequence
  Synthetic oligonucleotide
gtaatcgctgttcattgcagcaggagcaca

SEQ ID NO: 228255 - DNA, 30 bp, Artificial Sequence
  Synthetic oligonucleotide
tgtcgtgtggaattggtactcagtagcaca

SEQ ID NO: 228256 - DNA, 30 bp, Artificial Sequence
  Synthetic oligonucleotide
agttaagtggatagttctgtaacccgcaca

SEQ ID NO: 228257 - DNA, 30 bp, Artificial Sequence
  Synthetic oligonucleotide
caatagcgcttagatgatgttgtgcgcaca

SEQ ID NO: 228258 - DNA, 30 bp, Artificial Sequence
  Synthetic oligonucleotide
ccgcctacagtagggggccccattcgcaca

SEQ ID NO: 228259 - DNA, 30 bp, Artificial Sequence
  Synthetic oligonucleotide
gcattcgtgcggtccggcatcagaggcaca

SEQ ID NO: 228260 - DNA, 30 bp, Artificial Sequence
  Synthetic oligonucleotide
tttgttatatcgggatagtggctcggcaca

SEQ ID NO: 228261 - DNA, 30 bp, Artificial Sequence
  Synthetic oligonucleotide
tatttcaggcttatacaccgcgcgggcaca

SEQ ID NO: 228262 - DNA, 30 bp, Artificial Sequence
  Synthetic oligonucleotide
cgaatcactaacagcctttcgaggggcaca

SEQ ID NO: 228263 - DNA, 30 bp, Artificial Sequence
  Synthetic oligonucleotide
cgcaaacaaagcccaattttgaggggcaca

SEQ ID NO: 228264 - DNA, 30 bp, Artificial Sequence
  Synthetic oligonucleotide
gacttagcagggaaaccgatgctgggcaca

SEQ ID NO: 228265 - DNA, 30 bp, Artificial Sequence
  Synthetic oligonucleotide
tagttcgcgagttggggcggacctggcaca

SEQ ID NO: 228266 - DNA, 30 bp, Artificial Sequence
  Synthetic oligonucleotide
acctagccaggcttgcgtgtcaaatgcaca

SEQ ID NO: 228267 - DNA, 30 bp, Artificial Sequence
  Synthetic oligonucleotide
taatgcgcgaggaatcaggccccatgcaca

SEQ ID NO: 228268 - DNA, 30 bp, Artificial Sequence
  Synthetic oligonucleotide
gttattgacaccttatcccagccatgcaca

SEQ ID NO: 228269 - DNA, 30 bp, Artificial Sequence
  Synthetic oligonucleotide
ggcatcgccaacctatcaggccgatgcaca

SEQ ID NO: 228270 - DNA, 30 bp, Artificial Sequence
  Synthetic oligonucleotide
atccaggcgagagagagattccgatgcaca

SEQ ID NO: 228271 - DNA, 30 bp, Artificial Sequence
  Synthetic oligonucleotide
tggtactagagcagacccaacgactgcaca

SEQ ID NO: 228272 - DNA, 30 bp, Artificial Sequence
  Synthetic oligonucleotide
ttcttaggatgaaagttagacgagtgcaca

SEQ ID NO: 228273 - DNA, 30 bp, Artificial Sequence
  Synthetic oligonucleotide
agcaatgtccattccatccatgtgtgcaca

SEQ ID NO: 228274 - DNA, 30 bp, Artificial Sequence
  Synthetic oligonucleotide
ctaaccctaaactgtcgtaggttgtgcaca

SEQ ID NO: 228275 - DNA, 30 bp, Artificial Sequence
  Synthetic oligonucleotide
ttaggtctcgagctagaaacctgttgcaca

SEQ ID NO: 228276 - DNA, 30 bp, Artificial Sequence
  Synthetic oligonucleotide
ttcatccaatctgagtcggcggacatcaca

SEQ ID NO: 228277 - DNA, 30 bp, Artificial Sequence
  Synthetic oligonucleotide
acaccttcatggtgctcccaacgcatcaca

SEQ ID NO: 228278 - DNA, 25 bp, Artificial Sequence
  Synthetic oligonucleotide
actatcgaaaacccccctcatcaca

SEQ ID NO: 228279 - DNA, 25 bp, Artificial Sequence
  Synthetic oligonucleotide
cctatcgaaaacccctctcatcaca

SEQ ID NO: 228280 - DNA, 30 bp, Artificial Sequence
  Synthetic oligonucleotide
gccacaatattaggttggacgacgatcaca

SEQ ID NO: 228281 - DNA, 30 bp, Artificial Sequence
  Synthetic oligonucleotide
ggtcgtactcgtgactatattcgtatcaca

SEQ ID NO: 228282 - DNA, 30 bp, Artificial Sequence
  Synthetic oligonucleotide
tggtctgtgtacacaaatagtggtatcaca

SEQ ID NO: 228283 - DNA, 30 bp, Artificial Sequence
  Synthetic oligonucleotide
ttaacgggattaggggtgatttgtatcaca

SEQ ID NO: 228284 - DNA, 30 bp, Artificial Sequence
  Synthetic oligonucleotide
tggacagagcaagcctactcgtaactcaca

SEQ ID NO: 228285 - DNA, 30 bp, Artificial Sequence
  Synthetic oligonucleotide
gcttgtgtcgggtcgcccctattactcaca

SEQ ID NO: 228286 - DNA, 30 bp, Artificial Sequence
  Synthetic oligonucleotide
gggactgtagggggtgctgagtggctcaca

SEQ ID NO: 228287 - DNA, 30 bp, Artificial Sequence
  Synthetic oligonucleotide
agagggttgagatagcgtagatttctcaca

SEQ ID NO: 228288 - DNA, 30 bp, Artificial Sequence
  Synthetic oligonucleotide
tgtaaaaatacgcggaatatcccagtcaca

SEQ ID NO: 228289 - DNA, 30 bp, Artificial Sequence
  Synthetic oligonucleotide
gcggacctctggctgagataccgagtcaca

SEQ ID NO: 228290 - DNA, 30 bp, Artificial Sequence
  Synthetic oligonucleotide
ccttccatagtaggacggggtgcggtcaca

SEQ ID NO: 228291 - DNA, 30 bp, Artificial Sequence
  Synthetic oligonucleotide
ataggcgctaaagctagcaacagggtcaca

SEQ ID NO: 228292 - DNA, 30 bp, Artificial Sequence
  Synthetic oligonucleotide
cacagtaacaagtacatgtggtctgtcaca

SEQ ID NO: 228293 - DNA, 30 bp, Artificial Sequence
  Synthetic oligonucleotide
ggtccttgaagcaaaatcgatagattcaca

SEQ ID NO: 228294 - DNA, 30 bp, Artificial Sequence
  Synthetic oligonucleotide
atgcgcgtcaatgaaatacgcggattcaca

SEQ ID NO: 228295 - DNA, 30 bp, Artificial Sequence
  Synthetic oligonucleotide
gcgtttacccgactaggagtttgattcaca

SEQ ID NO: 228296 - DNA, 30 bp, Artificial Sequence
  Synthetic oligonucleotide
ggatgctgtcaacgatgcacttagttcaca

SEQ ID NO: 228297 - DNA, 30 bp, Artificial Sequence
  Synthetic oligonucleotide
atcctagcggcgattaaacgattgttcaca

SEQ ID NO: 228298 - DNA, 30 bp, Artificial Sequence
  Synthetic oligonucleotide
cgttaatacggaaagatgtgaagtttcaca

SEQ ID NO: 228299 - DNA, 30 bp, Artificial Sequence
  Synthetic oligonucleotide
aagtggattttgaagtgcatgccaaagaca

SEQ ID NO: 228300 - DNA, 30 bp, Artificial Sequence
  Synthetic oligonucleotide
ccttgtaaatcaatccccaccaccaagaca

SEQ ID NO: 228301 - DNA, 29 bp, Artificial Sequence
  Synthetic oligonucleotide
atgggtacgatagtggcatttagaagaca

SEQ ID NO: 228302 - DNA, 30 bp, Artificial Sequence
  Synthetic oligonucleotide
aggcgagcgttagtaactagcatgaagaca

SEQ ID NO: 228303 - DNA, 30 bp, Artificial Sequence
  Synthetic oligonucleotide
aagagactggtcacattacctagtaagaca

SEQ ID NO: 228304 - DNA, 30 bp, Artificial Sequence
  Synthetic oligonucleotide
tcgctgggttggttcccatatggtaagaca

SEQ ID NO: 228305 - DNA, 30 bp, Artificial Sequence
  Synthetic oligonucleotide
gggcggagtgtgtttgcagcctgacagaca

SEQ ID NO: 228306 - DNA, 30 bp, Artificial Sequence
  Synthetic oligonucleotide
ccgaagatgcaattacagtgcttacagaca

SEQ ID NO: 228307 - DNA, 30 bp, Artificial Sequence
  Synthetic oligonucleotide
ctcgagtctcagggagcggtgcatcagaca

SEQ ID NO: 228308 - DNA, 30 bp, Artificial Sequence
  Synthetic oligonucleotide
ttgagtgattcaagggttatgggagagaca

SEQ ID NO: 228309 - DNA, 30 bp, Artificial Sequence
  Synthetic oligonucleotide
gctgtcccagaaaccttcactaacgagaca

SEQ ID NO: 228310 - DNA, 30 bp, Artificial Sequence
  Synthetic oligonucleotide
gataatcttgaatccgggcaaatcgagaca

SEQ ID NO: 228311 - DNA, 30 bp, Artificial Sequence
  Synthetic oligonucleotide
ggtaaaggggtgtctgcagaggatgagaca

SEQ ID NO: 228312 - DNA, 30 bp, Artificial Sequence
  Synthetic oligonucleotide
gtatcctgaaccatgtaagaggctgagaca

SEQ ID NO: 228313 - DNA, 30 bp, Artificial Sequence
  Synthetic oligonucleotide
atgtcccaggttcgactgccgagtgagaca

SEQ ID NO: 228314 - DNA, 30 bp, Artificial Sequence
  Synthetic oligonucleotide
ctctggggcttagcatatgtaagatagaca

SEQ ID NO: 228315 - DNA, 30 bp, Artificial Sequence
  Synthetic oligonucleotide
gtaggggtccggttcatcagccgttagaca

SEQ ID NO: 228316 - DNA, 30 bp, Artificial Sequence
  Synthetic oligonucleotide
ctagtctgtaatcgaaattgatgttagaca

SEQ ID NO: 228317 - DNA, 30 bp, Artificial Sequence
  Synthetic oligonucleotide
aagttggcttcatgcatagatatttagaca

SEQ ID NO: 228318 - DNA, 30 bp, Artificial Sequence
  Synthetic oligonucleotide
aacgtccaactaagtttacggcacacgaca

SEQ ID NO: 228319 - DNA, 30 bp, Artificial Sequence
  Synthetic oligonucleotide
gttgatccatcagaagctgaggggacgaca

SEQ ID NO: 228320 - DNA, 30 bp, Artificial Sequence
  Synthetic oligonucleotide
gcgggggccccttgcgccggtcctacgaca

SEQ ID NO: 228321 - DNA, 30 bp, Artificial Sequence
  Synthetic oligonucleotide
tagatccacgattgtatggagagtacgaca

SEQ ID NO: 228322 - DNA, 30 bp, Artificial Sequence
  Synthetic oligonucleotide
tcgggcttgcctcggaagtgggacccgaca

SEQ ID NO: 228323 - DNA, 30 bp, Artificial Sequence
  Synthetic oligonucleotide
tatacaggtcataacgccacgccgccgaca

SEQ ID NO: 228324 - DNA, 30 bp, Artificial Sequence
  Synthetic oligonucleotide
atctaggaaggaaggatcgacggtccgaca

SEQ ID NO: 228325 - DNA, 30 bp, Artificial Sequence
  Synthetic oligonucleotide
aatgaacatttcctgcgaagtattccgaca

SEQ ID NO: 228326 - DNA, 30 bp, Artificial Sequence
  Synthetic oligonucleotide
tattaggaccagagagcttattcagcgaca

SEQ ID NO: 228327 - DNA, 30 bp, Artificial Sequence
  Synthetic oligonucleotide
gggatagtttaatgccttaatcgagcgaca

SEQ ID NO: 228328 - DNA, 30 bp, Artificial Sequence
  Synthetic oligonucleotide
atgtacaggtgctcagagcgcgccgcgaca

SEQ ID NO: 228329 - DNA, 30 bp, Artificial Sequence
  Synthetic oligonucleotide
ggtctcccacaataaatccacagcgcgaca

SEQ ID NO: 228330 - DNA, 30 bp, Artificial Sequence
  Synthetic oligonucleotide
gatccggctaggaagtaagcgggggcgaca

SEQ ID NO: 228331 - DNA, 30 bp, Artificial Sequence
  Synthetic oligonucleotide
ctgggcctttggctctggtattgatcgaca

SEQ ID NO: 228332 - DNA, 30 bp, Artificial Sequence
  Synthetic oligonucleotide
ggatcgcgatcctaagaggttaactcgaca

SEQ ID NO: 228333 - DNA, 30 bp, Artificial Sequence
  Synthetic oligonucleotide
tgtaccaagtcgaaccggtactagtcgaca

SEQ ID NO: 228334 - DNA, 30 bp, Artificial Sequence
  Synthetic oligonucleotide
acccataaatcctaagtagacatttcgaca

SEQ ID NO: 228335 - DNA, 30 bp, Artificial Sequence
  Synthetic oligonucleotide
ttgagcgacgccactccccatctaaggaca

SEQ ID NO: 228336 - DNA, 30 bp, Artificial Sequence
  Synthetic oligonucleotide
gaagattccaagagcagcgcgttaaggaca

SEQ ID NO: 228337 - DNA, 29 bp, Artificial Sequence
  Synthetic oligonucleotide
catgcggtgggttctttacggccaggaca

SEQ ID NO: 228338 - DNA, 30 bp, Artificial Sequence
  Synthetic oligonucleotide
aagggaaacgcctacgcgacgggcaggaca

SEQ ID NO: 228339 - DNA, 30 bp, Artificial Sequence
  Synthetic oligonucleotide
gatagcatgccaatccactgtggcaggaca

SEQ ID NO: 228340 - DNA, 30 bp, Artificial Sequence
  Synthetic oligonucleotide
accggctaaatgaggagcaatttcaggaca

SEQ ID NO: 228341 - DNA, 30 bp, Artificial Sequence
  Synthetic oligonucleotide
tttggtgtttccgataggcgcgagaggaca

SEQ ID NO: 228342 - DNA, 30 bp, Artificial Sequence
  Synthetic oligonucleotide
gcccgaaagttctaatttaccatgaggaca

SEQ ID NO: 228343 - DNA, 30 bp, Artificial Sequence
  Synthetic oligonucleotide
tttacgagacaagtatactctatgaggaca

SEQ ID NO: 228344 - DNA, 30 bp, Artificial Sequence
  Synthetic oligonucleotide
atagtatggtttagccatgaagtgaggaca

SEQ ID NO: 228345 - DNA, 30 bp, Artificial Sequence
  Synthetic oligonucleotide
cgggatgtgggactttagaatgataggaca

SEQ ID NO: 228346 - DNA, 30 bp, Artificial Sequence
  Synthetic oligonucleotide
tccctcattatcccagacatcactaggaca

SEQ ID NO: 228347 - DNA, 30 bp, Artificial Sequence
  Synthetic oligonucleotide
cgaacggctctgtgaaggggtctacggaca

SEQ ID NO: 228348 - DNA, 30 bp, Artificial Sequence
  Synthetic oligonucleotide
ctgcccaacgggatatgaatagcccggaca

SEQ ID NO: 228349 - DNA, 31 bp, Artificial Sequence
  Synthetic oligonucleotide
agttggtcggtaatcgcaaaacgagcggaca

SEQ ID NO: 228350 - DNA, 30 bp, Artificial Sequence
  Synthetic oligonucleotide
ttgttccggtgaaggcgttaagatcggaca

SEQ ID NO: 228351 - DNA, 30 bp, Artificial Sequence
  Synthetic oligonucleotide
agactaacagtattaagcatgggtcggaca

SEQ ID NO: 228352 - DNA, 30 bp, Artificial Sequence
  Synthetic oligonucleotide
ctaccatctcggtcaacgaattgtcggaca

SEQ ID NO: 228353 - DNA, 30 bp, Artificial Sequence
  Synthetic oligonucleotide
gaaacaccggaagcatggcctgttcggaca

SEQ ID NO: 228354 - DNA, 30 bp, Artificial Sequence
  Synthetic oligonucleotide
ccccaattataatattgatcataagggaca

SEQ ID NO: 228355 - DNA, 30 bp, Artificial Sequence
  Synthetic oligonucleotide
accgcgaacgtctagcattagccagggaca

SEQ ID NO: 228356 - DNA, 30 bp, Artificial Sequence
  Synthetic oligonucleotide
tgtgggcatcgtgtcctaccattagggaca

SEQ ID NO: 228357 - DNA, 30 bp, Artificial Sequence
  Synthetic oligonucleotide
acaatgaccgtaaggccgcatcacgggaca

SEQ ID NO: 228358 - DNA, 30 bp, Artificial Sequence
  Synthetic oligonucleotide
gtactagcatttgattctttggtggggaca

SEQ ID NO: 228359 - DNA, 30 bp, Artificial Sequence
  Synthetic oligonucleotide
atccagacctcaagcgttacttatgggaca

SEQ ID NO: 228360 - DNA, 30 bp, Artificial Sequence
  Synthetic oligonucleotide
cactagtgattcccgactggaggtgggaca

SEQ ID NO: 228361 - DNA, 30 bp, Artificial Sequence
  Synthetic oligonucleotide
taccacgcccattgtgtctctcgatggaca

SEQ ID NO: 228362 - DNA, 30 bp, Artificial Sequence
  Synthetic oligonucleotide
ggtggaatcacccttgtgatcgtatggaca

SEQ ID NO: 228363 - DNA, 30 bp, Artificial Sequence
  Synthetic oligonucleotide
atcccgcaccatcaagtcaacttatggaca

SEQ ID NO: 228364 - DNA, 30 bp, Artificial Sequence
  Synthetic oligonucleotide
gggacacccatgataagaggtggctggaca

SEQ ID NO: 228365 - DNA, 30 bp, Artificial Sequence
  Synthetic oligonucleotide
tgttgatccgtggcgctattagagtggaca

SEQ ID NO: 228366 - DNA, 30 bp, Artificial Sequence
  Synthetic oligonucleotide
aagactgacagcagcagaggaagttggaca

SEQ ID NO: 228367 - DNA, 30 bp, Artificial Sequence
  Synthetic oligonucleotide
acgtaaccccacttctggagcggaatgaca

SEQ ID NO: 228368 - DNA, 30 bp, Artificial Sequence
  Synthetic oligonucleotide
ccactgatgtcacgtatccggagcatgaca

SEQ ID NO: 228369 - DNA, 30 bp, Artificial Sequence
  Synthetic oligonucleotide
tacaggtgaaaattccatgagggtatgaca

SEQ ID NO: 228370 - DNA, 30 bp, Artificial Sequence
  Synthetic oligonucleotide
ccccacactttatcgtggatcgacctgaca

SEQ ID NO: 228371 - DNA, 30 bp, Artificial Sequence
  Synthetic oligonucleotide
ataataatgcattttaatcataaagtgaca

SEQ ID NO: 228372 - DNA, 30 bp, Artificial Sequence
  Synthetic oligonucleotide
ctatggaggttcgaggaatccttcgtgaca

SEQ ID NO: 228373 - DNA, 30 bp, Artificial Sequence
  Synthetic oligonucleotide
gggcgccacttgtttcgtagattggtgaca

SEQ ID NO: 228374 - DNA, 30 bp, Artificial Sequence
  Synthetic oligonucleotide
tacttgtcggttcgtttgtttcatgtgaca

SEQ ID NO: 228375 - DNA, 30 bp, Artificial Sequence
  Synthetic oligonucleotide
aagaggcgcgagaggatcaaggttgtgaca

SEQ ID NO: 228376 - DNA, 30 bp, Artificial Sequence
  Synthetic oligonucleotide
aaagcacggccgaacgcactaccattgaca

SEQ ID NO: 228377 - DNA, 30 bp, Artificial Sequence
  Synthetic oligonucleotide
cggtcgttataggaaggactcaccttgaca

SEQ ID NO: 228378 - DNA, 30 bp, Artificial Sequence
  Synthetic oligonucleotide
acacttggtgatgacaaacgcgtgttgaca

SEQ ID NO: 228379 - DNA, 30 bp, Artificial Sequence
  Synthetic oligonucleotide
gtgttgaattgagactctctggtaaataca

SEQ ID NO: 228380 - DNA, 30 bp, Artificial Sequence
  Synthetic oligonucleotide
tactctagctatcattacatcatcaataca

SEQ ID NO: 228381 - DNA, 30 bp, Artificial Sequence
  Synthetic oligonucleotide
gatgctataggggaagtatctttcaataca

SEQ ID NO: 228382 - DNA, 30 bp, Artificial Sequence
  Synthetic oligonucleotide
cagtaaagcaaatgtaactgcgagaataca

SEQ ID NO: 228383 - DNA, 30 bp, Artificial Sequence
  Synthetic oligonucleotide
aagcgtgcccttcgaagcggaagtaataca

SEQ ID NO: 228384 - DNA, 30 bp, Artificial Sequence
  Synthetic oligonucleotide
ctgaagatcggtggtagttacgaccataca

SEQ ID NO: 228385 - DNA, 30 bp, Artificial Sequence
  Synthetic oligonucleotide
tgcactatcggtacgcatgaggaccataca

SEQ ID NO: 228386 - DNA, 29 bp, Artificial Sequence
  Synthetic oligonucleotide
gtcggtatatgtgatcgcgacagcataca

SEQ ID NO: 228387 - DNA, 30 bp, Artificial Sequence
  Synthetic oligonucleotide
acagaaaagccgcaggaaggcgcgcataca

SEQ ID NO: 228388 - DNA, 30 bp, Artificial Sequence
  Synthetic oligonucleotide
tttagtctgtaaagaaaggagtcgcataca

SEQ ID NO: 228389 - DNA, 30 bp, Artificial Sequence
  Synthetic oligonucleotide
cgcaacataaaccggagattaaaagataca

SEQ ID NO: 228390 - DNA, 30 bp, Artificial Sequence
  Synthetic oligonucleotide
atcccacgttacgctttccgtgaagataca

SEQ ID NO: 228391 - DNA, 30 bp, Artificial Sequence
  Synthetic oligonucleotide
caaaccacgggcgaccgtatgacagataca

SEQ ID NO: 228392 - DNA, 30 bp, Artificial Sequence
  Synthetic oligonucleotide
tctagttatagtctccgacctcgagataca

SEQ ID NO: 228393 - DNA, 30 bp, Artificial Sequence
  Synthetic oligonucleotide
caacatttaaaatagtacacgatagataca

SEQ ID NO: 228394 - DNA, 30 bp, Artificial Sequence
  Synthetic oligonucleotide
gtcccaataattcgccgagatatagataca

SEQ ID NO: 228395 - DNA, 30 bp, Artificial Sequence
  Synthetic oligonucleotide
tctgaattcactactaagtgcccggataca

SEQ ID NO: 228396 - DNA, 30 bp, Artificial Sequence
  Synthetic oligonucleotide
ttaccagttatttagatctttcgctataca

SEQ ID NO: 228397 - DNA, 30 bp, Artificial Sequence
  Synthetic oligonucleotide
tacgacattgtgggttaatgtgtgtataca

SEQ ID NO: 228398 - DNA, 30 bp, Artificial Sequence
  Synthetic oligonucleotide
ccaaaccatgggatgatagccccttataca

SEQ ID NO: 228399 - DNA, 30 bp, Artificial Sequence
  Synthetic oligonucleotide
gggagtggtcgatttttttgactttataca

SEQ ID NO: 228400 - DNA, 30 bp, Artificial Sequence
  Synthetic oligonucleotide
tatacttggtgtggagacgggggaactaca

SEQ ID NO: 228401 - DNA, 30 bp, Artificial Sequence
  Synthetic oligonucleotide
atgtgacagttaatggcgccagtaactaca

SEQ ID NO: 228402 - DNA, 30 bp, Artificial Sequence
  Synthetic oligonucleotide
gttggcagactgattcaggcccatactaca

SEQ ID NO: 228403 - DNA, 30 bp, Artificial Sequence
  Synthetic oligonucleotide
gaaggttgtgcgcaaaagggttgacctaca

SEQ ID NO: 228404 - DNA, 30 bp, Artificial Sequence
  Synthetic oligonucleotide
gacaggtgggcatgttggtcgcaccctaca

SEQ ID NO: 228405 - DNA, 30 bp, Artificial Sequence
  Synthetic oligonucleotide
ctagatcaatcaaatgcagcgtctcctaca

SEQ ID NO: 228406 - DNA, 30 bp, Artificial Sequence
  Synthetic oligonucleotide
acctggtctccaaaattcacggttcctaca

SEQ ID NO: 228407 - DNA, 30 bp, Artificial Sequence
  Synthetic oligonucleotide
agttcagcatcgaattatctcgcggctaca

SEQ ID NO: 228408 - DNA, 30 bp, Artificial Sequence
  Synthetic oligonucleotide
aggaggaccgatctgggccttgcggctaca

SEQ ID NO: 228409 - DNA, 30 bp, Artificial Sequence
  Synthetic oligonucleotide
atctagacaagcctcaactaaggggctaca

SEQ ID NO: 228410 - DNA, 30 bp, Artificial Sequence
  Synthetic oligonucleotide
cattaggcatcaggagagggttgggctaca

SEQ ID NO: 228411 - DNA, 30 bp, Artificial Sequence
  Synthetic oligonucleotide
tgatttactctttgccctaagaatgctaca

SEQ ID NO: 228412 - DNA, 30 bp, Artificial Sequence
  Synthetic oligonucleotide
gtactaggggtactgctttaaactgctaca

SEQ ID NO: 228413 - DNA, 30 bp, Artificial Sequence
  Synthetic oligonucleotide
ttcaggtctagtatttactatgttgctaca

SEQ ID NO: 228414 - DNA, 30 bp, Artificial Sequence
  Synthetic oligonucleotide
atagcgttcctattgggggttaactctaca

SEQ ID NO: 228415 - DNA, 30 bp, Artificial Sequence
  Synthetic oligonucleotide
atatctcatgctttaagtgaaatctctaca

SEQ ID NO: 228416 - DNA, 30 bp, Artificial Sequence
  Synthetic oligonucleotide
ttggtggccgcatctttaaggaggtctaca

SEQ ID NO: 228417 - DNA, 30 bp, Artificial Sequence
  Synthetic oligonucleotide
atgggggatgaagtagactggctgtctaca

SEQ ID NO: 228418 - DNA, 30 bp, Artificial Sequence
  Synthetic oligonucleotide
ggccccgtgtctcgaagtaatctgtctaca

SEQ ID NO: 228419 - DNA, 30 bp, Artificial Sequence
  Synthetic oligonucleotide
ccagtgccaactctgtaaccgggaagtaca

SEQ ID NO: 228420 - DNA, 30 bp, Artificial Sequence
  Synthetic oligonucleotide
ttggcgttttaagggtaagaatgcagtaca

SEQ ID NO: 228421 - DNA, 30 bp, Artificial Sequence
  Synthetic oligonucleotide
gtttggcgtcttcgagcccatgtgagtaca

SEQ ID NO: 228422 - DNA, 30 bp, Artificial Sequence
  Synthetic oligonucleotide
tatcatactgctgagcaattacatagtaca

SEQ ID NO: 228423 - DNA, 30 bp, Artificial Sequence
  Synthetic oligonucleotide
ggtaggttgtttaagctaaccctacgtaca

SEQ ID NO: 228424 - DNA, 30 bp, Artificial Sequence
  Synthetic oligonucleotide
atttggaaatgctctgctaagtaccgtaca

SEQ ID NO: 228425 - DNA, 30 bp, Artificial Sequence
  Synthetic oligonucleotide
ttccccaagttaacgataggaggccgtaca

SEQ ID NO: 228426 - DNA, 30 bp, Artificial Sequence
  Synthetic oligonucleotide
aagcaaactacggcagactacttccgtaca

SEQ ID NO: 228427 - DNA, 30 bp, Artificial Sequence
  Synthetic oligonucleotide
gaggatcggtccctcgtccgatagcgtaca

SEQ ID NO: 228428 - DNA, 30 bp, Artificial Sequence
  Synthetic oligonucleotide
cagatcgtcgagagacgcgtgacgcgtaca

SEQ ID NO: 228429 - DNA, 30 bp, Artificial Sequence
  Synthetic oligonucleotide
ttagcgactataggagctaattggcgtaca

SEQ ID NO: 228430 - DNA, 30 bp, Artificial Sequence
  Synthetic oligonucleotide
accggagtagtgaaaggtcgacatcgtaca

SEQ ID NO: 228431 - DNA, 30 bp, Artificial Sequence
  Synthetic oligonucleotide
gaccatgaaagctagtactacactcgtaca

SEQ ID NO: 228432 - DNA, 30 bp, Artificial Sequence
  Synthetic oligonucleotide
agtgttctagacctctttatgcgtcgtaca

SEQ ID NO: 228433 - DNA, 31 bp, Artificial Sequence
  Synthetic oligonucleotide
gccgatggtatggcgttcctcaccaggtaca

SEQ ID NO: 228434 - DNA, 30 bp, Artificial Sequence
  Synthetic oligonucleotide
tgccaggagaaaagtccgtagtcaggtaca

SEQ ID NO: 228435 - DNA, 30 bp, Artificial Sequence
  Synthetic oligonucleotide
ttagatgacgggtaagagcggttcggtaca

SEQ ID NO: 228436 - DNA, 30 bp, Artificial Sequence
  Synthetic oligonucleotide
aagatcatcgtataaaccctggagggtaca

SEQ ID NO: 228437 - DNA, 30 bp, Artificial Sequence
  Synthetic oligonucleotide
gtacggtgtattgccaccccttagggtaca

SEQ ID NO: 228438 - DNA, 30 bp, Artificial Sequence
  Synthetic oligonucleotide
cgaaaacgtcctccctgagatgtgggtaca

SEQ ID NO: 228439 - DNA, 30 bp, Artificial Sequence
  Synthetic oligonucleotide
caactcctcgacatagtcttgaatggtaca

SEQ ID NO: 228440 - DNA, 30 bp, Artificial Sequence
  Synthetic oligonucleotide
ttgctgctgattagacaacgtcctggtaca

SEQ ID NO: 228441 - DNA, 30 bp, Artificial Sequence
  Synthetic oligonucleotide
accttaaggggccatgcttggcaatgtaca

SEQ ID NO: 228442 - DNA, 30 bp, Artificial Sequence
  Synthetic oligonucleotide
actgcgttagatgttgtacagacatgtaca

SEQ ID NO: 228443 - DNA, 30 bp, Artificial Sequence
  Synthetic oligonucleotide
gaacgtcccatggcctcaacaacctgtaca

SEQ ID NO: 228444 - DNA, 30 bp, Artificial Sequence
  Synthetic oligonucleotide
agctttatggctacaagctccacctgtaca

SEQ ID NO: 228445 - DNA, 30 bp, Artificial Sequence
  Synthetic oligonucleotide
tcgtaactctgtgtacggcggccgtgtaca

SEQ ID NO: 228446 - DNA, 30 bp, Artificial Sequence
  Synthetic oligonucleotide
tttagacccgggatgtaagagctgtgtaca

SEQ ID NO: 228447 - DNA, 30 bp, Artificial Sequence
  Synthetic oligonucleotide
aagggtgtggtaagcatcgataattgtaca

SEQ ID NO: 228448 - DNA, 30 bp, Artificial Sequence
  Synthetic oligonucleotide
aactgccgaattggccgacgtgattgtaca

SEQ ID NO: 228449 - DNA, 30 bp, Artificial Sequence
  Synthetic oligonucleotide
gtattgtacattctcgagtcttcttgtaca

SEQ ID NO: 228450 - DNA, 30 bp, Artificial Sequence
  Synthetic oligonucleotide
tccgttaacatagtggacagtaaaattaca

SEQ ID NO: 228451 - DNA, 30 bp, Artificial Sequence
  Synthetic oligonucleotide
gatcgccagctgcgaaagagtcatattaca

SEQ ID NO: 228452 - DNA, 30 bp, Artificial Sequence
  Synthetic oligonucleotide
ggggaattatgatggtcttctacacttaca

SEQ ID NO: 228453 - DNA, 30 bp, Artificial Sequence
  Synthetic oligonucleotide
gactgcaggcagctcaggaagtagcttaca

SEQ ID NO: 228454 - DNA, 30 bp, Artificial Sequence
  Synthetic oligonucleotide
tttattgcgacacctaaacaataagttaca

SEQ ID NO: 228455 - DNA, 30 bp, Artificial Sequence
  Synthetic oligonucleotide
gtatcgcgaccgcgggtattagcagttaca

SEQ ID NO: 228456 - DNA, 30 bp, Artificial Sequence
  Synthetic oligonucleotide
gggcagcattcccaatcatcgagagttaca

SEQ ID NO: 228457 - DNA, 30 bp, Artificial Sequence
  Synthetic oligonucleotide
taggaaccttactgggatccgtaggttaca

SEQ ID NO: 228458 - DNA, 30 bp, Artificial Sequence
  Synthetic oligonucleotide
ggcatcagcaagagtagccattcggttaca

SEQ ID NO: 228459 - DNA, 30 bp, Artificial Sequence
  Synthetic oligonucleotide
catacccaaaaaagcaagggctcatttaca

SEQ ID NO: 228460 - DNA, 30 bp, Artificial Sequence
  Synthetic oligonucleotide
ggagttcgtggacacacttagacctttaca

SEQ ID NO: 228461 - DNA, 30 bp, Artificial Sequence
  Synthetic oligonucleotide
gataagacgcattagaccgcaatctttaca

SEQ ID NO: 228462 - DNA, 30 bp, Artificial Sequence
  Synthetic oligonucleotide
tcgtcatagcaggaccacgatatgtttaca

SEQ ID NO: 228463 - DNA, 30 bp, Artificial Sequence
  Synthetic oligonucleotide
ggcagatcgctccggtctggtgtgtttaca

SEQ ID NO: 228464 - DNA, 30 bp, Artificial Sequence
  Synthetic oligonucleotide
gattccatccgctcctgggacagaaaacca

SEQ ID NO: 228465 - DNA, 30 bp, Artificial Sequence
  Synthetic oligonucleotide
cgtctaattctattaccgttaataaaacca

SEQ ID NO: 228466 - DNA, 30 bp, Artificial Sequence
  Synthetic oligonucleotide
ccatgggcaagataactgggtaataaacca

SEQ ID NO: 228467 - DNA, 30 bp, Artificial Sequence
  Synthetic oligonucleotide
tgacaagagatccgacctggggttaaacca

SEQ ID NO: 228468 - DNA, 30 bp, Artificial Sequence
  Synthetic oligonucleotide
ttgccaggtaagtgtatcgagtttaaacca

SEQ ID NO: 228469 - DNA, 30 bp, Artificial Sequence
  Synthetic oligonucleotide
aggttgccgataacgtaacctacacaacca

SEQ ID NO: 228470 - DNA, 30 bp, Artificial Sequence
  Synthetic oligonucleotide
aaacggagtggttattcaatggaccaacca

SEQ ID NO: 228471 - DNA, 30 bp, Artificial Sequence
  Synthetic oligonucleotide
aaacgtgttatgtctccccggtcgcaacca

SEQ ID NO: 228472 - DNA, 30 bp, Artificial Sequence
  Synthetic oligonucleotide
cctatacccatccacactgaatggcaacca

SEQ ID NO: 228473 - DNA, 30 bp, Artificial Sequence
  Synthetic oligonucleotide
gagtctggactaacgatgatgtggcaacca

SEQ ID NO: 228474 - DNA, 30 bp, Artificial Sequence
  Synthetic oligonucleotide
attaaagggagtacgcggggtaaataacca

SEQ ID NO: 228475 - DNA, 30 bp, Artificial Sequence
  Synthetic oligonucleotide
ccagtgtgagattgcggtgcaccataacca

SEQ ID NO: 228476 - DNA, 30 bp, Artificial Sequence
  Synthetic oligonucleotide
ttattcctatctggacttctagggtaacca

SEQ ID NO: 228477 - DNA, 30 bp, Artificial Sequence
  Synthetic oligonucleotide
atgggaccctgaatgaggattgtgtaacca

SEQ ID NO: 228478 - DNA, 30 bp, Artificial Sequence
  Synthetic oligonucleotide
ggggctcccccatggtataccgaaacacca

SEQ ID NO: 228479 - DNA, 30 bp, Artificial Sequence
  Synthetic oligonucleotide
ttgtgagccgaatatgaacttaccacacca

SEQ ID NO: 228480 - DNA, 30 bp, Artificial Sequence
  Synthetic oligonucleotide
cgccggtgcagctatttcgggacgacacca

SEQ ID NO: 228481 - DNA, 30 bp, Artificial Sequence
  Synthetic oligonucleotide
acaatggaattaagagcttataatccacca

SEQ ID NO: 228482 - DNA, 30 bp, Artificial Sequence
  Synthetic oligonucleotide
gatataatcgtactccaacagtaagcacca

SEQ ID NO: 228483 - DNA, 30 bp, Artificial Sequence
  Synthetic oligonucleotide
attgcccaattaaccccgctttgagcacca

SEQ ID NO: 228484 - DNA, 30 bp, Artificial Sequence
  Synthetic oligonucleotide
ggcgtctgttggaactcctacccggcacca

SEQ ID NO: 228485 - DNA, 30 bp, Artificial Sequence
  Synthetic oligonucleotide
atgggtggaccagcgttaggatatgcacca

SEQ ID NO: 228486 - DNA, 30 bp, Artificial Sequence
  Synthetic oligonucleotide
tcgagcgcttaggacctcgggtttgcacca

SEQ ID NO: 228487 - DNA, 30 bp, Artificial Sequence
  Synthetic oligonucleotide
ctgcccatcaaagtctagacacaatcacca

SEQ ID NO: 228488 - DNA, 30 bp, Artificial Sequence
  Synthetic oligonucleotide
gatagaaggttcaattacttccattcacca

SEQ ID NO: 228489 - DNA, 30 bp, Artificial Sequence
  Synthetic oligonucleotide
aagcttaaacgattcaaggaagattcacca

SEQ ID NO: 228490 - DNA, 30 bp, Artificial Sequence
  Synthetic oligonucleotide
agtagaggtgcccgtactatgcgttcacca

SEQ ID NO: 228491 - DNA, 30 bp, Artificial Sequence
  Synthetic oligonucleotide
tcgccagatgcgatgtgccagatttcacca

SEQ ID NO: 228492 - DNA, 30 bp, Artificial Sequence
  Synthetic oligonucleotide
tgaattcaatagggttcgggcggcagacca

SEQ ID NO: 228493 - DNA, 30 bp, Artificial Sequence
  Synthetic oligonucleotide
atactgacatgccattactgtgtcagacca

SEQ ID NO: 228494 - DNA, 30 bp, Artificial Sequence
  Synthetic oligonucleotide
gcatgtatttattggttttgggagagacca

SEQ ID NO: 228495 - DNA, 30 bp, Artificial Sequence
  Synthetic oligonucleotide
tagtctaggttgctaaaattggagagacca

SEQ ID NO: 228496 - DNA, 30 bp, Artificial Sequence
  Synthetic oligonucleotide
tagttctaaaggaacggtaattagagacca

SEQ ID NO: 228497 - DNA, 30 bp, Artificial Sequence
  Synthetic oligonucleotide
accaagcggcgggcttcaggtatacgacca

SEQ ID NO: 228498 - DNA, 30 bp, Artificial Sequence
  Synthetic oligonucleotide
aggagtaaccggtaattgatcgtgcgacca

SEQ ID NO: 228499 - DNA, 30 bp, Artificial Sequence
  Synthetic oligonucleotide
atgaatcatgcaagccgtctgggaggacca

SEQ ID NO: 228500 - DNA, 30 bp, Artificial Sequence
  Synthetic oligonucleotide
gctccgggcctaggcgttatgaacggacca

SEQ ID NO: 228501 - DNA, 30 bp, Artificial Sequence
  Synthetic oligonucleotide
ttcaacgtggttagatgggtcaccggacca

SEQ ID NO: 228502 - DNA, 30 bp, Artificial Sequence
  Synthetic oligonucleotide
tagcgaagaggaattgcgggggagggacca

SEQ ID NO: 228503 - DNA, 30 bp, Artificial Sequence
  Synthetic oligonucleotide
gtgaacgattgagtgccaatgcctggacca

SEQ ID NO: 228504 - DNA, 30 bp, Artificial Sequence
  Synthetic oligonucleotide
ttcctaagccgacacgggccgatatgacca

SEQ ID NO: 228505 - DNA, 30 bp, Artificial Sequence
  Synthetic oligonucleotide
cccgacgaggtcaggatcaaggagtgacca

SEQ ID NO: 228506 - DNA, 30 bp, Artificial Sequence
  Synthetic oligonucleotide
tcttcatagaaatatagaagcacgtgacca

SEQ ID NO: 228507 - DNA, 30 bp, Artificial Sequence
  Synthetic oligonucleotide
agtccggttaaactacatctttggtgacca

SEQ ID NO: 228508 - DNA, 30 bp, Artificial Sequence
  Synthetic oligonucleotide
tgagtattgagatggctagctgtgtgacca

SEQ ID NO: 228509 - DNA, 30 bp, Artificial Sequence
  Synthetic oligonucleotide
ggtttcgtatatctgccgcccacttgacca

SEQ ID NO: 228510 - DNA, 30 bp, Artificial Sequence
  Synthetic oligonucleotide
gtgagcgtcaattttgtatgatcttgacca

SEQ ID NO: 228511 - DNA, 30 bp, Artificial Sequence
  Synthetic oligonucleotide
cgatgactggcggagaaaagtcgttgacca

SEQ ID NO: 228512 - DNA, 30 bp, Artificial Sequence
  Synthetic oligonucleotide
ggatgaaacttatcaagttctaaaatacca

SEQ ID NO: 228513 - DNA, 30 bp, Artificial Sequence
  Synthetic oligonucleotide
cctatgaaagcttacaagcaaccaatacca

SEQ ID NO: 228514 - DNA, 30 bp, Artificial Sequence
  Synthetic oligonucleotide
aagtctgcaccgatggaaacttcaatacca

SEQ ID NO: 228515 - DNA, 30 bp, Artificial Sequence
  Synthetic oligonucleotide
ccaagtgagagtccgggtttactgatacca

SEQ ID NO: 228516 - DNA, 30 bp, Artificial Sequence
  Synthetic oligonucleotide
tacgacgagtaatgcagcgcttatatacca

SEQ ID NO: 228517 - DNA, 30 bp, Artificial Sequence
  Synthetic oligonucleotide
aagtgtaagaagcgagcaaggcaactacca

SEQ ID NO: 228518 - DNA, 30 bp, Artificial Sequence
  Synthetic oligonucleotide
atgccgtgagaatgtgatggtactctacca

SEQ ID NO: 228519 - DNA, 30 bp, Artificial Sequence
  Synthetic oligonucleotide
atgttctgcgagatgttcgtggacgtacca

SEQ ID NO: 228520 - DNA, 30 bp, Artificial Sequence
  Synthetic oligonucleotide
aactctaaagcagatccaatagccgtacca

SEQ ID NO: 228521 - DNA, 30 bp, Artificial Sequence
  Synthetic oligonucleotide
tttatacgcagtaaaaaacagcgcgtacca

SEQ ID NO: 228522 - DNA, 30 bp, Artificial Sequence
  Synthetic oligonucleotide
acaagccatggggcccgttcgggggtacca

SEQ ID NO: 228523 - DNA, 30 bp, Artificial Sequence
  Synthetic oligonucleotide
agctcaacgggcagaggccccccattacca

SEQ ID NO: 228524 - DNA, 30 bp, Artificial Sequence
  Synthetic oligonucleotide
acatagagactaggtcaccagggattacca

SEQ ID NO: 228525 - DNA, 30 bp, Artificial Sequence
  Synthetic oligonucleotide
tgttttaatgcctaaatgggaggtttacca

SEQ ID NO: 228526 - DNA, 30 bp, Artificial Sequence
  Synthetic oligonucleotide
ttcgggccattcctcagggacttaaaccca

SEQ ID NO: 228527 - DNA, 30 bp, Artificial Sequence
  Synthetic oligonucleotide
acgacggcagcagtatttgagcacaaccca

SEQ ID NO: 228528 - DNA, 30 bp, Artificial Sequence
  Synthetic oligonucleotide
ccgattgagaaatccgagaacggccaccca

SEQ ID NO: 228529 - DNA, 30 bp, Artificial Sequence
  Synthetic oligonucleotide
ggtcaataccatctggatggttggcaccca

SEQ ID NO: 228530 - DNA, 30 bp, Artificial Sequence
  Synthetic oligonucleotide
tgcaggcccaaagttataaccaaagaccca

SEQ ID NO: 228531 - DNA, 30 bp, Artificial Sequence
  Synthetic oligonucleotide
gaaccaagaaggatagccaagttcgaccca

SEQ ID NO: 228532 - DNA, 30 bp, Artificial Sequence
  Synthetic oligonucleotide
tacttagggcatgccacgtgataggaccca

SEQ ID NO: 228533 - DNA, 30 bp, Artificial Sequence
  Synthetic oligonucleotide
cgtagtcggcgcggacgagaaacggaccca

SEQ ID NO: 228534 - DNA, 30 bp, Artificial Sequence
  Synthetic oligonucleotide
tcacgggctacgagcatgttttatgaccca

SEQ ID NO: 228535 - DNA, 30 bp, Artificial Sequence
  Synthetic oligonucleotide
cagaggcagtgatgtttgtcggcctaccca

SEQ ID NO: 228536 - DNA, 30 bp, Artificial Sequence
  Synthetic oligonucleotide
tctgggcaagacgtgttgttgttctaccca

SEQ ID NO: 228537 - DNA, 30 bp, Artificial Sequence
  Synthetic oligonucleotide
taacctcaggacacgtgatccgggtaccca

SEQ ID NO: 228538 - DNA, 30 bp, Artificial Sequence
  Synthetic oligonucleotide
attgtcgtgaatgaaattcccggaacccca

SEQ ID NO: 228539 - DNA, 30 bp, Artificial Sequence
  Synthetic oligonucleotide
atgaattagcgactagagtaactaacccca

SEQ ID NO: 228540 - DNA, 30 bp, Artificial Sequence
  Synthetic oligonucleotide
cctgtaatacttgagtgtccctgcacccca

SEQ ID NO: 228541 - DNA, 30 bp, Artificial Sequence
  Synthetic oligonucleotide
gtaatcgtcgtatcaaaaagaccgacccca

SEQ ID NO: 228542 - DNA, 30 bp, Artificial Sequence
  Synthetic oligonucleotide
tctgcataatccattggtcctggtacccca

SEQ ID NO: 228543 - DNA, 30 bp, Artificial Sequence
  Synthetic oligonucleotide
ttaaggaagtgacgttgctaagaaccccca

SEQ ID NO: 228544 - DNA, 30 bp, Artificial Sequence
  Synthetic oligonucleotide
taagaaaaggagacttgagggggcccccca

SEQ ID NO: 228545 - DNA, 30 bp, Artificial Sequence
  Synthetic oligonucleotide
aaatgatatgtctacccagattatccccca

SEQ ID NO: 228546 - DNA, 30 bp, Artificial Sequence
  Synthetic oligonucleotide
gctctggatgggaacgtactaagtccccca

SEQ ID NO: 228547 - DNA, 30 bp, Artificial Sequence
  Synthetic oligonucleotide
atcttgagcggctgcaaagctatcgcccca

SEQ ID NO: 228548 - DNA, 30 bp, Artificial Sequence
  Synthetic oligonucleotide
ctatgaatcaaaaccttacgtgaggcccca

SEQ ID NO: 228549 - DNA, 30 bp, Artificial Sequence
  Synthetic oligonucleotide
gtatacgacgcatacaaaatgccgagccca

SEQ ID NO: 228550 - DNA, 30 bp, Artificial Sequence
  Synthetic oligonucleotide
aaccgacaccgtaggacttatatgagccca

SEQ ID NO: 228551 - DNA, 30 bp, Artificial Sequence
  Synthetic oligonucleotide
gatccggtcctcgtggggagggctagccca

SEQ ID NO: 228552 - DNA, 30 bp, Artificial Sequence
  Synthetic oligonucleotide
tggagttgtctattacgtaggccgcgccca

SEQ ID NO: 228553 - DNA, 30 bp, Artificial Sequence
  Synthetic oligonucleotide
tccttgaaaagtgggaacctgtcgcgccca

SEQ ID NO: 228554 - DNA, 30 bp, Artificial Sequence
  Synthetic oligonucleotide
gctgaaggcgagtattaatattgtcgccca

SEQ ID NO: 228555 - DNA, 30 bp, Artificial Sequence
  Synthetic oligonucleotide
cagctagtggtgagccataacctaggccca

SEQ ID NO: 228556 - DNA, 30 bp, Artificial Sequence
  Synthetic oligonucleotide
gggcaaatcgagtcgggtcgttacggccca

SEQ ID NO: 228557 - DNA, 30 bp, Artificial Sequence
  Synthetic oligonucleotide
tgaacatgcgacagttggcgttgcggccca

SEQ ID NO: 228558 - DNA, 30 bp, Artificial Sequence
  Synthetic oligonucleotide
gtaagagacaaagtaataaggttcggccca

SEQ ID NO: 228559 - DNA, 30 bp, Artificial Sequence
  Synthetic oligonucleotide
agaactggggctgagcatccaaagggccca

SEQ ID NO: 228560 - DNA, 30 bp, Artificial Sequence
  Synthetic oligonucleotide
acttatgcggtcttgagcttggcatgccca

SEQ ID NO: 228561 - DNA, 30 bp, Artificial Sequence
  Synthetic oligonucleotide
aactaggtaagcaagtttacgtgatgccca

SEQ ID NO: 228562 - DNA, 30 bp, Artificial Sequence
  Synthetic oligonucleotide
aagactgtccatttctgtgtcatatgccca

SEQ ID NO: 228563 - DNA, 30 bp, Artificial Sequence
  Synthetic oligonucleotide
gaggctgggatggccggttatgtatgccca

SEQ ID NO: 228564 - DNA, 30 bp, Artificial Sequence
  Synthetic oligonucleotide
aacccaagattgtccttaggcgtgtgccca

SEQ ID NO: 228565 - DNA, 30 bp, Artificial Sequence
  Synthetic oligonucleotide
catcgcctgcagggggttcgaaattgccca

SEQ ID NO: 228566 - DNA, 30 bp, Artificial Sequence
  Synthetic oligonucleotide
aggtctacagcaagccgcggaaattgccca

SEQ ID NO: 228567 - DNA, 30 bp, Artificial Sequence
  Synthetic oligonucleotide
ttcacaggttcccggcacagaggaatccca

SEQ ID NO: 228568 - DNA, 30 bp, Artificial Sequence
  Synthetic oligonucleotide
ttcgtctatttcgatggctgaactatccca

SEQ ID NO: 228569 - DNA, 30 bp, Artificial Sequence
  Synthetic oligonucleotide
tcatcgcgtatcgtaaccgtaaccctccca

SEQ ID NO: 228570 - DNA, 30 bp, Artificial Sequence
  Synthetic oligonucleotide
aggtgggcaggggtgagtgacagcctccca

SEQ ID NO: 228571 - DNA, 30 bp, Artificial Sequence
  Synthetic oligonucleotide
aggagactgcttcggtagctccggctccca

SEQ ID NO: 228572 - DNA, 30 bp, Artificial Sequence
  Synthetic oligonucleotide
tcgtactcgcggaatataggactgctccca

SEQ ID NO: 228573 - DNA, 30 bp, Artificial Sequence
  Synthetic oligonucleotide
ggttgcgggtggaaaattcaagaagtccca

SEQ ID NO: 228574 - DNA, 30 bp, Artificial Sequence
  Synthetic oligonucleotide
gacaaaagagacatccggcgtgaattccca

SEQ ID NO: 228575 - DNA, 30 bp, Artificial Sequence
  Synthetic oligonucleotide
agtagtctatgtccgatttacagcaagcca

SEQ ID NO: 228576 - DNA, 30 bp, Artificial Sequence
  Synthetic oligonucleotide
caaagtgagagccatgctctactcaagcca

SEQ ID NO: 228577 - DNA, 30 bp, Artificial Sequence
  Synthetic oligonucleotide
tgccaatacatctgggtaagggggaagcca

SEQ ID NO: 228578 - DNA, 30 bp, Artificial Sequence
  Synthetic oligonucleotide
gtgcagtgtccgcaagagcgaggtaagcca

SEQ ID NO: 228579 - DNA, 30 bp, Artificial Sequence
  Synthetic oligonucleotide
cgggacattgcaggcaactgtctacagcca

SEQ ID NO: 228580 - DNA, 30 bp, Artificial Sequence
  Synthetic oligonucleotide
ggctatctcagaccaaccaacttccagcca

SEQ ID NO: 228581 - DNA, 30 bp, Artificial Sequence
  Synthetic oligonucleotide
tgtcacccgcgatcggtgtatctgcagcca

SEQ ID NO: 228582 - DNA, 30 bp, Artificial Sequence
  Synthetic oligonucleotide
aaggcattctcttggaggtatgttcagcca

SEQ ID NO: 228583 - DNA, 30 bp, Artificial Sequence
  Synthetic oligonucleotide
atcaggcgagactcggctgaaggagagcca

SEQ ID NO: 228584 - DNA, 30 bp, Artificial Sequence
  Synthetic oligonucleotide
caaagcggaaccgagaacgttctggagcca

SEQ ID NO: 228585 - DNA, 30 bp, Artificial Sequence
  Synthetic oligonucleotide
gttaatcacatgaactcgcacgttgagcca

SEQ ID NO: 228586 - DNA, 31 bp, Artificial Sequence
  Synthetic oligonucleotide
gctcggcaggccatataggaggggctagcca

SEQ ID NO: 228587 - DNA, 29 bp, Artificial Sequence
  Synthetic oligonucleotide
ttcagaagatcggtgactataggtagcca

SEQ ID NO: 228588 - DNA, 30 bp, Artificial Sequence
  Synthetic oligonucleotide
gcacgagttcttcgccggctggattagcca

SEQ ID NO: 228589 - DNA, 30 bp, Artificial Sequence
  Synthetic oligonucleotide
gtgtactgcactcgtactctggattagcca

SEQ ID NO: 228590 - DNA, 30 bp, Artificial Sequence
  Synthetic oligonucleotide
tgcagcgcttattatatagaaatcacgcca

SEQ ID NO: 228591 - DNA, 30 bp, Artificial Sequence
  Synthetic oligonucleotide
acgatccaccagaacacggaccctacgcca

SEQ ID NO: 228592 - DNA, 30 bp, Artificial Sequence
  Synthetic oligonucleotide
gagatacggggctccggggtacgtacgcca

SEQ ID NO: 228593 - DNA, 30 bp, Artificial Sequence
  Synthetic oligonucleotide
tgactaatcaaggcaccatagaaaccgcca

SEQ ID NO: 228594 - DNA, 30 bp, Artificial Sequence
  Synthetic oligonucleotide
gactggctctgttggtcggaactaccgcca

SEQ ID NO: 228595 - DNA, 30 bp, Artificial Sequence
  Synthetic oligonucleotide
acagttgcgaaatcaatcaaatcagcgcca

SEQ ID NO: 228596 - DNA, 30 bp, Artificial Sequence
  Synthetic oligonucleotide
gcatgagtatgacaccaggaaatagcgcca

SEQ ID NO: 228597 - DNA, 30 bp, Artificial Sequence
  Synthetic oligonucleotide
cgtaggttagtttgccgctgcttagcgcca

SEQ ID NO: 228598 - DNA, 30 bp, Artificial Sequence
  Synthetic oligonucleotide
ggcgtcggaacgcttggcaagttcgcgcca

SEQ ID NO: 228599 - DNA, 30 bp, Artificial Sequence
  Synthetic oligonucleotide
acgacttctgtttgactcacataggcgcca

SEQ ID NO: 228600 - DNA, 30 bp, Artificial Sequence
  Synthetic oligonucleotide
gatgcctcagtcaggcattgattctcgcca

SEQ ID NO: 228601 - DNA, 29 bp, Artificial Sequence
  Synthetic oligonucleotide
ggctctgcagttgtaagtggaagtcgcca

SEQ ID NO: 228602 - DNA, 30 bp, Artificial Sequence
  Synthetic oligonucleotide
tgctatccgacccgaacgtccaggtcgcca

SEQ ID NO: 228603 - DNA, 30 bp, Artificial Sequence
  Synthetic oligonucleotide
tggggtattagggaacagccgttgtcgcca

SEQ ID NO: 228604 - DNA, 30 bp, Artificial Sequence
  Synthetic oligonucleotide
acggatctttggatcgatgctctaaggcca

SEQ ID NO: 228605 - DNA, 30 bp, Artificial Sequence
  Synthetic oligonucleotide
catatcaataggctaaagtccgtaaggcca

SEQ ID NO: 228606 - DNA, 30 bp, Artificial Sequence
  Synthetic oligonucleotide
gacttgtttagtggccaaccaagcaggcca

SEQ ID NO: 228607 - DNA, 30 bp, Artificial Sequence
  Synthetic oligonucleotide
attctaaacactcggagtctaacgaggcca

SEQ ID NO: 228608 - DNA, 30 bp, Artificial Sequence
  Synthetic oligonucleotide
tctggtcgcgtcgtcgcctgtctgaggcca

SEQ ID NO: 228609 - DNA, 30 bp, Artificial Sequence
  Synthetic oligonucleotide
atgtgagtctattaccgccccgttaggcca

SEQ ID NO: 228610 - DNA, 30 bp, Artificial Sequence
  Synthetic oligonucleotide
agagatcgatcaataacgccttcacggcca

SEQ ID NO: 228611 - DNA, 30 bp, Artificial Sequence
  Synthetic oligonucleotide
agtagcttactcctgccgcccgcccggcca

SEQ ID NO: 228612 - DNA, 30 bp, Artificial Sequence
  Synthetic oligonucleotide
ctcccccgtcaggtagattttcgccggcca

SEQ ID NO: 228613 - DNA, 30 bp, Artificial Sequence
  Synthetic oligonucleotide
tttactaccacaggcgatccactccggcca

SEQ ID NO: 228614 - DNA, 30 bp, Artificial Sequence
  Synthetic oligonucleotide
accaaagtgattatctgcgcttctcggcca

SEQ ID NO: 228615 - DNA, 30 bp, Artificial Sequence
  Synthetic oligonucleotide
accgtctgggccacccgacatcaagggcca

SEQ ID NO: 228616 - DNA, 30 bp, Artificial Sequence
  Synthetic oligonucleotide
cccggggcgcacccttagtatctagggcca

SEQ ID NO: 228617 - DNA, 30 bp, Artificial Sequence
  Synthetic oligonucleotide
gatataggtttggaagagtaaaccgggcca

SEQ ID NO: 228618 - DNA, 30 bp, Artificial Sequence
  Synthetic oligonucleotide
gatagccttacgttgaagatccgcgggcca

SEQ ID NO: 228619 - DNA, 30 bp, Artificial Sequence
  Synthetic oligonucleotide
ggaaaactttacggacacgattgcgggcca

SEQ ID NO: 228620 - DNA, 30 bp, Artificial Sequence
  Synthetic oligonucleotide
gccagacaaattcccaaattagatgggcca

SEQ ID NO: 228621 - DNA, 30 bp, Artificial Sequence
  Synthetic oligonucleotide
ttcaatacatgtagttcaattgagtggcca

SEQ ID NO: 228622 - DNA, 30 bp, Artificial Sequence
  Synthetic oligonucleotide
ggtaggatttcgctctaaatcaggtggcca

SEQ ID NO: 228623 - DNA, 30 bp, Artificial Sequence
  Synthetic oligonucleotide
gtcatgagctataaggacggacattggcca

SEQ ID NO: 228624 - DNA, 30 bp, Artificial Sequence
  Synthetic oligonucleotide
cgatatctagacccgagtctggacatgcca

SEQ ID NO: 228625 - DNA, 30 bp, Artificial Sequence
  Synthetic oligonucleotide
tttaagtgtgtgggatcaagaagcatgcca

SEQ ID NO: 228626 - DNA, 30 bp, Artificial Sequence
  Synthetic oligonucleotide
gcattcactttctcctctcccttcatgcca

SEQ ID NO: 228627 - DNA, 30 bp, Artificial Sequence
  Synthetic oligonucleotide
tttagtatgtacattcttgcaggactgcca

SEQ ID NO: 228628 - DNA, 30 bp, Artificial Sequence
  Synthetic oligonucleotide
gttattggcgatactatgacgtacctgcca

SEQ ID NO: 228629 - DNA, 30 bp, Artificial Sequence
  Synthetic oligonucleotide
tctgggaagttcctgtgcctggccctgcca

SEQ ID NO: 228630 - DNA, 30 bp, Artificial Sequence
  Synthetic oligonucleotide
accatgacggggttcagcgaaacgctgcca

SEQ ID NO: 228631 - DNA, 30 bp, Artificial Sequence
  Synthetic oligonucleotide
taacattgtatcttgcatatagcgctgcca

SEQ ID NO: 228632 - DNA, 30 bp, Artificial Sequence
  Synthetic oligonucleotide
ggaagccctctgatcttcttccatctgcca

SEQ ID NO: 228633 - DNA, 30 bp, Artificial Sequence
  Synthetic oligonucleotide
cccttcgctgggggtgtacagacagtgcca

SEQ ID NO: 228634 - DNA, 30 bp, Artificial Sequence
  Synthetic oligonucleotide
gacctatgttctactgaaaccagcgtgcca

SEQ ID NO: 228635 - DNA, 30 bp, Artificial Sequence
  Synthetic oligonucleotide
acttagacgcctttgctaacctcggtgcca

SEQ ID NO: 228636 - DNA, 30 bp, Artificial Sequence
  Synthetic oligonucleotide
ataaatctgggagctgcaacgaatgtgcca

SEQ ID NO: 228637 - DNA, 30 bp, Artificial Sequence
  Synthetic oligonucleotide
gttcctcggataagtgcgctgtcaaatcca

SEQ ID NO: 228638 - DNA, 30 bp, Artificial Sequence
  Synthetic oligonucleotide
cacattcctactgcttttgagtccaatcca

SEQ ID NO: 228639 - DNA, 30 bp, Artificial Sequence
  Synthetic oligonucleotide
aggaacgcatctccatgtgtatgcaatcca

SEQ ID NO: 228640 - DNA, 30 bp, Artificial Sequence
  Synthetic oligonucleotide
ctggtgggatcatcaatatgctgcaatcca

SEQ ID NO: 228641 - DNA, 30 bp, Artificial Sequence
  Synthetic oligonucleotide
atacagacagttggcagtcgataacatcca

SEQ ID NO: 228642 - DNA, 30 bp, Artificial Sequence
  Synthetic oligonucleotide
gaggcagtgagagcctctaacggacatcca

SEQ ID NO: 228643 - DNA, 30 bp, Artificial Sequence
  Synthetic oligonucleotide
ccgtgcaatctagaactactcaaccatcca

SEQ ID NO: 228644 - DNA, 30 bp, Artificial Sequence
  Synthetic oligonucleotide
acaaacgtgggtcttcttaaaccgcatcca

SEQ ID NO: 228645 - DNA, 30 bp, Artificial Sequence
  Synthetic oligonucleotide
gtcgaaattgtacagcctcgaatagatcca

SEQ ID NO: 228646 - DNA, 30 bp, Artificial Sequence
  Synthetic oligonucleotide
tgcactcaatcaaacggaaatatagatcca

SEQ ID NO: 228647 - DNA, 30 bp, Artificial Sequence
  Synthetic oligonucleotide
aaattggcaggtggttattttttagatcca

SEQ ID NO: 228648 - DNA, 30 bp, Artificial Sequence
  Synthetic oligonucleotide
cttacaatcgagctgtgcccagccgatcca

SEQ ID NO: 228649 - DNA, 30 bp, Artificial Sequence
  Synthetic oligonucleotide
catggcatctcaatgccgatatgcgatcca

SEQ ID NO: 228650 - DNA, 30 bp, Artificial Sequence
  Synthetic oligonucleotide
acgttttcgtacggaagtcgaccggatcca

SEQ ID NO: 228651 - DNA, 30 bp, Artificial Sequence
  Synthetic oligonucleotide
ccattccttcccgcgtacgacttggatcca

SEQ ID NO: 228652 - DNA, 30 bp, Artificial Sequence
  Synthetic oligonucleotide
gataaagggacaaatgcgcaccatgatcca

SEQ ID NO: 228653 - DNA, 30 bp, Artificial Sequence
  Synthetic oligonucleotide
tgaagaaagtgaccggatgcagatgatcca

SEQ ID NO: 228654 - DNA, 30 bp, Artificial Sequence
  Synthetic oligonucleotide
ttcaaggtctgccttcgtaaatcatatcca

SEQ ID NO: 228655 - DNA, 30 bp, Artificial Sequence
  Synthetic oligonucleotide
tatcgtcttacgtgatgtgaggtatatcca

SEQ ID NO: 228656 - DNA, 30 bp, Artificial Sequence
  Synthetic oligonucleotide
caagatatcagactcgatggcatgtatcca

SEQ ID NO: 228657 - DNA, 30 bp, Artificial Sequence
  Synthetic oligonucleotide
ctgtcctacccccatcggtgagtgtatcca

SEQ ID NO: 228658 - DNA, 30 bp, Artificial Sequence
  Synthetic oligonucleotide
gcaccttacctcttctgacttttgtatcca

SEQ ID NO: 228659 - DNA, 30 bp, Artificial Sequence
  Synthetic oligonucleotide
tcaagcagtgggtatttcgcggattatcca

SEQ ID NO: 228660 - DNA, 30 bp, Artificial Sequence
  Synthetic oligonucleotide
acgactctgggcgaggaatgaccttatcca

SEQ ID NO: 228661 - DNA, 30 bp, Artificial Sequence
  Synthetic oligonucleotide
tgttacacacttgactagctgttttatcca

SEQ ID NO: 228662 - DNA, 30 bp, Artificial Sequence
  Synthetic oligonucleotide
cgatgtttcggagaactaattataactcca

SEQ ID NO: 228663 - DNA, 30 bp, Artificial Sequence
  Synthetic oligonucleotide
gtgtgatcccagagggtgccggccactcca

SEQ ID NO: 228664 - DNA, 30 bp, Artificial Sequence
  Synthetic oligonucleotide
gcgattgggatgaaaatctttaagactcca

SEQ ID NO: 228665 - DNA, 30 bp, Artificial Sequence
  Synthetic oligonucleotide
cgtcaatataagttttaaccgcttactcca

SEQ ID NO: 228666 - DNA, 31 bp, Artificial Sequence
  Synthetic oligonucleotide
tacttatttccataataagtcgtttactcca

SEQ ID NO: 228667 - DNA, 30 bp, Artificial Sequence
  Synthetic oligonucleotide
cgatatcctctatggaggcatccacctcca

SEQ ID NO: 228668 - DNA, 30 bp, Artificial Sequence
  Synthetic oligonucleotide
tactcctataacaatagtccttgacctcca

SEQ ID NO: 228669 - DNA, 30 bp, Artificial Sequence
  Synthetic oligonucleotide
tggggtatttaaaacgaggggagccctcca

SEQ ID NO: 228670 - DNA, 30 bp, Artificial Sequence
  Synthetic oligonucleotide
aggacctgcaacagaacgcatccgcctcca

SEQ ID NO: 228671 - DNA, 30 bp, Artificial Sequence
  Synthetic oligonucleotide
gggccatacggcctctcatttggagctcca

SEQ ID NO: 228672 - DNA, 30 bp, Artificial Sequence
  Synthetic oligonucleotide
attgggcaggtagggaattgacgggctcca

SEQ ID NO: 228673 - DNA, 30 bp, Artificial Sequence
  Synthetic oligonucleotide
ttggttatctcgtggcgggaacttgctcca

SEQ ID NO: 228674 - DNA, 30 bp, Artificial Sequence
  Synthetic oligonucleotide
tgcatatagtgtacgaagtcttgctctcca

SEQ ID NO: 228675 - DNA, 30 bp, Artificial Sequence
  Synthetic oligonucleotide
ttagagtggtggggtcacatcaggagtcca

SEQ ID NO: 228676 - DNA, 30 bp, Artificial Sequence
  Synthetic oligonucleotide
ggtgagtcgatctcgcaacactctagtcca

SEQ ID NO: 228677 - DNA, 30 bp, Artificial Sequence
  Synthetic oligonucleotide
gataggcctggcaacaatcaggtacgtcca

SEQ ID NO: 228678 - DNA, 30 bp, Artificial Sequence
  Synthetic oligonucleotide
gataacgaagaacatgtgcagttccgtcca

SEQ ID NO: 228679 - DNA, 30 bp, Artificial Sequence
  Synthetic oligonucleotide
cagcgcatcgtctccaccacaggtcgtcca

SEQ ID NO: 228680 - DNA, 30 bp, Artificial Sequence
  Synthetic oligonucleotide
tatcaagctgccacgggttagggtcgtcca

SEQ ID NO: 228681 - DNA, 30 bp, Artificial Sequence
  Synthetic oligonucleotide
gcggatgtatggttaatacatagcggtcca

SEQ ID NO: 228682 - DNA, 30 bp, Artificial Sequence
  Synthetic oligonucleotide
ccaccttcatcggtcactaggctcggtcca

SEQ ID NO: 228683 - DNA, 30 bp, Artificial Sequence
  Synthetic oligonucleotide
ttactgagtcccatcacataatggggtcca

SEQ ID NO: 228684 - DNA, 31 bp, Artificial Sequence
  Synthetic oligonucleotide
gcagagaccggtgtataaaagtcgtggtcca

SEQ ID NO: 228685 - DNA, 30 bp, Artificial Sequence
  Synthetic oligonucleotide
tacaacgtcggcagagtcgtccaatgtcca

SEQ ID NO: 228686 - DNA, 30 bp, Artificial Sequence
  Synthetic oligonucleotide
ctcactcgcgggaaaattccgatatgtcca

SEQ ID NO: 228687 - DNA, 30 bp, Artificial Sequence
  Synthetic oligonucleotide
ccccgttgtatcggcgtactacactgtcca

SEQ ID NO: 228688 - DNA, 30 bp, Artificial Sequence
  Synthetic oligonucleotide
agtgtggatcatacttattcacgctgtcca

SEQ ID NO: 228689 - DNA, 30 bp, Artificial Sequence
  Synthetic oligonucleotide
catatcaataggtatcatcgtctctgtcca

SEQ ID NO: 228690 - DNA, 30 bp, Artificial Sequence
  Synthetic oligonucleotide
ctaccatgacttaagatccacaagtgtcca

SEQ ID NO: 228691 - DNA, 30 bp, Artificial Sequence
  Synthetic oligonucleotide
caagtcatacaaagcgaatgactgtgtcca

SEQ ID NO: 228692 - DNA, 30 bp, Artificial Sequence
  Synthetic oligonucleotide
tagttgcgtcgcatctattagaaaattcca

SEQ ID NO: 228693 - DNA, 30 bp, Artificial Sequence
  Synthetic oligonucleotide
ttgtacagttccacgtgaggcccaattcca

SEQ ID NO: 228694 - DNA, 30 bp, Artificial Sequence
  Synthetic oligonucleotide
gtatttcgggaaatacactgagtcattcca

SEQ ID NO: 228695 - DNA, 30 bp, Artificial Sequence
  Synthetic oligonucleotide
atcgtatagtagactccaaaggtcattcca

SEQ ID NO: 228696 - DNA, 30 bp, Artificial Sequence
  Synthetic oligonucleotide
ttcaggctatccttcacgctgtagattcca

SEQ ID NO: 228697 - DNA, 30 bp, Artificial Sequence
  Synthetic oligonucleotide
caggtaggggagtcttttgagggacttcca

SEQ ID NO: 228698 - DNA, 30 bp, Artificial Sequence
  Synthetic oligonucleotide
atatgagaacggagagctataatacttcca

SEQ ID NO: 228699 - DNA, 30 bp, Artificial Sequence
  Synthetic oligonucleotide
gacccaccgggtcgaggcggtgtacttcca

SEQ ID NO: 228700 - DNA, 30 bp, Artificial Sequence
  Synthetic oligonucleotide
tcagggtgaatagttgaccattgagttcca

SEQ ID NO: 228701 - DNA, 30 bp, Artificial Sequence
  Synthetic oligonucleotide
gcgtgacaccatgacggatcggacgttcca

SEQ ID NO: 228702 - DNA, 30 bp, Artificial Sequence
  Synthetic oligonucleotide
tcccgcttctgaggcatggcgattgttcca

SEQ ID NO: 228703 - DNA, 30 bp, Artificial Sequence
  Synthetic oligonucleotide
gcttagttggcagggacataggttgttcca

SEQ ID NO: 228704 - DNA, 30 bp, Artificial Sequence
  Synthetic oligonucleotide
tgacgagtataatggacgtgcaaatttcca

SEQ ID NO: 228705 - DNA, 30 bp, Artificial Sequence
  Synthetic oligonucleotide
atctggtggcgtaacggaaaggcatttcca

SEQ ID NO: 228706 - DNA, 30 bp, Artificial Sequence
  Synthetic oligonucleotide
cgagtgcgtgcagagttgaacgcgtttcca

SEQ ID NO: 228707 - DNA, 30 bp, Artificial Sequence
  Synthetic oligonucleotide
agtgacactctatgatctacgacttttcca

SEQ ID NO: 228708 - DNA, 30 bp, Artificial Sequence
  Synthetic oligonucleotide
agtttagtggactgcggttaaatcaaagca

SEQ ID NO: 228709 - DNA, 30 bp, Artificial Sequence
  Synthetic oligonucleotide
cttgcgtgaaccctcactcattcgaaagca

SEQ ID NO: 228710 - DNA, 30 bp, Artificial Sequence
  Synthetic oligonucleotide
tctccaactcctttctaaaaaactaaagca

SEQ ID NO: 228711 - DNA, 30 bp, Artificial Sequence
  Synthetic oligonucleotide
ttttcaaattcctgcaagccaaaacaagca

SEQ ID NO: 228712 - DNA, 30 bp, Artificial Sequence
  Synthetic oligonucleotide
aatcggtcggctcaccggaatggacaagca

SEQ ID NO: 228713 - DNA, 30 bp, Artificial Sequence
  Synthetic oligonucleotide
gttgtcgtagagtagatacatgttcaagca

SEQ ID NO: 228714 - DNA, 30 bp, Artificial Sequence
  Synthetic oligonucleotide
tcgtcactgtatctttggatgcacgaagca

SEQ ID NO: 228715 - DNA, 30 bp, Artificial Sequence
  Synthetic oligonucleotide
ggcgcatttcaaagtctcgcacccgaagca

SEQ ID NO: 228716 - DNA, 30 bp, Artificial Sequence
  Synthetic oligonucleotide
ccggtccgtctttcgggacctccggaagca

SEQ ID NO: 228717 - DNA, 30 bp, Artificial Sequence
  Synthetic oligonucleotide
tcgtcaattagcggcggtttctgggaagca

SEQ ID NO: 228718 - DNA, 30 bp, Artificial Sequence
  Synthetic oligonucleotide
cagattgtcatgttatagtggctggaagca

SEQ ID NO: 228719 - DNA, 30 bp, Artificial Sequence
  Synthetic oligonucleotide
ttcaagtgcaagttgaacgggatctaagca

SEQ ID NO: 228720 - DNA, 30 bp, Artificial Sequence
  Synthetic oligonucleotide
attagttaaataaacggacagtggtaagca

SEQ ID NO: 228721 - DNA, 30 bp, Artificial Sequence
  Synthetic oligonucleotide
gttggccatgtccgccatagcgcttaagca

SEQ ID NO: 228722 - DNA, 30 bp, Artificial Sequence
  Synthetic oligonucleotide
tagtctatgcctacacatccggcaacagca

SEQ ID NO: 228723 - DNA, 30 bp, Artificial Sequence
  Synthetic oligonucleotide
tagagtaataggccaagccaactaacagca

SEQ ID NO: 228724 - DNA, 30 bp, Artificial Sequence
  Synthetic oligonucleotide
cggggcctcactgagagttagtacacagca

SEQ ID NO: 228725 - DNA, 30 bp, Artificial Sequence
  Synthetic oligonucleotide
tgctagagtgggtagactccttgcacagca

SEQ ID NO: 228726 - DNA, 30 bp, Artificial Sequence
  Synthetic oligonucleotide
gaagctccccaattacaggaatgtacagca

SEQ ID NO: 228727 - DNA, 30 bp, Artificial Sequence
  Synthetic oligonucleotide
cattagtgcaattgcgcatatcaaccagca

SEQ ID NO: 228728 - DNA, 30 bp, Artificial Sequence
  Synthetic oligonucleotide
aggcaccctgcgcatttagtggaaccagca

SEQ ID NO: 228729 - DNA, 30 bp, Artificial Sequence
  Synthetic oligonucleotide
gccgggcgatacctttccgctacaccagca

SEQ ID NO: 228730 - DNA, 30 bp, Artificial Sequence
  Synthetic oligonucleotide
gtaatatgattgactctaggaaggccagca

SEQ ID NO: 228731 - DNA, 30 bp, Artificial Sequence
  Synthetic oligonucleotide
tgtgatgggatgcgtagcggtatcgcagca

SEQ ID NO: 228732 - DNA, 30 bp, Artificial Sequence
  Synthetic oligonucleotide
gaaaatacgtatgcacgcgtaccggcagca

SEQ ID NO: 228733 - DNA, 30 bp, Artificial Sequence
  Synthetic oligonucleotide
caccttagcaaaagaactcggggggcagca

SEQ ID NO: 228734 - DNA, 30 bp, Artificial Sequence
  Synthetic oligonucleotide
tatcccctacggtgggggttgctggcagca

SEQ ID NO: 228735 - DNA, 30 bp, Artificial Sequence
  Synthetic oligonucleotide
tgcatatccagtcccgtgctcacatcagca

SEQ ID NO: 228736 - DNA, 30 bp, Artificial Sequence
  Synthetic oligonucleotide
aagataccacgtatacgattttagtcagca

SEQ ID NO: 228737 - DNA, 30 bp, Artificial Sequence
  Synthetic oligonucleotide
ttggaattgatctattggtagccgtcagca

SEQ ID NO: 228738 - DNA, 30 bp, Artificial Sequence
  Synthetic oligonucleotide
ctcatatgtaattcgtgaaatgcgtcagca

SEQ ID NO: 228739 - DNA, 30 bp, Artificial Sequence
  Synthetic oligonucleotide
ccaggggcgctgggcccatgcctgtcagca

SEQ ID NO: 228740 - DNA, 30 bp, Artificial Sequence
  Synthetic oligonucleotide
aatcctcagctcttgcacgagaattcagca

SEQ ID NO: 228741 - DNA, 30 bp, Artificial Sequence
  Synthetic oligonucleotide
ccggcaatgtgtaatcgcacctattcagca

SEQ ID NO: 228742 - DNA, 30 bp, Artificial Sequence
  Synthetic oligonucleotide
atataatcgcggtggcgggctcgttcagca

SEQ ID NO: 228743 - DNA, 30 bp, Artificial Sequence
  Synthetic oligonucleotide
gaaagtagcgggctgaaaccgataagagca

SEQ ID NO: 228744 - DNA, 30 bp, Artificial Sequence
  Synthetic oligonucleotide
ggatgatatttatcgccattggcacgagca

SEQ ID NO: 228745 - DNA, 30 bp, Artificial Sequence
  Synthetic oligonucleotide
acgtgtcatggttgtcgtatatcacgagca

SEQ ID NO: 228746 - DNA, 30 bp, Artificial Sequence
  Synthetic oligonucleotide
ccggttaatgaccctaaaatcacgcgagca

SEQ ID NO: 228747 - DNA, 30 bp, Artificial Sequence
  Synthetic oligonucleotide
gctgggaacaatgccttttttctgcgagca

SEQ ID NO: 228748 - DNA, 30 bp, Artificial Sequence
  Synthetic oligonucleotide
accttttgtcaggaccgacaccctcgagca

SEQ ID NO: 228749 - DNA, 30 bp, Artificial Sequence
  Synthetic oligonucleotide
gtcttcatccgaggcgtcccgtgtcgagca

SEQ ID NO: 228750 - DNA, 30 bp, Artificial Sequence
  Synthetic oligonucleotide
agttctggaaaggttgcttttccaggagca

SEQ ID NO: 228751 - DNA, 35 bp, Artificial Sequence
  Synthetic oligonucleotide
gcggttggcgggaaaactcgcaggagggaggagca

SEQ ID NO: 228752 - DNA, 30 bp, Artificial Sequence
  Synthetic oligonucleotide
gaatgtagttccaccgctcagctaggagca

SEQ ID NO: 228753 - DNA, 30 bp, Artificial Sequence
  Synthetic oligonucleotide
ttccaattttggatatgtagaaccggagca

SEQ ID NO: 228754 - DNA, 30 bp, Artificial Sequence
  Synthetic oligonucleotide
atgaacttcggcatgcaaatactcggagca

SEQ ID NO: 228755 - DNA, 30 bp, Artificial Sequence
  Synthetic oligonucleotide
tgtatctaccgctaggttatgacgggagca

SEQ ID NO: 228756 - DNA, 30 bp, Artificial Sequence
  Synthetic oligonucleotide
aagcatcacgagttgtgtattgttggagca

SEQ ID NO: 228757 - DNA, 30 bp, Artificial Sequence
  Synthetic oligonucleotide
aatgtaggagccctttgctctgactgagca

SEQ ID NO: 228758 - DNA, 30 bp, Artificial Sequence
  Synthetic oligonucleotide
agaaagtattttggccactccaagtgagca

SEQ ID NO: 228759 - DNA, 30 bp, Artificial Sequence
  Synthetic oligonucleotide
tcggggagcagtggttttaaagtttgagca

SEQ ID NO: 228760 - DNA, 30 bp, Artificial Sequence
  Synthetic oligonucleotide
attaaggctaaatctgaagagttaatagca

SEQ ID NO: 228761 - DNA, 30 bp, Artificial Sequence
  Synthetic oligonucleotide
tatagagagcgtaaggtctgtcatatagca

SEQ ID NO: 228762 - DNA, 30 bp, Artificial Sequence
  Synthetic oligonucleotide
aaagaccgacccccatgccatgatatagca

SEQ ID NO: 228763 - DNA, 30 bp, Artificial Sequence
  Synthetic oligonucleotide
ggtgaccgacttcgaggttttacactagca

SEQ ID NO: 228764 - DNA, 30 bp, Artificial Sequence
  Synthetic oligonucleotide
gatactgagttaactccctctagactagca

SEQ ID NO: 228765 - DNA, 30 bp, Artificial Sequence
  Synthetic oligonucleotide
gtccatatacaaaaaaaggcttgcctagca

SEQ ID NO: 228766 - DNA, 30 bp, Artificial Sequence
  Synthetic oligonucleotide
acgacgtaacgctcgggccccgagctagca

SEQ ID NO: 228767 - DNA, 30 bp, Artificial Sequence
  Synthetic oligonucleotide
gggactgtgaacagggcgcacgggctagca

SEQ ID NO: 228768 - DNA, 30 bp, Artificial Sequence
  Synthetic oligonucleotide
atgggtacctgttgtgccgtgcatctagca

SEQ ID NO: 228769 - DNA, 30 bp, Artificial Sequence
  Synthetic oligonucleotide
taacttcacgggtgaaggcgtattctagca

SEQ ID NO: 228770 - DNA, 30 bp, Artificial Sequence
  Synthetic oligonucleotide
ggtcgcacgccataagtctggtagttagca

SEQ ID NO: 228771 - DNA, 30 bp, Artificial Sequence
  Synthetic oligonucleotide
ggcggcgcattgaattggttggggttagca

SEQ ID NO: 228772 - DNA, 30 bp, Artificial Sequence
  Synthetic oligonucleotide
agagagggtttaaatttactggctttagca

SEQ ID NO: 228773 - DNA, 30 bp, Artificial Sequence
  Synthetic oligonucleotide
acgaattagttcagctcataaagaaacgca

SEQ ID NO: 228774 - DNA, 30 bp, Artificial Sequence
  Synthetic oligonucleotide
ggactcacttccaaaaggaagacgaacgca

SEQ ID NO: 228775 - DNA, 30 bp, Artificial Sequence
  Synthetic oligonucleotide
tgggtggtgcgacggtagtcggggaacgca

SEQ ID NO: 228776 - DNA, 30 bp, Artificial Sequence
  Synthetic oligonucleotide
agatggagcaatgcctggcgagtgaacgca

SEQ ID NO: 228777 - DNA, 30 bp, Artificial Sequence
  Synthetic oligonucleotide
tctatcagagcgtatgcggaatagcacgca

SEQ ID NO: 228778 - DNA, 30 bp, Artificial Sequence
  Synthetic oligonucleotide
tgtcattctggcgggggaggcacgcacgca

SEQ ID NO: 228779 - DNA, 30 bp, Artificial Sequence
  Synthetic oligonucleotide
cgcaatactcacacattttggagtcacgca

SEQ ID NO: 228780 - DNA, 30 bp, Artificial Sequence
  Synthetic oligonucleotide
ggcagccatccagccaagtacaaagacgca

SEQ ID NO: 228781 - DNA, 30 bp, Artificial Sequence
  Synthetic oligonucleotide
ccaagataccgagcgttgagagtcgacgca

SEQ ID NO: 228782 - DNA, 30 bp, Artificial Sequence
  Synthetic oligonucleotide
actagatgtttagtacttacatcatacgca

SEQ ID NO: 228783 - DNA, 30 bp, Artificial Sequence
  Synthetic oligonucleotide
ctccgaattcattagggaaaaaactacgca

SEQ ID NO: 228784 - DNA, 30 bp, Artificial Sequence
  Synthetic oligonucleotide
ggagatagtttgacgcgtactaattacgca

SEQ ID NO: 228785 - DNA, 30 bp, Artificial Sequence
  Synthetic oligonucleotide
aggaatgtgcgtatagtgattagttacgca

SEQ ID NO: 228786 - DNA, 30 bp, Artificial Sequence
  Synthetic oligonucleotide
ctgtccctaacctcaaggactgcaaccgca

SEQ ID NO: 228787 - DNA, 30 bp, Artificial Sequence
  Synthetic oligonucleotide
gcaggcttccggaacctcgacagaaccgca

SEQ ID NO: 228788 - DNA, 30 bp, Artificial Sequence
  Synthetic oligonucleotide
cactagtccatactagccatgctaaccgca

SEQ ID NO: 228789 - DNA, 30 bp, Artificial Sequence
  Synthetic oligonucleotide
ctagtctggtcctaagtaagattcaccgca

SEQ ID NO: 228790 - DNA, 30 bp, Artificial Sequence
  Synthetic oligonucleotide
gcggttcaatactctgggcatcataccgca

SEQ ID NO: 228791 - DNA, 30 bp, Artificial Sequence
  Synthetic oligonucleotide
agatacaggcaacggaatggatatgccgca

SEQ ID NO: 228792 - DNA, 37 bp, Artificial Sequence
  Synthetic oligonucleotide
gccgcagagttccgcaaagatagaagtgtgtgccgca

SEQ ID NO: 228793 - DNA, 30 bp, Artificial Sequence
  Synthetic oligonucleotide
tcggtagaccgcgcggccaccccaagcgca

SEQ ID NO: 228794 - DNA, 30 bp, Artificial Sequence
  Synthetic oligonucleotide
gatggcattccgggtccatattacagcgca

SEQ ID NO: 228795 - DNA, 30 bp, Artificial Sequence
  Synthetic oligonucleotide
ggtatatgaagcgggcgagtccccagcgca

SEQ ID NO: 228796 - DNA, 30 bp, Artificial Sequence
  Synthetic oligonucleotide
catcagcgcccgacaactcaggccagcgca

SEQ ID NO: 228797 - DNA, 30 bp, Artificial Sequence
  Synthetic oligonucleotide
gatataaccaaaatcgtatatcaacgcgca

SEQ ID NO: 228798 - DNA, 30 bp, Artificial Sequence
  Synthetic oligonucleotide
cgttcttcatgggaagcagccgaacgcgca

SEQ ID NO: 228799 - DNA, 30 bp, Artificial Sequence
  Synthetic oligonucleotide
attacctcacgacaactaacgaggcgcgca

SEQ ID NO: 228800 - DNA, 30 bp, Artificial Sequence
  Synthetic oligonucleotide
atccgacttcgccggggtggatacggcgca

SEQ ID NO: 228801 - DNA, 30 bp, Artificial Sequence
  Synthetic oligonucleotide
agacatagtccatgacggttgcatggcgca

SEQ ID NO: 228802 - DNA, 30 bp, Artificial Sequence
  Synthetic oligonucleotide
taaggggggcgaatagagtcaagtggcgca

SEQ ID NO: 228803 - DNA, 30 bp, Artificial Sequence
  Synthetic oligonucleotide
aaagagggaagaaaagaaatgcttggcgca

SEQ ID NO: 228804 - DNA, 30 bp, Artificial Sequence
  Synthetic oligonucleotide
ggttcggatacgtggtttcacacatgcgca

SEQ ID NO: 228805 - DNA, 30 bp, Artificial Sequence
  Synthetic oligonucleotide
gtcagcgacttggggaactagtcctgcgca

SEQ ID NO: 228806 - DNA, 30 bp, Artificial Sequence
  Synthetic oligonucleotide
acgcgaatcaattaatgttatatctgcgca

SEQ ID NO: 228807 - DNA, 30 bp, Artificial Sequence
  Synthetic oligonucleotide
taacgtgcatccgtccatgttgattgcgca

SEQ ID NO: 228808 - DNA, 30 bp, Artificial Sequence
  Synthetic oligonucleotide
caccgaaggtgcgtttcgatagtttgcgca

SEQ ID NO: 228809 - DNA, 31 bp, Artificial Sequence
  Synthetic oligonucleotide
cagttcattgcagccacctaaaagaatcgca

SEQ ID NO: 228810 - DNA, 30 bp, Artificial Sequence
  Synthetic oligonucleotide
tgataagggaccctgacgcacctaatcgca

SEQ ID NO: 228811 - DNA, 30 bp, Artificial Sequence
  Synthetic oligonucleotide
agaccaataccggggctacgttacatcgca

SEQ ID NO: 228812 - DNA, 30 bp, Artificial Sequence
  Synthetic oligonucleotide
aaggttcaaatttcaatccgggtgatcgca

SEQ ID NO: 228813 - DNA, 30 bp, Artificial Sequence
  Synthetic oligonucleotide
tgtatgctaaacttggccagtaatatcgca

SEQ ID NO: 228814 - DNA, 30 bp, Artificial Sequence
  Synthetic oligonucleotide
acctccgaaccggatggagcggtactcgca

SEQ ID NO: 228815 - DNA, 30 bp, Artificial Sequence
  Synthetic oligonucleotide
caggacctgagcttaagtccgcaagtcgca

SEQ ID NO: 228816 - DNA, 30 bp, Artificial Sequence
  Synthetic oligonucleotide
atcagcttgtaacagcaccatgaagtcgca

SEQ ID NO: 228817 - DNA, 30 bp, Artificial Sequence
  Synthetic oligonucleotide
tcttatcgaacatcctgccggggagtcgca

SEQ ID NO: 228818 - DNA, 30 bp, Artificial Sequence
  Synthetic oligonucleotide
tgtcgcggctttatagattggggagtcgca

SEQ ID NO: 228819 - DNA, 30 bp, Artificial Sequence
  Synthetic oligonucleotide
atgcctgacattatttgctcaacggtcgca

SEQ ID NO: 228820 - DNA, 30 bp, Artificial Sequence
  Synthetic oligonucleotide
gaaatttctgacgacatctcgtgtgtcgca

SEQ ID NO: 228821 - DNA, 30 bp, Artificial Sequence
  Synthetic oligonucleotide
gaacgtcctgcgctgtggttttaattcgca

SEQ ID NO: 228822 - DNA, 30 bp, Artificial Sequence
  Synthetic oligonucleotide
tatttttgctggaggacaggcagtttcgca

SEQ ID NO: 228823 - DNA, 30 bp, Artificial Sequence
  Synthetic oligonucleotide
gggcatagccgctacgaccacggtttcgca

SEQ ID NO: 228824 - DNA, 30 bp, Artificial Sequence
  Synthetic oligonucleotide
aacggcgcgtctaagacgcctcttttcgca

SEQ ID NO: 228825 - DNA, 30 bp, Artificial Sequence
  Synthetic oligonucleotide
atatcgcgaacgttgcttaagtaaaaggca

SEQ ID NO: 228826 - DNA, 30 bp, Artificial Sequence
  Synthetic oligonucleotide
gagtctgcaagattcggatacgacaaggca

SEQ ID NO: 228827 - DNA, 30 bp, Artificial Sequence
  Synthetic oligonucleotide
tgtggcatgattagacctgaacccaaggca

SEQ ID NO: 228828 - DNA, 30 bp, Artificial Sequence
  Synthetic oligonucleotide
acacatcggctagctgcccgccgcaaggca

SEQ ID NO: 228829 - DNA, 30 bp, Artificial Sequence
  Synthetic oligonucleotide
atgaggaagtgcgtaggagttgggaaggca

SEQ ID NO: 228830 - DNA, 30 bp, Artificial Sequence
  Synthetic oligonucleotide
agccaagcttctctgcttggttataaggca

SEQ ID NO: 228831 - DNA, 30 bp, Artificial Sequence
  Synthetic oligonucleotide
aatgaaaggaccttgcatagcaaacaggca

SEQ ID NO: 228832 - DNA, 30 bp, Artificial Sequence
  Synthetic oligonucleotide
tataaggtaatgccagtatggacacaggca

SEQ ID NO: 228833 - DNA, 30 bp, Artificial Sequence
  Synthetic oligonucleotide
actttgcataggagccgccaggagcaggca

SEQ ID NO: 228834 - DNA, 30 bp, Artificial Sequence
  Synthetic oligonucleotide
cggaaaatccttttgctatgttgtcaggca

SEQ ID NO: 228835 - DNA, 30 bp, Artificial Sequence
  Synthetic oligonucleotide
agattcatgccatcataccgaaaagaggca

SEQ ID NO: 228836 - DNA, 30 bp, Artificial Sequence
  Synthetic oligonucleotide
catgtgaatttgatgtaggcgttagaggca

SEQ ID NO: 228837 - DNA, 30 bp, Artificial Sequence
  Synthetic oligonucleotide
gaaagcaatcagcctagcatgcacgaggca

SEQ ID NO: 228838 - DNA, 30 bp, Artificial Sequence
  Synthetic oligonucleotide
ccgacgttggccagatagggcttcgaggca

SEQ ID NO: 228839 - DNA, 30 bp, Artificial Sequence
  Synthetic oligonucleotide
ttcaacattattttacacgagtcggaggca

SEQ ID NO: 228840 - DNA, 30 bp, Artificial Sequence
  Synthetic oligonucleotide
tccataacacggagcggaccccctgaggca

SEQ ID NO: 228841 - DNA, 30 bp, Artificial Sequence
  Synthetic oligonucleotide
tgtaggtgatggttgattcgcgctgaggca

SEQ ID NO: 228842 - DNA, 30 bp, Artificial Sequence
  Synthetic oligonucleotide
ctcgttatacgcgaactgtgctctgaggca

SEQ ID NO: 228843 - DNA, 30 bp, Artificial Sequence
  Synthetic oligonucleotide
ttagttgctgggcgcttcctgaaataggca

SEQ ID NO: 228844 - DNA, 30 bp, Artificial Sequence
  Synthetic oligonucleotide
cttggtactaaccaacgtggataataggca

SEQ ID NO: 228845 - DNA, 30 bp, Artificial Sequence
  Synthetic oligonucleotide
tgcgaagcttgtcttatccggtactaggca

SEQ ID NO: 228846 - DNA, 30 bp, Artificial Sequence
  Synthetic oligonucleotide
tagcactggtcaattatgaaaacctaggca

SEQ ID NO: 228847 - DNA, 30 bp, Artificial Sequence
  Synthetic oligonucleotide
ttacttggttatcacacgttaccctaggca

SEQ ID NO: 228848 - DNA, 30 bp, Artificial Sequence
  Synthetic oligonucleotide
actacgaaattgaacgttctgaaaacggca

SEQ ID NO: 228849 - DNA, 30 bp, Artificial Sequence
  Synthetic oligonucleotide
tccgacacttgggcaggcttgaaaacggca

SEQ ID NO: 228850 - DNA, 30 bp, Artificial Sequence
  Synthetic oligonucleotide
tcataagccgtaatactatgtcaaacggca

SEQ ID NO: 228851 - DNA, 30 bp, Artificial Sequence
  Synthetic oligonucleotide
gggaccgcatgtacgtccataccaacggca

SEQ ID NO: 228852 - DNA, 30 bp, Artificial Sequence
  Synthetic oligonucleotide
gttaaaactgcccgttacactcccacggca

SEQ ID NO: 228853 - DNA, 30 bp, Artificial Sequence
  Synthetic oligonucleotide
gatacgtaaagttactctactcccacggca

SEQ ID NO: 228854 - DNA, 30 bp, Artificial Sequence
  Synthetic oligonucleotide
gattgtgaccctctggtctcgtcgacggca

SEQ ID NO: 228855 - DNA, 30 bp, Artificial Sequence
  Synthetic oligonucleotide
tagagatggcaagtgcaggatcatacggca

SEQ ID NO: 228856 - DNA, 30 bp, Artificial Sequence
  Synthetic oligonucleotide
ataccatccattagtaagaaacctacggca

SEQ ID NO: 228857 - DNA, 30 bp, Artificial Sequence
  Synthetic oligonucleotide
agaggtgacatgaagcgtgctttaccggca

SEQ ID NO: 228858 - DNA, 30 bp, Artificial Sequence
  Synthetic oligonucleotide
atctcgtgctaccggtcggaggcgccggca

SEQ ID NO: 228859 - DNA, 30 bp, Artificial Sequence
  Synthetic oligonucleotide
gtcttatgaatattaccgataaggccggca

SEQ ID NO: 228860 - DNA, 30 bp, Artificial Sequence
  Synthetic oligonucleotide
ttcgtgagatagaacccataatggccggca

SEQ ID NO: 228861 - DNA, 30 bp, Artificial Sequence
  Synthetic oligonucleotide
ggcgtaaggcaagcgttgagaattccggca

SEQ ID NO: 228862 - DNA, 30 bp, Artificial Sequence
  Synthetic oligonucleotide
ttacacgagacccctgtagggcgagcggca

SEQ ID NO: 228863 - DNA, 30 bp, Artificial Sequence
  Synthetic oligonucleotide
aactgtggctaagtaccctgctgcgcggca

SEQ ID NO: 228864 - DNA, 30 bp, Artificial Sequence
  Synthetic oligonucleotide
ttatttttatatagcccaaagcagtcggca

SEQ ID NO: 228865 - DNA, 30 bp, Artificial Sequence
  Synthetic oligonucleotide
gtacaaagttcgtacccgcaaggttcggca

SEQ ID NO: 228866 - DNA, 30 bp, Artificial Sequence
  Synthetic oligonucleotide
aagccccgagattcaagactgttcagggca

SEQ ID NO: 228867 - DNA, 31 bp, Artificial Sequence
  Synthetic oligonucleotide
gtgataggcaggtatgagcatttagagggca

SEQ ID NO: 228868 - DNA, 30 bp, Artificial Sequence
  Synthetic oligonucleotide
tatctgagtctagcggtcgggaggagggca

SEQ ID NO: 228869 - DNA, 30 bp, Artificial Sequence
  Synthetic oligonucleotide
caggctcccctaaaaatacttatgagggca

SEQ ID NO: 228870 - DNA, 30 bp, Artificial Sequence
  Synthetic oligonucleotide
ttatttaaagccaattcgtaaaaacgggca

SEQ ID NO: 228871 - DNA, 30 bp, Artificial Sequence
  Synthetic oligonucleotide
acctcgtcgtgctcgatggccgcccgggca

SEQ ID NO: 228872 - DNA, 30 bp, Artificial Sequence
  Synthetic oligonucleotide
gggggttccttcaagcttttatgccgggca

SEQ ID NO: 228873 - DNA, 30 bp, Artificial Sequence
  Synthetic oligonucleotide
gaggacagtctagacacggacgtccgggca

SEQ ID NO: 228874 - DNA, 30 bp, Artificial Sequence
  Synthetic oligonucleotide
attggtggtgttggagcaagacaaggggca

SEQ ID NO: 228875 - DNA, 30 bp, Artificial Sequence
  Synthetic oligonucleotide
cggcaaacacgagagcatggtgcaggggca

SEQ ID NO: 228876 - DNA, 30 bp, Artificial Sequence
  Synthetic oligonucleotide
aattcttggcctaacgtagattccggggca

SEQ ID NO: 228877 - DNA, 30 bp, Artificial Sequence
  Synthetic oligonucleotide
tattgtcaggggggacttagatgcggggca

SEQ ID NO: 228878 - DNA, 30 bp, Artificial Sequence
  Synthetic oligonucleotide
ggcggctaaggtggtaccacgtgcggggca

SEQ ID NO: 228879 - DNA, 30 bp, Artificial Sequence
  Synthetic oligonucleotide
atctaactgctggtgctaggcaagggggca

SEQ ID NO: 228880 - DNA, 30 bp, Artificial Sequence
  Synthetic oligonucleotide
aaggaacttaactgacttgtgacgggggca

SEQ ID NO: 228881 - DNA, 30 bp, Artificial Sequence
  Synthetic oligonucleotide
tcagggtttagtcaggccttcgcgggggca

SEQ ID NO: 228882 - DNA, 30 bp, Artificial Sequence
  Synthetic oligonucleotide
taccaggtgaatacgtacgatcggggggca

SEQ ID NO: 228883 - DNA, 30 bp, Artificial Sequence
  Synthetic oligonucleotide
agctcgttagttctaagtccatggggggca

SEQ ID NO: 228884 - DNA, 30 bp, Artificial Sequence
  Synthetic oligonucleotide
gccatgggtaaaacgaccgtgcttggggca

SEQ ID NO: 228885 - DNA, 30 bp, Artificial Sequence
  Synthetic oligonucleotide
cctagtgtgttaaccagtaggtactgggca

SEQ ID NO: 228886 - DNA, 30 bp, Artificial Sequence
  Synthetic oligonucleotide
gaggtgtaaaaaaaagatacaccctgggca

SEQ ID NO: 228887 - DNA, 30 bp, Artificial Sequence
  Synthetic oligonucleotide
aagactacattgtgagtgatttcctgggca

SEQ ID NO: 228888 - DNA, 30 bp, Artificial Sequence
  Synthetic oligonucleotide
gccccagatagatcattatagcgctgggca

SEQ ID NO: 228889 - DNA, 30 bp, Artificial Sequence
  Synthetic oligonucleotide
gttagtaagactacggaaatcaattgggca

SEQ ID NO: 228890 - DNA, 30 bp, Artificial Sequence
  Synthetic oligonucleotide
tcgacccttaagtttcaacttcaaatggca

SEQ ID NO: 228891 - DNA, 30 bp, Artificial Sequence
  Synthetic oligonucleotide
ataagagttcgcgcacctggcttaatggca

SEQ ID NO: 228892 - DNA, 30 bp, Artificial Sequence
  Synthetic oligonucleotide
cccggaggcttatcagcactgttaatggca

SEQ ID NO: 228893 - DNA, 30 bp, Artificial Sequence
  Synthetic oligonucleotide
tgaatgggtcaaaccttaagaatcatggca

SEQ ID NO: 228894 - DNA, 30 bp, Artificial Sequence
  Synthetic oligonucleotide
cgcttaaggcatgtattaaggaagatggca

SEQ ID NO: 228895 - DNA, 31 bp, Artificial Sequence
  Synthetic oligonucleotide
gtgtccggtttagtaggtccaaaggatggca

SEQ ID NO: 228896 - DNA, 30 bp, Artificial Sequence
  Synthetic oligonucleotide
gtctgcaataaaccaatcttacgtatggca

SEQ ID NO: 228897 - DNA, 30 bp, Artificial Sequence
  Synthetic oligonucleotide
gttgcggtatccaaggccaatcgtatggca

SEQ ID NO: 228898 - DNA, 30 bp, Artificial Sequence
  Synthetic oligonucleotide
ataaagctaatggtacatggaggcctggca

SEQ ID NO: 228899 - DNA, 30 bp, Artificial Sequence
  Synthetic oligonucleotide
ttggcgtctgtacccattatcagtctggca

SEQ ID NO: 228900 - DNA, 30 bp, Artificial Sequence
  Synthetic oligonucleotide
taccaaatgttgaccaagcgccgtctggca

SEQ ID NO: 228901 - DNA, 30 bp, Artificial Sequence
  Synthetic oligonucleotide
ccgtcctgcggttggatgcctcaagtggca

SEQ ID NO: 228902 - DNA, 30 bp, Artificial Sequence
  Synthetic oligonucleotide
agcatgacattattgttacggtaagtggca

SEQ ID NO: 228903 - DNA, 30 bp, Artificial Sequence
  Synthetic oligonucleotide
gtcttggcctgatgccaggattgagtggca

SEQ ID NO: 228904 - DNA, 30 bp, Artificial Sequence
  Synthetic oligonucleotide
tagaggtgtataatcaccgctgtagtggca

SEQ ID NO: 228905 - DNA, 30 bp, Artificial Sequence
  Synthetic oligonucleotide
aaatagttctgctcgcacaataacgtggca

SEQ ID NO: 228906 - DNA, 30 bp, Artificial Sequence
  Synthetic oligonucleotide
catactgtccgcgtctagtatatcgtggca

SEQ ID NO: 228907 - DNA, 30 bp, Artificial Sequence
  Synthetic oligonucleotide
cccccgctgagtacgagtgaaaaggtggca

SEQ ID NO: 228908 - DNA, 29 bp, Artificial Sequence
  Synthetic oligonucleotide
ttaaaatgctgtagcccaggcgggtggca

SEQ ID NO: 228909 - DNA, 30 bp, Artificial Sequence
  Synthetic oligonucleotide
tggggcaatataagacttctaaacttggca

SEQ ID NO: 228910 - DNA, 30 bp, Artificial Sequence
  Synthetic oligonucleotide
ggttactatatgggattgcgggccttggca

SEQ ID NO: 228911 - DNA, 30 bp, Artificial Sequence
  Synthetic oligonucleotide
attggattggattgccattgctccttggca

SEQ ID NO: 228912 - DNA, 30 bp, Artificial Sequence
  Synthetic oligonucleotide
gcgtggtcatggttgatgctacagttggca

SEQ ID NO: 228913 - DNA, 30 bp, Artificial Sequence
  Synthetic oligonucleotide
agtttgacatgtgtaaggcaatagttggca

SEQ ID NO: 228914 - DNA, 30 bp, Artificial Sequence
  Synthetic oligonucleotide
acctatcgtagactgtctacgcggttggca

SEQ ID NO: 228915 - DNA, 30 bp, Artificial Sequence
  Synthetic oligonucleotide
gtcagtcaaacactatgtgaaaaaaatgca

SEQ ID NO: 228916 - DNA, 30 bp, Artificial Sequence
  Synthetic oligonucleotide
tgcaccgggcaaacggggaattacaatgca

SEQ ID NO: 228917 - DNA, 30 bp, Artificial Sequence
  Synthetic oligonucleotide
atgaatttgtcgctgaggataaccaatgca

SEQ ID NO: 228918 - DNA, 30 bp, Artificial Sequence
  Synthetic oligonucleotide
cggacgctttatgccgtatgagagaatgca

SEQ ID NO: 228919 - DNA, 30 bp, Artificial Sequence
  Synthetic oligonucleotide
cgaaatgtatcacggcctgccccgaatgca

SEQ ID NO: 228920 - DNA, 30 bp, Artificial Sequence
  Synthetic oligonucleotide
taaaaacggatcttaaatggaaggaatgca

SEQ ID NO: 228921 - DNA, 30 bp, Artificial Sequence
  Synthetic oligonucleotide
gggtcgctacgtagtgaaagacataatgca

SEQ ID NO: 228922 - DNA, 30 bp, Artificial Sequence
  Synthetic oligonucleotide
tggaactttagcatagttcagagtaatgca

SEQ ID NO: 228923 - DNA, 30 bp, Artificial Sequence
  Synthetic oligonucleotide
ttgtggacgtacccttctactgcacatgca

SEQ ID NO: 228924 - DNA, 30 bp, Artificial Sequence
  Synthetic oligonucleotide
actgcgacttggagagcacttgcccatgca

SEQ ID NO: 228925 - DNA, 30 bp, Artificial Sequence
  Synthetic oligonucleotide
atggaagcaagtacggtggtacgccatgca

SEQ ID NO: 228926 - DNA, 30 bp, Artificial Sequence
  Synthetic oligonucleotide
ggggacctcaaaattttaaaggttcatgca

SEQ ID NO: 228927 - DNA, 30 bp, Artificial Sequence
  Synthetic oligonucleotide
attcgatgttcgtaacgtgtaagagatgca

SEQ ID NO: 228928 - DNA, 30 bp, Artificial Sequence
  Synthetic oligonucleotide
atcattactaagagaactctgagggatgca

SEQ ID NO: 228929 - DNA, 30 bp, Artificial Sequence
  Synthetic oligonucleotide
agtaacaagaaccaaacccggcggtatgca

SEQ ID NO: 228930 - DNA, 30 bp, Artificial Sequence
  Synthetic oligonucleotide
aaagcgtaaggcacttgtacagggtatgca

SEQ ID NO: 228931 - DNA, 30 bp, Artificial Sequence
  Synthetic oligonucleotide
agtcatatacaagacaatgtttacactgca

SEQ ID NO: 228932 - DNA, 30 bp, Artificial Sequence
  Synthetic oligonucleotide
aaggtacgggtttcctgagtttctactgca

SEQ ID NO: 228933 - DNA, 30 bp, Artificial Sequence
  Synthetic oligonucleotide
tggagtgcgcgtagatatagtgttactgca

SEQ ID NO: 228934 - DNA, 30 bp, Artificial Sequence
  Synthetic oligonucleotide
caggcgatcgtctatcccgcggaacctgca

SEQ ID NO: 228935 - DNA, 30 bp, Artificial Sequence
  Synthetic oligonucleotide
ggaaccaattggctgattaggccccctgca

SEQ ID NO: 228936 - DNA, 30 bp, Artificial Sequence
  Synthetic oligonucleotide
ctagaatatcaaatgcgtgtcgggcctgca

SEQ ID NO: 228937 - DNA, 30 bp, Artificial Sequence
  Synthetic oligonucleotide
cataacgacgctaggcgcaaatatcctgca

SEQ ID NO: 228938 - DNA, 30 bp, Artificial Sequence
  Synthetic oligonucleotide
atgaatagggggattaatacgcgtcctgca

SEQ ID NO: 228939 - DNA, 30 bp, Artificial Sequence
  Synthetic oligonucleotide
taggtagtgtaaggtgggccagccgctgca

SEQ ID NO: 228940 - DNA, 30 bp, Artificial Sequence
  Synthetic oligonucleotide
tcggtttatgtggcgatagacgtcgctgca

SEQ ID NO: 228941 - DNA, 30 bp, Artificial Sequence
  Synthetic oligonucleotide
ggtcccgggaagacacggcgtttcgctgca

SEQ ID NO: 228942 - DNA, 30 bp, Artificial Sequence
  Synthetic oligonucleotide
gtttctgtggaaacgcataagcgggctgca

SEQ ID NO: 228943 - DNA, 30 bp, Artificial Sequence
  Synthetic oligonucleotide
catctgcccgccaccacgttggctgctgca

SEQ ID NO: 228944 - DNA, 30 bp, Artificial Sequence
  Synthetic oligonucleotide
gttcaaatagacttttacgtctgtgctgca

SEQ ID NO: 228945 - DNA, 30 bp, Artificial Sequence
  Synthetic oligonucleotide
catgcaagagttgatattttttaatctgca

SEQ ID NO: 228946 - DNA, 30 bp, Artificial Sequence
  Synthetic oligonucleotide
tgacagtgttatcaagaaacagtgtctgca

SEQ ID NO: 228947 - DNA, 30 bp, Artificial Sequence
  Synthetic oligonucleotide
ttcggtaagctcatttacgcaaattctgca

SEQ ID NO: 228948 - DNA, 30 bp, Artificial Sequence
  Synthetic oligonucleotide
caattttgcatggaagaacgaggttctgca

SEQ ID NO: 228949 - DNA, 30 bp, Artificial Sequence
  Synthetic oligonucleotide
gagcaggataatgcgatatggctcagtgca

SEQ ID NO: 228950 - DNA, 30 bp, Artificial Sequence
  Synthetic oligonucleotide
ctcgttacatacgtattataacagagtgca

SEQ ID NO: 228951 - DNA, 30 bp, Artificial Sequence
  Synthetic oligonucleotide
aacagcggcgataaacccatcgcgagtgca

SEQ ID NO: 228952 - DNA, 30 bp, Artificial Sequence
  Synthetic oligonucleotide
taatgagggaaggcacgacgttatagtgca

SEQ ID NO: 228953 - DNA, 30 bp, Artificial Sequence
  Synthetic oligonucleotide
attcgtaagtgcacactgccacctagtgca

SEQ ID NO: 228954 - DNA, 30 bp, Artificial Sequence
  Synthetic oligonucleotide
tgctccaggttttgcataccaagacgtgca

SEQ ID NO: 228955 - DNA, 30 bp, Artificial Sequence
  Synthetic oligonucleotide
ctcttaggtagcagttatatggtacgtgca

SEQ ID NO: 228956 - DNA, 30 bp, Artificial Sequence
  Synthetic oligonucleotide
gacgtatgccattatcctcagggccgtgca

SEQ ID NO: 228957 - DNA, 30 bp, Artificial Sequence
  Synthetic oligonucleotide
caggaaatggtaccgtctgctgggcgtgca

SEQ ID NO: 228958 - DNA, 30 bp, Artificial Sequence
  Synthetic oligonucleotide
gagtaccctatggtcgagcgccgtcgtgca

SEQ ID NO: 228959 - DNA, 30 bp, Artificial Sequence
  Synthetic oligonucleotide
atgatgatatgcgaatggacgtcaggtgca

SEQ ID NO: 228960 - DNA, 30 bp, Artificial Sequence
  Synthetic oligonucleotide
cgcaagggcttgctcggtcggcgaggtgca

SEQ ID NO: 228961 - DNA, 30 bp, Artificial Sequence
  Synthetic oligonucleotide
atttcgcaactaacaaaggcttccggtgca

SEQ ID NO: 228962 - DNA, 30 bp, Artificial Sequence
  Synthetic oligonucleotide
ctcagcgggtgttgtgttacggtgggtgca

SEQ ID NO: 228963 - DNA, 30 bp, Artificial Sequence
  Synthetic oligonucleotide
ttacttgctacaacattaccctgtggtgca

SEQ ID NO: 228964 - DNA, 30 bp, Artificial Sequence
  Synthetic oligonucleotide
ttcccattggtcggtaggtagacatgtgca

SEQ ID NO: 228965 - DNA, 30 bp, Artificial Sequence
  Synthetic oligonucleotide
ggcctgggcgggatttacggcagatgtgca

SEQ ID NO: 228966 - DNA, 30 bp, Artificial Sequence
  Synthetic oligonucleotide
taccgcagactcagagataggatatgtgca

SEQ ID NO: 228967 - DNA, 30 bp, Artificial Sequence
  Synthetic oligonucleotide
caatagtatagaagttaaagtcattgtgca

SEQ ID NO: 228968 - DNA, 30 bp, Artificial Sequence
  Synthetic oligonucleotide
gcaatcccggcgcgattgagagattgtgca

SEQ ID NO: 228969 - DNA, 30 bp, Artificial Sequence
  Synthetic oligonucleotide
gacggacggatgctatttctgagttgtgca

SEQ ID NO: 228970 - DNA, 30 bp, Artificial Sequence
  Synthetic oligonucleotide
acataatctagcgcccacatcaaaattgca

SEQ ID NO: 228971 - DNA, 31 bp, Artificial Sequence
  Synthetic oligonucleotide
acacagaattgtaacataaaaggcaattgca

SEQ ID NO: 228972 - DNA, 30 bp, Artificial Sequence
  Synthetic oligonucleotide
atggtcaatatatcgcaagtcggaattgca

SEQ ID NO: 228973 - DNA, 30 bp, Artificial Sequence
  Synthetic oligonucleotide
taaactgaatagcactggcaacccattgca

SEQ ID NO: 228974 - DNA, 30 bp, Artificial Sequence
  Synthetic oligonucleotide
gcgtgccatgcacaattcatttcgattgca

SEQ ID NO: 228975 - DNA, 30 bp, Artificial Sequence
  Synthetic oligonucleotide
atagatttatttatcgttggagcacttgca

SEQ ID NO: 228976 - DNA, 30 bp, Artificial Sequence
  Synthetic oligonucleotide
tggagttaaaaacgcacgattacgcttgca

SEQ ID NO: 228977 - DNA, 30 bp, Artificial Sequence
  Synthetic oligonucleotide
agccataagttcgaacgctatctgcttgca

SEQ ID NO: 228978 - DNA, 30 bp, Artificial Sequence
  Synthetic oligonucleotide
atgctgagttgctgtggacagggtcttgca

SEQ ID NO: 228979 - DNA, 30 bp, Artificial Sequence
  Synthetic oligonucleotide
tttacatgtagttatctcaatcttcttgca

SEQ ID NO: 228980 - DNA, 30 bp, Artificial Sequence
  Synthetic oligonucleotide
acataaatcgaatggcttccgtaagttgca

SEQ ID NO: 228981 - DNA, 30 bp, Artificial Sequence
  Synthetic oligonucleotide
ggaccttggtgattaagaattccagttgca

SEQ ID NO: 228982 - DNA, 30 bp, Artificial Sequence
  Synthetic oligonucleotide
gacacctgggaagccggactaaacgttgca

SEQ ID NO: 228983 - DNA, 30 bp, Artificial Sequence
  Synthetic oligonucleotide
cggtcgtcaaagagttacgcgatcgttgca

SEQ ID NO: 228984 - DNA, 30 bp, Artificial Sequence
  Synthetic oligonucleotide
gaggcgtactcgggaaccaagctcgttgca

SEQ ID NO: 228985 - DNA, 30 bp, Artificial Sequence
  Synthetic oligonucleotide
atctccatcctgagtgttagcaaggttgca

SEQ ID NO: 228986 - DNA, 30 bp, Artificial Sequence
  Synthetic oligonucleotide
gttgcacgaggactcctcgcgggggttgca

SEQ ID NO: 228987 - DNA, 30 bp, Artificial Sequence
  Synthetic oligonucleotide
cgtataggataggcatcatcacaatttgca

SEQ ID NO: 228988 - DNA, 30 bp, Artificial Sequence
  Synthetic oligonucleotide
ctgtggttcaaagtgggggtactatttgca

SEQ ID NO: 228989 - DNA, 30 bp, Artificial Sequence
  Synthetic oligonucleotide
attatcagtaggaatttgatccactttgca

SEQ ID NO: 228990 - DNA, 30 bp, Artificial Sequence
  Synthetic oligonucleotide
aacaatgaacgatctagtcccgactttgca

SEQ ID NO: 228991 - DNA, 30 bp, Artificial Sequence
  Synthetic oligonucleotide
cggcacacctcgctaccctctaggtttgca

SEQ ID NO: 228992 - DNA, 30 bp, Artificial Sequence
  Synthetic oligonucleotide
tcgtggactccgctgcgcatactttttgca

SEQ ID NO: 228993 - DNA, 30 bp, Artificial Sequence
  Synthetic oligonucleotide
aagatgtattgatgggacattgaaaaatca

SEQ ID NO: 228994 - DNA, 30 bp, Artificial Sequence
  Synthetic oligonucleotide
aaccggacgggggctgtacatacaaaatca

SEQ ID NO: 228995 - DNA, 30 bp, Artificial Sequence
  Synthetic oligonucleotide
cccatatttgtgagttaccgctagaaatca

SEQ ID NO: 228996 - DNA, 30 bp, Artificial Sequence
  Synthetic oligonucleotide
tccgcaacgaattccgaataaggtaaatca

SEQ ID NO: 228997 - DNA, 30 bp, Artificial Sequence
  Synthetic oligonucleotide
cacgcatgtgcaatgacctagattaaatca

SEQ ID NO: 228998 - DNA, 30 bp, Artificial Sequence
  Synthetic oligonucleotide
actgagactcgaacctcgagatttaaatca

SEQ ID NO: 228999 - DNA, 30 bp, Artificial Sequence
  Synthetic oligonucleotide
cgtccaattgagctacactcgcaacaatca

SEQ ID NO: 229000 - DNA, 30 bp, Artificial Sequence
  Synthetic oligonucleotide
tcgtgttaagaaggctactcgctacaatca

SEQ ID NO: 229001 - DNA, 30 bp, Artificial Sequence
  Synthetic oligonucleotide
gaatgtgtgtatcccttctcgttccaatca

SEQ ID NO: 229002 - DNA, 30 bp, Artificial Sequence
  Synthetic oligonucleotide
tcgtgatcaatatgacagccctcgcaatca

SEQ ID NO: 229003 - DNA, 30 bp, Artificial Sequence
  Synthetic oligonucleotide
taccacggatgagctgtgcctggtcaatca

SEQ ID NO: 229004 - DNA, 30 bp, Artificial Sequence
  Synthetic oligonucleotide
gttatcctactagcgttaccctttcaatca

SEQ ID NO: 229005 - DNA, 30 bp, Artificial Sequence
  Synthetic oligonucleotide
tcttgatgccatcttacgctgacagaatca

SEQ ID NO: 229006 - DNA, 30 bp, Artificial Sequence
  Synthetic oligonucleotide
aaaaatccggaccgcgaggaaatagaatca

SEQ ID NO: 229007 - DNA, 30 bp, Artificial Sequence
  Synthetic oligonucleotide
agctgcgctgatgcccaaaccttagaatca

SEQ ID NO: 229008 - DNA, 30 bp, Artificial Sequence
  Synthetic oligonucleotide
agggattctcttagggcccatcgggaatca

SEQ ID NO: 229009 - DNA, 30 bp, Artificial Sequence
  Synthetic oligonucleotide
cttggaatcaacaactatagtggggaatca

SEQ ID NO: 229010 - DNA, 30 bp, Artificial Sequence
  Synthetic oligonucleotide
aggaggcggcgcgtgcacttgggtgaatca

SEQ ID NO: 229011 - DNA, 30 bp, Artificial Sequence
  Synthetic oligonucleotide
tggcccgttacatgctgggtccgataatca

SEQ ID NO: 229012 - DNA, 30 bp, Artificial Sequence
  Synthetic oligonucleotide
acggaataagtatcctgtcttgcctaatca

SEQ ID NO: 229013 - DNA, 30 bp, Artificial Sequence
  Synthetic oligonucleotide
ggccaattggaaccgcttctatcctaatca

SEQ ID NO: 229014 - DNA, 30 bp, Artificial Sequence
  Synthetic oligonucleotide
cggaaagctcctcagggctgttcgtaatca

SEQ ID NO: 229015 - DNA, 30 bp, Artificial Sequence
  Synthetic oligonucleotide
gcatgcagcgctaggcggaccaggtaatca

SEQ ID NO: 229016 - DNA, 30 bp, Artificial Sequence
  Synthetic oligonucleotide
aaggtgggtttacactgccaggaaacatca

SEQ ID NO: 229017 - DNA, 30 bp, Artificial Sequence
  Synthetic oligonucleotide
cagagacctgcaggtcgatagttaacatca

SEQ ID NO: 229018 - DNA, 30 bp, Artificial Sequence
  Synthetic oligonucleotide
agacatccgagttgttgtataagcacatca

SEQ ID NO: 229019 - DNA, 30 bp, Artificial Sequence
  Synthetic oligonucleotide
gtagtgggccaaggaatggcctcgacatca

SEQ ID NO: 229020 - DNA, 30 bp, Artificial Sequence
  Synthetic oligonucleotide
ggatgcattggacgcgcgacagcaccatca

SEQ ID NO: 229021 - DNA, 30 bp, Artificial Sequence
  Synthetic oligonucleotide
gttcgtggttcacggtaactagcaccatca

SEQ ID NO: 229022 - DNA, 30 bp, Artificial Sequence
  Synthetic oligonucleotide
gactaaatgtctaaataggagtatccatca

SEQ ID NO: 229023 - DNA, 30 bp, Artificial Sequence
  Synthetic oligonucleotide
cctcaaggggttcaaagctttaacgcatca

SEQ ID NO: 229024 - DNA, 30 bp, Artificial Sequence
  Synthetic oligonucleotide
ctcctagtattcgattatataaccgcatca

SEQ ID NO: 229025 - DNA, 30 bp, Artificial Sequence
  Synthetic oligonucleotide
tagggagaatcattgtagcaaagcgcatca

SEQ ID NO: 229026 - DNA, 30 bp, Artificial Sequence
  Synthetic oligonucleotide
tagttaacgacgtgggtgacgaaggcatca

SEQ ID NO: 229027 - DNA, 30 bp, Artificial Sequence
  Synthetic oligonucleotide
ggtggggtaacgaccgtcacataatcatca

SEQ ID NO: 229028 - DNA, 30 bp, Artificial Sequence
  Synthetic oligonucleotide
gagttaaggtggttccattcaaactcatca

SEQ ID NO: 229029 - DNA, 30 bp, Artificial Sequence
  Synthetic oligonucleotide
catctatcgcgtaggaattagtactcatca

SEQ ID NO: 229030 - DNA, 30 bp, Artificial Sequence
  Synthetic oligonucleotide
cgatgtgttcatcaattgatcacctcatca

SEQ ID NO: 229031 - DNA, 30 bp, Artificial Sequence
  Synthetic oligonucleotide
aaactctccaggcctcgtcaagcgtcatca

SEQ ID NO: 229032 - DNA, 30 bp, Artificial Sequence
  Synthetic oligonucleotide
cataaatcttcgaaaaaacgtaatagatca

SEQ ID NO: 229033 - DNA, 30 bp, Artificial Sequence
  Synthetic oligonucleotide
ctttgtggcagagatgctggaacacgatca

SEQ ID NO: 229034 - DNA, 30 bp, Artificial Sequence
  Synthetic oligonucleotide
gtgtttatcggtgaatcaaccctacgatca

SEQ ID NO: 229035 - DNA, 30 bp, Artificial Sequence
  Synthetic oligonucleotide
tccaaataacggaatgtgttcttacgatca

SEQ ID NO: 229036 - DNA, 30 bp, Artificial Sequence
  Synthetic oligonucleotide
gaaggcgaggcaggaaagggaaaccgatca

SEQ ID NO: 229037 - DNA, 30 bp, Artificial Sequence
  Synthetic oligonucleotide
ctggagaatgtaaatgaggaggtgcgatca

SEQ ID NO: 229038 - DNA, 30 bp, Artificial Sequence
  Synthetic oligonucleotide
gctccgagatcgttcttagaagttcgatca

SEQ ID NO: 229039 - DNA, 30 bp, Artificial Sequence
  Synthetic oligonucleotide
cttactgattacgattttactcgaggatca

SEQ ID NO: 229040 - DNA, 31 bp, Artificial Sequence
  Synthetic oligonucleotide
catatgtggttttaacgaccctcacggatca

SEQ ID NO: 229041 - DNA, 30 bp, Artificial Sequence
  Synthetic oligonucleotide
ccacggtgagagtgagcggataggggatca

SEQ ID NO: 229042 - DNA, 30 bp, Artificial Sequence
  Synthetic oligonucleotide
acatctcgccagcgtgtcgcatatggatca

SEQ ID NO: 229043 - DNA, 30 bp, Artificial Sequence
  Synthetic oligonucleotide
gggaccatagggcacaaagaggttggatca

SEQ ID NO: 229044 - DNA, 30 bp, Artificial Sequence
  Synthetic oligonucleotide
gcaccgcatgacccattcactcactgatca

SEQ ID NO: 229045 - DNA, 30 bp, Artificial Sequence
  Synthetic oligonucleotide
atacacgcatgcacgagggagctctgatca

SEQ ID NO: 229046 - DNA, 30 bp, Artificial Sequence
  Synthetic oligonucleotide
cttaaggaacatagatcgggtgtgtgatca

SEQ ID NO: 229047 - DNA, 30 bp, Artificial Sequence
  Synthetic oligonucleotide
gagtagcgggaatcggcaacctcaatatca

SEQ ID NO: 229048 - DNA, 30 bp, Artificial Sequence
  Synthetic oligonucleotide
agttcgccagcaggctaagcaaccatatca

SEQ ID NO: 229049 - DNA, 30 bp, Artificial Sequence
  Synthetic oligonucleotide
ttaggaaacagcattagtagaaatatatca

SEQ ID NO: 229050 - DNA, 30 bp, Artificial Sequence
  Synthetic oligonucleotide
taataggtgatggccagggacagtatatca

SEQ ID NO: 229051 - DNA, 31 bp, Artificial Sequence
  Synthetic oligonucleotide
cggggggtggcagtcaagagatggtatatca

SEQ ID NO: 229052 - DNA, 30 bp, Artificial Sequence
  Synthetic oligonucleotide
acattgatctggcctaatagcagactatca

SEQ ID NO: 229053 - DNA, 30 bp, Artificial Sequence
  Synthetic oligonucleotide
ggtgagcgaagcagaaagcggatgctatca

SEQ ID NO: 229054 - DNA, 30 bp, Artificial Sequence
  Synthetic oligonucleotide
ggtgctacaattgtcgacggctacgtatca

SEQ ID NO: 229055 - DNA, 30 bp, Artificial Sequence
  Synthetic oligonucleotide
ttgcatcagccatctggttctaccgtatca

SEQ ID NO: 229056 - DNA, 30 bp, Artificial Sequence
  Synthetic oligonucleotide
tggtttcaacgagaaataacggccgtatca

SEQ ID NO: 229057 - DNA, 30 bp, Artificial Sequence
  Synthetic oligonucleotide
cggtttgtgccctcgctattcgctgtatca

SEQ ID NO: 229058 - DNA, 30 bp, Artificial Sequence
  Synthetic oligonucleotide
aacgtaccgacttactatgctagtgtatca

SEQ ID NO: 229059 - DNA, 30 bp, Artificial Sequence
  Synthetic oligonucleotide
atccaatggtggtatgggtcgtaattatca

SEQ ID NO: 229060 - DNA, 30 bp, Artificial Sequence
  Synthetic oligonucleotide
tactcgagagggcgcatcgccttattatca

SEQ ID NO: 229061 - DNA, 30 bp, Artificial Sequence
  Synthetic oligonucleotide
aatgccgatatgtgtcggcctcccttatca

SEQ ID NO: 229062 - DNA, 30 bp, Artificial Sequence
  Synthetic oligonucleotide
ggatagctcaggatatgtcgtcccttatca

SEQ ID NO: 229063 - DNA, 30 bp, Artificial Sequence
  Synthetic oligonucleotide
gcgtgatattaacgcgcaatgtccttatca

SEQ ID NO: 229064 - DNA, 30 bp, Artificial Sequence
  Synthetic oligonucleotide
atgctgcactacgagtcgctagctttatca

SEQ ID NO: 229065 - DNA, 30 bp, Artificial Sequence
  Synthetic oligonucleotide
tgtgtgtgaaccccacatgaaagaaactca

SEQ ID NO: 229066 - DNA, 30 bp, Artificial Sequence
  Synthetic oligonucleotide
tcacagaaaatagtggtggtgttaaactca

SEQ ID NO: 229067 - DNA, 30 bp, Artificial Sequence
  Synthetic oligonucleotide
tccgttgtcatgatttattatcagaactca

SEQ ID NO: 229068 - DNA, 30 bp, Artificial Sequence
  Synthetic oligonucleotide
tatggggttgggtgtctctacgcgaactca

SEQ ID NO: 229069 - DNA, 30 bp, Artificial Sequence
  Synthetic oligonucleotide
cctataccgcgatcactaccgtcgaactca

SEQ ID NO: 229070 - DNA, 30 bp, Artificial Sequence
  Synthetic oligonucleotide
ccttgatcgggcctagcgcaaaataactca

SEQ ID NO: 229071 - DNA, 30 bp, Artificial Sequence
  Synthetic oligonucleotide
cactcactgacgcatgctcgtcaacactca

SEQ ID NO: 229072 - DNA, 30 bp, Artificial Sequence
  Synthetic oligonucleotide
cttgggtagatcctggtttgagcacactca

SEQ ID NO: 229073 - DNA, 30 bp, Artificial Sequence
  Synthetic oligonucleotide
agcaggtgggtatatggtatcaggcactca

SEQ ID NO: 229074 - DNA, 30 bp, Artificial Sequence
  Synthetic oligonucleotide
ctcgcatattatagactccatgaagactca

SEQ ID NO: 229075 - DNA, 30 bp, Artificial Sequence
  Synthetic oligonucleotide
tgtttgagcctacacaacctcccagactca

SEQ ID NO: 229076 - DNA, 30 bp, Artificial Sequence
  Synthetic oligonucleotide
ccatatcggatgtttatgaaattcgactca

SEQ ID NO: 229077 - DNA, 30 bp, Artificial Sequence
  Synthetic oligonucleotide
acgccagtacaaaactccatagtggactca

SEQ ID NO: 229078 - DNA, 30 bp, Artificial Sequence
  Synthetic oligonucleotide
ggctggttaaaacctttgattgcatactca

SEQ ID NO: 229079 - DNA, 30 bp, Artificial Sequence
  Synthetic oligonucleotide
ctccaggggacatcgttatgtatctactca

SEQ ID NO: 229080 - DNA, 30 bp, Artificial Sequence
  Synthetic oligonucleotide
tgtccggtgcagctcaatcgtccgtactca

SEQ ID NO: 229081 - DNA, 30 bp, Artificial Sequence
  Synthetic oligonucleotide
catatgtccgaattctactacgtcacctca

SEQ ID NO: 229082 - DNA, 30 bp, Artificial Sequence
  Synthetic oligonucleotide
tcactcatagcacacctgctgttcacctca

SEQ ID NO: 229083 - DNA, 30 bp, Artificial Sequence
  Synthetic oligonucleotide
tcaataggagttcttcagaatgacccctca

SEQ ID NO: 229084 - DNA, 30 bp, Artificial Sequence
  Synthetic oligonucleotide
agggatgaatgtttctttagaagagcctca

SEQ ID NO: 229085 - DNA, 30 bp, Artificial Sequence
  Synthetic oligonucleotide
ttaacccaatctttgtacggttgagcctca

SEQ ID NO: 229086 - DNA, 30 bp, Artificial Sequence
  Synthetic oligonucleotide
agcgataaaggcaatacaacgctggcctca

SEQ ID NO: 229087 - DNA, 30 bp, Artificial Sequence
  Synthetic oligonucleotide
gctttatggaattctctgacaattgcctca

SEQ ID NO: 229088 - DNA, 30 bp, Artificial Sequence
  Synthetic oligonucleotide
aaaacggaaagagcggattaacttgcctca

SEQ ID NO: 229089 - DNA, 30 bp, Artificial Sequence
  Synthetic oligonucleotide
atcagctgtgtccgagaaggaaactcctca

SEQ ID NO: 229090 - DNA, 30 bp, Artificial Sequence
  Synthetic oligonucleotide
ccagattacatgttcgatccctgctcctca

SEQ ID NO: 229091 - DNA, 30 bp, Artificial Sequence
  Synthetic oligonucleotide
aaagcgttcacagataaaccgaaaagctca

SEQ ID NO: 229092 - DNA, 30 bp, Artificial Sequence
  Synthetic oligonucleotide
tagtcctccatgcacacgtgatcaagctca

SEQ ID NO: 229093 - DNA, 30 bp, Artificial Sequence
  Synthetic oligonucleotide
attgacaacagggaaatttccaacagctca

SEQ ID NO: 229094 - DNA, 30 bp, Artificial Sequence
  Synthetic oligonucleotide
gggcagtctacaaagggagcaggtagctca

SEQ ID NO: 229095 - DNA, 30 bp, Artificial Sequence
  Synthetic oligonucleotide
atgtccgagagagggcatgcaggacgctca

SEQ ID NO: 229096 - DNA, 30 bp, Artificial Sequence
  Synthetic oligonucleotide
ctaaagcacaagtatggacgtgtccgctca

SEQ ID NO: 229097 - DNA, 30 bp, Artificial Sequence
  Synthetic oligonucleotide
cgtacttaggaatccggcaatctgcgctca

SEQ ID NO: 229098 - DNA, 30 bp, Artificial Sequence
  Synthetic oligonucleotide
ggacaataagacttaattggccatcgctca

SEQ ID NO: 229099 - DNA, 30 bp, Artificial Sequence
  Synthetic oligonucleotide
gcgagacccattttcggtctggatcgctca

SEQ ID NO: 229100 - DNA, 30 bp, Artificial Sequence
  Synthetic oligonucleotide
caggccatgtagttgcgctaaggtcgctca

SEQ ID NO: 229101 - DNA, 30 bp, Artificial Sequence
  Synthetic oligonucleotide
tgacaacgcgcactgctttaaggtcgctca

SEQ ID NO: 229102 - DNA, 30 bp, Artificial Sequence
  Synthetic oligonucleotide
actgagcactattcctcatttcttcgctca

SEQ ID NO: 229103 - DNA, 30 bp, Artificial Sequence
  Synthetic oligonucleotide
caatttcggcgcctggaactatatggctca

SEQ ID NO: 229104 - DNA, 30 bp, Artificial Sequence
  Synthetic oligonucleotide
ggaacgcttgccgatggtgtctgtggctca

SEQ ID NO: 229105 - DNA, 30 bp, Artificial Sequence
  Synthetic oligonucleotide
gttaaccaatctcagactattctctgctca

SEQ ID NO: 229106 - DNA, 30 bp, Artificial Sequence
  Synthetic oligonucleotide
tatgagtgtataaagcctggcaaaatctca

SEQ ID NO: 229107 - DNA, 30 bp, Artificial Sequence
  Synthetic oligonucleotide
atagatagcaacaacataggtggaatctca

SEQ ID NO: 229108 - DNA, 30 bp, Artificial Sequence
  Synthetic oligonucleotide
ttatgaaacaggacttatgaaagcatctca

SEQ ID NO: 229109 - DNA, 30 bp, Artificial Sequence
  Synthetic oligonucleotide
ccaccgaactgagcgcggcggcgtatctca

SEQ ID NO: 229110 - DNA, 30 bp, Artificial Sequence
  Synthetic oligonucleotide
tacacttacaataaatagagccttatctca

SEQ ID NO: 229111 - DNA, 30 bp, Artificial Sequence
  Synthetic oligonucleotide
acccagagtgccagtgaacgagcgctctca

SEQ ID NO: 229112 - DNA, 30 bp, Artificial Sequence
  Synthetic oligonucleotide
acctgtaagcagggcacgcttattctctca

SEQ ID NO: 229113 - DNA, 30 bp, Artificial Sequence
  Synthetic oligonucleotide
gtgtgccgaaatggacgcatcgaagtctca

SEQ ID NO: 229114 - DNA, 30 bp, Artificial Sequence
  Synthetic oligonucleotide
aatcaggtaagctaatgagttgaagtctca

SEQ ID NO: 229115 - DNA, 30 bp, Artificial Sequence
  Synthetic oligonucleotide
aaagggatgccgaaatggtagacagtctca

SEQ ID NO: 229116 - DNA, 30 bp, Artificial Sequence
  Synthetic oligonucleotide
aatgctcaaatgaccctcccgccagtctca

SEQ ID NO: 229117 - DNA, 30 bp, Artificial Sequence
  Synthetic oligonucleotide
gcacgagatccatcattagcaggagtctca

SEQ ID NO: 229118 - DNA, 30 bp, Artificial Sequence
  Synthetic oligonucleotide
ctaagaaattacgacgcgcacaatgtctca

SEQ ID NO: 229119 - DNA, 30 bp, Artificial Sequence
  Synthetic oligonucleotide
tgacagcagtgttcgtggtgcgctgtctca

SEQ ID NO: 229120 - DNA, 30 bp, Artificial Sequence
  Synthetic oligonucleotide
taaatcggaaaggccacctcgcgtgtctca

SEQ ID NO: 229121 - DNA, 30 bp, Artificial Sequence
  Synthetic oligonucleotide
ccgttttctgaaattgctatgcttgtctca

SEQ ID NO: 229122 - DNA, 30 bp, Artificial Sequence
  Synthetic oligonucleotide
ttcgtggtgcagagtacgggcgacttctca

SEQ ID NO: 229123 - DNA, 30 bp, Artificial Sequence
  Synthetic oligonucleotide
ctaggccattctacgtaaaggtgtttctca

SEQ ID NO: 229124 - DNA, 30 bp, Artificial Sequence
  Synthetic oligonucleotide
tgtactgtatcagttggtaacattttctca

SEQ ID NO: 229125 - DNA, 30 bp, Artificial Sequence
  Synthetic oligonucleotide
caaccgattagagtcttaagggccaagtca

SEQ ID NO: 229126 - DNA, 30 bp, Artificial Sequence
  Synthetic oligonucleotide
caatgctagtagagactgtgtgagaagtca

SEQ ID NO: 229127 - DNA, 30 bp, Artificial Sequence
  Synthetic oligonucleotide
ggccagctgagaaccgttttgtagaagtca

SEQ ID NO: 229128 - DNA, 30 bp, Artificial Sequence
  Synthetic oligonucleotide
aatcgcagttccggctaagggcctaagtca

SEQ ID NO: 229129 - DNA, 30 bp, Artificial Sequence
  Synthetic oligonucleotide
aaatgcttagtggtatgagcatctaagtca

SEQ ID NO: 229130 - DNA, 30 bp, Artificial Sequence
  Synthetic oligonucleotide
aagtcagcaaagttccatcggtaacagtca

SEQ ID NO: 229131 - DNA, 29 bp, Artificial Sequence
  Synthetic oligonucleotide
catatttacagggcgaaaccaaccagtca

SEQ ID NO: 229132 - DNA, 30 bp, Artificial Sequence
  Synthetic oligonucleotide
aactgaccgacttaacagatggagcagtca

SEQ ID NO: 229133 - DNA, 30 bp, Artificial Sequence
  Synthetic oligonucleotide
aacgtggaaccggactaggaccggcagtca

SEQ ID NO: 229134 - DNA, 30 bp, Artificial Sequence
  Synthetic oligonucleotide
aaagcaatctgtggattcgaagctcagtca

SEQ ID NO: 229135 - DNA, 30 bp, Artificial Sequence
  Synthetic oligonucleotide
atagggtgctactcgcgaagttttcagtca

SEQ ID NO: 229136 - DNA, 30 bp, Artificial Sequence
  Synthetic oligonucleotide
atcctacaccaaagtaattggaaagagtca

SEQ ID NO: 229137 - DNA, 30 bp, Artificial Sequence
  Synthetic oligonucleotide
accggcggctcccgagggatggcagagtca

SEQ ID NO: 229138 - DNA, 30 bp, Artificial Sequence
  Synthetic oligonucleotide
tcgtactcggtttcgcgacccgaggagtca

SEQ ID NO: 229139 - DNA, 30 bp, Artificial Sequence
  Synthetic oligonucleotide
gtcatatcaagtgacgtgatctcggagtca

SEQ ID NO: 229140 - DNA, 30 bp, Artificial Sequence
  Synthetic oligonucleotide
ctcaccggtgaagcggaagactactagtca

SEQ ID NO: 229141 - DNA, 30 bp, Artificial Sequence
  Synthetic oligonucleotide
gcacactggagaatagttttgtactagtca

SEQ ID NO: 229142 - DNA, 30 bp, Artificial Sequence
  Synthetic oligonucleotide
cctggagctaacaggttggagatctagtca

SEQ ID NO: 229143 - DNA, 30 bp, Artificial Sequence
  Synthetic oligonucleotide
gctaactatgatttaccgttattgtagtca

SEQ ID NO: 229144 - DNA, 30 bp, Artificial Sequence
  Synthetic oligonucleotide
gtgagggggtcctatgagcggtcttagtca

SEQ ID NO: 229145 - DNA, 30 bp, Artificial Sequence
  Synthetic oligonucleotide
tgtatacgtcgcgaagctgtaagttagtca

SEQ ID NO: 229146 - DNA, 30 bp, Artificial Sequence
  Synthetic oligonucleotide
gaccgtcgacctagatcctccttttagtca

SEQ ID NO: 229147 - DNA, 30 bp, Artificial Sequence
  Synthetic oligonucleotide
aagtgataaaggatgcggcatagaacgtca

SEQ ID NO: 229148 - DNA, 30 bp, Artificial Sequence
  Synthetic oligonucleotide
tccaccctcgctccgctggtactaacgtca

SEQ ID NO: 229149 - DNA, 30 bp, Artificial Sequence
  Synthetic oligonucleotide
tggcactttcggccgcaactcaccacgtca

SEQ ID NO: 229150 - DNA, 30 bp, Artificial Sequence
  Synthetic oligonucleotide
gtacacccgagcaacaaggggggcacgtca

SEQ ID NO: 229151 - DNA, 30 bp, Artificial Sequence
  Synthetic oligonucleotide
gtgcactggtatacagaacactgtacgtca

SEQ ID NO: 229152 - DNA, 30 bp, Artificial Sequence
  Synthetic oligonucleotide
gccggcccacttaatttaaatccaccgtca

SEQ ID NO: 229153 - DNA, 30 bp, Artificial Sequence
  Synthetic oligonucleotide
gatgaattgctgcgatcatgcggtccgtca

SEQ ID NO: 229154 - DNA, 30 bp, Artificial Sequence
  Synthetic oligonucleotide
tgagcgagcagcgtttctaagctagcgtca

SEQ ID NO: 229155 - DNA, 30 bp, Artificial Sequence
  Synthetic oligonucleotide
gcatgcggaagcacgccagtggtagcgtca

SEQ ID NO: 229156 - DNA, 30 bp, Artificial Sequence
  Synthetic oligonucleotide
gatgcgcacagatgcgtgggtcgtgcgtca

SEQ ID NO: 229157 - DNA, 30 bp, Artificial Sequence
  Synthetic oligonucleotide
tactgtgcgcacacgaaattttttgcgtca

SEQ ID NO: 229158 - DNA, 30 bp, Artificial Sequence
  Synthetic oligonucleotide
ctgctgtttgtgtcatttggcctatcgtca

SEQ ID NO: 229159 - DNA, 30 bp, Artificial Sequence
  Synthetic oligonucleotide
cacttaacgtatggctgagaaatctcgtca

SEQ ID NO: 229160 - DNA, 30 bp, Artificial Sequence
  Synthetic oligonucleotide
gaccgagagtatgaaggttttgtctcgtca

SEQ ID NO: 229161 - DNA, 30 bp, Artificial Sequence
  Synthetic oligonucleotide
gccatctagtcggtctcattccagtcgtca

SEQ ID NO: 229162 - DNA, 30 bp, Artificial Sequence
  Synthetic oligonucleotide
atgtaggtaagactggtcggttcaaggtca

SEQ ID NO: 229163 - DNA, 30 bp, Artificial Sequence
  Synthetic oligonucleotide
agaacaaccgccgaacccaaatgaaggtca

SEQ ID NO: 229164 - DNA, 30 bp, Artificial Sequence
  Synthetic oligonucleotide
ccggttgttctaagtagaccaagcaggtca

SEQ ID NO: 229165 - DNA, 30 bp, Artificial Sequence
  Synthetic oligonucleotide
attgagacttatacaatagcattcaggtca

SEQ ID NO: 229166 - DNA, 30 bp, Artificial Sequence
  Synthetic oligonucleotide
ttaatactgttcagaagaagtaagaggtca

SEQ ID NO: 229167 - DNA, 30 bp, Artificial Sequence
  Synthetic oligonucleotide
gtcagttgtggcggttggatccataggtca

SEQ ID NO: 229168 - DNA, 30 bp, Artificial Sequence
  Synthetic oligonucleotide
gtaatgtcatgggggccgactcgacggtca

SEQ ID NO: 229169 - DNA, 30 bp, Artificial Sequence
  Synthetic oligonucleotide
agcagtgagagggttgttaatatgcggtca

SEQ ID NO: 229170 - DNA, 30 bp, Artificial Sequence
  Synthetic oligonucleotide
acctagatacaagcgcctaatttgcggtca

SEQ ID NO: 229171 - DNA, 30 bp, Artificial Sequence
  Synthetic oligonucleotide
tacagattactgttgcaggtagatcggtca

SEQ ID NO: 229172 - DNA, 30 bp, Artificial Sequence
  Synthetic oligonucleotide
caagtcataggcctaacgtcatttcggtca

SEQ ID NO: 229173 - DNA, 30 bp, Artificial Sequence
  Synthetic oligonucleotide
gctctcaccaggatacggatgtttcggtca

SEQ ID NO: 229174 - DNA, 30 bp, Artificial Sequence
  Synthetic oligonucleotide
ttcgaaagtggcttcgctgcaccagggtca

SEQ ID NO: 229175 - DNA, 30 bp, Artificial Sequence
  Synthetic oligonucleotide
tgtctgtcttcgagctgcgtagtagggtca

SEQ ID NO: 229176 - DNA, 30 bp, Artificial Sequence
  Synthetic oligonucleotide
gtctcgcatcacgcggataggttagggtca

SEQ ID NO: 229177 - DNA, 30 bp, Artificial Sequence
  Synthetic oligonucleotide
ctgggaaggtgccgcgtcgagggcgggtca

SEQ ID NO: 229178 - DNA, 30 bp, Artificial Sequence
  Synthetic oligonucleotide
gtcttagtcgtcggacaagtttgcgggtca

SEQ ID NO: 229179 - DNA, 30 bp, Artificial Sequence
  Synthetic oligonucleotide
agtttattggtgcaagaagtattcgggtca

SEQ ID NO: 229180 - DNA, 30 bp, Artificial Sequence
  Synthetic oligonucleotide
gcagcactggcacctgccagggaggggtca

SEQ ID NO: 229181 - DNA, 30 bp, Artificial Sequence
  Synthetic oligonucleotide
ggcaaattgtatagctctatgttggggtca

SEQ ID NO: 229182 - DNA, 30 bp, Artificial Sequence
  Synthetic oligonucleotide
gatcgtatgtcgtattgtacataatggtca

SEQ ID NO: 229183 - DNA, 30 bp, Artificial Sequence
  Synthetic oligonucleotide
tatcaaaggcgactatgtattagatggtca

SEQ ID NO: 229184 - DNA, 30 bp, Artificial Sequence
  Synthetic oligonucleotide
cccatagcggaggatttgttgatatggtca

SEQ ID NO: 229185 - DNA, 30 bp, Artificial Sequence
  Synthetic oligonucleotide
aaccggggaaccagctttctcacctggtca

SEQ ID NO: 229186 - DNA, 30 bp, Artificial Sequence
  Synthetic oligonucleotide
taatgcgccttctggtggaatatctggtca

SEQ ID NO: 229187 - DNA, 30 bp, Artificial Sequence
  Synthetic oligonucleotide
ggacagggggacgccccggtcgggtggtca

SEQ ID NO: 229188 - DNA, 30 bp, Artificial Sequence
  Synthetic oligonucleotide
ggattaatcatagatgtaactgattggtca

SEQ ID NO: 229189 - DNA, 30 bp, Artificial Sequence
  Synthetic oligonucleotide
ccaagtgtatcatgacctaaagccatgtca

SEQ ID NO: 229190 - DNA, 30 bp, Artificial Sequence
  Synthetic oligonucleotide
gtaacaggggctgaaatgcggaagatgtca

SEQ ID NO: 229191 - DNA, 30 bp, Artificial Sequence
  Synthetic oligonucleotide
gtgtctgcgtaacccgtcgaatatatgtca

SEQ ID NO: 229192 - DNA, 31 bp, Artificial Sequence
  Synthetic oligonucleotide
acataggacagaacgtttaccgactatgtca

SEQ ID NO: 229193 - DNA, 30 bp, Artificial Sequence
  Synthetic oligonucleotide
aagggtcacccgcaaatgagttctatgtca

SEQ ID NO: 229194 - DNA, 30 bp, Artificial Sequence
  Synthetic oligonucleotide
atacgcgcaactggtatcaacaaactgtca

SEQ ID NO: 229195 - DNA, 30 bp, Artificial Sequence
  Synthetic oligonucleotide
accccgaaggataaatgtgcggaactgtca

SEQ ID NO: 229196 - DNA, 30 bp, Artificial Sequence
  Synthetic oligonucleotide
actccaactgcccatagtctcgtactgtca

SEQ ID NO: 229197 - DNA, 30 bp, Artificial Sequence
  Synthetic oligonucleotide
gttgatcctattactcagtccttactgtca

SEQ ID NO: 229198 - DNA, 30 bp, Artificial Sequence
  Synthetic oligonucleotide
aaacttcctgctcgcgaggtatcgctgtca

SEQ ID NO: 229199 - DNA, 30 bp, Artificial Sequence
  Synthetic oligonucleotide
aagttagccgtcttggtactcatgctgtca

SEQ ID NO: 229200 - DNA, 30 bp, Artificial Sequence
  Synthetic oligonucleotide
ctgaaacatgtataaagggaaggtctgtca

SEQ ID NO: 229201 - DNA, 30 bp, Artificial Sequence
  Synthetic oligonucleotide
cggagccttgtacgtatggagatagtgtca

SEQ ID NO: 229202 - DNA, 30 bp, Artificial Sequence
  Synthetic oligonucleotide
cctggttagaccgtcctaagcgacgtgtca

SEQ ID NO: 229203 - DNA, 30 bp, Artificial Sequence
  Synthetic oligonucleotide
gtagtcaaacatccgctaaatcgtgtgtca

SEQ ID NO: 229204 - DNA, 30 bp, Artificial Sequence
  Synthetic oligonucleotide
atgaatggcgggggtaagactggtgtgtca

SEQ ID NO: 229205 - DNA, 30 bp, Artificial Sequence
  Synthetic oligonucleotide
atagcacgtctggcgtcgcaaattgtgtca

SEQ ID NO: 229206 - DNA, 30 bp, Artificial Sequence
  Synthetic oligonucleotide
catggtagagtaggtgttcccaaattgtca

SEQ ID NO: 229207 - DNA, 30 bp, Artificial Sequence
  Synthetic oligonucleotide
cgggtaacaagcatcagataactcttgtca

SEQ ID NO: 229208 - DNA, 30 bp, Artificial Sequence
  Synthetic oligonucleotide
cggtctggggcttgcacctcctatttgtca

SEQ ID NO: 229209 - DNA, 30 bp, Artificial Sequence
  Synthetic oligonucleotide
gcgttaaacaacaaatttctagttttgtca

SEQ ID NO: 229210 - DNA, 30 bp, Artificial Sequence
  Synthetic oligonucleotide
tcctcgcgtgtgcagtagcgggtaaattca

SEQ ID NO: 229211 - DNA, 30 bp, Artificial Sequence
  Synthetic oligonucleotide
gtcggaaggtaatacataccacacaattca

SEQ ID NO: 229212 - DNA, 30 bp, Artificial Sequence
  Synthetic oligonucleotide
tggcgcaaggaataagattatatcaattca

SEQ ID NO: 229213 - DNA, 30 bp, Artificial Sequence
  Synthetic oligonucleotide
tagatcgttcattcggccttcgtcaattca

SEQ ID NO: 229214 - DNA, 30 bp, Artificial Sequence
  Synthetic oligonucleotide
taattggtatgcgtacgactatggaattca

SEQ ID NO: 229215 - DNA, 30 bp, Artificial Sequence
  Synthetic oligonucleotide
ggtgcaaacggattctaaccgaataattca

SEQ ID NO: 229216 - DNA, 30 bp, Artificial Sequence
  Synthetic oligonucleotide
gaagaaaaatgatcgggcatgtgtaattca

SEQ ID NO: 229217 - DNA, 30 bp, Artificial Sequence
  Synthetic oligonucleotide
cggaaccaggggactggcttcggacattca

SEQ ID NO: 229218 - DNA, 30 bp, Artificial Sequence
  Synthetic oligonucleotide
aacggccatcggtagactgaactacattca

SEQ ID NO: 229219 - DNA, 30 bp, Artificial Sequence
  Synthetic oligonucleotide
gcgaaattggaatagtgattacaccattca

SEQ ID NO: 229220 - DNA, 30 bp, Artificial Sequence
  Synthetic oligonucleotide
gttcaaatcggggctatctctcatcattca

SEQ ID NO: 229221 - DNA, 30 bp, Artificial Sequence
  Synthetic oligonucleotide
gcgcttcacgagaatgcttccaaagattca

SEQ ID NO: 229222 - DNA, 30 bp, Artificial Sequence
  Synthetic oligonucleotide
tactgatacaccggctctatacaagattca

SEQ ID NO: 229223 - DNA, 30 bp, Artificial Sequence
  Synthetic oligonucleotide
atggcctatgttgtcggaaggttagattca

SEQ ID NO: 229224 - DNA, 30 bp, Artificial Sequence
  Synthetic oligonucleotide
taagcagatcatggaagagaataggattca

SEQ ID NO: 229225 - DNA, 30 bp, Artificial Sequence
  Synthetic oligonucleotide
gatgttgctggtcacgaaattcgggattca

SEQ ID NO: 229226 - DNA, 30 bp, Artificial Sequence
  Synthetic oligonucleotide
cacctggttgctaaacgtccaatggattca

SEQ ID NO: 229227 - DNA, 30 bp, Artificial Sequence
  Synthetic oligonucleotide
ccgtcgggcttaggaattgggatatattca

SEQ ID NO: 229228 - DNA, 30 bp, Artificial Sequence
  Synthetic oligonucleotide
cgttgtccatgggctctaactttatattca

SEQ ID NO: 229229 - DNA, 30 bp, Artificial Sequence
  Synthetic oligonucleotide
cgtctagaacgtattgatgtagtctattca

SEQ ID NO: 229230 - DNA, 30 bp, Artificial Sequence
  Synthetic oligonucleotide
cgaaaatgaagggggatgagcaagtattca

SEQ ID NO: 229231 - DNA, 30 bp, Artificial Sequence
  Synthetic oligonucleotide
cgtcgcgattacggatcgtatgtgtattca

SEQ ID NO: 229232 - DNA, 30 bp, Artificial Sequence
  Synthetic oligonucleotide
aagggagcttaggccgggcggaattattca

SEQ ID NO: 229233 - DNA, 30 bp, Artificial Sequence
  Synthetic oligonucleotide
cggctactcctcccagcgggtacttattca

SEQ ID NO: 229234 - DNA, 30 bp, Artificial Sequence
  Synthetic oligonucleotide
aaagcagtaacagtccagataagttattca

SEQ ID NO: 229235 - DNA, 30 bp, Artificial Sequence
  Synthetic oligonucleotide
gtccagcctgcgagaaaggaactaacttca

SEQ ID NO: 229236 - DNA, 30 bp, Artificial Sequence
  Synthetic oligonucleotide
acctacgatgaagatcctccctccacttca

SEQ ID NO: 229237 - DNA, 30 bp, Artificial Sequence
  Synthetic oligonucleotide
accgcgtaaccgatcggatccagcacttca

SEQ ID NO: 229238 - DNA, 30 bp, Artificial Sequence
  Synthetic oligonucleotide
ggcactacaggaagtcctgcgttgacttca

SEQ ID NO: 229239 - DNA, 30 bp, Artificial Sequence
  Synthetic oligonucleotide
ttaactgctctgggccaggaggtcccttca

SEQ ID NO: 229240 - DNA, 30 bp, Artificial Sequence
  Synthetic oligonucleotide
agatacaagcattcaaccggggtcccttca

SEQ ID NO: 229241 - DNA, 30 bp, Artificial Sequence
  Synthetic oligonucleotide
cctcatttgtcttatctggaaaggccttca

SEQ ID NO: 229242 - DNA, 30 bp, Artificial Sequence
  Synthetic oligonucleotide
atcacctggtacagcagacaacgtccttca

SEQ ID NO: 229243 - DNA, 30 bp, Artificial Sequence
  Synthetic oligonucleotide
ggatactcgctcgcatcagtacaatcttca

SEQ ID NO: 229244 - DNA, 30 bp, Artificial Sequence
  Synthetic oligonucleotide
ccatctcgcgaaatacactacgcatcttca

SEQ ID NO: 229245 - DNA, 30 bp, Artificial Sequence
  Synthetic oligonucleotide
gacgggtaacgcctttccgaacggtcttca

SEQ ID NO: 229246 - DNA, 30 bp, Artificial Sequence
  Synthetic oligonucleotide
caagggcgtgtttctttcagtagcagttca

SEQ ID NO: 229247 - DNA, 30 bp, Artificial Sequence
  Synthetic oligonucleotide
cacattataatggacacctaaggcagttca

SEQ ID NO: 229248 - DNA, 30 bp, Artificial Sequence
  Synthetic oligonucleotide
tgcttttaaaaattacgcgtgaagagttca

SEQ ID NO: 229249 - DNA, 30 bp, Artificial Sequence
  Synthetic oligonucleotide
gtctgagcgccgtcatgtcgtcagagttca

SEQ ID NO: 229250 - DNA, 30 bp, Artificial Sequence
  Synthetic oligonucleotide
accgcggtgtcgatcttaataaatagttca

SEQ ID NO: 229251 - DNA, 30 bp, Artificial Sequence
  Synthetic oligonucleotide
ggtggacctgggggtgagtttggtagttca

SEQ ID NO: 229252 - DNA, 30 bp, Artificial Sequence
  Synthetic oligonucleotide
ttcagtgaccttaggatgccaattagttca

SEQ ID NO: 229253 - DNA, 30 bp, Artificial Sequence
  Synthetic oligonucleotide
tacttatagggtcgctgcgtccaacgttca

SEQ ID NO: 229254 - DNA, 30 bp, Artificial Sequence
  Synthetic oligonucleotide
gcttcacattgcgataaggtcatacgttca

SEQ ID NO: 229255 - DNA, 30 bp, Artificial Sequence
  Synthetic oligonucleotide
agaccgggagttgtatgttaccagcgttca

SEQ ID NO: 229256 - DNA, 30 bp, Artificial Sequence
  Synthetic oligonucleotide
gtagagagtccagctagctaggagcgttca

SEQ ID NO: 229257 - DNA, 30 bp, Artificial Sequence
  Synthetic oligonucleotide
ggatttgttacagttctaagtaggcgttca

SEQ ID NO: 229258 - DNA, 30 bp, Artificial Sequence
  Synthetic oligonucleotide
tgacactatactgggtgcacagtgcgttca

SEQ ID NO: 229259 - DNA, 30 bp, Artificial Sequence
  Synthetic oligonucleotide
agacattattcgcttaacggggttcgttca

SEQ ID NO: 229260 - DNA, 30 bp, Artificial Sequence
  Synthetic oligonucleotide
gtcaatgtacacccgacatttggaggttca

SEQ ID NO: 229261 - DNA, 30 bp, Artificial Sequence
  Synthetic oligonucleotide
gcaagatgacatgagcacatcgtaggttca

SEQ ID NO: 229262 - DNA, 30 bp, Artificial Sequence
  Synthetic oligonucleotide
ggtcgagtataaaaagcgctgaacggttca

SEQ ID NO: 229263 - DNA, 30 bp, Artificial Sequence
  Synthetic oligonucleotide
gaaagcgtacgcccagtacgtcccggttca

SEQ ID NO: 229264 - DNA, 30 bp, Artificial Sequence
  Synthetic oligonucleotide
gtctcatgacaggcccaaggctgcggttca

SEQ ID NO: 229265 - DNA, 30 bp, Artificial Sequence
  Synthetic oligonucleotide
tatggagggtggttgtacgacgagggttca

SEQ ID NO: 229266 - DNA, 30 bp, Artificial Sequence
  Synthetic oligonucleotide
acccgcgccaggaaagcgactgagggttca

SEQ ID NO: 229267 - DNA, 30 bp, Artificial Sequence
  Synthetic oligonucleotide
ccaagagccaactgtcctccgacgggttca

SEQ ID NO: 229268 - DNA, 30 bp, Artificial Sequence
  Synthetic oligonucleotide
ccgctgtaccatttatcggtgatgggttca

SEQ ID NO: 229269 - DNA, 30 bp, Artificial Sequence
  Synthetic oligonucleotide
ctatctaaatcgtatccccgtctgggttca

SEQ ID NO: 229270 - DNA, 30 bp, Artificial Sequence
  Synthetic oligonucleotide
gcaggcaggccagccgattaggatggttca

SEQ ID NO: 229271 - DNA, 30 bp, Artificial Sequence
  Synthetic oligonucleotide
tttgagcaaggtgcggctggttgtggttca

SEQ ID NO: 229272 - DNA, 30 bp, Artificial Sequence
  Synthetic oligonucleotide
atcgagagagtcgcgccttcacaatgttca

SEQ ID NO: 229273 - DNA, 30 bp, Artificial Sequence
  Synthetic oligonucleotide
tcaccaccgtttagtcccctccgatgttca

SEQ ID NO: 229274 - DNA, 30 bp, Artificial Sequence
  Synthetic oligonucleotide
tgctttattctggatcaacggttatgttca

SEQ ID NO: 229275 - DNA, 30 bp, Artificial Sequence
  Synthetic oligonucleotide
atatggacaggaccatctgattcctgttca

SEQ ID NO: 229276 - DNA, 30 bp, Artificial Sequence
  Synthetic oligonucleotide
taagttcggaagggtaaataatagtgttca

SEQ ID NO: 229277 - DNA, 30 bp, Artificial Sequence
  Synthetic oligonucleotide
attgcggcgcattagtcatcagtgtgttca

SEQ ID NO: 229278 - DNA, 30 bp, Artificial Sequence
  Synthetic oligonucleotide
tacggcttcttgcctcgggctggttgttca

SEQ ID NO: 229279 - DNA, 30 bp, Artificial Sequence
  Synthetic oligonucleotide
tatcgattcatggaggctcgcccaatttca

SEQ ID NO: 229280 - DNA, 30 bp, Artificial Sequence
  Synthetic oligonucleotide
catacgatgcgcaagcaatgggtcatttca

SEQ ID NO: 229281 - DNA, 30 bp, Artificial Sequence
  Synthetic oligonucleotide
tgcgcgacccaaacattggaaacgatttca

SEQ ID NO: 229282 - DNA, 30 bp, Artificial Sequence
  Synthetic oligonucleotide
caatctagttaagaccgtatctgtatttca

SEQ ID NO: 229283 - DNA, 30 bp, Artificial Sequence
  Synthetic oligonucleotide
ccgtatcaaggtactgtcaaagttatttca

SEQ ID NO: 229284 - DNA, 30 bp, Artificial Sequence
  Synthetic oligonucleotide
tcatagggaagtcaggagtctgagctttca

SEQ ID NO: 229285 - DNA, 30 bp, Artificial Sequence
  Synthetic oligonucleotide
gctgcacaccgtgatacagtcctgctttca

SEQ ID NO: 229286 - DNA, 30 bp, Artificial Sequence
  Synthetic oligonucleotide
ttggaaacaaaccgcgtgtgtaatctttca

SEQ ID NO: 229287 - DNA, 30 bp, Artificial Sequence
  Synthetic oligonucleotide
cttacgtaaggagtcaactttcgagtttca

SEQ ID NO: 229288 - DNA, 30 bp, Artificial Sequence
  Synthetic oligonucleotide
tagtgcctgattatatatagacacgtttca

SEQ ID NO: 229289 - DNA, 30 bp, Artificial Sequence
  Synthetic oligonucleotide
acgtctaatattcatatcagtcacgtttca

SEQ ID NO: 229290 - DNA, 30 bp, Artificial Sequence
  Synthetic oligonucleotide
ggacaatcgtggaatcttgtgtaggtttca

SEQ ID NO: 229291 - DNA, 30 bp, Artificial Sequence
  Synthetic oligonucleotide
cgggcccgtcactacctgagaggattttca

SEQ ID NO: 229292 - DNA, 30 bp, Artificial Sequence
  Synthetic oligonucleotide
tcaatccctcaaaactatacatgattttca

SEQ ID NO: 229293 - DNA, 30 bp, Artificial Sequence
  Synthetic oligonucleotide
tcgcataataaaatagccccacacttttca

SEQ ID NO: 229294 - DNA, 30 bp, Artificial Sequence
  Synthetic oligonucleotide
aggcctcacttatgcgttaaaataaaaaga

SEQ ID NO: 229295 - DNA, 30 bp, Artificial Sequence
  Synthetic oligonucleotide
aagtctatactaatatcgaaactaaaaaga

SEQ ID NO: 229296 - DNA, 30 bp, Artificial Sequence
  Synthetic oligonucleotide
agcgctaggccgctacgaatcttaaaaaga

SEQ ID NO: 229297 - DNA, 30 bp, Artificial Sequence
  Synthetic oligonucleotide
gtaatcatattacagattgttttaaaaaga

SEQ ID NO: 229298 - DNA, 30 bp, Artificial Sequence
  Synthetic oligonucleotide
tcttatctcaagatctgaaccgacaaaaga

SEQ ID NO: 229299 - DNA, 30 bp, Artificial Sequence
  Synthetic oligonucleotide
acactgaccgtcatgttcagtgacaaaaga

SEQ ID NO: 229300 - DNA, 30 bp, Artificial Sequence
  Synthetic oligonucleotide
catattatcaatcactcgggcaccaaaaga

SEQ ID NO: 229301 - DNA, 30 bp, Artificial Sequence
  Synthetic oligonucleotide
ttcataatccgcgcgcagatggccaaaaga

SEQ ID NO: 229302 - DNA, 30 bp, Artificial Sequence
  Synthetic oligonucleotide
acatagacctatctcaggcacatcaaaaga

SEQ ID NO: 229303 - DNA, 30 bp, Artificial Sequence
  Synthetic oligonucleotide
gatggggttcccgttcgtatcttcaaaaga

SEQ ID NO: 229304 - DNA, 30 bp, Artificial Sequence
  Synthetic oligonucleotide
tttgatgcggtgcccacttggacgaaaaga

SEQ ID NO: 229305 - DNA, 30 bp, Artificial Sequence
  Synthetic oligonucleotide
agggcgtgcgcatacccttacgggaaaaga

SEQ ID NO: 229306 - DNA, 31 bp, Artificial Sequence
  Synthetic oligonucleotide
gcaggatatggctcattcttcggtgaaaaga

SEQ ID NO: 229307 - DNA, 30 bp, Artificial Sequence
  Synthetic oligonucleotide
tgttgcgtgcagacagcaaggcctaaaaga

SEQ ID NO: 229308 - DNA, 31 bp, Artificial Sequence
  Synthetic oligonucleotide
acaggggcgtcattaacaatcccaccaaaga

SEQ ID NO: 229309 - DNA, 30 bp, Artificial Sequence
  Synthetic oligonucleotide
gtttgaaataatggaaatcgtgaccaaaga

SEQ ID NO: 229310 - DNA, 30 bp, Artificial Sequence
  Synthetic oligonucleotide
tatggacaggtttctaaatgtgcccaaaga

SEQ ID NO: 229311 - DNA, 30 bp, Artificial Sequence
  Synthetic oligonucleotide
gaccccgctctctgggcgtggcggcaaaga

SEQ ID NO: 229312 - DNA, 30 bp, Artificial Sequence
  Synthetic oligonucleotide
ggtcgactcaactgagctctagctcaaaga

SEQ ID NO: 229313 - DNA, 30 bp, Artificial Sequence
  Synthetic oligonucleotide
ggtagtttacagacatgttgacaagaaaga

SEQ ID NO: 229314 - DNA, 30 bp, Artificial Sequence
  Synthetic oligonucleotide
tggcttggacttgaacccggcgaagaaaga

SEQ ID NO: 229315 - DNA, 30 bp, Artificial Sequence
  Synthetic oligonucleotide
aatgagcacatgtttcgttctgaagaaaga

SEQ ID NO: 229316 - DNA, 30 bp, Artificial Sequence
  Synthetic oligonucleotide
ggtttgccttaagcgagcgactgagaaaga

SEQ ID NO: 229317 - DNA, 30 bp, Artificial Sequence
  Synthetic oligonucleotide
atataccgtggggtggtgcgattcgaaaga

SEQ ID NO: 229318 - DNA, 30 bp, Artificial Sequence
  Synthetic oligonucleotide
tgcaggagttagcaagttagtttcgaaaga

SEQ ID NO: 229319 - DNA, 30 bp, Artificial Sequence
  Synthetic oligonucleotide
aaaggacaggaatcctctcggtgataaaga

SEQ ID NO: 229320 - DNA, 30 bp, Artificial Sequence
  Synthetic oligonucleotide
ggaagtgaacacaacttggcgctataaaga

SEQ ID NO: 229321 - DNA, 30 bp, Artificial Sequence
  Synthetic oligonucleotide
gtcctctaacagtgtggctgcggctaaaga

SEQ ID NO: 229322 - DNA, 30 bp, Artificial Sequence
  Synthetic oligonucleotide
ccaactgcgctagggaaagtgtgttaaaga

SEQ ID NO: 229323 - DNA, 30 bp, Artificial Sequence
  Synthetic oligonucleotide
aagtgagaggaacacggaggctaaacaaga

SEQ ID NO: 229324 - DNA, 30 bp, Artificial Sequence
  Synthetic oligonucleotide
ataagttcctccgcgtgaacgacgacaaga

SEQ ID NO: 229325 - DNA, 30 bp, Artificial Sequence
  Synthetic oligonucleotide
cttagcgtattctccggggcaaggacaaga

SEQ ID NO: 229326 - DNA, 30 bp, Artificial Sequence
  Synthetic oligonucleotide
taaataagcccaagcttagcctggacaaga

SEQ ID NO: 229327 - DNA, 30 bp, Artificial Sequence
  Synthetic oligonucleotide
actggtccccggcaacgagtactgacaaga

SEQ ID NO: 229328 - DNA, 30 bp, Artificial Sequence
  Synthetic oligonucleotide
taaagatagaaaactactggcttcccaaga

SEQ ID NO: 229329 - DNA, 30 bp, Artificial Sequence
  Synthetic oligonucleotide
ggtttgcgaatacagaaggacacgccaaga

SEQ ID NO: 229330 - DNA, 30 bp, Artificial Sequence
  Synthetic oligonucleotide
aatggacgatcagtcagcgcaagtccaaga

SEQ ID NO: 229331 - DNA, 30 bp, Artificial Sequence
  Synthetic oligonucleotide
gtcttggaaccttccaagtctgacgcaaga

SEQ ID NO: 229332 - DNA, 30 bp, Artificial Sequence
  Synthetic oligonucleotide
tccgcgctgactcgctcgagtgccgcaaga

SEQ ID NO: 229333 - DNA, 30 bp, Artificial Sequence
  Synthetic oligonucleotide
cattcctattggaccgtagtggtcgcaaga

SEQ ID NO: 229334 - DNA, 30 bp, Artificial Sequence
  Synthetic oligonucleotide
atgaatggtgcctaagcgctgcatgcaaga

SEQ ID NO: 229335 - DNA, 30 bp, Artificial Sequence
  Synthetic oligonucleotide
tatcataggccagctctgtggtgatcaaga

SEQ ID NO: 229336 - DNA, 30 bp, Artificial Sequence
  Synthetic oligonucleotide
gtaccttatgaatgagacccaccgtcaaga

SEQ ID NO: 229337 - DNA, 30 bp, Artificial Sequence
  Synthetic oligonucleotide
gctaaaggactcaagtacttccggtcaaga

SEQ ID NO: 229338 - DNA, 30 bp, Artificial Sequence
  Synthetic oligonucleotide
caatgtataggaagcacgtgagggtcaaga

SEQ ID NO: 229339 - DNA, 30 bp, Artificial Sequence
  Synthetic oligonucleotide
aagtagttcaaacggagtcatgggtcaaga

SEQ ID NO: 229340 - DNA, 30 bp, Artificial Sequence
  Synthetic oligonucleotide
tcatggccctgggataaatccatgagaaga

SEQ ID NO: 229341 - DNA, 29 bp, Artificial Sequence
  Synthetic oligonucleotide
aaacaatgtcagacaattctcttagaaga

SEQ ID NO: 229342 - DNA, 30 bp, Artificial Sequence
  Synthetic oligonucleotide
ggtagtcatataacttgctgcttacgaaga

SEQ ID NO: 229343 - DNA, 30 bp, Artificial Sequence
  Synthetic oligonucleotide
accacctccaccagtcgagatctgcgaaga

SEQ ID NO: 229344 - DNA, 30 bp, Artificial Sequence
  Synthetic oligonucleotide
gcctcatgttaaaagtgcctagttcgaaga

SEQ ID NO: 229345 - DNA, 30 bp, Artificial Sequence
  Synthetic oligonucleotide
aagtggctttcaacccaatgataaggaaga

SEQ ID NO: 229346 - DNA, 30 bp, Artificial Sequence
  Synthetic oligonucleotide
atttggagcacggcttatcactgcggaaga

SEQ ID NO: 229347 - DNA, 30 bp, Artificial Sequence
  Synthetic oligonucleotide
tacaggaaaatagacattcttatcggaaga

SEQ ID NO: 229348 - DNA, 30 bp, Artificial Sequence
  Synthetic oligonucleotide
tcgctcgagaagctagaacctaggggaaga

SEQ ID NO: 229349 - DNA, 30 bp, Artificial Sequence
  Synthetic oligonucleotide
atgtcagcactcaaacatttggggggaaga

SEQ ID NO: 229350 - DNA, 30 bp, Artificial Sequence
  Synthetic oligonucleotide
cggttgtttggggtcacgggcatgggaaga

SEQ ID NO: 229351 - DNA, 30 bp, Artificial Sequence
  Synthetic oligonucleotide
tgcgaatacccttaagctcgcctgggaaga

SEQ ID NO: 229352 - DNA, 30 bp, Artificial Sequence
  Synthetic oligonucleotide
ggtagtagcgggggtaggaagaatggaaga

SEQ ID NO: 229353 - DNA, 30 bp, Artificial Sequence
  Synthetic oligonucleotide
catagggtacgttcgcttgtagttggaaga

SEQ ID NO: 229354 - DNA, 30 bp, Artificial Sequence
  Synthetic oligonucleotide
caggtgaacatacactttacctactgaaga

SEQ ID NO: 229355 - DNA, 30 bp, Artificial Sequence
  Synthetic oligonucleotide
tcaagtctacactcgtgtacggcttgaaga

SEQ ID NO: 229356 - DNA, 30 bp, Artificial Sequence
  Synthetic oligonucleotide
aggtgtaggaaccacgtaggatcttgaaga

SEQ ID NO: 229357 - DNA, 30 bp, Artificial Sequence
  Synthetic oligonucleotide
agagcctatttaggcccgtcttcttgaaga

SEQ ID NO: 229358 - DNA, 30 bp, Artificial Sequence
  Synthetic oligonucleotide
gaaagataagcggaggacgataaaataaga

SEQ ID NO: 229359 - DNA, 30 bp, Artificial Sequence
  Synthetic oligonucleotide
acctgggggaaacatgggatgggaataaga

SEQ ID NO: 229360 - DNA, 30 bp, Artificial Sequence
  Synthetic oligonucleotide
gtggcgcacagtaaagactgaataataaga

SEQ ID NO: 229361 - DNA, 30 bp, Artificial Sequence
  Synthetic oligonucleotide
ttatagtcttgccccgattaggtaataaga

SEQ ID NO: 229362 - DNA, 30 bp, Artificial Sequence
  Synthetic oligonucleotide
tacgcggtaattaccgaaaacagcataaga

SEQ ID NO: 229363 - DNA, 30 bp, Artificial Sequence
  Synthetic oligonucleotide
gggatgatgttataacctctgctcataaga

SEQ ID NO: 229364 - DNA, 30 bp, Artificial Sequence
  Synthetic oligonucleotide
tgtgagaccgtatgattgctaccgataaga

SEQ ID NO: 229365 - DNA, 30 bp, Artificial Sequence
  Synthetic oligonucleotide
gtcgacgctcgtcgctagatatggataaga

SEQ ID NO: 229366 - DNA, 30 bp, Artificial Sequence
  Synthetic oligonucleotide
gtcaaatggacgcattacatcctgataaga

SEQ ID NO: 229367 - DNA, 30 bp, Artificial Sequence
  Synthetic oligonucleotide
attgtaaaggtaactcaacacggactaaga

SEQ ID NO: 229368 - DNA, 30 bp, Artificial Sequence
  Synthetic oligonucleotide
ggttgagacgtggcccaccgtagcctaaga

SEQ ID NO: 229369 - DNA, 30 bp, Artificial Sequence
  Synthetic oligonucleotide
agccatctgtacgttgcaaggaagctaaga

SEQ ID NO: 229370 - DNA, 30 bp, Artificial Sequence
  Synthetic oligonucleotide
gggcctcgtctaagtctaggaggtctaaga

SEQ ID NO: 229371 - DNA, 30 bp, Artificial Sequence
  Synthetic oligonucleotide
atcccacatatctgccctaccgcagtaaga

SEQ ID NO: 229372 - DNA, 30 bp, Artificial Sequence
  Synthetic oligonucleotide
atgccatcgacagcaggagtaatagtaaga

SEQ ID NO: 229373 - DNA, 30 bp, Artificial Sequence
  Synthetic oligonucleotide
gaggtaggtatatgttgtagttgggtaaga

SEQ ID NO: 229374 - DNA, 30 bp, Artificial Sequence
  Synthetic oligonucleotide
cggaggcgttagctggggtgtaatgtaaga

SEQ ID NO: 229375 - DNA, 30 bp, Artificial Sequence
  Synthetic oligonucleotide
aggcccgcgctactttcaatccatgtaaga

SEQ ID NO: 229376 - DNA, 30 bp, Artificial Sequence
  Synthetic oligonucleotide
atgtcatcaccgctaattatttaattaaga

SEQ ID NO: 229377 - DNA, 30 bp, Artificial Sequence
  Synthetic oligonucleotide
atatatactgtcacaatacgacgattaaga

SEQ ID NO: 229378 - DNA, 30 bp, Artificial Sequence
  Synthetic oligonucleotide
tgcgtaaactcggttcccggaaacttaaga

SEQ ID NO: 229379 - DNA, 30 bp, Artificial Sequence
  Synthetic oligonucleotide
tccttccggctaacaccggtctacttaaga

SEQ ID NO: 229380 - DNA, 30 bp, Artificial Sequence
  Synthetic oligonucleotide
tgccgagcccgatcgtactacaccttaaga

SEQ ID NO: 229381 - DNA, 30 bp, Artificial Sequence
  Synthetic oligonucleotide
tcggagctaggctcggggttcctcttaaga

SEQ ID NO: 229382 - DNA, 30 bp, Artificial Sequence
  Synthetic oligonucleotide
gcaacggttagttttccttcctagttaaga

SEQ ID NO: 229383 - DNA, 30 bp, Artificial Sequence
  Synthetic oligonucleotide
tgatcatgcattgccagttgttgtttaaga

SEQ ID NO: 229384 - DNA, 30 bp, Artificial Sequence
  Synthetic oligonucleotide
aaaccggcaaaatttcgtaggccaaacaga

SEQ ID NO: 229385 - DNA, 30 bp, Artificial Sequence
  Synthetic oligonucleotide
accggttagggtatgagattaataaacaga

SEQ ID NO: 229386 - DNA, 29 bp, Artificial Sequence
  Synthetic oligonucleotide
ccattgcatgcaaattgtcaatcaacaga

SEQ ID NO: 229387 - DNA, 30 bp, Artificial Sequence
  Synthetic oligonucleotide
cgcactaaaatgtaagcgtgtgtgaacaga

SEQ ID NO: 229388 - DNA, 30 bp, Artificial Sequence
  Synthetic oligonucleotide
tctctaggatcacgcggtgcggataacaga

SEQ ID NO: 229389 - DNA, 30 bp, Artificial Sequence
  Synthetic oligonucleotide
gaccgccggggtgtcagtcagactaacaga

SEQ ID NO: 229390 - DNA, 30 bp, Artificial Sequence
  Synthetic oligonucleotide
gtgagcgcttccgggagtcggattaacaga

SEQ ID NO: 229391 - DNA, 30 bp, Artificial Sequence
  Synthetic oligonucleotide
caagtaaccaaattattggtccttaacaga

SEQ ID NO: 229392 - DNA, 30 bp, Artificial Sequence
  Synthetic oligonucleotide
tgttacacctggcacatatgggcacacaga

SEQ ID NO: 229393 - DNA, 30 bp, Artificial Sequence
  Synthetic oligonucleotide
catctcgatgttactacccttcatcacaga

SEQ ID NO: 229394 - DNA, 30 bp, Artificial Sequence
  Synthetic oligonucleotide
gtcatagcattccaatatttgcctcacaga

SEQ ID NO: 229395 - DNA, 30 bp, Artificial Sequence
  Synthetic oligonucleotide
ggtgctgcgtccgatttttaggaagacaga

SEQ ID NO: 229396 - DNA, 30 bp, Artificial Sequence
  Synthetic oligonucleotide
tgaatgacggtcttaactcacagagacaga

SEQ ID NO: 229397 - DNA, 30 bp, Artificial Sequence
  Synthetic oligonucleotide
ccagtgggtctggggcgattcgtagacaga

SEQ ID NO: 229398 - DNA, 30 bp, Artificial Sequence
  Synthetic oligonucleotide
acccgcaccctggtcccaaccttagacaga

SEQ ID NO: 229399 - DNA, 31 bp, Artificial Sequence
  Synthetic oligonucleotide
agttatatggggcggcaccgcagatgacaga

SEQ ID NO: 229400 - DNA, 30 bp, Artificial Sequence
  Synthetic oligonucleotide
aggagcagggatttttatgggctatacaga

SEQ ID NO: 229401 - DNA, 30 bp, Artificial Sequence
  Synthetic oligonucleotide
tctgtaaatttattggccttagtatacaga

SEQ ID NO: 229402 - DNA, 30 bp, Artificial Sequence
  Synthetic oligonucleotide
acgctccataaggtctacaatacctacaga

SEQ ID NO: 229403 - DNA, 30 bp, Artificial Sequence
  Synthetic oligonucleotide
tctagcgtcgggtaaatggattcctacaga

SEQ ID NO: 229404 - DNA, 30 bp, Artificial Sequence
  Synthetic oligonucleotide
agttggagttatggtgaatagctctacaga

SEQ ID NO: 229405 - DNA, 30 bp, Artificial Sequence
  Synthetic oligonucleotide
catgcgtggctcgaaatataaatttacaga

SEQ ID NO: 229406 - DNA, 30 bp, Artificial Sequence
  Synthetic oligonucleotide
aaaaattcggcaacaggcactgccaccaga

SEQ ID NO: 229407 - DNA, 30 bp, Artificial Sequence
  Synthetic oligonucleotide
tggagacccttgtcaaagcggttcaccaga

SEQ ID NO: 229408 - DNA, 30 bp, Artificial Sequence
  Synthetic oligonucleotide
aagaagtttggaactgaacgtgttaccaga

SEQ ID NO: 229409 - DNA, 30 bp, Artificial Sequence
  Synthetic oligonucleotide
tacaccgcattaagctattgaaaacccaga

SEQ ID NO: 229410 - DNA, 30 bp, Artificial Sequence
  Synthetic oligonucleotide
atctaacgatccgacactcaagtccccaga

SEQ ID NO: 229411 - DNA, 30 bp, Artificial Sequence
  Synthetic oligonucleotide
ggtagtgcgcgtattctaaaggagcccaga

SEQ ID NO: 229412 - DNA, 30 bp, Artificial Sequence
  Synthetic oligonucleotide
gcctcgcttcagtcgagtctgaggcccaga

SEQ ID NO: 229413 - DNA, 30 bp, Artificial Sequence
  Synthetic oligonucleotide
gtgtaatagagctgactgtacgtgcccaga

SEQ ID NO: 229414 - DNA, 30 bp, Artificial Sequence
  Synthetic oligonucleotide
gattccgagtccgacgttttgtccgccaga

SEQ ID NO: 229415 - DNA, 30 bp, Artificial Sequence
  Synthetic oligonucleotide
agttcccgtgttgatacgtattcggccaga

SEQ ID NO: 229416 - DNA, 30 bp, Artificial Sequence
  Synthetic oligonucleotide
caggttgtgctggccgttggtggggccaga

SEQ ID NO: 229417 - DNA, 30 bp, Artificial Sequence
  Synthetic oligonucleotide
gtagaaaaaaccaggtgtacggatgccaga

SEQ ID NO: 229418 - DNA, 30 bp, Artificial Sequence
  Synthetic oligonucleotide
attacctattagtgcatgtctgaatccaga

SEQ ID NO: 229419 - DNA, 30 bp, Artificial Sequence
  Synthetic oligonucleotide
atgcgtctgtgtatgggatagtactccaga

SEQ ID NO: 229420 - DNA, 30 bp, Artificial Sequence
  Synthetic oligonucleotide
tggggagatggtccagttctcgtctccaga

SEQ ID NO: 229421 - DNA, 30 bp, Artificial Sequence
  Synthetic oligonucleotide
tgcgagcacgctcaccgcatcttgtccaga

SEQ ID NO: 229422 - DNA, 30 bp, Artificial Sequence
  Synthetic oligonucleotide
agatcttattcttggctgcgaagttccaga

SEQ ID NO: 229423 - DNA, 30 bp, Artificial Sequence
  Synthetic oligonucleotide
ttgggtgcgcaataatcagctaacagcaga

SEQ ID NO: 229424 - DNA, 30 bp, Artificial Sequence
  Synthetic oligonucleotide
aaaatcacacagcgtcctgggatcagcaga

SEQ ID NO: 229425 - DNA, 30 bp, Artificial Sequence
  Synthetic oligonucleotide
tgccatagaggtgaccatcatatcagcaga

SEQ ID NO: 229426 - DNA, 30 bp, Artificial Sequence
  Synthetic oligonucleotide
tctgaccaatcgctccgctttgcgagcaga

SEQ ID NO: 229427 - DNA, 30 bp, Artificial Sequence
  Synthetic oligonucleotide
gggatatatggacaccgtagcatgagcaga

SEQ ID NO: 229428 - DNA, 30 bp, Artificial Sequence
  Synthetic oligonucleotide
ttggtacgcgagaatgttgtataacgcaga

SEQ ID NO: 229429 - DNA, 30 bp, Artificial Sequence
  Synthetic oligonucleotide
gggggtcgtacttgtcgataggcccgcaga

SEQ ID NO: 229430 - DNA, 30 bp, Artificial Sequence
  Synthetic oligonucleotide
gactcaagcatgaagatctttcatcgcaga

SEQ ID NO: 229431 - DNA, 30 bp, Artificial Sequence
  Synthetic oligonucleotide
cacgctgccgagggccttacgggtcgcaga

SEQ ID NO: 229432 - DNA, 30 bp, Artificial Sequence
  Synthetic oligonucleotide
aacccccttcaactaaacatgattcgcaga

SEQ ID NO: 229433 - DNA, 30 bp, Artificial Sequence
  Synthetic oligonucleotide
gcttaccaggcaaaggacagggttcgcaga

SEQ ID NO: 229434 - DNA, 30 bp, Artificial Sequence
  Synthetic oligonucleotide
tcatcccctatgcggtattaagtaggcaga

SEQ ID NO: 229435 - DNA, 30 bp, Artificial Sequence
  Synthetic oligonucleotide
atagactgcgcaaacgctgtggagggcaga

SEQ ID NO: 229436 - DNA, 30 bp, Artificial Sequence
  Synthetic oligonucleotide
attggcagctagcgataatccgggggcaga

SEQ ID NO: 229437 - DNA, 30 bp, Artificial Sequence
  Synthetic oligonucleotide
gtcaagttcaggtaattctccgaatgcaga

SEQ ID NO: 229438 - DNA, 30 bp, Artificial Sequence
  Synthetic oligonucleotide
gcgtccgaagtatattacctcacatgcaga

SEQ ID NO: 229439 - DNA, 30 bp, Artificial Sequence
  Synthetic oligonucleotide
aagacagagaaccgcgtggacaactgcaga

SEQ ID NO: 229440 - DNA, 30 bp, Artificial Sequence
  Synthetic oligonucleotide
atagtttattcggctggatgtaactgcaga

SEQ ID NO: 229441 - DNA, 30 bp, Artificial Sequence
  Synthetic oligonucleotide
tcctgagccgcaaggtatatcccctgcaga

SEQ ID NO: 229442 - DNA, 30 bp, Artificial Sequence
  Synthetic oligonucleotide
tggtcagtcgtcgcaaccaaatggtgcaga

SEQ ID NO: 229443 - DNA, 30 bp, Artificial Sequence
  Synthetic oligonucleotide
tgaggcagtcacatcgaggactgttgcaga

SEQ ID NO: 229444 - DNA, 30 bp, Artificial Sequence
  Synthetic oligonucleotide
aggcttaattgccctaccggggtaatcaga

SEQ ID NO: 229445 - DNA, 30 bp, Artificial Sequence
  Synthetic oligonucleotide
tgacccttggtacggcgttcttacatcaga

SEQ ID NO: 229446 - DNA, 30 bp, Artificial Sequence
  Synthetic oligonucleotide
taaagcgctatagtattggcaccgatcaga

SEQ ID NO: 229447 - DNA, 30 bp, Artificial Sequence
  Synthetic oligonucleotide
gttgccatcttgctccatcctcgtatcaga

SEQ ID NO: 229448 - DNA, 30 bp, Artificial Sequence
  Synthetic oligonucleotide
cctcgtgtatgacttgttggaccgctcaga

SEQ ID NO: 229449 - DNA, 30 bp, Artificial Sequence
  Synthetic oligonucleotide
actaatatgcaaatccggcgcaggctcaga

SEQ ID NO: 229450 - DNA, 30 bp, Artificial Sequence
  Synthetic oligonucleotide
ttgtttgggtgaaatggagagggggtcaga

SEQ ID NO: 229451 - DNA, 30 bp, Artificial Sequence
  Synthetic oligonucleotide
tatcttcgccgggcgaggaagggtgtcaga

SEQ ID NO: 229452 - DNA, 30 bp, Artificial Sequence
  Synthetic oligonucleotide
tgcaaataccttcaggtacgcatcttcaga

SEQ ID NO: 229453 - DNA, 30 bp, Artificial Sequence
  Synthetic oligonucleotide
tatatagtcgtcattcatccaacgttcaga

SEQ ID NO: 229454 - DNA, 30 bp, Artificial Sequence
  Synthetic oligonucleotide
ccttggcgcatttggctcagatctttcaga

SEQ ID NO: 229455 - DNA, 30 bp, Artificial Sequence
  Synthetic oligonucleotide
cggaagacaaattactgtaagtgtttcaga

SEQ ID NO: 229456 - DNA, 30 bp, Artificial Sequence
  Synthetic oligonucleotide
ggcattcaagttaggatcgttgaaaagaga

SEQ ID NO: 229457 - DNA, 30 bp, Artificial Sequence
  Synthetic oligonucleotide
tagcgcgtaatctattaaaacatcaagaga

SEQ ID NO: 229458 - DNA, 30 bp, Artificial Sequence
  Synthetic oligonucleotide
caatagaatcctgaattactcacgaagaga

SEQ ID NO: 229459 - DNA, 30 bp, Artificial Sequence
  Synthetic oligonucleotide
ctgggattaggtggattggcatggaagaga

SEQ ID NO: 229460 - DNA, 30 bp, Artificial Sequence
  Synthetic oligonucleotide
ctatccggttgtctgacgctaatgaagaga

SEQ ID NO: 229461 - DNA, 30 bp, Artificial Sequence
  Synthetic oligonucleotide
tgattggttacaaggacaccaactaagaga

SEQ ID NO: 229462 - DNA, 30 bp, Artificial Sequence
  Synthetic oligonucleotide
gacgaatgggccagttgcccatgtaagaga

SEQ ID NO: 229463 - DNA, 30 bp, Artificial Sequence
  Synthetic oligonucleotide
aatagtgctcatgctcgcgggagacagaga

SEQ ID NO: 229464 - DNA, 30 bp, Artificial Sequence
  Synthetic oligonucleotide
cagtccggattagtattaagaggacagaga

SEQ ID NO: 229465 - DNA, 30 bp, Artificial Sequence
  Synthetic oligonucleotide
ctatcgggtggttatttgatgagccagaga

SEQ ID NO: 229466 - DNA, 30 bp, Artificial Sequence
  Synthetic oligonucleotide
aatagaaggtctttcctcaacatccagaga

SEQ ID NO: 229467 - DNA, 30 bp, Artificial Sequence
  Synthetic oligonucleotide
ctaggactctcacgtcgacccgtccagaga

SEQ ID NO: 229468 - DNA, 30 bp, Artificial Sequence
  Synthetic oligonucleotide
gaaggtgctaaacgcaggtattagcagaga

SEQ ID NO: 229469 - DNA, 30 bp, Artificial Sequence
  Synthetic oligonucleotide
gtcactgaagtaccaggcaacacgcagaga

SEQ ID NO: 229470 - DNA, 30 bp, Artificial Sequence
  Synthetic oligonucleotide
ggtcgaccaatcaacatcttcattcagaga

SEQ ID NO: 229471 - DNA, 30 bp, Artificial Sequence
  Synthetic oligonucleotide
tcacgggtgccggacaaccgtgacgagaga

SEQ ID NO: 229472 - DNA, 30 bp, Artificial Sequence
  Synthetic oligonucleotide
taataacctatcgagaccgcccaggagaga

SEQ ID NO: 229473 - DNA, 30 bp, Artificial Sequence
  Synthetic oligonucleotide
ccggttggttcgattgtcacatgtgagaga

SEQ ID NO: 229474 - DNA, 30 bp, Artificial Sequence
  Synthetic oligonucleotide
attcaggcatgttacgaagcctgatagaga

SEQ ID NO: 229475 - DNA, 30 bp, Artificial Sequence
  Synthetic oligonucleotide
acggctcgttgattcagatgcatatagaga

SEQ ID NO: 229476 - DNA, 30 bp, Artificial Sequence
  Synthetic oligonucleotide
gaattgagtcgactctcgtaggcctagaga

SEQ ID NO: 229477 - DNA, 30 bp, Artificial Sequence
  Synthetic oligonucleotide
aggcggtttcccccgcctcggaattagaga

SEQ ID NO: 229478 - DNA, 30 bp, Artificial Sequence
  Synthetic oligonucleotide
tgcttccatactcaggctgtccattagaga

SEQ ID NO: 229479 - DNA, 30 bp, Artificial Sequence
  Synthetic oligonucleotide
cacgtggatgaaggacgggcagcaacgaga

SEQ ID NO: 229480 - DNA, 30 bp, Artificial Sequence
  Synthetic oligonucleotide
actcgacttggagtgttgttagcaacgaga

SEQ ID NO: 229481 - DNA, 30 bp, Artificial Sequence
  Synthetic oligonucleotide
atgtgccccttagaaagatcgtacacgaga

SEQ ID NO: 229482 - DNA, 30 bp, Artificial Sequence
  Synthetic oligonucleotide
attggttgctgtatttcattgcccacgaga

SEQ ID NO: 229483 - DNA, 30 bp, Artificial Sequence
  Synthetic oligonucleotide
gaattgggaaggccatcattgcgaccgaga

SEQ ID NO: 229484 - DNA, 30 bp, Artificial Sequence
  Synthetic oligonucleotide
acgttcatctgttaaccttcttgaccgaga

SEQ ID NO: 229485 - DNA, 30 bp, Artificial Sequence
  Synthetic oligonucleotide
ttaaggtcgaagcgggaaaaatggccgaga

SEQ ID NO: 229486 - DNA, 30 bp, Artificial Sequence
  Synthetic oligonucleotide
cccacttacatcaatggcctaaaagcgaga

SEQ ID NO: 229487 - DNA, 30 bp, Artificial Sequence
  Synthetic oligonucleotide
tacaatgctcataatgtggccttagcgaga

SEQ ID NO: 229488 - DNA, 30 bp, Artificial Sequence
  Synthetic oligonucleotide
gctcccttggattgcgcaagcgaggcgaga

SEQ ID NO: 229489 - DNA, 30 bp, Artificial Sequence
  Synthetic oligonucleotide
gcagtcgtaccgtgcagggtccgtgcgaga

SEQ ID NO: 229490 - DNA, 30 bp, Artificial Sequence
  Synthetic oligonucleotide
taagaacgaaccgctaagataacatcgaga

SEQ ID NO: 229491 - DNA, 30 bp, Artificial Sequence
  Synthetic oligonucleotide
gaatcgccagtgcgatatgtggcctcgaga

SEQ ID NO: 229492 - DNA, 30 bp, Artificial Sequence
  Synthetic oligonucleotide
cacgattgcccccttagtgggccgtcgaga

SEQ ID NO: 229493 - DNA, 30 bp, Artificial Sequence
  Synthetic oligonucleotide
gtggacagtttccaggagcgcatttcgaga

SEQ ID NO: 229494 - DNA, 30 bp, Artificial Sequence
  Synthetic oligonucleotide
tgctctgggtgctaggatcgcgaaaggaga

SEQ ID NO: 229495 - DNA, 30 bp, Artificial Sequence
  Synthetic oligonucleotide
aagggcagggagtcttgaagagacaggaga

SEQ ID NO: 229496 - DNA, 30 bp, Artificial Sequence
  Synthetic oligonucleotide
tgcatcaccgactcgatacgttccaggaga

SEQ ID NO: 229497 - DNA, 30 bp, Artificial Sequence
  Synthetic oligonucleotide
gtatgataaccttgtacagatagcaggaga

SEQ ID NO: 229498 - DNA, 30 bp, Artificial Sequence
  Synthetic oligonucleotide
gctagttattcgactcattaggtcaggaga

SEQ ID NO: 229499 - DNA, 30 bp, Artificial Sequence
  Synthetic oligonucleotide
cgcgcggtggcctgcacgtgtatgaggaga

SEQ ID NO: 229500 - DNA, 30 bp, Artificial Sequence
  Synthetic oligonucleotide
ccggatcagtgggagctaggacaacggaga

SEQ ID NO: 229501 - DNA, 30 bp, Artificial Sequence
  Synthetic oligonucleotide
gcgtggaataggtcgtttggggcacggaga

SEQ ID NO: 229502 - DNA, 30 bp, Artificial Sequence
  Synthetic oligonucleotide
cactcaaggggaccggcctttagtcggaga

SEQ ID NO: 229503 - DNA, 30 bp, Artificial Sequence
  Synthetic oligonucleotide
ccgatctttaaccgggtcaggtgtcggaga

SEQ ID NO: 229504 - DNA, 30 bp, Artificial Sequence
  Synthetic oligonucleotide
cgacggcgcttcttggatacttgggggaga

SEQ ID NO: 229505 - DNA, 30 bp, Artificial Sequence
  Synthetic oligonucleotide
atcccactgtctcaacggaacatggggaga

SEQ ID NO: 229506 - DNA, 30 bp, Artificial Sequence
  Synthetic oligonucleotide
caggcagacgcggtaccccagattgggaga

SEQ ID NO: 229507 - DNA, 30 bp, Artificial Sequence
  Synthetic oligonucleotide
gagaaatagcgcgtccctgggacatggaga

SEQ ID NO: 229508 - DNA, 30 bp, Artificial Sequence
  Synthetic oligonucleotide
aggaattatgtctcgtgaatgagatggaga

SEQ ID NO: 229509 - DNA, 30 bp, Artificial Sequence
  Synthetic oligonucleotide
cctcttgtaacttacaatacctcgtggaga

SEQ ID NO: 229510 - DNA, 30 bp, Artificial Sequence
  Synthetic oligonucleotide
gtccagtcccatggcatatgcaggtggaga

SEQ ID NO: 229511 - DNA, 30 bp, Artificial Sequence
  Synthetic oligonucleotide
tatatccctatcaggaatggcttttggaga

SEQ ID NO: 229512 - DNA, 30 bp, Artificial Sequence
  Synthetic oligonucleotide
ccttatccggctaaacgtgattcgatgaga

SEQ ID NO: 229513 - DNA, 30 bp, Artificial Sequence
  Synthetic oligonucleotide
gaatggggcattggcgaatcaaggatgaga

SEQ ID NO: 229514 - DNA, 30 bp, Artificial Sequence
  Synthetic oligonucleotide
ttaggagcaaaactcgccttcaaactgaga

SEQ ID NO: 229515 - DNA, 30 bp, Artificial Sequence
  Synthetic oligonucleotide
caagttgttcggatgccctgacaactgaga

SEQ ID NO: 229516 - DNA, 30 bp, Artificial Sequence
  Synthetic oligonucleotide
aattgttggacatccgttcaaacactgaga

SEQ ID NO: 229517 - DNA, 30 bp, Artificial Sequence
  Synthetic oligonucleotide
gaacagcagcgtgagtgtaaagcactgaga

SEQ ID NO: 229518 - DNA, 30 bp, Artificial Sequence
  Synthetic oligonucleotide
ggtctgttggtatcctcgtttagactgaga

SEQ ID NO: 229519 - DNA, 30 bp, Artificial Sequence
  Synthetic oligonucleotide
aaacacacgctttcacgcttcggactgaga

SEQ ID NO: 229520 - DNA, 30 bp, Artificial Sequence
  Synthetic oligonucleotide
gtagtaacgccatagatgttgacgctgaga

SEQ ID NO: 229521 - DNA, 30 bp, Artificial Sequence
  Synthetic oligonucleotide
aatgaccataggaccccgtatactctgaga

SEQ ID NO: 229522 - DNA, 30 bp, Artificial Sequence
  Synthetic oligonucleotide
agaggcaccttattcctcggtgcagtgaga

SEQ ID NO: 229523 - DNA, 30 bp, Artificial Sequence
  Synthetic oligonucleotide
ggttttacccggagtgatccatcggtgaga

SEQ ID NO: 229524 - DNA, 30 bp, Artificial Sequence
  Synthetic oligonucleotide
accgcgcccgacaatagccgtttggtgaga

SEQ ID NO: 229525 - DNA, 30 bp, Artificial Sequence
  Synthetic oligonucleotide
aagcgtcgtaaaatattgagatctgtgaga

SEQ ID NO: 229526 - DNA, 30 bp, Artificial Sequence
  Synthetic oligonucleotide
ttaaataactttgcctgcgccatattgaga

SEQ ID NO: 229527 - DNA, 30 bp, Artificial Sequence
  Synthetic oligonucleotide
gaaccctattcggctccggaggtattgaga

SEQ ID NO: 229528 - DNA, 30 bp, Artificial Sequence
  Synthetic oligonucleotide
cccacaacatcttcccgtgtttggttgaga

SEQ ID NO: 229529 - DNA, 30 bp, Artificial Sequence
  Synthetic oligonucleotide
agtacttggggctggccagtgatgttgaga

SEQ ID NO: 229530 - DNA, 30 bp, Artificial Sequence
  Synthetic oligonucleotide
atcggacgttattgtgattgatgtttgaga

SEQ ID NO: 229531 - DNA, 30 bp, Artificial Sequence
  Synthetic oligonucleotide
cagttggtgatgtcaattaaatttttgaga

SEQ ID NO: 229532 - DNA, 30 bp, Artificial Sequence
  Synthetic oligonucleotide
agggggcgaatactgtcgtaatcaaataga

SEQ ID NO: 229533 - DNA, 30 bp, Artificial Sequence
  Synthetic oligonucleotide
gggctgggcccctgatccccccgaaataga

SEQ ID NO: 229534 - DNA, 30 bp, Artificial Sequence
  Synthetic oligonucleotide
agggtcatccacgctattacatcgaataga

SEQ ID NO: 229535 - DNA, 30 bp, Artificial Sequence
  Synthetic oligonucleotide
gaggcagaacgcccatctatatggaataga

SEQ ID NO: 229536 - DNA, 30 bp, Artificial Sequence
  Synthetic oligonucleotide
cgacctcgacctcggtagggtcctaataga

SEQ ID NO: 229537 - DNA, 30 bp, Artificial Sequence
  Synthetic oligonucleotide
tcgaagtcgcgttagcatgatggtaataga

SEQ ID NO: 229538 - DNA, 30 bp, Artificial Sequence
  Synthetic oligonucleotide
gaggagagtatgtcctattcgtgtaataga

SEQ ID NO: 229539 - DNA, 30 bp, Artificial Sequence
  Synthetic oligonucleotide
gcgtaaaaacgtcgagatcgcctgcataga

SEQ ID NO: 229540 - DNA, 31 bp, Artificial Sequence
  Synthetic oligonucleotide
cacagtgccccctcacagagtcaatcataga

SEQ ID NO: 229541 - DNA, 30 bp, Artificial Sequence
  Synthetic oligonucleotide
gttgcgaaggggtccgtcctattcgataga

SEQ ID NO: 229542 - DNA, 30 bp, Artificial Sequence
  Synthetic oligonucleotide
ccgtttaacgtcgcacggagacgggataga

SEQ ID NO: 229543 - DNA, 30 bp, Artificial Sequence
  Synthetic oligonucleotide
acggccactgtaatctagagggctgataga

SEQ ID NO: 229544 - DNA, 30 bp, Artificial Sequence
  Synthetic oligonucleotide
ctactcagctacgagcagcgcaaatataga

SEQ ID NO: 229545 - DNA, 30 bp, Artificial Sequence
  Synthetic oligonucleotide
gtcagaagtaaactgtacgaagcctataga

SEQ ID NO: 229546 - DNA, 30 bp, Artificial Sequence
  Synthetic oligonucleotide
gcaagcccgcgaagacccgtcacgtataga

SEQ ID NO: 229547 - DNA, 30 bp, Artificial Sequence
  Synthetic oligonucleotide
atctcgaaacaggtgtaacttgggtataga

SEQ ID NO: 229548 - DNA, 30 bp, Artificial Sequence
  Synthetic oligonucleotide
atctcaatcaaataggtgataaattataga

SEQ ID NO: 229549 - DNA, 30 bp, Artificial Sequence
  Synthetic oligonucleotide
ggcatgtagggcggtgtaggacgttataga

SEQ ID NO: 229550 - DNA, 30 bp, Artificial Sequence
  Synthetic oligonucleotide
agttcgtcttctggctgttgagtaactaga

SEQ ID NO: 229551 - DNA, 30 bp, Artificial Sequence
  Synthetic oligonucleotide
ggcggaagtacacagcctgtgatcactaga

SEQ ID NO: 229552 - DNA, 30 bp, Artificial Sequence
  Synthetic oligonucleotide
ttgtcagaatcactccattagaagactaga

SEQ ID NO: 229553 - DNA, 30 bp, Artificial Sequence
  Synthetic oligonucleotide
gggctgacgtgtgggcggatttctactaga

SEQ ID NO: 229554 - DNA, 30 bp, Artificial Sequence
  Synthetic oligonucleotide
taccatgattccattaggtagttacctaga

SEQ ID NO: 229555 - DNA, 30 bp, Artificial Sequence
  Synthetic oligonucleotide
ccatcgcgtaaggaaatccgcgatcctaga

SEQ ID NO: 229556 - DNA, 30 bp, Artificial Sequence
  Synthetic oligonucleotide
gtttaaggagcccaaagtcgatatcctaga

SEQ ID NO: 229557 - DNA, 30 bp, Artificial Sequence
  Synthetic oligonucleotide
cagcgccttggaaccgagccgtaagctaga

SEQ ID NO: 229558 - DNA, 27 bp, Artificial Sequence
  Synthetic oligonucleotide
ttgtggcaatacggccaaggcgctaga

SEQ ID NO: 229559 - DNA, 30 bp, Artificial Sequence
  Synthetic oligonucleotide
tcttagggtgtagtatatgagtgcgctaga

SEQ ID NO: 229560 - DNA, 30 bp, Artificial Sequence
  Synthetic oligonucleotide
ccgccacgcgtcgtgcaagcacgggctaga

SEQ ID NO: 229561 - DNA, 30 bp, Artificial Sequence
  Synthetic oligonucleotide
gcgccggcggataaacccggccaatctaga

SEQ ID NO: 229562 - DNA, 30 bp, Artificial Sequence
  Synthetic oligonucleotide
ccaagtaaatgattccccataacatctaga

SEQ ID NO: 229563 - DNA, 30 bp, Artificial Sequence
  Synthetic oligonucleotide
tatcgcgtcttttctcaaaaagcatctaga

SEQ ID NO: 229564 - DNA, 30 bp, Artificial Sequence
  Synthetic oligonucleotide
atagtaaggtcgacagcccatgcatctaga

SEQ ID NO: 229565 - DNA, 30 bp, Artificial Sequence
  Synthetic oligonucleotide
tagtatggatgaccttgaggaggatctaga

SEQ ID NO: 229566 - DNA, 30 bp, Artificial Sequence
  Synthetic oligonucleotide
cggggagatatttttgaccgcctatctaga

SEQ ID NO: 229567 - DNA, 30 bp, Artificial Sequence
  Synthetic oligonucleotide
caggggttcgcttacaactttgcctctaga

SEQ ID NO: 229568 - DNA, 30 bp, Artificial Sequence
  Synthetic oligonucleotide
cgtatgactgctaccggacatggctctaga

SEQ ID NO: 229569 - DNA, 30 bp, Artificial Sequence
  Synthetic oligonucleotide
gggcacgagtagccagcatcctgttctaga

SEQ ID NO: 229570 - DNA, 30 bp, Artificial Sequence
  Synthetic oligonucleotide
acggttaggtctatataagtgtcaagtaga

SEQ ID NO: 229571 - DNA, 30 bp, Artificial Sequence
  Synthetic oligonucleotide
cagcatcagcgtaaaagcgtgaacagtaga

SEQ ID NO: 229572 - DNA, 30 bp, Artificial Sequence
  Synthetic oligonucleotide
cgaaaggagcgttgcacagccgggagtaga

SEQ ID NO: 229573 - DNA, 30 bp, Artificial Sequence
  Synthetic oligonucleotide
tcgctgtgcactgcgtgagggctgagtaga

SEQ ID NO: 229574 - DNA, 30 bp, Artificial Sequence
  Synthetic oligonucleotide
tatctacagtggcaggcggtaacccgtaga

SEQ ID NO: 229575 - DNA, 30 bp, Artificial Sequence
  Synthetic oligonucleotide
accgttccagcattcgtcgtgacccgtaga

SEQ ID NO: 229576 - DNA, 30 bp, Artificial Sequence
  Synthetic oligonucleotide
gtttgctgcggtgtgttccatttgcgtaga

SEQ ID NO: 229577 - DNA, 30 bp, Artificial Sequence
  Synthetic oligonucleotide
gtcccaaatgtgttgaagttccgtcgtaga

SEQ ID NO: 229578 - DNA, 30 bp, Artificial Sequence
  Synthetic oligonucleotide
ttagctcacaattatgtattctagggtaga

SEQ ID NO: 229579 - DNA, 30 bp, Artificial Sequence
  Synthetic oligonucleotide
ttagacgtcgtggtcgtccacaggggtaga

SEQ ID NO: 229580 - DNA, 30 bp, Artificial Sequence
  Synthetic oligonucleotide
ttgtatgattggtagaatttatgtggtaga

SEQ ID NO: 229581 - DNA, 30 bp, Artificial Sequence
  Synthetic oligonucleotide
gtgaggtgtccttatagtgggcgatgtaga

SEQ ID NO: 229582 - DNA, 30 bp, Artificial Sequence
  Synthetic oligonucleotide
aagtgtctatcctggcacagtgggtgtaga

SEQ ID NO: 229583 - DNA, 30 bp, Artificial Sequence
  Synthetic oligonucleotide
ctttggatagaggacaacgatttgtgtaga

SEQ ID NO: 229584 - DNA, 30 bp, Artificial Sequence
  Synthetic oligonucleotide
atgtgctcgttcgcgcgccagtattgtaga

SEQ ID NO: 229585 - DNA, 30 bp, Artificial Sequence
  Synthetic oligonucleotide
cggcagacggacatttcttctcgttgtaga

SEQ ID NO: 229586 - DNA, 30 bp, Artificial Sequence
  Synthetic oligonucleotide
ccagcctgtgttaggcaatggccaattaga

SEQ ID NO: 229587 - DNA, 30 bp, Artificial Sequence
  Synthetic oligonucleotide
tcggcccgtgcgcagatctcggtaattaga

SEQ ID NO: 229588 - DNA, 30 bp, Artificial Sequence
  Synthetic oligonucleotide
ccgtaatcacagcgactcttaaacattaga

SEQ ID NO: 229589 - DNA, 30 bp, Artificial Sequence
  Synthetic oligonucleotide
caagctactcctagttccgatcacattaga

SEQ ID NO: 229590 - DNA, 30 bp, Artificial Sequence
  Synthetic oligonucleotide
gctgatttagagtgtaacaatatgattaga

SEQ ID NO: 229591 - DNA, 30 bp, Artificial Sequence
  Synthetic oligonucleotide
taacatatagtccgaaacaggggtattaga

SEQ ID NO: 229592 - DNA, 30 bp, Artificial Sequence
  Synthetic oligonucleotide
gacgtgattccggggatagttgaacttaga

SEQ ID NO: 229593 - DNA, 30 bp, Artificial Sequence
  Synthetic oligonucleotide
tatccctcgagggaatgaaggtgacttaga

SEQ ID NO: 229594 - DNA, 30 bp, Artificial Sequence
  Synthetic oligonucleotide
agggttttatcacgtacggtccgccttaga

SEQ ID NO: 229595 - DNA, 30 bp, Artificial Sequence
  Synthetic oligonucleotide
agggagtttgaagggagggcacttcttaga

SEQ ID NO: 229596 - DNA, 30 bp, Artificial Sequence
  Synthetic oligonucleotide
tatagtcatcgcgctatcgagaaagttaga

SEQ ID NO: 229597 - DNA, 30 bp, Artificial Sequence
  Synthetic oligonucleotide
tcactacaacttggaaaacaagtcgttaga

SEQ ID NO: 229598 - DNA, 30 bp, Artificial Sequence
  Synthetic oligonucleotide
catccataaggccgcgttctaggggttaga

SEQ ID NO: 229599 - DNA, 30 bp, Artificial Sequence
  Synthetic oligonucleotide
tggaggagtagagcgataattttggttaga

SEQ ID NO: 229600 - DNA, 30 bp, Artificial Sequence
  Synthetic oligonucleotide
gtgatgaacgagtacacaagcgctgttaga

SEQ ID NO: 229601 - DNA, 30 bp, Artificial Sequence
  Synthetic oligonucleotide
cgcgttggcacccggggaatatctgttaga

SEQ ID NO: 229602 - DNA, 30 bp, Artificial Sequence
  Synthetic oligonucleotide
tgtataacgtatcaggaccggacaaaacga

SEQ ID NO: 229603 - DNA, 30 bp, Artificial Sequence
  Synthetic oligonucleotide
gtggggatctattcgcagcctgcaaaacga

SEQ ID NO: 229604 - DNA, 30 bp, Artificial Sequence
  Synthetic oligonucleotide
gcgactttacaacctccaagaccgaaacga

SEQ ID NO: 229605 - DNA, 30 bp, Artificial Sequence
  Synthetic oligonucleotide
ggtataccaattattcaaagaacacaacga

SEQ ID NO: 229606 - DNA, 30 bp, Artificial Sequence
  Synthetic oligonucleotide
ctagccatcgagtggcgggcaccacaacga

SEQ ID NO: 229607 - DNA, 30 bp, Artificial Sequence
  Synthetic oligonucleotide
aacttgccttactttgcctgcatccaacga

SEQ ID NO: 229608 - DNA, 30 bp, Artificial Sequence
  Synthetic oligonucleotide
gtaccgttcgatggattaactctgcaacga

SEQ ID NO: 229609 - DNA, 30 bp, Artificial Sequence
  Synthetic oligonucleotide
cctcccttatgctataattatgtgcaacga

SEQ ID NO: 229610 - DNA, 30 bp, Artificial Sequence
  Synthetic oligonucleotide
cctttgcagcaagagttgtattctcaacga

SEQ ID NO: 229611 - DNA, 30 bp, Artificial Sequence
  Synthetic oligonucleotide
agacggtccctgctttaggttggtcaacga

SEQ ID NO: 229612 - DNA, 30 bp, Artificial Sequence
  Synthetic oligonucleotide
atgcaacctgacattgggcttgttcaacga

SEQ ID NO: 229613 - DNA, 30 bp, Artificial Sequence
  Synthetic oligonucleotide
tccctcattaaaactggggtagcggaacga

SEQ ID NO: 229614 - DNA, 30 bp, Artificial Sequence
  Synthetic oligonucleotide
gaacggactagccattgcgtatctgaacga

SEQ ID NO: 229615 - DNA, 30 bp, Artificial Sequence
  Synthetic oligonucleotide
gcaactaaaaaaatctggaagggtgaacga

SEQ ID NO: 229616 - DNA, 30 bp, Artificial Sequence
  Synthetic oligonucleotide
cgctctgctccagacctcagatgtgaacga

SEQ ID NO: 229617 - DNA, 30 bp, Artificial Sequence
  Synthetic oligonucleotide
tagcataatgacactggtaggtttgaacga

SEQ ID NO: 229618 - DNA, 30 bp, Artificial Sequence
  Synthetic oligonucleotide
cagccgaaacctctgtgcagacactaacga

SEQ ID NO: 229619 - DNA, 30 bp, Artificial Sequence
  Synthetic oligonucleotide
gccaatcgcttggtcgactcgagctaacga

SEQ ID NO: 229620 - DNA, 30 bp, Artificial Sequence
  Synthetic oligonucleotide
cgctaaatacccataagatctttctaacga

SEQ ID NO: 229621 - DNA, 30 bp, Artificial Sequence
  Synthetic oligonucleotide
tcacgaaataatcccaatataacgtaacga

SEQ ID NO: 229622 - DNA, 30 bp, Artificial Sequence
  Synthetic oligonucleotide
tctgcttggtaagcgattctgcattaacga

SEQ ID NO: 229623 - DNA, 30 bp, Artificial Sequence
  Synthetic oligonucleotide
ccgacagagagttcacgtgtgacttaacga

SEQ ID NO: 229624 - DNA, 30 bp, Artificial Sequence
  Synthetic oligonucleotide
ggttttacattgtgggaccagacaacacga

SEQ ID NO: 229625 - DNA, 30 bp, Artificial Sequence
  Synthetic oligonucleotide
actgttgagtacaatggcagcgtaacacga

SEQ ID NO: 229626 - DNA, 30 bp, Artificial Sequence
  Synthetic oligonucleotide
cgttcggaaggaactcaataggtaacacga

SEQ ID NO: 229627 - DNA, 30 bp, Artificial Sequence
  Synthetic oligonucleotide
atggacatggtatgcggtgccgtcacacga

SEQ ID NO: 229628 - DNA, 30 bp, Artificial Sequence
  Synthetic oligonucleotide
gtgctcaatagacctagtaaactgacacga

SEQ ID NO: 229629 - DNA, 30 bp, Artificial Sequence
  Synthetic oligonucleotide
cccttttcccccctctcccgagacccacga

SEQ ID NO: 229630 - DNA, 30 bp, Artificial Sequence
  Synthetic oligonucleotide
attggtgcgaccgcaatactgtctccacga

SEQ ID NO: 229631 - DNA, 30 bp, Artificial Sequence
  Synthetic oligonucleotide
gctgaatgatacaagctagcctttccacga

SEQ ID NO: 229632 - DNA, 30 bp, Artificial Sequence
  Synthetic oligonucleotide
agatgttctatagccctatggggagcacga

SEQ ID NO: 229633 - DNA, 30 bp, Artificial Sequence
  Synthetic oligonucleotide
ctgatcgtagtaatatcttgatccgcacga

SEQ ID NO: 229634 - DNA, 30 bp, Artificial Sequence
  Synthetic oligonucleotide
cggtacctgagtagaatgtcgatcgcacga

SEQ ID NO: 229635 - DNA, 30 bp, Artificial Sequence
  Synthetic oligonucleotide
agagaaagtgtatgtggttgctttgcacga

SEQ ID NO: 229636 - DNA, 30 bp, Artificial Sequence
  Synthetic oligonucleotide
ttcatacagcgagtcgcaacgaaatcacga

SEQ ID NO: 229637 - DNA, 30 bp, Artificial Sequence
  Synthetic oligonucleotide
gcgggatactttggatataatgcatcacga

SEQ ID NO: 229638 - DNA, 30 bp, Artificial Sequence
  Synthetic oligonucleotide
cctcttgaaagtgcgatgagaacgtcacga

SEQ ID NO: 229639 - DNA, 30 bp, Artificial Sequence
  Synthetic oligonucleotide
caaaaatcccccgaatcaggaccttcacga

SEQ ID NO: 229640 - DNA, 30 bp, Artificial Sequence
  Synthetic oligonucleotide
cgtctcgttcacgggtactggggttcacga

SEQ ID NO: 229641 - DNA, 30 bp, Artificial Sequence
  Synthetic oligonucleotide
gatagatcacatcaacctaataaaagacga

SEQ ID NO: 229642 - DNA, 30 bp, Artificial Sequence
  Synthetic oligonucleotide
cccgccactaacatgagtccgtcaagacga

SEQ ID NO: 229643 - DNA, 30 bp, Artificial Sequence
  Synthetic oligonucleotide
tgagctcggtgaatgggggactgaagacga

SEQ ID NO: 229644 - DNA, 30 bp, Artificial Sequence
  Synthetic oligonucleotide
tgtctgaggaccatactcaagttaagacga

SEQ ID NO: 229645 - DNA, 30 bp, Artificial Sequence
  Synthetic oligonucleotide
ggcgagtcgcccagcagaccgcacagacga

SEQ ID NO: 229646 - DNA, 30 bp, Artificial Sequence
  Synthetic oligonucleotide
ctgtaatgttgaataatgatagcgagacga

SEQ ID NO: 229647 - DNA, 30 bp, Artificial Sequence
  Synthetic oligonucleotide
gtaataagattacgccacagcgcacgacga

SEQ ID NO: 229648 - DNA, 30 bp, Artificial Sequence
  Synthetic oligonucleotide
ctagagtttgacgctgttcaagcaggacga

SEQ ID NO: 229649 - DNA, 30 bp, Artificial Sequence
  Synthetic oligonucleotide
gaggcgacgaaacgcctcctcctaggacga

SEQ ID NO: 229650 - DNA, 30 bp, Artificial Sequence
  Synthetic oligonucleotide
tccggttagatacgagtgcttcccggacga

SEQ ID NO: 229651 - DNA, 30 bp, Artificial Sequence
  Synthetic oligonucleotide
atcgtaggtaattctaatcggagctgacga

SEQ ID NO: 229652 - DNA, 30 bp, Artificial Sequence
  Synthetic oligonucleotide
acaactaagggtacgtctaaaaagtgacga

SEQ ID NO: 229653 - DNA, 30 bp, Artificial Sequence
  Synthetic oligonucleotide
tatcgactggcgttagtggtagcttgacga

SEQ ID NO: 229654 - DNA, 30 bp, Artificial Sequence
  Synthetic oligonucleotide
ctgagagatttctaggagaccagaatacga

SEQ ID NO: 229655 - DNA, 30 bp, Artificial Sequence
  Synthetic oligonucleotide
tggctgttttaaacatggctcgggatacga

SEQ ID NO: 229656 - DNA, 30 bp, Artificial Sequence
  Synthetic oligonucleotide
agttacgaggcatatttcatttggatacga

SEQ ID NO: 229657 - DNA, 30 bp, Artificial Sequence
  Synthetic oligonucleotide
ttgagattttgttttcaggaaaaactacga

SEQ ID NO: 229658 - DNA, 30 bp, Artificial Sequence
  Synthetic oligonucleotide
gggagggtttgcgcgcgggaaagagtacga

SEQ ID NO: 229659 - DNA, 30 bp, Artificial Sequence
  Synthetic oligonucleotide
gtgtattcgtgtttctattaattagtacga

SEQ ID NO: 229660 - DNA, 30 bp, Artificial Sequence
  Synthetic oligonucleotide
ataaccctcgcacgtattaggtccgtacga

SEQ ID NO: 229661 - DNA, 29 bp, Artificial Sequence
  Synthetic oligonucleotide
aacgggggctcagtagacgcgaggtacga

SEQ ID NO: 229662 - DNA, 30 bp, Artificial Sequence
  Synthetic oligonucleotide
ggatacagggcgcaaacatatccggtacga

SEQ ID NO: 229663 - DNA, 30 bp, Artificial Sequence
  Synthetic oligonucleotide
gtgtatacgatgctgacttcatgggtacga

SEQ ID NO: 229664 - DNA, 30 bp, Artificial Sequence
  Synthetic oligonucleotide
gtgccgactatgctccttgatccattacga

SEQ ID NO: 229665 - DNA, 30 bp, Artificial Sequence
  Synthetic oligonucleotide
cactacttcagtatccatcgcgcattacga

SEQ ID NO: 229666 - DNA, 30 bp, Artificial Sequence
  Synthetic oligonucleotide
aacaacggtctcatggaaatgtccttacga

SEQ ID NO: 229667 - DNA, 30 bp, Artificial Sequence
  Synthetic oligonucleotide
aaaaccgtctatcatgaaaactgcttacga

SEQ ID NO: 229668 - DNA, 30 bp, Artificial Sequence
  Synthetic oligonucleotide
ggcgttcacagaccgtgacgtgctttacga

SEQ ID NO: 229669 - DNA, 30 bp, Artificial Sequence
  Synthetic oligonucleotide
ggagcaccaggtcacatgacgtgtttacga

SEQ ID NO: 229670 - DNA, 30 bp, Artificial Sequence
  Synthetic oligonucleotide
gtattgggtatcagaattcgcgaaaaccga

SEQ ID NO: 229671 - DNA, 30 bp, Artificial Sequence
  Synthetic oligonucleotide
aaagttatccagttccagaagagaaaccga

SEQ ID NO: 229672 - DNA, 30 bp, Artificial Sequence
  Synthetic oligonucleotide
cgcggaaacaactaaagtaagttaaaccga

SEQ ID NO: 229673 - DNA, 30 bp, Artificial Sequence
  Synthetic oligonucleotide
actacggtccgtatcgttgcaaacaaccga

SEQ ID NO: 229674 - DNA, 30 bp, Artificial Sequence
  Synthetic oligonucleotide
ataggacgactcataatgcgcggcaaccga

SEQ ID NO: 229675 - DNA, 30 bp, Artificial Sequence
  Synthetic oligonucleotide
tatagtggtaagtcgttattccggaaccga

SEQ ID NO: 229676 - DNA, 30 bp, Artificial Sequence
  Synthetic oligonucleotide
gtgtatacgttggcaggagcccaccaccga

SEQ ID NO: 229677 - DNA, 30 bp, Artificial Sequence
  Synthetic oligonucleotide
agtgctcagcattctgggtcgtaccaccga

SEQ ID NO: 229678 - DNA, 30 bp, Artificial Sequence
  Synthetic oligonucleotide
ttaacgttcgaattgcctcggaatcaccga

SEQ ID NO: 229679 - DNA, 30 bp, Artificial Sequence
  Synthetic oligonucleotide
ggagcgctttagtgaactcgctgagaccga

SEQ ID NO: 229680 - DNA, 30 bp, Artificial Sequence
  Synthetic oligonucleotide
ctacttacagcaatccaggcgttagaccga

SEQ ID NO: 229681 - DNA, 30 bp, Artificial Sequence
  Synthetic oligonucleotide
aacaaaatccgagggcttggtagcgaccga

SEQ ID NO: 229682 - DNA, 30 bp, Artificial Sequence
  Synthetic oligonucleotide
gacacgtggtgacagcgtgctaattaccga

SEQ ID NO: 229683 - DNA, 30 bp, Artificial Sequence
  Synthetic oligonucleotide
ctggtagcttttagggccgcaaagacccga

SEQ ID NO: 229684 - DNA, 30 bp, Artificial Sequence
  Synthetic oligonucleotide
gtatcgggatatttaaggcgtcacccccga

SEQ ID NO: 229685 - DNA, 30 bp, Artificial Sequence
  Synthetic oligonucleotide
gaggcccataagacaatggctttcccccga

SEQ ID NO: 229686 - DNA, 30 bp, Artificial Sequence
  Synthetic oligonucleotide
ttcacgatctaatgatgtgtgctgccccga

SEQ ID NO: 229687 - DNA, 30 bp, Artificial Sequence
  Synthetic oligonucleotide
cacgtcaattggggcgaaagtactccccga

SEQ ID NO: 229688 - DNA, 30 bp, Artificial Sequence
  Synthetic oligonucleotide
acatatacagctcagtagcgttttccccga

SEQ ID NO: 229689 - DNA, 30 bp, Artificial Sequence
  Synthetic oligonucleotide
ctgacccgtattgagaactttcgagcccga

SEQ ID NO: 229690 - DNA, 30 bp, Artificial Sequence
  Synthetic oligonucleotide
actctggcaacacccggacttaacgcccga

SEQ ID NO: 229691 - DNA, 30 bp, Artificial Sequence
  Synthetic oligonucleotide
catcgtggcgaccgtagtgcagcggcccga

SEQ ID NO: 229692 - DNA, 30 bp, Artificial Sequence
  Synthetic oligonucleotide
acccgttcctgatggacgataaatgcccga

SEQ ID NO: 229693 - DNA, 30 bp, Artificial Sequence
  Synthetic oligonucleotide
aggtcaaaggcttttcagttgtaatcccga

SEQ ID NO: 229694 - DNA, 30 bp, Artificial Sequence
  Synthetic oligonucleotide
gtacgttgtcagcatatacaggactcccga

SEQ ID NO: 229695 - DNA, 30 bp, Artificial Sequence
  Synthetic oligonucleotide
taaaggctctttgagtgccagtactcccga

SEQ ID NO: 229696 - DNA, 30 bp, Artificial Sequence
  Synthetic oligonucleotide
gtgtagagtaattaagaggtagtctcccga

SEQ ID NO: 229697 - DNA, 30 bp, Artificial Sequence
  Synthetic oligonucleotide
atagacggtttatcttgtgtacagtcccga

SEQ ID NO: 229698 - DNA, 30 bp, Artificial Sequence
  Synthetic oligonucleotide
ccacgagagttacctaacagatcttcccga

SEQ ID NO: 229699 - DNA, 30 bp, Artificial Sequence
  Synthetic oligonucleotide
caaccccggttaagccggaagggttcccga

SEQ ID NO: 229700 - DNA, 30 bp, Artificial Sequence
  Synthetic oligonucleotide
ctttaggaaccgaaccctacgggcagccga

SEQ ID NO: 229701 - DNA, 30 bp, Artificial Sequence
  Synthetic oligonucleotide
ctccgcgggagaatcagggacccgagccga

SEQ ID NO: 229702 - DNA, 30 bp, Artificial Sequence
  Synthetic oligonucleotide
cttggttaatggtgagtaaaaaatagccga

SEQ ID NO: 229703 - DNA, 30 bp, Artificial Sequence
  Synthetic oligonucleotide
taactttcggaagtatccataagtagccga

SEQ ID NO: 229704 - DNA, 30 bp, Artificial Sequence
  Synthetic oligonucleotide
agtctgtccgagtcgcctaaactacgccga

SEQ ID NO: 229705 - DNA, 30 bp, Artificial Sequence
  Synthetic oligonucleotide
gtaaatgggatcggaactgtataccgccga

SEQ ID NO: 229706 - DNA, 30 bp, Artificial Sequence
  Synthetic oligonucleotide
ggccttccacagagcaatctgttccgccga

SEQ ID NO: 229707 - DNA, 30 bp, Artificial Sequence
  Synthetic oligonucleotide
tttagcacatatgcactcgtaggtcgccga

SEQ ID NO: 229708 - DNA, 30 bp, Artificial Sequence
  Synthetic oligonucleotide
ctcaatctacttggtgtttgttagggccga

SEQ ID NO: 229709 - DNA, 30 bp, Artificial Sequence
  Synthetic oligonucleotide
tttggccggcacaatctgtgtgatggccga

SEQ ID NO: 229710 - DNA, 30 bp, Artificial Sequence
  Synthetic oligonucleotide
tttgaccggatgggttgtattactggccga

SEQ ID NO: 229711 - DNA, 30 bp, Artificial Sequence
  Synthetic oligonucleotide
ctgcccatcagatacacgcgtcttggccga

SEQ ID NO: 229712 - DNA, 31 bp, Artificial Sequence
  Synthetic oligonucleotide
ttagcccagcttccgtcgacccgcctgccga

SEQ ID NO: 229713 - DNA, 30 bp, Artificial Sequence
  Synthetic oligonucleotide
tcacgaaccgagtctgagttttagtgccga

SEQ ID NO: 229714 - DNA, 30 bp, Artificial Sequence
  Synthetic oligonucleotide
cttaaaacattcacgaagcttccgtgccga

SEQ ID NO: 229715 - DNA, 30 bp, Artificial Sequence
  Synthetic oligonucleotide
ctcgcgaaatacccaggtattgcgtgccga

SEQ ID NO: 229716 - DNA, 26 bp, Artificial Sequence
  Synthetic oligonucleotide
cctccgtaaaccctatggattgccga

SEQ ID NO: 229717 - DNA, 30 bp, Artificial Sequence
  Synthetic oligonucleotide
aaacgtagcttcctccactaattaatccga

SEQ ID NO: 229718 - DNA, 30 bp, Artificial Sequence
  Synthetic oligonucleotide
aacgcggcccctgctttatcacacatccga

SEQ ID NO: 229719 - DNA, 30 bp, Artificial Sequence
  Synthetic oligonucleotide
atttagtgcgcgtagcggagccccatccga

SEQ ID NO: 229720 - DNA, 30 bp, Artificial Sequence
  Synthetic oligonucleotide
ttgcggtatatgtaaggtcgggtcatccga

SEQ ID NO: 229721 - DNA, 30 bp, Artificial Sequence
  Synthetic oligonucleotide
agaaaatataagggaatcaaaaagatccga

SEQ ID NO: 229722 - DNA, 30 bp, Artificial Sequence
  Synthetic oligonucleotide
cacggttcgtccggcctcaagtcgatccga

SEQ ID NO: 229723 - DNA, 30 bp, Artificial Sequence
  Synthetic oligonucleotide
gtctttgcgaacagtctgtatcatatccga

SEQ ID NO: 229724 - DNA, 30 bp, Artificial Sequence
  Synthetic oligonucleotide
atacactcattgtgcgtttgcgatatccga

SEQ ID NO: 229725 - DNA, 30 bp, Artificial Sequence
  Synthetic oligonucleotide
tttataggaacaaaaaacgatagtatccga

SEQ ID NO: 229726 - DNA, 30 bp, Artificial Sequence
  Synthetic oligonucleotide
agagcgccttaaactaatcagacactccga

SEQ ID NO: 229727 - DNA, 30 bp, Artificial Sequence
  Synthetic oligonucleotide
cgctcatacaagtaagctaagcggctccga

SEQ ID NO: 229728 - DNA, 30 bp, Artificial Sequence
  Synthetic oligonucleotide
atatccccgaataagccaacgttgctccga

SEQ ID NO: 229729 - DNA, 30 bp, Artificial Sequence
  Synthetic oligonucleotide
cctacgaaatattccgcagaaatagtccga

SEQ ID NO: 229730 - DNA, 30 bp, Artificial Sequence
  Synthetic oligonucleotide
gtgtattgagcgattcactcgcatgtccga

SEQ ID NO: 229731 - DNA, 30 bp, Artificial Sequence
  Synthetic oligonucleotide
caagttaaaaattctacattggcattccga

SEQ ID NO: 229732 - DNA, 30 bp, Artificial Sequence
  Synthetic oligonucleotide
ctaagtagctgtcctttggaatccttccga

SEQ ID NO: 229733 - DNA, 30 bp, Artificial Sequence
  Synthetic oligonucleotide
agctgagcatccgataacgggctgttccga

SEQ ID NO: 229734 - DNA, 30 bp, Artificial Sequence
  Synthetic oligonucleotide
agtaattcgacaaaatgacagcaaaagcga

SEQ ID NO: 229735 - DNA, 30 bp, Artificial Sequence
  Synthetic oligonucleotide
aaattggaagtatatgataatcaaaagcga

SEQ ID NO: 229736 - DNA, 30 bp, Artificial Sequence
  Synthetic oligonucleotide
agggcacaaaactggacagcgcgaaagcga

SEQ ID NO: 229737 - DNA, 30 bp, Artificial Sequence
  Synthetic oligonucleotide
aaacgtgaacgttcatttccccagaagcga

SEQ ID NO: 229738 - DNA, 30 bp, Artificial Sequence
  Synthetic oligonucleotide
ttgacaagagtgggcttatgtcttaagcga

SEQ ID NO: 229739 - DNA, 30 bp, Artificial Sequence
  Synthetic oligonucleotide
aaagacctcaagcggcgagttacccagcga

SEQ ID NO: 229740 - DNA, 30 bp, Artificial Sequence
  Synthetic oligonucleotide
atgtcgactctcttgttactttcccagcga

SEQ ID NO: 229741 - DNA, 30 bp, Artificial Sequence
  Synthetic oligonucleotide
ctacacccttagccgatcacaagccagcga

SEQ ID NO: 229742 - DNA, 30 bp, Artificial Sequence
  Synthetic oligonucleotide
agccggcgtattatagctcgatgccagcga

SEQ ID NO: 229743 - DNA, 30 bp, Artificial Sequence
  Synthetic oligonucleotide
cagatgtactttaacgagtcacggcagcga

SEQ ID NO: 229744 - DNA, 30 bp, Artificial Sequence
  Synthetic oligonucleotide
cagggcacagccgatttcggctatcagcga

SEQ ID NO: 229745 - DNA, 30 bp, Artificial Sequence
  Synthetic oligonucleotide
aggtagtcgacccgcacatgttcagagcga

SEQ ID NO: 229746 - DNA, 30 bp, Artificial Sequence
  Synthetic oligonucleotide
gcgttaaagagagcattatcccacgagcga

SEQ ID NO: 229747 - DNA, 30 bp, Artificial Sequence
  Synthetic oligonucleotide
ggtgagacggcgcttgattacttcgagcga

SEQ ID NO: 229748 - DNA, 30 bp, Artificial Sequence
  Synthetic oligonucleotide
tacatcgaatccacaaatgaagaggagcga

SEQ ID NO: 229749 - DNA, 30 bp, Artificial Sequence
  Synthetic oligonucleotide
aggaggcgacatcaacgtcctttggagcga

SEQ ID NO: 229750 - DNA, 30 bp, Artificial Sequence
  Synthetic oligonucleotide
ccctacgaatctacgggttattctgagcga

SEQ ID NO: 229751 - DNA, 30 bp, Artificial Sequence
  Synthetic oligonucleotide
caagaaatcgtaggacattcccaatagcga

SEQ ID NO: 229752 - DNA, 30 bp, Artificial Sequence
  Synthetic oligonucleotide
cgtgagggacccagcgagaacttatagcga

SEQ ID NO: 229753 - DNA, 30 bp, Artificial Sequence
  Synthetic oligonucleotide
gcttactgtgagccatccaccccttagcga

SEQ ID NO: 229754 - DNA, 30 bp, Artificial Sequence
  Synthetic oligonucleotide
cactaccgaccctctcatgttctaacgcga

SEQ ID NO: 229755 - DNA, 30 bp, Artificial Sequence
  Synthetic oligonucleotide
acgcgagcgctttagggtcgcaacacgcga

SEQ ID NO: 229756 - DNA, 30 bp, Artificial Sequence
  Synthetic oligonucleotide
cgattacaagttgggtttatgtacacgcga

SEQ ID NO: 229757 - DNA, 30 bp, Artificial Sequence
  Synthetic oligonucleotide
accgttagggacagatatcgtaggacgcga

SEQ ID NO: 229758 - DNA, 30 bp, Artificial Sequence
  Synthetic oligonucleotide
cgtcctatgtctttagactgcgggacgcga

SEQ ID NO: 229759 - DNA, 30 bp, Artificial Sequence
  Synthetic oligonucleotide
tcgataggcatattttctataaatacgcga

SEQ ID NO: 229760 - DNA, 30 bp, Artificial Sequence
  Synthetic oligonucleotide
ccgtcgcattttgaagcagtacctacgcga

SEQ ID NO: 229761 - DNA, 30 bp, Artificial Sequence
  Synthetic oligonucleotide
caggcgacgggaaattgctagattacgcga

SEQ ID NO: 229762 - DNA, 30 bp, Artificial Sequence
  Synthetic oligonucleotide
gattcagagcggtactacgatgccgcgcga

SEQ ID NO: 229763 - DNA, 30 bp, Artificial Sequence
  Synthetic oligonucleotide
cggtacttcagctttatgctactcgcgcga

SEQ ID NO: 229764 - DNA, 31 bp, Artificial Sequence
  Synthetic oligonucleotide
gtcacttagaaaggctgtaaccttcgcgcga

SEQ ID NO: 229765 - DNA, 30 bp, Artificial Sequence
  Synthetic oligonucleotide
cttgccgactcttacacattccaggcgcga

SEQ ID NO: 229766 - DNA, 30 bp, Artificial Sequence
  Synthetic oligonucleotide
aaacgaatacgctatgaccatagggcgcga

SEQ ID NO: 229767 - DNA, 30 bp, Artificial Sequence
  Synthetic oligonucleotide
gtaagtcgtccgtggaagacacgggcgcga

SEQ ID NO: 229768 - DNA, 30 bp, Artificial Sequence
  Synthetic oligonucleotide
aaggatgcgggatcgtgagccaatgcgcga

SEQ ID NO: 229769 - DNA, 30 bp, Artificial Sequence
  Synthetic oligonucleotide
tagctctgggagctgtcacccactgcgcga

SEQ ID NO: 229770 - DNA, 30 bp, Artificial Sequence
  Synthetic oligonucleotide
atcgcgggtctggctgcgctggtatcgcga

SEQ ID NO: 229771 - DNA, 30 bp, Artificial Sequence
  Synthetic oligonucleotide
caagatgtgctaacattttataactcgcga

SEQ ID NO: 229772 - DNA, 30 bp, Artificial Sequence
  Synthetic oligonucleotide
gcccagggtgagcataacgtgccgtcgcga

SEQ ID NO: 229773 - DNA, 30 bp, Artificial Sequence
  Synthetic oligonucleotide
gatccgcatgagggtcgcatgaggtcgcga

SEQ ID NO: 229774 - DNA, 30 bp, Artificial Sequence
  Synthetic oligonucleotide
gaccccaggtgatatcattaacataggcga

SEQ ID NO: 229775 - DNA, 30 bp, Artificial Sequence
  Synthetic oligonucleotide
gcgatatcggaatgccatgttacccggcga

SEQ ID NO: 229776 - DNA, 30 bp, Artificial Sequence
  Synthetic oligonucleotide
ggaacagatttacatcccgagccccggcga

SEQ ID NO: 229777 - DNA, 30 bp, Artificial Sequence
  Synthetic oligonucleotide
tacgtacccacaaagttgtcagcgcggcga

SEQ ID NO: 229778 - DNA, 30 bp, Artificial Sequence
  Synthetic oligonucleotide
agcctgactgctgggctgatctaagggcga

SEQ ID NO: 229779 - DNA, 30 bp, Artificial Sequence
  Synthetic oligonucleotide
tcactgcgggggttcgggaggtgcgggcga

SEQ ID NO: 229780 - DNA, 30 bp, Artificial Sequence
  Synthetic oligonucleotide
gcatcaacttcgacaagtagtcaggggcga

SEQ ID NO: 229781 - DNA, 30 bp, Artificial Sequence
  Synthetic oligonucleotide
ggcgtgcgggtagtcaccaacgtggggcga

SEQ ID NO: 229782 - DNA, 30 bp, Artificial Sequence
  Synthetic oligonucleotide
ggtcatgtagtcgccatgacgaatgggcga

SEQ ID NO: 229783 - DNA, 30 bp, Artificial Sequence
  Synthetic oligonucleotide
tgagtgtttttggacagctatcatgggcga

SEQ ID NO: 229784 - DNA, 30 bp, Artificial Sequence
  Synthetic oligonucleotide
aactggtttagcaacgttacatcctggcga

SEQ ID NO: 229785 - DNA, 30 bp, Artificial Sequence
  Synthetic oligonucleotide
ggaagtatttccgaagttaagaagtggcga

SEQ ID NO: 229786 - DNA, 30 bp, Artificial Sequence
  Synthetic oligonucleotide
tcggtttaagaaaatccatcgagaatgcga

SEQ ID NO: 229787 - DNA, 30 bp, Artificial Sequence
  Synthetic oligonucleotide
ccctaagaagcgcgaccagggctcatgcga

SEQ ID NO: 229788 - DNA, 30 bp, Artificial Sequence
  Synthetic oligonucleotide
tcgcgttacgaaattcggataaatatgcga

SEQ ID NO: 229789 - DNA, 30 bp, Artificial Sequence
  Synthetic oligonucleotide
caaagaacattagcggcagcaactatgcga

SEQ ID NO: 229790 - DNA, 30 bp, Artificial Sequence
  Synthetic oligonucleotide
atttacgatcgtgcgagaggtcggctgcga

SEQ ID NO: 229791 - DNA, 30 bp, Artificial Sequence
  Synthetic oligonucleotide
taacgtcggcagttacaagctaacgtgcga

SEQ ID NO: 229792 - DNA, 30 bp, Artificial Sequence
  Synthetic oligonucleotide
tagggttaaatgtggctgagagcattgcga

SEQ ID NO: 229793 - DNA, 30 bp, Artificial Sequence
  Synthetic oligonucleotide
tgtagataactgggagcaatagcattgcga

SEQ ID NO: 229794 - DNA, 30 bp, Artificial Sequence
  Synthetic oligonucleotide
attagagactaaagcggcacgtcattgcga

SEQ ID NO: 229795 - DNA, 30 bp, Artificial Sequence
  Synthetic oligonucleotide
gagatccctgaaaggtcggtatcaaatcga

SEQ ID NO: 229796 - DNA, 30 bp, Artificial Sequence
  Synthetic oligonucleotide
acatgtaccccaggtttacatataaatcga

SEQ ID NO: 229797 - DNA, 30 bp, Artificial Sequence
  Synthetic oligonucleotide
cactttctgatatcttaacagaccaatcga

SEQ ID NO: 229798 - DNA, 30 bp, Artificial Sequence
  Synthetic oligonucleotide
tttaatgcaaaacgagtcagccggaatcga

SEQ ID NO: 229799 - DNA, 30 bp, Artificial Sequence
  Synthetic oligonucleotide
gctcggggctcaatgtttgacgggaatcga

SEQ ID NO: 229800 - DNA, 30 bp, Artificial Sequence
  Synthetic oligonucleotide
aaacgggaaatcctgaaacacgtacatcga

SEQ ID NO: 229801 - DNA, 30 bp, Artificial Sequence
  Synthetic oligonucleotide
attccactggactctaggtaattccatcga

SEQ ID NO: 229802 - DNA, 30 bp, Artificial Sequence
  Synthetic oligonucleotide
tctctttcgacgtgacagttagcgcatcga

SEQ ID NO: 229803 - DNA, 30 bp, Artificial Sequence
  Synthetic oligonucleotide
ggaatttggtagggaatgtctgctcatcga

SEQ ID NO: 229804 - DNA, 30 bp, Artificial Sequence
  Synthetic oligonucleotide
cctagtggagaagcacgagtattagatcga

SEQ ID NO: 229805 - DNA, 30 bp, Artificial Sequence
  Synthetic oligonucleotide
tggcccaacacgtagcccggcttagatcga

SEQ ID NO: 229806 - DNA, 30 bp, Artificial Sequence
  Synthetic oligonucleotide
ttgtatgcagacaggagtagtcaggatcga

SEQ ID NO: 229807 - DNA, 30 bp, Artificial Sequence
  Synthetic oligonucleotide
ttgtcctatcgggagtgcgttggtgatcga

SEQ ID NO: 229808 - DNA, 30 bp, Artificial Sequence
  Synthetic oligonucleotide
aggtcagttggtccattggcggagtatcga

SEQ ID NO: 229809 - DNA, 30 bp, Artificial Sequence
  Synthetic oligonucleotide
tacggggtcagtcatacctctccaactcga

SEQ ID NO: 229810 - DNA, 30 bp, Artificial Sequence
  Synthetic oligonucleotide
atcgtgctaactgcacgccatggaactcga

SEQ ID NO: 229811 - DNA, 30 bp, Artificial Sequence
  Synthetic oligonucleotide
taaaaatccttattcacccgactcactcga

SEQ ID NO: 229812 - DNA, 30 bp, Artificial Sequence
  Synthetic oligonucleotide
tgaacattgcgttgctgacgtgagactcga

SEQ ID NO: 229813 - DNA, 30 bp, Artificial Sequence
  Synthetic oligonucleotide
ttcccaggcgcgatgatcggaccgactcga

SEQ ID NO: 229814 - DNA, 30 bp, Artificial Sequence
  Synthetic oligonucleotide
gagcattgtggacctcttacacagcctcga

SEQ ID NO: 229815 - DNA, 30 bp, Artificial Sequence
  Synthetic oligonucleotide
ttagtccttgactacgacatctagcctcga

SEQ ID NO: 229816 - DNA, 30 bp, Artificial Sequence
  Synthetic oligonucleotide
cacgggcatgacgagtgttagcatcctcga

SEQ ID NO: 229817 - DNA, 30 bp, Artificial Sequence
  Synthetic oligonucleotide
aatgtgttatagcactagccaggtcctcga

SEQ ID NO: 229818 - DNA, 30 bp, Artificial Sequence
  Synthetic oligonucleotide
gaccgtcgtagcaacctgctgtgtcctcga

SEQ ID NO: 229819 - DNA, 30 bp, Artificial Sequence
  Synthetic oligonucleotide
tgcgttccatcagcaatggacaacgctcga

SEQ ID NO: 229820 - DNA, 29 bp, Artificial Sequence
  Synthetic oligonucleotide
gaaccgtctcgggcaatatgctcgctcga

SEQ ID NO: 229821 - DNA, 30 bp, Artificial Sequence
  Synthetic oligonucleotide
acggtaggcccatcaggcctcccggctcga

SEQ ID NO: 229822 - DNA, 30 bp, Artificial Sequence
  Synthetic oligonucleotide
cggctttcgtgaacaggcggaccctctcga

SEQ ID NO: 229823 - DNA, 30 bp, Artificial Sequence
  Synthetic oligonucleotide
atcatgtgctcaggtcagagtgggtctcga

SEQ ID NO: 229824 - DNA, 30 bp, Artificial Sequence
  Synthetic oligonucleotide
acttatgtggggcatactgcttcaagtcga

SEQ ID NO: 229825 - DNA, 30 bp, Artificial Sequence
  Synthetic oligonucleotide
tcgacagtatgacaatcaacgtggagtcga

SEQ ID NO: 229826 - DNA, 30 bp, Artificial Sequence
  Synthetic oligonucleotide
cttttctttcgaagttatgcgagccgtcga

SEQ ID NO: 229827 - DNA, 30 bp, Artificial Sequence
  Synthetic oligonucleotide
tagtgccgtaaatgtggcaccgttcgtcga

SEQ ID NO: 229828 - DNA, 30 bp, Artificial Sequence
  Synthetic oligonucleotide
cgaaatggcagacgccttgtggacggtcga

SEQ ID NO: 229829 - DNA, 30 bp, Artificial Sequence
  Synthetic oligonucleotide
tagtagaaaaaagttcgaattgacggtcga

SEQ ID NO: 229830 - DNA, 30 bp, Artificial Sequence
  Synthetic oligonucleotide
ttctgtaggtcacaccctctgtacggtcga

SEQ ID NO: 229831 - DNA, 30 bp, Artificial Sequence
  Synthetic oligonucleotide
accgcatcccatgtgttcatgaagggtcga

SEQ ID NO: 229832 - DNA, 30 bp, Artificial Sequence
  Synthetic oligonucleotide
ggccggaataaccatgcagcagtgggtcga

SEQ ID NO: 229833 - DNA, 30 bp, Artificial Sequence
  Synthetic oligonucleotide
aacgtcctgaaccatgctggctctggtcga

SEQ ID NO: 229834 - DNA, 30 bp, Artificial Sequence
  Synthetic oligonucleotide
acgcatcggcagatcctggcgtgtggtcga

SEQ ID NO: 229835 - DNA, 30 bp, Artificial Sequence
  Synthetic oligonucleotide
aatacaaaaattaagagtaacgttggtcga

SEQ ID NO: 229836 - DNA, 30 bp, Artificial Sequence
  Synthetic oligonucleotide
gggaaacttaggccggtactactatgtcga

SEQ ID NO: 229837 - DNA, 30 bp, Artificial Sequence
  Synthetic oligonucleotide
gctatgacatatcgatgtctattctgtcga

SEQ ID NO: 229838 - DNA, 30 bp, Artificial Sequence
  Synthetic oligonucleotide
tgttgtttatgacgtaaatattagtgtcga

SEQ ID NO: 229839 - DNA, 30 bp, Artificial Sequence
  Synthetic oligonucleotide
tttgacatgacatgtgtgatggcgtgtcga

SEQ ID NO: 229840 - DNA, 30 bp, Artificial Sequence
  Synthetic oligonucleotide
aggacctggaacatgcccacatattgtcga

SEQ ID NO: 229841 - DNA, 30 bp, Artificial Sequence
  Synthetic oligonucleotide
acggagcttttctaatcgttgtaacttcga

SEQ ID NO: 229842 - DNA, 30 bp, Artificial Sequence
  Synthetic oligonucleotide
tagtaggggtagcgatggtaaagccttcga

SEQ ID NO: 229843 - DNA, 30 bp, Artificial Sequence
  Synthetic oligonucleotide
ctgacctttggaccaggttacgtagttcga

SEQ ID NO: 229844 - DNA, 30 bp, Artificial Sequence
  Synthetic oligonucleotide
gacacctgggccgctgaatttgtagttcga

SEQ ID NO: 229845 - DNA, 30 bp, Artificial Sequence
  Synthetic oligonucleotide
atggttattcgatagttgttacacgttcga

SEQ ID NO: 229846 - DNA, 30 bp, Artificial Sequence
  Synthetic oligonucleotide
gccgcatgatcaaaatttacgatcgttcga

SEQ ID NO: 229847 - DNA, 30 bp, Artificial Sequence
  Synthetic oligonucleotide
catgcgggttccggatggcgaactgttcga

SEQ ID NO: 229848 - DNA, 30 bp, Artificial Sequence
  Synthetic oligonucleotide
tgcatcgtatggcaaactaacagtgttcga

SEQ ID NO: 229849 - DNA, 30 bp, Artificial Sequence
  Synthetic oligonucleotide
ttagcgaggtactggcacgcctgtgttcga

SEQ ID NO: 229850 - DNA, 30 bp, Artificial Sequence
  Synthetic oligonucleotide
gcacgggtttcctgaaggagtacatttcga

SEQ ID NO: 229851 - DNA, 30 bp, Artificial Sequence
  Synthetic oligonucleotide
ggctgagcacttgtgactagcaagtttcga

SEQ ID NO: 229852 - DNA, 30 bp, Artificial Sequence
  Synthetic oligonucleotide
gtacacgcgatcacccaccgggggtttcga

SEQ ID NO: 229853 - DNA, 30 bp, Artificial Sequence
  Synthetic oligonucleotide
cgtccgttcgagtctctcgtctattttcga

SEQ ID NO: 229854 - DNA, 30 bp, Artificial Sequence
  Synthetic oligonucleotide
gtgtttaagaagtcgtacccaacaaaagga

SEQ ID NO: 229855 - DNA, 30 bp, Artificial Sequence
  Synthetic oligonucleotide
tacaggctgcgctgggcggccacaaaagga

SEQ ID NO: 229856 - DNA, 30 bp, Artificial Sequence
  Synthetic oligonucleotide
gggaatgcggctttacggatcgtcaaagga

SEQ ID NO: 229857 - DNA, 30 bp, Artificial Sequence
  Synthetic oligonucleotide
ggaaactttaggattatctattcgaaagga

SEQ ID NO: 229858 - DNA, 30 bp, Artificial Sequence
  Synthetic oligonucleotide
tagacagcgggtcgcaggagttggaaagga

SEQ ID NO: 229859 - DNA, 30 bp, Artificial Sequence
  Synthetic oligonucleotide
gtggtatattacattcatctaatgaaagga

SEQ ID NO: 229860 - DNA, 30 bp, Artificial Sequence
  Synthetic oligonucleotide
gtcggcgtctccataagaatcggtaaagga

SEQ ID NO: 229861 - DNA, 30 bp, Artificial Sequence
  Synthetic oligonucleotide
attaagcgcgggccaagaacgaaacaagga

SEQ ID NO: 229862 - DNA, 30 bp, Artificial Sequence
  Synthetic oligonucleotide
gatccgtagccagtgataggctaacaagga

SEQ ID NO: 229863 - DNA, 30 bp, Artificial Sequence
  Synthetic oligonucleotide
cgaacgatcaagatctgtatagtgcaagga

SEQ ID NO: 229864 - DNA, 30 bp, Artificial Sequence
  Synthetic oligonucleotide
tactaattccctacgcctaacttgcaagga

SEQ ID NO: 229865 - DNA, 30 bp, Artificial Sequence
  Synthetic oligonucleotide
tgaacttgaagcggagttagttatcaagga

SEQ ID NO: 229866 - DNA, 30 bp, Artificial Sequence
  Synthetic oligonucleotide
gacgtggcccagatgtagttatttcaagga

SEQ ID NO: 229867 - DNA, 30 bp, Artificial Sequence
  Synthetic oligonucleotide
aaaacggaacgtagtgtgcgttttcaagga

SEQ ID NO: 229868 - DNA, 30 bp, Artificial Sequence
  Synthetic oligonucleotide
aacaataaggaacagatgatttttcaagga

SEQ ID NO: 229869 - DNA, 30 bp, Artificial Sequence
  Synthetic oligonucleotide
tcttgcaaatcaccgtgcacctccgaagga

SEQ ID NO: 229870 - DNA, 30 bp, Artificial Sequence
  Synthetic oligonucleotide
ctgcatactcctctgaccggcctcgaagga

SEQ ID NO: 229871 - DNA, 30 bp, Artificial Sequence
  Synthetic oligonucleotide
tgctgccgggtgaccgatcatttcgaagga

SEQ ID NO: 229872 - DNA, 30 bp, Artificial Sequence
  Synthetic oligonucleotide
aaaacgctaaagacgcaaatttcggaagga

SEQ ID NO: 229873 - DNA, 30 bp, Artificial Sequence
  Synthetic oligonucleotide
cgaaagtaatggctagcggcacgggaagga

SEQ ID NO: 229874 - DNA, 30 bp, Artificial Sequence
  Synthetic oligonucleotide
tgcctaggctgggaagtcaggggggaagga

SEQ ID NO: 229875 - DNA, 30 bp, Artificial Sequence
  Synthetic oligonucleotide
tatgctgacgtgaccgaggttggggaagga

SEQ ID NO: 229876 - DNA, 30 bp, Artificial Sequence
  Synthetic oligonucleotide
gactactgaactctcgttcgatcctaagga

SEQ ID NO: 229877 - DNA, 30 bp, Artificial Sequence
  Synthetic oligonucleotide
ctgactccagtcagctcagccaagtaagga

SEQ ID NO: 229878 - DNA, 30 bp, Artificial Sequence
  Synthetic oligonucleotide
gagacataaaccaggatgcgcatgtaagga

SEQ ID NO: 229879 - DNA, 30 bp, Artificial Sequence
  Synthetic oligonucleotide
ggcgaaaccttggaaggtggcaattaagga

SEQ ID NO: 229880 - DNA, 30 bp, Artificial Sequence
  Synthetic oligonucleotide
tacgtatgagatacccctgcacgttaagga

SEQ ID NO: 229881 - DNA, 30 bp, Artificial Sequence
  Synthetic oligonucleotide
aagcactaactacatttgctgcgttaagga

SEQ ID NO: 229882 - DNA, 30 bp, Artificial Sequence
  Synthetic oligonucleotide
gacgaatgtgaacttattggggagacagga

SEQ ID NO: 229883 - DNA, 30 bp, Artificial Sequence
  Synthetic oligonucleotide
ttacgtgctgatgacgtcactgctacagga

SEQ ID NO: 229884 - DNA, 30 bp, Artificial Sequence
  Synthetic oligonucleotide
cctaaatcaaggcccatcctcattacagga

SEQ ID NO: 229885 - DNA, 30 bp, Artificial Sequence
  Synthetic oligonucleotide
acatctttcaaacgaggtcgaagaccagga

SEQ ID NO: 229886 - DNA, 30 bp, Artificial Sequence
  Synthetic oligonucleotide
caggtgttgagtacatcaaaacccccagga

SEQ ID NO: 229887 - DNA, 30 bp, Artificial Sequence
  Synthetic oligonucleotide
ggatcgcacttaaattggatttccccagga

SEQ ID NO: 229888 - DNA, 30 bp, Artificial Sequence
  Synthetic oligonucleotide
tgattcaatgcacaaacttgcgtcccagga

SEQ ID NO: 229889 - DNA, 30 bp, Artificial Sequence
  Synthetic oligonucleotide
atacaagacatggcccatgctgatccagga

SEQ ID NO: 229890 - DNA, 30 bp, Artificial Sequence
  Synthetic oligonucleotide
ttactaggaccggtcgatctttctccagga

SEQ ID NO: 229891 - DNA, 30 bp, Artificial Sequence
  Synthetic oligonucleotide
tcgattcgggaacgattggcatgtccagga

SEQ ID NO: 229892 - DNA, 30 bp, Artificial Sequence
  Synthetic oligonucleotide
aattggaaacccattggggaggaagcagga

SEQ ID NO: 229893 - DNA, 30 bp, Artificial Sequence
  Synthetic oligonucleotide
caagattacggttaaaccgtagtagcagga

SEQ ID NO: 229894 - DNA, 30 bp, Artificial Sequence
  Synthetic oligonucleotide
ggcgaccaagtcgctgtaaccttcgcagga

SEQ ID NO: 229895 - DNA, 30 bp, Artificial Sequence
  Synthetic oligonucleotide
gatagtggagcttcgaaaccgacggcagga

SEQ ID NO: 229896 - DNA, 30 bp, Artificial Sequence
  Synthetic oligonucleotide
tttccttggtagggtaacctaacatcagga

SEQ ID NO: 229897 - DNA, 30 bp, Artificial Sequence
  Synthetic oligonucleotide
ataacgatgctggtaagcggtggctcagga

SEQ ID NO: 229898 - DNA, 30 bp, Artificial Sequence
  Synthetic oligonucleotide
gattggctgcttacaagttaatagtcagga

SEQ ID NO: 229899 - DNA, 30 bp, Artificial Sequence
  Synthetic oligonucleotide
caattacgatcgtccttcacgacgtcagga

SEQ ID NO: 229900 - DNA, 30 bp, Artificial Sequence
  Synthetic oligonucleotide
ctgttgtgacacaatacacctacgtcagga

SEQ ID NO: 229901 - DNA, 30 bp, Artificial Sequence
  Synthetic oligonucleotide
gctagactcagtccagtcacgacttcagga

SEQ ID NO: 229902 - DNA, 30 bp, Artificial Sequence
  Synthetic oligonucleotide
atctgatgacaggcacaacgccgttcagga

SEQ ID NO: 229903 - DNA, 30 bp, Artificial Sequence
  Synthetic oligonucleotide
aaaggcgatcgcaatgggggcatttcagga

SEQ ID NO: 229904 - DNA, 30 bp, Artificial Sequence
  Synthetic oligonucleotide
atgcggggttcaaccctctggttaagagga

SEQ ID NO: 229905 - DNA, 30 bp, Artificial Sequence
  Synthetic oligonucleotide
ccactctacgtacacggggtatgcagagga

SEQ ID NO: 229906 - DNA, 30 bp, Artificial Sequence
  Synthetic oligonucleotide
gggggcttattcgtggatccatcgagagga

SEQ ID NO: 229907 - DNA, 30 bp, Artificial Sequence
  Synthetic oligonucleotide
ctcgactgaagcaactcttaactgagagga

SEQ ID NO: 229908 - DNA, 30 bp, Artificial Sequence
  Synthetic oligonucleotide
accgcagcacagcgttccgactgtagagga

SEQ ID NO: 229909 - DNA, 30 bp, Artificial Sequence
  Synthetic oligonucleotide
gtgatagatacgcgcgttgcgaagcgagga

SEQ ID NO: 229910 - DNA, 30 bp, Artificial Sequence
  Synthetic oligonucleotide
gatatacctgcagttcgcgccagaggagga

SEQ ID NO: 229911 - DNA, 30 bp, Artificial Sequence
  Synthetic oligonucleotide
ggggccactaagtggacacgcagaggagga

SEQ ID NO: 229912 - DNA, 30 bp, Artificial Sequence
  Synthetic oligonucleotide
ttcaatttcctgatttaatctctaggagga

SEQ ID NO: 229913 - DNA, 30 bp, Artificial Sequence
  Synthetic oligonucleotide
catcgcgcttggcgggagcgcggcggagga

SEQ ID NO: 229914 - DNA, 30 bp, Artificial Sequence
  Synthetic oligonucleotide
ggccttcacaggcgaataggactcggagga

SEQ ID NO: 229915 - DNA, 30 bp, Artificial Sequence
  Synthetic oligonucleotide
ctctacgaaagcaatgacttcttctgagga

SEQ ID NO: 229916 - DNA, 30 bp, Artificial Sequence
  Synthetic oligonucleotide
aaatgtgaacttgttccggaacagtgagga

SEQ ID NO: 229917 - DNA, 30 bp, Artificial Sequence
  Synthetic oligonucleotide
gtcccgacctgtcgatggacggagtgagga

SEQ ID NO: 229918 - DNA, 30 bp, Artificial Sequence
  Synthetic oligonucleotide
aattgttgagtcacaggatagtcgtgagga

SEQ ID NO: 229919 - DNA, 30 bp, Artificial Sequence
  Synthetic oligonucleotide
cccgtggcgatattcaacggcgggtgagga

SEQ ID NO: 229920 - DNA, 30 bp, Artificial Sequence
  Synthetic oligonucleotide
gcgcggcatgatagacgcaatccttgagga

SEQ ID NO: 229921 - DNA, 30 bp, Artificial Sequence
  Synthetic oligonucleotide
tggttcactaaaagccaaacgggttgagga

SEQ ID NO: 229922 - DNA, 30 bp, Artificial Sequence
  Synthetic oligonucleotide
ctcgaatcaactgtatcataagtttgagga

SEQ ID NO: 229923 - DNA, 30 bp, Artificial Sequence
  Synthetic oligonucleotide
agcaaccgtgtgtatcgttgaaaaatagga

SEQ ID NO: 229924 - DNA, 30 bp, Artificial Sequence
  Synthetic oligonucleotide
gaaaaaagtgtcacatgttagggtatagga

SEQ ID NO: 229925 - DNA, 30 bp, Artificial Sequence
  Synthetic oligonucleotide
tcgatgctaatgagcatccgtattatagga

SEQ ID NO: 229926 - DNA, 30 bp, Artificial Sequence
  Synthetic oligonucleotide
gccgcaattgccggtcgacgcgttatagga

SEQ ID NO: 229927 - DNA, 30 bp, Artificial Sequence
  Synthetic oligonucleotide
aaaacacgtgggtaaagatctgccctagga

SEQ ID NO: 229928 - DNA, 30 bp, Artificial Sequence
  Synthetic oligonucleotide
atgacgactgtctgggcaagcatcctagga

SEQ ID NO: 229929 - DNA, 30 bp, Artificial Sequence
  Synthetic oligonucleotide
aagtcctgaaaagaaagttggacgctagga

SEQ ID NO: 229930 - DNA, 30 bp, Artificial Sequence
  Synthetic oligonucleotide
acggagtttcagctccgccagatgctagga

SEQ ID NO: 229931 - DNA, 30 bp, Artificial Sequence
  Synthetic oligonucleotide
acgcccgttcttgcgaccccaagagtagga

SEQ ID NO: 229932 - DNA, 30 bp, Artificial Sequence
  Synthetic oligonucleotide
cattcgcccgtgtttcaggaattcgtagga

SEQ ID NO: 229933 - DNA, 30 bp, Artificial Sequence
  Synthetic oligonucleotide
tacgtcaggacttcaaataggttcgtagga

SEQ ID NO: 229934 - DNA, 30 bp, Artificial Sequence
  Synthetic oligonucleotide
actttgaagataacacccggggcggtagga

SEQ ID NO: 229935 - DNA, 30 bp, Artificial Sequence
  Synthetic oligonucleotide
gagcacagtacgcatcagagatcggtagga

SEQ ID NO: 229936 - DNA, 30 bp, Artificial Sequence
  Synthetic oligonucleotide
aaggctaagtcggcctaccatttggtagga

SEQ ID NO: 229937 - DNA, 30 bp, Artificial Sequence
  Synthetic oligonucleotide
ccactccagaagagttaggtttctgtagga

SEQ ID NO: 229938 - DNA, 30 bp, Artificial Sequence
  Synthetic oligonucleotide
gtctcagaaagcgattggcctgagttagga

SEQ ID NO: 229939 - DNA, 30 bp, Artificial Sequence
  Synthetic oligonucleotide
aggctcgtgccgacctttaacaatttagga

SEQ ID NO: 229940 - DNA, 30 bp, Artificial Sequence
  Synthetic oligonucleotide
ctggatcaccggagcaatctagaaaacgga

SEQ ID NO: 229941 - DNA, 30 bp, Artificial Sequence
  Synthetic oligonucleotide
aaaagaggcattggggtatcgccaaacgga

SEQ ID NO: 229942 - DNA, 30 bp, Artificial Sequence
  Synthetic oligonucleotide
attagcggttaagcgcggcaaggaaacgga

SEQ ID NO: 229943 - DNA, 30 bp, Artificial Sequence
  Synthetic oligonucleotide
cgttctgcccaatttctcaataccaacgga

SEQ ID NO: 229944 - DNA, 30 bp, Artificial Sequence
  Synthetic oligonucleotide
tagaccctccgggtccagaaacagaacgga

SEQ ID NO: 229945 - DNA, 30 bp, Artificial Sequence
  Synthetic oligonucleotide
cgtatacggaacggtgaatgttttaacgga

SEQ ID NO: 229946 - DNA, 30 bp, Artificial Sequence
  Synthetic oligonucleotide
gtctccgtcgtgaagcaaagaatacacgga

SEQ ID NO: 229947 - DNA, 30 bp, Artificial Sequence
  Synthetic oligonucleotide
tggatagattggccatacacggtacacgga

SEQ ID NO: 229948 - DNA, 30 bp, Artificial Sequence
  Synthetic oligonucleotide
aagccgatagggtgtagcgatttacacgga

SEQ ID NO: 229949 - DNA, 30 bp, Artificial Sequence
  Synthetic oligonucleotide
tggatgagcccaagttggggcccccacgga

SEQ ID NO: 229950 - DNA, 30 bp, Artificial Sequence
  Synthetic oligonucleotide
ggggaccatcagctggccagacgccacgga

SEQ ID NO: 229951 - DNA, 30 bp, Artificial Sequence
  Synthetic oligonucleotide
accgggtggttttcagaagggcgccacgga

SEQ ID NO: 229952 - DNA, 30 bp, Artificial Sequence
  Synthetic oligonucleotide
tggaactcgggtgccgtccggatccacgga

SEQ ID NO: 229953 - DNA, 30 bp, Artificial Sequence
  Synthetic oligonucleotide
ttgaaagcgcaagctgctgtgaggcacgga

SEQ ID NO: 229954 - DNA, 30 bp, Artificial Sequence
  Synthetic oligonucleotide
gaggggccatgtgcttaaacgcggcacgga

SEQ ID NO: 229955 - DNA, 30 bp, Artificial Sequence
  Synthetic oligonucleotide
ccagagatactttagttctcactggacgga

SEQ ID NO: 229956 - DNA, 30 bp, Artificial Sequence
  Synthetic oligonucleotide
atcttagacaagtttggaaataatgacgga

SEQ ID NO: 229957 - DNA, 30 bp, Artificial Sequence
  Synthetic oligonucleotide
caagtaaattgattttaattaacatacgga

SEQ ID NO: 229958 - DNA, 30 bp, Artificial Sequence
  Synthetic oligonucleotide
tgtgtgctgggatctttgcaggactacgga

SEQ ID NO: 229959 - DNA, 30 bp, Artificial Sequence
  Synthetic oligonucleotide
tctgtagttcaatagcaatggtactacgga

SEQ ID NO: 229960 - DNA, 30 bp, Artificial Sequence
  Synthetic oligonucleotide
agtctgagcggctctattgtgagctacgga

SEQ ID NO: 229961 - DNA, 30 bp, Artificial Sequence
  Synthetic oligonucleotide
aaggcctgcatacaactcgaattctacgga

SEQ ID NO: 229962 - DNA, 29 bp, Artificial Sequence
  Synthetic oligonucleotide
ttctggcggaatgagtccacacttacgga

SEQ ID NO: 229963 - DNA, 30 bp, Artificial Sequence
  Synthetic oligonucleotide
gggcccagaattcacatgctatgttacgga

SEQ ID NO: 229964 - DNA, 30 bp, Artificial Sequence
  Synthetic oligonucleotide
acctgcaagtccccaaccatagtttacgga

SEQ ID NO: 229965 - DNA, 30 bp, Artificial Sequence
  Synthetic oligonucleotide
tgaggtccatggcaggtcctcaaaaccgga

SEQ ID NO: 229966 - DNA, 30 bp, Artificial Sequence
  Synthetic oligonucleotide
ctgagccttaatatacctgattcaaccgga

SEQ ID NO: 229967 - DNA, 30 bp, Artificial Sequence
  Synthetic oligonucleotide
ccgcccaggccatatccgacgagaaccgga

SEQ ID NO: 229968 - DNA, 30 bp, Artificial Sequence
  Synthetic oligonucleotide
ggattggtaagtgtctcggttggaaccgga

SEQ ID NO: 229969 - DNA, 30 bp, Artificial Sequence
  Synthetic oligonucleotide
gcttatgcccgcaagataccgtagaccgga

SEQ ID NO: 229970 - DNA, 30 bp, Artificial Sequence
  Synthetic oligonucleotide
caagcttgtccgcctacaacacggaccgga

SEQ ID NO: 229971 - DNA, 30 bp, Artificial Sequence
  Synthetic oligonucleotide
gtaagtttggaggggtaacatgggaccgga

SEQ ID NO: 229972 - DNA, 30 bp, Artificial Sequence
  Synthetic oligonucleotide
tagtagagaggacatacgggtactaccgga

SEQ ID NO: 229973 - DNA, 30 bp, Artificial Sequence
  Synthetic oligonucleotide
gttgtagtgacggtcgataatgtacccgga

SEQ ID NO: 229974 - DNA, 30 bp, Artificial Sequence
  Synthetic oligonucleotide
gtccttgtacggtggtccagcttacccgga

SEQ ID NO: 229975 - DNA, 30 bp, Artificial Sequence
  Synthetic oligonucleotide
cgttgcgtcaaaagcaatgcctcgcccgga

SEQ ID NO: 229976 - DNA, 30 bp, Artificial Sequence
  Synthetic oligonucleotide
acgcatattttcgtccggaaacaagccgga

SEQ ID NO: 229977 - DNA, 30 bp, Artificial Sequence
  Synthetic oligonucleotide
agcgtaccggcattgcgatatccagccgga

SEQ ID NO: 229978 - DNA, 30 bp, Artificial Sequence
  Synthetic oligonucleotide
ttagagcatgccacgcaggtttgggccgga

SEQ ID NO: 229979 - DNA, 30 bp, Artificial Sequence
  Synthetic oligonucleotide
cttgtgctatgtacatagtacatggccgga

SEQ ID NO: 229980 - DNA, 30 bp, Artificial Sequence
  Synthetic oligonucleotide
tcctatcaagcatgtgggattagtgccgga

SEQ ID NO: 229981 - DNA, 30 bp, Artificial Sequence
  Synthetic oligonucleotide
cggtggaaaaatcttacttacgcatccgga

SEQ ID NO: 229982 - DNA, 30 bp, Artificial Sequence
  Synthetic oligonucleotide
cggcgctatatgagctactgtgactccgga

SEQ ID NO: 229983 - DNA, 30 bp, Artificial Sequence
  Synthetic oligonucleotide
acttaacacgccatgaaaaagcccagcgga

SEQ ID NO: 229984 - DNA, 30 bp, Artificial Sequence
  Synthetic oligonucleotide
atgtatccctataacgtttaatagagcgga

SEQ ID NO: 229985 - DNA, 30 bp, Artificial Sequence
  Synthetic oligonucleotide
cacggatacgataagtaacccctgagcgga

SEQ ID NO: 229986 - DNA, 30 bp, Artificial Sequence
  Synthetic oligonucleotide
cggcttacagcctggggttcccatagcgga

SEQ ID NO: 229987 - DNA, 30 bp, Artificial Sequence
  Synthetic oligonucleotide
gtaggcgatagccgaagttctaaacgcgga

SEQ ID NO: 229988 - DNA, 30 bp, Artificial Sequence
  Synthetic oligonucleotide
ttgaaggaacttaaattgccgccgcgcgga

SEQ ID NO: 229989 - DNA, 30 bp, Artificial Sequence
  Synthetic oligonucleotide
cattaaacgcgtgcactgtccaatcgcgga

SEQ ID NO: 229990 - DNA, 30 bp, Artificial Sequence
  Synthetic oligonucleotide
taactacttatgttcacaccaatcggcgga

SEQ ID NO: 229991 - DNA, 30 bp, Artificial Sequence
  Synthetic oligonucleotide
tgtcgagtgggtatttggattaagggcgga

SEQ ID NO: 229992 - DNA, 30 bp, Artificial Sequence
  Synthetic oligonucleotide
aagtcttctccatgacggtagggtggcgga

SEQ ID NO: 229993 - DNA, 30 bp, Artificial Sequence
  Synthetic oligonucleotide
tgtatattttactattgtttcatgtgcgga

SEQ ID NO: 229994 - DNA, 30 bp, Artificial Sequence
  Synthetic oligonucleotide
aaggtacacacagggaatctggcttgcgga

SEQ ID NO: 229995 - DNA, 30 bp, Artificial Sequence
  Synthetic oligonucleotide
actcccattataagtggtaaaaaaatcgga

SEQ ID NO: 229996 - DNA, 30 bp, Artificial Sequence
  Synthetic oligonucleotide
tagaaggtcgcatcgaagcccgcaatcgga

SEQ ID NO: 229997 - DNA, 30 bp, Artificial Sequence
  Synthetic oligonucleotide
tgaacatgcggtaatttcatgctaatcgga

SEQ ID NO: 229998 - DNA, 30 bp, Artificial Sequence
  Synthetic oligonucleotide
agcgctgttctgattagacatttgatcgga

SEQ ID NO: 229999 - DNA, 30 bp, Artificial Sequence
  Synthetic oligonucleotide
aaggcctagcgtagttcgttccgcctcgga

SEQ ID NO: 230000 - DNA, 30 bp, Artificial Sequence
  Synthetic oligonucleotide
gcatttaaggatcgcctataggttctcgga

SEQ ID NO: 230001 - DNA, 30 bp, Artificial Sequence
  Synthetic oligonucleotide
gctagctaacccgatactgactttctcgga

SEQ ID NO: 230002 - DNA, 30 bp, Artificial Sequence
  Synthetic oligonucleotide
aagattgattggaaaagatgaatagtcgga

SEQ ID NO: 230003 - DNA, 30 bp, Artificial Sequence
  Synthetic oligonucleotide
aatcaatggagacaatataatatggtcgga

SEQ ID NO: 230004 - DNA, 30 bp, Artificial Sequence
  Synthetic oligonucleotide
gggtggctccaccaccaacctttattcgga

SEQ ID NO: 230005 - DNA, 30 bp, Artificial Sequence
  Synthetic oligonucleotide
cctttaattcatttggatacaagcttcgga

SEQ ID NO: 230006 - DNA, 30 bp, Artificial Sequence
  Synthetic oligonucleotide
ggttatacgtaccgaactctgggcttcgga

SEQ ID NO: 230007 - DNA, 30 bp, Artificial Sequence
  Synthetic oligonucleotide
gttgcgagtgtgtttactacaaacaaggga

SEQ ID NO: 230008 - DNA, 30 bp, Artificial Sequence
  Synthetic oligonucleotide
ggttaaagtccttccaaacgttacaaggga

SEQ ID NO: 230009 - DNA, 30 bp, Artificial Sequence
  Synthetic oligonucleotide
tgacggaatcaggtcatagtggccaaggga

SEQ ID NO: 230010 - DNA, 30 bp, Artificial Sequence
  Synthetic oligonucleotide
gcatgcctcggatcagtcgaggtcaaggga

SEQ ID NO: 230011 - DNA, 30 bp, Artificial Sequence
  Synthetic oligonucleotide
atcgccgggcacaccctggggaggaaggga

SEQ ID NO: 230012 - DNA, 30 bp, Artificial Sequence
  Synthetic oligonucleotide
ctggttactaagataggaggtttgaaggga

SEQ ID NO: 230013 - DNA, 30 bp, Artificial Sequence
  Synthetic oligonucleotide
ggcgtgaaacttaccaggtcggataaggga

SEQ ID NO: 230014 - DNA, 30 bp, Artificial Sequence
  Synthetic oligonucleotide
agttcataagtaatctcattttataaggga

SEQ ID NO: 230015 - DNA, 30 bp, Artificial Sequence
  Synthetic oligonucleotide
gttaggatcatagcggcaatatcccaggga

SEQ ID NO: 230016 - DNA, 30 bp, Artificial Sequence
  Synthetic oligonucleotide
gttagcatactatgctaaagttgccaggga

SEQ ID NO: 230017 - DNA, 30 bp, Artificial Sequence
  Synthetic oligonucleotide
atacactgactcatatatgctcggcaggga

SEQ ID NO: 230018 - DNA, 30 bp, Artificial Sequence
  Synthetic oligonucleotide
aggtcctatcgggcgccactcatgcaggga

SEQ ID NO: 230019 - DNA, 30 bp, Artificial Sequence
  Synthetic oligonucleotide
gaggacttcgaatagtaacaagtgcaggga

SEQ ID NO: 230020 - DNA, 30 bp, Artificial Sequence
  Synthetic oligonucleotide
gtcttgccaattaattgaagcactcaggga

SEQ ID NO: 230021 - DNA, 30 bp, Artificial Sequence
  Synthetic oligonucleotide
catccgtcaacaataataaggagtcaggga

SEQ ID NO: 230022 - DNA, 30 bp, Artificial Sequence
  Synthetic oligonucleotide
tatgaagaggcatgtgtcggtggagaggga

SEQ ID NO: 230023 - DNA, 30 bp, Artificial Sequence
  Synthetic oligonucleotide
actcagaagtataacggtttcggtgaggga

SEQ ID NO: 230024 - DNA, 30 bp, Artificial Sequence
  Synthetic oligonucleotide
cgcgcatttctcttgcaagctggataggga

SEQ ID NO: 230025 - DNA, 30 bp, Artificial Sequence
  Synthetic oligonucleotide
gcagtatcgaggaccaataggcactaggga

SEQ ID NO: 230026 - DNA, 30 bp, Artificial Sequence
  Synthetic oligonucleotide
cactagtgtgagtactagtactactaggga

SEQ ID NO: 230027 - DNA, 30 bp, Artificial Sequence
  Synthetic oligonucleotide
ttcgattgggggctgttgtggaagtaggga

SEQ ID NO: 230028 - DNA, 31 bp, Artificial Sequence
  Synthetic oligonucleotide
ggttgaagcccgtctacactcgcggtaggga

SEQ ID NO: 230029 - DNA, 30 bp, Artificial Sequence
  Synthetic oligonucleotide
tcttggggcaacatgtgattggtgtaggga

SEQ ID NO: 230030 - DNA, 30 bp, Artificial Sequence
  Synthetic oligonucleotide
cacttcgcatttagctgcaggcattaggga

SEQ ID NO: 230031 - DNA, 30 bp, Artificial Sequence
  Synthetic oligonucleotide
ttggctgaaggaaaacgagaattttaggga

SEQ ID NO: 230032 - DNA, 30 bp, Artificial Sequence
  Synthetic oligonucleotide
ggatacgcgctgacacgggggtaaacggga

SEQ ID NO: 230033 - DNA, 30 bp, Artificial Sequence
  Synthetic oligonucleotide
cgtaagattgcgttcatgcaaagaacggga

SEQ ID NO: 230034 - DNA, 30 bp, Artificial Sequence
  Synthetic oligonucleotide
tttagcgtgaatctagttaggcgaacggga

SEQ ID NO: 230035 - DNA, 30 bp, Artificial Sequence
  Synthetic oligonucleotide
gaagaatcgatgtgctctagcaacacggga

SEQ ID NO: 230036 - DNA, 30 bp, Artificial Sequence
  Synthetic oligonucleotide
gcccagaagcagagagcccgtaagacggga

SEQ ID NO: 230037 - DNA, 30 bp, Artificial Sequence
  Synthetic oligonucleotide
tagctgctaatatcataacactagacggga

SEQ ID NO: 230038 - DNA, 30 bp, Artificial Sequence
  Synthetic oligonucleotide
gctcaaggggcagcgaatcctacgacggga

SEQ ID NO: 230039 - DNA, 30 bp, Artificial Sequence
  Synthetic oligonucleotide
tagagagtgatggtggtggcagtgacggga

SEQ ID NO: 230040 - DNA, 30 bp, Artificial Sequence
  Synthetic oligonucleotide
ggcaaaattatgtcctctggttatacggga

SEQ ID NO: 230041 - DNA, 30 bp, Artificial Sequence
  Synthetic oligonucleotide
atggtaacataacgcagtcagacaccggga

SEQ ID NO: 230042 - DNA, 30 bp, Artificial Sequence
  Synthetic oligonucleotide
cgtacggcgccagggctccgttgaccggga

SEQ ID NO: 230043 - DNA, 30 bp, Artificial Sequence
  Synthetic oligonucleotide
ggtacctttaatcacgagtgtaacccggga

SEQ ID NO: 230044 - DNA, 30 bp, Artificial Sequence
  Synthetic oligonucleotide
gggggggttttgactgcgctcgtcccggga

SEQ ID NO: 230045 - DNA, 30 bp, Artificial Sequence
  Synthetic oligonucleotide
tttcaatccccataggagttgtggccggga

SEQ ID NO: 230046 - DNA, 30 bp, Artificial Sequence
  Synthetic oligonucleotide
taacataactagggccaagtcactccggga

SEQ ID NO: 230047 - DNA, 30 bp, Artificial Sequence
  Synthetic oligonucleotide
ctgacgcgcccatatcgtctgttagcggga

SEQ ID NO: 230048 - DNA, 30 bp, Artificial Sequence
  Synthetic oligonucleotide
gacgacgcgtaacagcgatgctccgcggga

SEQ ID NO: 230049 - DNA, 30 bp, Artificial Sequence
  Synthetic oligonucleotide
tggagctttaaggcatattccaaggcggga

SEQ ID NO: 230050 - DNA, 30 bp, Artificial Sequence
  Synthetic oligonucleotide
actgatttcagtccgccaggcaaggcggga

SEQ ID NO: 230051 - DNA, 30 bp, Artificial Sequence
  Synthetic oligonucleotide
ctatgtcgagcacgagtagccccggcggga

SEQ ID NO: 230052 - DNA, 30 bp, Artificial Sequence
  Synthetic oligonucleotide
ttgaactgtagccggcgtgaagcggcggga

SEQ ID NO: 230053 - DNA, 30 bp, Artificial Sequence
  Synthetic oligonucleotide
aaccagcacttgaaagtataactggcggga

SEQ ID NO: 230054 - DNA, 30 bp, Artificial Sequence
  Synthetic oligonucleotide
agttacattcaggaatgcttgctggcggga

SEQ ID NO: 230055 - DNA, 30 bp, Artificial Sequence
  Synthetic oligonucleotide
aaccagggaatcagggcacgacttgcggga

SEQ ID NO: 230056 - DNA, 30 bp, Artificial Sequence
  Synthetic oligonucleotide
caatcgcaattcgtcagattctaatcggga

SEQ ID NO: 230057 - DNA, 30 bp, Artificial Sequence
  Synthetic oligonucleotide
atcggcacacacgtaaaggtgccatcggga

SEQ ID NO: 230058 - DNA, 30 bp, Artificial Sequence
  Synthetic oligonucleotide
taataggtgctgtgaggtcggagatcggga

SEQ ID NO: 230059 - DNA, 30 bp, Artificial Sequence
  Synthetic oligonucleotide
tgaagcacactgcccgacacccgatcggga

SEQ ID NO: 230060 - DNA, 30 bp, Artificial Sequence
  Synthetic oligonucleotide
cacgagcgcgattgagtaccgatatcggga

SEQ ID NO: 230061 - DNA, 30 bp, Artificial Sequence
  Synthetic oligonucleotide
ggcgtcgggttcgttcaacgcttatcggga

SEQ ID NO: 230062 - DNA, 30 bp, Artificial Sequence
  Synthetic oligonucleotide
tgacttacatattatcctagcaactcggga

SEQ ID NO: 230063 - DNA, 30 bp, Artificial Sequence
  Synthetic oligonucleotide
actcgacacaggcaaagtactgcctcggga

SEQ ID NO: 230064 - DNA, 30 bp, Artificial Sequence
  Synthetic oligonucleotide
ggggtgtacgtaggtctatcgatgtcggga

SEQ ID NO: 230065 - DNA, 30 bp, Artificial Sequence
  Synthetic oligonucleotide
attgagttggaattcaactcagattcggga

SEQ ID NO: 230066 - DNA, 30 bp, Artificial Sequence
  Synthetic oligonucleotide
ccaacgctgcgcacatatgagtcttcggga

SEQ ID NO: 230067 - DNA, 30 bp, Artificial Sequence
  Synthetic oligonucleotide
agcctgtgcagatgtaaaggccgttcggga

SEQ ID NO: 230068 - DNA, 30 bp, Artificial Sequence
  Synthetic oligonucleotide
gccgtactatattgtttcaatatttcggga

SEQ ID NO: 230069 - DNA, 30 bp, Artificial Sequence
  Synthetic oligonucleotide
actacacgcggttagtacctacgaagggga

SEQ ID NO: 230070 - DNA, 30 bp, Artificial Sequence
  Synthetic oligonucleotide
tcagtggattgaactgactgaataagggga

SEQ ID NO: 230071 - DNA, 30 bp, Artificial Sequence
  Synthetic oligonucleotide
gcagtctgtctttatggacgtataagggga

SEQ ID NO: 230072 - DNA, 30 bp, Artificial Sequence
  Synthetic oligonucleotide
tataagaccggcgtaatgcccaccagggga

SEQ ID NO: 230073 - DNA, 30 bp, Artificial Sequence
  Synthetic oligonucleotide
gatatacatcgaccactgaaggagagggga

SEQ ID NO: 230074 - DNA, 30 bp, Artificial Sequence
  Synthetic oligonucleotide
aggttcggggtcatatttcgtgagagggga

SEQ ID NO: 230075 - DNA, 30 bp, Artificial Sequence
  Synthetic oligonucleotide
gggactgtttatttgctactcaatagggga

SEQ ID NO: 230076 - DNA, 30 bp, Artificial Sequence
  Synthetic oligonucleotide
taggataaagacttcgttaattatagggga

SEQ ID NO: 230077 - DNA, 30 bp, Artificial Sequence
  Synthetic oligonucleotide
gtccatctgcgtgcacgcgcccaacgggga

SEQ ID NO: 230078 - DNA, 30 bp, Artificial Sequence
  Synthetic oligonucleotide
ttgggaaaatcctgcacagcgcaacgggga

SEQ ID NO: 230079 - DNA, 30 bp, Artificial Sequence
  Synthetic oligonucleotide
atcgtcaccatggtacaaccattacgggga

SEQ ID NO: 230080 - DNA, 30 bp, Artificial Sequence
  Synthetic oligonucleotide
gccagcggactgcgaaggtgcgtccgggga

SEQ ID NO: 230081 - DNA, 31 bp, Artificial Sequence
  Synthetic oligonucleotide
ggtctactggcatctccccgtcaagcgggga

SEQ ID NO: 230082 - DNA, 30 bp, Artificial Sequence
  Synthetic oligonucleotide
cagcaaggatcgctgcggcagagtcgggga

SEQ ID NO: 230083 - DNA, 30 bp, Artificial Sequence
  Synthetic oligonucleotide
tttacttgtggagcaggtacccgtcgggga

SEQ ID NO: 230084 - DNA, 30 bp, Artificial Sequence
  Synthetic oligonucleotide
atatgttgcttcaagcatagctccggggga

SEQ ID NO: 230085 - DNA, 30 bp, Artificial Sequence
  Synthetic oligonucleotide
catgggttaagggaagggttaaggggggga

SEQ ID NO: 230086 - DNA, 40 bp, Artificial Sequence
  Synthetic oligonucleotide
aagataatacattcatggtatggtcgaggatcggggggga

SEQ ID NO: 230087 - DNA, 40 bp, Artificial Sequence
  Synthetic oligonucleotide
aagataatacgttcatggtatggtcggggatcggggggga

SEQ ID NO: 230088 - DNA, 40 bp, Artificial Sequence
  Synthetic oligonucleotide
aagataatacattcttggtatggtcggggatcggggggga

SEQ ID NO: 230089 - DNA, 30 bp, Artificial Sequence
  Synthetic oligonucleotide
aactccagtaactttgtgtaaaatggggga

SEQ ID NO: 230090 - DNA, 30 bp, Artificial Sequence
  Synthetic oligonucleotide
taattacatgtcggtttagggaatggggga

SEQ ID NO: 230091 - DNA, 30 bp, Artificial Sequence
  Synthetic oligonucleotide
atgtgacaccattgtgcaacgcttggggga

SEQ ID NO: 230092 - DNA, 30 bp, Artificial Sequence
  Synthetic oligonucleotide
agcctggtccgccaaacttgttttggggga

SEQ ID NO: 230093 - DNA, 30 bp, Artificial Sequence
  Synthetic oligonucleotide
ggaattgcatggttaacaacataatgggga

SEQ ID NO: 230094 - DNA, 30 bp, Artificial Sequence
  Synthetic oligonucleotide
ataaagctattcgcctcgtagcgctgggga

SEQ ID NO: 230095 - DNA, 30 bp, Artificial Sequence
  Synthetic oligonucleotide
ccaaaggggtattacggtagtccgtgggga

SEQ ID NO: 230096 - DNA, 30 bp, Artificial Sequence
  Synthetic oligonucleotide
caagtcatgagaccagcttacccttgggga

SEQ ID NO: 230097 - DNA, 30 bp, Artificial Sequence
  Synthetic oligonucleotide
tatgcgctgatacgaccgcgatgttgggga

SEQ ID NO: 230098 - DNA, 30 bp, Artificial Sequence
  Synthetic oligonucleotide
gttcaacggccccattcaagtcccatggga

SEQ ID NO: 230099 - DNA, 30 bp, Artificial Sequence
  Synthetic oligonucleotide
cggttctttgggcgacggatcaaactggga

SEQ ID NO: 230100 - DNA, 30 bp, Artificial Sequence
  Synthetic oligonucleotide
gaggcctcactatatacacctcacctggga

SEQ ID NO: 230101 - DNA, 30 bp, Artificial Sequence
  Synthetic oligonucleotide
ggaagtgcttcagcggcggctcgcctggga

SEQ ID NO: 230102 - DNA, 30 bp, Artificial Sequence
  Synthetic oligonucleotide
gatatcacaaaaaagccgtgaacgctggga

SEQ ID NO: 230103 - DNA, 30 bp, Artificial Sequence
  Synthetic oligonucleotide
caggacatggattattaggggtggctggga

SEQ ID NO: 230104 - DNA, 30 bp, Artificial Sequence
  Synthetic oligonucleotide
tgaactcatgttgctacttgcaatctggga

SEQ ID NO: 230105 - DNA, 30 bp, Artificial Sequence
  Synthetic oligonucleotide
gtctcgtactatgccatcgatgatctggga

SEQ ID NO: 230106 - DNA, 30 bp, Artificial Sequence
  Synthetic oligonucleotide
tttatcttgtcaaggggggtccgtctggga

SEQ ID NO: 230107 - DNA, 30 bp, Artificial Sequence
  Synthetic oligonucleotide
cgtattggctgggcgcttctgattctggga

SEQ ID NO: 230108 - DNA, 30 bp, Artificial Sequence
  Synthetic oligonucleotide
gaactccaccagagactccgtaaagtggga

SEQ ID NO: 230109 - DNA, 30 bp, Artificial Sequence
  Synthetic oligonucleotide
cacagatggacttccgcgacgatagtggga

SEQ ID NO: 230110 - DNA, 30 bp, Artificial Sequence
  Synthetic oligonucleotide
ccccaataacaacttaaagaggaggtggga

SEQ ID NO: 230111 - DNA, 30 bp, Artificial Sequence
  Synthetic oligonucleotide
aaaatacacacgctagaagaggctttggga

SEQ ID NO: 230112 - DNA, 30 bp, Artificial Sequence
  Synthetic oligonucleotide
cgagcaagccctgggctaaggattttggga

SEQ ID NO: 230113 - DNA, 30 bp, Artificial Sequence
  Synthetic oligonucleotide
gggtccagcctcgcgatcgtggtaaatgga

SEQ ID NO: 230114 - DNA, 31 bp, Artificial Sequence
  Synthetic oligonucleotide
actcgtgaagttaaacggagctttaaatgga

SEQ ID NO: 230115 - DNA, 30 bp, Artificial Sequence
  Synthetic oligonucleotide
gaaaaccgcgacaaggtgtcggacaatgga

SEQ ID NO: 230116 - DNA, 30 bp, Artificial Sequence
  Synthetic oligonucleotide
acaaatggaagtttattaacggccaatgga

SEQ ID NO: 230117 - DNA, 30 bp, Artificial Sequence
  Synthetic oligonucleotide
ttaagggcattcatcggtactacgaatgga

SEQ ID NO: 230118 - DNA, 30 bp, Artificial Sequence
  Synthetic oligonucleotide
ggtgttaaccggaacgcccacgggaatgga

SEQ ID NO: 230119 - DNA, 30 bp, Artificial Sequence
  Synthetic oligonucleotide
aatcgcgcgctgaaagcgtatgtacatgga

SEQ ID NO: 230120 - DNA, 30 bp, Artificial Sequence
  Synthetic oligonucleotide
gaaaccagattaacctgattgacccatgga

SEQ ID NO: 230121 - DNA, 30 bp, Artificial Sequence
  Synthetic oligonucleotide
gtcagcagtacgaaagcggatgcccatgga

SEQ ID NO: 230122 - DNA, 30 bp, Artificial Sequence
  Synthetic oligonucleotide
gaggaatcgtatgggcgtgaatgtcatgga

SEQ ID NO: 230123 - DNA, 30 bp, Artificial Sequence
  Synthetic oligonucleotide
agctagcggtgaattgccccttcagatgga

SEQ ID NO: 230124 - DNA, 30 bp, Artificial Sequence
  Synthetic oligonucleotide
tacatggggatagggccaaccggagatgga

SEQ ID NO: 230125 - DNA, 30 bp, Artificial Sequence
  Synthetic oligonucleotide
ggtcattgggttatggaaggactagatgga

SEQ ID NO: 230126 - DNA, 30 bp, Artificial Sequence
  Synthetic oligonucleotide
tacactgcccaccgcaaaacgttcgatgga

SEQ ID NO: 230127 - DNA, 30 bp, Artificial Sequence
  Synthetic oligonucleotide
cggaacaacatggcaggagctggatatgga

SEQ ID NO: 230128 - DNA, 31 bp, Artificial Sequence
  Synthetic oligonucleotide
tatggtactcgtatggataccgctatatgga

SEQ ID NO: 230129 - DNA, 30 bp, Artificial Sequence
  Synthetic oligonucleotide
tccgaaaaactagaggggggcgtatatgga

SEQ ID NO: 230130 - DNA, 30 bp, Artificial Sequence
  Synthetic oligonucleotide
tcgttcatgtgcagtcgatgcgtctatgga

SEQ ID NO: 230131 - DNA, 30 bp, Artificial Sequence
  Synthetic oligonucleotide
aaataaggacccgattaagcaaagtatgga

SEQ ID NO: 230132 - DNA, 30 bp, Artificial Sequence
  Synthetic oligonucleotide
ggatccaggtttgcgaccctgcagtatgga

SEQ ID NO: 230133 - DNA, 30 bp, Artificial Sequence
  Synthetic oligonucleotide
gttgggcacatttgttccttgtagtatgga

SEQ ID NO: 230134 - DNA, 30 bp, Artificial Sequence
  Synthetic oligonucleotide
acgtagttcatcacacatccttcgtatgga

SEQ ID NO: 230135 - DNA, 30 bp, Artificial Sequence
  Synthetic oligonucleotide
tggtggcaaaaccagcgtggggggtatgga

SEQ ID NO: 230136 - DNA, 30 bp, Artificial Sequence
  Synthetic oligonucleotide
accacggcacacattaaatcttgaactgga

SEQ ID NO: 230137 - DNA, 30 bp, Artificial Sequence
  Synthetic oligonucleotide
aatttgactactgtagactgagtaactgga

SEQ ID NO: 230138 - DNA, 30 bp, Artificial Sequence
  Synthetic oligonucleotide
cacaattattgcaatataagggagactgga

SEQ ID NO: 230139 - DNA, 30 bp, Artificial Sequence
  Synthetic oligonucleotide
cacacttatgtatgactgagaatgactgga

SEQ ID NO: 230140 - DNA, 30 bp, Artificial Sequence
  Synthetic oligonucleotide
tatatgacaagaaccaatagcctgactgga

SEQ ID NO: 230141 - DNA, 30 bp, Artificial Sequence
  Synthetic oligonucleotide
cttgctaaataagttggcaccgtgactgga

SEQ ID NO: 230142 - DNA, 30 bp, Artificial Sequence
  Synthetic oligonucleotide
cttacttcgggggtagggtttgtgactgga

SEQ ID NO: 230143 - DNA, 30 bp, Artificial Sequence
  Synthetic oligonucleotide
ctttgtaaaaccctaatcggaacacctgga

SEQ ID NO: 230144 - DNA, 30 bp, Artificial Sequence
  Synthetic oligonucleotide
gcctctgcttgaattagcctgacccctgga

SEQ ID NO: 230145 - DNA, 30 bp, Artificial Sequence
  Synthetic oligonucleotide
gacgtacttaaagacaaatttcgccctgga

SEQ ID NO: 230146 - DNA, 30 bp, Artificial Sequence
  Synthetic oligonucleotide
aaacgtacaaagggtcctatctcgcctgga

SEQ ID NO: 230147 - DNA, 30 bp, Artificial Sequence
  Synthetic oligonucleotide
aaattagaggtagggggttaccatcctgga

SEQ ID NO: 230148 - DNA, 30 bp, Artificial Sequence
  Synthetic oligonucleotide
tattcggaatcgaaaccccaatatcctgga

SEQ ID NO: 230149 - DNA, 30 bp, Artificial Sequence
  Synthetic oligonucleotide
tattatagttgcgtgttaactggtcctgga

SEQ ID NO: 230150 - DNA, 30 bp, Artificial Sequence
  Synthetic oligonucleotide
attgttaggagcatcgggaaataagctgga

SEQ ID NO: 230151 - DNA, 30 bp, Artificial Sequence
  Synthetic oligonucleotide
cctttcctgacttgttaggagtgggctgga

SEQ ID NO: 230152 - DNA, 30 bp, Artificial Sequence
  Synthetic oligonucleotide
ttaccgaaacagatactagttcgatctgga

SEQ ID NO: 230153 - DNA, 30 bp, Artificial Sequence
  Synthetic oligonucleotide
ggagggattctgaggggttacttatctgga

SEQ ID NO: 230154 - DNA, 30 bp, Artificial Sequence
  Synthetic oligonucleotide
ttgaaggatccattcaaaggtaactctgga

SEQ ID NO: 230155 - DNA, 30 bp, Artificial Sequence
  Synthetic oligonucleotide
cggcaggtgcctataaagcgcagttctgga

SEQ ID NO: 230156 - DNA, 30 bp, Artificial Sequence
  Synthetic oligonucleotide
gctgtctcgatcagactagatctttctgga

SEQ ID NO: 230157 - DNA, 30 bp, Artificial Sequence
  Synthetic oligonucleotide
cagttgagggtctttgcgtacgcgagtgga

SEQ ID NO: 230158 - DNA, 30 bp, Artificial Sequence
  Synthetic oligonucleotide
aaggcttatatttcgcgctctatgagtgga

SEQ ID NO: 230159 - DNA, 30 bp, Artificial Sequence
  Synthetic oligonucleotide
cgggctgcatcaaatcaagaattgagtgga

SEQ ID NO: 230160 - DNA, 30 bp, Artificial Sequence
  Synthetic oligonucleotide
taattacaaggaacccatcatcatagtgga

SEQ ID NO: 230161 - DNA, 30 bp, Artificial Sequence
  Synthetic oligonucleotide
tggctgtggcgaactggctacgctagtgga

SEQ ID NO: 230162 - DNA, 30 bp, Artificial Sequence
  Synthetic oligonucleotide
agaataaatccctgacaatcaacacgtgga

SEQ ID NO: 230163 - DNA, 30 bp, Artificial Sequence
  Synthetic oligonucleotide
cggaaggcgctcttttcaggagcacgtgga

SEQ ID NO: 230164 - DNA, 30 bp, Artificial Sequence
  Synthetic oligonucleotide
aacataaatgcctttgtttagagccgtgga

SEQ ID NO: 230165 - DNA, 30 bp, Artificial Sequence
  Synthetic oligonucleotide
ttcgtgcattcatttactcctgatcgtgga

SEQ ID NO: 230166 - DNA, 30 bp, Artificial Sequence
  Synthetic oligonucleotide
gcgtctatttggtcttcattgcttcgtgga

SEQ ID NO: 230167 - DNA, 30 bp, Artificial Sequence
  Synthetic oligonucleotide
atagtgtggcacacgaaaggcttaggtgga

SEQ ID NO: 230168 - DNA, 30 bp, Artificial Sequence
  Synthetic oligonucleotide
acctgggttagagaggtctatctcggtgga

SEQ ID NO: 230169 - DNA, 30 bp, Artificial Sequence
  Synthetic oligonucleotide
tcaataactgggaggttcaaattcggtgga

SEQ ID NO: 230170 - DNA, 30 bp, Artificial Sequence
  Synthetic oligonucleotide
aaggagctctatgtcctggtcctgggtgga

SEQ ID NO: 230171 - DNA, 30 bp, Artificial Sequence
  Synthetic oligonucleotide
ataataaatcacccaagaaacgttggtgga

SEQ ID NO: 230172 - DNA, 30 bp, Artificial Sequence
  Synthetic oligonucleotide
tctaatgcgaatggctcagttagatgtgga

SEQ ID NO: 230173 - DNA, 30 bp, Artificial Sequence
  Synthetic oligonucleotide
aggcttacaaagccgaacacccgatgtgga

SEQ ID NO: 230174 - DNA, 30 bp, Artificial Sequence
  Synthetic oligonucleotide
ggcatacggttacggcacagactatgtgga

SEQ ID NO: 230175 - DNA, 30 bp, Artificial Sequence
  Synthetic oligonucleotide
gggattaactagaatagggacgattgtgga

SEQ ID NO: 230176 - DNA, 30 bp, Artificial Sequence
  Synthetic oligonucleotide
tcgaacgacacatcccgttatagttgtgga

SEQ ID NO: 230177 - DNA, 30 bp, Artificial Sequence
  Synthetic oligonucleotide
ttgcagcgacgccttatgaagatttgtgga

SEQ ID NO: 230178 - DNA, 30 bp, Artificial Sequence
  Synthetic oligonucleotide
acggactcccccattcaggaacgcattgga

SEQ ID NO: 230179 - DNA, 30 bp, Artificial Sequence
  Synthetic oligonucleotide
cggacaatcgacttgtttcccttgattgga

SEQ ID NO: 230180 - DNA, 30 bp, Artificial Sequence
  Synthetic oligonucleotide
atatgaggggtatcccaaatgaaacttgga

SEQ ID NO: 230181 - DNA, 30 bp, Artificial Sequence
  Synthetic oligonucleotide
ctagttaggcattgtattcattgacttgga

SEQ ID NO: 230182 - DNA, 30 bp, Artificial Sequence
  Synthetic oligonucleotide
aacagccttatagggggcgtctgccttgga

SEQ ID NO: 230183 - DNA, 30 bp, Artificial Sequence
  Synthetic oligonucleotide
atcgtacatttttcgcttacaaagcttgga

SEQ ID NO: 230184 - DNA, 30 bp, Artificial Sequence
  Synthetic oligonucleotide
gaggaactttagcacgatcacgagcttgga

SEQ ID NO: 230185 - DNA, 30 bp, Artificial Sequence
  Synthetic oligonucleotide
actaatgaatttcccttgggcccgcttgga

SEQ ID NO: 230186 - DNA, 30 bp, Artificial Sequence
  Synthetic oligonucleotide
cggaattgctgcgcggtgagaattcttgga

SEQ ID NO: 230187 - DNA, 30 bp, Artificial Sequence
  Synthetic oligonucleotide
tttcgctggcttcgaaaaaaggaagttgga

SEQ ID NO: 230188 - DNA, 30 bp, Artificial Sequence
  Synthetic oligonucleotide
tagccgccgggtatacattggaaggttgga

SEQ ID NO: 230189 - DNA, 30 bp, Artificial Sequence
  Synthetic oligonucleotide
taagttgactataatcagttgacgtttgga

SEQ ID NO: 230190 - DNA, 30 bp, Artificial Sequence
  Synthetic oligonucleotide
tgatctgaaaccaaggatatagcgtttgga

SEQ ID NO: 230191 - DNA, 30 bp, Artificial Sequence
  Synthetic oligonucleotide
gctaaacctcaacgcctgggatggtttgga

SEQ ID NO: 230192 - DNA, 30 bp, Artificial Sequence
  Synthetic oligonucleotide
tagggactgaggtaagtctacacttttgga

SEQ ID NO: 230193 - DNA, 30 bp, Artificial Sequence
  Synthetic oligonucleotide
gtgcttcagcgatgactgcctgtttttgga

SEQ ID NO: 230194 - DNA, 30 bp, Artificial Sequence
  Synthetic oligonucleotide
ccgcattatagagcgatggatccaaaatga

SEQ ID NO: 230195 - DNA, 30 bp, Artificial Sequence
  Synthetic oligonucleotide
tccggttgccgtaatgcctagggcaaatga

SEQ ID NO: 230196 - DNA, 30 bp, Artificial Sequence
  Synthetic oligonucleotide
accactatgtcgtgctgttcactcaaatga

SEQ ID NO: 230197 - DNA, 30 bp, Artificial Sequence
  Synthetic oligonucleotide
atacgcggaccaagtaaggttgagaaatga

SEQ ID NO: 230198 - DNA, 30 bp, Artificial Sequence
  Synthetic oligonucleotide
cgtaaatgtttagctttcaccccgaaatga

SEQ ID NO: 230199 - DNA, 30 bp, Artificial Sequence
  Synthetic oligonucleotide
tttaggaggaaccccgcgttgtgtaaatga

SEQ ID NO: 230200 - DNA, 30 bp, Artificial Sequence
  Synthetic oligonucleotide
gtacgaaattgtcgtcaagtccaacaatga

SEQ ID NO: 230201 - DNA, 30 bp, Artificial Sequence
  Synthetic oligonucleotide
tctttcacaattgagaatgttgaacaatga

SEQ ID NO: 230202 - DNA, 30 bp, Artificial Sequence
  Synthetic oligonucleotide
ctttaccatcgctgaaatgattcccaatga

SEQ ID NO: 230203 - DNA, 30 bp, Artificial Sequence
  Synthetic oligonucleotide
gggacggaattacgagtatgggtccaatga

SEQ ID NO: 230204 - DNA, 30 bp, Artificial Sequence
  Synthetic oligonucleotide
cggggggctgacggcccaagtccgcaatga

SEQ ID NO: 230205 - DNA, 30 bp, Artificial Sequence
  Synthetic oligonucleotide
ggtaatcggcgacatacagtgctgcaatga

SEQ ID NO: 230206 - DNA, 30 bp, Artificial Sequence
  Synthetic oligonucleotide
gcagccattcttcgttaaacctctcaatga

SEQ ID NO: 230207 - DNA, 30 bp, Artificial Sequence
  Synthetic oligonucleotide
gaggagcgtggaccgggagggcacgaatga

SEQ ID NO: 230208 - DNA, 30 bp, Artificial Sequence
  Synthetic oligonucleotide
ggatcggtgcccactgtaagccgcgaatga

SEQ ID NO: 230209 - DNA, 30 bp, Artificial Sequence
  Synthetic oligonucleotide
tatttggaaccatatagggctggggaatga

SEQ ID NO: 230210 - DNA, 30 bp, Artificial Sequence
  Synthetic oligonucleotide
aagcggtctgcactgcgcctcagtgaatga

SEQ ID NO: 230211 - DNA, 30 bp, Artificial Sequence
  Synthetic oligonucleotide
catgtctctgtcaccctggaagttgaatga

SEQ ID NO: 230212 - DNA, 30 bp, Artificial Sequence
  Synthetic oligonucleotide
gggagtgaaagcttagcctctccataatga

SEQ ID NO: 230213 - DNA, 30 bp, Artificial Sequence
  Synthetic oligonucleotide
ggggagattgtccgcacctcgtactaatga

SEQ ID NO: 230214 - DNA, 30 bp, Artificial Sequence
  Synthetic oligonucleotide
tattaggtggtgagccagataaagtaatga

SEQ ID NO: 230215 - DNA, 30 bp, Artificial Sequence
  Synthetic oligonucleotide
ccactgacaactaactaaggggggtaatga

SEQ ID NO: 230216 - DNA, 30 bp, Artificial Sequence
  Synthetic oligonucleotide
ctacgttgctgtccccatcgaagttaatga

SEQ ID NO: 230217 - DNA, 30 bp, Artificial Sequence
  Synthetic oligonucleotide
attcatagatcgattcgaagatgttaatga

SEQ ID NO: 230218 - DNA, 29 bp, Artificial Sequence
  Synthetic oligonucleotide
tagagagcgtcattaaaaggctttaatga

SEQ ID NO: 230219 - DNA, 30 bp, Artificial Sequence
  Synthetic oligonucleotide
tctacgtccacctttgagagacgaacatga

SEQ ID NO: 230220 - DNA, 30 bp, Artificial Sequence
  Synthetic oligonucleotide
agtagaataagagtagacctttacacatga

SEQ ID NO: 230221 - DNA, 30 bp, Artificial Sequence
  Synthetic oligonucleotide
agggcgctagttaattggaagtccacatga

SEQ ID NO: 230222 - DNA, 30 bp, Artificial Sequence
  Synthetic oligonucleotide
cctaaatacggaatagaatccggcacatga

SEQ ID NO: 230223 - DNA, 30 bp, Artificial Sequence
  Synthetic oligonucleotide
tgcgttcgatatatcgagcgagtcacatga

SEQ ID NO: 230224 - DNA, 30 bp, Artificial Sequence
  Synthetic oligonucleotide
cgggaggtcgttatggggcagggaccatga

SEQ ID NO: 230225 - DNA, 30 bp, Artificial Sequence
  Synthetic oligonucleotide
agggcttcgactgagcctcaggtaccatga

SEQ ID NO: 230226 - DNA, 30 bp, Artificial Sequence
  Synthetic oligonucleotide
caattcatgcatatgacgtggaccccatga

SEQ ID NO: 230227 - DNA, 30 bp, Artificial Sequence
  Synthetic oligonucleotide
acagacctgaaagacatagaagtcccatga

SEQ ID NO: 230228 - DNA, 30 bp, Artificial Sequence
  Synthetic oligonucleotide
tgcactgaggcagaaactcagttcccatga

SEQ ID NO: 230229 - DNA, 30 bp, Artificial Sequence
  Synthetic oligonucleotide
ctatactactaaaaacaacgctcgccatga

SEQ ID NO: 230230 - DNA, 29 bp, Artificial Sequence
  Synthetic oligonucleotide
tagggcggacgcaagacagtacagcatga

SEQ ID NO: 230231 - DNA, 30 bp, Artificial Sequence
  Synthetic oligonucleotide
tctaagggtgtcaaactatatatcgcatga

SEQ ID NO: 230232 - DNA, 30 bp, Artificial Sequence
  Synthetic oligonucleotide
cctgacctacgggcaaccctatctgcatga

SEQ ID NO: 230233 - DNA, 31 bp, Artificial Sequence
  Synthetic oligonucleotide
ggccattcccaggtggggttgcgttgcatga

SEQ ID NO: 230234 - DNA, 30 bp, Artificial Sequence
  Synthetic oligonucleotide
tcctggaatctgcatattgtaaaatcatga

SEQ ID NO: 230235 - DNA, 30 bp, Artificial Sequence
  Synthetic oligonucleotide
aaatagtaagcgtggtgcgctaaatcatga

SEQ ID NO: 230236 - DNA, 30 bp, Artificial Sequence
  Synthetic oligonucleotide
tcttgaggagaggaacattgcggatcatga

SEQ ID NO: 230237 - DNA, 30 bp, Artificial Sequence
  Synthetic oligonucleotide
aaggtatcgctactatagatatactcatga

SEQ ID NO: 230238 - DNA, 30 bp, Artificial Sequence
  Synthetic oligonucleotide
aaacgtacgagccaccacggatgctcatga

SEQ ID NO: 230239 - DNA, 30 bp, Artificial Sequence
  Synthetic oligonucleotide
cagcaaatagcttagacaggtttctcatga

SEQ ID NO: 230240 - DNA, 30 bp, Artificial Sequence
  Synthetic oligonucleotide
agacaatgagccatgctacgtatttcatga

SEQ ID NO: 230241 - DNA, 30 bp, Artificial Sequence
  Synthetic oligonucleotide
taacctaggtcctcctggcctgagagatga

SEQ ID NO: 230242 - DNA, 30 bp, Artificial Sequence
  Synthetic oligonucleotide
ggattcttccgacactagcactcgagatga

SEQ ID NO: 230243 - DNA, 30 bp, Artificial Sequence
  Synthetic oligonucleotide
taagttgggaaggatcaaggaaaacgatga

SEQ ID NO: 230244 - DNA, 30 bp, Artificial Sequence
  Synthetic oligonucleotide
gaaaaatgaaatgagatatcaatacgatga

SEQ ID NO: 230245 - DNA, 30 bp, Artificial Sequence
  Synthetic oligonucleotide
ggaggtacggcggcgtgtcccatccgatga

SEQ ID NO: 230246 - DNA, 30 bp, Artificial Sequence
  Synthetic oligonucleotide
agttgccacgccctcagcggggtccgatga

SEQ ID NO: 230247 - DNA, 30 bp, Artificial Sequence
  Synthetic oligonucleotide
gcgaatgaggtgactcattgtcagcgatga

SEQ ID NO: 230248 - DNA, 30 bp, Artificial Sequence
  Synthetic oligonucleotide
tgcaccagctgcaaacgtgatacgcgatga

SEQ ID NO: 230249 - DNA, 30 bp, Artificial Sequence
  Synthetic oligonucleotide
ggacagaaaggaacccctctaaggcgatga

SEQ ID NO: 230250 - DNA, 30 bp, Artificial Sequence
  Synthetic oligonucleotide
ctgcatcgtatgaagggcagactgcgatga

SEQ ID NO: 230251 - DNA, 30 bp, Artificial Sequence
  Synthetic oligonucleotide
gcggctttgccattatattgcaatcgatga

SEQ ID NO: 230252 - DNA, 30 bp, Artificial Sequence
  Synthetic oligonucleotide
taaagtttctagagtaacacctatcgatga

SEQ ID NO: 230253 - DNA, 30 bp, Artificial Sequence
  Synthetic oligonucleotide
tctggggtgtcatctctcaaccctcgatga

SEQ ID NO: 230254 - DNA, 30 bp, Artificial Sequence
  Synthetic oligonucleotide
agaatggagtaacacgcttcggacggatga

SEQ ID NO: 230255 - DNA, 30 bp, Artificial Sequence
  Synthetic oligonucleotide
tggtagttaccggtggcgtcagagggatga

SEQ ID NO: 230256 - DNA, 30 bp, Artificial Sequence
  Synthetic oligonucleotide
atggcgaactagccaaggttttagggatga

SEQ ID NO: 230257 - DNA, 30 bp, Artificial Sequence
  Synthetic oligonucleotide
gttacgggctgccgtttcgtaggtggatga

SEQ ID NO: 230258 - DNA, 30 bp, Artificial Sequence
  Synthetic oligonucleotide
tcagagcacaggggcacctcatgtggatga

SEQ ID NO: 230259 - DNA, 30 bp, Artificial Sequence
  Synthetic oligonucleotide
tctatgtgttagatgatatagttatgatga

SEQ ID NO: 230260 - DNA, 30 bp, Artificial Sequence
  Synthetic oligonucleotide
atactgtatttggcattggcttcaatatga

SEQ ID NO: 230261 - DNA, 30 bp, Artificial Sequence
  Synthetic oligonucleotide
cacatgcgagtcgtaatactggccatatga

SEQ ID NO: 230262 - DNA, 30 bp, Artificial Sequence
  Synthetic oligonucleotide
atcctcgcgggtagatcccaccgcatatga

SEQ ID NO: 230263 - DNA, 30 bp, Artificial Sequence
  Synthetic oligonucleotide
actcttgacatgcctcaaaagggcatatga

SEQ ID NO: 230264 - DNA, 30 bp, Artificial Sequence
  Synthetic oligonucleotide
gaataagccattatcagccgaatcatatga

SEQ ID NO: 230265 - DNA, 30 bp, Artificial Sequence
  Synthetic oligonucleotide
taatatgacacgagtgctggatcactatga

SEQ ID NO: 230266 - DNA, 30 bp, Artificial Sequence
  Synthetic oligonucleotide
actcggtttctacagtcactacccctatga

SEQ ID NO: 230267 - DNA, 30 bp, Artificial Sequence
  Synthetic oligonucleotide
gatacaagtatgcatgttcacgggctatga

SEQ ID NO: 230268 - DNA, 30 bp, Artificial Sequence
  Synthetic oligonucleotide
ttatagagttcagacctgtctgctctatga

SEQ ID NO: 230269 - DNA, 30 bp, Artificial Sequence
  Synthetic oligonucleotide
agtccttagattgtagtcgtggttctatga

SEQ ID NO: 230270 - DNA, 30 bp, Artificial Sequence
  Synthetic oligonucleotide
gtgaaaacaagtctatccgtaaaagtatga

SEQ ID NO: 230271 - DNA, 30 bp, Artificial Sequence
  Synthetic oligonucleotide
acggccgactcactccctgattcagtatga

SEQ ID NO: 230272 - DNA, 30 bp, Artificial Sequence
  Synthetic oligonucleotide
tataacaaccataatggggaattagtatga

SEQ ID NO: 230273 - DNA, 30 bp, Artificial Sequence
  Synthetic oligonucleotide
atgtccacgttactctaacatgccgtatga

SEQ ID NO: 230274 - DNA, 30 bp, Artificial Sequence
  Synthetic oligonucleotide
ctcggagtagaagcgtgcaacatggtatga

SEQ ID NO: 230275 - DNA, 30 bp, Artificial Sequence
  Synthetic oligonucleotide
gcgcgctggtggctcatctttgaattatga

SEQ ID NO: 230276 - DNA, 30 bp, Artificial Sequence
  Synthetic oligonucleotide
tctcgtagatgcgggcgcggttcattatga

SEQ ID NO: 230277 - DNA, 30 bp, Artificial Sequence
  Synthetic oligonucleotide
aaattgatgtacgttacaataggcttatga

SEQ ID NO: 230278 - DNA, 30 bp, Artificial Sequence
  Synthetic oligonucleotide
gatgcgtaatggtcaggaaggggcttatga

SEQ ID NO: 230279 - DNA, 30 bp, Artificial Sequence
  Synthetic oligonucleotide
aaacctagaaaaggttggagtaagttatga

SEQ ID NO: 230280 - DNA, 30 bp, Artificial Sequence
  Synthetic oligonucleotide
aagtgcttgcgagtaagtatcacgttatga

SEQ ID NO: 230281 - DNA, 30 bp, Artificial Sequence
  Synthetic oligonucleotide
ggctaagcgatacataatcgagcgttatga

SEQ ID NO: 230282 - DNA, 30 bp, Artificial Sequence
  Synthetic oligonucleotide
gatattcgcccttcaacccggctcaactga

SEQ ID NO: 230283 - DNA, 30 bp, Artificial Sequence
  Synthetic oligonucleotide
caaaaactcggaccggagcgccagaactga

SEQ ID NO: 230284 - DNA, 30 bp, Artificial Sequence
  Synthetic oligonucleotide
tgctgtgcgaagctggcgaggccgaactga

SEQ ID NO: 230285 - DNA, 30 bp, Artificial Sequence
  Synthetic oligonucleotide
aacgctcatcaatctgcgcatccgaactga

SEQ ID NO: 230286 - DNA, 30 bp, Artificial Sequence
  Synthetic oligonucleotide
aggagctattttaatgtgcaaaggaactga

SEQ ID NO: 230287 - DNA, 30 bp, Artificial Sequence
  Synthetic oligonucleotide
cactttaagaacgcatcgtgagggaactga

SEQ ID NO: 230288 - DNA, 30 bp, Artificial Sequence
  Synthetic oligonucleotide
gttagcagattgggtaatgagtttaactga

SEQ ID NO: 230289 - DNA, 30 bp, Artificial Sequence
  Synthetic oligonucleotide
gcaacgctacaaggtggctttgcccactga

SEQ ID NO: 230290 - DNA, 30 bp, Artificial Sequence
  Synthetic oligonucleotide
ccaagactaagagttatgttggcgcactga

SEQ ID NO: 230291 - DNA, 30 bp, Artificial Sequence
  Synthetic oligonucleotide
gtggtataggaggtatagtttgggcactga

SEQ ID NO: 230292 - DNA, 30 bp, Artificial Sequence
  Synthetic oligonucleotide
cggtgattccattcgtgtgcgcctcactga

SEQ ID NO: 230293 - DNA, 30 bp, Artificial Sequence
  Synthetic oligonucleotide
cgccgaccactctcctgggcggaagactga

SEQ ID NO: 230294 - DNA, 30 bp, Artificial Sequence
  Synthetic oligonucleotide
tctcgtgatctgtccggtggggtagactga

SEQ ID NO: 230295 - DNA, 30 bp, Artificial Sequence
  Synthetic oligonucleotide
aaaaggcggcgacgcttgtgtctcgactga

SEQ ID NO: 230296 - DNA, 30 bp, Artificial Sequence
  Synthetic oligonucleotide
agcatatctggagcggactaagcggactga

SEQ ID NO: 230297 - DNA, 30 bp, Artificial Sequence
  Synthetic oligonucleotide
gtccgctagagcgagtgatacgcggactga

SEQ ID NO: 230298 - DNA, 30 bp, Artificial Sequence
  Synthetic oligonucleotide
cgagccggtatcgtcggttcaagggactga

SEQ ID NO: 230299 - DNA, 30 bp, Artificial Sequence
  Synthetic oligonucleotide
tggttcatagataggacctataatgactga

SEQ ID NO: 230300 - DNA, 30 bp, Artificial Sequence
  Synthetic oligonucleotide
ggttccccgttcggcgaagaggctgactga

SEQ ID NO: 230301 - DNA, 30 bp, Artificial Sequence
  Synthetic oligonucleotide
cggatttctcagcacgaaggcgttgactga

SEQ ID NO: 230302 - DNA, 30 bp, Artificial Sequence
  Synthetic oligonucleotide
tgtcaaatgtcatgtcgagaacgatactga

SEQ ID NO: 230303 - DNA, 30 bp, Artificial Sequence
  Synthetic oligonucleotide
cacgtgttccactcaggcggcgtctactga

SEQ ID NO: 230304 - DNA, 30 bp, Artificial Sequence
  Synthetic oligonucleotide
ctatgcggcgtaccgggatattagtactga

SEQ ID NO: 230305 - DNA, 30 bp, Artificial Sequence
  Synthetic oligonucleotide
ttggcgccttgtactcgtgtcacgtactga

SEQ ID NO: 230306 - DNA, 30 bp, Artificial Sequence
  Synthetic oligonucleotide
atatgggaggaataggctccagcgtactga

SEQ ID NO: 230307 - DNA, 30 bp, Artificial Sequence
  Synthetic oligonucleotide
gtgctcgtgtaaaggcataaaagaacctga

SEQ ID NO: 230308 - DNA, 30 bp, Artificial Sequence
  Synthetic oligonucleotide
ttaggtaatctaggtgagcaaaccacctga

SEQ ID NO: 230309 - DNA, 30 bp, Artificial Sequence
  Synthetic oligonucleotide
taatgaataacccatgacttgtccacctga

SEQ ID NO: 230310 - DNA, 30 bp, Artificial Sequence
  Synthetic oligonucleotide
aagggagtcatatcgtaggtgttcacctga

SEQ ID NO: 230311 - DNA, 30 bp, Artificial Sequence
  Synthetic oligonucleotide
ggcgaaacttatatctagtggccgacctga

SEQ ID NO: 230312 - DNA, 30 bp, Artificial Sequence
  Synthetic oligonucleotide
ctccacagaagccgaagtgaagtgacctga

SEQ ID NO: 230313 - DNA, 30 bp, Artificial Sequence
  Synthetic oligonucleotide
tgatgacccaggtgtgtgttaattacctga

SEQ ID NO: 230314 - DNA, 30 bp, Artificial Sequence
  Synthetic oligonucleotide
ttcctgcgtgtttcatttggatccccctga

SEQ ID NO: 230315 - DNA, 30 bp, Artificial Sequence
  Synthetic oligonucleotide
ctgtgcgacgggcaccggtgtattccctga

SEQ ID NO: 230316 - DNA, 30 bp, Artificial Sequence
  Synthetic oligonucleotide
acagcatgatctcggaccgaggaagcctga

SEQ ID NO: 230317 - DNA, 30 bp, Artificial Sequence
  Synthetic oligonucleotide
gctaccttctcctgtattcgaagagcctga

SEQ ID NO: 230318 - DNA, 30 bp, Artificial Sequence
  Synthetic oligonucleotide
gtccaaaacggactcgtagcgggagcctga

SEQ ID NO: 230319 - DNA, 30 bp, Artificial Sequence
  Synthetic oligonucleotide
ctatggaggggcacctgtcgtaccgcctga

SEQ ID NO: 230320 - DNA, 29 bp, Artificial Sequence
  Synthetic oligonucleotide
taactgggacctatgctcacctcgcctga

SEQ ID NO: 230321 - DNA, 30 bp, Artificial Sequence
  Synthetic oligonucleotide
gctgtccgatcacgggtatattgggcctga

SEQ ID NO: 230322 - DNA, 30 bp, Artificial Sequence
  Synthetic oligonucleotide
taccatagttttttgaggcgagatgcctga

SEQ ID NO: 230323 - DNA, 30 bp, Artificial Sequence
  Synthetic oligonucleotide
gtccgtagattcaagaaattacctgcctga

SEQ ID NO: 230324 - DNA, 30 bp, Artificial Sequence
  Synthetic oligonucleotide
tagaaatgatacatggcgatttaatcctga

SEQ ID NO: 230325 - DNA, 30 bp, Artificial Sequence
  Synthetic oligonucleotide
cattgcaactactaaagttctacatcctga

SEQ ID NO: 230326 - DNA, 30 bp, Artificial Sequence
  Synthetic oligonucleotide
cagttgatgactgacatccacccatcctga

SEQ ID NO: 230327 - DNA, 30 bp, Artificial Sequence
  Synthetic oligonucleotide
agggctcaaggtggcgtcattgagtcctga

SEQ ID NO: 230328 - DNA, 30 bp, Artificial Sequence
  Synthetic oligonucleotide
gggaaggcaacgttgataggtatgtcctga

SEQ ID NO: 230329 - DNA, 30 bp, Artificial Sequence
  Synthetic oligonucleotide
aacgccgtgatttgtcgatggagcagctga

SEQ ID NO: 230330 - DNA, 30 bp, Artificial Sequence
  Synthetic oligonucleotide
gttgaacgccaatagtagcagaaacgctga

SEQ ID NO: 230331 - DNA, 30 bp, Artificial Sequence
  Synthetic oligonucleotide
ttaagattctaccagcgacgagcacgctga

SEQ ID NO: 230332 - DNA, 30 bp, Artificial Sequence
  Synthetic oligonucleotide
cagtttgaatgtgcatgtctgtcgcgctga

SEQ ID NO: 230333 - DNA, 30 bp, Artificial Sequence
  Synthetic oligonucleotide
cagaaggtttcgattacggaattgcgctga

SEQ ID NO: 230334 - DNA, 30 bp, Artificial Sequence
  Synthetic oligonucleotide
atgcgcggtggcaccatgcagagtcgctga

SEQ ID NO: 230335 - DNA, 30 bp, Artificial Sequence
  Synthetic oligonucleotide
gactccactctcccagagggatctggctga

SEQ ID NO: 230336 - DNA, 30 bp, Artificial Sequence
  Synthetic oligonucleotide
cgtggttcattacttgaggtgcgtggctga

SEQ ID NO: 230337 - DNA, 30 bp, Artificial Sequence
  Synthetic oligonucleotide
cgcgagtggtaaaaattctacagatgctga

SEQ ID NO: 230338 - DNA, 30 bp, Artificial Sequence
  Synthetic oligonucleotide
gtcactagagcttcggggtttacgtgctga

SEQ ID NO: 230339 - DNA, 30 bp, Artificial Sequence
  Synthetic oligonucleotide
cacccgtcggtttaccacgaaaattgctga

SEQ ID NO: 230340 - DNA, 30 bp, Artificial Sequence
  Synthetic oligonucleotide
aaaccttcatccgtccgtaatccttgctga

SEQ ID NO: 230341 - DNA, 30 bp, Artificial Sequence
  Synthetic oligonucleotide
ggctgagttcccttagggtcttgcatctga

SEQ ID NO: 230342 - DNA, 30 bp, Artificial Sequence
  Synthetic oligonucleotide
taaagtggatcagtcaggcaattcatctga

SEQ ID NO: 230343 - DNA, 30 bp, Artificial Sequence
  Synthetic oligonucleotide
cgacatatgtgcagatagtccctgatctga

SEQ ID NO: 230344 - DNA, 30 bp, Artificial Sequence
  Synthetic oligonucleotide
ggatgctagtggcttgtgctgactatctga

SEQ ID NO: 230345 - DNA, 30 bp, Artificial Sequence
  Synthetic oligonucleotide
agttctgagtgaactctaaacgtgctctga

SEQ ID NO: 230346 - DNA, 30 bp, Artificial Sequence
  Synthetic oligonucleotide
gtagaactgctgtttttagccaatgtctga

SEQ ID NO: 230347 - DNA, 30 bp, Artificial Sequence
  Synthetic oligonucleotide
ctgcatgtatcgggaaatcttcatgtctga

SEQ ID NO: 230348 - DNA, 30 bp, Artificial Sequence
  Synthetic oligonucleotide
gcatgcctgtccccataaagatttgtctga

SEQ ID NO: 230349 - DNA, 30 bp, Artificial Sequence
  Synthetic oligonucleotide
accccatcatcacgtgactacgaattctga

SEQ ID NO: 230350 - DNA, 30 bp, Artificial Sequence
  Synthetic oligonucleotide
tgagggtagcggtattgccgatcattctga

SEQ ID NO: 230351 - DNA, 30 bp, Artificial Sequence
  Synthetic oligonucleotide
agctgtcagtcggcacaggctaacttctga

SEQ ID NO: 230352 - DNA, 30 bp, Artificial Sequence
  Synthetic oligonucleotide
cgtaacgaaccggccacgcataagttctga

SEQ ID NO: 230353 - DNA, 30 bp, Artificial Sequence
  Synthetic oligonucleotide
gatcggtatgttgacttataagcgttctga

SEQ ID NO: 230354 - DNA, 30 bp, Artificial Sequence
  Synthetic oligonucleotide
aatagaatacaaactctaggaatgttctga

SEQ ID NO: 230355 - DNA, 30 bp, Artificial Sequence
  Synthetic oligonucleotide
gcggtacatcatctgccaccatcaaagtga

SEQ ID NO: 230356 - DNA, 30 bp, Artificial Sequence
  Synthetic oligonucleotide
gatctgcataacggtgcctatgtaaagtga

SEQ ID NO: 230357 - DNA, 30 bp, Artificial Sequence
  Synthetic oligonucleotide
aatgcgctggctaacccgcaacagaagtga

SEQ ID NO: 230358 - DNA, 30 bp, Artificial Sequence
  Synthetic oligonucleotide
gacgtggttggccgcgacgaccggaagtga

SEQ ID NO: 230359 - DNA, 30 bp, Artificial Sequence
  Synthetic oligonucleotide
catcctacaggaaatccataaatgaagtga

SEQ ID NO: 230360 - DNA, 30 bp, Artificial Sequence
  Synthetic oligonucleotide
attacttgctaacaatcgcatccccagtga

SEQ ID NO: 230361 - DNA, 30 bp, Artificial Sequence
  Synthetic oligonucleotide
agactggaattcttgagatctatgcagtga

SEQ ID NO: 230362 - DNA, 30 bp, Artificial Sequence
  Synthetic oligonucleotide
tttggacttagtgcatttaacacagagtga

SEQ ID NO: 230363 - DNA, 30 bp, Artificial Sequence
  Synthetic oligonucleotide
tctatggcgaaagactcattagcagagtga

SEQ ID NO: 230364 - DNA, 30 bp, Artificial Sequence
  Synthetic oligonucleotide
gatccaggttgtaatagtggtctggagtga

SEQ ID NO: 230365 - DNA, 30 bp, Artificial Sequence
  Synthetic oligonucleotide
gtttggagtcggtgagtatgtgcatagtga

SEQ ID NO: 230366 - DNA, 30 bp, Artificial Sequence
  Synthetic oligonucleotide
ttacagacatggggtaaatttggatagtga

SEQ ID NO: 230367 - DNA, 30 bp, Artificial Sequence
  Synthetic oligonucleotide
agacgagttactgcaagtcaacactagtga

SEQ ID NO: 230368 - DNA, 30 bp, Artificial Sequence
  Synthetic oligonucleotide
gtcccactactggatatccgttgctagtga

SEQ ID NO: 230369 - DNA, 30 bp, Artificial Sequence
  Synthetic oligonucleotide
agggtaacttgggagatatttgggtagtga

SEQ ID NO: 230370 - DNA, 30 bp, Artificial Sequence
  Synthetic oligonucleotide
cagtagtttctcacgtcgacagtttagtga

SEQ ID NO: 230371 - DNA, 30 bp, Artificial Sequence
  Synthetic oligonucleotide
ttgaggaaattctgtaaattcaacacgtga

SEQ ID NO: 230372 - DNA, 30 bp, Artificial Sequence
  Synthetic oligonucleotide
ttgacaggtgttgatcagactgcgacgtga

SEQ ID NO: 230373 - DNA, 30 bp, Artificial Sequence
  Synthetic oligonucleotide
ggggaggtcgagtgtaatagacctacgtga

SEQ ID NO: 230374 - DNA, 30 bp, Artificial Sequence
  Synthetic oligonucleotide
gggtggatccaatggagcggggttacgtga

SEQ ID NO: 230375 - DNA, 30 bp, Artificial Sequence
  Synthetic oligonucleotide
gcctggagtgctagctagctggtaccgtga

SEQ ID NO: 230376 - DNA, 30 bp, Artificial Sequence
  Synthetic oligonucleotide
tggagcactagtttctccgaactcccgtga

SEQ ID NO: 230377 - DNA, 30 bp, Artificial Sequence
  Synthetic oligonucleotide
ttgtaaggttggaacatattgcagccgtga

SEQ ID NO: 230378 - DNA, 30 bp, Artificial Sequence
  Synthetic oligonucleotide
caaggtgcgtgaccatcaactgtcgcgtga

SEQ ID NO: 230379 - DNA, 30 bp, Artificial Sequence
  Synthetic oligonucleotide
ttggtctcatcaagactatcatatgcgtga

SEQ ID NO: 230380 - DNA, 30 bp, Artificial Sequence
  Synthetic oligonucleotide
gggcttataccccgatgcctgtcatcgtga

SEQ ID NO: 230381 - DNA, 30 bp, Artificial Sequence
  Synthetic oligonucleotide
tatgtaatgttgaggatagcttgatcgtga

SEQ ID NO: 230382 - DNA, 30 bp, Artificial Sequence
  Synthetic oligonucleotide
aactgatcacgagagcaacatgggtcgtga

SEQ ID NO: 230383 - DNA, 30 bp, Artificial Sequence
  Synthetic oligonucleotide
tatgcgtacgctaagtacagtgcttcgtga

SEQ ID NO: 230384 - DNA, 30 bp, Artificial Sequence
  Synthetic oligonucleotide
gacccgtcataatctacgccaaaaaggtga

SEQ ID NO: 230385 - DNA, 30 bp, Artificial Sequence
  Synthetic oligonucleotide
gggtacacaacgtacgcgcaagtaaggtga

SEQ ID NO: 230386 - DNA, 30 bp, Artificial Sequence
  Synthetic oligonucleotide
ccaaaaatagttagaaagttgttaaggtga

SEQ ID NO: 230387 - DNA, 30 bp, Artificial Sequence
  Synthetic oligonucleotide
gttggtatagcacgagctaaaaataggtga

SEQ ID NO: 230388 - DNA, 30 bp, Artificial Sequence
  Synthetic oligonucleotide
gtatggctagtatcggcacaggtccggtga

SEQ ID NO: 230389 - DNA, 30 bp, Artificial Sequence
  Synthetic oligonucleotide
cgtacggcagaatcagcattattgcggtga

SEQ ID NO: 230390 - DNA, 30 bp, Artificial Sequence
  Synthetic oligonucleotide
tgggttgaatcaccgaatcggcgagggtga

SEQ ID NO: 230391 - DNA, 30 bp, Artificial Sequence
  Synthetic oligonucleotide
tacaagctgtgcatataatggttagggtga

SEQ ID NO: 230392 - DNA, 30 bp, Artificial Sequence
  Synthetic oligonucleotide
taagcgcttttgacataggcgaaggggtga

SEQ ID NO: 230393 - DNA, 30 bp, Artificial Sequence
  Synthetic oligonucleotide
agtatatacgcgtaagcgagacctgggtga

SEQ ID NO: 230394 - DNA, 30 bp, Artificial Sequence
  Synthetic oligonucleotide
gcttgactcaaagcagcttaaaactggtga

SEQ ID NO: 230395 - DNA, 30 bp, Artificial Sequence
  Synthetic oligonucleotide
acctcggcattagctcagcctccctggtga

SEQ ID NO: 230396 - DNA, 30 bp, Artificial Sequence
  Synthetic oligonucleotide
agaaagcgaaggttctgtgcgtagtggtga

SEQ ID NO: 230397 - DNA, 30 bp, Artificial Sequence
  Synthetic oligonucleotide
cagattagctgtcttcatcaggtgtggtga

SEQ ID NO: 230398 - DNA, 30 bp, Artificial Sequence
  Synthetic oligonucleotide
aagctgtatgcccgttggccggcaatgtga

SEQ ID NO: 230399 - DNA, 30 bp, Artificial Sequence
  Synthetic oligonucleotide
tcttcgttcccggtttaagaatccatgtga

SEQ ID NO: 230400 - DNA, 30 bp, Artificial Sequence
  Synthetic oligonucleotide
ggaagaatgtgttccagggcatgcatgtga

SEQ ID NO: 230401 - DNA, 30 bp, Artificial Sequence
  Synthetic oligonucleotide
tgccgttacaactttgtcagcatcatgtga

SEQ ID NO: 230402 - DNA, 30 bp, Artificial Sequence
  Synthetic oligonucleotide
ttccgagcacggcgttatattgggatgtga

SEQ ID NO: 230403 - DNA, 30 bp, Artificial Sequence
  Synthetic oligonucleotide
tctccaggccaatttcgaaaaattatgtga

SEQ ID NO: 230404 - DNA, 30 bp, Artificial Sequence
  Synthetic oligonucleotide
ctggaagtgtataagtatcttaccctgtga

SEQ ID NO: 230405 - DNA, 30 bp, Artificial Sequence
  Synthetic oligonucleotide
ccccgctacggatatcaacattcgctgtga

SEQ ID NO: 230406 - DNA, 30 bp, Artificial Sequence
  Synthetic oligonucleotide
tggagtattcgggttcttataattctgtga

SEQ ID NO: 230407 - DNA, 30 bp, Artificial Sequence
  Synthetic oligonucleotide
tagagatagatgtatatttaccgagtgtga

SEQ ID NO: 230408 - DNA, 30 bp, Artificial Sequence
  Synthetic oligonucleotide
actgattgctccagccaaggtatagtgtga

SEQ ID NO: 230409 - DNA, 30 bp, Artificial Sequence
  Synthetic oligonucleotide
tagtggtgcgtttggcggtccggcgtgtga

SEQ ID NO: 230410 - DNA, 30 bp, Artificial Sequence
  Synthetic oligonucleotide
gtacttgcatggattattctacgggtgtga

SEQ ID NO: 230411 - DNA, 30 bp, Artificial Sequence
  Synthetic oligonucleotide
cccgcaagttcatggtagagtggggtgtga

SEQ ID NO: 230412 - DNA, 30 bp, Artificial Sequence
  Synthetic oligonucleotide
tcaaacaagccttgctttcgtggattgtga

SEQ ID NO: 230413 - DNA, 30 bp, Artificial Sequence
  Synthetic oligonucleotide
cttgtagggcttctcttaccggccttgtga

SEQ ID NO: 230414 - DNA, 30 bp, Artificial Sequence
  Synthetic oligonucleotide
ccatcgggtccgactaataagtcgttgtga

SEQ ID NO: 230415 - DNA, 30 bp, Artificial Sequence
  Synthetic oligonucleotide
tattgtccgcgtgtcaatagccatttgtga

SEQ ID NO: 230416 - DNA, 30 bp, Artificial Sequence
  Synthetic oligonucleotide
tactttgctaacaaaggatccaacaattga

SEQ ID NO: 230417 - DNA, 30 bp, Artificial Sequence
  Synthetic oligonucleotide
attactccctcaacactcatatgcaattga

SEQ ID NO: 230418 - DNA, 30 bp, Artificial Sequence
  Synthetic oligonucleotide
aagtattacggccggaacacacaacattga

SEQ ID NO: 230419 - DNA, 30 bp, Artificial Sequence
  Synthetic oligonucleotide
tacggagttgattacactacggaacattga

SEQ ID NO: 230420 - DNA, 30 bp, Artificial Sequence
  Synthetic oligonucleotide
tgaggatctccagtataattaaaccattga

SEQ ID NO: 230421 - DNA, 30 bp, Artificial Sequence
  Synthetic oligonucleotide
gtatggggatgaatgatgctctcccattga

SEQ ID NO: 230422 - DNA, 30 bp, Artificial Sequence
  Synthetic oligonucleotide
ctgcctgggcagctgtgaattcagcattga

SEQ ID NO: 230423 - DNA, 30 bp, Artificial Sequence
  Synthetic oligonucleotide
gcttcggtctggtcaattccaacgcattga

SEQ ID NO: 230424 - DNA, 30 bp, Artificial Sequence
  Synthetic oligonucleotide
gtgtaatatacgcaagcgagatctcattga

SEQ ID NO: 230425 - DNA, 30 bp, Artificial Sequence
  Synthetic oligonucleotide
tgctatttatggctacacgatcttcattga

SEQ ID NO: 230426 - DNA, 30 bp, Artificial Sequence
  Synthetic oligonucleotide
gagagttagagttatcattaactcgattga

SEQ ID NO: 230427 - DNA, 30 bp, Artificial Sequence
  Synthetic oligonucleotide
gaagccttgaagttgttctgatgggattga

SEQ ID NO: 230428 - DNA, 30 bp, Artificial Sequence
  Synthetic oligonucleotide
atcggcagaggctaaggtttgaatgattga

SEQ ID NO: 230429 - DNA, 30 bp, Artificial Sequence
  Synthetic oligonucleotide
gtgcgactagcttttaccggggctgattga

SEQ ID NO: 230430 - DNA, 30 bp, Artificial Sequence
  Synthetic oligonucleotide
agggctaagcttgatgtttaattatattga

SEQ ID NO: 230431 - DNA, 30 bp, Artificial Sequence
  Synthetic oligonucleotide
cgccaattcgtcagactgcacgactattga

SEQ ID NO: 230432 - DNA, 30 bp, Artificial Sequence
  Synthetic oligonucleotide
gacactgtatccactgaacacccgtattga

SEQ ID NO: 230433 - DNA, 30 bp, Artificial Sequence
  Synthetic oligonucleotide
aagcggggatttcctatacaccgttattga

SEQ ID NO: 230434 - DNA, 30 bp, Artificial Sequence
  Synthetic oligonucleotide
tggaaacaaggatgtttaactgttacttga

SEQ ID NO: 230435 - DNA, 30 bp, Artificial Sequence
  Synthetic oligonucleotide
agacgggaagaggtcaagtaataaccttga

SEQ ID NO: 230436 - DNA, 30 bp, Artificial Sequence
  Synthetic oligonucleotide
aagccgtaagagttcggaatggcaccttga

SEQ ID NO: 230437 - DNA, 30 bp, Artificial Sequence
  Synthetic oligonucleotide
tcaaagcccgtcgctgatgaattaccttga

SEQ ID NO: 230438 - DNA, 30 bp, Artificial Sequence
  Synthetic oligonucleotide
cgatttctgataggatgttacaccccttga

SEQ ID NO: 230439 - DNA, 30 bp, Artificial Sequence
  Synthetic oligonucleotide
gcgtagttggttcatcaactcttgccttga

SEQ ID NO: 230440 - DNA, 30 bp, Artificial Sequence
  Synthetic oligonucleotide
ctaaaaatcctagaatcgttaactccttga

SEQ ID NO: 230441 - DNA, 30 bp, Artificial Sequence
  Synthetic oligonucleotide
ttgttggggttggccctttgtattccttga

SEQ ID NO: 230442 - DNA, 30 bp, Artificial Sequence
  Synthetic oligonucleotide
gcacttcgttgtagcagttggcttccttga

SEQ ID NO: 230443 - DNA, 30 bp, Artificial Sequence
  Synthetic oligonucleotide
tgtccggacaggatatatcgtagagcttga

SEQ ID NO: 230444 - DNA, 30 bp, Artificial Sequence
  Synthetic oligonucleotide
gtaagatgacagcagcgatggatagcttga

SEQ ID NO: 230445 - DNA, 30 bp, Artificial Sequence
  Synthetic oligonucleotide
atcagggccaggtgccacaacgtagcttga

SEQ ID NO: 230446 - DNA, 30 bp, Artificial Sequence
  Synthetic oligonucleotide
agaagatatgcaacgtccatggtagcttga

SEQ ID NO: 230447 - DNA, 30 bp, Artificial Sequence
  Synthetic oligonucleotide
gaacatacggggcaaatataatgcgcttga

SEQ ID NO: 230448 - DNA, 30 bp, Artificial Sequence
  Synthetic oligonucleotide
acactcacgacatggcaaaacacggcttga

SEQ ID NO: 230449 - DNA, 30 bp, Artificial Sequence
  Synthetic oligonucleotide
gctttgtgttagttcgtgaaggcggcttga

SEQ ID NO: 230450 - DNA, 30 bp, Artificial Sequence
  Synthetic oligonucleotide
tagtgaatgcctgtcgcggtcggggcttga

SEQ ID NO: 230451 - DNA, 30 bp, Artificial Sequence
  Synthetic oligonucleotide
gacagcgtgtctaagttgacaaatgcttga

SEQ ID NO: 230452 - DNA, 30 bp, Artificial Sequence
  Synthetic oligonucleotide
ataatcagagcctgagtcaagcgtgcttga

SEQ ID NO: 230453 - DNA, 30 bp, Artificial Sequence
  Synthetic oligonucleotide
tgggagagttaacggtaataaagctcttga

SEQ ID NO: 230454 - DNA, 30 bp, Artificial Sequence
  Synthetic oligonucleotide
attaaaagccaacaccggcgggcaagttga

SEQ ID NO: 230455 - DNA, 30 bp, Artificial Sequence
  Synthetic oligonucleotide
ccgtaagtgaggctgatagacagcagttga

SEQ ID NO: 230456 - DNA, 30 bp, Artificial Sequence
  Synthetic oligonucleotide
gctcgttcgttgtcacgagagcgcagttga

SEQ ID NO: 230457 - DNA, 30 bp, Artificial Sequence
  Synthetic oligonucleotide
atctccgtgacccctgtagggtagagttga

SEQ ID NO: 230458 - DNA, 30 bp, Artificial Sequence
  Synthetic oligonucleotide
ctcttagaactcctcgcactgtcgagttga

SEQ ID NO: 230459 - DNA, 30 bp, Artificial Sequence
  Synthetic oligonucleotide
cgggttctgatgagccgtcaaactagttga

SEQ ID NO: 230460 - DNA, 30 bp, Artificial Sequence
  Synthetic oligonucleotide
gagaaagatcacgccttataagtacgttga

SEQ ID NO: 230461 - DNA, 30 bp, Artificial Sequence
  Synthetic oligonucleotide
aatattacacaggcggacatttgccgttga

SEQ ID NO: 230462 - DNA, 30 bp, Artificial Sequence
  Synthetic oligonucleotide
gttttgccaaaacgtacacgtccaggttga

SEQ ID NO: 230463 - DNA, 30 bp, Artificial Sequence
  Synthetic oligonucleotide
acccagatgactggttgatagtgaggttga

SEQ ID NO: 230464 - DNA, 30 bp, Artificial Sequence
  Synthetic oligonucleotide
cttaaagctccaatcccctgtttcggttga

SEQ ID NO: 230465 - DNA, 30 bp, Artificial Sequence
  Synthetic oligonucleotide
tcggagtttgtctcaaatcgagagggttga

SEQ ID NO: 230466 - DNA, 30 bp, Artificial Sequence
  Synthetic oligonucleotide
aagatctatgatcctacttccccatgttga

SEQ ID NO: 230467 - DNA, 30 bp, Artificial Sequence
  Synthetic oligonucleotide
ttgagaccacctcacgtttgctcgtgttga

SEQ ID NO: 230468 - DNA, 30 bp, Artificial Sequence
  Synthetic oligonucleotide
accgcacacagtggaaaaaattggtgttga

SEQ ID NO: 230469 - DNA, 30 bp, Artificial Sequence
  Synthetic oligonucleotide
gatgtgagaagtgcgaactggtgaatttga

SEQ ID NO: 230470 - DNA, 30 bp, Artificial Sequence
  Synthetic oligonucleotide
ttagtatgggtagcaggtgctcgcatttga

SEQ ID NO: 230471 - DNA, 30 bp, Artificial Sequence
  Synthetic oligonucleotide
ctcataaaaggtacgtatacagatatttga

SEQ ID NO: 230472 - DNA, 30 bp, Artificial Sequence
  Synthetic oligonucleotide
atatgttacggataggttgtatgtatttga

SEQ ID NO: 230473 - DNA, 30 bp, Artificial Sequence
  Synthetic oligonucleotide
ataggtgctgagagtacgctcgaactttga

SEQ ID NO: 230474 - DNA, 30 bp, Artificial Sequence
  Synthetic oligonucleotide
tggtgaacgcttttccaagcatcactttga

SEQ ID NO: 230475 - DNA, 30 bp, Artificial Sequence
  Synthetic oligonucleotide
gtgggatatggctatagcgtgtgactttga

SEQ ID NO: 230476 - DNA, 30 bp, Artificial Sequence
  Synthetic oligonucleotide
tcgccaatatctgagcgaggatccctttga

SEQ ID NO: 230477 - DNA, 30 bp, Artificial Sequence
  Synthetic oligonucleotide
taaagagttttgcagataagagtgctttga

SEQ ID NO: 230478 - DNA, 30 bp, Artificial Sequence
  Synthetic oligonucleotide
ttgatacaagggaccggtcgtgttctttga

SEQ ID NO: 230479 - DNA, 30 bp, Artificial Sequence
  Synthetic oligonucleotide
atcgcgcaaggggttaacagagccgtttga

SEQ ID NO: 230480 - DNA, 30 bp, Artificial Sequence
  Synthetic oligonucleotide
tccagcaaatgcaatcaggaggacttttga

SEQ ID NO: 230481 - DNA, 30 bp, Artificial Sequence
  Synthetic oligonucleotide
agagaacattacaatgtgtggatcttttga

SEQ ID NO: 230482 - DNA, 30 bp, Artificial Sequence
  Synthetic oligonucleotide
agaccattaggagcgagtgggtcgttttga

SEQ ID NO: 230483 - DNA, 30 bp, Artificial Sequence
  Synthetic oligonucleotide
tagatggggtgggttgacagtgggttttga

SEQ ID NO: 230484 - DNA, 30 bp, Artificial Sequence
  Synthetic oligonucleotide
ttaggagccgggcgaaacatggacaaaata

SEQ ID NO: 230485 - DNA, 30 bp, Artificial Sequence
  Synthetic oligonucleotide
gccgggcacatcttggtctgcggcaaaata

SEQ ID NO: 230486 - DNA, 30 bp, Artificial Sequence
  Synthetic oligonucleotide
atgatactttcggtgcatgggacgaaaata

SEQ ID NO: 230487 - DNA, 30 bp, Artificial Sequence
  Synthetic oligonucleotide
cgcacaggctaccagcctaataggaaaata

SEQ ID NO: 230488 - DNA, 30 bp, Artificial Sequence
  Synthetic oligonucleotide
tactgctctcggtggtggccgggtaaaata

SEQ ID NO: 230489 - DNA, 30 bp, Artificial Sequence
  Synthetic oligonucleotide
cgatgcttacatcgtagcgtctaacaaata

SEQ ID NO: 230490 - DNA, 30 bp, Artificial Sequence
  Synthetic oligonucleotide
aactacaagcctagagatctggcacaaata

SEQ ID NO: 230491 - DNA, 30 bp, Artificial Sequence
  Synthetic oligonucleotide
tcgaccttttgcaatgctgtgtgacaaata

SEQ ID NO: 230492 - DNA, 30 bp, Artificial Sequence
  Synthetic oligonucleotide
taatagcgggggagtaaccgctaccaaata

SEQ ID NO: 230493 - DNA, 30 bp, Artificial Sequence
  Synthetic oligonucleotide
gatggcgatattgaagtgtgcctccaaata

SEQ ID NO: 230494 - DNA, 30 bp, Artificial Sequence
  Synthetic oligonucleotide
aggattgcaagactcgtcgatgatcaaata

SEQ ID NO: 230495 - DNA, 30 bp, Artificial Sequence
  Synthetic oligonucleotide
aaagccggccagtaagggttggacgaaata

SEQ ID NO: 230496 - DNA, 30 bp, Artificial Sequence
  Synthetic oligonucleotide
gtagcggttatgtcagaaaagggcgaaata

SEQ ID NO: 230497 - DNA, 30 bp, Artificial Sequence
  Synthetic oligonucleotide
gctgggccagtggctgacagccgtgaaata

SEQ ID NO: 230498 - DNA, 30 bp, Artificial Sequence
  Synthetic oligonucleotide
gttacctgtgggagtacaggagaataaata

SEQ ID NO: 230499 - DNA, 30 bp, Artificial Sequence
  Synthetic oligonucleotide
ttccatcgataaccactaacgtactaaata

SEQ ID NO: 230500 - DNA, 30 bp, Artificial Sequence
  Synthetic oligonucleotide
tcctgttgacgcctgattcaaggctaaata

SEQ ID NO: 230501 - DNA, 30 bp, Artificial Sequence
  Synthetic oligonucleotide
ctgcatagtgaagtgaaatgaatctaaata

SEQ ID NO: 230502 - DNA, 30 bp, Artificial Sequence
  Synthetic oligonucleotide
cgatctggtacaacctcgaaaccgtaaata

SEQ ID NO: 230503 - DNA, 30 bp, Artificial Sequence
  Synthetic oligonucleotide
ggatggtttcggctgtactgttcgtaaata

SEQ ID NO: 230504 - DNA, 30 bp, Artificial Sequence
  Synthetic oligonucleotide
aattaggaatcaaggaggcagaggtaaata

SEQ ID NO: 230505 - DNA, 30 bp, Artificial Sequence
  Synthetic oligonucleotide
atgatcaggctcaagaacgggcattaaata

SEQ ID NO: 230506 - DNA, 30 bp, Artificial Sequence
  Synthetic oligonucleotide
cacatcgcggagcggggcctatcttaaata

SEQ ID NO: 230507 - DNA, 30 bp, Artificial Sequence
  Synthetic oligonucleotide
tccggctacaggttctcggcaagttaaata

SEQ ID NO: 230508 - DNA, 30 bp, Artificial Sequence
  Synthetic oligonucleotide
agcatcaacatcgttaatgagaacacaata

SEQ ID NO: 230509 - DNA, 30 bp, Artificial Sequence
  Synthetic oligonucleotide
actgccacatagtgttagcgagtgacaata

SEQ ID NO: 230510 - DNA, 30 bp, Artificial Sequence
  Synthetic oligonucleotide
ctatgatattcaggcaccattataccaata

SEQ ID NO: 230511 - DNA, 30 bp, Artificial Sequence
  Synthetic oligonucleotide
aggactttcaaggggtatcataccccaata

SEQ ID NO: 230512 - DNA, 30 bp, Artificial Sequence
  Synthetic oligonucleotide
cctgaatcatcgcgcattctacagccaata

SEQ ID NO: 230513 - DNA, 30 bp, Artificial Sequence
  Synthetic oligonucleotide
tagtattattaagagtacgcgccgccaata

SEQ ID NO: 230514 - DNA, 30 bp, Artificial Sequence
  Synthetic oligonucleotide
gcccaattgtggtggccccaagttccaata

SEQ ID NO: 230515 - DNA, 30 bp, Artificial Sequence
  Synthetic oligonucleotide
agacgcctgtaaggcatcttgaaagcaata

SEQ ID NO: 230516 - DNA, 30 bp, Artificial Sequence
  Synthetic oligonucleotide
ataaccgagccgtaggccagtgaatcaata

SEQ ID NO: 230517 - DNA, 30 bp, Artificial Sequence
  Synthetic oligonucleotide
caaaccgcgcttgcatatgtacgctcaata

SEQ ID NO: 230518 - DNA, 30 bp, Artificial Sequence
  Synthetic oligonucleotide
tattgagcactcaagcacacaggctcaata

SEQ ID NO: 230519 - DNA, 30 bp, Artificial Sequence
  Synthetic oligonucleotide
ccagcccgatataaaactatagtctcaata

SEQ ID NO: 230520 - DNA, 30 bp, Artificial Sequence
  Synthetic oligonucleotide
tatgagtatactatgtacggggagtcaata

SEQ ID NO: 230521 - DNA, 30 bp, Artificial Sequence
  Synthetic oligonucleotide
acgagacaactgcttcggttactaagaata

SEQ ID NO: 230522 - DNA, 30 bp, Artificial Sequence
  Synthetic oligonucleotide
tcatccacaggccattggtgagccagaata

SEQ ID NO: 230523 - DNA, 30 bp, Artificial Sequence
  Synthetic oligonucleotide
gtattcgcaggagacaagcactccagaata

SEQ ID NO: 230524 - DNA, 30 bp, Artificial Sequence
  Synthetic oligonucleotide
gggaggatgtgacataaagggtccagaata

SEQ ID NO: 230525 - DNA, 30 bp, Artificial Sequence
  Synthetic oligonucleotide
tatcgaggtccggcgtagtatgatagaata

SEQ ID NO: 230526 - DNA, 30 bp, Artificial Sequence
  Synthetic oligonucleotide
gcgagccttgtatgtggttgtagtagaata

SEQ ID NO: 230527 - DNA, 30 bp, Artificial Sequence
  Synthetic oligonucleotide
atgaaccgtcgttgcagtggatgtagaata

SEQ ID NO: 230528 - DNA, 30 bp, Artificial Sequence
  Synthetic oligonucleotide
ggaaggcatgttcttgactattgtagaata

SEQ ID NO: 230529 - DNA, 30 bp, Artificial Sequence
  Synthetic oligonucleotide
gcttgagtttccgggtcaggccaacgaata

SEQ ID NO: 230530 - DNA, 30 bp, Artificial Sequence
  Synthetic oligonucleotide
cagtatacaagcgaactgacccgacgaata

SEQ ID NO: 230531 - DNA, 30 bp, Artificial Sequence
  Synthetic oligonucleotide
gcgaaatccttaggttactagctaggaata

SEQ ID NO: 230532 - DNA, 30 bp, Artificial Sequence
  Synthetic oligonucleotide
tcccggattgtagagtgcggattcggaata

SEQ ID NO: 230533 - DNA, 30 bp, Artificial Sequence
  Synthetic oligonucleotide
gacgcaaactctagcgtcaaagagggaata

SEQ ID NO: 230534 - DNA, 30 bp, Artificial Sequence
  Synthetic oligonucleotide
agcatactggttgcttcggtcccgggaata

SEQ ID NO: 230535 - DNA, 30 bp, Artificial Sequence
  Synthetic oligonucleotide
ttacggttagctgtaaaaccggcgggaata

SEQ ID NO: 230536 - DNA, 30 bp, Artificial Sequence
  Synthetic oligonucleotide
agattacacaaaaagtgtgtacggggaata

SEQ ID NO: 230537 - DNA, 30 bp, Artificial Sequence
  Synthetic oligonucleotide
ttcgggacaaagtcagcacaattgggaata

SEQ ID NO: 230538 - DNA, 30 bp, Artificial Sequence
  Synthetic oligonucleotide
gatatggacaacgggtatcctactggaata

SEQ ID NO: 230539 - DNA, 30 bp, Artificial Sequence
  Synthetic oligonucleotide
ggcttgcacgattcggctcagtactgaata

SEQ ID NO: 230540 - DNA, 30 bp, Artificial Sequence
  Synthetic oligonucleotide
aggggagtattgtgcgggttgtactgaata

SEQ ID NO: 230541 - DNA, 30 bp, Artificial Sequence
  Synthetic oligonucleotide
tcgagactatgtttttaagagaattgaata

SEQ ID NO: 230542 - DNA, 30 bp, Artificial Sequence
  Synthetic oligonucleotide
tgttggcgagacgcccgaccttaaataata

SEQ ID NO: 230543 - DNA, 30 bp, Artificial Sequence
  Synthetic oligonucleotide
tgctctccgacttttaggtaccgaataata

SEQ ID NO: 230544 - DNA, 30 bp, Artificial Sequence
  Synthetic oligonucleotide
ctctcctccctagtgcctaaccacataata

SEQ ID NO: 230545 - DNA, 30 bp, Artificial Sequence
  Synthetic oligonucleotide
aaaaccagtgcctgcagtttagccataata

SEQ ID NO: 230546 - DNA, 30 bp, Artificial Sequence
  Synthetic oligonucleotide
gatgtaacaaccatccgacatgtcataata

SEQ ID NO: 230547 - DNA, 30 bp, Artificial Sequence
  Synthetic oligonucleotide
gaagcagagtctatgaggacggcgataata

SEQ ID NO: 230548 - DNA, 30 bp, Artificial Sequence
  Synthetic oligonucleotide
atagggtacttaacagtggaaaggataata

SEQ ID NO: 230549 - DNA, 30 bp, Artificial Sequence
  Synthetic oligonucleotide
cgcgaaatgagcattaggttacggataata

SEQ ID NO: 230550 - DNA, 30 bp, Artificial Sequence
  Synthetic oligonucleotide
accaacgcgctaggatacaggggtataata

SEQ ID NO: 230551 - DNA, 30 bp, Artificial Sequence
  Synthetic oligonucleotide
ggcgagcaccttcctatgctagttataata

SEQ ID NO: 230552 - DNA, 30 bp, Artificial Sequence
  Synthetic oligonucleotide
gctatgtcatggtaagggtacgttataata

SEQ ID NO: 230553 - DNA, 30 bp, Artificial Sequence
  Synthetic oligonucleotide
acaaggctgcgcacaaggacagcactaata

SEQ ID NO: 230554 - DNA, 30 bp, Artificial Sequence
  Synthetic oligonucleotide
cgaacacctttcctaggcacttccctaata

SEQ ID NO: 230555 - DNA, 30 bp, Artificial Sequence
  Synthetic oligonucleotide
aaggtatgcaacggtggacgcatcctaata

SEQ ID NO: 230556 - DNA, 30 bp, Artificial Sequence
  Synthetic oligonucleotide
atcctgggtcagagtaatatcattctaata

SEQ ID NO: 230557 - DNA, 30 bp, Artificial Sequence
  Synthetic oligonucleotide
cctgtagacttcctccctaatgttctaata

SEQ ID NO: 230558 - DNA, 30 bp, Artificial Sequence
  Synthetic oligonucleotide
aaagatcctatttgtgttagggtagtaata

SEQ ID NO: 230559 - DNA, 30 bp, Artificial Sequence
  Synthetic oligonucleotide
tcgacaggtgttgatattgttgatgtaata

SEQ ID NO: 230560 - DNA, 30 bp, Artificial Sequence
  Synthetic oligonucleotide
catgctgaccataaaccataagctgtaata

SEQ ID NO: 230561 - DNA, 30 bp, Artificial Sequence
  Synthetic oligonucleotide
gagggctggctatctttcaacagtgtaata

SEQ ID NO: 230562 - DNA, 30 bp, Artificial Sequence
  Synthetic oligonucleotide
gtagtatgagtcgaatttttgtcattaata

SEQ ID NO: 230563 - DNA, 30 bp, Artificial Sequence
  Synthetic oligonucleotide
gccttgtgtgcgagaagctgttacttaata

SEQ ID NO: 230564 - DNA, 30 bp, Artificial Sequence
  Synthetic oligonucleotide
aacgtactcaccttcctttagagcttaata

SEQ ID NO: 230565 - DNA, 30 bp, Artificial Sequence
  Synthetic oligonucleotide
gcgcagcgggctcctaagatactcttaata

SEQ ID NO: 230566 - DNA, 30 bp, Artificial Sequence
  Synthetic oligonucleotide
gcacgtatcaggaagctcaagctcttaata

SEQ ID NO: 230567 - DNA, 30 bp, Artificial Sequence
  Synthetic oligonucleotide
tgccagagagctcggattgggaagttaata

SEQ ID NO: 230568 - DNA, 30 bp, Artificial Sequence
  Synthetic oligonucleotide
gtggccagggaacggtagcgagagttaata

SEQ ID NO: 230569 - DNA, 30 bp, Artificial Sequence
  Synthetic oligonucleotide
tgaagcggtaagctggaagcttcgttaata

SEQ ID NO: 230570 - DNA, 30 bp, Artificial Sequence
  Synthetic oligonucleotide
cttaggtcccgggggtgctgacaaaacata

SEQ ID NO: 230571 - DNA, 30 bp, Artificial Sequence
  Synthetic oligonucleotide
agggcgcccgggtctacgtggttaaacata

SEQ ID NO: 230572 - DNA, 30 bp, Artificial Sequence
  Synthetic oligonucleotide
gaaacgtaatattgcaatagcaacaacata

SEQ ID NO: 230573 - DNA, 30 bp, Artificial Sequence
  Synthetic oligonucleotide
agaagcaaacaccagggatcaaagaacata

SEQ ID NO: 230574 - DNA, 30 bp, Artificial Sequence
  Synthetic oligonucleotide
cgtaacgactttgtggtaaacgggaacata

SEQ ID NO: 230575 - DNA, 30 bp, Artificial Sequence
  Synthetic oligonucleotide
cttagggacgagagttaattgactaacata

SEQ ID NO: 230576 - DNA, 30 bp, Artificial Sequence
  Synthetic oligonucleotide
accgcgggctaagcccttgagagtaacata

SEQ ID NO: 230577 - DNA, 30 bp, Artificial Sequence
  Synthetic oligonucleotide
ttgccagcttcttgtcgtgggggtaacata

SEQ ID NO: 230578 - DNA, 30 bp, Artificial Sequence
  Synthetic oligonucleotide
ccgtttaaccgtggacctcccgaccacata

SEQ ID NO: 230579 - DNA, 30 bp, Artificial Sequence
  Synthetic oligonucleotide
aaggcccgtgtacagttgatctagcacata

SEQ ID NO: 230580 - DNA, 30 bp, Artificial Sequence
  Synthetic oligonucleotide
atcccttaattgaatacgtcacgtcacata

SEQ ID NO: 230581 - DNA, 30 bp, Artificial Sequence
  Synthetic oligonucleotide
cactctgccattgtaagaatgattcacata

SEQ ID NO: 230582 - DNA, 30 bp, Artificial Sequence
  Synthetic oligonucleotide
acagattcggtgacgttataacaagacata

SEQ ID NO: 230583 - DNA, 30 bp, Artificial Sequence
  Synthetic oligonucleotide
tgtcatgtttcctaccaagaataagacata

SEQ ID NO: 230584 - DNA, 30 bp, Artificial Sequence
  Synthetic oligonucleotide
ttacagtgtttaaggtcatcctaagacata

SEQ ID NO: 230585 - DNA, 30 bp, Artificial Sequence
  Synthetic oligonucleotide
taccacccccatccgcggatgtgagacata

SEQ ID NO: 230586 - DNA, 30 bp, Artificial Sequence
  Synthetic oligonucleotide
ggaagcgattctgccattaggtgcgacata

SEQ ID NO: 230587 - DNA, 30 bp, Artificial Sequence
  Synthetic oligonucleotide
tttacacgaccaggtccataaacggacata

SEQ ID NO: 230588 - DNA, 30 bp, Artificial Sequence
  Synthetic oligonucleotide
gggtgtatgcctgtcgataaatcggacata

SEQ ID NO: 230589 - DNA, 30 bp, Artificial Sequence
  Synthetic oligonucleotide
aacacaaaaaacaccctaatacgtgacata

SEQ ID NO: 230590 - DNA, 30 bp, Artificial Sequence
  Synthetic oligonucleotide
cgtaaacgaaaaaacctgtctcttgacata

SEQ ID NO: 230591 - DNA, 30 bp, Artificial Sequence
  Synthetic oligonucleotide
tgttgtgtgcatagacttactgtatacata

SEQ ID NO: 230592 - DNA, 30 bp, Artificial Sequence
  Synthetic oligonucleotide
atatgctaatcaaaaaggtacgcctacata

SEQ ID NO: 230593 - DNA, 30 bp, Artificial Sequence
  Synthetic oligonucleotide
ggttcggttaacgacttttcgagctacata

SEQ ID NO: 230594 - DNA, 31 bp, Artificial Sequence
  Synthetic oligonucleotide
ccccgctaaggccataattggtgcttacata

SEQ ID NO: 230595 - DNA, 30 bp, Artificial Sequence
  Synthetic oligonucleotide
aaaagctaggaaagagttctgagttacata

SEQ ID NO: 230596 - DNA, 30 bp, Artificial Sequence
  Synthetic oligonucleotide
caatgtcaggggtcagggtctataaccata

SEQ ID NO: 230597 - DNA, 30 bp, Artificial Sequence
  Synthetic oligonucleotide
attagcaaaatcctctgaccgtccaccata

SEQ ID NO: 230598 - DNA, 30 bp, Artificial Sequence
  Synthetic oligonucleotide
gctatgaagggacccagcatgcagaccata

SEQ ID NO: 230599 - DNA, 30 bp, Artificial Sequence
  Synthetic oligonucleotide
tacttggaagctcggttgagatgccccata

SEQ ID NO: 230600 - DNA, 30 bp, Artificial Sequence
  Synthetic oligonucleotide
atgcaggtgcgtcgcttgaggttccccata

SEQ ID NO: 230601 - DNA, 30 bp, Artificial Sequence
  Synthetic oligonucleotide
taaattatgatacagaggggaaggcccata

SEQ ID NO: 230602 - DNA, 30 bp, Artificial Sequence
  Synthetic oligonucleotide
ggtgacgactatacacgggagcggcccata

SEQ ID NO: 230603 - DNA, 30 bp, Artificial Sequence
  Synthetic oligonucleotide
ccggtgtcatctcgggagcagctgcccata

SEQ ID NO: 230604 - DNA, 30 bp, Artificial Sequence
  Synthetic oligonucleotide
tcgggcgtggtaacagagacacaagccata

SEQ ID NO: 230605 - DNA, 30 bp, Artificial Sequence
  Synthetic oligonucleotide
gtcttacaacttccctgaaactgagccata

SEQ ID NO: 230606 - DNA, 30 bp, Artificial Sequence
  Synthetic oligonucleotide
cactgttaaaacagggcaatactagccata

SEQ ID NO: 230607 - DNA, 30 bp, Artificial Sequence
  Synthetic oligonucleotide
ttcaagtaggacatctaccgtaaggccata

SEQ ID NO: 230608 - DNA, 30 bp, Artificial Sequence
  Synthetic oligonucleotide
atcactgggggaataagacagtatgccata

SEQ ID NO: 230609 - DNA, 30 bp, Artificial Sequence
  Synthetic oligonucleotide
ggggtacgtactaataaggaaatatccata

SEQ ID NO: 230610 - DNA, 30 bp, Artificial Sequence
  Synthetic oligonucleotide
tgtcatgacttgccagaattgcggtccata

SEQ ID NO: 230611 - DNA, 30 bp, Artificial Sequence
  Synthetic oligonucleotide
acaatgaggttatgatactccccttccata

SEQ ID NO: 230612 - DNA, 30 bp, Artificial Sequence
  Synthetic oligonucleotide
ttcgtctgcaatcgagcttcaggaagcata

SEQ ID NO: 230613 - DNA, 30 bp, Artificial Sequence
  Synthetic oligonucleotide
gttgacatcacaagctattcaataagcata

SEQ ID NO: 230614 - DNA, 30 bp, Artificial Sequence
  Synthetic oligonucleotide
acccaggtctgctatacatcgaacagcata

SEQ ID NO: 230615 - DNA, 30 bp, Artificial Sequence
  Synthetic oligonucleotide
agagcacgtcgtgttgtatgctacagcata

SEQ ID NO: 230616 - DNA, 31 bp, Artificial Sequence
  Synthetic oligonucleotide
tgcttgcctcgaaatgagatcttcgagcata

SEQ ID NO: 230617 - DNA, 30 bp, Artificial Sequence
  Synthetic oligonucleotide
acttgctgtatagaggctagaatgagcata

SEQ ID NO: 230618 - DNA, 30 bp, Artificial Sequence
  Synthetic oligonucleotide
actaacacgcaagagcgatcgtatagcata

SEQ ID NO: 230619 - DNA, 30 bp, Artificial Sequence
  Synthetic oligonucleotide
aaaatactaaggagttccagaccacgcata

SEQ ID NO: 230620 - DNA, 30 bp, Artificial Sequence
  Synthetic oligonucleotide
accctcgtagggggcaaggcctcacgcata

SEQ ID NO: 230621 - DNA, 30 bp, Artificial Sequence
  Synthetic oligonucleotide
ggtccgggggtagcaactattatacgcata

SEQ ID NO: 230622 - DNA, 30 bp, Artificial Sequence
  Synthetic oligonucleotide
atgaagtcggtgtgaatctgactacgcata

SEQ ID NO: 230623 - DNA, 30 bp, Artificial Sequence
  Synthetic oligonucleotide
cgggggattcatatggtactttcgcgcata

SEQ ID NO: 230624 - DNA, 30 bp, Artificial Sequence
  Synthetic oligonucleotide
ggctgcttccaaagttgcaggttgcgcata

SEQ ID NO: 230625 - DNA, 30 bp, Artificial Sequence
  Synthetic oligonucleotide
tgtcttggctttatcaggtcacttcgcata

SEQ ID NO: 230626 - DNA, 30 bp, Artificial Sequence
  Synthetic oligonucleotide
cgtaatcaggatacggtttcagttcgcata

SEQ ID NO: 230627 - DNA, 30 bp, Artificial Sequence
  Synthetic oligonucleotide
tgtcgacgtataggcagtggcagcggcata

SEQ ID NO: 230628 - DNA, 30 bp, Artificial Sequence
  Synthetic oligonucleotide
aaaattcagaggctggtggcgttgggcata

SEQ ID NO: 230629 - DNA, 30 bp, Artificial Sequence
  Synthetic oligonucleotide
tcaaacaagaaagacgatatttaatgcata

SEQ ID NO: 230630 - DNA, 30 bp, Artificial Sequence
  Synthetic oligonucleotide
tttcaatgataattggcatagacatgcata

SEQ ID NO: 230631 - DNA, 30 bp, Artificial Sequence
  Synthetic oligonucleotide
ggtaccccaagaagatgccgcctgtgcata

SEQ ID NO: 230632 - DNA, 30 bp, Artificial Sequence
  Synthetic oligonucleotide
ttaaatgatggggggaaattttaaatcata

SEQ ID NO: 230633 - DNA, 30 bp, Artificial Sequence
  Synthetic oligonucleotide
ccctagatggtgatcctggttacaatcata

SEQ ID NO: 230634 - DNA, 30 bp, Artificial Sequence
  Synthetic oligonucleotide
gggctgagggggaaggggggttgaatcata

SEQ ID NO: 230635 - DNA, 30 bp, Artificial Sequence
  Synthetic oligonucleotide
cttatacggacgtgggtcgacagcatcata

SEQ ID NO: 230636 - DNA, 30 bp, Artificial Sequence
  Synthetic oligonucleotide
tgtcaccacgcgaattattcaaggatcata

SEQ ID NO: 230637 - DNA, 30 bp, Artificial Sequence
  Synthetic oligonucleotide
ttcagggaacacgtaccggtaatgctcata

SEQ ID NO: 230638 - DNA, 30 bp, Artificial Sequence
  Synthetic oligonucleotide
gaggaactgctagtaaccgggctcgtcata

SEQ ID NO: 230639 - DNA, 30 bp, Artificial Sequence
  Synthetic oligonucleotide
aggctgtctggtaacatgtctagtgtcata

SEQ ID NO: 230640 - DNA, 30 bp, Artificial Sequence
  Synthetic oligonucleotide
gtacttatggaatgccgaaacattgtcata

SEQ ID NO: 230641 - DNA, 30 bp, Artificial Sequence
  Synthetic oligonucleotide
aaacaactaacaacttcccaatttgtcata

SEQ ID NO: 230642 - DNA, 30 bp, Artificial Sequence
  Synthetic oligonucleotide
agtaactaaagttcgttccgatgattcata

SEQ ID NO: 230643 - DNA, 30 bp, Artificial Sequence
  Synthetic oligonucleotide
agaaggttcttaggtgcgaaaagcttcata

SEQ ID NO: 230644 - DNA, 30 bp, Artificial Sequence
  Synthetic oligonucleotide
tcgggagcctcctaataatagtgcttcata

SEQ ID NO: 230645 - DNA, 30 bp, Artificial Sequence
  Synthetic oligonucleotide
gaactgaagtatcaactgggccctttcata

SEQ ID NO: 230646 - DNA, 30 bp, Artificial Sequence
  Synthetic oligonucleotide
actaaaggcaggtaaactcccggtttcata

SEQ ID NO: 230647 - DNA, 30 bp, Artificial Sequence
  Synthetic oligonucleotide
tcctgtctagatcaaatggttcttttcata

SEQ ID NO: 230648 - DNA, 30 bp, Artificial Sequence
  Synthetic oligonucleotide
acatttagctagaacccctaacaaaagata

SEQ ID NO: 230649 - DNA, 30 bp, Artificial Sequence
  Synthetic oligonucleotide
gctcgcgtgcaacaaagtctttaaaagata

SEQ ID NO: 230650 - DNA, 30 bp, Artificial Sequence
  Synthetic oligonucleotide
agttaggcgaccttggcccgcccaaagata

SEQ ID NO: 230651 - DNA, 30 bp, Artificial Sequence
  Synthetic oligonucleotide
gtgtggggccacactatgccgttaaagata

SEQ ID NO: 230652 - DNA, 30 bp, Artificial Sequence
  Synthetic oligonucleotide
gtggaagcattgaggactcgccgcaagata

SEQ ID NO: 230653 - DNA, 30 bp, Artificial Sequence
  Synthetic oligonucleotide
cttcagggacgtaatcagaaagataagata

SEQ ID NO: 230654 - DNA, 30 bp, Artificial Sequence
  Synthetic oligonucleotide
aatgtgatggaaagcaaggtggttaagata

SEQ ID NO: 230655 - DNA, 30 bp, Artificial Sequence
  Synthetic oligonucleotide
ccgatttttcgaaaatactgttttaagata

SEQ ID NO: 230656 - DNA, 30 bp, Artificial Sequence
  Synthetic oligonucleotide
aaacaaggtaaatggagaaaacaacagata

SEQ ID NO: 230657 - DNA, 30 bp, Artificial Sequence
  Synthetic oligonucleotide
tcatccggcggaagtttaagaacacagata

SEQ ID NO: 230658 - DNA, 30 bp, Artificial Sequence
  Synthetic oligonucleotide
cggggtggataccgagcaactggacagata

SEQ ID NO: 230659 - DNA, 30 bp, Artificial Sequence
  Synthetic oligonucleotide
gaagagctctgacagtgcccatgccagata

SEQ ID NO: 230660 - DNA, 30 bp, Artificial Sequence
  Synthetic oligonucleotide
tgtcgttacattgggtatgacttgcagata

SEQ ID NO: 230661 - DNA, 30 bp, Artificial Sequence
  Synthetic oligonucleotide
cgctaatctggaaatttacacaatcagata

SEQ ID NO: 230662 - DNA, 30 bp, Artificial Sequence
  Synthetic oligonucleotide
tcgtactgagtcccatgtggcgctcagata

SEQ ID NO: 230663 - DNA, 30 bp, Artificial Sequence
  Synthetic oligonucleotide
tttatggtcaccggtgtaacacaagagata

SEQ ID NO: 230664 - DNA, 30 bp, Artificial Sequence
  Synthetic oligonucleotide
gaagatagattgtgtatcagtgcagagata

SEQ ID NO: 230665 - DNA, 30 bp, Artificial Sequence
  Synthetic oligonucleotide
agattcgtattcgaccgtaaagtagagata

SEQ ID NO: 230666 - DNA, 30 bp, Artificial Sequence
  Synthetic oligonucleotide
agcaaacaggatctatccctagacgagata

SEQ ID NO: 230667 - DNA, 30 bp, Artificial Sequence
  Synthetic oligonucleotide
ggatggagcgtttccacactcgccgagata

SEQ ID NO: 230668 - DNA, 30 bp, Artificial Sequence
  Synthetic oligonucleotide
cacaaaagcacctgctggcgtcttgagata

SEQ ID NO: 230669 - DNA, 27 bp, Artificial Sequence
  Synthetic oligonucleotide
gaaggaatacgtgcattatttgagata

SEQ ID NO: 230670 - DNA, 30 bp, Artificial Sequence
  Synthetic oligonucleotide
gctcagccggaagagaagtgggaatagata

SEQ ID NO: 230671 - DNA, 30 bp, Artificial Sequence
  Synthetic oligonucleotide
cataaggcaggggaggggcgggcatagata

SEQ ID NO: 230672 - DNA, 30 bp, Artificial Sequence
  Synthetic oligonucleotide
acacggatcattatcgaatcaagatagata

SEQ ID NO: 230673 - DNA, 30 bp, Artificial Sequence
  Synthetic oligonucleotide
ttggtggcattgcccttgtgacggtagata

SEQ ID NO: 230674 - DNA, 30 bp, Artificial Sequence
  Synthetic oligonucleotide
cgatgctaccagtgaacttagtcttagata

SEQ ID NO: 230675 - DNA, 30 bp, Artificial Sequence
  Synthetic oligonucleotide
ggtctaccgagcgagtccgttggttagata

SEQ ID NO: 230676 - DNA, 30 bp, Artificial Sequence
  Synthetic oligonucleotide
gtgtagagaactctgaactgcgtttagata

SEQ ID NO: 230677 - DNA, 30 bp, Artificial Sequence
  Synthetic oligonucleotide
cccctagcagaacgagaaatgcctacgata

SEQ ID NO: 230678 - DNA, 30 bp, Artificial Sequence
  Synthetic oligonucleotide
tgatgcgtggacatagatccttctacgata

SEQ ID NO: 230679 - DNA, 31 bp, Artificial Sequence
  Synthetic oligonucleotide
aactgggggagaaaaactttgttcaccgata

SEQ ID NO: 230680 - DNA, 30 bp, Artificial Sequence
  Synthetic oligonucleotide
caacggtcagcgcctgttaaacgaccgata

SEQ ID NO: 230681 - DNA, 30 bp, Artificial Sequence
  Synthetic oligonucleotide
tattgggcctactggataggatacccgata

SEQ ID NO: 230682 - DNA, 30 bp, Artificial Sequence
  Synthetic oligonucleotide
ctctgcaaaattctaaatgtctaggcgata

SEQ ID NO: 230683 - DNA, 30 bp, Artificial Sequence
  Synthetic oligonucleotide
gaattcattgaatgtatctgcggggcgata

SEQ ID NO: 230684 - DNA, 30 bp, Artificial Sequence
  Synthetic oligonucleotide
tcgagtgccaaacgtcatcactgggcgata

SEQ ID NO: 230685 - DNA, 30 bp, Artificial Sequence
  Synthetic oligonucleotide
atcaggggtggacagagtataattgcgata

SEQ ID NO: 230686 - DNA, 30 bp, Artificial Sequence
  Synthetic oligonucleotide
gtcacgtatggataacaccacggatcgata

SEQ ID NO: 230687 - DNA, 30 bp, Artificial Sequence
  Synthetic oligonucleotide
aatcaagatcctttactccagcaaaggata

SEQ ID NO: 230688 - DNA, 30 bp, Artificial Sequence
  Synthetic oligonucleotide
aaggaggcctggtgacgctcggaaaggata

SEQ ID NO: 230689 - DNA, 30 bp, Artificial Sequence
  Synthetic oligonucleotide
acggttcaacaatatcaccttagaaggata

SEQ ID NO: 230690 - DNA, 30 bp, Artificial Sequence
  Synthetic oligonucleotide
tacttgcggaagttgtggagtcgaaggata

SEQ ID NO: 230691 - DNA, 30 bp, Artificial Sequence
  Synthetic oligonucleotide
gtagacaacggctggggcatttgaaggata

SEQ ID NO: 230692 - DNA, 30 bp, Artificial Sequence
  Synthetic oligonucleotide
gcaacgatttttccgactcgttacaggata

SEQ ID NO: 230693 - DNA, 30 bp, Artificial Sequence
  Synthetic oligonucleotide
gcgacctgtattcgtaggacagagaggata

SEQ ID NO: 230694 - DNA, 30 bp, Artificial Sequence
  Synthetic oligonucleotide
atctaggacagggagctcgcgctgaggata

SEQ ID NO: 230695 - DNA, 30 bp, Artificial Sequence
  Synthetic oligonucleotide
gagatctatatcatatacgggtctaggata

SEQ ID NO: 230696 - DNA, 30 bp, Artificial Sequence
  Synthetic oligonucleotide
accaaacactccaaccgggactgacggata

SEQ ID NO: 230697 - DNA, 30 bp, Artificial Sequence
  Synthetic oligonucleotide
atccgtaactgttgaaacgcgggccggata

SEQ ID NO: 230698 - DNA, 30 bp, Artificial Sequence
  Synthetic oligonucleotide
agtattgccgggaacttggagcagcggata

SEQ ID NO: 230699 - DNA, 30 bp, Artificial Sequence
  Synthetic oligonucleotide
atcgggcagaaaatttttggtaggcggata

SEQ ID NO: 230700 - DNA, 30 bp, Artificial Sequence
  Synthetic oligonucleotide
ctaggaagagaattccgcttgactcggata

SEQ ID NO: 230701 - DNA, 30 bp, Artificial Sequence
  Synthetic oligonucleotide
acaccaccgagttaatgtctctctcggata

SEQ ID NO: 230702 - DNA, 29 bp, Artificial Sequence
  Synthetic oligonucleotide
ggtgtaaatgtgaattaacttaagggata

SEQ ID NO: 230703 - DNA, 30 bp, Artificial Sequence
  Synthetic oligonucleotide
acaaatttgggccattaggtcaatgggata

SEQ ID NO: 230704 - DNA, 30 bp, Artificial Sequence
  Synthetic oligonucleotide
taggcgcgatcattatctcaggatgggata

SEQ ID NO: 230705 - DNA, 30 bp, Artificial Sequence
  Synthetic oligonucleotide
ggggaagtctttgcggcatagtatgggata

SEQ ID NO: 230706 - DNA, 30 bp, Artificial Sequence
  Synthetic oligonucleotide
gtggcccgcttacgtgcgttgagatggata

SEQ ID NO: 230707 - DNA, 30 bp, Artificial Sequence
  Synthetic oligonucleotide
gtactacaatcttcaacaggattatggata

SEQ ID NO: 230708 - DNA, 30 bp, Artificial Sequence
  Synthetic oligonucleotide
tgcagtgacagcaaaattggcatctggata

SEQ ID NO: 230709 - DNA, 30 bp, Artificial Sequence
  Synthetic oligonucleotide
gttacctatagcccccttccatcgtggata

SEQ ID NO: 230710 - DNA, 30 bp, Artificial Sequence
  Synthetic oligonucleotide
gaactacaggcatttaactgatggtggata

SEQ ID NO: 230711 - DNA, 30 bp, Artificial Sequence
  Synthetic oligonucleotide
cctgtgtatagattctgtaggtggtggata

SEQ ID NO: 230712 - DNA, 30 bp, Artificial Sequence
  Synthetic oligonucleotide
tgggcgagtgtactttgggtactgtggata

SEQ ID NO: 230713 - DNA, 30 bp, Artificial Sequence
  Synthetic oligonucleotide
aagaagtgccaggcactcgagatttggata

SEQ ID NO: 230714 - DNA, 30 bp, Artificial Sequence
  Synthetic oligonucleotide
gacgagcagacttcgtggtcggtttggata

SEQ ID NO: 230715 - DNA, 30 bp, Artificial Sequence
  Synthetic oligonucleotide
tgtcaatgtcacgcatgcggatgaatgata

SEQ ID NO: 230716 - DNA, 30 bp, Artificial Sequence
  Synthetic oligonucleotide
acggaattattaatcgatggggggatgata

SEQ ID NO: 230717 - DNA, 30 bp, Artificial Sequence
  Synthetic oligonucleotide
aagcaacctccgacgaaaaataatatgata

SEQ ID NO: 230718 - DNA, 30 bp, Artificial Sequence
  Synthetic oligonucleotide
aatgtggcataacgacatatccatatgata

SEQ ID NO: 230719 - DNA, 30 bp, Artificial Sequence
  Synthetic oligonucleotide
ctgcggcggcgaagaggaaaatatatgata

SEQ ID NO: 230720 - DNA, 30 bp, Artificial Sequence
  Synthetic oligonucleotide
cgcaccatcgggacctgggcggttatgata

SEQ ID NO: 230721 - DNA, 30 bp, Artificial Sequence
  Synthetic oligonucleotide
aattaagtttgccgtctgggtgtactgata

SEQ ID NO: 230722 - DNA, 30 bp, Artificial Sequence
  Synthetic oligonucleotide
ataggttcacacaaattacccggtctgata

SEQ ID NO: 230723 - DNA, 30 bp, Artificial Sequence
  Synthetic oligonucleotide
aagactgaccaagcgatagtacgagtgata

SEQ ID NO: 230724 - DNA, 30 bp, Artificial Sequence
  Synthetic oligonucleotide
gggtagggagtgtcttcgatagtagtgata

SEQ ID NO: 230725 - DNA, 30 bp, Artificial Sequence
  Synthetic oligonucleotide
ctactggagcggaccgaacggaacgtgata

SEQ ID NO: 230726 - DNA, 30 bp, Artificial Sequence
  Synthetic oligonucleotide
gcatagtctcgactacaactattggtgata

SEQ ID NO: 230727 - DNA, 30 bp, Artificial Sequence
  Synthetic oligonucleotide
tgtctagcccgactgagtaacagtgtgata

SEQ ID NO: 230728 - DNA, 30 bp, Artificial Sequence
  Synthetic oligonucleotide
tggatgactcctttgtcgtcccttgtgata

SEQ ID NO: 230729 - DNA, 30 bp, Artificial Sequence
  Synthetic oligonucleotide
taacctgtaaggtaaccgatcctattgata

SEQ ID NO: 230730 - DNA, 30 bp, Artificial Sequence
  Synthetic oligonucleotide
cgctaggcgcttatggggcttttgttgata

SEQ ID NO: 230731 - DNA, 30 bp, Artificial Sequence
  Synthetic oligonucleotide
ctgagggaacagacagtggcagctttgata

SEQ ID NO: 230732 - DNA, 31 bp, Artificial Sequence
  Synthetic oligonucleotide
agctcgacaagttaaagttgccagaaatata

SEQ ID NO: 230733 - DNA, 30 bp, Artificial Sequence
  Synthetic oligonucleotide
tgtcacagccccccgagagctaggaatata

SEQ ID NO: 230734 - DNA, 30 bp, Artificial Sequence
  Synthetic oligonucleotide
gcccgtcgtcctaagtaaatgaataatata

SEQ ID NO: 230735 - DNA, 30 bp, Artificial Sequence
  Synthetic oligonucleotide
caagcgacatcgctttaccaagctaatata

SEQ ID NO: 230736 - DNA, 30 bp, Artificial Sequence
  Synthetic oligonucleotide
gagattgagattgccactggttgtaatata

SEQ ID NO: 230737 - DNA, 30 bp, Artificial Sequence
  Synthetic oligonucleotide
gtctataccagggtactctaagagcatata

SEQ ID NO: 230738 - DNA, 30 bp, Artificial Sequence
  Synthetic oligonucleotide
gaagtgggggcgcgtaagcaatagcatata

SEQ ID NO: 230739 - DNA, 30 bp, Artificial Sequence
  Synthetic oligonucleotide
cggccaacccggaggtagtcgacgcatata

SEQ ID NO: 230740 - DNA, 30 bp, Artificial Sequence
  Synthetic oligonucleotide
cggagtggcagagattaaccttcgcatata

SEQ ID NO: 230741 - DNA, 30 bp, Artificial Sequence
  Synthetic oligonucleotide
ctccatgaggaaaacacaaagtccgatata

SEQ ID NO: 230742 - DNA, 30 bp, Artificial Sequence
  Synthetic oligonucleotide
agtggctcgatagtctatataacggatata

SEQ ID NO: 230743 - DNA, 30 bp, Artificial Sequence
  Synthetic oligonucleotide
tccatctctccgaacattgttatggatata

SEQ ID NO: 230744 - DNA, 30 bp, Artificial Sequence
  Synthetic oligonucleotide
aagtacgatattccaactcccctctatata

SEQ ID NO: 230745 - DNA, 30 bp, Artificial Sequence
  Synthetic oligonucleotide
gtggattatataagccgggatcattatata

SEQ ID NO: 230746 - DNA, 30 bp, Artificial Sequence
  Synthetic oligonucleotide
taggtaagacatattatttgcccaactata

SEQ ID NO: 230747 - DNA, 30 bp, Artificial Sequence
  Synthetic oligonucleotide
gaccgaatatgaatgggccactacactata

SEQ ID NO: 230748 - DNA, 30 bp, Artificial Sequence
  Synthetic oligonucleotide
tatagcggatcgcctcggggactgactata

SEQ ID NO: 230749 - DNA, 30 bp, Artificial Sequence
  Synthetic oligonucleotide
acatgggacagtgaagttgggtcacctata

SEQ ID NO: 230750 - DNA, 30 bp, Artificial Sequence
  Synthetic oligonucleotide
aacctatctgatcggccatgacaccctata

SEQ ID NO: 230751 - DNA, 30 bp, Artificial Sequence
  Synthetic oligonucleotide
aaaaaggagggcagaggataagatcctata

SEQ ID NO: 230752 - DNA, 30 bp, Artificial Sequence
  Synthetic oligonucleotide
gtgctcatcacaagaactacatatcctata

SEQ ID NO: 230753 - DNA, 30 bp, Artificial Sequence
  Synthetic oligonucleotide
ggggattagatgcgagcgctaccagctata

SEQ ID NO: 230754 - DNA, 30 bp, Artificial Sequence
  Synthetic oligonucleotide
tacgttcgcgcatgaggtgcgcacgctata

SEQ ID NO: 230755 - DNA, 30 bp, Artificial Sequence
  Synthetic oligonucleotide
tcggggggtatgtcggtggtccaggctata

SEQ ID NO: 230756 - DNA, 30 bp, Artificial Sequence
  Synthetic oligonucleotide
tagtgggttgacctgtgaggtgcggctata

SEQ ID NO: 230757 - DNA, 30 bp, Artificial Sequence
  Synthetic oligonucleotide
attagcgtcggaaggtcggcatgatctata

SEQ ID NO: 230758 - DNA, 30 bp, Artificial Sequence
  Synthetic oligonucleotide
ctgacatagcccacttagagttgatctata

SEQ ID NO: 230759 - DNA, 30 bp, Artificial Sequence
  Synthetic oligonucleotide
gtgatggcatggatctcttgcctctctata

SEQ ID NO: 230760 - DNA, 30 bp, Artificial Sequence
  Synthetic oligonucleotide
aacgagacttctaattcgcgtaagtctata

SEQ ID NO: 230761 - DNA, 30 bp, Artificial Sequence
  Synthetic oligonucleotide
agtttaggcgtgacgatatgcatgtctata

SEQ ID NO: 230762 - DNA, 30 bp, Artificial Sequence
  Synthetic oligonucleotide
ttagcgtgcctcgtggtcagtctttctata

SEQ ID NO: 230763 - DNA, 30 bp, Artificial Sequence
  Synthetic oligonucleotide
acatatacaacagaaacatgcaaaagtata

SEQ ID NO: 230764 - DNA, 30 bp, Artificial Sequence
  Synthetic oligonucleotide
attgccaacacatatagcggtaaaagtata

SEQ ID NO: 230765 - DNA, 30 bp, Artificial Sequence
  Synthetic oligonucleotide
acccgtagaatagaggcgcgagaaagtata

SEQ ID NO: 230766 - DNA, 30 bp, Artificial Sequence
  Synthetic oligonucleotide
tgcgtagaatccggattaacgtaaagtata

SEQ ID NO: 230767 - DNA, 30 bp, Artificial Sequence
  Synthetic oligonucleotide
cttgcgctcagttctctctgcccaagtata

SEQ ID NO: 230768 - DNA, 30 bp, Artificial Sequence
  Synthetic oligonucleotide
gaagcgtcggctaagcgctagtgaagtata

SEQ ID NO: 230769 - DNA, 30 bp, Artificial Sequence
  Synthetic oligonucleotide
ttttggggtatcgacgaggtgatgagtata

SEQ ID NO: 230770 - DNA, 30 bp, Artificial Sequence
  Synthetic oligonucleotide
ctaagatattagtccgtgaacaatagtata

SEQ ID NO: 230771 - DNA, 30 bp, Artificial Sequence
  Synthetic oligonucleotide
gtagatggtatgtagggtcggaatagtata

SEQ ID NO: 230772 - DNA, 30 bp, Artificial Sequence
  Synthetic oligonucleotide
ttcatgaagtcaacgatttggtcacgtata

SEQ ID NO: 230773 - DNA, 30 bp, Artificial Sequence
  Synthetic oligonucleotide
gactagagtaatgtataggggtaaggtata

SEQ ID NO: 230774 - DNA, 30 bp, Artificial Sequence
  Synthetic oligonucleotide
tcacgctcaatttgaaatacaggaggtata

SEQ ID NO: 230775 - DNA, 30 bp, Artificial Sequence
  Synthetic oligonucleotide
ctaggcagtcaaaggcatcggtacggtata

SEQ ID NO: 230776 - DNA, 30 bp, Artificial Sequence
  Synthetic oligonucleotide
tgattacactctcgtgcggggcccggtata

SEQ ID NO: 230777 - DNA, 30 bp, Artificial Sequence
  Synthetic oligonucleotide
tccttggaggaagttcaggttatgggtata

SEQ ID NO: 230778 - DNA, 30 bp, Artificial Sequence
  Synthetic oligonucleotide
tgaggagagggtgctgttcatttgggtata

SEQ ID NO: 230779 - DNA, 30 bp, Artificial Sequence
  Synthetic oligonucleotide
cagagatagatacgggctgcttctggtata

SEQ ID NO: 230780 - DNA, 30 bp, Artificial Sequence
  Synthetic oligonucleotide
taccgaaagcaggaaaatctgtgtggtata

SEQ ID NO: 230781 - DNA, 30 bp, Artificial Sequence
  Synthetic oligonucleotide
cttcacaaggaatggtgaccacttggtata

SEQ ID NO: 230782 - DNA, 30 bp, Artificial Sequence
  Synthetic oligonucleotide
gtgtccccggcaacaagcacaggctgtata

SEQ ID NO: 230783 - DNA, 30 bp, Artificial Sequence
  Synthetic oligonucleotide
gaaacgtacccttggatttgatgctgtata

SEQ ID NO: 230784 - DNA, 30 bp, Artificial Sequence
  Synthetic oligonucleotide
tagagatgtttcgaccccctacacattata

SEQ ID NO: 230785 - DNA, 30 bp, Artificial Sequence
  Synthetic oligonucleotide
actgtcgtgtacacttgcgctcggattata

SEQ ID NO: 230786 - DNA, 30 bp, Artificial Sequence
  Synthetic oligonucleotide
cgttaggtgcgtatccagtagcatattata

SEQ ID NO: 230787 - DNA, 30 bp, Artificial Sequence
  Synthetic oligonucleotide
gcgactcacgcagagttgtggtgtattata

SEQ ID NO: 230788 - DNA, 30 bp, Artificial Sequence
  Synthetic oligonucleotide
agttggaggagctatcacagcaaacttata

SEQ ID NO: 230789 - DNA, 30 bp, Artificial Sequence
  Synthetic oligonucleotide
ggccccgttgtatgcgactagtcacttata

SEQ ID NO: 230790 - DNA, 30 bp, Artificial Sequence
  Synthetic oligonucleotide
gcgcagagaattagtccgttgaatcttata

SEQ ID NO: 230791 - DNA, 30 bp, Artificial Sequence
  Synthetic oligonucleotide
tgcgacaagatcgcgggaaaccttcttata

SEQ ID NO: 230792 - DNA, 30 bp, Artificial Sequence
  Synthetic oligonucleotide
gatcggatatcggtacgcgtctttcttata

SEQ ID NO: 230793 - DNA, 30 bp, Artificial Sequence
  Synthetic oligonucleotide
tcagaaatggtactagacttaaaagttata

SEQ ID NO: 230794 - DNA, 30 bp, Artificial Sequence
  Synthetic oligonucleotide
ggcagtaaattcgttccggtgtaagttata

SEQ ID NO: 230795 - DNA, 30 bp, Artificial Sequence
  Synthetic oligonucleotide
acatgacggcttcgagcgactaccgttata

SEQ ID NO: 230796 - DNA, 30 bp, Artificial Sequence
  Synthetic oligonucleotide
gtacgggctttacaagttagatctgttata

SEQ ID NO: 230797 - DNA, 30 bp, Artificial Sequence
  Synthetic oligonucleotide
attaggaagcggatttcggcaacatttata

SEQ ID NO: 230798 - DNA, 30 bp, Artificial Sequence
  Synthetic oligonucleotide
attggatttggggtggtagaaccatttata

SEQ ID NO: 230799 - DNA, 30 bp, Artificial Sequence
  Synthetic oligonucleotide
gcacgaaacgtggatagactattatttata

SEQ ID NO: 230800 - DNA, 30 bp, Artificial Sequence
  Synthetic oligonucleotide
agacgtagtgagatatattgtgactttata

SEQ ID NO: 230801 - DNA, 30 bp, Artificial Sequence
  Synthetic oligonucleotide
tagtacaagtgacgatggcgaacctttata

SEQ ID NO: 230802 - DNA, 30 bp, Artificial Sequence
  Synthetic oligonucleotide
tccagagcgacatcgagggcgggctttata

SEQ ID NO: 230803 - DNA, 30 bp, Artificial Sequence
  Synthetic oligonucleotide
ctgatataattggatcgccttggctttata

SEQ ID NO: 230804 - DNA, 30 bp, Artificial Sequence
  Synthetic oligonucleotide
cccagagttgttttgatataacagtttata

SEQ ID NO: 230805 - DNA, 30 bp, Artificial Sequence
  Synthetic oligonucleotide
tctccatagtaggctgaatcgtcgtttata

SEQ ID NO: 230806 - DNA, 30 bp, Artificial Sequence
  Synthetic oligonucleotide
atcgggcagcttgggcatcttcgttttata

SEQ ID NO: 230807 - DNA, 30 bp, Artificial Sequence
  Synthetic oligonucleotide
actgggcactgtaaactggcccgcaaacta

SEQ ID NO: 230808 - DNA, 30 bp, Artificial Sequence
  Synthetic oligonucleotide
gggtcggttcttacaacgaagcgcaaacta

SEQ ID NO: 230809 - DNA, 30 bp, Artificial Sequence
  Synthetic oligonucleotide
tcaagtcgcatcctatcataattgaaacta

SEQ ID NO: 230810 - DNA, 30 bp, Artificial Sequence
  Synthetic oligonucleotide
ggccaaagaagtctctttaattaacaacta

SEQ ID NO: 230811 - DNA, 30 bp, Artificial Sequence
  Synthetic oligonucleotide
ccttgaacactggggcgtatttcacaacta

SEQ ID NO: 230812 - DNA, 30 bp, Artificial Sequence
  Synthetic oligonucleotide
tgctcccccgaactccatgctagacaacta

SEQ ID NO: 230813 - DNA, 30 bp, Artificial Sequence
  Synthetic oligonucleotide
gactccgtaacgctggcttgacaccaacta

SEQ ID NO: 230814 - DNA, 30 bp, Artificial Sequence
  Synthetic oligonucleotide
catataagtacttcagagcggctccaacta

SEQ ID NO: 230815 - DNA, 30 bp, Artificial Sequence
  Synthetic oligonucleotide
gggagactcggaacatcattgtggcaacta

SEQ ID NO: 230816 - DNA, 30 bp, Artificial Sequence
  Synthetic oligonucleotide
tttccgttaagtaacgagtgtgatcaacta

SEQ ID NO: 230817 - DNA, 30 bp, Artificial Sequence
  Synthetic oligonucleotide
gcttggctcgtatagcatgaggttcaacta

SEQ ID NO: 230818 - DNA, 30 bp, Artificial Sequence
  Synthetic oligonucleotide
tgaatgccgtcctttccatactcagaacta

SEQ ID NO: 230819 - DNA, 30 bp, Artificial Sequence
  Synthetic oligonucleotide
atttgagaagataggcgttcacaggaacta

SEQ ID NO: 230820 - DNA, 30 bp, Artificial Sequence
  Synthetic oligonucleotide
ggagtgaagattccccactgagctgaacta

SEQ ID NO: 230821 - DNA, 30 bp, Artificial Sequence
  Synthetic oligonucleotide
gcgtctggggcaaaccaggtggctgaacta

SEQ ID NO: 230822 - DNA, 30 bp, Artificial Sequence
  Synthetic oligonucleotide
tgcgttaaacgtccgggtagggaataacta

SEQ ID NO: 230823 - DNA, 30 bp, Artificial Sequence
  Synthetic oligonucleotide
cacagtggcgaagcgctaatggtctaacta

SEQ ID NO: 230824 - DNA, 30 bp, Artificial Sequence
  Synthetic oligonucleotide
gtgtggtactatcaatatggggcgtaacta

SEQ ID NO: 230825 - DNA, 30 bp, Artificial Sequence
  Synthetic oligonucleotide
gacatacggaaagcttcaggctcgtaacta

SEQ ID NO: 230826 - DNA, 30 bp, Artificial Sequence
  Synthetic oligonucleotide
atctttaaggagaggaggggatgttaacta

SEQ ID NO: 230827 - DNA, 30 bp, Artificial Sequence
  Synthetic oligonucleotide
attcgataatacgctaatggacgaacacta

SEQ ID NO: 230828 - DNA, 30 bp, Artificial Sequence
  Synthetic oligonucleotide
ggtggatcttgcaagttttgattaacacta

SEQ ID NO: 230829 - DNA, 30 bp, Artificial Sequence
  Synthetic oligonucleotide
gatcttagatagctccagaacctcacacta

SEQ ID NO: 230830 - DNA, 30 bp, Artificial Sequence
  Synthetic oligonucleotide
ctaaccatggtatgagttggcaatacacta

SEQ ID NO: 230831 - DNA, 30 bp, Artificial Sequence
  Synthetic oligonucleotide
tcgtgccccagcgaggtttttgctacacta

SEQ ID NO: 230832 - DNA, 30 bp, Artificial Sequence
  Synthetic oligonucleotide
cctgggacatcctgttgctcttttacacta

SEQ ID NO: 230833 - DNA, 30 bp, Artificial Sequence
  Synthetic oligonucleotide
tcccgacagtatgccaggccagagccacta

SEQ ID NO: 230834 - DNA, 30 bp, Artificial Sequence
  Synthetic oligonucleotide
ctagacatgccatggtcctcgtggccacta

SEQ ID NO: 230835 - DNA, 30 bp, Artificial Sequence
  Synthetic oligonucleotide
gccccttgacaaccgatttgcagagcacta

SEQ ID NO: 230836 - DNA, 30 bp, Artificial Sequence
  Synthetic oligonucleotide
tcgataaagttacatgcttcaggagcacta

SEQ ID NO: 230837 - DNA, 30 bp, Artificial Sequence
  Synthetic oligonucleotide
agcgaaccttaacagttgcaactagcacta

SEQ ID NO: 230838 - DNA, 30 bp, Artificial Sequence
  Synthetic oligonucleotide
cggtacttaagtttcctggagaacgcacta

SEQ ID NO: 230839 - DNA, 30 bp, Artificial Sequence
  Synthetic oligonucleotide
tgttgcggaccttatttagtcggatcacta

SEQ ID NO: 230840 - DNA, 30 bp, Artificial Sequence
  Synthetic oligonucleotide
gaatagccccaccttgtacaaaagtcacta

SEQ ID NO: 230841 - DNA, 30 bp, Artificial Sequence
  Synthetic oligonucleotide
aggaatttagtgacacgcgaggcgtcacta

SEQ ID NO: 230842 - DNA, 30 bp, Artificial Sequence
  Synthetic oligonucleotide
actcgtcaggtggttatggtcaggtcacta

SEQ ID NO: 230843 - DNA, 30 bp, Artificial Sequence
  Synthetic oligonucleotide
gcaatacccaattaatagctggcttcacta

SEQ ID NO: 230844 - DNA, 30 bp, Artificial Sequence
  Synthetic oligonucleotide
cgttaactgaacgcagaaggacgttcacta

SEQ ID NO: 230845 - DNA, 30 bp, Artificial Sequence
  Synthetic oligonucleotide
ttaacctcgggccacacacagcccagacta

SEQ ID NO: 230846 - DNA, 30 bp, Artificial Sequence
  Synthetic oligonucleotide
ggtaagggtccctggagccccattagacta

SEQ ID NO: 230847 - DNA, 30 bp, Artificial Sequence
  Synthetic oligonucleotide
ggaccctgaaaatagagatcaggacgacta

SEQ ID NO: 230848 - DNA, 30 bp, Artificial Sequence
  Synthetic oligonucleotide
ctaccagaaggatatgagcaatcaggacta

SEQ ID NO: 230849 - DNA, 30 bp, Artificial Sequence
  Synthetic oligonucleotide
cgccaagcatggcatcttcagtgaggacta

SEQ ID NO: 230850 - DNA, 30 bp, Artificial Sequence
  Synthetic oligonucleotide
caatgagtcatctacgactagaagggacta

SEQ ID NO: 230851 - DNA, 30 bp, Artificial Sequence
  Synthetic oligonucleotide
tgacgagaggcaggaagagtcaatggacta

SEQ ID NO: 230852 - DNA, 31 bp, Artificial Sequence
  Synthetic oligonucleotide
attctgtaatagatccttgagccctggacta

SEQ ID NO: 230853 - DNA, 30 bp, Artificial Sequence
  Synthetic oligonucleotide
caaggttcgggggaacacgtcagtggacta

SEQ ID NO: 230854 - DNA, 30 bp, Artificial Sequence
  Synthetic oligonucleotide
acccttatgacgtaaatcgacggtggacta

SEQ ID NO: 230855 - DNA, 30 bp, Artificial Sequence
  Synthetic oligonucleotide
ttcaggccgggacgggtcaagcactgacta

SEQ ID NO: 230856 - DNA, 30 bp, Artificial Sequence
  Synthetic oligonucleotide
ggggatctataggaatcctaatcctgacta

SEQ ID NO: 230857 - DNA, 30 bp, Artificial Sequence
  Synthetic oligonucleotide
catgatcagctcttccatacggggtgacta

SEQ ID NO: 230858 - DNA, 30 bp, Artificial Sequence
  Synthetic oligonucleotide
gcggagtgaacacacacaggtagaatacta

SEQ ID NO: 230859 - DNA, 30 bp, Artificial Sequence
  Synthetic oligonucleotide
tatgggctcggcgcggattatacgatacta

SEQ ID NO: 230860 - DNA, 30 bp, Artificial Sequence
  Synthetic oligonucleotide
atgaattggcacgaagaatactttatacta

SEQ ID NO: 230861 - DNA, 30 bp, Artificial Sequence
  Synthetic oligonucleotide
tacgatatagaaaaaatatgagaactacta

SEQ ID NO: 230862 - DNA, 30 bp, Artificial Sequence
  Synthetic oligonucleotide
gaccggccgactaggtcagaggtactacta

SEQ ID NO: 230863 - DNA, 30 bp, Artificial Sequence
  Synthetic oligonucleotide
atccccgacctgttaatatgcttactacta

SEQ ID NO: 230864 - DNA, 30 bp, Artificial Sequence
  Synthetic oligonucleotide
atcagtagcagtgacgcctttcagctacta

SEQ ID NO: 230865 - DNA, 30 bp, Artificial Sequence
  Synthetic oligonucleotide
cgaacaagcctcctggtctattggctacta

SEQ ID NO: 230866 - DNA, 30 bp, Artificial Sequence
  Synthetic oligonucleotide
tcctcgccagtactactttgcacagtacta

SEQ ID NO: 230867 - DNA, 31 bp, Artificial Sequence
  Synthetic oligonucleotide
tgggtaccacgtccgaggtgaagcagtacta

SEQ ID NO: 230868 - DNA, 30 bp, Artificial Sequence
  Synthetic oligonucleotide
agccctctcagtgcaagcgagggagtacta

SEQ ID NO: 230869 - DNA, 30 bp, Artificial Sequence
  Synthetic oligonucleotide
ggcattccatgagtgtgaaggaacgtacta

SEQ ID NO: 230870 - DNA, 30 bp, Artificial Sequence
  Synthetic oligonucleotide
tgagctcggcaattatttagacccgtacta

SEQ ID NO: 230871 - DNA, 30 bp, Artificial Sequence
  Synthetic oligonucleotide
tgatgggagaccgcgtaggccaaggtacta

SEQ ID NO: 230872 - DNA, 30 bp, Artificial Sequence
  Synthetic oligonucleotide
gaggcggccgcattggacaagcgggtacta

SEQ ID NO: 230873 - DNA, 30 bp, Artificial Sequence
  Synthetic oligonucleotide
tcgcttcagtcgactgtaagggttgtacta

SEQ ID NO: 230874 - DNA, 30 bp, Artificial Sequence
  Synthetic oligonucleotide
ctgcggtgcagccgaaggcttggcttacta

SEQ ID NO: 230875 - DNA, 30 bp, Artificial Sequence
  Synthetic oligonucleotide
acgtgcacctagtagcttggtaagttacta

SEQ ID NO: 230876 - DNA, 30 bp, Artificial Sequence
  Synthetic oligonucleotide
cggtccatctcgccccatcccgttttacta

SEQ ID NO: 230877 - DNA, 30 bp, Artificial Sequence
  Synthetic oligonucleotide
gctatcaattatagttagatctgaaaccta

SEQ ID NO: 230878 - DNA, 30 bp, Artificial Sequence
  Synthetic oligonucleotide
atgtacgtattgtacggcagtgtcaaccta

SEQ ID NO: 230879 - DNA, 30 bp, Artificial Sequence
  Synthetic oligonucleotide
caaacacaacatggacggcctaagaaccta

SEQ ID NO: 230880 - DNA, 30 bp, Artificial Sequence
  Synthetic oligonucleotide
aaagataagcgtaggctatcttcgaaccta

SEQ ID NO: 230881 - DNA, 30 bp, Artificial Sequence
  Synthetic oligonucleotide
agggtcaggatgtcaacggacactaaccta

SEQ ID NO: 230882 - DNA, 30 bp, Artificial Sequence
  Synthetic oligonucleotide
aacataattcggaaggctccgaaccaccta

SEQ ID NO: 230883 - DNA, 30 bp, Artificial Sequence
  Synthetic oligonucleotide
tccattctgctcgatatcctagtccaccta

SEQ ID NO: 230884 - DNA, 30 bp, Artificial Sequence
  Synthetic oligonucleotide
tatggccccatcgggggtcagccgcaccta

SEQ ID NO: 230885 - DNA, 30 bp, Artificial Sequence
  Synthetic oligonucleotide
cgtcatcacttcttccccttgaaggaccta

SEQ ID NO: 230886 - DNA, 30 bp, Artificial Sequence
  Synthetic oligonucleotide
caccgtgcgacgcgtataactcgggaccta

SEQ ID NO: 230887 - DNA, 30 bp, Artificial Sequence
  Synthetic oligonucleotide
ttatatggtcggataatatcaccctaccta

SEQ ID NO: 230888 - DNA, 30 bp, Artificial Sequence
  Synthetic oligonucleotide
tctccggcggcattgctcgcttcctaccta

SEQ ID NO: 230889 - DNA, 30 bp, Artificial Sequence
  Synthetic oligonucleotide
tgtacggtatgatcgctacgacgctaccta

SEQ ID NO: 230890 - DNA, 30 bp, Artificial Sequence
  Synthetic oligonucleotide
cgcccccggggaataaaaagaaacacccta

SEQ ID NO: 230891 - DNA, 30 bp, Artificial Sequence
  Synthetic oligonucleotide
cgggatcatctctcacggcatcccacccta

SEQ ID NO: 230892 - DNA, 30 bp, Artificial Sequence
  Synthetic oligonucleotide
cctccgcactcactccactaggggacccta

SEQ ID NO: 230893 - DNA, 30 bp, Artificial Sequence
  Synthetic oligonucleotide
aaaaaagtaagggcattgtgtctgacccta

SEQ ID NO: 230894 - DNA, 30 bp, Artificial Sequence
  Synthetic oligonucleotide
gatcaagcaaagaacatcacttcaccccta

SEQ ID NO: 230895 - DNA, 30 bp, Artificial Sequence
  Synthetic oligonucleotide
acgggcccaaccgcagttgcaggtccccta

SEQ ID NO: 230896 - DNA, 30 bp, Artificial Sequence
  Synthetic oligonucleotide
cagggtaaacccagtccattggtagcccta

SEQ ID NO: 230897 - DNA, 30 bp, Artificial Sequence
  Synthetic oligonucleotide
ctcggatagactttcagttccgcatcccta

SEQ ID NO: 230898 - DNA, 30 bp, Artificial Sequence
  Synthetic oligonucleotide
ggaggattcctttcgcttcgcttatcccta

SEQ ID NO: 230899 - DNA, 30 bp, Artificial Sequence
  Synthetic oligonucleotide
tactggggacagacatatttaagctcccta

SEQ ID NO: 230900 - DNA, 30 bp, Artificial Sequence
  Synthetic oligonucleotide
cgaaactctcctattagctgtgcgtcccta

SEQ ID NO: 230901 - DNA, 30 bp, Artificial Sequence
  Synthetic oligonucleotide
cagagggtaggtaatacaatacggtcccta

SEQ ID NO: 230902 - DNA, 30 bp, Artificial Sequence
  Synthetic oligonucleotide
cacggtcctggacgacgatagatttcccta

SEQ ID NO: 230903 - DNA, 30 bp, Artificial Sequence
  Synthetic oligonucleotide
gctacgggggatactgggtcttcaagccta

SEQ ID NO: 230904 - DNA, 30 bp, Artificial Sequence
  Synthetic oligonucleotide
tgggacggtgagagcataacgggaagccta

SEQ ID NO: 230905 - DNA, 30 bp, Artificial Sequence
  Synthetic oligonucleotide
taagaggtcgggggtattactggaagccta

SEQ ID NO: 230906 - DNA, 30 bp, Artificial Sequence
  Synthetic oligonucleotide
atatgtaaaataaagttggacctaagccta

SEQ ID NO: 230907 - DNA, 30 bp, Artificial Sequence
  Synthetic oligonucleotide
ggagggactatcagctgatctgggagccta

SEQ ID NO: 230908 - DNA, 30 bp, Artificial Sequence
  Synthetic oligonucleotide
ttatagagaaattaccaacgcgcacgccta

SEQ ID NO: 230909 - DNA, 29 bp, Artificial Sequence
  Synthetic oligonucleotide
tcaggtgtctatccaggactaagcgccta

SEQ ID NO: 230910 - DNA, 30 bp, Artificial Sequence
  Synthetic oligonucleotide
attgggtggttatcaacatgtctgcgccta

SEQ ID NO: 230911 - DNA, 30 bp, Artificial Sequence
  Synthetic oligonucleotide
tcacgactttctttcgatctccacggccta

SEQ ID NO: 230912 - DNA, 30 bp, Artificial Sequence
  Synthetic oligonucleotide
tacaattttgaacaggcgtcaagcggccta

SEQ ID NO: 230913 - DNA, 30 bp, Artificial Sequence
  Synthetic oligonucleotide
cagcgccccgtgtaaagacctttcggccta

SEQ ID NO: 230914 - DNA, 30 bp, Artificial Sequence
  Synthetic oligonucleotide
tcagacttattgcgagtattaccgggccta

SEQ ID NO: 230915 - DNA, 30 bp, Artificial Sequence
  Synthetic oligonucleotide
gacaggagaaatcacctcgaaatgggccta

SEQ ID NO: 230916 - DNA, 30 bp, Artificial Sequence
  Synthetic oligonucleotide
ggactaccgtcttacattaacatgggccta

SEQ ID NO: 230917 - DNA, 30 bp, Artificial Sequence
  Synthetic oligonucleotide
ataagatcgctaggaacatataattgccta

SEQ ID NO: 230918 - DNA, 30 bp, Artificial Sequence
  Synthetic oligonucleotide
atgggccctaagcggacttcgcgttgccta

SEQ ID NO: 230919 - DNA, 30 bp, Artificial Sequence
  Synthetic oligonucleotide
accgggtatccgcacacttttgaaatccta

SEQ ID NO: 230920 - DNA, 30 bp, Artificial Sequence
  Synthetic oligonucleotide
gcgaaaaccgaatggcgtttaataatccta

SEQ ID NO: 230921 - DNA, 30 bp, Artificial Sequence
  Synthetic oligonucleotide
tgcccattttctaaattcagagctatccta

SEQ ID NO: 230922 - DNA, 30 bp, Artificial Sequence
  Synthetic oligonucleotide
aagttgacggagaaatcgagttcactccta

SEQ ID NO: 230923 - DNA, 30 bp, Artificial Sequence
  Synthetic oligonucleotide
gcaactgacggtatctgaaaaggactccta

SEQ ID NO: 230924 - DNA, 30 bp, Artificial Sequence
  Synthetic oligonucleotide
gaaggtaaagcgaccccgtctcgcctccta

SEQ ID NO: 230925 - DNA, 30 bp, Artificial Sequence
  Synthetic oligonucleotide
agcggagttgatcgggacatcatcctccta

SEQ ID NO: 230926 - DNA, 30 bp, Artificial Sequence
  Synthetic oligonucleotide
tcccgagtcgattaggaagccaggctccta

SEQ ID NO: 230927 - DNA, 30 bp, Artificial Sequence
  Synthetic oligonucleotide
ggaccgggaaggctttatgtacggctccta

SEQ ID NO: 230928 - DNA, 30 bp, Artificial Sequence
  Synthetic oligonucleotide
aagccaaataaaaatgctttggggctccta

SEQ ID NO: 230929 - DNA, 30 bp, Artificial Sequence
  Synthetic oligonucleotide
gtcagtatgaacttgaaatgattgctccta

SEQ ID NO: 230930 - DNA, 30 bp, Artificial Sequence
  Synthetic oligonucleotide
gtcccgaaatggacctttaatttgctccta

SEQ ID NO: 230931 - DNA, 30 bp, Artificial Sequence
  Synthetic oligonucleotide
acaatagtcgacggactaaggtaagtccta

SEQ ID NO: 230932 - DNA, 30 bp, Artificial Sequence
  Synthetic oligonucleotide
ttacaatagcgcgaaaccaactacgtccta

SEQ ID NO: 230933 - DNA, 30 bp, Artificial Sequence
  Synthetic oligonucleotide
gttcacgacgataatccctagcgtgtccta

SEQ ID NO: 230934 - DNA, 30 bp, Artificial Sequence
  Synthetic oligonucleotide
ctgtcgactaccattccagaggccttccta

SEQ ID NO: 230935 - DNA, 30 bp, Artificial Sequence
  Synthetic oligonucleotide
tccctaaaaacgggtaggtagtatttccta

SEQ ID NO: 230936 - DNA, 30 bp, Artificial Sequence
  Synthetic oligonucleotide
gtaaggtattctggatgggttggtttccta

SEQ ID NO: 230937 - DNA, 30 bp, Artificial Sequence
  Synthetic oligonucleotide
cccgttctgccattgggtcgattaaagcta

SEQ ID NO: 230938 - DNA, 30 bp, Artificial Sequence
  Synthetic oligonucleotide
aggcacgcgaagggccctctaccgaagcta

SEQ ID NO: 230939 - DNA, 30 bp, Artificial Sequence
  Synthetic oligonucleotide
gcactagttcacggcactcccccgaagcta

SEQ ID NO: 230940 - DNA, 31 bp, Artificial Sequence
  Synthetic oligonucleotide
ataacggaaagctcgatgtacactgaagcta

SEQ ID NO: 230941 - DNA, 30 bp, Artificial Sequence
  Synthetic oligonucleotide
tagtaacctctccctgaatgtgaacagcta

SEQ ID NO: 230942 - DNA, 30 bp, Artificial Sequence
  Synthetic oligonucleotide
ttaaggctagccattagaaagttgcagcta

SEQ ID NO: 230943 - DNA, 30 bp, Artificial Sequence
  Synthetic oligonucleotide
attgctgtgaacggctgcactcaagagcta

SEQ ID NO: 230944 - DNA, 30 bp, Artificial Sequence
  Synthetic oligonucleotide
agactatgactaaatgtacgtacagagcta

SEQ ID NO: 230945 - DNA, 30 bp, Artificial Sequence
  Synthetic oligonucleotide
aaagaccatctttattgcatgtgagagcta

SEQ ID NO: 230946 - DNA, 30 bp, Artificial Sequence
  Synthetic oligonucleotide
atcggtgacgcccatacgactaacgagcta

SEQ ID NO: 230947 - DNA, 30 bp, Artificial Sequence
  Synthetic oligonucleotide
agcttttgcgtatcaaatacacacgagcta

SEQ ID NO: 230948 - DNA, 30 bp, Artificial Sequence
  Synthetic oligonucleotide
ctttagaaccataaaacgtaggccgagcta

SEQ ID NO: 230949 - DNA, 30 bp, Artificial Sequence
  Synthetic oligonucleotide
gtcgtaattgcgaagtggcttttggagcta

SEQ ID NO: 230950 - DNA, 30 bp, Artificial Sequence
  Synthetic oligonucleotide
tcgtcttatcacgatctgctaggtgagcta

SEQ ID NO: 230951 - DNA, 30 bp, Artificial Sequence
  Synthetic oligonucleotide
tggtatctgaccaggcctcgggaatagcta

SEQ ID NO: 230952 - DNA, 30 bp, Artificial Sequence
  Synthetic oligonucleotide
aaatcggaagttgctcaacggtaatagcta

SEQ ID NO: 230953 - DNA, 30 bp, Artificial Sequence
  Synthetic oligonucleotide
tagcgtgtaccggagaccgcgtcatagcta

SEQ ID NO: 230954 - DNA, 30 bp, Artificial Sequence
  Synthetic oligonucleotide
aacgactgtgacctaatttggtcatagcta

SEQ ID NO: 230955 - DNA, 30 bp, Artificial Sequence
  Synthetic oligonucleotide
accatagacactaaaaacgcatgatagcta

SEQ ID NO: 230956 - DNA, 30 bp, Artificial Sequence
  Synthetic oligonucleotide
gtaaagggacgctgtagagtgagctagcta

SEQ ID NO: 230957 - DNA, 30 bp, Artificial Sequence
  Synthetic oligonucleotide
cgaatgcggaaaacctgcgtctggtagcta

SEQ ID NO: 230958 - DNA, 30 bp, Artificial Sequence
  Synthetic oligonucleotide
gataacctaggatctttgtaggtttagcta

SEQ ID NO: 230959 - DNA, 30 bp, Artificial Sequence
  Synthetic oligonucleotide
cacacgacacgtgacattgacttttagcta

SEQ ID NO: 230960 - DNA, 30 bp, Artificial Sequence
  Synthetic oligonucleotide
gttcgacagttctgcatgaaaggcacgcta

SEQ ID NO: 230961 - DNA, 30 bp, Artificial Sequence
  Synthetic oligonucleotide
ttttgtagtgaaaacgctaggcggacgcta

SEQ ID NO: 230962 - DNA, 30 bp, Artificial Sequence
  Synthetic oligonucleotide
gcaattaaaataatccgtgcggatacgcta

SEQ ID NO: 230963 - DNA, 30 bp, Artificial Sequence
  Synthetic oligonucleotide
tggaatcttcgcggcccacgttgaccgcta

SEQ ID NO: 230964 - DNA, 30 bp, Artificial Sequence
  Synthetic oligonucleotide
ggaataaatgactggctgcctggcccgcta

SEQ ID NO: 230965 - DNA, 30 bp, Artificial Sequence
  Synthetic oligonucleotide
cagcctccgtctactgtggaacctccgcta

SEQ ID NO: 230966 - DNA, 30 bp, Artificial Sequence
  Synthetic oligonucleotide
acgtgtaggactccaaagtagggtccgcta

SEQ ID NO: 230967 - DNA, 30 bp, Artificial Sequence
  Synthetic oligonucleotide
tgagttctcgtcgttaatgtaagagcgcta

SEQ ID NO: 230968 - DNA, 30 bp, Artificial Sequence
  Synthetic oligonucleotide
tggcaatattggtaggcggtcgtagcgcta

SEQ ID NO: 230969 - DNA, 30 bp, Artificial Sequence
  Synthetic oligonucleotide
cagcagaccatacaaaccgcgcaggcgcta

SEQ ID NO: 230970 - DNA, 30 bp, Artificial Sequence
  Synthetic oligonucleotide
ttcgactcagaggcccaatgtatggcgcta

SEQ ID NO: 230971 - DNA, 30 bp, Artificial Sequence
  Synthetic oligonucleotide
tatccccagtagcgtcctaaacgtgcgcta

SEQ ID NO: 230972 - DNA, 30 bp, Artificial Sequence
  Synthetic oligonucleotide
agcttccccttgccatgggccctatcgcta

SEQ ID NO: 230973 - DNA, 29 bp, Artificial Sequence
  Synthetic oligonucleotide
accggagagccatgcactcaatctcgcta

SEQ ID NO: 230974 - DNA, 30 bp, Artificial Sequence
  Synthetic oligonucleotide
tcccactcgttgctctagggagagtcgcta

SEQ ID NO: 230975 - DNA, 30 bp, Artificial Sequence
  Synthetic oligonucleotide
tgtccgttgacgactaaggacataaggcta

SEQ ID NO: 230976 - DNA, 30 bp, Artificial Sequence
  Synthetic oligonucleotide
cacgtaattgcccttaagtgacacaggcta

SEQ ID NO: 230977 - DNA, 30 bp, Artificial Sequence
  Synthetic oligonucleotide
ggacgactgggggtcacggcgagcaggcta

SEQ ID NO: 230978 - DNA, 30 bp, Artificial Sequence
  Synthetic oligonucleotide
tcaaaagaccacatgtcccaatggaggcta

SEQ ID NO: 230979 - DNA, 30 bp, Artificial Sequence
  Synthetic oligonucleotide
agtgacggccataacggtccaatgaggcta

SEQ ID NO: 230980 - DNA, 30 bp, Artificial Sequence
  Synthetic oligonucleotide
actaagcaaaaaagatctgaggtgaggcta

SEQ ID NO: 230981 - DNA, 30 bp, Artificial Sequence
  Synthetic oligonucleotide
tattagcaccgtaggatggtgaataggcta

SEQ ID NO: 230982 - DNA, 30 bp, Artificial Sequence
  Synthetic oligonucleotide
ttctccgcacgtcatgtgtaaactaggcta

SEQ ID NO: 230983 - DNA, 30 bp, Artificial Sequence
  Synthetic oligonucleotide
gaatatgtcgcgtaagcgggcacacggcta

SEQ ID NO: 230984 - DNA, 30 bp, Artificial Sequence
  Synthetic oligonucleotide
atgtgtaacatcactcgtggtcagcggcta

SEQ ID NO: 230985 - DNA, 30 bp, Artificial Sequence
  Synthetic oligonucleotide
tttctgatgagtgaactattttggcggcta

SEQ ID NO: 230986 - DNA, 30 bp, Artificial Sequence
  Synthetic oligonucleotide
caccggttccgtctacagaataaagggcta

SEQ ID NO: 230987 - DNA, 30 bp, Artificial Sequence
  Synthetic oligonucleotide
ccagttaaagaagaggtagactcagggcta

SEQ ID NO: 230988 - DNA, 30 bp, Artificial Sequence
  Synthetic oligonucleotide
ttcttcacggacgggggtgagtcagggcta

SEQ ID NO: 230989 - DNA, 30 bp, Artificial Sequence
  Synthetic oligonucleotide
tgctaagttgtattttaggcacgagggcta

SEQ ID NO: 230990 - DNA, 30 bp, Artificial Sequence
  Synthetic oligonucleotide
taagggttggtctgcgggaagcacgggcta

SEQ ID NO: 230991 - DNA, 30 bp, Artificial Sequence
  Synthetic oligonucleotide
cggtcgataccgaggggccagtatgggcta

SEQ ID NO: 230992 - DNA, 30 bp, Artificial Sequence
  Synthetic oligonucleotide
ggcacgttgcgcctttaatgttatgggcta

SEQ ID NO: 230993 - DNA, 30 bp, Artificial Sequence
  Synthetic oligonucleotide
aagacggggtctcgttaagaacaatggcta

SEQ ID NO: 230994 - DNA, 30 bp, Artificial Sequence
  Synthetic oligonucleotide
atgcaggatgtgatcagagcattatggcta

SEQ ID NO: 230995 - DNA, 30 bp, Artificial Sequence
  Synthetic oligonucleotide
gcatgaagctagtcaggctacacgtggcta

SEQ ID NO: 230996 - DNA, 30 bp, Artificial Sequence
  Synthetic oligonucleotide
agtaccgtgtgctaccagggcaggtggcta

SEQ ID NO: 230997 - DNA, 30 bp, Artificial Sequence
  Synthetic oligonucleotide
catgtagtgcaatggcgaattcggtggcta

SEQ ID NO: 230998 - DNA, 30 bp, Artificial Sequence
  Synthetic oligonucleotide
aagtaaaggcgtttgacaggatcaatgcta

SEQ ID NO: 230999 - DNA, 30 bp, Artificial Sequence
  Synthetic oligonucleotide
atcagtagaatcgcagtcaacctcatgcta

SEQ ID NO: 231000 - DNA, 30 bp, Artificial Sequence
  Synthetic oligonucleotide
acgactaggtaccgtggaaggttgatgcta

SEQ ID NO: 231001 - DNA, 30 bp, Artificial Sequence
  Synthetic oligonucleotide
ggataggacccgcttagccttcaactgcta

SEQ ID NO: 231002 - DNA, 30 bp, Artificial Sequence
  Synthetic oligonucleotide
gccaagcagtagtatgatcgtggactgcta

SEQ ID NO: 231003 - DNA, 30 bp, Artificial Sequence
  Synthetic oligonucleotide
tcgcgtattggctgcacgctagacctgcta

SEQ ID NO: 231004 - DNA, 30 bp, Artificial Sequence
  Synthetic oligonucleotide
ccgttcatttcccgcaatgaatggctgcta

SEQ ID NO: 231005 - DNA, 30 bp, Artificial Sequence
  Synthetic oligonucleotide
taacgataggatcggttctcacgagtgcta

SEQ ID NO: 231006 - DNA, 30 bp, Artificial Sequence
  Synthetic oligonucleotide
cgtcgtgtagttaggatcagagaggtgcta

SEQ ID NO: 231007 - DNA, 30 bp, Artificial Sequence
  Synthetic oligonucleotide
gcgacataggcctgattaatggaggtgcta

SEQ ID NO: 231008 - DNA, 30 bp, Artificial Sequence
  Synthetic oligonucleotide
caatggcaataccaggttgacactgtgcta

SEQ ID NO: 231009 - DNA, 30 bp, Artificial Sequence
  Synthetic oligonucleotide
tctcaaattttccctacctacaacttgcta

SEQ ID NO: 231010 - DNA, 30 bp, Artificial Sequence
  Synthetic oligonucleotide
gtactgcgactcgagtgatgccccttgcta

SEQ ID NO: 231011 - DNA, 30 bp, Artificial Sequence
  Synthetic oligonucleotide
atgactattgtcgagagatcgatgttgcta

SEQ ID NO: 231012 - DNA, 30 bp, Artificial Sequence
  Synthetic oligonucleotide
aagaatccgaaagaataacgcgatttgcta

SEQ ID NO: 231013 - DNA, 30 bp, Artificial Sequence
  Synthetic oligonucleotide
cttacacgggttggtctgagatttttgcta

SEQ ID NO: 231014 - DNA, 30 bp, Artificial Sequence
  Synthetic oligonucleotide
tatacgagatagatggatacgcaaaatcta

SEQ ID NO: 231015 - DNA, 30 bp, Artificial Sequence
  Synthetic oligonucleotide
gtagggccgttgggcttttaggaaaatcta

SEQ ID NO: 231016 - DNA, 30 bp, Artificial Sequence
  Synthetic oligonucleotide
tacgtaggaagcgtcatacactcaaatcta

SEQ ID NO: 231017 - DNA, 30 bp, Artificial Sequence
  Synthetic oligonucleotide
atggtaacaacgtactttttattaaatcta

SEQ ID NO: 231018 - DNA, 30 bp, Artificial Sequence
  Synthetic oligonucleotide
aatgacttatctgagggtctgctgaatcta

SEQ ID NO: 231019 - DNA, 30 bp, Artificial Sequence
  Synthetic oligonucleotide
cgtaacgccttcgcgtgccattcgcatcta

SEQ ID NO: 231020 - DNA, 30 bp, Artificial Sequence
  Synthetic oligonucleotide
cgtagggtatgtgggttgtaacatcatcta

SEQ ID NO: 231021 - DNA, 30 bp, Artificial Sequence
  Synthetic oligonucleotide
catacaagccgaaggaatggagttcatcta

SEQ ID NO: 231022 - DNA, 30 bp, Artificial Sequence
  Synthetic oligonucleotide
cctagaatttagcctgcctagacagatcta

SEQ ID NO: 231023 - DNA, 30 bp, Artificial Sequence
  Synthetic oligonucleotide
acagggctaataggctgatcgccagatcta

SEQ ID NO: 231024 - DNA, 30 bp, Artificial Sequence
  Synthetic oligonucleotide
ttctgcccagaccatattacacacgatcta

SEQ ID NO: 231025 - DNA, 30 bp, Artificial Sequence
  Synthetic oligonucleotide
cagaaccgttccgatctacgtggggatcta

SEQ ID NO: 231026 - DNA, 30 bp, Artificial Sequence
  Synthetic oligonucleotide
cagcgtcgtaatagggaatgaatggatcta

SEQ ID NO: 231027 - DNA, 30 bp, Artificial Sequence
  Synthetic oligonucleotide
ctcaagttctcaaatcgatctatggatcta

SEQ ID NO: 231028 - DNA, 30 bp, Artificial Sequence
  Synthetic oligonucleotide
taggaggattaattctttctaggatatcta

SEQ ID NO: 231029 - DNA, 30 bp, Artificial Sequence
  Synthetic oligonucleotide
cattatgcgggtacgcggtctaagtatcta

SEQ ID NO: 231030 - DNA, 30 bp, Artificial Sequence
  Synthetic oligonucleotide
aatgcatactgtcgtacacgctcgtatcta

SEQ ID NO: 231031 - DNA, 30 bp, Artificial Sequence
  Synthetic oligonucleotide
gggtcagaactgaatgcagggaattatcta

SEQ ID NO: 231032 - DNA, 30 bp, Artificial Sequence
  Synthetic oligonucleotide
taaagccgtgtttacggggagtattatcta

SEQ ID NO: 231033 - DNA, 30 bp, Artificial Sequence
  Synthetic oligonucleotide
cacgcaagtaaagttcagaatggttatcta

SEQ ID NO: 231034 - DNA, 30 bp, Artificial Sequence
  Synthetic oligonucleotide
ttatctcaataacccatgattctttatcta

SEQ ID NO: 231035 - DNA, 30 bp, Artificial Sequence
  Synthetic oligonucleotide
tgccaaggcgagctgaattttagcactcta

SEQ ID NO: 231036 - DNA, 30 bp, Artificial Sequence
  Synthetic oligonucleotide
ggtgccttaattatttcccagacgactcta

SEQ ID NO: 231037 - DNA, 30 bp, Artificial Sequence
  Synthetic oligonucleotide
aaaacaaagatctaaccgcctgatactcta

SEQ ID NO: 231038 - DNA, 30 bp, Artificial Sequence
  Synthetic oligonucleotide
agggtggtggtcgctacactgactactcta

SEQ ID NO: 231039 - DNA, 30 bp, Artificial Sequence
  Synthetic oligonucleotide
aggatggcggtagtcaagaagctacctcta

SEQ ID NO: 231040 - DNA, 30 bp, Artificial Sequence
  Synthetic oligonucleotide
atgcaccgcaaccacgttttcgtgcctcta

SEQ ID NO: 231041 - DNA, 30 bp, Artificial Sequence
  Synthetic oligonucleotide
cgcttcatattgttacacaagccagctcta

SEQ ID NO: 231042 - DNA, 30 bp, Artificial Sequence
  Synthetic oligonucleotide
atcctacttgttggaccatcgtccgctcta

SEQ ID NO: 231043 - DNA, 30 bp, Artificial Sequence
  Synthetic oligonucleotide
tgggggctaaatccaagactcagctctcta

SEQ ID NO: 231044 - DNA, 30 bp, Artificial Sequence
  Synthetic oligonucleotide
taagaatgctacagtgtcctctgctctcta

SEQ ID NO: 231045 - DNA, 30 bp, Artificial Sequence
  Synthetic oligonucleotide
tgagcttggcgatcggtaagtatgtctcta

SEQ ID NO: 231046 - DNA, 30 bp, Artificial Sequence
  Synthetic oligonucleotide
atagtaaggtccactgagtttacaagtcta

SEQ ID NO: 231047 - DNA, 30 bp, Artificial Sequence
  Synthetic oligonucleotide
tgacggcatgggggacaaactttcagtcta

SEQ ID NO: 231048 - DNA, 30 bp, Artificial Sequence
  Synthetic oligonucleotide
tttgggctgccgacctataacgctagtcta

SEQ ID NO: 231049 - DNA, 30 bp, Artificial Sequence
  Synthetic oligonucleotide
cttaccgagttgattatgatatctagtcta

SEQ ID NO: 231050 - DNA, 30 bp, Artificial Sequence
  Synthetic oligonucleotide
ggattcagtgtatggctatcgagacgtcta

SEQ ID NO: 231051 - DNA, 30 bp, Artificial Sequence
  Synthetic oligonucleotide
acctggttagctggcgactggaagcgtcta

SEQ ID NO: 231052 - DNA, 30 bp, Artificial Sequence
  Synthetic oligonucleotide
tagcagtttaacgtggggcacgacggtcta

SEQ ID NO: 231053 - DNA, 30 bp, Artificial Sequence
  Synthetic oligonucleotide
atgaatttgcagtgagggaggggtggtcta

SEQ ID NO: 231054 - DNA, 30 bp, Artificial Sequence
  Synthetic oligonucleotide
gtattgtctcacttgcgcttcttctgtcta

SEQ ID NO: 231055 - DNA, 30 bp, Artificial Sequence
  Synthetic oligonucleotide
agccactataacttagtgatggtgtgtcta

SEQ ID NO: 231056 - DNA, 30 bp, Artificial Sequence
  Synthetic oligonucleotide
atgcgcggcatgtgatgttgtagttgtcta

SEQ ID NO: 231057 - DNA, 30 bp, Artificial Sequence
  Synthetic oligonucleotide
tgcgaattgcgcggagaattttgttgtcta

SEQ ID NO: 231058 - DNA, 30 bp, Artificial Sequence
  Synthetic oligonucleotide
cttgaaggtgagccacaaacgggaattcta

SEQ ID NO: 231059 - DNA, 30 bp, Artificial Sequence
  Synthetic oligonucleotide
taacgtttccaaagctggtagttcattcta

SEQ ID NO: 231060 - DNA, 30 bp, Artificial Sequence
  Synthetic oligonucleotide
cgggttacgaaaactagcaagacgattcta

SEQ ID NO: 231061 - DNA, 30 bp, Artificial Sequence
  Synthetic oligonucleotide
tgggtctacagtgcgtgatctcggattcta

SEQ ID NO: 231062 - DNA, 30 bp, Artificial Sequence
  Synthetic oligonucleotide
cgaaggccagaaggcttaacagggattcta

SEQ ID NO: 231063 - DNA, 30 bp, Artificial Sequence
  Synthetic oligonucleotide
ggataattggctgaatatacattgattcta

SEQ ID NO: 231064 - DNA, 30 bp, Artificial Sequence
  Synthetic oligonucleotide
caagacgccggtagtaatgatggtattcta

SEQ ID NO: 231065 - DNA, 30 bp, Artificial Sequence
  Synthetic oligonucleotide
agtacacagtcgacttcacagtttattcta

SEQ ID NO: 231066 - DNA, 30 bp, Artificial Sequence
  Synthetic oligonucleotide
tcgttataggaggctcctcgtctccttcta

SEQ ID NO: 231067 - DNA, 30 bp, Artificial Sequence
  Synthetic oligonucleotide
catgtgccacacttatgacatcctcttcta

SEQ ID NO: 231068 - DNA, 30 bp, Artificial Sequence
  Synthetic oligonucleotide
cgccctcggatatagagggaggcagttcta

SEQ ID NO: 231069 - DNA, 30 bp, Artificial Sequence
  Synthetic oligonucleotide
atttgcaaggtcgataattgcagagttcta

SEQ ID NO: 231070 - DNA, 30 bp, Artificial Sequence
  Synthetic oligonucleotide
agtagggtacaatgtacatgtttggttcta

SEQ ID NO: 231071 - DNA, 30 bp, Artificial Sequence
  Synthetic oligonucleotide
tgatacgaggtttagtacatccatgttcta

SEQ ID NO: 231072 - DNA, 30 bp, Artificial Sequence
  Synthetic oligonucleotide
ccgcgaggcaatgaagcgctctcatttcta

SEQ ID NO: 231073 - DNA, 30 bp, Artificial Sequence
  Synthetic oligonucleotide
ggggttgtttctacagtgacacgatttcta

SEQ ID NO: 231074 - DNA, 30 bp, Artificial Sequence
  Synthetic oligonucleotide
gtttggtaacggctggactgtaagtttcta

SEQ ID NO: 231075 - DNA, 30 bp, Artificial Sequence
  Synthetic oligonucleotide
cgttatccattcagtaaggctggcaaagta

SEQ ID NO: 231076 - DNA, 30 bp, Artificial Sequence
  Synthetic oligonucleotide
taaggcataatataatgtcacaataaagta

SEQ ID NO: 231077 - DNA, 30 bp, Artificial Sequence
  Synthetic oligonucleotide
ggtcgccgcaaggagtcgccttctaaagta

SEQ ID NO: 231078 - DNA, 30 bp, Artificial Sequence
  Synthetic oligonucleotide
acaactctagacatcatatcaattaaagta

SEQ ID NO: 231079 - DNA, 30 bp, Artificial Sequence
  Synthetic oligonucleotide
ccggcaatttttacagcagtccttaaagta

SEQ ID NO: 231080 - DNA, 30 bp, Artificial Sequence
  Synthetic oligonucleotide
gaagcgtctggtcgcaacgtacgacaagta

SEQ ID NO: 231081 - DNA, 30 bp, Artificial Sequence
  Synthetic oligonucleotide
ggaagaagggacctgttgaatctacaagta

SEQ ID NO: 231082 - DNA, 30 bp, Artificial Sequence
  Synthetic oligonucleotide
accctttttctcgacctacaagtacaagta

SEQ ID NO: 231083 - DNA, 30 bp, Artificial Sequence
  Synthetic oligonucleotide
cggaccgtgtggccattggtgtcccaagta

SEQ ID NO: 231084 - DNA, 30 bp, Artificial Sequence
  Synthetic oligonucleotide
tccctagagataaataatgagtagcaagta

SEQ ID NO: 231085 - DNA, 30 bp, Artificial Sequence
  Synthetic oligonucleotide
ttgccttagcgggcaagatagcggcaagta

SEQ ID NO: 231086 - DNA, 30 bp, Artificial Sequence
  Synthetic oligonucleotide
aagggctcggtagacttgccggatcaagta

SEQ ID NO: 231087 - DNA, 30 bp, Artificial Sequence
  Synthetic oligonucleotide
gtgtgccttcgcctagtaattattcaagta

SEQ ID NO: 231088 - DNA, 30 bp, Artificial Sequence
  Synthetic oligonucleotide
cgtgtaatttgtcgcgtgctagttcaagta

SEQ ID NO: 231089 - DNA, 30 bp, Artificial Sequence
  Synthetic oligonucleotide
cgtgcccgacatagaccttcaaaagaagta

SEQ ID NO: 231090 - DNA, 30 bp, Artificial Sequence
  Synthetic oligonucleotide
gtggcgccctacgactggggtaaagaagta

SEQ ID NO: 231091 - DNA, 30 bp, Artificial Sequence
  Synthetic oligonucleotide
cccacaagatttaacatcggataagaagta

SEQ ID NO: 231092 - DNA, 30 bp, Artificial Sequence
  Synthetic oligonucleotide
taagtgtcattggggactcgaacggaagta

SEQ ID NO: 231093 - DNA, 30 bp, Artificial Sequence
  Synthetic oligonucleotide
attaaatagggatgagtgtttagggaagta

SEQ ID NO: 231094 - DNA, 30 bp, Artificial Sequence
  Synthetic oligonucleotide
tagcccgtctgagcgccatgtactgaagta

SEQ ID NO: 231095 - DNA, 30 bp, Artificial Sequence
  Synthetic oligonucleotide
ctggccctagaccgtcctttgggtgaagta

SEQ ID NO: 231096 - DNA, 30 bp, Artificial Sequence
  Synthetic oligonucleotide
ggaatcccagggtaataaaataaataagta

SEQ ID NO: 231097 - DNA, 30 bp, Artificial Sequence
  Synthetic oligonucleotide
tcgaatcaacgaatctacatgagataagta

SEQ ID NO: 231098 - DNA, 30 bp, Artificial Sequence
  Synthetic oligonucleotide
gaggcactcgatcgtccacttagataagta

SEQ ID NO: 231099 - DNA, 30 bp, Artificial Sequence
  Synthetic oligonucleotide
cagtagattgcgttgtatgatttataagta

SEQ ID NO: 231100 - DNA, 30 bp, Artificial Sequence
  Synthetic oligonucleotide
gatagagtagagtctcggaccgtctaagta

SEQ ID NO: 231101 - DNA, 30 bp, Artificial Sequence
  Synthetic oligonucleotide
atagcactttgctcccatgagtagtaagta

SEQ ID NO: 231102 - DNA, 30 bp, Artificial Sequence
  Synthetic oligonucleotide
ccgcccagggcgacggttactacgtaagta

SEQ ID NO: 231103 - DNA, 30 bp, Artificial Sequence
  Synthetic oligonucleotide
ttgcagtccgcaacagttggtacgtaagta

SEQ ID NO: 231104 - DNA, 30 bp, Artificial Sequence
  Synthetic oligonucleotide
agagcagggctacacgcccgatcgtaagta

SEQ ID NO: 231105 - DNA, 30 bp, Artificial Sequence
  Synthetic oligonucleotide
ggattaggatagacaggatctgggtaagta

SEQ ID NO: 231106 - DNA, 30 bp, Artificial Sequence
  Synthetic oligonucleotide
gacccgtggggtcggttttaacattaagta

SEQ ID NO: 231107 - DNA, 30 bp, Artificial Sequence
  Synthetic oligonucleotide
ctactgacaactcagaggtgataaacagta

SEQ ID NO: 231108 - DNA, 30 bp, Artificial Sequence
  Synthetic oligonucleotide
gcattagaacggtcgatcgaagacacagta

SEQ ID NO: 231109 - DNA, 30 bp, Artificial Sequence
  Synthetic oligonucleotide
gtcactcttactgaatgtgcaatcacagta

SEQ ID NO: 231110 - DNA, 30 bp, Artificial Sequence
  Synthetic oligonucleotide
tcttcgggtggaaattatctaaagacagta

SEQ ID NO: 231111 - DNA, 30 bp, Artificial Sequence
  Synthetic oligonucleotide
ggagatatagggccccgcacgaagacagta

SEQ ID NO: 231112 - DNA, 30 bp, Artificial Sequence
  Synthetic oligonucleotide
tgccgcatagcggaggcggtgtggacagta

SEQ ID NO: 231113 - DNA, 30 bp, Artificial Sequence
  Synthetic oligonucleotide
gtatgaacggaggccagtgcttatacagta

SEQ ID NO: 231114 - DNA, 30 bp, Artificial Sequence
  Synthetic oligonucleotide
tatttagggacgcgaaaacaaccgccagta

SEQ ID NO: 231115 - DNA, 30 bp, Artificial Sequence
  Synthetic oligonucleotide
ggacgtcaggttgcgctgctgaggccagta

SEQ ID NO: 231116 - DNA, 30 bp, Artificial Sequence
  Synthetic oligonucleotide
tgtgacgcgtgcggcgtgctcactccagta

SEQ ID NO: 231117 - DNA, 30 bp, Artificial Sequence
  Synthetic oligonucleotide
cgacagtaaatgcttttggaaggtccagta

SEQ ID NO: 231118 - DNA, 30 bp, Artificial Sequence
  Synthetic oligonucleotide
acctttggattaggcaaaggaggtccagta

SEQ ID NO: 231119 - DNA, 30 bp, Artificial Sequence
  Synthetic oligonucleotide
acagtactgtacggctacagtggtccagta

SEQ ID NO: 231120 - DNA, 30 bp, Artificial Sequence
  Synthetic oligonucleotide
cttcgtccgggcactttttatattccagta

SEQ ID NO: 231121 - DNA, 30 bp, Artificial Sequence
  Synthetic oligonucleotide
aaaaaggaagtccaactcccatttccagta

SEQ ID NO: 231122 - DNA, 30 bp, Artificial Sequence
  Synthetic oligonucleotide
catattatcgttatggtccaacaagcagta

SEQ ID NO: 231123 - DNA, 30 bp, Artificial Sequence
  Synthetic oligonucleotide
agttaatcatgtgagagataggatgcagta

SEQ ID NO: 231124 - DNA, 30 bp, Artificial Sequence
  Synthetic oligonucleotide
atcagcgtgaatataagcttgtatgcagta

SEQ ID NO: 231125 - DNA, 30 bp, Artificial Sequence
  Synthetic oligonucleotide
gggccttacgcccgagtatagctatcagta

SEQ ID NO: 231126 - DNA, 30 bp, Artificial Sequence
  Synthetic oligonucleotide
agactataacgcgatgcatggaactcagta

SEQ ID NO: 231127 - DNA, 30 bp, Artificial Sequence
  Synthetic oligonucleotide
tgaaatgctgcgatttccaaacactcagta

SEQ ID NO: 231128 - DNA, 30 bp, Artificial Sequence
  Synthetic oligonucleotide
aaccggagcaaccagcgaagatcgtcagta

SEQ ID NO: 231129 - DNA, 30 bp, Artificial Sequence
  Synthetic oligonucleotide
tcatcttgtttgttatgagtcgtgtcagta

SEQ ID NO: 231130 - DNA, 30 bp, Artificial Sequence
  Synthetic oligonucleotide
agagggactcggcagccagcagcttcagta

SEQ ID NO: 231131 - DNA, 30 bp, Artificial Sequence
  Synthetic oligonucleotide
tatacgtacggatacaaagaaaaaagagta

SEQ ID NO: 231132 - DNA, 30 bp, Artificial Sequence
  Synthetic oligonucleotide
acgcagtgaaactgttgccgacaaagagta

SEQ ID NO: 231133 - DNA, 30 bp, Artificial Sequence
  Synthetic oligonucleotide
ccccccaaagagagattcttgcccagagta

SEQ ID NO: 231134 - DNA, 30 bp, Artificial Sequence
  Synthetic oligonucleotide
tagatgttagtagtataatacgctagagta

SEQ ID NO: 231135 - DNA, 30 bp, Artificial Sequence
  Synthetic oligonucleotide
attcagcgggagacatctaccgtacgagta

SEQ ID NO: 231136 - DNA, 30 bp, Artificial Sequence
  Synthetic oligonucleotide
aaacttgtcgttaacctccaggaccgagta

SEQ ID NO: 231137 - DNA, 30 bp, Artificial Sequence
  Synthetic oligonucleotide
ctcttagttggttgtatatcttaccgagta

SEQ ID NO: 231138 - DNA, 31 bp, Artificial Sequence
  Synthetic oligonucleotide
ggctccatatgtgcagggtcaccggcgagta

SEQ ID NO: 231139 - DNA, 30 bp, Artificial Sequence
  Synthetic oligonucleotide
gctccaccgttttgacgagtttatcgagta

SEQ ID NO: 231140 - DNA, 30 bp, Artificial Sequence
  Synthetic oligonucleotide
atcaacttaacttcggactcaattcgagta

SEQ ID NO: 231141 - DNA, 30 bp, Artificial Sequence
  Synthetic oligonucleotide
tagggccgtgggtggtacatgctaggagta

SEQ ID NO: 231142 - DNA, 30 bp, Artificial Sequence
  Synthetic oligonucleotide
cctaagatcctccgaactaagaacggagta

SEQ ID NO: 231143 - DNA, 30 bp, Artificial Sequence
  Synthetic oligonucleotide
ctctgttggggtgagcagaccaagggagta

SEQ ID NO: 231144 - DNA, 30 bp, Artificial Sequence
  Synthetic oligonucleotide
cctaggcccttacatgtaagaacgggagta

SEQ ID NO: 231145 - DNA, 30 bp, Artificial Sequence
  Synthetic oligonucleotide
aactccatcaacgagcggagactgggagta

SEQ ID NO: 231146 - DNA, 30 bp, Artificial Sequence
  Synthetic oligonucleotide
ttcagtcaattaatgcacgccctgggagta

SEQ ID NO: 231147 - DNA, 30 bp, Artificial Sequence
  Synthetic oligonucleotide
gcgtgatcgcataaaattgtgcaatgagta

SEQ ID NO: 231148 - DNA, 30 bp, Artificial Sequence
  Synthetic oligonucleotide
gttgtgttgaatgtcccagaggaatgagta

SEQ ID NO: 231149 - DNA, 30 bp, Artificial Sequence
  Synthetic oligonucleotide
aggggatgtttgcccattgctacatgagta

SEQ ID NO: 231150 - DNA, 30 bp, Artificial Sequence
  Synthetic oligonucleotide
gcaacctcgcaatgtactcttgagtgagta

SEQ ID NO: 231151 - DNA, 30 bp, Artificial Sequence
  Synthetic oligonucleotide
ccagcaggctgacaaggtgccgcgtgagta

SEQ ID NO: 231152 - DNA, 30 bp, Artificial Sequence
  Synthetic oligonucleotide
atcgatcaattatcgaaagattcgtgagta

SEQ ID NO: 231153 - DNA, 30 bp, Artificial Sequence
  Synthetic oligonucleotide
ctccgacagcaatagcggatcaggtgagta

SEQ ID NO: 231154 - DNA, 30 bp, Artificial Sequence
  Synthetic oligonucleotide
tgctatatgtggccgctcgaaaattgagta

SEQ ID NO: 231155 - DNA, 30 bp, Artificial Sequence
  Synthetic oligonucleotide
tgtcgcagtacggatgtaataagttgagta

SEQ ID NO: 231156 - DNA, 30 bp, Artificial Sequence
  Synthetic oligonucleotide
ttcacgatatcagaaccaggcccaatagta

SEQ ID NO: 231157 - DNA, 30 bp, Artificial Sequence
  Synthetic oligonucleotide
actaaaagccgaacaaaggcggcaatagta

SEQ ID NO: 231158 - DNA, 30 bp, Artificial Sequence
  Synthetic oligonucleotide
ctcagttccatctgaaagaaagccatagta

SEQ ID NO: 231159 - DNA, 30 bp, Artificial Sequence
  Synthetic oligonucleotide
agggcccgcacgcgtggctgcaagatagta

SEQ ID NO: 231160 - DNA, 30 bp, Artificial Sequence
  Synthetic oligonucleotide
gacttgaaacggtactacaaaagtatagta

SEQ ID NO: 231161 - DNA, 30 bp, Artificial Sequence
  Synthetic oligonucleotide
gactgaatgacctgcgctgagcacctagta

SEQ ID NO: 231162 - DNA, 30 bp, Artificial Sequence
  Synthetic oligonucleotide
gggtttgtactccgttgtccccggctagta

SEQ ID NO: 231163 - DNA, 30 bp, Artificial Sequence
  Synthetic oligonucleotide
ggacaagattctaccaaagaaattctagta

SEQ ID NO: 231164 - DNA, 30 bp, Artificial Sequence
  Synthetic oligonucleotide
ccggttgctcatccaatcagaggggtagta

SEQ ID NO: 231165 - DNA, 30 bp, Artificial Sequence
  Synthetic oligonucleotide
ccgctgtccaaaaaggaagtgttggtagta

SEQ ID NO: 231166 - DNA, 30 bp, Artificial Sequence
  Synthetic oligonucleotide
gatagacgtcacgtgacacctcctgtagta

SEQ ID NO: 231167 - DNA, 30 bp, Artificial Sequence
  Synthetic oligonucleotide
tgcgtgttggatctgagcagcgctgtagta

SEQ ID NO: 231168 - DNA, 30 bp, Artificial Sequence
  Synthetic oligonucleotide
attgatatctcatgccgtgtcattgtagta

SEQ ID NO: 231169 - DNA, 31 bp, Artificial Sequence
  Synthetic oligonucleotide
gcaagtcatcgtccaagtcatatttgtagta

SEQ ID NO: 231170 - DNA, 30 bp, Artificial Sequence
  Synthetic oligonucleotide
aggcgtcgtagacgataatcatgattagta

SEQ ID NO: 231171 - DNA, 30 bp, Artificial Sequence
  Synthetic oligonucleotide
tgggggcagcttagccaaaccaggttagta

SEQ ID NO: 231172 - DNA, 30 bp, Artificial Sequence
  Synthetic oligonucleotide
ctgtaaagttcgggtgctcgtcggttagta

SEQ ID NO: 231173 - DNA, 30 bp, Artificial Sequence
  Synthetic oligonucleotide
atgcctcagggaagttagcctagtttagta

SEQ ID NO: 231174 - DNA, 30 bp, Artificial Sequence
  Synthetic oligonucleotide
aataaacaacttatgtaaaagtaaaacgta

SEQ ID NO: 231175 - DNA, 30 bp, Artificial Sequence
  Synthetic oligonucleotide
gtttgtgtgctgagtatcatacgcaacgta

SEQ ID NO: 231176 - DNA, 30 bp, Artificial Sequence
  Synthetic oligonucleotide
gtttcgttaatggaactacaccgcaacgta

SEQ ID NO: 231177 - DNA, 30 bp, Artificial Sequence
  Synthetic oligonucleotide
gcataagcatgtctgcagaggaagaacgta

SEQ ID NO: 231178 - DNA, 30 bp, Artificial Sequence
  Synthetic oligonucleotide
tagtaacagcggttaacgattcgccacgta

SEQ ID NO: 231179 - DNA, 30 bp, Artificial Sequence
  Synthetic oligonucleotide
catgtcaatcgtgaacattacaggcacgta

SEQ ID NO: 231180 - DNA, 30 bp, Artificial Sequence
  Synthetic oligonucleotide
cggaaggtcttcgccaatgttaggcacgta

SEQ ID NO: 231181 - DNA, 30 bp, Artificial Sequence
  Synthetic oligonucleotide
ccgttcactgtagaaccttacttgcacgta

SEQ ID NO: 231182 - DNA, 30 bp, Artificial Sequence
  Synthetic oligonucleotide
ggattaccagaacctcgcagatatcacgta

SEQ ID NO: 231183 - DNA, 30 bp, Artificial Sequence
  Synthetic oligonucleotide
gtgagatcgtacagtaagtaacctcacgta

SEQ ID NO: 231184 - DNA, 30 bp, Artificial Sequence
  Synthetic oligonucleotide
aagttatggagtaataccctagtagacgta

SEQ ID NO: 231185 - DNA, 30 bp, Artificial Sequence
  Synthetic oligonucleotide
agtatatgtcgactggtggttagcgacgta

SEQ ID NO: 231186 - DNA, 30 bp, Artificial Sequence
  Synthetic oligonucleotide
aaggtctaagcggatggcagatgggacgta

SEQ ID NO: 231187 - DNA, 30 bp, Artificial Sequence
  Synthetic oligonucleotide
cagagattgttctgaataggatctgacgta

SEQ ID NO: 231188 - DNA, 30 bp, Artificial Sequence
  Synthetic oligonucleotide
gccatcgtaggggaatagggccgatacgta

SEQ ID NO: 231189 - DNA, 30 bp, Artificial Sequence
  Synthetic oligonucleotide
atgtctatgaatatatattagaagtacgta

SEQ ID NO: 231190 - DNA, 30 bp, Artificial Sequence
  Synthetic oligonucleotide
gaacaactgatgcacccacttaagtacgta

SEQ ID NO: 231191 - DNA, 30 bp, Artificial Sequence
  Synthetic oligonucleotide
gggtactgcaatcgccgtaacgattacgta

SEQ ID NO: 231192 - DNA, 30 bp, Artificial Sequence
  Synthetic oligonucleotide
ttactgaggatcgcccaactcacaaccgta

SEQ ID NO: 231193 - DNA, 30 bp, Artificial Sequence
  Synthetic oligonucleotide
acggtctggtgcatgtgcaaagagaccgta

SEQ ID NO: 231194 - DNA, 30 bp, Artificial Sequence
  Synthetic oligonucleotide
ttggggatggatatatcgatggggaccgta

SEQ ID NO: 231195 - DNA, 30 bp, Artificial Sequence
  Synthetic oligonucleotide
ggacaaggaattggtcgtcgatttaccgta

SEQ ID NO: 231196 - DNA, 30 bp, Artificial Sequence
  Synthetic oligonucleotide
ctggctaaatatggccgatagtcacccgta

SEQ ID NO: 231197 - DNA, 30 bp, Artificial Sequence
  Synthetic oligonucleotide
ctatcctcccttcgtaaagttgctcccgta

SEQ ID NO: 231198 - DNA, 30 bp, Artificial Sequence
  Synthetic oligonucleotide
ggcggttatggtacgatcacgtgtcccgta

SEQ ID NO: 231199 - DNA, 30 bp, Artificial Sequence
  Synthetic oligonucleotide
ctgaggtatctcatcgataagattcccgta

SEQ ID NO: 231200 - DNA, 30 bp, Artificial Sequence
  Synthetic oligonucleotide
ttgaagaggccggtgggggttgttcccgta

SEQ ID NO: 231201 - DNA, 30 bp, Artificial Sequence
  Synthetic oligonucleotide
aaagtaatgtacaacgttcgcaaagccgta

SEQ ID NO: 231202 - DNA, 30 bp, Artificial Sequence
  Synthetic oligonucleotide
catcggatatagacatgctggctagccgta

SEQ ID NO: 231203 - DNA, 30 bp, Artificial Sequence
  Synthetic oligonucleotide
gatctattaacagcgaaggctctagccgta

SEQ ID NO: 231204 - DNA, 30 bp, Artificial Sequence
  Synthetic oligonucleotide
tctcgtaaatgcattgtagcgaacgccgta

SEQ ID NO: 231205 - DNA, 30 bp, Artificial Sequence
  Synthetic oligonucleotide
ccccaggaaaggcagagctggatggccgta

SEQ ID NO: 231206 - DNA, 30 bp, Artificial Sequence
  Synthetic oligonucleotide
tatcggaatgattcatgcactgaatccgta

SEQ ID NO: 231207 - DNA, 30 bp, Artificial Sequence
  Synthetic oligonucleotide
ccaagtctccggtcaatggtcgcgtccgta

SEQ ID NO: 231208 - DNA, 30 bp, Artificial Sequence
  Synthetic oligonucleotide
gctaggtcaagatttattactgggtccgta

SEQ ID NO: 231209 - DNA, 30 bp, Artificial Sequence
  Synthetic oligonucleotide
cgtagggcaagtattgtataatattccgta

SEQ ID NO: 231210 - DNA, 31 bp, Artificial Sequence
  Synthetic oligonucleotide
atgacgataaaagccactcttcgcttccgta

SEQ ID NO: 231211 - DNA, 30 bp, Artificial Sequence
  Synthetic oligonucleotide
aagggctacgatgtttatctcagttccgta

SEQ ID NO: 231212 - DNA, 30 bp, Artificial Sequence
  Synthetic oligonucleotide
ccccgggcccaatgtgagacccgttccgta

SEQ ID NO: 231213 - DNA, 30 bp, Artificial Sequence
  Synthetic oligonucleotide
aacggggcgcatgctgagcggtcgagcgta

SEQ ID NO: 231214 - DNA, 30 bp, Artificial Sequence
  Synthetic oligonucleotide
gacaagttttgatatcaattaaatagcgta

SEQ ID NO: 231215 - DNA, 30 bp, Artificial Sequence
  Synthetic oligonucleotide
gtagcgagccacgaccatagtgttagcgta

SEQ ID NO: 231216 - DNA, 30 bp, Artificial Sequence
  Synthetic oligonucleotide
ttcttagtgcccataatggacatccgcgta

SEQ ID NO: 231217 - DNA, 30 bp, Artificial Sequence
  Synthetic oligonucleotide
ggtatccaagcaattaagacggtccgcgta

SEQ ID NO: 231218 - DNA, 30 bp, Artificial Sequence
  Synthetic oligonucleotide
ggatcggtaagctttaactgatcgcgcgta

SEQ ID NO: 231219 - DNA, 30 bp, Artificial Sequence
  Synthetic oligonucleotide
gatggacaccctagatggaaattgcgcgta

SEQ ID NO: 231220 - DNA, 30 bp, Artificial Sequence
  Synthetic oligonucleotide
aagtactagatcgacggatgttgaggcgta

SEQ ID NO: 231221 - DNA, 30 bp, Artificial Sequence
  Synthetic oligonucleotide
aactggtgatacttgaccccgtccggcgta

SEQ ID NO: 231222 - DNA, 30 bp, Artificial Sequence
  Synthetic oligonucleotide
ggcgccgatctagcctccgatctcggcgta

SEQ ID NO: 231223 - DNA, 30 bp, Artificial Sequence
  Synthetic oligonucleotide
ggtgagtgggtgggagttttgtcgggcgta

SEQ ID NO: 231224 - DNA, 30 bp, Artificial Sequence
  Synthetic oligonucleotide
accatggtgcgatgtggtttcgcatgcgta

SEQ ID NO: 231225 - DNA, 30 bp, Artificial Sequence
  Synthetic oligonucleotide
tatagggaaaacgtcagtgtgacctgcgta

SEQ ID NO: 231226 - DNA, 30 bp, Artificial Sequence
  Synthetic oligonucleotide
gaatccctctgtatagaacgggcctgcgta

SEQ ID NO: 231227 - DNA, 29 bp, Artificial Sequence
  Synthetic oligonucleotide
gtcactgacgcgggagggttttctgcgta

SEQ ID NO: 231228 - DNA, 30 bp, Artificial Sequence
  Synthetic oligonucleotide
gggtttaacgtgccctgagcctggtgcgta

SEQ ID NO: 231229 - DNA, 30 bp, Artificial Sequence
  Synthetic oligonucleotide
tgactcgcaggagggggaccgccttgcgta

SEQ ID NO: 231230 - DNA, 30 bp, Artificial Sequence
  Synthetic oligonucleotide
gagatatgcggctccacctaatgttgcgta

SEQ ID NO: 231231 - DNA, 30 bp, Artificial Sequence
  Synthetic oligonucleotide
cacgaccgtaggggtggtcccccactcgta

SEQ ID NO: 231232 - DNA, 30 bp, Artificial Sequence
  Synthetic oligonucleotide
gcgcttgagctcaccgcaagagaagtcgta

SEQ ID NO: 231233 - DNA, 30 bp, Artificial Sequence
  Synthetic oligonucleotide
gctaatacttttcctaactcggtagtcgta

SEQ ID NO: 231234 - DNA, 30 bp, Artificial Sequence
  Synthetic oligonucleotide
tagactgagtagagaatttgtatcgtcgta

SEQ ID NO: 231235 - DNA, 30 bp, Artificial Sequence
  Synthetic oligonucleotide
gccaactcagcctcaacattcgtggtcgta

SEQ ID NO: 231236 - DNA, 30 bp, Artificial Sequence
  Synthetic oligonucleotide
accggcgtaaatagtatatcgaatgtcgta

SEQ ID NO: 231237 - DNA, 30 bp, Artificial Sequence
  Synthetic oligonucleotide
tggtaccgagctgacgaaagggttgtcgta

SEQ ID NO: 231238 - DNA, 30 bp, Artificial Sequence
  Synthetic oligonucleotide
acggcctaataatccgacgcacagttcgta

SEQ ID NO: 231239 - DNA, 30 bp, Artificial Sequence
  Synthetic oligonucleotide
ccaaaagacccgcaagcactggggttcgta

SEQ ID NO: 231240 - DNA, 30 bp, Artificial Sequence
  Synthetic oligonucleotide
cagaataaacgctttgatagtactttcgta

SEQ ID NO: 231241 - DNA, 30 bp, Artificial Sequence
  Synthetic oligonucleotide
ttcgagcacagcaagattaccccaaaggta

SEQ ID NO: 231242 - DNA, 30 bp, Artificial Sequence
  Synthetic oligonucleotide
ggttgggcataatcaggcgaggcaaaggta

SEQ ID NO: 231243 - DNA, 30 bp, Artificial Sequence
  Synthetic oligonucleotide
caaggtggtgatgacctgaaggtaaaggta

SEQ ID NO: 231244 - DNA, 30 bp, Artificial Sequence
  Synthetic oligonucleotide
atacgagcgtagcgtgtggccgacaaggta

SEQ ID NO: 231245 - DNA, 30 bp, Artificial Sequence
  Synthetic oligonucleotide
ggtgtggcaaagcttctggtaaccaaggta

SEQ ID NO: 231246 - DNA, 30 bp, Artificial Sequence
  Synthetic oligonucleotide
aaatgctacaagtactgctaccgcaaggta

SEQ ID NO: 231247 - DNA, 30 bp, Artificial Sequence
  Synthetic oligonucleotide
acacaacattcagtaacctgccagaaggta

SEQ ID NO: 231248 - DNA, 30 bp, Artificial Sequence
  Synthetic oligonucleotide
tcggaagtagtgaattaaatcaggaaggta

SEQ ID NO: 231249 - DNA, 30 bp, Artificial Sequence
  Synthetic oligonucleotide
tgaactcgatccggtaatcaaatgaaggta

SEQ ID NO: 231250 - DNA, 30 bp, Artificial Sequence
  Synthetic oligonucleotide
cgctgtaccggatgccttcctgctaaggta

SEQ ID NO: 231251 - DNA, 30 bp, Artificial Sequence
  Synthetic oligonucleotide
cagtaccgggtggcaatccctcttaaggta

SEQ ID NO: 231252 - DNA, 30 bp, Artificial Sequence
  Synthetic oligonucleotide
gcagaacagctgcctacatgagaacaggta

SEQ ID NO: 231253 - DNA, 30 bp, Artificial Sequence
  Synthetic oligonucleotide
cttgaaaccctaaactaatgttcacaggta

SEQ ID NO: 231254 - DNA, 30 bp, Artificial Sequence
  Synthetic oligonucleotide
tactaaagatagattctattccgccaggta

SEQ ID NO: 231255 - DNA, 30 bp, Artificial Sequence
  Synthetic oligonucleotide
gtcctttgatatccccaagagtcgcaggta

SEQ ID NO: 231256 - DNA, 30 bp, Artificial Sequence
  Synthetic oligonucleotide
tccatggactacccagcccctgctcaggta

SEQ ID NO: 231257 - DNA, 30 bp, Artificial Sequence
  Synthetic oligonucleotide
tttcacatatgggaacaagtacgtcaggta

SEQ ID NO: 231258 - DNA, 30 bp, Artificial Sequence
  Synthetic oligonucleotide
accctaagaaggcttgccaattgtcaggta

SEQ ID NO: 231259 - DNA, 30 bp, Artificial Sequence
  Synthetic oligonucleotide
gcggtcggaaatctcgccactgaagaggta

SEQ ID NO: 231260 - DNA, 30 bp, Artificial Sequence
  Synthetic oligonucleotide
ggtgccgggttggtatataatagagaggta

SEQ ID NO: 231261 - DNA, 30 bp, Artificial Sequence
  Synthetic oligonucleotide
gtaatcgcgattggggcaacgaccgaggta

SEQ ID NO: 231262 - DNA, 30 bp, Artificial Sequence
  Synthetic oligonucleotide
gtaagaatcccaagccgggacaaggaggta

SEQ ID NO: 231263 - DNA, 30 bp, Artificial Sequence
  Synthetic oligonucleotide
ggggtaaacttattccggcgagaggaggta

SEQ ID NO: 231264 - DNA, 30 bp, Artificial Sequence
  Synthetic oligonucleotide
aggaaacgtcgccccgggacgaattaggta

SEQ ID NO: 231265 - DNA, 30 bp, Artificial Sequence
  Synthetic oligonucleotide
gtaactcaaatgacagtgttgaattaggta

SEQ ID NO: 231266 - DNA, 30 bp, Artificial Sequence
  Synthetic oligonucleotide
ctcagtgcgccaggtgggacaacttaggta

SEQ ID NO: 231267 - DNA, 30 bp, Artificial Sequence
  Synthetic oligonucleotide
ggcagacgtcgtcaacgacggggaacggta

SEQ ID NO: 231268 - DNA, 30 bp, Artificial Sequence
  Synthetic oligonucleotide
ggagcttgcgtaggggatcctcacacggta

SEQ ID NO: 231269 - DNA, 30 bp, Artificial Sequence
  Synthetic oligonucleotide
gaaaacaactagtaactgaatgtcacggta

SEQ ID NO: 231270 - DNA, 30 bp, Artificial Sequence
  Synthetic oligonucleotide
aagataatgagtgcagtgacagatacggta

SEQ ID NO: 231271 - DNA, 30 bp, Artificial Sequence
  Synthetic oligonucleotide
aaagtggcccagcccgaccggtatacggta

SEQ ID NO: 231272 - DNA, 30 bp, Artificial Sequence
  Synthetic oligonucleotide
atgtgtcagccagtgtagcaaagtacggta

SEQ ID NO: 231273 - DNA, 30 bp, Artificial Sequence
  Synthetic oligonucleotide
cagggaacaggaccctgctgaggtacggta

SEQ ID NO: 231274 - DNA, 30 bp, Artificial Sequence
  Synthetic oligonucleotide
aataagatgcaagggagtatatggccggta

SEQ ID NO: 231275 - DNA, 30 bp, Artificial Sequence
  Synthetic oligonucleotide
taggaatgctaggtatgatttatgccggta

SEQ ID NO: 231276 - DNA, 30 bp, Artificial Sequence
  Synthetic oligonucleotide
agcatagaaggacacttcttcccggcggta

SEQ ID NO: 231277 - DNA, 30 bp, Artificial Sequence
  Synthetic oligonucleotide
aatgatatacctattcacaacctggcggta

SEQ ID NO: 231278 - DNA, 30 bp, Artificial Sequence
  Synthetic oligonucleotide
tgatgcgacggatactactcagcgtcggta

SEQ ID NO: 231279 - DNA, 30 bp, Artificial Sequence
  Synthetic oligonucleotide
ccgcgtaggagccaaaaatccttttcggta

SEQ ID NO: 231280 - DNA, 30 bp, Artificial Sequence
  Synthetic oligonucleotide
gcctattgagccaaaccaatgcaaagggta

SEQ ID NO: 231281 - DNA, 30 bp, Artificial Sequence
  Synthetic oligonucleotide
tgtgaaataccaagaggcaatagaagggta

SEQ ID NO: 231282 - DNA, 30 bp, Artificial Sequence
  Synthetic oligonucleotide
ggcggtaaaggcgagttatggtgaagggta

SEQ ID NO: 231283 - DNA, 30 bp, Artificial Sequence
  Synthetic oligonucleotide
ccgaaagactgatgcctaaccataagggta

SEQ ID NO: 231284 - DNA, 30 bp, Artificial Sequence
  Synthetic oligonucleotide
tcatgtctatattaaagtgcctcgagggta

SEQ ID NO: 231285 - DNA, 30 bp, Artificial Sequence
  Synthetic oligonucleotide
aggtcaataatctaccactcgatgagggta

SEQ ID NO: 231286 - DNA, 30 bp, Artificial Sequence
  Synthetic oligonucleotide
tactgctcggaagtgtcaacacatagggta

SEQ ID NO: 231287 - DNA, 30 bp, Artificial Sequence
  Synthetic oligonucleotide
tgtagggtccgaaacttggtgtcacgggta

SEQ ID NO: 231288 - DNA, 30 bp, Artificial Sequence
  Synthetic oligonucleotide
acgataggccgaaaactatatcgacgggta

SEQ ID NO: 231289 - DNA, 30 bp, Artificial Sequence
  Synthetic oligonucleotide
gagaagataaattgcatacaataccgggta

SEQ ID NO: 231290 - DNA, 30 bp, Artificial Sequence
  Synthetic oligonucleotide
gcaatcatacttcttagaggggtccgggta

SEQ ID NO: 231291 - DNA, 30 bp, Artificial Sequence
  Synthetic oligonucleotide
actgcgtcagtgactatcggttcgcgggta

SEQ ID NO: 231292 - DNA, 30 bp, Artificial Sequence
  Synthetic oligonucleotide
ttccgtactcaagcgaagccagaaggggta

SEQ ID NO: 231293 - DNA, 30 bp, Artificial Sequence
  Synthetic oligonucleotide
aatgtatttcagaggacaactataggggta

SEQ ID NO: 231294 - DNA, 30 bp, Artificial Sequence
  Synthetic oligonucleotide
tttgtaaacgacatccgataattaggggta

SEQ ID NO: 231295 - DNA, 30 bp, Artificial Sequence
  Synthetic oligonucleotide
gacagcgccgcggtggggccagacggggta

SEQ ID NO: 231296 - DNA, 30 bp, Artificial Sequence
  Synthetic oligonucleotide
cacctagatgatggaggacgtgggggggta

SEQ ID NO: 231297 - DNA, 30 bp, Artificial Sequence
  Synthetic oligonucleotide
tcttcgatggaagttactacgtgtggggta

SEQ ID NO: 231298 - DNA, 30 bp, Artificial Sequence
  Synthetic oligonucleotide
gggttccgaattcagcccgttggatgggta

SEQ ID NO: 231299 - DNA, 30 bp, Artificial Sequence
  Synthetic oligonucleotide
tgaggatctcgctacatgcaagtatgggta

SEQ ID NO: 231300 - DNA, 30 bp, Artificial Sequence
  Synthetic oligonucleotide
tcgactcttactttggatttcttatgggta

SEQ ID NO: 231301 - DNA, 30 bp, Artificial Sequence
  Synthetic oligonucleotide
atgtatagcctttatgacaacacctgggta

SEQ ID NO: 231302 - DNA, 30 bp, Artificial Sequence
  Synthetic oligonucleotide
gcagggtgacactcccgcagtacctgggta

SEQ ID NO: 231303 - DNA, 30 bp, Artificial Sequence
  Synthetic oligonucleotide
aaaagaccaggaggctctggggtctgggta

SEQ ID NO: 231304 - DNA, 30 bp, Artificial Sequence
  Synthetic oligonucleotide
cgtaccgcccaatggcaccttaggtgggta

SEQ ID NO: 231305 - DNA, 30 bp, Artificial Sequence
  Synthetic oligonucleotide
attcagggtgagacgtattatcggtgggta

SEQ ID NO: 231306 - DNA, 30 bp, Artificial Sequence
  Synthetic oligonucleotide
aacataagtggggggaaaaccaattgggta

SEQ ID NO: 231307 - DNA, 30 bp, Artificial Sequence
  Synthetic oligonucleotide
tacatgcgtagaataataccaacttgggta

SEQ ID NO: 231308 - DNA, 30 bp, Artificial Sequence
  Synthetic oligonucleotide
gagaaggggattcaaggtaacgcaatggta

SEQ ID NO: 231309 - DNA, 30 bp, Artificial Sequence
  Synthetic oligonucleotide
tgcagcaggcgatttatgggagtgatggta

SEQ ID NO: 231310 - DNA, 30 bp, Artificial Sequence
  Synthetic oligonucleotide
gttaaccaggtcaaacaatctcttatggta

SEQ ID NO: 231311 - DNA, 30 bp, Artificial Sequence
  Synthetic oligonucleotide
gtgaaaatgcggatggtcttacaactggta

SEQ ID NO: 231312 - DNA, 30 bp, Artificial Sequence
  Synthetic oligonucleotide
cgaatcggttgcggtcgcgaagaactggta

SEQ ID NO: 231313 - DNA, 30 bp, Artificial Sequence
  Synthetic oligonucleotide
gtatgaggatagtgggaccattcactggta

SEQ ID NO: 231314 - DNA, 30 bp, Artificial Sequence
  Synthetic oligonucleotide
acttgttacattctcgacactatactggta

SEQ ID NO: 231315 - DNA, 30 bp, Artificial Sequence
  Synthetic oligonucleotide
tacatcgcactgttcggttcagtcctggta

SEQ ID NO: 231316 - DNA, 30 bp, Artificial Sequence
  Synthetic oligonucleotide
ctatgatacttctcctggagtgatctggta

SEQ ID NO: 231317 - DNA, 30 bp, Artificial Sequence
  Synthetic oligonucleotide
agcatatggagaggcgaccaaattctggta

SEQ ID NO: 231318 - DNA, 30 bp, Artificial Sequence
  Synthetic oligonucleotide
tgaatatctgggggctcctgttaagtggta

SEQ ID NO: 231319 - DNA, 30 bp, Artificial Sequence
  Synthetic oligonucleotide
cgatttaaaggattcctcacttgagtggta

SEQ ID NO: 231320 - DNA, 30 bp, Artificial Sequence
  Synthetic oligonucleotide
agtcgccactaatttctaaaggtagtggta

SEQ ID NO: 231321 - DNA, 30 bp, Artificial Sequence
  Synthetic oligonucleotide
gaccgtggatgattcgggcgattagtggta

SEQ ID NO: 231322 - DNA, 30 bp, Artificial Sequence
  Synthetic oligonucleotide
tacaagtgttgcgctagctacgacgtggta

SEQ ID NO: 231323 - DNA, 30 bp, Artificial Sequence
  Synthetic oligonucleotide
gattcaacactttcgagcgtaagcgtggta

SEQ ID NO: 231324 - DNA, 30 bp, Artificial Sequence
  Synthetic oligonucleotide
accgagagccgtagcatagagccggtggta

SEQ ID NO: 231325 - DNA, 30 bp, Artificial Sequence
  Synthetic oligonucleotide
ttgatagttttatgaacctattgggtggta

SEQ ID NO: 231326 - DNA, 30 bp, Artificial Sequence
  Synthetic oligonucleotide
gccagccacgagataatggcgcctgtggta

SEQ ID NO: 231327 - DNA, 30 bp, Artificial Sequence
  Synthetic oligonucleotide
tacgacatactgcatgacatggttgtggta

SEQ ID NO: 231328 - DNA, 30 bp, Artificial Sequence
  Synthetic oligonucleotide
caagtgtgttatccgtggtaatgattggta

SEQ ID NO: 231329 - DNA, 30 bp, Artificial Sequence
  Synthetic oligonucleotide
ttaaccccatatcaggatccagagttggta

SEQ ID NO: 231330 - DNA, 30 bp, Artificial Sequence
  Synthetic oligonucleotide
ctatcggatgtaaggacaacgtagttggta

SEQ ID NO: 231331 - DNA, 30 bp, Artificial Sequence
  Synthetic oligonucleotide
gtcgtgtgtgcttacaaatctaggttggta

SEQ ID NO: 231332 - DNA, 30 bp, Artificial Sequence
  Synthetic oligonucleotide
tatgggatcatctccgcgtaacctttggta

SEQ ID NO: 231333 - DNA, 30 bp, Artificial Sequence
  Synthetic oligonucleotide
ttccgaataacgatagcccgccaaaatgta

SEQ ID NO: 231334 - DNA, 30 bp, Artificial Sequence
  Synthetic oligonucleotide
gcgatgcaagtggccggagatcacaatgta

SEQ ID NO: 231335 - DNA, 30 bp, Artificial Sequence
  Synthetic oligonucleotide
ccgcaaaattttagctaatgggcgaatgta

SEQ ID NO: 231336 - DNA, 30 bp, Artificial Sequence
  Synthetic oligonucleotide
ctcggacaggttctagcccgtcataatgta

SEQ ID NO: 231337 - DNA, 30 bp, Artificial Sequence
  Synthetic oligonucleotide
tgatcgtcggcgcggtctgcttataatgta

SEQ ID NO: 231338 - DNA, 30 bp, Artificial Sequence
  Synthetic oligonucleotide
aaactgggcggaagacatgccagacatgta

SEQ ID NO: 231339 - DNA, 30 bp, Artificial Sequence
  Synthetic oligonucleotide
tagtaacctgtcctggtttggggacatgta

SEQ ID NO: 231340 - DNA, 30 bp, Artificial Sequence
  Synthetic oligonucleotide
acaaggtacacatatgccgagcagcatgta

SEQ ID NO: 231341 - DNA, 30 bp, Artificial Sequence
  Synthetic oligonucleotide
gtgtcccgattttatcatggctaggatgta

SEQ ID NO: 231342 - DNA, 30 bp, Artificial Sequence
  Synthetic oligonucleotide
aatgctatgagtaagttaaaaatggatgta

SEQ ID NO: 231343 - DNA, 30 bp, Artificial Sequence
  Synthetic oligonucleotide
tgtacagttgaacgaacgtatcatgatgta

SEQ ID NO: 231344 - DNA, 30 bp, Artificial Sequence
  Synthetic oligonucleotide
gtgaagtcggtacgttggattgctgatgta

SEQ ID NO: 231345 - DNA, 30 bp, Artificial Sequence
  Synthetic oligonucleotide
ggaccattgatcctggaaggggactatgta

SEQ ID NO: 231346 - DNA, 30 bp, Artificial Sequence
  Synthetic oligonucleotide
ggctccaggcactaagtgccacgctatgta

SEQ ID NO: 231347 - DNA, 30 bp, Artificial Sequence
  Synthetic oligonucleotide
cgttatgtgaggggtttgtgcggctatgta

SEQ ID NO: 231348 - DNA, 30 bp, Artificial Sequence
  Synthetic oligonucleotide
ccgagacatggtacacagatatagtatgta

SEQ ID NO: 231349 - DNA, 30 bp, Artificial Sequence
  Synthetic oligonucleotide
ataagggtcaaactctaacacgcgtatgta

SEQ ID NO: 231350 - DNA, 30 bp, Artificial Sequence
  Synthetic oligonucleotide
acccggattatctcaacgttacattatgta

SEQ ID NO: 231351 - DNA, 30 bp, Artificial Sequence
  Synthetic oligonucleotide
ggccgagactgcgccaaacatggttatgta

SEQ ID NO: 231352 - DNA, 30 bp, Artificial Sequence
  Synthetic oligonucleotide
cttagtgaacccataataactcacactgta

SEQ ID NO: 231353 - DNA, 30 bp, Artificial Sequence
  Synthetic oligonucleotide
ccaactaaggttttccaacgacagactgta

SEQ ID NO: 231354 - DNA, 30 bp, Artificial Sequence
  Synthetic oligonucleotide
atagcatcgtccaccatcacgatgactgta

SEQ ID NO: 231355 - DNA, 30 bp, Artificial Sequence
  Synthetic oligonucleotide
acgctgcgaactggaggaccagtgactgta

SEQ ID NO: 231356 - DNA, 30 bp, Artificial Sequence
  Synthetic oligonucleotide
taatgctaatggtgtcagcttcatactgta

SEQ ID NO: 231357 - DNA, 30 bp, Artificial Sequence
  Synthetic oligonucleotide
acatgttcatcgtccgcgcgctgtactgta

SEQ ID NO: 231358 - DNA, 30 bp, Artificial Sequence
  Synthetic oligonucleotide
agcaaacgccgctcgatcactgagcctgta

SEQ ID NO: 231359 - DNA, 30 bp, Artificial Sequence
  Synthetic oligonucleotide
gaggaacagtaattatatgggctgcctgta

SEQ ID NO: 231360 - DNA, 30 bp, Artificial Sequence
  Synthetic oligonucleotide
ttagatcattagctcgaactgcaagctgta

SEQ ID NO: 231361 - DNA, 30 bp, Artificial Sequence
  Synthetic oligonucleotide
cgttaccccaccgctattcagaccgctgta

SEQ ID NO: 231362 - DNA, 30 bp, Artificial Sequence
  Synthetic oligonucleotide
gtcacaaacgatttgcaggtctgcgctgta

SEQ ID NO: 231363 - DNA, 30 bp, Artificial Sequence
  Synthetic oligonucleotide
gatcgtcggggccatgcatcttaggctgta

SEQ ID NO: 231364 - DNA, 30 bp, Artificial Sequence
  Synthetic oligonucleotide
caatcctataatgatcctcaattggctgta

SEQ ID NO: 231365 - DNA, 30 bp, Artificial Sequence
  Synthetic oligonucleotide
ctgcgagaccatctacaggacgttgctgta

SEQ ID NO: 231366 - DNA, 30 bp, Artificial Sequence
  Synthetic oligonucleotide
cgagacgcatccggggtcacggttgctgta

SEQ ID NO: 231367 - DNA, 30 bp, Artificial Sequence
  Synthetic oligonucleotide
attccaagggatgttgactagggatctgta

SEQ ID NO: 231368 - DNA, 30 bp, Artificial Sequence
  Synthetic oligonucleotide
agctattggggacgcgccacttcctctgta

SEQ ID NO: 231369 - DNA, 30 bp, Artificial Sequence
  Synthetic oligonucleotide
atacacccggtttaaaacggacagtctgta

SEQ ID NO: 231370 - DNA, 30 bp, Artificial Sequence
  Synthetic oligonucleotide
taagcctattgtgggtattttaggtctgta

SEQ ID NO: 231371 - DNA, 30 bp, Artificial Sequence
  Synthetic oligonucleotide
gtaggggctcggtgacgatcttgttctgta

SEQ ID NO: 231372 - DNA, 30 bp, Artificial Sequence
  Synthetic oligonucleotide
tacagtatgtagtttcacatgatttctgta

SEQ ID NO: 231373 - DNA, 30 bp, Artificial Sequence
  Synthetic oligonucleotide
atgatattggaagtgtagtatcaaagtgta

SEQ ID NO: 231374 - DNA, 30 bp, Artificial Sequence
  Synthetic oligonucleotide
ggatagccagattatctactggcaagtgta

SEQ ID NO: 231375 - DNA, 30 bp, Artificial Sequence
  Synthetic oligonucleotide
gaccagttgtgccagcttacaggcagtgta

SEQ ID NO: 231376 - DNA, 30 bp, Artificial Sequence
  Synthetic oligonucleotide
cacattatccattctgaatgacagagtgta

SEQ ID NO: 231377 - DNA, 30 bp, Artificial Sequence
  Synthetic oligonucleotide
ccgcgtttccatgacaacttagcgagtgta

SEQ ID NO: 231378 - DNA, 30 bp, Artificial Sequence
  Synthetic oligonucleotide
actatagttgaagcgctgagggcccgtgta

SEQ ID NO: 231379 - DNA, 30 bp, Artificial Sequence
  Synthetic oligonucleotide
ttgtcccaagtgtgcgtgctggccggtgta

SEQ ID NO: 231380 - DNA, 30 bp, Artificial Sequence
  Synthetic oligonucleotide
ctccagcgtacaggtatttatgggggtgta

SEQ ID NO: 231381 - DNA, 30 bp, Artificial Sequence
  Synthetic oligonucleotide
ggcaacattcatccgataccaatgggtgta

SEQ ID NO: 231382 - DNA, 30 bp, Artificial Sequence
  Synthetic oligonucleotide
acaatcgaacgaaacgtggtttaatgtgta

SEQ ID NO: 231383 - DNA, 30 bp, Artificial Sequence
  Synthetic oligonucleotide
tgcacatccagccttcttcacgcatgtgta

SEQ ID NO: 231384 - DNA, 30 bp, Artificial Sequence
  Synthetic oligonucleotide
ttcacttgtaggtctattgcatcctgtgta

SEQ ID NO: 231385 - DNA, 30 bp, Artificial Sequence
  Synthetic oligonucleotide
cgtatgcagaacttcaggggaacttgtgta

SEQ ID NO: 231386 - DNA, 30 bp, Artificial Sequence
  Synthetic oligonucleotide
catacgcgcgtaactgcccaatagattgta

SEQ ID NO: 231387 - DNA, 30 bp, Artificial Sequence
  Synthetic oligonucleotide
tcggtacgcgttggcattagagcgattgta

SEQ ID NO: 231388 - DNA, 30 bp, Artificial Sequence
  Synthetic oligonucleotide
tctagacatattatctagcgagggattgta

SEQ ID NO: 231389 - DNA, 30 bp, Artificial Sequence
  Synthetic oligonucleotide
gggcttatcaaacgttcccgatggattgta

SEQ ID NO: 231390 - DNA, 30 bp, Artificial Sequence
  Synthetic oligonucleotide
aacgttaagtatccaacgattttgattgta

SEQ ID NO: 231391 - DNA, 30 bp, Artificial Sequence
  Synthetic oligonucleotide
gcgtaatcccgccacctctcgtttattgta

SEQ ID NO: 231392 - DNA, 30 bp, Artificial Sequence
  Synthetic oligonucleotide
gtaaaccctacgacgagtttcaagcttgta

SEQ ID NO: 231393 - DNA, 30 bp, Artificial Sequence
  Synthetic oligonucleotide
gttcaaagtaaggacgatatggaagttgta

SEQ ID NO: 231394 - DNA, 30 bp, Artificial Sequence
  Synthetic oligonucleotide
tcgtgaaagtggcacgtaagttgagttgta

SEQ ID NO: 231395 - DNA, 30 bp, Artificial Sequence
  Synthetic oligonucleotide
ggaaaaattatacagtgaccaaaggttgta

SEQ ID NO: 231396 - DNA, 30 bp, Artificial Sequence
  Synthetic oligonucleotide
tgtcgattaagtccactggtaaaggttgta

SEQ ID NO: 231397 - DNA, 30 bp, Artificial Sequence
  Synthetic oligonucleotide
ggtaatcctctgaagctccgatgggttgta

SEQ ID NO: 231398 - DNA, 30 bp, Artificial Sequence
  Synthetic oligonucleotide
ctgattgcattattagggagggctgttgta

SEQ ID NO: 231399 - DNA, 30 bp, Artificial Sequence
  Synthetic oligonucleotide
tagctccacgcccttgtaggaaaatttgta

SEQ ID NO: 231400 - DNA, 30 bp, Artificial Sequence
  Synthetic oligonucleotide
aagagataaacgggcatcaggaggtttgta

SEQ ID NO: 231401 - DNA, 30 bp, Artificial Sequence
  Synthetic oligonucleotide
ggcgggtgggtaacctgtgggacaaaatta

SEQ ID NO: 231402 - DNA, 30 bp, Artificial Sequence
  Synthetic oligonucleotide
tgtcgctcagtacgtgcaatacacaaatta

SEQ ID NO: 231403 - DNA, 30 bp, Artificial Sequence
  Synthetic oligonucleotide
agcaacaggtgtgacatgcgcgtcaaatta

SEQ ID NO: 231404 - DNA, 30 bp, Artificial Sequence
  Synthetic oligonucleotide
gtcaatggtgcaacttatgtcacgaaatta

SEQ ID NO: 231405 - DNA, 30 bp, Artificial Sequence
  Synthetic oligonucleotide
agggcgtgcagatcgttaccgccgaaatta

SEQ ID NO: 231406 - DNA, 30 bp, Artificial Sequence
  Synthetic oligonucleotide
tatgcatcgaatgtacttggggcgaaatta

SEQ ID NO: 231407 - DNA, 30 bp, Artificial Sequence
  Synthetic oligonucleotide
atcgatatctagcgcacatgcaggaaatta

SEQ ID NO: 231408 - DNA, 30 bp, Artificial Sequence
  Synthetic oligonucleotide
gcttggctagggcatgtgaatgggaaatta

SEQ ID NO: 231409 - DNA, 30 bp, Artificial Sequence
  Synthetic oligonucleotide
acacaagaaccacaatggttaaataaatta

SEQ ID NO: 231410 - DNA, 30 bp, Artificial Sequence
  Synthetic oligonucleotide
agcggctcctcaatgggaagggttaaatta

SEQ ID NO: 231411 - DNA, 30 bp, Artificial Sequence
  Synthetic oligonucleotide
gcctctggatgtttccatgtgaagcaatta

SEQ ID NO: 231412 - DNA, 30 bp, Artificial Sequence
  Synthetic oligonucleotide
cgcgtagtgcagccgtagcttgatcaatta

SEQ ID NO: 231413 - DNA, 30 bp, Artificial Sequence
  Synthetic oligonucleotide
gcgtagagattataagctcaggcagaatta

SEQ ID NO: 231414 - DNA, 30 bp, Artificial Sequence
  Synthetic oligonucleotide
gccggaccctattacataacgggggaatta

SEQ ID NO: 231415 - DNA, 30 bp, Artificial Sequence
  Synthetic oligonucleotide
ggcacgttgtacagttttgcgttggaatta

SEQ ID NO: 231416 - DNA, 30 bp, Artificial Sequence
  Synthetic oligonucleotide
ccaagaacaccttagtaatgccggtaatta

SEQ ID NO: 231417 - DNA, 30 bp, Artificial Sequence
  Synthetic oligonucleotide
tgccacgtcaaaagtgtcgttatgtaatta

SEQ ID NO: 231418 - DNA, 30 bp, Artificial Sequence
  Synthetic oligonucleotide
gcacaacagtgtgatcgcacagtgtaatta

SEQ ID NO: 231419 - DNA, 30 bp, Artificial Sequence
  Synthetic oligonucleotide
gtaggacacacttccgagtcgggttaatta

SEQ ID NO: 231420 - DNA, 30 bp, Artificial Sequence
  Synthetic oligonucleotide
cgttctcattggaacggatttgcaacatta

SEQ ID NO: 231421 - DNA, 30 bp, Artificial Sequence
  Synthetic oligonucleotide
ctcaaggacaccaattgttcaagaacatta

SEQ ID NO: 231422 - DNA, 30 bp, Artificial Sequence
  Synthetic oligonucleotide
caaccaaaggatagaataccccgaacatta

SEQ ID NO: 231423 - DNA, 30 bp, Artificial Sequence
  Synthetic oligonucleotide
tagaggactgcttcctaacttgtaacatta

SEQ ID NO: 231424 - DNA, 30 bp, Artificial Sequence
  Synthetic oligonucleotide
atgccacgtataaaccccctcaacacatta

SEQ ID NO: 231425 - DNA, 30 bp, Artificial Sequence
  Synthetic oligonucleotide
acgaagtaattttactcctttttgacatta

SEQ ID NO: 231426 - DNA, 30 bp, Artificial Sequence
  Synthetic oligonucleotide
ggttcgttggaccaatatgagtcaccatta

SEQ ID NO: 231427 - DNA, 30 bp, Artificial Sequence
  Synthetic oligonucleotide
tccgatgatggaagtaatgcacacccatta

SEQ ID NO: 231428 - DNA, 30 bp, Artificial Sequence
  Synthetic oligonucleotide
ccgatttggggacgatcaacgcagccatta

SEQ ID NO: 231429 - DNA, 30 bp, Artificial Sequence
  Synthetic oligonucleotide
ttcggcccgggttggttaaaatgtccatta

SEQ ID NO: 231430 - DNA, 30 bp, Artificial Sequence
  Synthetic oligonucleotide
agccaatcgtagtggcccgaacttccatta

SEQ ID NO: 231431 - DNA, 30 bp, Artificial Sequence
  Synthetic oligonucleotide
acacgtaatactcggacttacggggcatta

SEQ ID NO: 231432 - DNA, 30 bp, Artificial Sequence
  Synthetic oligonucleotide
gcgtggagacatgttcgaatcctctcatta

SEQ ID NO: 231433 - DNA, 29 bp, Artificial Sequence
  Synthetic oligonucleotide
agaacgaaaggagatcacagctctcatta

SEQ ID NO: 231434 - DNA, 30 bp, Artificial Sequence
  Synthetic oligonucleotide
gtgcttaccaacgtggcaacatcgtcatta

SEQ ID NO: 231435 - DNA, 30 bp, Artificial Sequence
  Synthetic oligonucleotide
tgtcgagaaatgccaatttgtggttcatta

SEQ ID NO: 231436 - DNA, 30 bp, Artificial Sequence
  Synthetic oligonucleotide
ggccgattaacacgccgaattgtttcatta

SEQ ID NO: 231437 - DNA, 30 bp, Artificial Sequence
  Synthetic oligonucleotide
gaatactggtcttgtcagtcagaaagatta

SEQ ID NO: 231438 - DNA, 30 bp, Artificial Sequence
  Synthetic oligonucleotide
atgctcaaaacactacaatcgtgcagatta

SEQ ID NO: 231439 - DNA, 30 bp, Artificial Sequence
  Synthetic oligonucleotide
ggtacctttgtatgtgaattctcgagatta

SEQ ID NO: 231440 - DNA, 30 bp, Artificial Sequence
  Synthetic oligonucleotide
ctgaagggatacggggcaaagggtagatta

SEQ ID NO: 231441 - DNA, 30 bp, Artificial Sequence
  Synthetic oligonucleotide
gtaactgtggtggcagagcgttaacgatta

SEQ ID NO: 231442 - DNA, 30 bp, Artificial Sequence
  Synthetic oligonucleotide
tactgggtgagagagcttaatcgacgatta

SEQ ID NO: 231443 - DNA, 30 bp, Artificial Sequence
  Synthetic oligonucleotide
accatcgcagggacagtcttccagcgatta

SEQ ID NO: 231444 - DNA, 30 bp, Artificial Sequence
  Synthetic oligonucleotide
acaatgtaacgccagggagcgtcgcgatta

SEQ ID NO: 231445 - DNA, 30 bp, Artificial Sequence
  Synthetic oligonucleotide
tcagtccagggctaggccctgcggcgatta

SEQ ID NO: 231446 - DNA, 30 bp, Artificial Sequence
  Synthetic oligonucleotide
aagggtattgaaccgtagagtatgcgatta

SEQ ID NO: 231447 - DNA, 30 bp, Artificial Sequence
  Synthetic oligonucleotide
atatgttaaacaggagaagtccaaggatta

SEQ ID NO: 231448 - DNA, 30 bp, Artificial Sequence
  Synthetic oligonucleotide
ttgcaagtactccatgtaaagacaggatta

SEQ ID NO: 231449 - DNA, 30 bp, Artificial Sequence
  Synthetic oligonucleotide
taagtacgggtcttagcagtgggaggatta

SEQ ID NO: 231450 - DNA, 30 bp, Artificial Sequence
  Synthetic oligonucleotide
gccgaagacaactagcgaggacacggatta

SEQ ID NO: 231451 - DNA, 30 bp, Artificial Sequence
  Synthetic oligonucleotide
tgttgagcgttgcgaacaacctagggatta

SEQ ID NO: 231452 - DNA, 30 bp, Artificial Sequence
  Synthetic oligonucleotide
gaaagatgagtttatacacaatggggatta

SEQ ID NO: 231453 - DNA, 30 bp, Artificial Sequence
  Synthetic oligonucleotide
ctgcaacgactcaatgaaaatatgggatta

SEQ ID NO: 231454 - DNA, 30 bp, Artificial Sequence
  Synthetic oligonucleotide
aacggatcgctcccggcatctatgggatta

SEQ ID NO: 231455 - DNA, 30 bp, Artificial Sequence
  Synthetic oligonucleotide
gcttgcgcaccgaccggggtacgtggatta

SEQ ID NO: 231456 - DNA, 30 bp, Artificial Sequence
  Synthetic oligonucleotide
gcgtcttggccatcggccgatggtggatta

SEQ ID NO: 231457 - DNA, 30 bp, Artificial Sequence
  Synthetic oligonucleotide
cgtctcgtaagcatggctctatgtggatta

SEQ ID NO: 231458 - DNA, 30 bp, Artificial Sequence
  Synthetic oligonucleotide
gtcagatcgatagcctttccgaaatgatta

SEQ ID NO: 231459 - DNA, 30 bp, Artificial Sequence
  Synthetic oligonucleotide
acccggctaccatgtagggcaagatgatta

SEQ ID NO: 231460 - DNA, 30 bp, Artificial Sequence
  Synthetic oligonucleotide
tcaaccgttacgagatgtattttatgatta

SEQ ID NO: 231461 - DNA, 30 bp, Artificial Sequence
  Synthetic oligonucleotide
cctcgccgctgattagcgtctaactgatta

SEQ ID NO: 231462 - DNA, 30 bp, Artificial Sequence
  Synthetic oligonucleotide
tagtacatattgagagaaatcaagtgatta

SEQ ID NO: 231463 - DNA, 30 bp, Artificial Sequence
  Synthetic oligonucleotide
gacgatccagcgaaaaatctcaagtgatta

SEQ ID NO: 231464 - DNA, 30 bp, Artificial Sequence
  Synthetic oligonucleotide
tcacttgtaacactgtatcctacgtgatta

SEQ ID NO: 231465 - DNA, 30 bp, Artificial Sequence
  Synthetic oligonucleotide
tagagaacagattcagctaggccgtgatta

SEQ ID NO: 231466 - DNA, 30 bp, Artificial Sequence
  Synthetic oligonucleotide
cattacagcaagtaccgagggaacatatta

SEQ ID NO: 231467 - DNA, 30 bp, Artificial Sequence
  Synthetic oligonucleotide
actaggtgcaaggttaagcaaaccatatta

SEQ ID NO: 231468 - DNA, 30 bp, Artificial Sequence
  Synthetic oligonucleotide
aagggggtggatattcttgaatagatatta

SEQ ID NO: 231469 - DNA, 30 bp, Artificial Sequence
  Synthetic oligonucleotide
cgcgtgttatgtggttggctggatatatta

SEQ ID NO: 231470 - DNA, 30 bp, Artificial Sequence
  Synthetic oligonucleotide
tggaaaaaatggctacggacccgtatatta

SEQ ID NO: 231471 - DNA, 30 bp, Artificial Sequence
  Synthetic oligonucleotide
aactgacagcgactcatcccattactatta

SEQ ID NO: 231472 - DNA, 30 bp, Artificial Sequence
  Synthetic oligonucleotide
gggacgcgtgatgattccgcaacgctatta

SEQ ID NO: 231473 - DNA, 30 bp, Artificial Sequence
  Synthetic oligonucleotide
atgaccctcgtcgataccgaatggctatta

SEQ ID NO: 231474 - DNA, 30 bp, Artificial Sequence
  Synthetic oligonucleotide
acacaatgggcgcctctgagcgtagtatta

SEQ ID NO: 231475 - DNA, 30 bp, Artificial Sequence
  Synthetic oligonucleotide
gcctcgagacttcgggtcattgtagtatta

SEQ ID NO: 231476 - DNA, 30 bp, Artificial Sequence
  Synthetic oligonucleotide
gtaaaattgacgacatttgaatccgtatta

SEQ ID NO: 231477 - DNA, 30 bp, Artificial Sequence
  Synthetic oligonucleotide
gttggtttggacctagccttccgcgtatta

SEQ ID NO: 231478 - DNA, 30 bp, Artificial Sequence
  Synthetic oligonucleotide
taggaaatggtgcatctagtagaggtatta

SEQ ID NO: 231479 - DNA, 30 bp, Artificial Sequence
  Synthetic oligonucleotide
ccgtttacaccaaggccgtatttggtatta

SEQ ID NO: 231480 - DNA, 30 bp, Artificial Sequence
  Synthetic oligonucleotide
gttcatactagaatcatgaagactgtatta

SEQ ID NO: 231481 - DNA, 30 bp, Artificial Sequence
  Synthetic oligonucleotide
agagccggaatagatgatagttgtgtatta

SEQ ID NO: 231482 - DNA, 30 bp, Artificial Sequence
  Synthetic oligonucleotide
acgcctggcgggggtaaagctgttgtatta

SEQ ID NO: 231483 - DNA, 30 bp, Artificial Sequence
  Synthetic oligonucleotide
atgccattttaagcataagacggcttatta

SEQ ID NO: 231484 - DNA, 30 bp, Artificial Sequence
  Synthetic oligonucleotide
accacccgttagtgttaatcccggttatta

SEQ ID NO: 231485 - DNA, 30 bp, Artificial Sequence
  Synthetic oligonucleotide
cccgagccagtcacaccgtggaatttatta

SEQ ID NO: 231486 - DNA, 30 bp, Artificial Sequence
  Synthetic oligonucleotide
cgttgaagaatgcactccgggtacaactta

SEQ ID NO: 231487 - DNA, 30 bp, Artificial Sequence
  Synthetic oligonucleotide
ggtatcgtaaatgcttgtatggccaactta

SEQ ID NO: 231488 - DNA, 30 bp, Artificial Sequence
  Synthetic oligonucleotide
aacagttcctagtgcttggcatccaactta

SEQ ID NO: 231489 - DNA, 30 bp, Artificial Sequence
  Synthetic oligonucleotide
tgcgttaaaaaagcacactccgtcaactta

SEQ ID NO: 231490 - DNA, 30 bp, Artificial Sequence
  Synthetic oligonucleotide
cggtaatgatgaaaccttgcgaagaactta

SEQ ID NO: 231491 - DNA, 30 bp, Artificial Sequence
  Synthetic oligonucleotide
gaactgcacggctagcggagatagaactta

SEQ ID NO: 231492 - DNA, 30 bp, Artificial Sequence
  Synthetic oligonucleotide
acctacgagttcgtgagtcgttagaactta

SEQ ID NO: 231493 - DNA, 30 bp, Artificial Sequence
  Synthetic oligonucleotide
cagcgcgggcagggctttgtagaacactta

SEQ ID NO: 231494 - DNA, 31 bp, Artificial Sequence
  Synthetic oligonucleotide
gagcgcaaggtcgctaggacaacaccactta

SEQ ID NO: 231495 - DNA, 30 bp, Artificial Sequence
  Synthetic oligonucleotide
tgcgctggcattctgcagcgagaccactta

SEQ ID NO: 231496 - DNA, 30 bp, Artificial Sequence
  Synthetic oligonucleotide
aggtccgcccttatggaccccagccactta

SEQ ID NO: 231497 - DNA, 30 bp, Artificial Sequence
  Synthetic oligonucleotide
gtagctgatcactgggttcatctccactta

SEQ ID NO: 231498 - DNA, 30 bp, Artificial Sequence
  Synthetic oligonucleotide
aaaatgtgaatttgcatacggtagcactta

SEQ ID NO: 231499 - DNA, 30 bp, Artificial Sequence
  Synthetic oligonucleotide
ttaggggcagtagtacccacgtcgcactta

SEQ ID NO: 231500 - DNA, 30 bp, Artificial Sequence
  Synthetic oligonucleotide
tccgagctgatggtgacgtgtttgcactta

SEQ ID NO: 231501 - DNA, 30 bp, Artificial Sequence
  Synthetic oligonucleotide
taataatccgggagttcccgcgctcactta

SEQ ID NO: 231502 - DNA, 30 bp, Artificial Sequence
  Synthetic oligonucleotide
cgagaaggagaaggcacaggtttagactta

SEQ ID NO: 231503 - DNA, 30 bp, Artificial Sequence
  Synthetic oligonucleotide
caaagctcctggtcctttcaaaccgactta

SEQ ID NO: 231504 - DNA, 30 bp, Artificial Sequence
  Synthetic oligonucleotide
gagtatcagggtagtataattgtcgactta

SEQ ID NO: 231505 - DNA, 30 bp, Artificial Sequence
  Synthetic oligonucleotide
gcttttatgtcaaggagtgattcggactta

SEQ ID NO: 231506 - DNA, 30 bp, Artificial Sequence
  Synthetic oligonucleotide
ttcgtacaggtagctgattctgagtactta

SEQ ID NO: 231507 - DNA, 30 bp, Artificial Sequence
  Synthetic oligonucleotide
acccaatgatgaaatagatcacattactta

SEQ ID NO: 231508 - DNA, 30 bp, Artificial Sequence
  Synthetic oligonucleotide
ctgcagtgaataacggtctcggattactta

SEQ ID NO: 231509 - DNA, 30 bp, Artificial Sequence
  Synthetic oligonucleotide
catggggcggggtctgttcagagaacctta

SEQ ID NO: 231510 - DNA, 30 bp, Artificial Sequence
  Synthetic oligonucleotide
aaagagacacatagtgcacccataacctta

SEQ ID NO: 231511 - DNA, 30 bp, Artificial Sequence
  Synthetic oligonucleotide
gcgaaaggaggtcatgggaaatccacctta

SEQ ID NO: 231512 - DNA, 30 bp, Artificial Sequence
  Synthetic oligonucleotide
gtaatacgtctaatattccaaagcacctta

SEQ ID NO: 231513 - DNA, 30 bp, Artificial Sequence
  Synthetic oligonucleotide
ggtgatgcggattggtagataagtacctta

SEQ ID NO: 231514 - DNA, 30 bp, Artificial Sequence
  Synthetic oligonucleotide
tacacgacacagggtaatcttaaaccctta

SEQ ID NO: 231515 - DNA, 30 bp, Artificial Sequence
  Synthetic oligonucleotide
gcacgtcatagtacaaagtcaccagcctta

SEQ ID NO: 231516 - DNA, 30 bp, Artificial Sequence
  Synthetic oligonucleotide
tgtatcgcaggattcctgagagcagcctta

SEQ ID NO: 231517 - DNA, 30 bp, Artificial Sequence
  Synthetic oligonucleotide
caccgacaaacagaaagacccctggcctta

SEQ ID NO: 231518 - DNA, 30 bp, Artificial Sequence
  Synthetic oligonucleotide
accggtctctatgggaacttcgtctcctta

SEQ ID NO: 231519 - DNA, 30 bp, Artificial Sequence
  Synthetic oligonucleotide
gacttgataactaggtctctactgtcctta

SEQ ID NO: 231520 - DNA, 30 bp, Artificial Sequence
  Synthetic oligonucleotide
gatctgaaagtgtcacgaacctacagctta

SEQ ID NO: 231521 - DNA, 30 bp, Artificial Sequence
  Synthetic oligonucleotide
aagggctcgtcactgtctgtaaggagctta

SEQ ID NO: 231522 - DNA, 30 bp, Artificial Sequence
  Synthetic oligonucleotide
cttatacgatataactaactatctagctta

SEQ ID NO: 231523 - DNA, 30 bp, Artificial Sequence
  Synthetic oligonucleotide
ccgcaacaatgtcgacattcctgtagctta

SEQ ID NO: 231524 - DNA, 30 bp, Artificial Sequence
  Synthetic oligonucleotide
gagaaaccatttacatgctgtgttagctta

SEQ ID NO: 231525 - DNA, 30 bp, Artificial Sequence
  Synthetic oligonucleotide
tagtcgaagcgagctaacccctttagctta

SEQ ID NO: 231526 - DNA, 30 bp, Artificial Sequence
  Synthetic oligonucleotide
cggcgagataaaagcactttggaacgctta

SEQ ID NO: 231527 - DNA, 30 bp, Artificial Sequence
  Synthetic oligonucleotide
gttaaacgagcttacgaggaatagcgctta

SEQ ID NO: 231528 - DNA, 30 bp, Artificial Sequence
  Synthetic oligonucleotide
taacatagatgggctttcgggaaaggctta

SEQ ID NO: 231529 - DNA, 30 bp, Artificial Sequence
  Synthetic oligonucleotide
tatttatgaacagtgagtgtgcaaggctta

SEQ ID NO: 231530 - DNA, 30 bp, Artificial Sequence
  Synthetic oligonucleotide
agtgcaggtttaggtgctcgatgaggctta

SEQ ID NO: 231531 - DNA, 30 bp, Artificial Sequence
  Synthetic oligonucleotide
gctacggcaagtgaaagagggtgctgctta

SEQ ID NO: 231532 - DNA, 30 bp, Artificial Sequence
  Synthetic oligonucleotide
aattggactaggattcggtctaaaatctta

SEQ ID NO: 231533 - DNA, 30 bp, Artificial Sequence
  Synthetic oligonucleotide
gaggccctaatgcacttggaatcaatctta

SEQ ID NO: 231534 - DNA, 30 bp, Artificial Sequence
  Synthetic oligonucleotide
acatgattatgtcagcaggattacatctta

SEQ ID NO: 231535 - DNA, 30 bp, Artificial Sequence
  Synthetic oligonucleotide
aacatcagaatcgcctggaactgcatctta

SEQ ID NO: 231536 - DNA, 30 bp, Artificial Sequence
  Synthetic oligonucleotide
caatgaagtgcaaaatgacacctgatctta

SEQ ID NO: 231537 - DNA, 30 bp, Artificial Sequence
  Synthetic oligonucleotide
gtcgagatcatgcaatgagacgtgatctta

SEQ ID NO: 231538 - DNA, 30 bp, Artificial Sequence
  Synthetic oligonucleotide
ggtataggaatatgacagagcgcactctta

SEQ ID NO: 231539 - DNA, 30 bp, Artificial Sequence
  Synthetic oligonucleotide
cctcccaaggggtcaagccgcaaagtctta

SEQ ID NO: 231540 - DNA, 30 bp, Artificial Sequence
  Synthetic oligonucleotide
gtttgcgctcggtatcgcaagaaagtctta

SEQ ID NO: 231541 - DNA, 30 bp, Artificial Sequence
  Synthetic oligonucleotide
attgcagaggatgcgttacactaagtctta

SEQ ID NO: 231542 - DNA, 30 bp, Artificial Sequence
  Synthetic oligonucleotide
tcgcggtatttacctctatcactcgtctta

SEQ ID NO: 231543 - DNA, 30 bp, Artificial Sequence
  Synthetic oligonucleotide
ccagggtcgaacaacagggtcagggtctta

SEQ ID NO: 231544 - DNA, 30 bp, Artificial Sequence
  Synthetic oligonucleotide
gaacgcccgaagagcggtatccatgtctta

SEQ ID NO: 231545 - DNA, 30 bp, Artificial Sequence
  Synthetic oligonucleotide
aagtggcacatgaaactcgtaaaattctta

SEQ ID NO: 231546 - DNA, 30 bp, Artificial Sequence
  Synthetic oligonucleotide
acgaattgtcagcgccccaggatattctta

SEQ ID NO: 231547 - DNA, 30 bp, Artificial Sequence
  Synthetic oligonucleotide
catactgtgtatgtccaggggtggttctta

SEQ ID NO: 231548 - DNA, 30 bp, Artificial Sequence
  Synthetic oligonucleotide
gcagaaaggggctgagtaaaagtgttctta

SEQ ID NO: 231549 - DNA, 30 bp, Artificial Sequence
  Synthetic oligonucleotide
agggtatgtctcgcatgtctgactttctta

SEQ ID NO: 231550 - DNA, 30 bp, Artificial Sequence
  Synthetic oligonucleotide
tgggcaagaggagagcagggttctttctta

SEQ ID NO: 231551 - DNA, 30 bp, Artificial Sequence
  Synthetic oligonucleotide
tgtgattcaacgtctcatgaaaaaaagtta

SEQ ID NO: 231552 - DNA, 30 bp, Artificial Sequence
  Synthetic oligonucleotide
aaaatcaggtgtacatcgggttacaagtta

SEQ ID NO: 231553 - DNA, 30 bp, Artificial Sequence
  Synthetic oligonucleotide
gcactagggagttacagtatgatcaagtta

SEQ ID NO: 231554 - DNA, 30 bp, Artificial Sequence
  Synthetic oligonucleotide
gactcatataaacgaagccatctcaagtta

SEQ ID NO: 231555 - DNA, 30 bp, Artificial Sequence
  Synthetic oligonucleotide
gggttagcaactcacgaacagcggaagtta

SEQ ID NO: 231556 - DNA, 30 bp, Artificial Sequence
  Synthetic oligonucleotide
cgcactaaatgggatgtggtgtggaagtta

SEQ ID NO: 231557 - DNA, 30 bp, Artificial Sequence
  Synthetic oligonucleotide
ttcgttcagcgttggagacaccttaagtta

SEQ ID NO: 231558 - DNA, 30 bp, Artificial Sequence
  Synthetic oligonucleotide
cccattagtaaaattttcggtcttaagtta

SEQ ID NO: 231559 - DNA, 30 bp, Artificial Sequence
  Synthetic oligonucleotide
ccctgcaggctgctcggctagtgacagtta

SEQ ID NO: 231560 - DNA, 30 bp, Artificial Sequence
  Synthetic oligonucleotide
catgaatacatactctcctgcaaccagtta

SEQ ID NO: 231561 - DNA, 30 bp, Artificial Sequence
  Synthetic oligonucleotide
ttgggcgatgctggacttaaaatgcagtta

SEQ ID NO: 231562 - DNA, 30 bp, Artificial Sequence
  Synthetic oligonucleotide
gttgcttagttccggtggtgttatcagtta

SEQ ID NO: 231563 - DNA, 30 bp, Artificial Sequence
  Synthetic oligonucleotide
tgctcgctagatctcatgcttggtcagtta

SEQ ID NO: 231564 - DNA, 30 bp, Artificial Sequence
  Synthetic oligonucleotide
cggcgcggacctttcaggggcattcagtta

SEQ ID NO: 231565 - DNA, 30 bp, Artificial Sequence
  Synthetic oligonucleotide
gtgcgacaagaagcaagatgtattcagtta

SEQ ID NO: 231566 - DNA, 30 bp, Artificial Sequence
  Synthetic oligonucleotide
gcgcactagacagctttaggatcagagtta

SEQ ID NO: 231567 - DNA, 30 bp, Artificial Sequence
  Synthetic oligonucleotide
agaaaatacgtatgatcctatggagagtta

SEQ ID NO: 231568 - DNA, 30 bp, Artificial Sequence
  Synthetic oligonucleotide
ggtcgggattccgaaccgcccatagagtta

SEQ ID NO: 231569 - DNA, 30 bp, Artificial Sequence
  Synthetic oligonucleotide
tcattaggaataccacattgcctagagtta

SEQ ID NO: 231570 - DNA, 30 bp, Artificial Sequence
  Synthetic oligonucleotide
caataccgtttgttgtattccgtctagtta

SEQ ID NO: 231571 - DNA, 30 bp, Artificial Sequence
  Synthetic oligonucleotide
tgccgggcggtccgcgcgcctaagtagtta

SEQ ID NO: 231572 - DNA, 30 bp, Artificial Sequence
  Synthetic oligonucleotide
agcagcaaggctctctgaatggagtagtta

SEQ ID NO: 231573 - DNA, 30 bp, Artificial Sequence
  Synthetic oligonucleotide
gtatggtgaagtataggactaaggtagtta

SEQ ID NO: 231574 - DNA, 30 bp, Artificial Sequence
  Synthetic oligonucleotide
cttgcagtgtctgtcattgaccattagtta

SEQ ID NO: 231575 - DNA, 30 bp, Artificial Sequence
  Synthetic oligonucleotide
cggaaaccatagcaatatctcagttagtta

SEQ ID NO: 231576 - DNA, 30 bp, Artificial Sequence
  Synthetic oligonucleotide
gccgtgaccatcatacgtgaggcaacgtta

SEQ ID NO: 231577 - DNA, 30 bp, Artificial Sequence
  Synthetic oligonucleotide
aatagcacggcgcaagtgagaagaacgtta

SEQ ID NO: 231578 - DNA, 30 bp, Artificial Sequence
  Synthetic oligonucleotide
gggtggaattaatagatgtacggaacgtta

SEQ ID NO: 231579 - DNA, 30 bp, Artificial Sequence
  Synthetic oligonucleotide
aggtagaaccgcggaggatataacacgtta

SEQ ID NO: 231580 - DNA, 30 bp, Artificial Sequence
  Synthetic oligonucleotide
cttaactacaggccaaaaggatacacgtta

SEQ ID NO: 231581 - DNA, 30 bp, Artificial Sequence
  Synthetic oligonucleotide
aaagatggcatcagcagctacagtacgtta

SEQ ID NO: 231582 - DNA, 30 bp, Artificial Sequence
  Synthetic oligonucleotide
agcccacacgcgaccactatctgtacgtta

SEQ ID NO: 231583 - DNA, 30 bp, Artificial Sequence
  Synthetic oligonucleotide
tggatacaaactttatcacccataccgtta

SEQ ID NO: 231584 - DNA, 30 bp, Artificial Sequence
  Synthetic oligonucleotide
ccatttcgataagtccgggtgttaccgtta

SEQ ID NO: 231585 - DNA, 30 bp, Artificial Sequence
  Synthetic oligonucleotide
tcaaaagctgcatttatccagatcccgtta

SEQ ID NO: 231586 - DNA, 30 bp, Artificial Sequence
  Synthetic oligonucleotide
agaatgaaaagagggaactcagtcccgtta

SEQ ID NO: 231587 - DNA, 30 bp, Artificial Sequence
  Synthetic oligonucleotide
gttcggtcatcgtagttgagcgcgccgtta

SEQ ID NO: 231588 - DNA, 30 bp, Artificial Sequence
  Synthetic oligonucleotide
ttaccggctcgtcacatcgcaccagcgtta

SEQ ID NO: 231589 - DNA, 30 bp, Artificial Sequence
  Synthetic oligonucleotide
aagaattaggacgcttcatgtcacgcgtta

SEQ ID NO: 231590 - DNA, 30 bp, Artificial Sequence
  Synthetic oligonucleotide
atgtataaatcaaaaactaacgccgcgtta

SEQ ID NO: 231591 - DNA, 30 bp, Artificial Sequence
  Synthetic oligonucleotide
ggtgagcaagggaccagcctgcaggcgtta

SEQ ID NO: 231592 - DNA, 30 bp, Artificial Sequence
  Synthetic oligonucleotide
gtgcagacttgcacgtgtacaccggcgtta

SEQ ID NO: 231593 - DNA, 30 bp, Artificial Sequence
  Synthetic oligonucleotide
atgatcagggtttctaccgtatcggcgtta

SEQ ID NO: 231594 - DNA, 30 bp, Artificial Sequence
  Synthetic oligonucleotide
aaaaccgcaggctgtcaattcggggcgtta

SEQ ID NO: 231595 - DNA, 30 bp, Artificial Sequence
  Synthetic oligonucleotide
cgtaccgttattatctgagattatgcgtta

SEQ ID NO: 231596 - DNA, 30 bp, Artificial Sequence
  Synthetic oligonucleotide
tttggtccaacccagccaagagtatcgtta

SEQ ID NO: 231597 - DNA, 30 bp, Artificial Sequence
  Synthetic oligonucleotide
ggtggattcccctcgactagtgcctcgtta

SEQ ID NO: 231598 - DNA, 30 bp, Artificial Sequence
  Synthetic oligonucleotide
ttactcgatgcggatgccattaagtcgtta

SEQ ID NO: 231599 - DNA, 30 bp, Artificial Sequence
  Synthetic oligonucleotide
gacggatagtaaagttgccagtagtcgtta

SEQ ID NO: 231600 - DNA, 30 bp, Artificial Sequence
  Synthetic oligonucleotide
agctaaaagttcccgcagactaggtcgtta

SEQ ID NO: 231601 - DNA, 30 bp, Artificial Sequence
  Synthetic oligonucleotide
acaggtggccactaacactaattgtcgtta

SEQ ID NO: 231602 - DNA, 30 bp, Artificial Sequence
  Synthetic oligonucleotide
ccgacgtcgccgtcccagcaagcttcgtta

SEQ ID NO: 231603 - DNA, 30 bp, Artificial Sequence
  Synthetic oligonucleotide
aagtaagttgttggttgacggggttcgtta

SEQ ID NO: 231604 - DNA, 30 bp, Artificial Sequence
  Synthetic oligonucleotide
ctcctagttgagaattaacgggcaaggtta

SEQ ID NO: 231605 - DNA, 30 bp, Artificial Sequence
  Synthetic oligonucleotide
agcgcccagacggtgttatgtgcaaggtta

SEQ ID NO: 231606 - DNA, 30 bp, Artificial Sequence
  Synthetic oligonucleotide
gccaaaccaggaaggccgtctagaaggtta

SEQ ID NO: 231607 - DNA, 30 bp, Artificial Sequence
  Synthetic oligonucleotide
actgtgccagtaaggtattcgtgaaggtta

SEQ ID NO: 231608 - DNA, 30 bp, Artificial Sequence
  Synthetic oligonucleotide
ctgtgcttcttccatgtggacgtaaggtta

SEQ ID NO: 231609 - DNA, 30 bp, Artificial Sequence
  Synthetic oligonucleotide
aatgctaaatgtctcagtattagcaggtta

SEQ ID NO: 231610 - DNA, 30 bp, Artificial Sequence
  Synthetic oligonucleotide
gttaagcgcatcgaaaatgcgtaacggtta

SEQ ID NO: 231611 - DNA, 30 bp, Artificial Sequence
  Synthetic oligonucleotide
ttcacatcctctcggcctcaaacacggtta

SEQ ID NO: 231612 - DNA, 30 bp, Artificial Sequence
  Synthetic oligonucleotide
caaacagaggggtattcgcgcgcacggtta

SEQ ID NO: 231613 - DNA, 30 bp, Artificial Sequence
  Synthetic oligonucleotide
gttggttagaacttcttaaagacccggtta

SEQ ID NO: 231614 - DNA, 31 bp, Artificial Sequence
  Synthetic oligonucleotide
atggcgggctaccagtcaaaaagcccggtta

SEQ ID NO: 231615 - DNA, 30 bp, Artificial Sequence
  Synthetic oligonucleotide
tgacaagggcgtgtcgtgtaacgccggtta

SEQ ID NO: 231616 - DNA, 30 bp, Artificial Sequence
  Synthetic oligonucleotide
accaagaacgtgcaaattgttctccggtta

SEQ ID NO: 231617 - DNA, 30 bp, Artificial Sequence
  Synthetic oligonucleotide
gtacggcgccgtaacacagttaggcggtta

SEQ ID NO: 231618 - DNA, 30 bp, Artificial Sequence
  Synthetic oligonucleotide
ctgcgtaaacgaactgcctgggctcggtta

SEQ ID NO: 231619 - DNA, 30 bp, Artificial Sequence
  Synthetic oligonucleotide
gctcctggagactaattcagcattcggtta

SEQ ID NO: 231620 - DNA, 30 bp, Artificial Sequence
  Synthetic oligonucleotide
tctacattgttcatacgggacagagggtta

SEQ ID NO: 231621 - DNA, 30 bp, Artificial Sequence
  Synthetic oligonucleotide
cgcttgctactttcatggataaacgggtta

SEQ ID NO: 231622 - DNA, 30 bp, Artificial Sequence
  Synthetic oligonucleotide
ataccggggagcacagcatggggcgggtta

SEQ ID NO: 231623 - DNA, 30 bp, Artificial Sequence
  Synthetic oligonucleotide
cgtcgcctaggcatgagtacggaggggtta

SEQ ID NO: 231624 - DNA, 30 bp, Artificial Sequence
  Synthetic oligonucleotide
tcctagggcagtgcgcgttctatggggtta

SEQ ID NO: 231625 - DNA, 30 bp, Artificial Sequence
  Synthetic oligonucleotide
tgctgggggaagagtcagaaactggggtta

SEQ ID NO: 231626 - DNA, 30 bp, Artificial Sequence
  Synthetic oligonucleotide
taagtgctagcagggtgtgaattggggtta

SEQ ID NO: 231627 - DNA, 30 bp, Artificial Sequence
  Synthetic oligonucleotide
tctgcgcatggattcacgtccccatggtta

SEQ ID NO: 231628 - DNA, 30 bp, Artificial Sequence
  Synthetic oligonucleotide
aaagacgtgttattcgagctggggtggtta

SEQ ID NO: 231629 - DNA, 30 bp, Artificial Sequence
  Synthetic oligonucleotide
tgtacgtgatagatcgtcgccagttggtta

SEQ ID NO: 231630 - DNA, 30 bp, Artificial Sequence
  Synthetic oligonucleotide
ggcgtatgagtgtgtgtaatattaatgtta

SEQ ID NO: 231631 - DNA, 30 bp, Artificial Sequence
  Synthetic oligonucleotide
tagggtctaggaagaaaatgtgtcatgtta

SEQ ID NO: 231632 - DNA, 30 bp, Artificial Sequence
  Synthetic oligonucleotide
ttgcgcttgcgacttctagttacgatgtta

SEQ ID NO: 231633 - DNA, 30 bp, Artificial Sequence
  Synthetic oligonucleotide
tggccttcgcgaaagattcgggatatgtta

SEQ ID NO: 231634 - DNA, 30 bp, Artificial Sequence
  Synthetic oligonucleotide
ggaggtgacggagcccaagattctatgtta

SEQ ID NO: 231635 - DNA, 30 bp, Artificial Sequence
  Synthetic oligonucleotide
gtagcgactaatctaccagatgcactgtta

SEQ ID NO: 231636 - DNA, 30 bp, Artificial Sequence
  Synthetic oligonucleotide
acgtcaacaacctctcgtgtggacctgtta

SEQ ID NO: 231637 - DNA, 30 bp, Artificial Sequence
  Synthetic oligonucleotide
tacagaaaggggctaacgccatgcctgtta

SEQ ID NO: 231638 - DNA, 30 bp, Artificial Sequence
  Synthetic oligonucleotide
aacagggcgatgcttacacaggggctgtta

SEQ ID NO: 231639 - DNA, 30 bp, Artificial Sequence
  Synthetic oligonucleotide
ggtccatatttttagaacgtatatctgtta

SEQ ID NO: 231640 - DNA, 30 bp, Artificial Sequence
  Synthetic oligonucleotide
gcgaaccgctccagtaccttgcgtctgtta

SEQ ID NO: 231641 - DNA, 30 bp, Artificial Sequence
  Synthetic oligonucleotide
attgatatccaatatcaagaaaaagtgtta

SEQ ID NO: 231642 - DNA, 30 bp, Artificial Sequence
  Synthetic oligonucleotide
aacgtatagaactccctctgagtagtgtta

SEQ ID NO: 231643 - DNA, 30 bp, Artificial Sequence
  Synthetic oligonucleotide
tggtggaaattaccgcaagattgcgtgtta

SEQ ID NO: 231644 - DNA, 30 bp, Artificial Sequence
  Synthetic oligonucleotide
gaagaccactttaggtatatgagtgtgtta

SEQ ID NO: 231645 - DNA, 30 bp, Artificial Sequence
  Synthetic oligonucleotide
tacgttactagtgaatgaaaagcattgtta

SEQ ID NO: 231646 - DNA, 30 bp, Artificial Sequence
  Synthetic oligonucleotide
ctaatacgtccgtattcgtacggattgtta

SEQ ID NO: 231647 - DNA, 30 bp, Artificial Sequence
  Synthetic oligonucleotide
agaaaaccagcggtcaatagaatattgtta

SEQ ID NO: 231648 - DNA, 30 bp, Artificial Sequence
  Synthetic oligonucleotide
tgcgcgatgggatgtgagtaaatcttgtta

SEQ ID NO: 231649 - DNA, 30 bp, Artificial Sequence
  Synthetic oligonucleotide
tccacacaggttgcgaacctactcttgtta

SEQ ID NO: 231650 - DNA, 30 bp, Artificial Sequence
  Synthetic oligonucleotide
tggtggttacaccgtttgtgtaatttgtta

SEQ ID NO: 231651 - DNA, 30 bp, Artificial Sequence
  Synthetic oligonucleotide
gaccctgttaagatttggctaatcaattta

SEQ ID NO: 231652 - DNA, 30 bp, Artificial Sequence
  Synthetic oligonucleotide
gcaaaggtggccgccctcgaccggaattta

SEQ ID NO: 231653 - DNA, 30 bp, Artificial Sequence
  Synthetic oligonucleotide
cggcgttccaattagggaattgtgaattta

SEQ ID NO: 231654 - DNA, 30 bp, Artificial Sequence
  Synthetic oligonucleotide
gacgacctagtaagtatcattcgacattta

SEQ ID NO: 231655 - DNA, 30 bp, Artificial Sequence
  Synthetic oligonucleotide
tggcacacacgcgctagcccttgacattta

SEQ ID NO: 231656 - DNA, 30 bp, Artificial Sequence
  Synthetic oligonucleotide
ggctcgtctaaggtgaatcttccgcattta

SEQ ID NO: 231657 - DNA, 30 bp, Artificial Sequence
  Synthetic oligonucleotide
ttcactggaacgctgccctcgaggcattta

SEQ ID NO: 231658 - DNA, 30 bp, Artificial Sequence
  Synthetic oligonucleotide
aagctattgagggtacgtgagctgcattta

SEQ ID NO: 231659 - DNA, 30 bp, Artificial Sequence
  Synthetic oligonucleotide
ggtgaatcgatgccctttcgtcaagattta

SEQ ID NO: 231660 - DNA, 30 bp, Artificial Sequence
  Synthetic oligonucleotide
gtaaacagcaggttttggcgcgaagattta

SEQ ID NO: 231661 - DNA, 30 bp, Artificial Sequence
  Synthetic oligonucleotide
gtatcgtatagctcgcgttttgaggattta

SEQ ID NO: 231662 - DNA, 30 bp, Artificial Sequence
  Synthetic oligonucleotide
tgagggttcagtagaaccgctagggattta

SEQ ID NO: 231663 - DNA, 30 bp, Artificial Sequence
  Synthetic oligonucleotide
ctgactcatagagaaaaacttgtggattta

SEQ ID NO: 231664 - DNA, 30 bp, Artificial Sequence
  Synthetic oligonucleotide
gcacaaatgaatgcgacaattgaatattta

SEQ ID NO: 231665 - DNA, 30 bp, Artificial Sequence
  Synthetic oligonucleotide
ccgtcagagatgattgtagtaacatattta

SEQ ID NO: 231666 - DNA, 30 bp, Artificial Sequence
  Synthetic oligonucleotide
tgccgcggggctcgggcgcaaagatattta

SEQ ID NO: 231667 - DNA, 30 bp, Artificial Sequence
  Synthetic oligonucleotide
caaaagttgaatattactcgtaagtattta

SEQ ID NO: 231668 - DNA, 30 bp, Artificial Sequence
  Synthetic oligonucleotide
aggtgtaaattcctagatctacggtattta

SEQ ID NO: 231669 - DNA, 30 bp, Artificial Sequence
  Synthetic oligonucleotide
aacggggatcctgttgcacgccgttattta

SEQ ID NO: 231670 - DNA, 30 bp, Artificial Sequence
  Synthetic oligonucleotide
gtttgctaggtggagatagggtgcacttta

SEQ ID NO: 231671 - DNA, 30 bp, Artificial Sequence
  Synthetic oligonucleotide
tacaggccgggatgcgtgaaggatacttta

SEQ ID NO: 231672 - DNA, 30 bp, Artificial Sequence
  Synthetic oligonucleotide
ctagtagagtgcgatctcgctagcccttta

SEQ ID NO: 231673 - DNA, 30 bp, Artificial Sequence
  Synthetic oligonucleotide
tagcatacaccattggagcagacagcttta

SEQ ID NO: 231674 - DNA, 30 bp, Artificial Sequence
  Synthetic oligonucleotide
ccaatacattcgtcagttgagttagcttta

SEQ ID NO: 231675 - DNA, 30 bp, Artificial Sequence
  Synthetic oligonucleotide
agaattcatcgagcccgctacatcgcttta

SEQ ID NO: 231676 - DNA, 30 bp, Artificial Sequence
  Synthetic oligonucleotide
cggaacgtttacgtcaataagggggcttta

SEQ ID NO: 231677 - DNA, 30 bp, Artificial Sequence
  Synthetic oligonucleotide
cgatggcccaggcaattttgagaatcttta

SEQ ID NO: 231678 - DNA, 30 bp, Artificial Sequence
  Synthetic oligonucleotide
gcgtctatgtaaatctataaaaagtcttta

SEQ ID NO: 231679 - DNA, 30 bp, Artificial Sequence
  Synthetic oligonucleotide
gtatgtgcgggagacctatttaagtcttta

SEQ ID NO: 231680 - DNA, 30 bp, Artificial Sequence
  Synthetic oligonucleotide
gtgcaatgcactcacatcatggcgtcttta

SEQ ID NO: 231681 - DNA, 30 bp, Artificial Sequence
  Synthetic oligonucleotide
cttaacaaggttatgggaaacctgtcttta

SEQ ID NO: 231682 - DNA, 31 bp, Artificial Sequence
  Synthetic oligonucleotide
gtgaccggcgtcttccaatgtgacaagttta

SEQ ID NO: 231683 - DNA, 30 bp, Artificial Sequence
  Synthetic oligonucleotide
atgcaaaaatgacaagactagagaagttta

SEQ ID NO: 231684 - DNA, 30 bp, Artificial Sequence
  Synthetic oligonucleotide
gggcgtagttgatttggggactgaagttta

SEQ ID NO: 231685 - DNA, 30 bp, Artificial Sequence
  Synthetic oligonucleotide
ttggaacagtgatgcacggcccacagttta

SEQ ID NO: 231686 - DNA, 30 bp, Artificial Sequence
  Synthetic oligonucleotide
cctggcgtcatctaggacgagcatagttta

SEQ ID NO: 231687 - DNA, 30 bp, Artificial Sequence
  Synthetic oligonucleotide
gacttggacgacagagctcgcgttagttta

SEQ ID NO: 231688 - DNA, 30 bp, Artificial Sequence
  Synthetic oligonucleotide
atatcaggactgtgacccggatgccgttta

SEQ ID NO: 231689 - DNA, 30 bp, Artificial Sequence
  Synthetic oligonucleotide
accgcgatttggcaatctgcgtgtcgttta

SEQ ID NO: 231690 - DNA, 30 bp, Artificial Sequence
  Synthetic oligonucleotide
gaaagggttggctacatattctgcggttta

SEQ ID NO: 231691 - DNA, 30 bp, Artificial Sequence
  Synthetic oligonucleotide
atagttcgtatcggggactgacagggttta

SEQ ID NO: 231692 - DNA, 30 bp, Artificial Sequence
  Synthetic oligonucleotide
ctgtcgtatggtgacggtcgccggggttta

SEQ ID NO: 231693 - DNA, 30 bp, Artificial Sequence
  Synthetic oligonucleotide
gcggacatagtcttacgcgagaaatgttta

SEQ ID NO: 231694 - DNA, 30 bp, Artificial Sequence
  Synthetic oligonucleotide
ttaggtgaggctccaggagagtgctgttta

SEQ ID NO: 231695 - DNA, 31 bp, Artificial Sequence
  Synthetic oligonucleotide
cgacggatgagtttacggcgggccgtgttta

SEQ ID NO: 231696 - DNA, 30 bp, Artificial Sequence
  Synthetic oligonucleotide
cgatcgtttctttccctcaatcggtgttta

SEQ ID NO: 231697 - DNA, 30 bp, Artificial Sequence
  Synthetic oligonucleotide
gccttcggcgggaggattatagattgttta

SEQ ID NO: 231698 - DNA, 30 bp, Artificial Sequence
  Synthetic oligonucleotide
cggatacgtccggcggaatctttaatttta

SEQ ID NO: 231699 - DNA, 30 bp, Artificial Sequence
  Synthetic oligonucleotide
acacgattcagtggctagatcaccatttta

SEQ ID NO: 231700 - DNA, 30 bp, Artificial Sequence
  Synthetic oligonucleotide
catcggtagctgtggctcattttcatttta

SEQ ID NO: 231701 - DNA, 30 bp, Artificial Sequence
  Synthetic oligonucleotide
gttaggacagtgagcaggaagatcctttta

SEQ ID NO: 231702 - DNA, 30 bp, Artificial Sequence
  Synthetic oligonucleotide
gcatcaggagaccttgcagaaaacgtttta

SEQ ID NO: 231703 - DNA, 30 bp, Artificial Sequence
  Synthetic oligonucleotide
gaattagtgcaaaggcatcctaacgtttta

SEQ ID NO: 231704 - DNA, 30 bp, Artificial Sequence
  Synthetic oligonucleotide
aaggtgacccatcggacattacacgtttta

SEQ ID NO: 231705 - DNA, 30 bp, Artificial Sequence
  Synthetic oligonucleotide
cactggctcaataaacaggaccgcgtttta

SEQ ID NO: 231706 - DNA, 30 bp, Artificial Sequence
  Synthetic oligonucleotide
gtcaacgacagtgaagaaagacgggtttta

SEQ ID NO: 231707 - DNA, 30 bp, Artificial Sequence
  Synthetic oligonucleotide
tcgactgtagacaccggtacaatggtttta

SEQ ID NO: 231708 - DNA, 30 bp, Artificial Sequence
  Synthetic oligonucleotide
cgggggggggcacagattttacgtgtttta

SEQ ID NO: 231709 - DNA, 30 bp, Artificial Sequence
  Synthetic oligonucleotide
accagctataaacgatctagcctattttta

SEQ ID NO: 231710 - DNA, 30 bp, Artificial Sequence
  Synthetic oligonucleotide
ggagccatgattatgccgggaaagttttta

SEQ ID NO: 231711 - DNA, 30 bp, Artificial Sequence
  Synthetic oligonucleotide
ctcgacgggatagctgcaaagtagttttta

SEQ ID NO: 231712 - DNA, 30 bp, Artificial Sequence
  Synthetic oligonucleotide
tcggtagcgatttaggagaaccggttttta

SEQ ID NO: 231713 - DNA, 30 bp, Artificial Sequence
  Synthetic oligonucleotide
cagctcaataatctccgtttgctgttttta

SEQ ID NO: 231714 - DNA, 30 bp, Artificial Sequence
  Synthetic oligonucleotide
taaggtggtgccgcccactgcgatttttta

SEQ ID NO: 231715 - DNA, 31 bp, Artificial Sequence
  Synthetic oligonucleotide
gtgagccaatagctagcccatccctttttta

SEQ ID NO: 231716 - DNA, 30 bp, Artificial Sequence
  Synthetic oligonucleotide
ggatcagggccgtagtacctctgtttttta

SEQ ID NO: 231717 - DNA, 30 bp, Artificial Sequence
  Synthetic oligonucleotide
gctggggccaagcatagaccataaaaaaac

SEQ ID NO: 231718 - DNA, 30 bp, Artificial Sequence
  Synthetic oligonucleotide
gccgtaatccaattttaagacggcaaaaac

SEQ ID NO: 231719 - DNA, 30 bp, Artificial Sequence
  Synthetic oligonucleotide
tacagtcaggtaatagggcaatgtaaaaac

SEQ ID NO: 231720 - DNA, 30 bp, Artificial Sequence
  Synthetic oligonucleotide
caaaaacttatgtgcatggaataacaaaac

SEQ ID NO: 231721 - DNA, 30 bp, Artificial Sequence
  Synthetic oligonucleotide
tcatcatggtcaaaaaacctcagacaaaac

SEQ ID NO: 231722 - DNA, 30 bp, Artificial Sequence
  Synthetic oligonucleotide
gcggctctactagagagattccatcaaaac

SEQ ID NO: 231723 - DNA, 30 bp, Artificial Sequence
  Synthetic oligonucleotide
cgacccaccatccgtgattgggtagaaaac

SEQ ID NO: 231724 - DNA, 30 bp, Artificial Sequence
  Synthetic oligonucleotide
gcctgtggaccacccagttggacggaaaac

SEQ ID NO: 231725 - DNA, 30 bp, Artificial Sequence
  Synthetic oligonucleotide
gagcggaagcggccctcatggtgggaaaac

SEQ ID NO: 231726 - DNA, 30 bp, Artificial Sequence
  Synthetic oligonucleotide
tgtggcgggcgcgagtgctaagtggaaaac

SEQ ID NO: 231727 - DNA, 30 bp, Artificial Sequence
  Synthetic oligonucleotide
ctatagaaagacatggcacctgctgaaaac

SEQ ID NO: 231728 - DNA, 30 bp, Artificial Sequence
  Synthetic oligonucleotide
ttagatcccaacgtgacgattgttgaaaac

SEQ ID NO: 231729 - DNA, 30 bp, Artificial Sequence
  Synthetic oligonucleotide
cgtggttcacgagtagtacggtagtaaaac

SEQ ID NO: 231730 - DNA, 30 bp, Artificial Sequence
  Synthetic oligonucleotide
gggaaattaaagggtgaggcgggaacaaac

SEQ ID NO: 231731 - DNA, 31 bp, Artificial Sequence
  Synthetic oligonucleotide
gtgtgcacgttccgctgttagtcacacaaac

SEQ ID NO: 231732 - DNA, 30 bp, Artificial Sequence
  Synthetic oligonucleotide
tcgattcaccagccagcacgatgcacaaac

SEQ ID NO: 231733 - DNA, 30 bp, Artificial Sequence
  Synthetic oligonucleotide
ttgaattacgaaccgagcagggagacaaac

SEQ ID NO: 231734 - DNA, 30 bp, Artificial Sequence
  Synthetic oligonucleotide
agggaaaccccgagcgctatcgggacaaac

SEQ ID NO: 231735 - DNA, 30 bp, Artificial Sequence
  Synthetic oligonucleotide
gagggcatctatatcgactggaatacaaac

SEQ ID NO: 231736 - DNA, 30 bp, Artificial Sequence
  Synthetic oligonucleotide
acataagaactgcgctctaagattacaaac

SEQ ID NO: 231737 - DNA, 30 bp, Artificial Sequence
  Synthetic oligonucleotide
aaaagtatcacatactgatggcttacaaac

SEQ ID NO: 231738 - DNA, 30 bp, Artificial Sequence
  Synthetic oligonucleotide
cgcaatggctgcccggtagcgtcaccaaac

SEQ ID NO: 231739 - DNA, 30 bp, Artificial Sequence
  Synthetic oligonucleotide
cgattattgaactactttaggcgaccaaac

SEQ ID NO: 231740 - DNA, 30 bp, Artificial Sequence
  Synthetic oligonucleotide
ctgttgtgcgacaaacatcttcgcccaaac

SEQ ID NO: 231741 - DNA, 30 bp, Artificial Sequence
  Synthetic oligonucleotide
ctacgtttcgcgaactcacgctgtccaaac

SEQ ID NO: 231742 - DNA, 30 bp, Artificial Sequence
  Synthetic oligonucleotide
gtgagcggttgaactttgtacctagcaaac

SEQ ID NO: 231743 - DNA, 30 bp, Artificial Sequence
  Synthetic oligonucleotide
gtagtacccggagcaggacgatgcgcaaac

SEQ ID NO: 231744 - DNA, 30 bp, Artificial Sequence
  Synthetic oligonucleotide
acgcatttttcatccggctaagaatcaaac

SEQ ID NO: 231745 - DNA, 30 bp, Artificial Sequence
  Synthetic oligonucleotide
tatccatggctcaaggcggatgaatcaaac

SEQ ID NO: 231746 - DNA, 30 bp, Artificial Sequence
  Synthetic oligonucleotide
ggaatcgacgggttcgaccggctatcaaac

SEQ ID NO: 231747 - DNA, 30 bp, Artificial Sequence
  Synthetic oligonucleotide
gcagaaggatgtccccgacattcctcaaac

SEQ ID NO: 231748 - DNA, 30 bp, Artificial Sequence
  Synthetic oligonucleotide
tgggtgcgagtaatctaaatctcgtcaaac

SEQ ID NO: 231749 - DNA, 30 bp, Artificial Sequence
  Synthetic oligonucleotide
ttacacgttatcaacggatgaatgtcaaac

SEQ ID NO: 231750 - DNA, 30 bp, Artificial Sequence
  Synthetic oligonucleotide
gccaatgtgtggcatatgccgcaaagaaac

SEQ ID NO: 231751 - DNA, 30 bp, Artificial Sequence
  Synthetic oligonucleotide
tgaacttcgaactgtaaagtctacagaaac

SEQ ID NO: 231752 - DNA, 30 bp, Artificial Sequence
  Synthetic oligonucleotide
ttaacgaattgagcctcagcgtacagaaac

SEQ ID NO: 231753 - DNA, 30 bp, Artificial Sequence
  Synthetic oligonucleotide
aggggagtgggctgtattgatgccagaaac

SEQ ID NO: 231754 - DNA, 30 bp, Artificial Sequence
  Synthetic oligonucleotide
ggaacgtgaagcatgacagttaagagaaac

SEQ ID NO: 231755 - DNA, 30 bp, Artificial Sequence
  Synthetic oligonucleotide
ctgtgtccaacttagctgagacagcgaaac

SEQ ID NO: 231756 - DNA, 30 bp, Artificial Sequence
  Synthetic oligonucleotide
tccgtatctgcttccaacagtccgcgaaac

SEQ ID NO: 231757 - DNA, 30 bp, Artificial Sequence
  Synthetic oligonucleotide
cttggatacatacctataagggcgcgaaac

SEQ ID NO: 231758 - DNA, 30 bp, Artificial Sequence
  Synthetic oligonucleotide
ccaggtgtgagtacaaccatgtaaggaaac

SEQ ID NO: 231759 - DNA, 30 bp, Artificial Sequence
  Synthetic oligonucleotide
gaaagaggagtgggaaacgtctagggaaac

SEQ ID NO: 231760 - DNA, 30 bp, Artificial Sequence
  Synthetic oligonucleotide
gagctgtctaggtattggtgaaggggaaac

SEQ ID NO: 231761 - DNA, 30 bp, Artificial Sequence
  Synthetic oligonucleotide
agtacttgtagttcggcatattgtggaaac

SEQ ID NO: 231762 - DNA, 30 bp, Artificial Sequence
  Synthetic oligonucleotide
gtactaatggtaccgtcctttaaatgaaac

SEQ ID NO: 231763 - DNA, 30 bp, Artificial Sequence
  Synthetic oligonucleotide
gctcgttcgccaattcggtgggaatgaaac

SEQ ID NO: 231764 - DNA, 30 bp, Artificial Sequence
  Synthetic oligonucleotide
ggaatccaaggtagtgcgcaataatgaaac

SEQ ID NO: 231765 - DNA, 30 bp, Artificial Sequence
  Synthetic oligonucleotide
gcagctcgcggtcgaggggatgagtgaaac

SEQ ID NO: 231766 - DNA, 30 bp, Artificial Sequence
  Synthetic oligonucleotide
gtcaagttaaatccatgctggcggtgaaac

SEQ ID NO: 231767 - DNA, 30 bp, Artificial Sequence
  Synthetic oligonucleotide
ccctataaaggtgggtgaacatattgaaac

SEQ ID NO: 231768 - DNA, 30 bp, Artificial Sequence
  Synthetic oligonucleotide
acgttgaggagaatcattagttaaataaac

SEQ ID NO: 231769 - DNA, 30 bp, Artificial Sequence
  Synthetic oligonucleotide
ttcagagggaacgcccgggcggtaataaac

SEQ ID NO: 231770 - DNA, 30 bp, Artificial Sequence
  Synthetic oligonucleotide
atcatggcatttcggatggtgcacataaac

SEQ ID NO: 231771 - DNA, 30 bp, Artificial Sequence
  Synthetic oligonucleotide
aaacctgcataacactcagttattataaac

SEQ ID NO: 231772 - DNA, 30 bp, Artificial Sequence
  Synthetic oligonucleotide
tggtaggaaaggacttgaggccttataaac

SEQ ID NO: 231773 - DNA, 30 bp, Artificial Sequence
  Synthetic oligonucleotide
acgcttatagtccttgcagccgaactaaac

SEQ ID NO: 231774 - DNA, 30 bp, Artificial Sequence
  Synthetic oligonucleotide
aaactggccgaatgattcagtcgactaaac

SEQ ID NO: 231775 - DNA, 30 bp, Artificial Sequence
  Synthetic oligonucleotide
caacgggctagggactcttaatgactaaac

SEQ ID NO: 231776 - DNA, 30 bp, Artificial Sequence
  Synthetic oligonucleotide
cagcgcaacaacattgcgccttgactaaac

SEQ ID NO: 231777 - DNA, 30 bp, Artificial Sequence
  Synthetic oligonucleotide
gtcattaaatgtggtcggagcaccctaaac

SEQ ID NO: 231778 - DNA, 30 bp, Artificial Sequence
  Synthetic oligonucleotide
aagtgaacgctcagcattttaccgctaaac

SEQ ID NO: 231779 - DNA, 30 bp, Artificial Sequence
  Synthetic oligonucleotide
cctagacgaagtcgcgttaggactctaaac

SEQ ID NO: 231780 - DNA, 30 bp, Artificial Sequence
  Synthetic oligonucleotide
gccgataatgtttggcaccgtcaagtaaac

SEQ ID NO: 231781 - DNA, 30 bp, Artificial Sequence
  Synthetic oligonucleotide
gaatcataacgcctggacaagcgagtaaac

SEQ ID NO: 231782 - DNA, 30 bp, Artificial Sequence
  Synthetic oligonucleotide
tggatagtagatgttaaaatgtcggtaaac

SEQ ID NO: 231783 - DNA, 30 bp, Artificial Sequence
  Synthetic oligonucleotide
aacccagacgatggtccactttcggtaaac

SEQ ID NO: 231784 - DNA, 30 bp, Artificial Sequence
  Synthetic oligonucleotide
caacttaaagtcttagcaagtttggtaaac

SEQ ID NO: 231785 - DNA, 30 bp, Artificial Sequence
  Synthetic oligonucleotide
agtatcacgattgaatccagatatgtaaac

SEQ ID NO: 231786 - DNA, 30 bp, Artificial Sequence
  Synthetic oligonucleotide
ctattatttggagctgaaggaattgtaaac

SEQ ID NO: 231787 - DNA, 30 bp, Artificial Sequence
  Synthetic oligonucleotide
tagcgtacacccatgcgagaagtattaaac

SEQ ID NO: 231788 - DNA, 30 bp, Artificial Sequence
  Synthetic oligonucleotide
cgagattgttcgtgttttggaaacttaaac

SEQ ID NO: 231789 - DNA, 30 bp, Artificial Sequence
  Synthetic oligonucleotide
agattcatgtaagcgatattgaccttaaac

SEQ ID NO: 231790 - DNA, 30 bp, Artificial Sequence
  Synthetic oligonucleotide
acgtagtaaaagagagtatatagcttaaac

SEQ ID NO: 231791 - DNA, 30 bp, Artificial Sequence
  Synthetic oligonucleotide
gtagcgaggttgtatttggaatcgttaaac

SEQ ID NO: 231792 - DNA, 31 bp, Artificial Sequence
  Synthetic oligonucleotide
tgtcgggcagctttggaagaatggtttaaac

SEQ ID NO: 231793 - DNA, 30 bp, Artificial Sequence
  Synthetic oligonucleotide
gactttgccgattgagaatacccaaacaac

SEQ ID NO: 231794 - DNA, 30 bp, Artificial Sequence
  Synthetic oligonucleotide
agtccgtccacgttagctgccttaaacaac

SEQ ID NO: 231795 - DNA, 30 bp, Artificial Sequence
  Synthetic oligonucleotide
aaagcaattgggaggcaactgggacacaac

SEQ ID NO: 231796 - DNA, 30 bp, Artificial Sequence
  Synthetic oligonucleotide
ttctagcaatgttgcagaaatatacacaac

SEQ ID NO: 231797 - DNA, 30 bp, Artificial Sequence
  Synthetic oligonucleotide
aaatgacatacgatgttggaaggtcacaac

SEQ ID NO: 231798 - DNA, 30 bp, Artificial Sequence
  Synthetic oligonucleotide
accgcgcatgactctgactcgggagacaac

SEQ ID NO: 231799 - DNA, 30 bp, Artificial Sequence
  Synthetic oligonucleotide
gcgcacggggtggcgtagtcccacgacaac

SEQ ID NO: 231800 - DNA, 30 bp, Artificial Sequence
  Synthetic oligonucleotide
gaccctggattctaagctcgccatgacaac

SEQ ID NO: 231801 - DNA, 30 bp, Artificial Sequence
  Synthetic oligonucleotide
tgactagtaggtttccgagtaacatacaac

SEQ ID NO: 231802 - DNA, 30 bp, Artificial Sequence
  Synthetic oligonucleotide
aatgcggagccccgggttgtgacatacaac

SEQ ID NO: 231803 - DNA, 30 bp, Artificial Sequence
  Synthetic oligonucleotide
ctaagtaagggctagttgtgtgcatacaac

SEQ ID NO: 231804 - DNA, 30 bp, Artificial Sequence
  Synthetic oligonucleotide
ggccggatgtgaaattaaggcggatacaac

SEQ ID NO: 231805 - DNA, 30 bp, Artificial Sequence
  Synthetic oligonucleotide
tgcatcggccttttccatcgcaagtacaac

SEQ ID NO: 231806 - DNA, 30 bp, Artificial Sequence
  Synthetic oligonucleotide
tctagcatggacgcaccaggatggtacaac

SEQ ID NO: 231807 - DNA, 30 bp, Artificial Sequence
  Synthetic oligonucleotide
gtgacccgttgggtgggagcggtttacaac

SEQ ID NO: 231808 - DNA, 30 bp, Artificial Sequence
  Synthetic oligonucleotide
tgcatcatcaaggagcgccagagaaccaac

SEQ ID NO: 231809 - DNA, 30 bp, Artificial Sequence
  Synthetic oligonucleotide
agagggtagcgcggtagtcgtttaaccaac

SEQ ID NO: 231810 - DNA, 30 bp, Artificial Sequence
  Synthetic oligonucleotide
gttcgagttgaaacaatttcctggaccaac

SEQ ID NO: 231811 - DNA, 30 bp, Artificial Sequence
  Synthetic oligonucleotide
tcagggtcaaggcgcaagattgttaccaac

SEQ ID NO: 231812 - DNA, 30 bp, Artificial Sequence
  Synthetic oligonucleotide
cattgcacaaaggaaattaatcaacccaac

SEQ ID NO: 231813 - DNA, 30 bp, Artificial Sequence
  Synthetic oligonucleotide
gtcccctcaatacgtagacaacaccccaac

SEQ ID NO: 231814 - DNA, 30 bp, Artificial Sequence
  Synthetic oligonucleotide
ctcaagttggacacatcgtcgctgcccaac

SEQ ID NO: 231815 - DNA, 30 bp, Artificial Sequence
  Synthetic oligonucleotide
gcggtatacaatcatcaatcacaagccaac

SEQ ID NO: 231816 - DNA, 30 bp, Artificial Sequence
  Synthetic oligonucleotide
gccatcgtgaatgacacaagcatcgccaac

SEQ ID NO: 231817 - DNA, 30 bp, Artificial Sequence
  Synthetic oligonucleotide
tagaaactggcttacacgcgcgtcgccaac

SEQ ID NO: 231818 - DNA, 30 bp, Artificial Sequence
  Synthetic oligonucleotide
ggggggacagaatgtaagtttttggccaac

SEQ ID NO: 231819 - DNA, 30 bp, Artificial Sequence
  Synthetic oligonucleotide
acagtatatacaaaccgcgacatctccaac

SEQ ID NO: 231820 - DNA, 30 bp, Artificial Sequence
  Synthetic oligonucleotide
tgaacagtgtatgccatcgcgccgtccaac

SEQ ID NO: 231821 - DNA, 30 bp, Artificial Sequence
  Synthetic oligonucleotide
gtctaagcctgctcagacgagcgaagcaac

SEQ ID NO: 231822 - DNA, 30 bp, Artificial Sequence
  Synthetic oligonucleotide
ccggccaactccgcgacgaaactaagcaac

SEQ ID NO: 231823 - DNA, 30 bp, Artificial Sequence
  Synthetic oligonucleotide
gtatattcacttggtaaaagtgacagcaac

SEQ ID NO: 231824 - DNA, 30 bp, Artificial Sequence
  Synthetic oligonucleotide
gctgttccgcccagattaaaaaagagcaac

SEQ ID NO: 231825 - DNA, 30 bp, Artificial Sequence
  Synthetic oligonucleotide
agaaacttcgtaatgcaggtcgggagcaac

SEQ ID NO: 231826 - DNA, 30 bp, Artificial Sequence
  Synthetic oligonucleotide
ccctgcgtgaacatgggaagaggtagcaac

SEQ ID NO: 231827 - DNA, 30 bp, Artificial Sequence
  Synthetic oligonucleotide
atcctggttacatcgtaactctgtagcaac

SEQ ID NO: 231828 - DNA, 30 bp, Artificial Sequence
  Synthetic oligonucleotide
gcagatcagtcgcgccaacaaccccgcaac

SEQ ID NO: 231829 - DNA, 30 bp, Artificial Sequence
  Synthetic oligonucleotide
ggtctcacatggaaaaacgatctgcgcaac

SEQ ID NO: 231830 - DNA, 30 bp, Artificial Sequence
  Synthetic oligonucleotide
ttgcgtaagggtttctgaagttccggcaac

SEQ ID NO: 231831 - DNA, 30 bp, Artificial Sequence
  Synthetic oligonucleotide
taccgtgactttgtctagcaatgcggcaac

SEQ ID NO: 231832 - DNA, 30 bp, Artificial Sequence
  Synthetic oligonucleotide
tctacacgggggtgggaaagcgagggcaac

SEQ ID NO: 231833 - DNA, 30 bp, Artificial Sequence
  Synthetic oligonucleotide
tcgtttcgcaagggaatagatcggggcaac

SEQ ID NO: 231834 - DNA, 30 bp, Artificial Sequence
  Synthetic oligonucleotide
ttagactaggaactggggacggaatgcaac

SEQ ID NO: 231835 - DNA, 30 bp, Artificial Sequence
  Synthetic oligonucleotide
ggcagccgtgtactaagattcgtatgcaac

SEQ ID NO: 231836 - DNA, 30 bp, Artificial Sequence
  Synthetic oligonucleotide
tgacatcaagaggaattttttaagtgcaac

SEQ ID NO: 231837 - DNA, 30 bp, Artificial Sequence
  Synthetic oligonucleotide
acgggctggcgccgatcgcataattgcaac

SEQ ID NO: 231838 - DNA, 30 bp, Artificial Sequence
  Synthetic oligonucleotide
taatggttgcgataacaatatacaatcaac

SEQ ID NO: 231839 - DNA, 30 bp, Artificial Sequence
  Synthetic oligonucleotide
agagatacgtcaggtacgatctccatcaac

SEQ ID NO: 231840 - DNA, 30 bp, Artificial Sequence
  Synthetic oligonucleotide
atgtgaagataaattgaatgtaagatcaac

SEQ ID NO: 231841 - DNA, 30 bp, Artificial Sequence
  Synthetic oligonucleotide
atggtaatagatgtgacacctatgatcaac

SEQ ID NO: 231842 - DNA, 30 bp, Artificial Sequence
  Synthetic oligonucleotide
gttataaaaaaaaatactatcgatatcaac

SEQ ID NO: 231843 - DNA, 30 bp, Artificial Sequence
  Synthetic oligonucleotide
ggctagggtagccaaaccctacttatcaac

SEQ ID NO: 231844 - DNA, 30 bp, Artificial Sequence
  Synthetic oligonucleotide
aacgctgccaacaatgtatgcgttatcaac

SEQ ID NO: 231845 - DNA, 30 bp, Artificial Sequence
  Synthetic oligonucleotide
aacgtacttaatctacccgacgcgctcaac

SEQ ID NO: 231846 - DNA, 30 bp, Artificial Sequence
  Synthetic oligonucleotide
aggggcctgctataacttttcagagtcaac

SEQ ID NO: 231847 - DNA, 30 bp, Artificial Sequence
  Synthetic oligonucleotide
tttcctagacctgtaactacgagagtcaac

SEQ ID NO: 231848 - DNA, 30 bp, Artificial Sequence
  Synthetic oligonucleotide
gtgataaaatgaccgttgtactgagtcaac

SEQ ID NO: 231849 - DNA, 30 bp, Artificial Sequence
  Synthetic oligonucleotide
tattccggtggtagttatgttctcgtcaac

SEQ ID NO: 231850 - DNA, 30 bp, Artificial Sequence
  Synthetic oligonucleotide
acaaacgaattgatcgagcagggtgtcaac

SEQ ID NO: 231851 - DNA, 30 bp, Artificial Sequence
  Synthetic oligonucleotide
gaggatcaacagggattgaacccattcaac

SEQ ID NO: 231852 - DNA, 30 bp, Artificial Sequence
  Synthetic oligonucleotide
acgttgatccaagtgcgcgagttattcaac

SEQ ID NO: 231853 - DNA, 30 bp, Artificial Sequence
  Synthetic oligonucleotide
cattaggcggtctgatccgtaaagttcaac

SEQ ID NO: 231854 - DNA, 30 bp, Artificial Sequence
  Synthetic oligonucleotide
agttaacgccagcaacagggcaatttcaac

SEQ ID NO: 231855 - DNA, 30 bp, Artificial Sequence
  Synthetic oligonucleotide
agtagtcttacgtaccgctttcatttcaac

SEQ ID NO: 231856 - DNA, 30 bp, Artificial Sequence
  Synthetic oligonucleotide
tgttctcactcgtattcgcttcctttcaac

SEQ ID NO: 231857 - DNA, 30 bp, Artificial Sequence
  Synthetic oligonucleotide
cagtttatagaggagcgaggagctttcaac

SEQ ID NO: 231858 - DNA, 30 bp, Artificial Sequence
  Synthetic oligonucleotide
tgagcaacccggtttacgtataccaagaac

SEQ ID NO: 231859 - DNA, 30 bp, Artificial Sequence
  Synthetic oligonucleotide
acttgggggttaatgtctcagcctaagaac

SEQ ID NO: 231860 - DNA, 30 bp, Artificial Sequence
  Synthetic oligonucleotide
cgcgtgttggtgagatgaagaggtaagaac

SEQ ID NO: 231861 - DNA, 30 bp, Artificial Sequence
  Synthetic oligonucleotide
tcaatagcaggataagtggactttaagaac

SEQ ID NO: 231862 - DNA, 30 bp, Artificial Sequence
  Synthetic oligonucleotide
cattctatattttgataaaaagcacagaac

SEQ ID NO: 231863 - DNA, 30 bp, Artificial Sequence
  Synthetic oligonucleotide
ctgaagaagtacagcgttaggctccagaac

SEQ ID NO: 231864 - DNA, 30 bp, Artificial Sequence
  Synthetic oligonucleotide
tctccttaccggttgatccgggtgcagaac

SEQ ID NO: 231865 - DNA, 30 bp, Artificial Sequence
  Synthetic oligonucleotide
tcaagcccggcttgcatttatacagagaac

SEQ ID NO: 231866 - DNA, 30 bp, Artificial Sequence
  Synthetic oligonucleotide
cccgaagactcacactgatgcatagagaac

SEQ ID NO: 231867 - DNA, 30 bp, Artificial Sequence
  Synthetic oligonucleotide
gtactacagcaagtattatgcgaggagaac

SEQ ID NO: 231868 - DNA, 30 bp, Artificial Sequence
  Synthetic oligonucleotide
ctcagatatgatgatatcggccgggagaac

SEQ ID NO: 231869 - DNA, 30 bp, Artificial Sequence
  Synthetic oligonucleotide
atgctccgtccgcaaggacaagtggagaac

SEQ ID NO: 231870 - DNA, 30 bp, Artificial Sequence
  Synthetic oligonucleotide
gacgttgattactagaaaggccatgagaac

SEQ ID NO: 231871 - DNA, 30 bp, Artificial Sequence
  Synthetic oligonucleotide
gaactagatatctattacgaggaatagaac

SEQ ID NO: 231872 - DNA, 30 bp, Artificial Sequence
  Synthetic oligonucleotide
tgcagcgaacgccgaattattgcatagaac

SEQ ID NO: 231873 - DNA, 30 bp, Artificial Sequence
  Synthetic oligonucleotide
ccttaccaagggactatctgacactagaac

SEQ ID NO: 231874 - DNA, 30 bp, Artificial Sequence
  Synthetic oligonucleotide
ccttaaaactctgatcttggtgactagaac

SEQ ID NO: 231875 - DNA, 30 bp, Artificial Sequence
  Synthetic oligonucleotide
taggtggccgtgagttgatgacgctagaac

SEQ ID NO: 231876 - DNA, 30 bp, Artificial Sequence
  Synthetic oligonucleotide
gttggccagacggttcacacgtgttagaac

SEQ ID NO: 231877 - DNA, 30 bp, Artificial Sequence
  Synthetic oligonucleotide
tgtggtaggacattgaatcggtgttagaac

SEQ ID NO: 231878 - DNA, 30 bp, Artificial Sequence
  Synthetic oligonucleotide
cgtcaaagactagggtggcaagtttagaac

SEQ ID NO: 231879 - DNA, 30 bp, Artificial Sequence
  Synthetic oligonucleotide
aaaggcatcgtgccgtcagcttcaacgaac

SEQ ID NO: 231880 - DNA, 30 bp, Artificial Sequence
  Synthetic oligonucleotide
ggggaacggcccaatggacctcgcacgaac

SEQ ID NO: 231881 - DNA, 30 bp, Artificial Sequence
  Synthetic oligonucleotide
tgcctcagcactgacaatcgacgcccgaac

SEQ ID NO: 231882 - DNA, 30 bp, Artificial Sequence
  Synthetic oligonucleotide
tcagaatgactgtcttcgttgatcccgaac

SEQ ID NO: 231883 - DNA, 30 bp, Artificial Sequence
  Synthetic oligonucleotide
tgttggatcctgacgcgttctatgccgaac

SEQ ID NO: 231884 - DNA, 30 bp, Artificial Sequence
  Synthetic oligonucleotide
aaatactccgatgacctcgcataagcgaac

SEQ ID NO: 231885 - DNA, 30 bp, Artificial Sequence
  Synthetic oligonucleotide
aggaagggtacgatcgtaagggtagcgaac

SEQ ID NO: 231886 - DNA, 30 bp, Artificial Sequence
  Synthetic oligonucleotide
cggacctatagagtcgagatcgtcgcgaac

SEQ ID NO: 231887 - DNA, 30 bp, Artificial Sequence
  Synthetic oligonucleotide
cgcattgtagtcaggtgggcggctgcgaac

SEQ ID NO: 231888 - DNA, 30 bp, Artificial Sequence
  Synthetic oligonucleotide
gcctcagcgaccagttctcaaagtgcgaac

SEQ ID NO: 231889 - DNA, 30 bp, Artificial Sequence
  Synthetic oligonucleotide
cttagagcagccgaacagtctcaatcgaac

SEQ ID NO: 231890 - DNA, 30 bp, Artificial Sequence
  Synthetic oligonucleotide
acccatgaaccgttcctcaccgtatcgaac

SEQ ID NO: 231891 - DNA, 30 bp, Artificial Sequence
  Synthetic oligonucleotide
ctcctgtgcaagcaaaaagttacctcgaac

SEQ ID NO: 231892 - DNA, 30 bp, Artificial Sequence
  Synthetic oligonucleotide
tcgcagttcaactcacaggaggagtcgaac

SEQ ID NO: 231893 - DNA, 30 bp, Artificial Sequence
  Synthetic oligonucleotide
cccgcgggaagagagggttatacgtcgaac

SEQ ID NO: 231894 - DNA, 30 bp, Artificial Sequence
  Synthetic oligonucleotide
acaaccatccggttttgggaatggtcgaac

SEQ ID NO: 231895 - DNA, 30 bp, Artificial Sequence
  Synthetic oligonucleotide
tccttacacacccgctccgacggttcgaac

SEQ ID NO: 231896 - DNA, 30 bp, Artificial Sequence
  Synthetic oligonucleotide
aacgttcggtagtggcataacgtcaggaac

SEQ ID NO: 231897 - DNA, 30 bp, Artificial Sequence
  Synthetic oligonucleotide
aaccgccgcactttggataattcgaggaac

SEQ ID NO: 231898 - DNA, 30 bp, Artificial Sequence
  Synthetic oligonucleotide
ctaactagacttgcatcaatgctgaggaac

SEQ ID NO: 231899 - DNA, 30 bp, Artificial Sequence
  Synthetic oligonucleotide
gcgacttcggatcaggtagactaacggaac

SEQ ID NO: 231900 - DNA, 30 bp, Artificial Sequence
  Synthetic oligonucleotide
acgggtttgagtaccgtggatggacggaac

SEQ ID NO: 231901 - DNA, 30 bp, Artificial Sequence
  Synthetic oligonucleotide
ctagtgatacggggcaatcctcagcggaac

SEQ ID NO: 231902 - DNA, 30 bp, Artificial Sequence
  Synthetic oligonucleotide
actgtgtgtgcttgattcagctttcggaac

SEQ ID NO: 231903 - DNA, 30 bp, Artificial Sequence
  Synthetic oligonucleotide
tgcggttgcgacaaggtataacaagggaac

SEQ ID NO: 231904 - DNA, 30 bp, Artificial Sequence
  Synthetic oligonucleotide
aagggcccgtaagcgtacgattaagggaac

SEQ ID NO: 231905 - DNA, 30 bp, Artificial Sequence
  Synthetic oligonucleotide
ctcgaggtggcaaaaggtaactcagggaac

SEQ ID NO: 231906 - DNA, 30 bp, Artificial Sequence
  Synthetic oligonucleotide
ggtcaacgcagaagcgcacataacgggaac

SEQ ID NO: 231907 - DNA, 30 bp, Artificial Sequence
  Synthetic oligonucleotide
ataagcggacgaccggacattcacgggaac

SEQ ID NO: 231908 - DNA, 30 bp, Artificial Sequence
  Synthetic oligonucleotide
cggcagccagacgtatggtagtaggggaac

SEQ ID NO: 231909 - DNA, 30 bp, Artificial Sequence
  Synthetic oligonucleotide
aaggaatgtgtgcatgacggaagggggaac

SEQ ID NO: 231910 - DNA, 30 bp, Artificial Sequence
  Synthetic oligonucleotide
aacttgggaccatgtccaagtatggggaac

SEQ ID NO: 231911 - DNA, 30 bp, Artificial Sequence
  Synthetic oligonucleotide
ggtcttgacggtaaagtgacctctgggaac

SEQ ID NO: 231912 - DNA, 30 bp, Artificial Sequence
  Synthetic oligonucleotide
ccatagacgcaatcgagcaagtttgggaac

SEQ ID NO: 231913 - DNA, 30 bp, Artificial Sequence
  Synthetic oligonucleotide
cgtagctgcccaattagaacaggatggaac

SEQ ID NO: 231914 - DNA, 30 bp, Artificial Sequence
  Synthetic oligonucleotide
aatcagagtaacaatacaattgtatggaac

SEQ ID NO: 231915 - DNA, 30 bp, Artificial Sequence
  Synthetic oligonucleotide
acgtagcgatggggtcagtcatagtggaac

SEQ ID NO: 231916 - DNA, 30 bp, Artificial Sequence
  Synthetic oligonucleotide
tgaggccgtcgacctgcatgtaggtggaac

SEQ ID NO: 231917 - DNA, 30 bp, Artificial Sequence
  Synthetic oligonucleotide
acggttcaggggaaagaggcatggtggaac

SEQ ID NO: 231918 - DNA, 30 bp, Artificial Sequence
  Synthetic oligonucleotide
gaggaggcttgttggcctctagattggaac

SEQ ID NO: 231919 - DNA, 30 bp, Artificial Sequence
  Synthetic oligonucleotide
cggctgcatgccaagtagcgtaaaatgaac

SEQ ID NO: 231920 - DNA, 29 bp, Artificial Sequence
  Synthetic oligonucleotide
gtaactatgaatcttgatgaagaatgaac

SEQ ID NO: 231921 - DNA, 30 bp, Artificial Sequence
  Synthetic oligonucleotide
ctaatcagaggaaacggtctaataatgaac

SEQ ID NO: 231922 - DNA, 30 bp, Artificial Sequence
  Synthetic oligonucleotide
tctcgcggcttgtatatggaagtgatgaac

SEQ ID NO: 231923 - DNA, 30 bp, Artificial Sequence
  Synthetic oligonucleotide
gtcataagcgtcgagggtcaatctatgaac

SEQ ID NO: 231924 - DNA, 30 bp, Artificial Sequence
  Synthetic oligonucleotide
tagtcaggatgacaagtctacattatgaac

SEQ ID NO: 231925 - DNA, 30 bp, Artificial Sequence
  Synthetic oligonucleotide
ttgagtggtcaatactcgccggttatgaac

SEQ ID NO: 231926 - DNA, 30 bp, Artificial Sequence
  Synthetic oligonucleotide
gagggacacataacgcctgtgagtctgaac

SEQ ID NO: 231927 - DNA, 30 bp, Artificial Sequence
  Synthetic oligonucleotide
gagagctctctctagctgaactgtctgaac

SEQ ID NO: 231928 - DNA, 30 bp, Artificial Sequence
  Synthetic oligonucleotide
acttcgaataaatgagcatccaaagtgaac

SEQ ID NO: 231929 - DNA, 30 bp, Artificial Sequence
  Synthetic oligonucleotide
gtggactgtcgcaagtaagcgttagtgaac

SEQ ID NO: 231930 - DNA, 30 bp, Artificial Sequence
  Synthetic oligonucleotide
acttccgaccaccacttggcaagcgtgaac

SEQ ID NO: 231931 - DNA, 30 bp, Artificial Sequence
  Synthetic oligonucleotide
tcctgtacccactatcattgggctgtgaac

SEQ ID NO: 231932 - DNA, 30 bp, Artificial Sequence
  Synthetic oligonucleotide
actaagtaagggatcagcttctttgtgaac

SEQ ID NO: 231933 - DNA, 30 bp, Artificial Sequence
  Synthetic oligonucleotide
gcaggcatggaacttagatttcctttgaac

SEQ ID NO: 231934 - DNA, 30 bp, Artificial Sequence
  Synthetic oligonucleotide
ctgggctggagtacgcacaaaacaaataac

SEQ ID NO: 231935 - DNA, 30 bp, Artificial Sequence
  Synthetic oligonucleotide
tgatctggtaaaagacagtcgtcaaataac

SEQ ID NO: 231936 - DNA, 30 bp, Artificial Sequence
  Synthetic oligonucleotide
agtaggaggaagcggcccgcgcgaaataac

SEQ ID NO: 231937 - DNA, 30 bp, Artificial Sequence
  Synthetic oligonucleotide
acaaggaatcagcgctcgtatataaataac

SEQ ID NO: 231938 - DNA, 30 bp, Artificial Sequence
  Synthetic oligonucleotide
atcaaacgtagtgacggctgtgccaataac

SEQ ID NO: 231939 - DNA, 30 bp, Artificial Sequence
  Synthetic oligonucleotide
ctaacatagcgcaacaaccacttcaataac

SEQ ID NO: 231940 - DNA, 30 bp, Artificial Sequence
  Synthetic oligonucleotide
agaaatgagtgtctacccccagagaataac

SEQ ID NO: 231941 - DNA, 30 bp, Artificial Sequence
  Synthetic oligonucleotide
tagcatgaccgatcactcctaatgaataac

SEQ ID NO: 231942 - DNA, 30 bp, Artificial Sequence
  Synthetic oligonucleotide
aaggtgaacatccatttcaatggacataac

SEQ ID NO: 231943 - DNA, 30 bp, Artificial Sequence
  Synthetic oligonucleotide
gtgcggatccgggggtgtctggaccataac

SEQ ID NO: 231944 - DNA, 30 bp, Artificial Sequence
  Synthetic oligonucleotide
gctcgcctagtatcttttcaacgccataac

SEQ ID NO: 231945 - DNA, 30 bp, Artificial Sequence
  Synthetic oligonucleotide
gcccacacaaggggtaccctcaagcataac

SEQ ID NO: 231946 - DNA, 30 bp, Artificial Sequence
  Synthetic oligonucleotide
tccactaagctggatggagtctagcataac

SEQ ID NO: 231947 - DNA, 30 bp, Artificial Sequence
  Synthetic oligonucleotide
acaatagctaaatctttgggtcggcataac

SEQ ID NO: 231948 - DNA, 30 bp, Artificial Sequence
  Synthetic oligonucleotide
tggtcctgtaaagactacagtatgcataac

SEQ ID NO: 231949 - DNA, 30 bp, Artificial Sequence
  Synthetic oligonucleotide
ctacacagctatcccctaactaatcataac

SEQ ID NO: 231950 - DNA, 30 bp, Artificial Sequence
  Synthetic oligonucleotide
ccattataacaaagtcgctgttatcataac

SEQ ID NO: 231951 - DNA, 30 bp, Artificial Sequence
  Synthetic oligonucleotide
catgtgcctggagcaatcaaaatagataac

SEQ ID NO: 231952 - DNA, 30 bp, Artificial Sequence
  Synthetic oligonucleotide
gccgccggttgcgtgaatagcgtcgataac

SEQ ID NO: 231953 - DNA, 30 bp, Artificial Sequence
  Synthetic oligonucleotide
aagacaaaacgggatagaatttgggataac

SEQ ID NO: 231954 - DNA, 30 bp, Artificial Sequence
  Synthetic oligonucleotide
ggccccctaatgacggaaggtaatgataac

SEQ ID NO: 231955 - DNA, 30 bp, Artificial Sequence
  Synthetic oligonucleotide
ctaaataatcatgtccgtagacgatataac

SEQ ID NO: 231956 - DNA, 30 bp, Artificial Sequence
  Synthetic oligonucleotide
ggggagaatataaacttgtatttatataac

SEQ ID NO: 231957 - DNA, 30 bp, Artificial Sequence
  Synthetic oligonucleotide
tgtccgtgtaggtggatgacggtctataac

SEQ ID NO: 231958 - DNA, 30 bp, Artificial Sequence
  Synthetic oligonucleotide
gcaatttggtgcgcggtgaccaggtataac

SEQ ID NO: 231959 - DNA, 30 bp, Artificial Sequence
  Synthetic oligonucleotide
tctgctggaacaggacggtgagtgtataac

SEQ ID NO: 231960 - DNA, 30 bp, Artificial Sequence
  Synthetic oligonucleotide
cggaaaatcccacaagtggatcgttataac

SEQ ID NO: 231961 - DNA, 30 bp, Artificial Sequence
  Synthetic oligonucleotide
ccaagtgtcgaacccgaggtcctttataac

SEQ ID NO: 231962 - DNA, 30 bp, Artificial Sequence
  Synthetic oligonucleotide
aaggtgacacgggaattacttctttataac

SEQ ID NO: 231963 - DNA, 30 bp, Artificial Sequence
  Synthetic oligonucleotide
ctgattaaacgtcactgatcattttataac

SEQ ID NO: 231964 - DNA, 30 bp, Artificial Sequence
  Synthetic oligonucleotide
atcgaatgttgttagtgcgcgaaaactaac

SEQ ID NO: 231965 - DNA, 30 bp, Artificial Sequence
  Synthetic oligonucleotide
gcaactactggcagagatgcatgaactaac

SEQ ID NO: 231966 - DNA, 30 bp, Artificial Sequence
  Synthetic oligonucleotide
atgtagttggtattagacagtggcactaac

SEQ ID NO: 231967 - DNA, 30 bp, Artificial Sequence
  Synthetic oligonucleotide
atgggttatgagtcaatgacgccgactaac

SEQ ID NO: 231968 - DNA, 30 bp, Artificial Sequence
  Synthetic oligonucleotide
gggtgtgttcccagctggcgccaccctaac

SEQ ID NO: 231969 - DNA, 30 bp, Artificial Sequence
  Synthetic oligonucleotide
tctagtggaataggtacttctgtgcctaac

SEQ ID NO: 231970 - DNA, 30 bp, Artificial Sequence
  Synthetic oligonucleotide
ttagcgtccggcgtatcagcgcctcctaac

SEQ ID NO: 231971 - DNA, 30 bp, Artificial Sequence
  Synthetic oligonucleotide
tttggcgtggcggccctgtaaaccgctaac

SEQ ID NO: 231972 - DNA, 30 bp, Artificial Sequence
  Synthetic oligonucleotide
cggcacagtatgccgttgtttgatgctaac

SEQ ID NO: 231973 - DNA, 30 bp, Artificial Sequence
  Synthetic oligonucleotide
taaagcgaagctatccattcgtttgctaac

SEQ ID NO: 231974 - DNA, 30 bp, Artificial Sequence
  Synthetic oligonucleotide
tcttacctccagtgatctcttcggtctaac

SEQ ID NO: 231975 - DNA, 30 bp, Artificial Sequence
  Synthetic oligonucleotide
ctgattttttcacgtgtcgtccaaagtaac

SEQ ID NO: 231976 - DNA, 30 bp, Artificial Sequence
  Synthetic oligonucleotide
accctgggaacaatcggttcgttcagtaac

SEQ ID NO: 231977 - DNA, 30 bp, Artificial Sequence
  Synthetic oligonucleotide
ccgctaggatactggcggcgaaggagtaac

SEQ ID NO: 231978 - DNA, 30 bp, Artificial Sequence
  Synthetic oligonucleotide
ttgcgaaggtgcgaaactaattggagtaac

SEQ ID NO: 231979 - DNA, 30 bp, Artificial Sequence
  Synthetic oligonucleotide
tcaacttatatgccaccccgccatagtaac

SEQ ID NO: 231980 - DNA, 30 bp, Artificial Sequence
  Synthetic oligonucleotide
tacaaaacagctacgggtgtgtatagtaac

SEQ ID NO: 231981 - DNA, 30 bp, Artificial Sequence
  Synthetic oligonucleotide
agttgggtgatgaatacttccttacgtaac

SEQ ID NO: 231982 - DNA, 30 bp, Artificial Sequence
  Synthetic oligonucleotide
gataaatgcagtcagtacggtgcgcgtaac

SEQ ID NO: 231983 - DNA, 30 bp, Artificial Sequence
  Synthetic oligonucleotide
gatcggtgtaacctcaagtagaggcgtaac

SEQ ID NO: 231984 - DNA, 30 bp, Artificial Sequence
  Synthetic oligonucleotide
atgacggagatatgacaaggtactcgtaac

SEQ ID NO: 231985 - DNA, 30 bp, Artificial Sequence
  Synthetic oligonucleotide
cgaatggtggaccactggttatctcgtaac

SEQ ID NO: 231986 - DNA, 30 bp, Artificial Sequence
  Synthetic oligonucleotide
tctgataatatatcagtcaagaaaggtaac

SEQ ID NO: 231987 - DNA, 30 bp, Artificial Sequence
  Synthetic oligonucleotide
tcggtcccctagacaagatgccaaggtaac

SEQ ID NO: 231988 - DNA, 30 bp, Artificial Sequence
  Synthetic oligonucleotide
agattatactaaggaacgtgggcaggtaac

SEQ ID NO: 231989 - DNA, 30 bp, Artificial Sequence
  Synthetic oligonucleotide
tctgtccgggtccggcgtgtggcaggtaac

SEQ ID NO: 231990 - DNA, 30 bp, Artificial Sequence
  Synthetic oligonucleotide
cattatatactagtggataagactggtaac

SEQ ID NO: 231991 - DNA, 30 bp, Artificial Sequence
  Synthetic oligonucleotide
caccggctacttgctcaaaatgctggtaac

SEQ ID NO: 231992 - DNA, 30 bp, Artificial Sequence
  Synthetic oligonucleotide
gcccacaactcctgtgccacgacatgtaac

SEQ ID NO: 231993 - DNA, 30 bp, Artificial Sequence
  Synthetic oligonucleotide
taatagatcagtgcaattggtggctgtaac

SEQ ID NO: 231994 - DNA, 30 bp, Artificial Sequence
  Synthetic oligonucleotide
ttgtgattccatctgaccgagttctgtaac

SEQ ID NO: 231995 - DNA, 30 bp, Artificial Sequence
  Synthetic oligonucleotide
gaagtagacattgggaatccattgtgtaac

SEQ ID NO: 231996 - DNA, 30 bp, Artificial Sequence
  Synthetic oligonucleotide
aactcaggaatgtgtgccctttgaattaac

SEQ ID NO: 231997 - DNA, 30 bp, Artificial Sequence
  Synthetic oligonucleotide
ctcgcaatcagcagggggagcataattaac

SEQ ID NO: 231998 - DNA, 30 bp, Artificial Sequence
  Synthetic oligonucleotide
accgttccgacatgcgccggcaccattaac

SEQ ID NO: 231999 - DNA, 30 bp, Artificial Sequence
  Synthetic oligonucleotide
gggcgccgagtccaaccttcgtctattaac

SEQ ID NO: 232000 - DNA, 30 bp, Artificial Sequence
  Synthetic oligonucleotide
gccgaatacctcatgaacgctcaccttaac

SEQ ID NO: 232001 - DNA, 30 bp, Artificial Sequence
  Synthetic oligonucleotide
aagggcatttgcgtgtaaagtaggcttaac

SEQ ID NO: 232002 - DNA, 30 bp, Artificial Sequence
  Synthetic oligonucleotide
tcggcgaggcacggtcttcgactgcttaac

SEQ ID NO: 232003 - DNA, 30 bp, Artificial Sequence
  Synthetic oligonucleotide
tcacgggcatcagggtacgttagtcttaac

SEQ ID NO: 232004 - DNA, 30 bp, Artificial Sequence
  Synthetic oligonucleotide
aacacagcgatggcagatacccgagttaac

SEQ ID NO: 232005 - DNA, 30 bp, Artificial Sequence
  Synthetic oligonucleotide
tcaattaccagcctggataggctagttaac

SEQ ID NO: 232006 - DNA, 30 bp, Artificial Sequence
  Synthetic oligonucleotide
tctcccgactaacaggagtccactgttaac

SEQ ID NO: 232007 - DNA, 30 bp, Artificial Sequence
  Synthetic oligonucleotide
tttgaacatagagaaggataaaagtttaac

SEQ ID NO: 232008 - DNA, 30 bp, Artificial Sequence
  Synthetic oligonucleotide
gggactaacgagggctgcaccaagtttaac

SEQ ID NO: 232009 - DNA, 30 bp, Artificial Sequence
  Synthetic oligonucleotide
cgtgacacgtttaagcagccggcgtttaac

SEQ ID NO: 232010 - DNA, 30 bp, Artificial Sequence
  Synthetic oligonucleotide
ttacgggtaattctttaatacaattttaac

SEQ ID NO: 232011 - DNA, 30 bp, Artificial Sequence
  Synthetic oligonucleotide
ggttgaccaatagggtaccgaaaaaaacac

SEQ ID NO: 232012 - DNA, 30 bp, Artificial Sequence
  Synthetic oligonucleotide
agaccttaaagatgaatgccattaaaacac

SEQ ID NO: 232013 - DNA, 30 bp, Artificial Sequence
  Synthetic oligonucleotide
cccgcggcacagccagatgaagacaaacac

SEQ ID NO: 232014 - DNA, 30 bp, Artificial Sequence
  Synthetic oligonucleotide
cgcggctgcatttcgtggggcaagaaacac

SEQ ID NO: 232015 - DNA, 30 bp, Artificial Sequence
  Synthetic oligonucleotide
cgtgccaaagttatactgtcagtgaaacac

SEQ ID NO: 232016 - DNA, 30 bp, Artificial Sequence
  Synthetic oligonucleotide
tcggcaatgattctgatagccgaacaacac

SEQ ID NO: 232017 - DNA, 30 bp, Artificial Sequence
  Synthetic oligonucleotide
atgccttcaactgtctttggttaacaacac

SEQ ID NO: 232018 - DNA, 30 bp, Artificial Sequence
  Synthetic oligonucleotide
taacaacaggtttatgggtgaatccaacac

SEQ ID NO: 232019 - DNA, 30 bp, Artificial Sequence
  Synthetic oligonucleotide
gtgacgtagatctattgtctccgagaacac

SEQ ID NO: 232020 - DNA, 30 bp, Artificial Sequence
  Synthetic oligonucleotide
tgactgtgagaagggctggattgagaacac

SEQ ID NO: 232021 - DNA, 30 bp, Artificial Sequence
  Synthetic oligonucleotide
gagggttaacggcaaatgggtgacgaacac

SEQ ID NO: 232022 - DNA, 30 bp, Artificial Sequence
  Synthetic oligonucleotide
tcggaccattgactgcgtggtattgaacac

SEQ ID NO: 232023 - DNA, 30 bp, Artificial Sequence
  Synthetic oligonucleotide
gctgcctgcttttggtataaatcctaacac

SEQ ID NO: 232024 - DNA, 30 bp, Artificial Sequence
  Synthetic oligonucleotide
aacaaagagtagctattgggaatctaacac

SEQ ID NO: 232025 - DNA, 30 bp, Artificial Sequence
  Synthetic oligonucleotide
acaggagctagacgccaatctatctaacac

SEQ ID NO: 232026 - DNA, 30 bp, Artificial Sequence
  Synthetic oligonucleotide
gcgggtgagcgtcggcggggcgtttaacac

SEQ ID NO: 232027 - DNA, 30 bp, Artificial Sequence
  Synthetic oligonucleotide
actattatcccgacgacagatctaacacac

SEQ ID NO: 232028 - DNA, 31 bp, Artificial Sequence
  Synthetic oligonucleotide
cgcgacgtatataaagttggggtggacacac

SEQ ID NO: 232029 - DNA, 30 bp, Artificial Sequence
  Synthetic oligonucleotide
gtataaggggcagtgaacgcgtctacacac

SEQ ID NO: 232030 - DNA, 30 bp, Artificial Sequence
  Synthetic oligonucleotide
tgtagaggtcaaacaggtaggtccccacac

SEQ ID NO: 232031 - DNA, 30 bp, Artificial Sequence
  Synthetic oligonucleotide
tagcctctcgagtccattcccagcccacac

SEQ ID NO: 232032 - DNA, 30 bp, Artificial Sequence
  Synthetic oligonucleotide
tgcaggatagccgcgcataaccgcccacac

SEQ ID NO: 232033 - DNA, 30 bp, Artificial Sequence
  Synthetic oligonucleotide
ggtacagcttatcagcagcgcacagcacac

SEQ ID NO: 232034 - DNA, 30 bp, Artificial Sequence
  Synthetic oligonucleotide
cacgtgccagctttgtcggcctgctcacac

SEQ ID NO: 232035 - DNA, 30 bp, Artificial Sequence
  Synthetic oligonucleotide
ctgacatgattagggggtgagtcgtcacac

SEQ ID NO: 232036 - DNA, 30 bp, Artificial Sequence
  Synthetic oligonucleotide
tcagacttgatttgggtgtaggtttcacac

SEQ ID NO: 232037 - DNA, 30 bp, Artificial Sequence
  Synthetic oligonucleotide
agcagcgggaagatgccgggggacagacac

SEQ ID NO: 232038 - DNA, 30 bp, Artificial Sequence
  Synthetic oligonucleotide
gcgataacttccattgatatatacagacac

SEQ ID NO: 232039 - DNA, 30 bp, Artificial Sequence
  Synthetic oligonucleotide
ccatatcgcccggtattattcctccgacac

SEQ ID NO: 232040 - DNA, 30 bp, Artificial Sequence
  Synthetic oligonucleotide
ggtggagagagcataccacagcagcgacac

SEQ ID NO: 232041 - DNA, 30 bp, Artificial Sequence
  Synthetic oligonucleotide
aggccgattcagctattagaagcgcgacac

SEQ ID NO: 232042 - DNA, 30 bp, Artificial Sequence
  Synthetic oligonucleotide
cggcccggcgggggcaagcgtaggcgacac

SEQ ID NO: 232043 - DNA, 30 bp, Artificial Sequence
  Synthetic oligonucleotide
tccgggtgagacgagtgcacgaaaggacac

SEQ ID NO: 232044 - DNA, 30 bp, Artificial Sequence
  Synthetic oligonucleotide
cgacttaactggtggtcctataacggacac

SEQ ID NO: 232045 - DNA, 30 bp, Artificial Sequence
  Synthetic oligonucleotide
ttccagtgactatcctggaaagacggacac

SEQ ID NO: 232046 - DNA, 30 bp, Artificial Sequence
  Synthetic oligonucleotide
ctgaattgaggaccagtagagcgcggacac

SEQ ID NO: 232047 - DNA, 30 bp, Artificial Sequence
  Synthetic oligonucleotide
tgagggaccggcgtgagtccatgcggacac

SEQ ID NO: 232048 - DNA, 30 bp, Artificial Sequence
  Synthetic oligonucleotide
actgggttaggtccgcgtcgtcatggacac

SEQ ID NO: 232049 - DNA, 31 bp, Artificial Sequence
  Synthetic oligonucleotide
acaacccaaaacatgttaacatgcatgacac

SEQ ID NO: 232050 - DNA, 30 bp, Artificial Sequence
  Synthetic oligonucleotide
atgggagtggagtcttaaggtgcttgacac

SEQ ID NO: 232051 - DNA, 30 bp, Artificial Sequence
  Synthetic oligonucleotide
acacgacttcgatcacgttctcaaatacac

SEQ ID NO: 232052 - DNA, 30 bp, Artificial Sequence
  Synthetic oligonucleotide
aatacacgcggaagaggatccagaatacac

SEQ ID NO: 232053 - DNA, 30 bp, Artificial Sequence
  Synthetic oligonucleotide
caagtccacagctgtctccagggcatacac

SEQ ID NO: 232054 - DNA, 30 bp, Artificial Sequence
  Synthetic oligonucleotide
ctgaacgttgtttccaggaatcagatacac

SEQ ID NO: 232055 - DNA, 30 bp, Artificial Sequence
  Synthetic oligonucleotide
cacaacgtcctgcatcccggatcgatacac

SEQ ID NO: 232056 - DNA, 30 bp, Artificial Sequence
  Synthetic oligonucleotide
cactccgtggaacatgctcggcggatacac

SEQ ID NO: 232057 - DNA, 30 bp, Artificial Sequence
  Synthetic oligonucleotide
ttacttgtagtaatggcttctactatacac

SEQ ID NO: 232058 - DNA, 30 bp, Artificial Sequence
  Synthetic oligonucleotide
actataggtactcgtagagctgctatacac

SEQ ID NO: 232059 - DNA, 30 bp, Artificial Sequence
  Synthetic oligonucleotide
ctgatacgggtacatgtgtatagtatacac

SEQ ID NO: 232060 - DNA, 30 bp, Artificial Sequence
  Synthetic oligonucleotide
ctgacgaagatcaggcatcttgccctacac

SEQ ID NO: 232061 - DNA, 30 bp, Artificial Sequence
  Synthetic oligonucleotide
caaacccacacgcgacgtataaatgtacac

SEQ ID NO: 232062 - DNA, 30 bp, Artificial Sequence
  Synthetic oligonucleotide
gcgcaattatctgcagtgggcagattacac

SEQ ID NO: 232063 - DNA, 30 bp, Artificial Sequence
  Synthetic oligonucleotide
acaacgcgcttcccatcactacctttacac

SEQ ID NO: 232064 - DNA, 30 bp, Artificial Sequence
  Synthetic oligonucleotide
aaaagtggaatgaccgtatctcgtttacac

SEQ ID NO: 232065 - DNA, 30 bp, Artificial Sequence
  Synthetic oligonucleotide
ggatacattcgactgactgccattttacac

SEQ ID NO: 232066 - DNA, 30 bp, Artificial Sequence
  Synthetic oligonucleotide
gctccctagaatgattaggagattttacac

SEQ ID NO: 232067 - DNA, 30 bp, Artificial Sequence
  Synthetic oligonucleotide
caatgtggatatagaccagatagaaaccac

SEQ ID NO: 232068 - DNA, 30 bp, Artificial Sequence
  Synthetic oligonucleotide
tgcgtacgagtggatcgcctattaaaccac

SEQ ID NO: 232069 - DNA, 30 bp, Artificial Sequence
  Synthetic oligonucleotide
ttgcatgcactgtactagcacaacaaccac

SEQ ID NO: 232070 - DNA, 30 bp, Artificial Sequence
  Synthetic oligonucleotide
gtgccgtcccagcagtaatatgccaaccac

SEQ ID NO: 232071 - DNA, 30 bp, Artificial Sequence
  Synthetic oligonucleotide
gcaaggttaaactgataggacagcaaccac

SEQ ID NO: 232072 - DNA, 30 bp, Artificial Sequence
  Synthetic oligonucleotide
tgaatatcgacccgaaatgagatcaaccac

SEQ ID NO: 232073 - DNA, 30 bp, Artificial Sequence
  Synthetic oligonucleotide
cgaagtcgggtccatctaagaagtaaccac

SEQ ID NO: 232074 - DNA, 30 bp, Artificial Sequence
  Synthetic oligonucleotide
ggatccagcctcttactgtggggtaaccac

SEQ ID NO: 232075 - DNA, 30 bp, Artificial Sequence
  Synthetic oligonucleotide
atgggtatgaacctttcaccgagccaccac

SEQ ID NO: 232076 - DNA, 30 bp, Artificial Sequence
  Synthetic oligonucleotide
atgacgagtggccctggtgaatagcaccac

SEQ ID NO: 232077 - DNA, 30 bp, Artificial Sequence
  Synthetic oligonucleotide
aaattgcaggagccgatggaaacgcaccac

SEQ ID NO: 232078 - DNA, 30 bp, Artificial Sequence
  Synthetic oligonucleotide
aaaggtggacttagcccaaaagtgcaccac

SEQ ID NO: 232079 - DNA, 30 bp, Artificial Sequence
  Synthetic oligonucleotide
attgactattgctgacgggggtaagaccac

SEQ ID NO: 232080 - DNA, 30 bp, Artificial Sequence
  Synthetic oligonucleotide
gttgctgtgagattatataacatagaccac

SEQ ID NO: 232081 - DNA, 30 bp, Artificial Sequence
  Synthetic oligonucleotide
tcaatgccactacttaaaattagcgaccac

SEQ ID NO: 232082 - DNA, 30 bp, Artificial Sequence
  Synthetic oligonucleotide
ttggccctgcagcgcaagatgtgcgaccac

SEQ ID NO: 232083 - DNA, 30 bp, Artificial Sequence
  Synthetic oligonucleotide
attgactgtagaccggggggaaatgaccac

SEQ ID NO: 232084 - DNA, 30 bp, Artificial Sequence
  Synthetic oligonucleotide
ttgcgaagtgacagatctgaccttgaccac

SEQ ID NO: 232085 - DNA, 30 bp, Artificial Sequence
  Synthetic oligonucleotide
ggtggtctaagggcaattaaccaataccac

SEQ ID NO: 232086 - DNA, 30 bp, Artificial Sequence
  Synthetic oligonucleotide
ttagagcccgtacttgatcctcgataccac

SEQ ID NO: 232087 - DNA, 30 bp, Artificial Sequence
  Synthetic oligonucleotide
tatacataactgatatcacctggctaccac

SEQ ID NO: 232088 - DNA, 30 bp, Artificial Sequence
  Synthetic oligonucleotide
taggctacaaccgggaaacgatagtaccac

SEQ ID NO: 232089 - DNA, 30 bp, Artificial Sequence
  Synthetic oligonucleotide
ggaccgataccgcataaatttacgtaccac

SEQ ID NO: 232090 - DNA, 30 bp, Artificial Sequence
  Synthetic oligonucleotide
tggtttgtggacaaaaatacccggtaccac

SEQ ID NO: 232091 - DNA, 30 bp, Artificial Sequence
  Synthetic oligonucleotide
cggcttaaatcgtacgcggactaaacccac

SEQ ID NO: 232092 - DNA, 30 bp, Artificial Sequence
  Synthetic oligonucleotide
tccgagaggagcaactaaccgtcaacccac

SEQ ID NO: 232093 - DNA, 30 bp, Artificial Sequence
  Synthetic oligonucleotide
gtgcgatgcctgcgctaagcatacacccac

SEQ ID NO: 232094 - DNA, 30 bp, Artificial Sequence
  Synthetic oligonucleotide
ttccattcagaggaagggatcaagacccac

SEQ ID NO: 232095 - DNA, 30 bp, Artificial Sequence
  Synthetic oligonucleotide
cttaaaaagtgaagcgtaagtaagccccac

SEQ ID NO: 232096 - DNA, 30 bp, Artificial Sequence
  Synthetic oligonucleotide
tgcgactgtaagcgctaagcgagcgcccac

SEQ ID NO: 232097 - DNA, 30 bp, Artificial Sequence
  Synthetic oligonucleotide
ctgaatccataagtctgtcgaatcgcccac

SEQ ID NO: 232098 - DNA, 30 bp, Artificial Sequence
  Synthetic oligonucleotide
atcgctaatcgtataccatctgctgcccac

SEQ ID NO: 232099 - DNA, 30 bp, Artificial Sequence
  Synthetic oligonucleotide
ctgcgcatactgccaaaagtggaatcccac

SEQ ID NO: 232100 - DNA, 30 bp, Artificial Sequence
  Synthetic oligonucleotide
actaacagatgccccacatcgaggtcccac

SEQ ID NO: 232101 - DNA, 30 bp, Artificial Sequence
  Synthetic oligonucleotide
accggtaaccttcaaatggtccgaagccac

SEQ ID NO: 232102 - DNA, 30 bp, Artificial Sequence
  Synthetic oligonucleotide
ggggggttaaaattagcgatttgaagccac

SEQ ID NO: 232103 - DNA, 30 bp, Artificial Sequence
  Synthetic oligonucleotide
ccagtcgcctttagcttgaaccccagccac

SEQ ID NO: 232104 - DNA, 30 bp, Artificial Sequence
  Synthetic oligonucleotide
tccagctcttggtggatgtcaaagagccac

SEQ ID NO: 232105 - DNA, 30 bp, Artificial Sequence
  Synthetic oligonucleotide
ggcaccgtatttgcgcattttaagagccac

SEQ ID NO: 232106 - DNA, 30 bp, Artificial Sequence
  Synthetic oligonucleotide
actagactgttcagcaaggtcactagccac

SEQ ID NO: 232107 - DNA, 30 bp, Artificial Sequence
  Synthetic oligonucleotide
cagggtactccggatggcgccaaacgccac

SEQ ID NO: 232108 - DNA, 30 bp, Artificial Sequence
  Synthetic oligonucleotide
gcttagaggttttgcgggcgcacacgccac

SEQ ID NO: 232109 - DNA, 30 bp, Artificial Sequence
  Synthetic oligonucleotide
ttaagatcaattatccagtaatggggccac

SEQ ID NO: 232110 - DNA, 30 bp, Artificial Sequence
  Synthetic oligonucleotide
ttaatcatggtgccgggttataactgccac

SEQ ID NO: 232111 - DNA, 30 bp, Artificial Sequence
  Synthetic oligonucleotide
taggtcgtagtcaggccagcgtagtgccac

SEQ ID NO: 232112 - DNA, 30 bp, Artificial Sequence
  Synthetic oligonucleotide
ggttctcctgggattatatgggcttgccac

SEQ ID NO: 232113 - DNA, 30 bp, Artificial Sequence
  Synthetic oligonucleotide
gttattcaccagaccacaaaggcaatccac

SEQ ID NO: 232114 - DNA, 30 bp, Artificial Sequence
  Synthetic oligonucleotide
ggaggggagggacggcttgtagccatccac

SEQ ID NO: 232115 - DNA, 30 bp, Artificial Sequence
  Synthetic oligonucleotide
attaggcgaacggggcatatagtcatccac

SEQ ID NO: 232116 - DNA, 30 bp, Artificial Sequence
  Synthetic oligonucleotide
tgtttgggctactctggtgatgccctccac

SEQ ID NO: 232117 - DNA, 30 bp, Artificial Sequence
  Synthetic oligonucleotide
aaaccgagactgcatgatgttcagctccac

SEQ ID NO: 232118 - DNA, 30 bp, Artificial Sequence
  Synthetic oligonucleotide
tcagaatgtccggcggttaggggtctccac

SEQ ID NO: 232119 - DNA, 30 bp, Artificial Sequence
  Synthetic oligonucleotide
atgaggggtacgagtgatttacaagtccac

SEQ ID NO: 232120 - DNA, 30 bp, Artificial Sequence
  Synthetic oligonucleotide
ttggtgagggcctgcttactcagcgtccac

SEQ ID NO: 232121 - DNA, 30 bp, Artificial Sequence
  Synthetic oligonucleotide
agtacggctcggagctttacagccttccac

SEQ ID NO: 232122 - DNA, 30 bp, Artificial Sequence
  Synthetic oligonucleotide
ttacctgacaactcatataatatgttccac

SEQ ID NO: 232123 - DNA, 30 bp, Artificial Sequence
  Synthetic oligonucleotide
accgatacggcccggagattcagtttccac

SEQ ID NO: 232124 - DNA, 30 bp, Artificial Sequence
  Synthetic oligonucleotide
atgtcccacatttgaatccgcctaaagcac

SEQ ID NO: 232125 - DNA, 30 bp, Artificial Sequence
  Synthetic oligonucleotide
tgatcctatgcgggccgacagggcaagcac

SEQ ID NO: 232126 - DNA, 30 bp, Artificial Sequence
  Synthetic oligonucleotide
ccaaagacaccagcgagcagcaggaagcac

SEQ ID NO: 232127 - DNA, 30 bp, Artificial Sequence
  Synthetic oligonucleotide
aggctttataccgggagagacgtgaagcac

SEQ ID NO: 232128 - DNA, 30 bp, Artificial Sequence
  Synthetic oligonucleotide
agtgccactagcgtatttggaatacagcac

SEQ ID NO: 232129 - DNA, 30 bp, Artificial Sequence
  Synthetic oligonucleotide
tctatgaagccagacaccaagctacagcac

SEQ ID NO: 232130 - DNA, 30 bp, Artificial Sequence
  Synthetic oligonucleotide
tggcgacaccgagcggcagcggtgcagcac

SEQ ID NO: 232131 - DNA, 30 bp, Artificial Sequence
  Synthetic oligonucleotide
tgaacttagttcgggctcgggtatcagcac

SEQ ID NO: 232132 - DNA, 30 bp, Artificial Sequence
  Synthetic oligonucleotide
ctcgccgaggaaatatatctacgtcagcac

SEQ ID NO: 232133 - DNA, 30 bp, Artificial Sequence
  Synthetic oligonucleotide
acccactgctagcaacactcgcttcagcac

SEQ ID NO: 232134 - DNA, 30 bp, Artificial Sequence
  Synthetic oligonucleotide
gtttccatactgaatagcgaccaatagcac

SEQ ID NO: 232135 - DNA, 30 bp, Artificial Sequence
  Synthetic oligonucleotide
caggcaaagacactttccccgttatagcac

SEQ ID NO: 232136 - DNA, 30 bp, Artificial Sequence
  Synthetic oligonucleotide
atctatggaacaaatattgggagctagcac

SEQ ID NO: 232137 - DNA, 30 bp, Artificial Sequence
  Synthetic oligonucleotide
tgcaacggcaaaccaagcttataaacgcac

SEQ ID NO: 232138 - DNA, 30 bp, Artificial Sequence
  Synthetic oligonucleotide
atactaggcgaggccgccggtttcacgcac

SEQ ID NO: 232139 - DNA, 30 bp, Artificial Sequence
  Synthetic oligonucleotide
aggccaagcggggttcgggacgcgacgcac

SEQ ID NO: 232140 - DNA, 30 bp, Artificial Sequence
  Synthetic oligonucleotide
cattcactggtcggtgataagtctacgcac

SEQ ID NO: 232141 - DNA, 30 bp, Artificial Sequence
  Synthetic oligonucleotide
ctgatcgatatcgcgggaattcttacgcac

SEQ ID NO: 232142 - DNA, 30 bp, Artificial Sequence
  Synthetic oligonucleotide
cgcaccacttgtaggaaattttaaccgcac

SEQ ID NO: 232143 - DNA, 30 bp, Artificial Sequence
  Synthetic oligonucleotide
ccgaagtaggtgtggagcttagcgccgcac

SEQ ID NO: 232144 - DNA, 30 bp, Artificial Sequence
  Synthetic oligonucleotide
tggttatagcggagtccaccagatccgcac

SEQ ID NO: 232145 - DNA, 30 bp, Artificial Sequence
  Synthetic oligonucleotide
ccaaccgttgcgagaaaaaatccagcgcac

SEQ ID NO: 232146 - DNA, 30 bp, Artificial Sequence
  Synthetic oligonucleotide
attgactaagctttgcctaccaccgcgcac

SEQ ID NO: 232147 - DNA, 30 bp, Artificial Sequence
  Synthetic oligonucleotide
ctctgactcctaccgggctagttcgcgcac

SEQ ID NO: 232148 - DNA, 30 bp, Artificial Sequence
  Synthetic oligonucleotide
gcgaaactacgcccattacaccctgcgcac

SEQ ID NO: 232149 - DNA, 30 bp, Artificial Sequence
  Synthetic oligonucleotide
ggacgcacgcggtagctgcataattcgcac

SEQ ID NO: 232150 - DNA, 30 bp, Artificial Sequence
  Synthetic oligonucleotide
atcaaatgtgcccgagcgttagtaaggcac

SEQ ID NO: 232151 - DNA, 30 bp, Artificial Sequence
  Synthetic oligonucleotide
gtcagtcgcaccacaaataaaggacggcac

SEQ ID NO: 232152 - DNA, 30 bp, Artificial Sequence
  Synthetic oligonucleotide
gcaagatagctatcttacgttgtacggcac

SEQ ID NO: 232153 - DNA, 30 bp, Artificial Sequence
  Synthetic oligonucleotide
acgactacgcaacatgctagccggcggcac

SEQ ID NO: 232154 - DNA, 30 bp, Artificial Sequence
  Synthetic oligonucleotide
aagagagccaccttgacggaccatcggcac

SEQ ID NO: 232155 - DNA, 30 bp, Artificial Sequence
  Synthetic oligonucleotide
gagacggtggagggacacagctatcggcac

SEQ ID NO: 232156 - DNA, 30 bp, Artificial Sequence
  Synthetic oligonucleotide
ggtgcgattgtttaaaaatggtatcggcac

SEQ ID NO: 232157 - DNA, 30 bp, Artificial Sequence
  Synthetic oligonucleotide
aaagttgagtcaaatttgccagccgggcac

SEQ ID NO: 232158 - DNA, 30 bp, Artificial Sequence
  Synthetic oligonucleotide
agctgatggtttaataacataaaggggcac

SEQ ID NO: 232159 - DNA, 30 bp, Artificial Sequence
  Synthetic oligonucleotide
ggagggcctagtcatcggactcctgggcac

SEQ ID NO: 232160 - DNA, 30 bp, Artificial Sequence
  Synthetic oligonucleotide
taaatccactatcaagaaactggtgggcac

SEQ ID NO: 232161 - DNA, 30 bp, Artificial Sequence
  Synthetic oligonucleotide
caggtatcggcagtgaggcactagtggcac

SEQ ID NO: 232162 - DNA, 30 bp, Artificial Sequence
  Synthetic oligonucleotide
tggacgtgtaacgagacctagccgtggcac

SEQ ID NO: 232163 - DNA, 30 bp, Artificial Sequence
  Synthetic oligonucleotide
aacatgacgagagaaatgtctaggtggcac

SEQ ID NO: 232164 - DNA, 30 bp, Artificial Sequence
  Synthetic oligonucleotide
ggacacgtaagatgcagctgtctgtggcac

SEQ ID NO: 232165 - DNA, 30 bp, Artificial Sequence
  Synthetic oligonucleotide
ctggcgtatggtgggagatattgttggcac

SEQ ID NO: 232166 - DNA, 30 bp, Artificial Sequence
  Synthetic oligonucleotide
attgcgacacaaaggttctttatttggcac

SEQ ID NO: 232167 - DNA, 30 bp, Artificial Sequence
  Synthetic oligonucleotide
attgtctcaggaattgggtacggaatgcac

SEQ ID NO: 232168 - DNA, 30 bp, Artificial Sequence
  Synthetic oligonucleotide
acttgacctccgactcaataccgcatgcac

SEQ ID NO: 232169 - DNA, 30 bp, Artificial Sequence
  Synthetic oligonucleotide
acgtcattagatgtaaactcctagatgcac

SEQ ID NO: 232170 - DNA, 30 bp, Artificial Sequence
  Synthetic oligonucleotide
atatgatcgtaccatgtggacatgatgcac

SEQ ID NO: 232171 - DNA, 30 bp, Artificial Sequence
  Synthetic oligonucleotide
gcgtcatgtctctatgaagaaagtatgcac

SEQ ID NO: 232172 - DNA, 30 bp, Artificial Sequence
  Synthetic oligonucleotide
gaactagggcgcaccatactaagtatgcac

SEQ ID NO: 232173 - DNA, 30 bp, Artificial Sequence
  Synthetic oligonucleotide
gcttatgttcagtcggcctagcacctgcac

SEQ ID NO: 232174 - DNA, 30 bp, Artificial Sequence
  Synthetic oligonucleotide
agcacctgattgaagcccccgggcctgcac

SEQ ID NO: 232175 - DNA, 30 bp, Artificial Sequence
  Synthetic oligonucleotide
aagaccatatcgcgagtcatcattctgcac

SEQ ID NO: 232176 - DNA, 30 bp, Artificial Sequence
  Synthetic oligonucleotide
gggcaaagaatcactgaaggcagcgtgcac

SEQ ID NO: 232177 - DNA, 30 bp, Artificial Sequence
  Synthetic oligonucleotide
cgttggttaaagtcattaaattaggtgcac

SEQ ID NO: 232178 - DNA, 30 bp, Artificial Sequence
  Synthetic oligonucleotide
gggcagacatgtgtcttaagacctgtgcac

SEQ ID NO: 232179 - DNA, 29 bp, Artificial Sequence
  Synthetic oligonucleotide
acaacatgcgcttgaataaatctgtgcac

SEQ ID NO: 232180 - DNA, 30 bp, Artificial Sequence
  Synthetic oligonucleotide
taaagagcaagggtccgtgttttaaatcac

SEQ ID NO: 232181 - DNA, 30 bp, Artificial Sequence
  Synthetic oligonucleotide
cctattaaactgactgtcgatatcaatcac

SEQ ID NO: 232182 - DNA, 30 bp, Artificial Sequence
  Synthetic oligonucleotide
ttgcactgtctgttgtttagatataatcac

SEQ ID NO: 232183 - DNA, 30 bp, Artificial Sequence
  Synthetic oligonucleotide
acaattacctgcttacaaacgtctaatcac

SEQ ID NO: 232184 - DNA, 30 bp, Artificial Sequence
  Synthetic oligonucleotide
gtgcagtgccatactttcgtaaaccatcac

SEQ ID NO: 232185 - DNA, 30 bp, Artificial Sequence
  Synthetic oligonucleotide
actcaacacatcatgacaggacaccatcac

SEQ ID NO: 232186 - DNA, 30 bp, Artificial Sequence
  Synthetic oligonucleotide
ttggtgttgggtgcaattgcataccatcac

SEQ ID NO: 232187 - DNA, 30 bp, Artificial Sequence
  Synthetic oligonucleotide
attgagggaagcttcgattaaatccatcac

SEQ ID NO: 232188 - DNA, 30 bp, Artificial Sequence
  Synthetic oligonucleotide
ggctggccagtaatccgtgcgcgagatcac

SEQ ID NO: 232189 - DNA, 30 bp, Artificial Sequence
  Synthetic oligonucleotide
ttaagtaaagcgaacgaattcctcgatcac

SEQ ID NO: 232190 - DNA, 30 bp, Artificial Sequence
  Synthetic oligonucleotide
gtaatagtcggatgcaaggcttaggatcac

SEQ ID NO: 232191 - DNA, 30 bp, Artificial Sequence
  Synthetic oligonucleotide
tcggctgatccattttggtcttcggatcac

SEQ ID NO: 232192 - DNA, 30 bp, Artificial Sequence
  Synthetic oligonucleotide
acatggaagagagctcggagtaaatatcac

SEQ ID NO: 232193 - DNA, 30 bp, Artificial Sequence
  Synthetic oligonucleotide
ccagccgggctgtgcgccaacgagtatcac

SEQ ID NO: 232194 - DNA, 30 bp, Artificial Sequence
  Synthetic oligonucleotide
ggggggagccattcgaggtaggggtatcac

SEQ ID NO: 232195 - DNA, 30 bp, Artificial Sequence
  Synthetic oligonucleotide
aatcgttcataaaggtgacccgattatcac

SEQ ID NO: 232196 - DNA, 30 bp, Artificial Sequence
  Synthetic oligonucleotide
cgacgcgtcttgcaacatactttttatcac

SEQ ID NO: 232197 - DNA, 30 bp, Artificial Sequence
  Synthetic oligonucleotide
aaatcgccaattaaggggtagcaaactcac

SEQ ID NO: 232198 - DNA, 30 bp, Artificial Sequence
  Synthetic oligonucleotide
tctacaaatcactcatggggccgaactcac

SEQ ID NO: 232199 - DNA, 30 bp, Artificial Sequence
  Synthetic oligonucleotide
gaatataaaagattacttgtacagactcac

SEQ ID NO: 232200 - DNA, 30 bp, Artificial Sequence
  Synthetic oligonucleotide
aaaacggaggcccctcgttagcagactcac

SEQ ID NO: 232201 - DNA, 30 bp, Artificial Sequence
  Synthetic oligonucleotide
gaatcgttgcaagatgtggataggactcac

SEQ ID NO: 232202 - DNA, 30 bp, Artificial Sequence
  Synthetic oligonucleotide
ctgcgtcaatctggctgcacaattactcac

SEQ ID NO: 232203 - DNA, 30 bp, Artificial Sequence
  Synthetic oligonucleotide
cggtaacgtactctttgctcaagacctcac

SEQ ID NO: 232204 - DNA, 30 bp, Artificial Sequence
  Synthetic oligonucleotide
gcagaggtgggttcagtgttatcgcctcac

SEQ ID NO: 232205 - DNA, 30 bp, Artificial Sequence
  Synthetic oligonucleotide
ttaattttggtggaaacaaaactgcctcac

SEQ ID NO: 232206 - DNA, 30 bp, Artificial Sequence
  Synthetic oligonucleotide
taacaaacgcgtacgaactgtattcctcac

SEQ ID NO: 232207 - DNA, 30 bp, Artificial Sequence
  Synthetic oligonucleotide
agagggtccatcggggcattagcagctcac

SEQ ID NO: 232208 - DNA, 30 bp, Artificial Sequence
  Synthetic oligonucleotide
atggactgctagtacgtcatcggggctcac

SEQ ID NO: 232209 - DNA, 30 bp, Artificial Sequence
  Synthetic oligonucleotide
ccgggctcagacgctatgaggcttgctcac

SEQ ID NO: 232210 - DNA, 30 bp, Artificial Sequence
  Synthetic oligonucleotide
acaaccgattcacgaacaatcgtgagtcac

SEQ ID NO: 232211 - DNA, 30 bp, Artificial Sequence
  Synthetic oligonucleotide
taaattcggaaacgggctgataagcgtcac

SEQ ID NO: 232212 - DNA, 30 bp, Artificial Sequence
  Synthetic oligonucleotide
ctaaatagctaaaaggatttgtatcgtcac

SEQ ID NO: 232213 - DNA, 30 bp, Artificial Sequence
  Synthetic oligonucleotide
tgtaggagtagtctatcataacaaggtcac

SEQ ID NO: 232214 - DNA, 30 bp, Artificial Sequence
  Synthetic oligonucleotide
gggccacctaggtcaacagtagcaggtcac

SEQ ID NO: 232215 - DNA, 30 bp, Artificial Sequence
  Synthetic oligonucleotide
cagtcgctctctgcgccatagttaggtcac

SEQ ID NO: 232216 - DNA, 30 bp, Artificial Sequence
  Synthetic oligonucleotide
cgatacctgttatagagcatgtccggtcac

SEQ ID NO: 232217 - DNA, 30 bp, Artificial Sequence
  Synthetic oligonucleotide
agggttttaatctttcctctccggggtcac

SEQ ID NO: 232218 - DNA, 30 bp, Artificial Sequence
  Synthetic oligonucleotide
gatccaacaactctgagcaggactggtcac

SEQ ID NO: 232219 - DNA, 30 bp, Artificial Sequence
  Synthetic oligonucleotide
gtctcgaagtgcaacaattctcctggtcac

SEQ ID NO: 232220 - DNA, 30 bp, Artificial Sequence
  Synthetic oligonucleotide
tgcgtgaaaaggcaacccccgggtggtcac

SEQ ID NO: 232221 - DNA, 30 bp, Artificial Sequence
  Synthetic oligonucleotide
catcacggaccgctcgctgaaggatgtcac

SEQ ID NO: 232222 - DNA, 30 bp, Artificial Sequence
  Synthetic oligonucleotide
actgcagaagaccacaccagtaaaattcac

SEQ ID NO: 232223 - DNA, 30 bp, Artificial Sequence
  Synthetic oligonucleotide
gctcgatgggtttctcgccttcacattcac

SEQ ID NO: 232224 - DNA, 30 bp, Artificial Sequence
  Synthetic oligonucleotide
gatatctgcgactctctcggaaccattcac

SEQ ID NO: 232225 - DNA, 30 bp, Artificial Sequence
  Synthetic oligonucleotide
cgggcattctttcagtgatgaggcattcac

SEQ ID NO: 232226 - DNA, 30 bp, Artificial Sequence
  Synthetic oligonucleotide
caagtcggggctaacgcgttggagattcac

SEQ ID NO: 232227 - DNA, 30 bp, Artificial Sequence
  Synthetic oligonucleotide
gaagtcaccagactagttatcgcgattcac

SEQ ID NO: 232228 - DNA, 30 bp, Artificial Sequence
  Synthetic oligonucleotide
aattacagccgggcacacatttatattcac

SEQ ID NO: 232229 - DNA, 30 bp, Artificial Sequence
  Synthetic oligonucleotide
tctgtccagggcaaacattgatgccttcac

SEQ ID NO: 232230 - DNA, 30 bp, Artificial Sequence
  Synthetic oligonucleotide
ggtcacggaggccccatgcgaaatgttcac

SEQ ID NO: 232231 - DNA, 30 bp, Artificial Sequence
  Synthetic oligonucleotide
taaatggtacgatatgagcccgatgttcac

SEQ ID NO: 232232 - DNA, 30 bp, Artificial Sequence
  Synthetic oligonucleotide
ttgagagttccaatgccgagcacatttcac

SEQ ID NO: 232233 - DNA, 30 bp, Artificial Sequence
  Synthetic oligonucleotide
tactagctggttggctaatcgcactttcac

SEQ ID NO: 232234 - DNA, 30 bp, Artificial Sequence
  Synthetic oligonucleotide
ctaccacaaacaccgagtaactactttcac

SEQ ID NO: 232235 - DNA, 30 bp, Artificial Sequence
  Synthetic oligonucleotide
ccgggcacagacctggtcggccggtttcac

SEQ ID NO: 232236 - DNA, 34 bp, Artificial Sequence
  Synthetic oligonucleotide
gatactagaccaccacgtgtcaatcagaaaagac

SEQ ID NO: 232237 - DNA, 31 bp, Artificial Sequence
  Synthetic oligonucleotide
gatactagaccacgtgtccatcagaaaagac

SEQ ID NO: 232238 - DNA, 34 bp, Artificial Sequence
  Synthetic oligonucleotide
gatactagaccaccacttgtccatcagaaaagac

SEQ ID NO: 232239 - DNA, 30 bp, Artificial Sequence
  Synthetic oligonucleotide
aatgcggaccgccggagtttccgaaaagac

SEQ ID NO: 232240 - DNA, 30 bp, Artificial Sequence
  Synthetic oligonucleotide
tagcatccggccgtaccgggtaggaaagac

SEQ ID NO: 232241 - DNA, 30 bp, Artificial Sequence
  Synthetic oligonucleotide
aataaatgaggcgttagggagaataaagac

SEQ ID NO: 232242 - DNA, 30 bp, Artificial Sequence
  Synthetic oligonucleotide
atcccggcggtcctcgctgtcccacaagac

SEQ ID NO: 232243 - DNA, 30 bp, Artificial Sequence
  Synthetic oligonucleotide
ccagtgcgtccagaggccgaaagacaagac

SEQ ID NO: 232244 - DNA, 31 bp, Artificial Sequence
  Synthetic oligonucleotide
cgccgggtctggactggcattatggcaagac

SEQ ID NO: 232245 - DNA, 30 bp, Artificial Sequence
  Synthetic oligonucleotide
gttcagcgtttgcgagaatctgcagaagac

SEQ ID NO: 232246 - DNA, 30 bp, Artificial Sequence
  Synthetic oligonucleotide
acagcagagcaccatattaatctagaagac

SEQ ID NO: 232247 - DNA, 30 bp, Artificial Sequence
  Synthetic oligonucleotide
ctacgtcacccggacaccaaggacgaagac

SEQ ID NO: 232248 - DNA, 30 bp, Artificial Sequence
  Synthetic oligonucleotide
gctcacgtgttaggaactgcgagggaagac

SEQ ID NO: 232249 - DNA, 30 bp, Artificial Sequence
  Synthetic oligonucleotide
aaagtatagttatatgtatttagggaagac

SEQ ID NO: 232250 - DNA, 30 bp, Artificial Sequence
  Synthetic oligonucleotide
tgactatacaactgggggaggcgtgaagac

SEQ ID NO: 232251 - DNA, 30 bp, Artificial Sequence
  Synthetic oligonucleotide
tggacaaagagttcaccgccctgtgaagac

SEQ ID NO: 232252 - DNA, 30 bp, Artificial Sequence
  Synthetic oligonucleotide
aaagggctctgacaatcatcgatataagac

SEQ ID NO: 232253 - DNA, 30 bp, Artificial Sequence
  Synthetic oligonucleotide
tagaggtaggtgatgatgtcccaaacagac

SEQ ID NO: 232254 - DNA, 30 bp, Artificial Sequence
  Synthetic oligonucleotide
gggacctgtacaggcgggaactgaacagac

SEQ ID NO: 232255 - DNA, 30 bp, Artificial Sequence
  Synthetic oligonucleotide
taaccaggctgggtgtgtattaacacagac

SEQ ID NO: 232256 - DNA, 30 bp, Artificial Sequence
  Synthetic oligonucleotide
aagccagcgtcggggggaaggctcacagac

SEQ ID NO: 232257 - DNA, 30 bp, Artificial Sequence
  Synthetic oligonucleotide
ttacttacggctctgtcctaaccgacagac

SEQ ID NO: 232258 - DNA, 30 bp, Artificial Sequence
  Synthetic oligonucleotide
ttctcggcgaactttcgaaagcggacagac

SEQ ID NO: 232259 - DNA, 30 bp, Artificial Sequence
  Synthetic oligonucleotide
gtatcattatttgtaaaacgctatacagac

SEQ ID NO: 232260 - DNA, 30 bp, Artificial Sequence
  Synthetic oligonucleotide
agtggggggaacctcatatacggtacagac

SEQ ID NO: 232261 - DNA, 30 bp, Artificial Sequence
  Synthetic oligonucleotide
cggtgagtcctgggagtaatcattacagac

SEQ ID NO: 232262 - DNA, 30 bp, Artificial Sequence
  Synthetic oligonucleotide
cctaaatgtggtcttcacaccgacccagac

SEQ ID NO: 232263 - DNA, 30 bp, Artificial Sequence
  Synthetic oligonucleotide
ggcacccgttaactggcatcccgtccagac

SEQ ID NO: 232264 - DNA, 30 bp, Artificial Sequence
  Synthetic oligonucleotide
gggtacgagatgtggtgcttgcgtccagac

SEQ ID NO: 232265 - DNA, 30 bp, Artificial Sequence
  Synthetic oligonucleotide
cttcgggaaacgtaatgtcctgtatcagac

SEQ ID NO: 232266 - DNA, 30 bp, Artificial Sequence
  Synthetic oligonucleotide
ttccttgacgaactgatacatcgctcagac

SEQ ID NO: 232267 - DNA, 30 bp, Artificial Sequence
  Synthetic oligonucleotide
agcatgtcgtgagcaggcttgcagtcagac

SEQ ID NO: 232268 - DNA, 30 bp, Artificial Sequence
  Synthetic oligonucleotide
aagcgtgtcggctagccgaaggggtcagac

SEQ ID NO: 232269 - DNA, 30 bp, Artificial Sequence
  Synthetic oligonucleotide
ataaatacctgccgccggagtgggtcagac

SEQ ID NO: 232270 - DNA, 30 bp, Artificial Sequence
  Synthetic oligonucleotide
catagtccattgaggagtgaatattcagac

SEQ ID NO: 232271 - DNA, 30 bp, Artificial Sequence
  Synthetic oligonucleotide
gggatgtagtcgtttcatttatattcagac

SEQ ID NO: 232272 - DNA, 30 bp, Artificial Sequence
  Synthetic oligonucleotide
aggggccgaccgcggccgggatgttcagac

SEQ ID NO: 232273 - DNA, 30 bp, Artificial Sequence
  Synthetic oligonucleotide
ttggcgcgaacctcgacggaacacagagac

SEQ ID NO: 232274 - DNA, 30 bp, Artificial Sequence
  Synthetic oligonucleotide
gggagagactctgggctaatggcgagagac

SEQ ID NO: 232275 - DNA, 30 bp, Artificial Sequence
  Synthetic oligonucleotide
acatccatcgatacatcatcgtggagagac

SEQ ID NO: 232276 - DNA, 30 bp, Artificial Sequence
  Synthetic oligonucleotide
aggcggtatgttggagatctacatagagac

SEQ ID NO: 232277 - DNA, 30 bp, Artificial Sequence
  Synthetic oligonucleotide
gcgcgttcgagagtcctgaaccttagagac

SEQ ID NO: 232278 - DNA, 30 bp, Artificial Sequence
  Synthetic oligonucleotide
actacaagtcgggcctaatttagacgagac

SEQ ID NO: 232279 - DNA, 30 bp, Artificial Sequence
  Synthetic oligonucleotide
tcttcgtaaacaagcgccaggctccgagac

SEQ ID NO: 232280 - DNA, 30 bp, Artificial Sequence
  Synthetic oligonucleotide
tcgttttccatgaattgcctgtggcgagac

SEQ ID NO: 232281 - DNA, 30 bp, Artificial Sequence
  Synthetic oligonucleotide
gaaacgactagttcgaccacaggtcgagac

SEQ ID NO: 232282 - DNA, 30 bp, Artificial Sequence
  Synthetic oligonucleotide
catgtgaaatgtgaccgctcgtgtcgagac

SEQ ID NO: 232283 - DNA, 30 bp, Artificial Sequence
  Synthetic oligonucleotide
cgaatacggctgacaagctggccaggagac

SEQ ID NO: 232284 - DNA, 30 bp, Artificial Sequence
  Synthetic oligonucleotide
aaatatgggtggtcaaaacgtaatggagac

SEQ ID NO: 232285 - DNA, 30 bp, Artificial Sequence
  Synthetic oligonucleotide
gaggcgggcgtatctattggtaatggagac

SEQ ID NO: 232286 - DNA, 30 bp, Artificial Sequence
  Synthetic oligonucleotide
acccagacatgggtacgtaatattggagac

SEQ ID NO: 232287 - DNA, 30 bp, Artificial Sequence
  Synthetic oligonucleotide
aagatctttttccagacagcatttggagac

SEQ ID NO: 232288 - DNA, 30 bp, Artificial Sequence
  Synthetic oligonucleotide
cagcatctgaagcttgtacgtcgatgagac

SEQ ID NO: 232289 - DNA, 30 bp, Artificial Sequence
  Synthetic oligonucleotide
tgcccgagactgccgacagtacggtgagac

SEQ ID NO: 232290 - DNA, 30 bp, Artificial Sequence
  Synthetic oligonucleotide
gtaaaagacgggttaaggaaccattgagac

SEQ ID NO: 232291 - DNA, 30 bp, Artificial Sequence
  Synthetic oligonucleotide
gggactcacatgtcgacccatgcttgagac

SEQ ID NO: 232292 - DNA, 30 bp, Artificial Sequence
  Synthetic oligonucleotide
tgtatccacacaatcgcctatggttgagac

SEQ ID NO: 232293 - DNA, 30 bp, Artificial Sequence
  Synthetic oligonucleotide
gtctatcgcggtagcgccgcccaaatagac

SEQ ID NO: 232294 - DNA, 30 bp, Artificial Sequence
  Synthetic oligonucleotide
ccatgagctaatgtggcaggtacaatagac

SEQ ID NO: 232295 - DNA, 30 bp, Artificial Sequence
  Synthetic oligonucleotide
gtgggctttacaagcgggggttacatagac

SEQ ID NO: 232296 - DNA, 30 bp, Artificial Sequence
  Synthetic oligonucleotide
aagagcagggtttaggttccacagatagac

SEQ ID NO: 232297 - DNA, 30 bp, Artificial Sequence
  Synthetic oligonucleotide
agcggatcatgggcgacctaatcgatagac

SEQ ID NO: 232298 - DNA, 30 bp, Artificial Sequence
  Synthetic oligonucleotide
ctgccacgcggcaaactaagagggatagac

SEQ ID NO: 232299 - DNA, 30 bp, Artificial Sequence
  Synthetic oligonucleotide
tgagaaagcaggacctaccaggtgatagac

SEQ ID NO: 232300 - DNA, 30 bp, Artificial Sequence
  Synthetic oligonucleotide
gcaaaccgggattctattctaaatatagac

SEQ ID NO: 232301 - DNA, 30 bp, Artificial Sequence
  Synthetic oligonucleotide
caatcaaatacaaatttccctcccgtagac

SEQ ID NO: 232302 - DNA, 30 bp, Artificial Sequence
  Synthetic oligonucleotide
ccaggacccggacatagcaataaggtagac

SEQ ID NO: 232303 - DNA, 30 bp, Artificial Sequence
  Synthetic oligonucleotide
actgatacgggaaattaaaagtcggtagac

SEQ ID NO: 232304 - DNA, 30 bp, Artificial Sequence
  Synthetic oligonucleotide
tggctaaagacacacatctatcttgtagac

SEQ ID NO: 232305 - DNA, 30 bp, Artificial Sequence
  Synthetic oligonucleotide
aaaggccgcgggccaagtagggcattagac

SEQ ID NO: 232306 - DNA, 30 bp, Artificial Sequence
  Synthetic oligonucleotide
ctttaatgttgaagagttatccacttagac

SEQ ID NO: 232307 - DNA, 30 bp, Artificial Sequence
  Synthetic oligonucleotide
aaagaccctaactaagaggtatagttagac

SEQ ID NO: 232308 - DNA, 30 bp, Artificial Sequence
  Synthetic oligonucleotide
agatgcgataatacgaagcgatcgttagac

SEQ ID NO: 232309 - DNA, 31 bp, Artificial Sequence
  Synthetic oligonucleotide
catgccgctacaaggaacactcattttagac

SEQ ID NO: 232310 - DNA, 30 bp, Artificial Sequence
  Synthetic oligonucleotide
taaagaagctatgttcaaatcgaaaacgac

SEQ ID NO: 232311 - DNA, 30 bp, Artificial Sequence
  Synthetic oligonucleotide
agagaatcgaattgggtttgagcaaacgac

SEQ ID NO: 232312 - DNA, 30 bp, Artificial Sequence
  Synthetic oligonucleotide
ttcggtggtcccggaaggcaacgcaacgac

SEQ ID NO: 232313 - DNA, 30 bp, Artificial Sequence
  Synthetic oligonucleotide
ccagcgaaaaggcagtgctcatagaacgac

SEQ ID NO: 232314 - DNA, 30 bp, Artificial Sequence
  Synthetic oligonucleotide
tccgcccaacctgctacatcgagtaacgac

SEQ ID NO: 232315 - DNA, 31 bp, Artificial Sequence
  Synthetic oligonucleotide
cagcccctagtaaggacacattagtaacgac

SEQ ID NO: 232316 - DNA, 30 bp, Artificial Sequence
  Synthetic oligonucleotide
gatgaggatttacgagtcgaagttaacgac

SEQ ID NO: 232317 - DNA, 30 bp, Artificial Sequence
  Synthetic oligonucleotide
actcgtctgtcggtcaaaagactccacgac

SEQ ID NO: 232318 - DNA, 30 bp, Artificial Sequence
  Synthetic oligonucleotide
ctgtccggtcctaattagacctagcacgac

SEQ ID NO: 232319 - DNA, 30 bp, Artificial Sequence
  Synthetic oligonucleotide
tggataagcctatcaaatggattgcacgac

SEQ ID NO: 232320 - DNA, 30 bp, Artificial Sequence
  Synthetic oligonucleotide
ccagccaaggtatgcgttacgtgagacgac

SEQ ID NO: 232321 - DNA, 40 bp, Artificial Sequence
  Synthetic oligonucleotide
cttccgactgtaagttgtctaaagcctcaaactagacgac

SEQ ID NO: 232322 - DNA, 30 bp, Artificial Sequence
  Synthetic oligonucleotide
acagggccgtttatgcgctaaagcgacgac

SEQ ID NO: 232323 - DNA, 30 bp, Artificial Sequence
  Synthetic oligonucleotide
attccttaaccacattcagtgagcgacgac

SEQ ID NO: 232324 - DNA, 30 bp, Artificial Sequence
  Synthetic oligonucleotide
taagactcccggactcgcacgatggacgac

SEQ ID NO: 232325 - DNA, 30 bp, Artificial Sequence
  Synthetic oligonucleotide
atcgtaatcgtagctccctacgctgacgac

SEQ ID NO: 232326 - DNA, 30 bp, Artificial Sequence
  Synthetic oligonucleotide
attccagtaccctaagtcatattatacgac

SEQ ID NO: 232327 - DNA, 30 bp, Artificial Sequence
  Synthetic oligonucleotide
aataggcggttagaaagggttacgtacgac

SEQ ID NO: 232328 - DNA, 30 bp, Artificial Sequence
  Synthetic oligonucleotide
gaaaaattcctttatcggctgctgtacgac

SEQ ID NO: 232329 - DNA, 30 bp, Artificial Sequence
  Synthetic oligonucleotide
tatatgcgcaaggtgaatatcacaaccgac

SEQ ID NO: 232330 - DNA, 30 bp, Artificial Sequence
  Synthetic oligonucleotide
ttgctcctatgagcctccccccgccccgac

SEQ ID NO: 232331 - DNA, 30 bp, Artificial Sequence
  Synthetic oligonucleotide
gtgcacccaaccgtcgtcgtattccccgac

SEQ ID NO: 232332 - DNA, 30 bp, Artificial Sequence
  Synthetic oligonucleotide
aagccgcaatgcaggcaattacggcccgac

SEQ ID NO: 232333 - DNA, 30 bp, Artificial Sequence
  Synthetic oligonucleotide
ttcgcgcagcttgtgtggtcagatcccgac

SEQ ID NO: 232334 - DNA, 30 bp, Artificial Sequence
  Synthetic oligonucleotide
atgaggagacgcagtttcgatcttcccgac

SEQ ID NO: 232335 - DNA, 30 bp, Artificial Sequence
  Synthetic oligonucleotide
agctaagctcgtgcaatcgacgtggccgac

SEQ ID NO: 232336 - DNA, 30 bp, Artificial Sequence
  Synthetic oligonucleotide
cgctgcgtagtggttaaaactcagtccgac

SEQ ID NO: 232337 - DNA, 30 bp, Artificial Sequence
  Synthetic oligonucleotide
cgctcctgggctcatcgtatatagtccgac

SEQ ID NO: 232338 - DNA, 30 bp, Artificial Sequence
  Synthetic oligonucleotide
aggggggccgtgacttgtcccgggtccgac

SEQ ID NO: 232339 - DNA, 30 bp, Artificial Sequence
  Synthetic oligonucleotide
atactcacgactatggggcttaattccgac

SEQ ID NO: 232340 - DNA, 30 bp, Artificial Sequence
  Synthetic oligonucleotide
tcaatagtcgggtaccggataagttccgac

SEQ ID NO: 232341 - DNA, 30 bp, Artificial Sequence
  Synthetic oligonucleotide
attccaaccgacccataacaggcaagcgac

SEQ ID NO: 232342 - DNA, 30 bp, Artificial Sequence
  Synthetic oligonucleotide
caacagtgttgtattcgtaagtcaagcgac

SEQ ID NO: 232343 - DNA, 30 bp, Artificial Sequence
  Synthetic oligonucleotide
aatgcaggtggaatcttttgaaccagcgac

SEQ ID NO: 232344 - DNA, 30 bp, Artificial Sequence
  Synthetic oligonucleotide
tgcgttggacgccagaggccacggagcgac

SEQ ID NO: 232345 - DNA, 30 bp, Artificial Sequence
  Synthetic oligonucleotide
gaccttaggctattggtctgactgagcgac

SEQ ID NO: 232346 - DNA, 30 bp, Artificial Sequence
  Synthetic oligonucleotide
ccacaaggtccatgcatcctgcgtagcgac

SEQ ID NO: 232347 - DNA, 30 bp, Artificial Sequence
  Synthetic oligonucleotide
ggtttaaggagttacataaaaggtagcgac

SEQ ID NO: 232348 - DNA, 30 bp, Artificial Sequence
  Synthetic oligonucleotide
tctgtttgaccgagagttcaaccacgcgac

SEQ ID NO: 232349 - DNA, 30 bp, Artificial Sequence
  Synthetic oligonucleotide
tctcggatatttggatgcgccgaccgcgac

SEQ ID NO: 232350 - DNA, 30 bp, Artificial Sequence
  Synthetic oligonucleotide
gtgtttatgatagtggcgtgcttccgcgac

SEQ ID NO: 232351 - DNA, 30 bp, Artificial Sequence
  Synthetic oligonucleotide
acctcggactccgaaacttcaaagcgcgac

SEQ ID NO: 232352 - DNA, 30 bp, Artificial Sequence
  Synthetic oligonucleotide
aaatcgatgtaccgaacccctgatcgcgac

SEQ ID NO: 232353 - DNA, 30 bp, Artificial Sequence
  Synthetic oligonucleotide
gtttgccttagggagagcattgctcgcgac

SEQ ID NO: 232354 - DNA, 30 bp, Artificial Sequence
  Synthetic oligonucleotide
gagggggtattcaggggcgtggttcgcgac

SEQ ID NO: 232355 - DNA, 30 bp, Artificial Sequence
  Synthetic oligonucleotide
gtccaaacgtgcacgtcattgaaaggcgac

SEQ ID NO: 232356 - DNA, 30 bp, Artificial Sequence
  Synthetic oligonucleotide
catagtgtaattaggtgcgtagtaggcgac

SEQ ID NO: 232357 - DNA, 30 bp, Artificial Sequence
  Synthetic oligonucleotide
atggaggtccaacgaacgtgtcccggcgac

SEQ ID NO: 232358 - DNA, 30 bp, Artificial Sequence
  Synthetic oligonucleotide
gtctaatagtatggcgcatactccggcgac

SEQ ID NO: 232359 - DNA, 30 bp, Artificial Sequence
  Synthetic oligonucleotide
ctgtgaccgacccccttaataagcggcgac

SEQ ID NO: 232360 - DNA, 30 bp, Artificial Sequence
  Synthetic oligonucleotide
ggttaagatgaacggtcaaaaggcggcgac

SEQ ID NO: 232361 - DNA, 30 bp, Artificial Sequence
  Synthetic oligonucleotide
ttgttgcgcgaatttctagtgatcggcgac

SEQ ID NO: 232362 - DNA, 30 bp, Artificial Sequence
  Synthetic oligonucleotide
gacttcccggacggatgctgccagggcgac

SEQ ID NO: 232363 - DNA, 29 bp, Artificial Sequence
  Synthetic oligonucleotide
cttcaactctatcactggggaatggcgac

SEQ ID NO: 232364 - DNA, 30 bp, Artificial Sequence
  Synthetic oligonucleotide
gagaattacatccagttgtaccgtggcgac

SEQ ID NO: 232365 - DNA, 30 bp, Artificial Sequence
  Synthetic oligonucleotide
ttccaacttcaaaaatgtgatacatgcgac

SEQ ID NO: 232366 - DNA, 30 bp, Artificial Sequence
  Synthetic oligonucleotide
gggataagtcatacctgaagcatatgcgac

SEQ ID NO: 232367 - DNA, 30 bp, Artificial Sequence
  Synthetic oligonucleotide
gccatagcatctatgatgacgccctgcgac

SEQ ID NO: 232368 - DNA, 30 bp, Artificial Sequence
  Synthetic oligonucleotide
cctatgcggggattgttgaaccagtgcgac

SEQ ID NO: 232369 - DNA, 30 bp, Artificial Sequence
  Synthetic oligonucleotide
gtatacggggattgtttccacgggtgcgac

SEQ ID NO: 232370 - DNA, 29 bp, Artificial Sequence
  Synthetic oligonucleotide
ttcgtcctacgagggttcatacttgcgac

SEQ ID NO: 232371 - DNA, 30 bp, Artificial Sequence
  Synthetic oligonucleotide
gtgcattaaagcgtgcgcgttaccatcgac

SEQ ID NO: 232372 - DNA, 30 bp, Artificial Sequence
  Synthetic oligonucleotide
gagggtgtctcccaagggaacgatatcgac

SEQ ID NO: 232373 - DNA, 30 bp, Artificial Sequence
  Synthetic oligonucleotide
ggacacctatttggcgcgccatctatcgac

SEQ ID NO: 232374 - DNA, 30 bp, Artificial Sequence
  Synthetic oligonucleotide
ggctgcgagtaagaaaaagaatttatcgac

SEQ ID NO: 232375 - DNA, 30 bp, Artificial Sequence
  Synthetic oligonucleotide
aagctcgcatccgccaagaggactctcgac

SEQ ID NO: 232376 - DNA, 30 bp, Artificial Sequence
  Synthetic oligonucleotide
aggccttaaggcggctagagatctctcgac

SEQ ID NO: 232377 - DNA, 30 bp, Artificial Sequence
  Synthetic oligonucleotide
taaacaacagttctggaaagggcagtcgac

SEQ ID NO: 232378 - DNA, 30 bp, Artificial Sequence
  Synthetic oligonucleotide
attaggatcattacgtatccgtacgtcgac

SEQ ID NO: 232379 - DNA, 30 bp, Artificial Sequence
  Synthetic oligonucleotide
cagtaggaaccctccgcttttgccgtcgac

SEQ ID NO: 232380 - DNA, 30 bp, Artificial Sequence
  Synthetic oligonucleotide
tgcggactgctggcactatgggaggtcgac

SEQ ID NO: 232381 - DNA, 30 bp, Artificial Sequence
  Synthetic oligonucleotide
ttaggcaaacagccctgcatatacttcgac

SEQ ID NO: 232382 - DNA, 30 bp, Artificial Sequence
  Synthetic oligonucleotide
ccatgctagaggaattaagacggtttcgac

SEQ ID NO: 232383 - DNA, 30 bp, Artificial Sequence
  Synthetic oligonucleotide
tgaatagttactcaattacaaaccaaggac

SEQ ID NO: 232384 - DNA, 30 bp, Artificial Sequence
  Synthetic oligonucleotide
cttggagagttacgggattcatcgaaggac

SEQ ID NO: 232385 - DNA, 30 bp, Artificial Sequence
  Synthetic oligonucleotide
caaattactcaagtccggtagtctaaggac

SEQ ID NO: 232386 - DNA, 30 bp, Artificial Sequence
  Synthetic oligonucleotide
tgacttgcggggaatgcctgacttaaggac

SEQ ID NO: 232387 - DNA, 30 bp, Artificial Sequence
  Synthetic oligonucleotide
acatgatcctggtcacctctatgccaggac

SEQ ID NO: 232388 - DNA, 30 bp, Artificial Sequence
  Synthetic oligonucleotide
tctttcgggtttacacgtgaccggcaggac

SEQ ID NO: 232389 - DNA, 30 bp, Artificial Sequence
  Synthetic oligonucleotide
gggtttccgaaacaaaagtagttagaggac

SEQ ID NO: 232390 - DNA, 30 bp, Artificial Sequence
  Synthetic oligonucleotide
gacgccggaacctgtgaggtgcgcgaggac

SEQ ID NO: 232391 - DNA, 30 bp, Artificial Sequence
  Synthetic oligonucleotide
gtagagtcactagaacctgtccaggaggac

SEQ ID NO: 232392 - DNA, 30 bp, Artificial Sequence
  Synthetic oligonucleotide
acatctatcatcgactctgaataggaggac

SEQ ID NO: 232393 - DNA, 30 bp, Artificial Sequence
  Synthetic oligonucleotide
gaacgggatcaatggagcattccggaggac

SEQ ID NO: 232394 - DNA, 30 bp, Artificial Sequence
  Synthetic oligonucleotide
tttcgagtcagcggtggaacggcggaggac

SEQ ID NO: 232395 - DNA, 30 bp, Artificial Sequence
  Synthetic oligonucleotide
ctggttatcagcttacttaacgactaggac

SEQ ID NO: 232396 - DNA, 30 bp, Artificial Sequence
  Synthetic oligonucleotide
gatagcggacgaggctctacaggctaggac

SEQ ID NO: 232397 - DNA, 30 bp, Artificial Sequence
  Synthetic oligonucleotide
gctacttagggactctttccagcgtaggac

SEQ ID NO: 232398 - DNA, 30 bp, Artificial Sequence
  Synthetic oligonucleotide
cgcgtcgcgcacttgtcataaggttaggac

SEQ ID NO: 232399 - DNA, 30 bp, Artificial Sequence
  Synthetic oligonucleotide
accttgagttacgtagatcttggttaggac

SEQ ID NO: 232400 - DNA, 30 bp, Artificial Sequence
  Synthetic oligonucleotide
atcgatttacctgggtaggcgctaacggac

SEQ ID NO: 232401 - DNA, 30 bp, Artificial Sequence
  Synthetic oligonucleotide
tccttccagaagctgacttaagtaacggac

SEQ ID NO: 232402 - DNA, 30 bp, Artificial Sequence
  Synthetic oligonucleotide
atgttcaattacacaaattaggccacggac

SEQ ID NO: 232403 - DNA, 30 bp, Artificial Sequence
  Synthetic oligonucleotide
aacaacaactggtaatatcgacagacggac

SEQ ID NO: 232404 - DNA, 30 bp, Artificial Sequence
  Synthetic oligonucleotide
tacggcatctcaacatctttggaaccggac

SEQ ID NO: 232405 - DNA, 30 bp, Artificial Sequence
  Synthetic oligonucleotide
agtagattactggagtgaaattacccggac

SEQ ID NO: 232406 - DNA, 30 bp, Artificial Sequence
  Synthetic oligonucleotide
aaacaccttttatcgtgtgttgccccggac

SEQ ID NO: 232407 - DNA, 30 bp, Artificial Sequence
  Synthetic oligonucleotide
cgtttaatttcgaggaagtatcgcccggac

SEQ ID NO: 232408 - DNA, 30 bp, Artificial Sequence
  Synthetic oligonucleotide
tcccaactacgggcagcggtaacgccggac

SEQ ID NO: 232409 - DNA, 30 bp, Artificial Sequence
  Synthetic oligonucleotide
cggtttgcggtcggttcgcgggatgcggac

SEQ ID NO: 232410 - DNA, 30 bp, Artificial Sequence
  Synthetic oligonucleotide
atatatcagaggggacaatgacgctcggac

SEQ ID NO: 232411 - DNA, 30 bp, Artificial Sequence
  Synthetic oligonucleotide
aacaaaagttatgcgaattggaagtcggac

SEQ ID NO: 232412 - DNA, 30 bp, Artificial Sequence
  Synthetic oligonucleotide
ctttagtagacgggcggactagtgtcggac

SEQ ID NO: 232413 - DNA, 30 bp, Artificial Sequence
  Synthetic oligonucleotide
cggataaatttggcatttctggcttcggac

SEQ ID NO: 232414 - DNA, 30 bp, Artificial Sequence
  Synthetic oligonucleotide
tgtaactgctgggagtggcgttgttcggac

SEQ ID NO: 232415 - DNA, 30 bp, Artificial Sequence
  Synthetic oligonucleotide
attgtccttgtgaaggttccaccaagggac

SEQ ID NO: 232416 - DNA, 30 bp, Artificial Sequence
  Synthetic oligonucleotide
agtcatgtcagaggaggctgcggaagggac

SEQ ID NO: 232417 - DNA, 30 bp, Artificial Sequence
  Synthetic oligonucleotide
ggactggcgcgattattccgggtaagggac

SEQ ID NO: 232418 - DNA, 30 bp, Artificial Sequence
  Synthetic oligonucleotide
tgttgagagtcctgaagctaatacagggac

SEQ ID NO: 232419 - DNA, 30 bp, Artificial Sequence
  Synthetic oligonucleotide
ggtgagacgcgccgcgagctgagcagggac

SEQ ID NO: 232420 - DNA, 30 bp, Artificial Sequence
  Synthetic oligonucleotide
tttgctcgcctcgggaaatctgttagggac

SEQ ID NO: 232421 - DNA, 30 bp, Artificial Sequence
  Synthetic oligonucleotide
gtacgcgttcggaattacgacgagcgggac

SEQ ID NO: 232422 - DNA, 30 bp, Artificial Sequence
  Synthetic oligonucleotide
gagtggtttacttcattaacaatgcgggac

SEQ ID NO: 232423 - DNA, 30 bp, Artificial Sequence
  Synthetic oligonucleotide
tccggtttatatcgttttgttatgcgggac

SEQ ID NO: 232424 - DNA, 30 bp, Artificial Sequence
  Synthetic oligonucleotide
ttccgccctaggtgaccatcgagaggggac

SEQ ID NO: 232425 - DNA, 30 bp, Artificial Sequence
  Synthetic oligonucleotide
accttgtaaatactatgatagcgaggggac

SEQ ID NO: 232426 - DNA, 30 bp, Artificial Sequence
  Synthetic oligonucleotide
tcgagggtggaagcgtccggtggaggggac

SEQ ID NO: 232427 - DNA, 30 bp, Artificial Sequence
  Synthetic oligonucleotide
catactcgggcactctcgtcaggcggggac

SEQ ID NO: 232428 - DNA, 30 bp, Artificial Sequence
  Synthetic oligonucleotide
atcacacactattggacccatttcggggac

SEQ ID NO: 232429 - DNA, 30 bp, Artificial Sequence
  Synthetic oligonucleotide
gtcactaccacatctatttgaaaatgggac

SEQ ID NO: 232430 - DNA, 30 bp, Artificial Sequence
  Synthetic oligonucleotide
agagttaagcatattgcaaactgctgggac

SEQ ID NO: 232431 - DNA, 30 bp, Artificial Sequence
  Synthetic oligonucleotide
tgtgaacaacgacctaaccacatgtgggac

SEQ ID NO: 232432 - DNA, 30 bp, Artificial Sequence
  Synthetic oligonucleotide
ctgagggggccattaatgcaaccaatggac

SEQ ID NO: 232433 - DNA, 31 bp, Artificial Sequence
  Synthetic oligonucleotide
agcaatctgatcagaagtcttgtcaatggac

SEQ ID NO: 232434 - DNA, 30 bp, Artificial Sequence
  Synthetic oligonucleotide
tttcgcacaattcgtcacaatcacatggac

SEQ ID NO: 232435 - DNA, 30 bp, Artificial Sequence
  Synthetic oligonucleotide
cgaatttccctcacggttggggagatggac

SEQ ID NO: 232436 - DNA, 30 bp, Artificial Sequence
  Synthetic oligonucleotide
gtgtctgcacttaaggttatggcgatggac

SEQ ID NO: 232437 - DNA, 30 bp, Artificial Sequence
  Synthetic oligonucleotide
cctgaggggtaaattgtacaccatatggac

SEQ ID NO: 232438 - DNA, 30 bp, Artificial Sequence
  Synthetic oligonucleotide
agaaaggtgcttgggccatgaggtatggac

SEQ ID NO: 232439 - DNA, 30 bp, Artificial Sequence
  Synthetic oligonucleotide
ctggaggggtctgtccgcctgtaactggac

SEQ ID NO: 232440 - DNA, 30 bp, Artificial Sequence
  Synthetic oligonucleotide
gcgggtcagttaccatccaaaggactggac

SEQ ID NO: 232441 - DNA, 30 bp, Artificial Sequence
  Synthetic oligonucleotide
agcggtgcggtacgtaacccaggactggac

SEQ ID NO: 232442 - DNA, 30 bp, Artificial Sequence
  Synthetic oligonucleotide
caggcgtaaagaggcttactgggcctggac

SEQ ID NO: 232443 - DNA, 30 bp, Artificial Sequence
  Synthetic oligonucleotide
ggctaatcagctcgaattgatagtctggac

SEQ ID NO: 232444 - DNA, 30 bp, Artificial Sequence
  Synthetic oligonucleotide
tgaaatgggggaaactcactatttctggac

SEQ ID NO: 232445 - DNA, 30 bp, Artificial Sequence
  Synthetic oligonucleotide
gcgatttagatagggctctatgaagtggac

SEQ ID NO: 232446 - DNA, 30 bp, Artificial Sequence
  Synthetic oligonucleotide
ctgctctctggaagaatggttcgagtggac

SEQ ID NO: 232447 - DNA, 31 bp, Artificial Sequence
  Synthetic oligonucleotide
tgaataccatcaccccaggctactcgtggac

SEQ ID NO: 232448 - DNA, 30 bp, Artificial Sequence
  Synthetic oligonucleotide
ctagccgacatagcataagtcatggtggac

SEQ ID NO: 232449 - DNA, 30 bp, Artificial Sequence
  Synthetic oligonucleotide
tgccaagctacctaaatagttatggtggac

SEQ ID NO: 232450 - DNA, 30 bp, Artificial Sequence
  Synthetic oligonucleotide
gtattactcgtaatatggaaatgtgtggac

SEQ ID NO: 232451 - DNA, 30 bp, Artificial Sequence
  Synthetic oligonucleotide
agttcgttgttactttgccatgttgtggac

SEQ ID NO: 232452 - DNA, 30 bp, Artificial Sequence
  Synthetic oligonucleotide
taaactcccagacatgggatgcaattggac

SEQ ID NO: 232453 - DNA, 30 bp, Artificial Sequence
  Synthetic oligonucleotide
tcaccgataggggaggggttcggcttggac

SEQ ID NO: 232454 - DNA, 30 bp, Artificial Sequence
  Synthetic oligonucleotide
gcggaccgtttactgtaataggcgttggac

SEQ ID NO: 232455 - DNA, 30 bp, Artificial Sequence
  Synthetic oligonucleotide
taggatagagagctgtgctttcgtttggac

SEQ ID NO: 232456 - DNA, 30 bp, Artificial Sequence
  Synthetic oligonucleotide
ctgtgcgcagagtattgatggtttttggac

SEQ ID NO: 232457 - DNA, 30 bp, Artificial Sequence
  Synthetic oligonucleotide
aacaacggaacggcattagaacgaaatgac

SEQ ID NO: 232458 - DNA, 30 bp, Artificial Sequence
  Synthetic oligonucleotide
cccatccagtatatcggtgagctaaatgac

SEQ ID NO: 232459 - DNA, 29 bp, Artificial Sequence
  Synthetic oligonucleotide
ctggacgtcacgggaatccctccaatgac

SEQ ID NO: 232460 - DNA, 30 bp, Artificial Sequence
  Synthetic oligonucleotide
gcgtaccttaggtatgttgatagcaatgac

SEQ ID NO: 232461 - DNA, 30 bp, Artificial Sequence
  Synthetic oligonucleotide
gtatctccggcacgaaacaaggttaatgac

SEQ ID NO: 232462 - DNA, 30 bp, Artificial Sequence
  Synthetic oligonucleotide
tcatatcctagaagcccggaaacccatgac

SEQ ID NO: 232463 - DNA, 30 bp, Artificial Sequence
  Synthetic oligonucleotide
ggccgtgcgtgggtgtcttggggccatgac

SEQ ID NO: 232464 - DNA, 30 bp, Artificial Sequence
  Synthetic oligonucleotide
agatcctagggttccatcaaaaggcatgac

SEQ ID NO: 232465 - DNA, 30 bp, Artificial Sequence
  Synthetic oligonucleotide
cgactccggcagcggaatggactgcatgac

SEQ ID NO: 232466 - DNA, 30 bp, Artificial Sequence
  Synthetic oligonucleotide
cgggggtgaacattaccattcgaagatgac

SEQ ID NO: 232467 - DNA, 30 bp, Artificial Sequence
  Synthetic oligonucleotide
tccgacatgccggtacacgcgggcgatgac

SEQ ID NO: 232468 - DNA, 30 bp, Artificial Sequence
  Synthetic oligonucleotide
agcggacgccagaaggtctactaggatgac

SEQ ID NO: 232469 - DNA, 30 bp, Artificial Sequence
  Synthetic oligonucleotide
tgtctagacccaaaaattaacgctgatgac

SEQ ID NO: 232470 - DNA, 30 bp, Artificial Sequence
  Synthetic oligonucleotide
tgactcccgaactccgtcccatgtgatgac

SEQ ID NO: 232471 - DNA, 30 bp, Artificial Sequence
  Synthetic oligonucleotide
gacgaaacggcctccgagaggaaatatgac

SEQ ID NO: 232472 - DNA, 30 bp, Artificial Sequence
  Synthetic oligonucleotide
gggttgtgcactagcgctcatcgctatgac

SEQ ID NO: 232473 - DNA, 30 bp, Artificial Sequence
  Synthetic oligonucleotide
caggtgtctcatggaacttggggttatgac

SEQ ID NO: 232474 - DNA, 30 bp, Artificial Sequence
  Synthetic oligonucleotide
attgtggattacccgatggctataactgac

SEQ ID NO: 232475 - DNA, 30 bp, Artificial Sequence
  Synthetic oligonucleotide
gcgaagagcagcgtagtgggcccgactgac

SEQ ID NO: 232476 - DNA, 30 bp, Artificial Sequence
  Synthetic oligonucleotide
ggtccatttcctagccaacaggggactgac

SEQ ID NO: 232477 - DNA, 30 bp, Artificial Sequence
  Synthetic oligonucleotide
agtaaggccgtgtaaaccgtcagacctgac

SEQ ID NO: 232478 - DNA, 30 bp, Artificial Sequence
  Synthetic oligonucleotide
ataagccgccagactcgggggatacctgac

SEQ ID NO: 232479 - DNA, 30 bp, Artificial Sequence
  Synthetic oligonucleotide
gaatcactctaatgaccagtggcgcctgac

SEQ ID NO: 232480 - DNA, 30 bp, Artificial Sequence
  Synthetic oligonucleotide
aaatagggagaattttggcgtaacgctgac

SEQ ID NO: 232481 - DNA, 30 bp, Artificial Sequence
  Synthetic oligonucleotide
tactcaagacactttaatcctacggctgac

SEQ ID NO: 232482 - DNA, 30 bp, Artificial Sequence
  Synthetic oligonucleotide
gcgtttggcgcatgccctaggctctctgac

SEQ ID NO: 232483 - DNA, 30 bp, Artificial Sequence
  Synthetic oligonucleotide
agctggtaaatttgataatctgtgtctgac

SEQ ID NO: 232484 - DNA, 30 bp, Artificial Sequence
  Synthetic oligonucleotide
ccaggcatttgtaggttacgcgtttctgac

SEQ ID NO: 232485 - DNA, 30 bp, Artificial Sequence
  Synthetic oligonucleotide
gtgcgagtaattgcttctacattttctgac

SEQ ID NO: 232486 - DNA, 30 bp, Artificial Sequence
  Synthetic oligonucleotide
agaaaggcgaattttttcacaaaaagtgac

SEQ ID NO: 232487 - DNA, 30 bp, Artificial Sequence
  Synthetic oligonucleotide
cgacctataagctggcgcgataaaagtgac

SEQ ID NO: 232488 - DNA, 30 bp, Artificial Sequence
  Synthetic oligonucleotide
tgttctcccccacaagacggtggaagtgac

SEQ ID NO: 232489 - DNA, 30 bp, Artificial Sequence
  Synthetic oligonucleotide
gaaacaaggatggcgattggatagagtgac

SEQ ID NO: 232490 - DNA, 30 bp, Artificial Sequence
  Synthetic oligonucleotide
acttgcacgtccaaaaggtttagccgtgac

SEQ ID NO: 232491 - DNA, 30 bp, Artificial Sequence
  Synthetic oligonucleotide
gatcgttcgccatggacgggctatcgtgac

SEQ ID NO: 232492 - DNA, 30 bp, Artificial Sequence
  Synthetic oligonucleotide
ggttgtttgaaaggtacaagccttcgtgac

SEQ ID NO: 232493 - DNA, 30 bp, Artificial Sequence
  Synthetic oligonucleotide
tgaccagaatatcttattcgttaaggtgac

SEQ ID NO: 232494 - DNA, 30 bp, Artificial Sequence
  Synthetic oligonucleotide
tcggttccactgctgatacgtgcaggtgac

SEQ ID NO: 232495 - DNA, 30 bp, Artificial Sequence
  Synthetic oligonucleotide
ttgtgggtcatcgttgaattgagcggtgac

SEQ ID NO: 232496 - DNA, 30 bp, Artificial Sequence
  Synthetic oligonucleotide
gctgatagatatgaaccaggtaggggtgac

SEQ ID NO: 232497 - DNA, 30 bp, Artificial Sequence
  Synthetic oligonucleotide
tcaggcgcggctaaatacctaattggtgac

SEQ ID NO: 232498 - DNA, 30 bp, Artificial Sequence
  Synthetic oligonucleotide
acctatctctataagaatgttacatgtgac

SEQ ID NO: 232499 - DNA, 30 bp, Artificial Sequence
  Synthetic oligonucleotide
gttgtcaggaagatggtgcatccctgtgac

SEQ ID NO: 232500 - DNA, 30 bp, Artificial Sequence
  Synthetic oligonucleotide
tggtgaatcggtttgggaacccggtgtgac

SEQ ID NO: 232501 - DNA, 30 bp, Artificial Sequence
  Synthetic oligonucleotide
ggctgtaggtaaggtacgcaaagcattgac

SEQ ID NO: 232502 - DNA, 30 bp, Artificial Sequence
  Synthetic oligonucleotide
cgtgaggggtttgtcggggtctcgattgac

SEQ ID NO: 232503 - DNA, 30 bp, Artificial Sequence
  Synthetic oligonucleotide
gtgcccccaccggacttgggcactattgac

SEQ ID NO: 232504 - DNA, 30 bp, Artificial Sequence
  Synthetic oligonucleotide
gccgtcttaggattctgagaattccttgac

SEQ ID NO: 232505 - DNA, 30 bp, Artificial Sequence
  Synthetic oligonucleotide
tcaatgcttaaatctgaaaagtggcttgac

SEQ ID NO: 232506 - DNA, 30 bp, Artificial Sequence
  Synthetic oligonucleotide
gccagtaagttataatcaataaatcttgac

SEQ ID NO: 232507 - DNA, 30 bp, Artificial Sequence
  Synthetic oligonucleotide
aagtagtgttagtggaaaacaggggttgac

SEQ ID NO: 232508 - DNA, 30 bp, Artificial Sequence
  Synthetic oligonucleotide
gcgtggaatgatgttagtattcatgttgac

SEQ ID NO: 232509 - DNA, 30 bp, Artificial Sequence
  Synthetic oligonucleotide
agatgtaggggggatacggggagatttgac

SEQ ID NO: 232510 - DNA, 30 bp, Artificial Sequence
  Synthetic oligonucleotide
tacatggtagcggatccctggatttttgac

SEQ ID NO: 232511 - DNA, 30 bp, Artificial Sequence
  Synthetic oligonucleotide
cgggcattgggtaacccgggacataaatac

SEQ ID NO: 232512 - DNA, 30 bp, Artificial Sequence
  Synthetic oligonucleotide
tgcggctattgctgcccgtctggtaaatac

SEQ ID NO: 232513 - DNA, 30 bp, Artificial Sequence
  Synthetic oligonucleotide
tgccttcgatggttaacacagccgcaatac

SEQ ID NO: 232514 - DNA, 30 bp, Artificial Sequence
  Synthetic oligonucleotide
gggctaagtccattgacaagggggcaatac

SEQ ID NO: 232515 - DNA, 30 bp, Artificial Sequence
  Synthetic oligonucleotide
aagaacgcgagtgatgagttatctcaatac

SEQ ID NO: 232516 - DNA, 30 bp, Artificial Sequence
  Synthetic oligonucleotide
acgcgtattaccaggggaccatgagaatac

SEQ ID NO: 232517 - DNA, 30 bp, Artificial Sequence
  Synthetic oligonucleotide
accgttcgatgcccagagtaaaacgaatac

SEQ ID NO: 232518 - DNA, 30 bp, Artificial Sequence
  Synthetic oligonucleotide
gatctagtgcgtgcgagcaggatggaatac

SEQ ID NO: 232519 - DNA, 30 bp, Artificial Sequence
  Synthetic oligonucleotide
gcgacaatgcggggggccaacccataatac

SEQ ID NO: 232520 - DNA, 30 bp, Artificial Sequence
  Synthetic oligonucleotide
gacagaaaacaattgcccagggactaatac

SEQ ID NO: 232521 - DNA, 30 bp, Artificial Sequence
  Synthetic oligonucleotide
ttacataccaggggttgccatgactaatac

SEQ ID NO: 232522 - DNA, 30 bp, Artificial Sequence
  Synthetic oligonucleotide
gtaagtggaattaaagacttgagctaatac

SEQ ID NO: 232523 - DNA, 30 bp, Artificial Sequence
  Synthetic oligonucleotide
gggtagtaaagcaatactgatgtgtaatac

SEQ ID NO: 232524 - DNA, 30 bp, Artificial Sequence
  Synthetic oligonucleotide
tgaacggtgaccgtcttgggtcattaatac

SEQ ID NO: 232525 - DNA, 30 bp, Artificial Sequence
  Synthetic oligonucleotide
agcaaaactgacaaaccgaacgtttaatac

SEQ ID NO: 232526 - DNA, 30 bp, Artificial Sequence
  Synthetic oligonucleotide
tctttgcccctcgtcatcactttttaatac

SEQ ID NO: 232527 - DNA, 30 bp, Artificial Sequence
  Synthetic oligonucleotide
gtacaaagcacgttctaaaggggaacatac

SEQ ID NO: 232528 - DNA, 30 bp, Artificial Sequence
  Synthetic oligonucleotide
atttacaaatcacacgcatgttgaacatac

SEQ ID NO: 232529 - DNA, 30 bp, Artificial Sequence
  Synthetic oligonucleotide
cttataaaggcctctcatagccagacatac

SEQ ID NO: 232530 - DNA, 30 bp, Artificial Sequence
  Synthetic oligonucleotide
catgttcaggcgtggtacagttcgacatac

SEQ ID NO: 232531 - DNA, 30 bp, Artificial Sequence
  Synthetic oligonucleotide
gtgcttcgttaacatggtctaatgacatac

SEQ ID NO: 232532 - DNA, 30 bp, Artificial Sequence
  Synthetic oligonucleotide
tcttatccgttattggaaagtatgacatac

SEQ ID NO: 232533 - DNA, 30 bp, Artificial Sequence
  Synthetic oligonucleotide
gggttgtcgcgcttatgagacagaccatac

SEQ ID NO: 232534 - DNA, 30 bp, Artificial Sequence
  Synthetic oligonucleotide
gagggctcatgcttattgggcgacccatac

SEQ ID NO: 232535 - DNA, 30 bp, Artificial Sequence
  Synthetic oligonucleotide
tgctgcttgctgaacctttggctcccatac

SEQ ID NO: 232536 - DNA, 30 bp, Artificial Sequence
  Synthetic oligonucleotide
gggaaacctcgcctctagtgaattccatac

SEQ ID NO: 232537 - DNA, 30 bp, Artificial Sequence
  Synthetic oligonucleotide
gcgtaaagccatccctaacaatccgcatac

SEQ ID NO: 232538 - DNA, 30 bp, Artificial Sequence
  Synthetic oligonucleotide
tgttcatgtggtcaagaagtaatggcatac

SEQ ID NO: 232539 - DNA, 30 bp, Artificial Sequence
  Synthetic oligonucleotide
accgtcctcatcggtcaagttattgcatac

SEQ ID NO: 232540 - DNA, 30 bp, Artificial Sequence
  Synthetic oligonucleotide
ggacttcaaatagtaatctgacttgcatac

SEQ ID NO: 232541 - DNA, 30 bp, Artificial Sequence
  Synthetic oligonucleotide
cgttgacatctgggccaattggactcatac

SEQ ID NO: 232542 - DNA, 30 bp, Artificial Sequence
  Synthetic oligonucleotide
agctcactacataccacttatgtctcatac

SEQ ID NO: 232543 - DNA, 30 bp, Artificial Sequence
  Synthetic oligonucleotide
gcatggaaacgcgttcatgcggcttcatac

SEQ ID NO: 232544 - DNA, 30 bp, Artificial Sequence
  Synthetic oligonucleotide
ctattcaaggaaaaaacacacaaaagatac

SEQ ID NO: 232545 - DNA, 30 bp, Artificial Sequence
  Synthetic oligonucleotide
aatggactgcggtagatttcaaacagatac

SEQ ID NO: 232546 - DNA, 30 bp, Artificial Sequence
  Synthetic oligonucleotide
ctagagcacatcgtgatctactacagatac

SEQ ID NO: 232547 - DNA, 30 bp, Artificial Sequence
  Synthetic oligonucleotide
cgccaattgaggtatgcaacggtcagatac

SEQ ID NO: 232548 - DNA, 30 bp, Artificial Sequence
  Synthetic oligonucleotide
taatgctgggggacgaggtctgtgagatac

SEQ ID NO: 232549 - DNA, 31 bp, Artificial Sequence
  Synthetic oligonucleotide
cgtcacgtggactctcggatgattgagatac

SEQ ID NO: 232550 - DNA, 30 bp, Artificial Sequence
  Synthetic oligonucleotide
cattatcggaaatgatttgttaaacgatac

SEQ ID NO: 232551 - DNA, 30 bp, Artificial Sequence
  Synthetic oligonucleotide
aaccgccacaattttgttcttctacgatac

SEQ ID NO: 232552 - DNA, 30 bp, Artificial Sequence
  Synthetic oligonucleotide
gctctagcacctgcggtttgcaaaggatac

SEQ ID NO: 232553 - DNA, 30 bp, Artificial Sequence
  Synthetic oligonucleotide
ccggacgaccccactagtgtcggaggatac

SEQ ID NO: 232554 - DNA, 30 bp, Artificial Sequence
  Synthetic oligonucleotide
tctagggcactgtttacaaaacccggatac

SEQ ID NO: 232555 - DNA, 30 bp, Artificial Sequence
  Synthetic oligonucleotide
agctacactccatcaagtctatccggatac

SEQ ID NO: 232556 - DNA, 30 bp, Artificial Sequence
  Synthetic oligonucleotide
actgaatgtttagagtatatttgcggatac

SEQ ID NO: 232557 - DNA, 30 bp, Artificial Sequence
  Synthetic oligonucleotide
agaattgtaggataaaatagcgggggatac

SEQ ID NO: 232558 - DNA, 30 bp, Artificial Sequence
  Synthetic oligonucleotide
gttacgggtagctatgtgagcgttggatac

SEQ ID NO: 232559 - DNA, 30 bp, Artificial Sequence
  Synthetic oligonucleotide
cggttaaccgacaaagggggttgatgatac

SEQ ID NO: 232560 - DNA, 30 bp, Artificial Sequence
  Synthetic oligonucleotide
gcccatacgacaacgacaaggttgtgatac

SEQ ID NO: 232561 - DNA, 30 bp, Artificial Sequence
  Synthetic oligonucleotide
gtataatcagaactgaacaaaggtatatac

SEQ ID NO: 232562 - DNA, 30 bp, Artificial Sequence
  Synthetic oligonucleotide
gggatggatcgtgtggcttgatttatatac

SEQ ID NO: 232563 - DNA, 30 bp, Artificial Sequence
  Synthetic oligonucleotide
aagaaaaaggatcaaaggccgctactatac

SEQ ID NO: 232564 - DNA, 30 bp, Artificial Sequence
  Synthetic oligonucleotide
caccgggggcctctgccatcgatcctatac

SEQ ID NO: 232565 - DNA, 30 bp, Artificial Sequence
  Synthetic oligonucleotide
gcacgggttgacaaggcctgaccgctatac

SEQ ID NO: 232566 - DNA, 30 bp, Artificial Sequence
  Synthetic oligonucleotide
cgctatatgataggaaactagcggctatac

SEQ ID NO: 232567 - DNA, 30 bp, Artificial Sequence
  Synthetic oligonucleotide
cgcaacattacacttgggggattgctatac

SEQ ID NO: 232568 - DNA, 30 bp, Artificial Sequence
  Synthetic oligonucleotide
cgggaccccgtgacaagaatggcagtatac

SEQ ID NO: 232569 - DNA, 30 bp, Artificial Sequence
  Synthetic oligonucleotide
cacacgcaaataggtttctggggagtatac

SEQ ID NO: 232570 - DNA, 30 bp, Artificial Sequence
  Synthetic oligonucleotide
ggtctagtggagaaaacagggtcggtatac

SEQ ID NO: 232571 - DNA, 30 bp, Artificial Sequence
  Synthetic oligonucleotide
tcgagcggttcgctagttggcggggtatac

SEQ ID NO: 232572 - DNA, 30 bp, Artificial Sequence
  Synthetic oligonucleotide
caatggcagatggtgagtggaaatgtatac

SEQ ID NO: 232573 - DNA, 30 bp, Artificial Sequence
  Synthetic oligonucleotide
aaggttccctcacgactaaggactgtatac

SEQ ID NO: 232574 - DNA, 30 bp, Artificial Sequence
  Synthetic oligonucleotide
cagcacatccgccacggccatgctgtatac

SEQ ID NO: 232575 - DNA, 30 bp, Artificial Sequence
  Synthetic oligonucleotide
tgtatgcaatgagaagtcccgtaattatac

SEQ ID NO: 232576 - DNA, 31 bp, Artificial Sequence
  Synthetic oligonucleotide
agacttgcccaggcaaggtcaaaccttatac

SEQ ID NO: 232577 - DNA, 30 bp, Artificial Sequence
  Synthetic oligonucleotide
gaactgagcccaggcgtaaacgtcttatac

SEQ ID NO: 232578 - DNA, 30 bp, Artificial Sequence
  Synthetic oligonucleotide
tactccgacagaatactgagcacgttatac

SEQ ID NO: 232579 - DNA, 30 bp, Artificial Sequence
  Synthetic oligonucleotide
gtttaacaactggtagctaacagtttatac

SEQ ID NO: 232580 - DNA, 30 bp, Artificial Sequence
  Synthetic oligonucleotide
taccggggtgaggggactgagctcaactac

SEQ ID NO: 232581 - DNA, 30 bp, Artificial Sequence
  Synthetic oligonucleotide
aaccctggaggaagtaggcatctgaactac

SEQ ID NO: 232582 - DNA, 30 bp, Artificial Sequence
  Synthetic oligonucleotide
cacctgaaaaatttgcccaagaaacactac

SEQ ID NO: 232583 - DNA, 30 bp, Artificial Sequence
  Synthetic oligonucleotide
tactgaacagttaaattccgggagcactac

SEQ ID NO: 232584 - DNA, 30 bp, Artificial Sequence
  Synthetic oligonucleotide
catgtattgcgctcgaactatgatcactac

SEQ ID NO: 232585 - DNA, 30 bp, Artificial Sequence
  Synthetic oligonucleotide
ggaaatcgcggaaggaacagtggtcactac

SEQ ID NO: 232586 - DNA, 30 bp, Artificial Sequence
  Synthetic oligonucleotide
tctaggtactaaagcacgttgagagactac

SEQ ID NO: 232587 - DNA, 30 bp, Artificial Sequence
  Synthetic oligonucleotide
ctaagacacagccgaagggggtatgactac

SEQ ID NO: 232588 - DNA, 30 bp, Artificial Sequence
  Synthetic oligonucleotide
aagggttaatcgtgttcgtcaagtgactac

SEQ ID NO: 232589 - DNA, 31 bp, Artificial Sequence
  Synthetic oligonucleotide
gaggcaaaattaaaccgttccgtactactac

SEQ ID NO: 232590 - DNA, 30 bp, Artificial Sequence
  Synthetic oligonucleotide
cgaacggattttcttaaagcacagtactac

SEQ ID NO: 232591 - DNA, 30 bp, Artificial Sequence
  Synthetic oligonucleotide
gaaaacagaactgatatccacctaacctac

SEQ ID NO: 232592 - DNA, 30 bp, Artificial Sequence
  Synthetic oligonucleotide
cccggacgaaggttcggtaaacgcacctac

SEQ ID NO: 232593 - DNA, 30 bp, Artificial Sequence
  Synthetic oligonucleotide
cgggcgcaatatcaggacaaagccccctac

SEQ ID NO: 232594 - DNA, 30 bp, Artificial Sequence
  Synthetic oligonucleotide
gaccacgtcaccgcgtagccacagccctac

SEQ ID NO: 232595 - DNA, 30 bp, Artificial Sequence
  Synthetic oligonucleotide
cacagtcattgcccgagacggacgccctac

SEQ ID NO: 232596 - DNA, 31 bp, Artificial Sequence
  Synthetic oligonucleotide
atgttaggtagtatagactatcgtgccctac

SEQ ID NO: 232597 - DNA, 30 bp, Artificial Sequence
  Synthetic oligonucleotide
gaaagttgtggggagggcttgtcagcctac

SEQ ID NO: 232598 - DNA, 30 bp, Artificial Sequence
  Synthetic oligonucleotide
ctgcggtggggataagagttggaggcctac

SEQ ID NO: 232599 - DNA, 30 bp, Artificial Sequence
  Synthetic oligonucleotide
gctaaatgagtttcgccaatgctatcctac

SEQ ID NO: 232600 - DNA, 30 bp, Artificial Sequence
  Synthetic oligonucleotide
atcctaactcttagtctacttataagctac

SEQ ID NO: 232601 - DNA, 30 bp, Artificial Sequence
  Synthetic oligonucleotide
aacataaggattttgtacagaaccagctac

SEQ ID NO: 232602 - DNA, 31 bp, Artificial Sequence
  Synthetic oligonucleotide
ggtggcaatcaaaaccgcgcagcgcagctac

SEQ ID NO: 232603 - DNA, 30 bp, Artificial Sequence
  Synthetic oligonucleotide
aagcattttaacaggacacggaatagctac

SEQ ID NO: 232604 - DNA, 30 bp, Artificial Sequence
  Synthetic oligonucleotide
cctgtacactcttcgcattacgaacgctac

SEQ ID NO: 232605 - DNA, 30 bp, Artificial Sequence
  Synthetic oligonucleotide
atcgaatcttaatcactctcaacacgctac

SEQ ID NO: 232606 - DNA, 30 bp, Artificial Sequence
  Synthetic oligonucleotide
agcaggaatatgagtgtgggatcacgctac

SEQ ID NO: 232607 - DNA, 30 bp, Artificial Sequence
  Synthetic oligonucleotide
tcgccaacgttacgtccatcaatccgctac

SEQ ID NO: 232608 - DNA, 30 bp, Artificial Sequence
  Synthetic oligonucleotide
catagtggagtaaagactgttaggcgctac

SEQ ID NO: 232609 - DNA, 30 bp, Artificial Sequence
  Synthetic oligonucleotide
tatagaccaggcaggtcggaccacggctac

SEQ ID NO: 232610 - DNA, 30 bp, Artificial Sequence
  Synthetic oligonucleotide
gggatggagacggaagggtggtacggctac

SEQ ID NO: 232611 - DNA, 31 bp, Artificial Sequence
  Synthetic oligonucleotide
atttacgtccagactcgtgaaatcgggctac

SEQ ID NO: 232612 - DNA, 30 bp, Artificial Sequence
  Synthetic oligonucleotide
tattaactcgtcataggtactatgggctac

SEQ ID NO: 232613 - DNA, 30 bp, Artificial Sequence
  Synthetic oligonucleotide
agatgtgactttggttaatgagatggctac

SEQ ID NO: 232614 - DNA, 30 bp, Artificial Sequence
  Synthetic oligonucleotide
taggagggtcggacggagggtcgatgctac

SEQ ID NO: 232615 - DNA, 30 bp, Artificial Sequence
  Synthetic oligonucleotide
cgaatctaaagaggggcgctcctgtgctac

SEQ ID NO: 232616 - DNA, 30 bp, Artificial Sequence
  Synthetic oligonucleotide
agtataaaactgaaaactctatatatctac

SEQ ID NO: 232617 - DNA, 30 bp, Artificial Sequence
  Synthetic oligonucleotide
aagaagagagcggtaatctggtctatctac

SEQ ID NO: 232618 - DNA, 30 bp, Artificial Sequence
  Synthetic oligonucleotide
tgcacatgtcgaattctaattttactctac

SEQ ID NO: 232619 - DNA, 30 bp, Artificial Sequence
  Synthetic oligonucleotide
aaagatgcgtaggtgagcaaaaccctctac

SEQ ID NO: 232620 - DNA, 30 bp, Artificial Sequence
  Synthetic oligonucleotide
tctccgacgatgagcaacgcgcagctctac

SEQ ID NO: 232621 - DNA, 30 bp, Artificial Sequence
  Synthetic oligonucleotide
gcttctgataccgagtcgaacatgctctac

SEQ ID NO: 232622 - DNA, 30 bp, Artificial Sequence
  Synthetic oligonucleotide
aaaataaacatgccgaggtgccatctctac

SEQ ID NO: 232623 - DNA, 30 bp, Artificial Sequence
  Synthetic oligonucleotide
aatccgggtccgtaggtgatacatgtctac

SEQ ID NO: 232624 - DNA, 30 bp, Artificial Sequence
  Synthetic oligonucleotide
ggctatgttgataagcgaatatcattctac

SEQ ID NO: 232625 - DNA, 30 bp, Artificial Sequence
  Synthetic oligonucleotide
tcttctgacccgaactagcccctcttctac

SEQ ID NO: 232626 - DNA, 30 bp, Artificial Sequence
  Synthetic oligonucleotide
tttactggcatacggtccctggcgttctac

SEQ ID NO: 232627 - DNA, 30 bp, Artificial Sequence
  Synthetic oligonucleotide
ggacataatgccgcgaaagactcaaagtac

SEQ ID NO: 232628 - DNA, 30 bp, Artificial Sequence
  Synthetic oligonucleotide
aagtacagtcaggagtttccactcaagtac

SEQ ID NO: 232629 - DNA, 30 bp, Artificial Sequence
  Synthetic oligonucleotide
acagttccactagagaaatcatgtaagtac

SEQ ID NO: 232630 - DNA, 30 bp, Artificial Sequence
  Synthetic oligonucleotide
cccggttggaaaagaaatctggcacagtac

SEQ ID NO: 232631 - DNA, 30 bp, Artificial Sequence
  Synthetic oligonucleotide
accaagacgattcttaatagtgcacagtac

SEQ ID NO: 232632 - DNA, 30 bp, Artificial Sequence
  Synthetic oligonucleotide
aggtgcccagtctttacatccatacagtac

SEQ ID NO: 232633 - DNA, 30 bp, Artificial Sequence
  Synthetic oligonucleotide
cgttcggcggagagtgccaccttacagtac

SEQ ID NO: 232634 - DNA, 30 bp, Artificial Sequence
  Synthetic oligonucleotide
acgaaaactgcccggatacgccagcagtac

SEQ ID NO: 232635 - DNA, 30 bp, Artificial Sequence
  Synthetic oligonucleotide
gcaggaggctagtcactggataatcagtac

SEQ ID NO: 232636 - DNA, 30 bp, Artificial Sequence
  Synthetic oligonucleotide
ggactcaaatacatctaggccactcagtac

SEQ ID NO: 232637 - DNA, 30 bp, Artificial Sequence
  Synthetic oligonucleotide
gtcaaatgaagggcccatacatatgagtac

SEQ ID NO: 232638 - DNA, 30 bp, Artificial Sequence
  Synthetic oligonucleotide
tataactatgcattctcgatatgtgagtac

SEQ ID NO: 232639 - DNA, 30 bp, Artificial Sequence
  Synthetic oligonucleotide
cagtagtgagggtgctaaagtacatagtac

SEQ ID NO: 232640 - DNA, 30 bp, Artificial Sequence
  Synthetic oligonucleotide
tcgcggtagaccatatcgcacctatagtac

SEQ ID NO: 232641 - DNA, 30 bp, Artificial Sequence
  Synthetic oligonucleotide
ggataagatctggaacacaccaactagtac

SEQ ID NO: 232642 - DNA, 30 bp, Artificial Sequence
  Synthetic oligonucleotide
aatgacgtgattactagtaaggtttagtac

SEQ ID NO: 232643 - DNA, 30 bp, Artificial Sequence
  Synthetic oligonucleotide
atttccctaaccagtagccaatgcacgtac

SEQ ID NO: 232644 - DNA, 30 bp, Artificial Sequence
  Synthetic oligonucleotide
cgtaagtctcagccggtgttcatcacgtac

SEQ ID NO: 232645 - DNA, 30 bp, Artificial Sequence
  Synthetic oligonucleotide
caagtcgagagatctatcgctaagacgtac

SEQ ID NO: 232646 - DNA, 30 bp, Artificial Sequence
  Synthetic oligonucleotide
tgggtccaagtttagccgggatcgacgtac

SEQ ID NO: 232647 - DNA, 30 bp, Artificial Sequence
  Synthetic oligonucleotide
ttcaacgtgctatgatccagggatacgtac

SEQ ID NO: 232648 - DNA, 30 bp, Artificial Sequence
  Synthetic oligonucleotide
gaatggtagtgaatacgaccacctacgtac

SEQ ID NO: 232649 - DNA, 30 bp, Artificial Sequence
  Synthetic oligonucleotide
aaaggaatgtgcgtactgcaaggtacgtac

SEQ ID NO: 232650 - DNA, 30 bp, Artificial Sequence
  Synthetic oligonucleotide
tggtatagagttgtgcccaagggtacgtac

SEQ ID NO: 232651 - DNA, 30 bp, Artificial Sequence
  Synthetic oligonucleotide
ggatcacggatcaccataagctaaccgtac

SEQ ID NO: 232652 - DNA, 30 bp, Artificial Sequence
  Synthetic oligonucleotide
tggagggttggacactccccaataccgtac

SEQ ID NO: 232653 - DNA, 30 bp, Artificial Sequence
  Synthetic oligonucleotide
ccggcctaagccaagacggaccagccgtac

SEQ ID NO: 232654 - DNA, 30 bp, Artificial Sequence
  Synthetic oligonucleotide
taggggcgtgtaggaatttttgcagcgtac

SEQ ID NO: 232655 - DNA, 30 bp, Artificial Sequence
  Synthetic oligonucleotide
ctcatctcgaaaaacgtaaacatagcgtac

SEQ ID NO: 232656 - DNA, 30 bp, Artificial Sequence
  Synthetic oligonucleotide
ctgcggacgggtgctcaaggttacgcgtac

SEQ ID NO: 232657 - DNA, 30 bp, Artificial Sequence
  Synthetic oligonucleotide
ggctcagggatgcggtgctaataggcgtac

SEQ ID NO: 232658 - DNA, 30 bp, Artificial Sequence
  Synthetic oligonucleotide
cagcgaaagtcacattagcggaatgcgtac

SEQ ID NO: 232659 - DNA, 30 bp, Artificial Sequence
  Synthetic oligonucleotide
aataccgaggacctacaaagtcatgcgtac

SEQ ID NO: 232660 - DNA, 30 bp, Artificial Sequence
  Synthetic oligonucleotide
ttggcaggtgaggtatacaaatgtgcgtac

SEQ ID NO: 232661 - DNA, 30 bp, Artificial Sequence
  Synthetic oligonucleotide
gctgcgcatcctatcctgcgctgtgcgtac

SEQ ID NO: 232662 - DNA, 30 bp, Artificial Sequence
  Synthetic oligonucleotide
ttcacccctaagactattagttaaaggtac

SEQ ID NO: 232663 - DNA, 30 bp, Artificial Sequence
  Synthetic oligonucleotide
taacaggataatatgaagatttcaaggtac

SEQ ID NO: 232664 - DNA, 30 bp, Artificial Sequence
  Synthetic oligonucleotide
agttataccgtagggaaaacttgaaggtac

SEQ ID NO: 232665 - DNA, 30 bp, Artificial Sequence
  Synthetic oligonucleotide
accggggacacagcctcagttgacaggtac

SEQ ID NO: 232666 - DNA, 30 bp, Artificial Sequence
  Synthetic oligonucleotide
gctgtggcgtaatagtgttagcccaggtac

SEQ ID NO: 232667 - DNA, 30 bp, Artificial Sequence
  Synthetic oligonucleotide
ttatacagtaccatccgtatgggcaggtac

SEQ ID NO: 232668 - DNA, 30 bp, Artificial Sequence
  Synthetic oligonucleotide
atcgggtgatgcacaccacaatgcaggtac

SEQ ID NO: 232669 - DNA, 30 bp, Artificial Sequence
  Synthetic oligonucleotide
cttgtcttcatatgtgttggtccgaggtac

SEQ ID NO: 232670 - DNA, 30 bp, Artificial Sequence
  Synthetic oligonucleotide
taatatctgaacgtcgtcaagtcgaggtac

SEQ ID NO: 232671 - DNA, 30 bp, Artificial Sequence
  Synthetic oligonucleotide
ttctaaatctcgtagggataggagcggtac

SEQ ID NO: 232672 - DNA, 30 bp, Artificial Sequence
  Synthetic oligonucleotide
gcatcagcgcccaaccagaaaatgcggtac

SEQ ID NO: 232673 - DNA, 30 bp, Artificial Sequence
  Synthetic oligonucleotide
gctaggccactatgaagctttgtgcggtac

SEQ ID NO: 232674 - DNA, 30 bp, Artificial Sequence
  Synthetic oligonucleotide
gcaaatactgtggtcggacctaacgggtac

SEQ ID NO: 232675 - DNA, 30 bp, Artificial Sequence
  Synthetic oligonucleotide
tcgtacagagtgactgcatttctcgggtac

SEQ ID NO: 232676 - DNA, 30 bp, Artificial Sequence
  Synthetic oligonucleotide
cggtagatagacaaaagtccgtaggggtac

SEQ ID NO: 232677 - DNA, 30 bp, Artificial Sequence
  Synthetic oligonucleotide
atgtcgctaaacgtaatggaacgggggtac

SEQ ID NO: 232678 - DNA, 30 bp, Artificial Sequence
  Synthetic oligonucleotide
catggcatttaaggccacgagaatgggtac

SEQ ID NO: 232679 - DNA, 30 bp, Artificial Sequence
  Synthetic oligonucleotide
catagctctggatcaccgggggaatggtac

SEQ ID NO: 232680 - DNA, 30 bp, Artificial Sequence
  Synthetic oligonucleotide
ttgagcctactcaaatctccgtgatggtac

SEQ ID NO: 232681 - DNA, 30 bp, Artificial Sequence
  Synthetic oligonucleotide
cccagtcaaaatgagttagcattatggtac

SEQ ID NO: 232682 - DNA, 30 bp, Artificial Sequence
  Synthetic oligonucleotide
taatctgtattgttccgatttgactggtac

SEQ ID NO: 232683 - DNA, 30 bp, Artificial Sequence
  Synthetic oligonucleotide
gtatacccgtacgagatatctaattggtac

SEQ ID NO: 232684 - DNA, 30 bp, Artificial Sequence
  Synthetic oligonucleotide
ggcaaaggagccttaggtgaaggttggtac

SEQ ID NO: 232685 - DNA, 30 bp, Artificial Sequence
  Synthetic oligonucleotide
gctggattgtgatcgccaaggttttggtac

SEQ ID NO: 232686 - DNA, 30 bp, Artificial Sequence
  Synthetic oligonucleotide
gaagtattgattgtgaactacttgatgtac

SEQ ID NO: 232687 - DNA, 30 bp, Artificial Sequence
  Synthetic oligonucleotide
agatgttaagggaacgagtaagatatgtac

SEQ ID NO: 232688 - DNA, 30 bp, Artificial Sequence
  Synthetic oligonucleotide
tgctcgatcacgaacaaccgggctatgtac

SEQ ID NO: 232689 - DNA, 30 bp, Artificial Sequence
  Synthetic oligonucleotide
ctcactattctcggacagacgcgtatgtac

SEQ ID NO: 232690 - DNA, 30 bp, Artificial Sequence
  Synthetic oligonucleotide
ggctgcgttcgtaatataagtgacctgtac

SEQ ID NO: 232691 - DNA, 30 bp, Artificial Sequence
  Synthetic oligonucleotide
accgggtgtaagaggaaggctttcctgtac

SEQ ID NO: 232692 - DNA, 30 bp, Artificial Sequence
  Synthetic oligonucleotide
ctgaaatacacgggttcatgaggtctgtac

SEQ ID NO: 232693 - DNA, 30 bp, Artificial Sequence
  Synthetic oligonucleotide
tgcattcttattagcatcactcatgtgtac

SEQ ID NO: 232694 - DNA, 30 bp, Artificial Sequence
  Synthetic oligonucleotide
gatacgcaaatactgttattcagtgtgtac

SEQ ID NO: 232695 - DNA, 30 bp, Artificial Sequence
  Synthetic oligonucleotide
ataggatgctacatctacgaagaattgtac

SEQ ID NO: 232696 - DNA, 30 bp, Artificial Sequence
  Synthetic oligonucleotide
tggatgcccactatggcataccacttgtac

SEQ ID NO: 232697 - DNA, 30 bp, Artificial Sequence
  Synthetic oligonucleotide
cccaggcataacggtttagtccgcttgtac

SEQ ID NO: 232698 - DNA, 30 bp, Artificial Sequence
  Synthetic oligonucleotide
ccgccaagtggcatccttcgatttttgtac

SEQ ID NO: 232699 - DNA, 30 bp, Artificial Sequence
  Synthetic oligonucleotide
gggcgcggagtttcggcttcaccaaattac

SEQ ID NO: 232700 - DNA, 30 bp, Artificial Sequence
  Synthetic oligonucleotide
gcagtgggagcattagtcgcacgacattac

SEQ ID NO: 232701 - DNA, 30 bp, Artificial Sequence
  Synthetic oligonucleotide
ggaaacaagcactgtgccgcatgccattac

SEQ ID NO: 232702 - DNA, 30 bp, Artificial Sequence
  Synthetic oligonucleotide
attacaagcgtgagaatcttatatcattac

SEQ ID NO: 232703 - DNA, 30 bp, Artificial Sequence
  Synthetic oligonucleotide
tccggtaagacaaggccgtcacttcattac

SEQ ID NO: 232704 - DNA, 30 bp, Artificial Sequence
  Synthetic oligonucleotide
cggaaaggtgacgctccgtcaggagattac

SEQ ID NO: 232705 - DNA, 30 bp, Artificial Sequence
  Synthetic oligonucleotide
gatggactataaactgagcgagaatattac

SEQ ID NO: 232706 - DNA, 30 bp, Artificial Sequence
  Synthetic oligonucleotide
agaggtcctcgaaccatgtgtgaatattac

SEQ ID NO: 232707 - DNA, 30 bp, Artificial Sequence
  Synthetic oligonucleotide
actcgtcagagcgcattaatgtcgtattac

SEQ ID NO: 232708 - DNA, 30 bp, Artificial Sequence
  Synthetic oligonucleotide
agtcttagtgcgggagagaaaaggtattac

SEQ ID NO: 232709 - DNA, 30 bp, Artificial Sequence
  Synthetic oligonucleotide
gatagctacagtccatccccgtattattac

SEQ ID NO: 232710 - DNA, 30 bp, Artificial Sequence
  Synthetic oligonucleotide
cgcggggatgtgtagtgcacaggttattac

SEQ ID NO: 232711 - DNA, 30 bp, Artificial Sequence
  Synthetic oligonucleotide
aacacccaggtgggacgcatagccacttac

SEQ ID NO: 232712 - DNA, 30 bp, Artificial Sequence
  Synthetic oligonucleotide
attgttcacgtgtggagtttccctacttac

SEQ ID NO: 232713 - DNA, 30 bp, Artificial Sequence
  Synthetic oligonucleotide
ggccatacgctgaggtctagggtagcttac

SEQ ID NO: 232714 - DNA, 30 bp, Artificial Sequence
  Synthetic oligonucleotide
ggacgaagcgttcgacgaacaagggcttac

SEQ ID NO: 232715 - DNA, 29 bp, Artificial Sequence
  Synthetic oligonucleotide
tctaacagtctacaacgattaatgcttac

SEQ ID NO: 232716 - DNA, 30 bp, Artificial Sequence
  Synthetic oligonucleotide
atatcatcagctagggttccatgtgcttac

SEQ ID NO: 232717 - DNA, 30 bp, Artificial Sequence
  Synthetic oligonucleotide
actgtagtttttacaaagtcactctcttac

SEQ ID NO: 232718 - DNA, 30 bp, Artificial Sequence
  Synthetic oligonucleotide
catacgttcggtttaggagctctgtcttac

SEQ ID NO: 232719 - DNA, 30 bp, Artificial Sequence
  Synthetic oligonucleotide
tcgaggtgacgctctgacagagtttcttac

SEQ ID NO: 232720 - DNA, 30 bp, Artificial Sequence
  Synthetic oligonucleotide
agtgtgcgtcaggtgttgaacgcaagttac

SEQ ID NO: 232721 - DNA, 30 bp, Artificial Sequence
  Synthetic oligonucleotide
tctagggcgggccgcctcatcataagttac

SEQ ID NO: 232722 - DNA, 30 bp, Artificial Sequence
  Synthetic oligonucleotide
tttgcacgggcgtaaataccttgcagttac

SEQ ID NO: 232723 - DNA, 30 bp, Artificial Sequence
  Synthetic oligonucleotide
gtgttcggcgaaaaccaccttgtcagttac

SEQ ID NO: 232724 - DNA, 30 bp, Artificial Sequence
  Synthetic oligonucleotide
tacggaaaacgtcagcgcgatgagagttac

SEQ ID NO: 232725 - DNA, 30 bp, Artificial Sequence
  Synthetic oligonucleotide
gctatgacgtgggacaacgaacatagttac

SEQ ID NO: 232726 - DNA, 30 bp, Artificial Sequence
  Synthetic oligonucleotide
tcaaactagattcgatgatgctgtagttac

SEQ ID NO: 232727 - DNA, 30 bp, Artificial Sequence
  Synthetic oligonucleotide
caaggagtgtgttaaagcttaagccgttac

SEQ ID NO: 232728 - DNA, 30 bp, Artificial Sequence
  Synthetic oligonucleotide
gcagtccgccaagctcacgtacgccgttac

SEQ ID NO: 232729 - DNA, 31 bp, Artificial Sequence
  Synthetic oligonucleotide
gttcccacaatcaggccttttcaagcgttac

SEQ ID NO: 232730 - DNA, 30 bp, Artificial Sequence
  Synthetic oligonucleotide
caaccgggctgggagttactcgaaggttac

SEQ ID NO: 232731 - DNA, 30 bp, Artificial Sequence
  Synthetic oligonucleotide
tggatactggagtggagatggcttggttac

SEQ ID NO: 232732 - DNA, 30 bp, Artificial Sequence
  Synthetic oligonucleotide
gtgtatgactaatggctatcggaatgttac

SEQ ID NO: 232733 - DNA, 30 bp, Artificial Sequence
  Synthetic oligonucleotide
atccggagggaagcagagcgtgcatgttac

SEQ ID NO: 232734 - DNA, 30 bp, Artificial Sequence
  Synthetic oligonucleotide
gaaggtaagcgtatccgaggaaggtgttac

SEQ ID NO: 232735 - DNA, 30 bp, Artificial Sequence
  Synthetic oligonucleotide
ttgagcgcataagggaagcaaagttgttac

SEQ ID NO: 232736 - DNA, 30 bp, Artificial Sequence
  Synthetic oligonucleotide
gatgaaatatacctggccaagtgttgttac

SEQ ID NO: 232737 - DNA, 30 bp, Artificial Sequence
  Synthetic oligonucleotide
aaccagaagtggtttgtgcgaaatatttac

SEQ ID NO: 232738 - DNA, 30 bp, Artificial Sequence
  Synthetic oligonucleotide
tgaagcatgtagcccaccggtcctatttac

SEQ ID NO: 232739 - DNA, 30 bp, Artificial Sequence
  Synthetic oligonucleotide
ctcggtgggtatagtcccttctgtatttac

SEQ ID NO: 232740 - DNA, 30 bp, Artificial Sequence
  Synthetic oligonucleotide
atggccactctcacttgagatgtcctttac

SEQ ID NO: 232741 - DNA, 30 bp, Artificial Sequence
  Synthetic oligonucleotide
aataggaccctgatactgtaagctctttac

SEQ ID NO: 232742 - DNA, 30 bp, Artificial Sequence
  Synthetic oligonucleotide
aggcctgaaacagcttacacttttctttac

SEQ ID NO: 232743 - DNA, 30 bp, Artificial Sequence
  Synthetic oligonucleotide
tgggggctgcgggatatatgataggtttac

SEQ ID NO: 232744 - DNA, 30 bp, Artificial Sequence
  Synthetic oligonucleotide
tgtagtgggaagcgtatcactgctgtttac

SEQ ID NO: 232745 - DNA, 30 bp, Artificial Sequence
  Synthetic oligonucleotide
atgtgatcggaaatgctaggacaattttac

SEQ ID NO: 232746 - DNA, 30 bp, Artificial Sequence
  Synthetic oligonucleotide
ctggttcgttagtcgttcgaatcattttac

SEQ ID NO: 232747 - DNA, 30 bp, Artificial Sequence
  Synthetic oligonucleotide
gctggatgttaaacttctggctgattttac

SEQ ID NO: 232748 - DNA, 30 bp, Artificial Sequence
  Synthetic oligonucleotide
taatggcgtttttgtgagatcaagaaaacc

SEQ ID NO: 232749 - DNA, 30 bp, Artificial Sequence
  Synthetic oligonucleotide
ttagcatattgtcgattttacacgaaaacc

SEQ ID NO: 232750 - DNA, 30 bp, Artificial Sequence
  Synthetic oligonucleotide
gggtgctgttagacctgatacaggaaaacc

SEQ ID NO: 232751 - DNA, 30 bp, Artificial Sequence
  Synthetic oligonucleotide
ccacgggaaagcatatttaattctaaaacc

SEQ ID NO: 232752 - DNA, 30 bp, Artificial Sequence
  Synthetic oligonucleotide
gacgagaagaatggccacgaaattaaaacc

SEQ ID NO: 232753 - DNA, 30 bp, Artificial Sequence
  Synthetic oligonucleotide
gggaggggtcacataacgatagttaaaacc

SEQ ID NO: 232754 - DNA, 30 bp, Artificial Sequence
  Synthetic oligonucleotide
cccgtagcataacggaccagactacaaacc

SEQ ID NO: 232755 - DNA, 30 bp, Artificial Sequence
  Synthetic oligonucleotide
gcgaatctgcaccgcaggttccagcaaacc

SEQ ID NO: 232756 - DNA, 30 bp, Artificial Sequence
  Synthetic oligonucleotide
gagtaagaagtgaaagtcggttatcaaacc

SEQ ID NO: 232757 - DNA, 30 bp, Artificial Sequence
  Synthetic oligonucleotide
gcatgtcgtgacgaatcaaacacagaaacc

SEQ ID NO: 232758 - DNA, 30 bp, Artificial Sequence
  Synthetic oligonucleotide
tggccatcccatagcgctgtgtgcgaaacc

SEQ ID NO: 232759 - DNA, 30 bp, Artificial Sequence
  Synthetic oligonucleotide
tgacgggagttacacaacgcttgggaaacc

SEQ ID NO: 232760 - DNA, 30 bp, Artificial Sequence
  Synthetic oligonucleotide
taccttacaagaatggtccggggtgaaacc

SEQ ID NO: 232761 - DNA, 30 bp, Artificial Sequence
  Synthetic oligonucleotide
atgttatattagtcggtcggcggataaacc

SEQ ID NO: 232762 - DNA, 30 bp, Artificial Sequence
  Synthetic oligonucleotide
ggtggatgctgcagatcctatcattaaacc

SEQ ID NO: 232763 - DNA, 30 bp, Artificial Sequence
  Synthetic oligonucleotide
actcgagctcagagaaaggatttttaaacc

SEQ ID NO: 232764 - DNA, 30 bp, Artificial Sequence
  Synthetic oligonucleotide
ctagtggggtttatcaaaggactaacaacc

SEQ ID NO: 232765 - DNA, 30 bp, Artificial Sequence
  Synthetic oligonucleotide
gataggattatgctcgcataagccacaacc

SEQ ID NO: 232766 - DNA, 30 bp, Artificial Sequence
  Synthetic oligonucleotide
gcaggaggaagcaggcctcgatggacaacc

SEQ ID NO: 232767 - DNA, 30 bp, Artificial Sequence
  Synthetic oligonucleotide
ctcactatatcttacgaactgacaccaacc

SEQ ID NO: 232768 - DNA, 30 bp, Artificial Sequence
  Synthetic oligonucleotide
gctcgtcactgcgtcgcggacgtaccaacc

SEQ ID NO: 232769 - DNA, 30 bp, Artificial Sequence
  Synthetic oligonucleotide
ctggttccatgctgattagttcacccaacc

SEQ ID NO: 232770 - DNA, 30 bp, Artificial Sequence
  Synthetic oligonucleotide
tggggcaatctttgtacctgagggccaacc

SEQ ID NO: 232771 - DNA, 30 bp, Artificial Sequence
  Synthetic oligonucleotide
atgcaagtcctaagtagccaacgtccaacc

SEQ ID NO: 232772 - DNA, 30 bp, Artificial Sequence
  Synthetic oligonucleotide
agcgattaaggcaacaagttgacagcaacc

SEQ ID NO: 232773 - DNA, 30 bp, Artificial Sequence
  Synthetic oligonucleotide
ctgaccttatgtcagtaaagtatagcaacc

SEQ ID NO: 232774 - DNA, 30 bp, Artificial Sequence
  Synthetic oligonucleotide
gtctgcgggtggcggttctggactgcaacc

SEQ ID NO: 232775 - DNA, 30 bp, Artificial Sequence
  Synthetic oligonucleotide
ttataggaacgtgccaaatccccctcaacc

SEQ ID NO: 232776 - DNA, 30 bp, Artificial Sequence
  Synthetic oligonucleotide
ctacaagcaacatcgcggcaagcctcaacc

SEQ ID NO: 232777 - DNA, 30 bp, Artificial Sequence
  Synthetic oligonucleotide
gcgccttcgatggcgaggtttccgtcaacc

SEQ ID NO: 232778 - DNA, 30 bp, Artificial Sequence
  Synthetic oligonucleotide
gcacccaacactacaatgattggttcaacc

SEQ ID NO: 232779 - DNA, 30 bp, Artificial Sequence
  Synthetic oligonucleotide
cgaagtagggttggtgcttcttcaagaacc

SEQ ID NO: 232780 - DNA, 30 bp, Artificial Sequence
  Synthetic oligonucleotide
gcaaaggaaacacatagaaggtgcagaacc

SEQ ID NO: 232781 - DNA, 30 bp, Artificial Sequence
  Synthetic oligonucleotide
gagaacaggcggatagccgaattccgaacc

SEQ ID NO: 232782 - DNA, 30 bp, Artificial Sequence
  Synthetic oligonucleotide
taataaatctgtgggggctctgcgcgaacc

SEQ ID NO: 232783 - DNA, 30 bp, Artificial Sequence
  Synthetic oligonucleotide
tatgtacctaggattggcaacggtcgaacc

SEQ ID NO: 232784 - DNA, 30 bp, Artificial Sequence
  Synthetic oligonucleotide
cttacgttacagggttgaagttgtcgaacc

SEQ ID NO: 232785 - DNA, 30 bp, Artificial Sequence
  Synthetic oligonucleotide
gtcctttccacaaataccgaaataggaacc

SEQ ID NO: 232786 - DNA, 30 bp, Artificial Sequence
  Synthetic oligonucleotide
aactaaatacgcgcgggcactctcggaacc

SEQ ID NO: 232787 - DNA, 30 bp, Artificial Sequence
  Synthetic oligonucleotide
gcgctccggcgcgcttgtgtcgtcggaacc

SEQ ID NO: 232788 - DNA, 30 bp, Artificial Sequence
  Synthetic oligonucleotide
atagggcatcttagcagtacaaggggaacc

SEQ ID NO: 232789 - DNA, 30 bp, Artificial Sequence
  Synthetic oligonucleotide
agcaagtgctcagccggaccatgctgaacc

SEQ ID NO: 232790 - DNA, 30 bp, Artificial Sequence
  Synthetic oligonucleotide
ggttgtgagagataaagttgggggtgaacc

SEQ ID NO: 232791 - DNA, 30 bp, Artificial Sequence
  Synthetic oligonucleotide
actgtttcctcgctataacagagaataacc

SEQ ID NO: 232792 - DNA, 30 bp, Artificial Sequence
  Synthetic oligonucleotide
cgactaccgagacgcgaccagttcataacc

SEQ ID NO: 232793 - DNA, 30 bp, Artificial Sequence
  Synthetic oligonucleotide
cagtccgccagttagacgaagaagataacc

SEQ ID NO: 232794 - DNA, 30 bp, Artificial Sequence
  Synthetic oligonucleotide
tgaccgaacgtgggtgcaataactataacc

SEQ ID NO: 232795 - DNA, 30 bp, Artificial Sequence
  Synthetic oligonucleotide
gtaggcaggcaagcaggaatgggtataacc

SEQ ID NO: 232796 - DNA, 30 bp, Artificial Sequence
  Synthetic oligonucleotide
attacgagtgtagaatgttcccgactaacc

SEQ ID NO: 232797 - DNA, 30 bp, Artificial Sequence
  Synthetic oligonucleotide
agagaaagtcaccgcgttagctgactaacc

SEQ ID NO: 232798 - DNA, 30 bp, Artificial Sequence
  Synthetic oligonucleotide
gtagggcggcctgtggtcatccgcctaacc

SEQ ID NO: 232799 - DNA, 30 bp, Artificial Sequence
  Synthetic oligonucleotide
tgtgtatggcgtcatcgcccggcgctaacc

SEQ ID NO: 232800 - DNA, 30 bp, Artificial Sequence
  Synthetic oligonucleotide
tcttatgagacgcacgaacttgttctaacc

SEQ ID NO: 232801 - DNA, 30 bp, Artificial Sequence
  Synthetic oligonucleotide
aaatgggatacgagccagcacaaagtaacc

SEQ ID NO: 232802 - DNA, 30 bp, Artificial Sequence
  Synthetic oligonucleotide
tgtaagccaacgaagatctgtcccgtaacc

SEQ ID NO: 232803 - DNA, 30 bp, Artificial Sequence
  Synthetic oligonucleotide
gtatttagagtagcagaccactccgtaacc

SEQ ID NO: 232804 - DNA, 30 bp, Artificial Sequence
  Synthetic oligonucleotide
acgggcgccccaccttatctaggcgtaacc

SEQ ID NO: 232805 - DNA, 29 bp, Artificial Sequence
  Synthetic oligonucleotide
catttcaggggagcaaacatctcgtaacc

SEQ ID NO: 232806 - DNA, 30 bp, Artificial Sequence
  Synthetic oligonucleotide
gggccagattacggtgcggcactggtaacc

SEQ ID NO: 232807 - DNA, 30 bp, Artificial Sequence
  Synthetic oligonucleotide
gagacgtccggaatgtttaattacttaacc

SEQ ID NO: 232808 - DNA, 30 bp, Artificial Sequence
  Synthetic oligonucleotide
ggggaacctattgaagcctactcgttaacc

SEQ ID NO: 232809 - DNA, 30 bp, Artificial Sequence
  Synthetic oligonucleotide
tgaaatcaccaagctgagacttcgttaacc

SEQ ID NO: 232810 - DNA, 30 bp, Artificial Sequence
  Synthetic oligonucleotide
gtctatatacggccagcggcataaaacacc

SEQ ID NO: 232811 - DNA, 30 bp, Artificial Sequence
  Synthetic oligonucleotide
aggacctgtcgagctcgtagtgcgaacacc

SEQ ID NO: 232812 - DNA, 30 bp, Artificial Sequence
  Synthetic oligonucleotide
ttactggagtcctaaggtggaacacacacc

SEQ ID NO: 232813 - DNA, 30 bp, Artificial Sequence
  Synthetic oligonucleotide
agctaagggaccgggcatctatgccacacc

SEQ ID NO: 232814 - DNA, 30 bp, Artificial Sequence
  Synthetic oligonucleotide
aggctagtagaatcgccgttgatccacacc

SEQ ID NO: 232815 - DNA, 30 bp, Artificial Sequence
  Synthetic oligonucleotide
gaacccccacttattgggccggtccacacc

SEQ ID NO: 232816 - DNA, 30 bp, Artificial Sequence
  Synthetic oligonucleotide
gacagaaagcaagcattgtggactcacacc

SEQ ID NO: 232817 - DNA, 30 bp, Artificial Sequence
  Synthetic oligonucleotide
taaaccaacatctctattgatagtcacacc

SEQ ID NO: 232818 - DNA, 30 bp, Artificial Sequence
  Synthetic oligonucleotide
ttcgcatgctctcgctgtctgcttcacacc

SEQ ID NO: 232819 - DNA, 30 bp, Artificial Sequence
  Synthetic oligonucleotide
gtgaccctcgacgaccgtgtattagacacc

SEQ ID NO: 232820 - DNA, 30 bp, Artificial Sequence
  Synthetic oligonucleotide
atgtcgcgagcggcctggtggttcgacacc

SEQ ID NO: 232821 - DNA, 30 bp, Artificial Sequence
  Synthetic oligonucleotide
tcgaatagcggccgggtaagttaggacacc

SEQ ID NO: 232822 - DNA, 30 bp, Artificial Sequence
  Synthetic oligonucleotide
gcatctcatctctagctaaagggggacacc

SEQ ID NO: 232823 - DNA, 30 bp, Artificial Sequence
  Synthetic oligonucleotide
tgtcataaaaatcggcatcagtatgacacc

SEQ ID NO: 232824 - DNA, 30 bp, Artificial Sequence
  Synthetic oligonucleotide
tccggcgtgggtgatagcgcgtaatacacc

SEQ ID NO: 232825 - DNA, 30 bp, Artificial Sequence
  Synthetic oligonucleotide
cctgaagaaaacttaggcaattggtacacc

SEQ ID NO: 232826 - DNA, 30 bp, Artificial Sequence
  Synthetic oligonucleotide
ctatagaattaagagggtttaaattacacc

SEQ ID NO: 232827 - DNA, 30 bp, Artificial Sequence
  Synthetic oligonucleotide
ctgtaaaagccactatgctacgaccccacc

SEQ ID NO: 232828 - DNA, 30 bp, Artificial Sequence
  Synthetic oligonucleotide
gaacgggatatcaactaggtgtatcccacc

SEQ ID NO: 232829 - DNA, 30 bp, Artificial Sequence
  Synthetic oligonucleotide
tgagggtaattattcctcacgaaagccacc

SEQ ID NO: 232830 - DNA, 30 bp, Artificial Sequence
  Synthetic oligonucleotide
agacggcaatgtcgaaaggtgtatgccacc

SEQ ID NO: 232831 - DNA, 30 bp, Artificial Sequence
  Synthetic oligonucleotide
gggttcggccaaatactaggttatgccacc

SEQ ID NO: 232832 - DNA, 30 bp, Artificial Sequence
  Synthetic oligonucleotide
tctggtgacatcgtaggggagaactccacc

SEQ ID NO: 232833 - DNA, 30 bp, Artificial Sequence
  Synthetic oligonucleotide
gactatacgatagcatcaggctattccacc

SEQ ID NO: 232834 - DNA, 30 bp, Artificial Sequence
  Synthetic oligonucleotide
ggcatctaaaaatggggaagaacaagcacc

SEQ ID NO: 232835 - DNA, 30 bp, Artificial Sequence
  Synthetic oligonucleotide
agcactaattttagcgcttgatcaagcacc

SEQ ID NO: 232836 - DNA, 30 bp, Artificial Sequence
  Synthetic oligonucleotide
ccggcgtgcgtcgcgacagcgtccagcacc

SEQ ID NO: 232837 - DNA, 30 bp, Artificial Sequence
  Synthetic oligonucleotide
gactgcgattacgtatacactaagagcacc

SEQ ID NO: 232838 - DNA, 30 bp, Artificial Sequence
  Synthetic oligonucleotide
ttcagacttacattgatattgtcgagcacc

SEQ ID NO: 232839 - DNA, 30 bp, Artificial Sequence
  Synthetic oligonucleotide
cggcaacatatccaagctcgtggtagcacc

SEQ ID NO: 232840 - DNA, 30 bp, Artificial Sequence
  Synthetic oligonucleotide
gtgatgaagaaaattgctccgccacgcacc

SEQ ID NO: 232841 - DNA, 30 bp, Artificial Sequence
  Synthetic oligonucleotide
agttcggagctgtgaaatcgagcacgcacc

SEQ ID NO: 232842 - DNA, 30 bp, Artificial Sequence
  Synthetic oligonucleotide
ttaccacgctgagtttgggggccaggcacc

SEQ ID NO: 232843 - DNA, 30 bp, Artificial Sequence
  Synthetic oligonucleotide
tatcagtgtgaggctcaccgtcacggcacc

SEQ ID NO: 232844 - DNA, 30 bp, Artificial Sequence
  Synthetic oligonucleotide
acagcaaatcggtatagtgaatacggcacc

SEQ ID NO: 232845 - DNA, 30 bp, Artificial Sequence
  Synthetic oligonucleotide
ggggttggtcagatctaaaccaagggcacc

SEQ ID NO: 232846 - DNA, 30 bp, Artificial Sequence
  Synthetic oligonucleotide
gtcaaaatggtttccttggatgagggcacc

SEQ ID NO: 232847 - DNA, 30 bp, Artificial Sequence
  Synthetic oligonucleotide
ataactgtatcggatccttttaggggcacc

SEQ ID NO: 232848 - DNA, 30 bp, Artificial Sequence
  Synthetic oligonucleotide
tcttaggtgctggtgtagggttggggcacc

SEQ ID NO: 232849 - DNA, 30 bp, Artificial Sequence
  Synthetic oligonucleotide
taagaagtgcgtttgtacgtactctgcacc

SEQ ID NO: 232850 - DNA, 30 bp, Artificial Sequence
  Synthetic oligonucleotide
agttcaactggtaacgtgagctcgtgcacc

SEQ ID NO: 232851 - DNA, 30 bp, Artificial Sequence
  Synthetic oligonucleotide
gagagtaacggcgagcgagtctattgcacc

SEQ ID NO: 232852 - DNA, 30 bp, Artificial Sequence
  Synthetic oligonucleotide
gacaaggtattttaccggataagttgcacc

SEQ ID NO: 232853 - DNA, 30 bp, Artificial Sequence
  Synthetic oligonucleotide
ggttatactctagagtgcagtgcaatcacc

SEQ ID NO: 232854 - DNA, 30 bp, Artificial Sequence
  Synthetic oligonucleotide
ccgcaacaacctgttaagcagggaatcacc

SEQ ID NO: 232855 - DNA, 30 bp, Artificial Sequence
  Synthetic oligonucleotide
caacgtgggaaacagttggggtgaatcacc

SEQ ID NO: 232856 - DNA, 30 bp, Artificial Sequence
  Synthetic oligonucleotide
gtagcagacatgtaggttccgttaatcacc

SEQ ID NO: 232857 - DNA, 30 bp, Artificial Sequence
  Synthetic oligonucleotide
ctaaacaataacacagatggtaatatcacc

SEQ ID NO: 232858 - DNA, 30 bp, Artificial Sequence
  Synthetic oligonucleotide
cctcagtgggattgcattgagactatcacc

SEQ ID NO: 232859 - DNA, 30 bp, Artificial Sequence
  Synthetic oligonucleotide
ggcattactcgtgcactatccagactcacc

SEQ ID NO: 232860 - DNA, 30 bp, Artificial Sequence
  Synthetic oligonucleotide
gtcgtggtgttggttttatactggctcacc

SEQ ID NO: 232861 - DNA, 30 bp, Artificial Sequence
  Synthetic oligonucleotide
cagactctgaacatttcgagctgtctcacc

SEQ ID NO: 232862 - DNA, 30 bp, Artificial Sequence
  Synthetic oligonucleotide
tgccagtaatccataagactgcgcgtcacc

SEQ ID NO: 232863 - DNA, 30 bp, Artificial Sequence
  Synthetic oligonucleotide
cgtacggttgaaagtgggcatgcggtcacc

SEQ ID NO: 232864 - DNA, 30 bp, Artificial Sequence
  Synthetic oligonucleotide
tttactctgcgctatccatccgtattcacc

SEQ ID NO: 232865 - DNA, 30 bp, Artificial Sequence
  Synthetic oligonucleotide
ttctgcatagttcttggacagcacttcacc

SEQ ID NO: 232866 - DNA, 30 bp, Artificial Sequence
  Synthetic oligonucleotide
ccccactcagcatagacccgctcaaagacc

SEQ ID NO: 232867 - DNA, 30 bp, Artificial Sequence
  Synthetic oligonucleotide
tcacacgtggaccgccgtgccaccaagacc

SEQ ID NO: 232868 - DNA, 30 bp, Artificial Sequence
  Synthetic oligonucleotide
gtaggatctcaatggccataggataagacc

SEQ ID NO: 232869 - DNA, 30 bp, Artificial Sequence
  Synthetic oligonucleotide
gattcgagaactgacgatttggaagagacc

SEQ ID NO: 232870 - DNA, 30 bp, Artificial Sequence
  Synthetic oligonucleotide
gcaatagccttacgtctcaagcaggagacc

SEQ ID NO: 232871 - DNA, 30 bp, Artificial Sequence
  Synthetic oligonucleotide
ccctaaagacggtcacacaaactggagacc

SEQ ID NO: 232872 - DNA, 30 bp, Artificial Sequence
  Synthetic oligonucleotide
gtcccaatgcccagtagacattatgagacc

SEQ ID NO: 232873 - DNA, 30 bp, Artificial Sequence
  Synthetic oligonucleotide
atgctgaccagatttggggattctgagacc

SEQ ID NO: 232874 - DNA, 30 bp, Artificial Sequence
  Synthetic oligonucleotide
tgtgttcagcgtaaataggagtaatagacc

SEQ ID NO: 232875 - DNA, 30 bp, Artificial Sequence
  Synthetic oligonucleotide
tgaccaaccacggccatgggcgcatagacc

SEQ ID NO: 232876 - DNA, 30 bp, Artificial Sequence
  Synthetic oligonucleotide
catcggtaaggagtagagtggctatagacc

SEQ ID NO: 232877 - DNA, 30 bp, Artificial Sequence
  Synthetic oligonucleotide
gcaccgttgcttgaaggcttgatctagacc

SEQ ID NO: 232878 - DNA, 30 bp, Artificial Sequence
  Synthetic oligonucleotide
gcaataacatccctcggtcaagtttagacc

SEQ ID NO: 232879 - DNA, 30 bp, Artificial Sequence
  Synthetic oligonucleotide
tatacaccctatcgggtaagcgaaacgacc

SEQ ID NO: 232880 - DNA, 30 bp, Artificial Sequence
  Synthetic oligonucleotide
aaagctacatcggctagatcatccacgacc

SEQ ID NO: 232881 - DNA, 31 bp, Artificial Sequence
  Synthetic oligonucleotide
tgcatcatctgtccctatcctcagcacgacc

SEQ ID NO: 232882 - DNA, 30 bp, Artificial Sequence
  Synthetic oligonucleotide
gaaatgagttcggcaatccattctacgacc

SEQ ID NO: 232883 - DNA, 30 bp, Artificial Sequence
  Synthetic oligonucleotide
atatacaatctgggactagaaccaccgacc

SEQ ID NO: 232884 - DNA, 30 bp, Artificial Sequence
  Synthetic oligonucleotide
ggctacgtctccagataagtcatgccgacc

SEQ ID NO: 232885 - DNA, 30 bp, Artificial Sequence
  Synthetic oligonucleotide
ggctcaagcgatgtcagttaccccgcgacc

SEQ ID NO: 232886 - DNA, 30 bp, Artificial Sequence
  Synthetic oligonucleotide
agcggtttagccaaatgccgtgatgcgacc

SEQ ID NO: 232887 - DNA, 30 bp, Artificial Sequence
  Synthetic oligonucleotide
accgcatacgctagtatcctgaactcgacc

SEQ ID NO: 232888 - DNA, 30 bp, Artificial Sequence
  Synthetic oligonucleotide
cgggtcataaaaaataccccgggctcgacc

SEQ ID NO: 232889 - DNA, 30 bp, Artificial Sequence
  Synthetic oligonucleotide
gaggaaggaggatattttaaaatgtcgacc

SEQ ID NO: 232890 - DNA, 30 bp, Artificial Sequence
  Synthetic oligonucleotide
agcgtatgtaacccaatacatgcaaggacc

SEQ ID NO: 232891 - DNA, 30 bp, Artificial Sequence
  Synthetic oligonucleotide
tttcaacaccatagtagcggccacaggacc

SEQ ID NO: 232892 - DNA, 30 bp, Artificial Sequence
  Synthetic oligonucleotide
gccgcgcaaccaatatgagagtataggacc

SEQ ID NO: 232893 - DNA, 30 bp, Artificial Sequence
  Synthetic oligonucleotide
gtcgtaaccctcgtaaagtcgatagggacc

SEQ ID NO: 232894 - DNA, 30 bp, Artificial Sequence
  Synthetic oligonucleotide
tattgattgcatatagtatcactcgggacc

SEQ ID NO: 232895 - DNA, 30 bp, Artificial Sequence
  Synthetic oligonucleotide
gacaagtgttattagtcgcccatggggacc

SEQ ID NO: 232896 - DNA, 30 bp, Artificial Sequence
  Synthetic oligonucleotide
attaatcgctcccttgacatcggtgggacc

SEQ ID NO: 232897 - DNA, 30 bp, Artificial Sequence
  Synthetic oligonucleotide
gggtaatgacgatgcgggacgcgatggacc

SEQ ID NO: 232898 - DNA, 30 bp, Artificial Sequence
  Synthetic oligonucleotide
ggtctgtgagatagaatagggatctggacc

SEQ ID NO: 232899 - DNA, 30 bp, Artificial Sequence
  Synthetic oligonucleotide
cgcatgacaccagaaaggtgtgggtggacc

SEQ ID NO: 232900 - DNA, 30 bp, Artificial Sequence
  Synthetic oligonucleotide
ccgggcagacattatgaccacgtttggacc

SEQ ID NO: 232901 - DNA, 30 bp, Artificial Sequence
  Synthetic oligonucleotide
tagatggatttctcgttggcactgatgacc

SEQ ID NO: 232902 - DNA, 30 bp, Artificial Sequence
  Synthetic oligonucleotide
gtggatggtaagatactagcggtactgacc

SEQ ID NO: 232903 - DNA, 30 bp, Artificial Sequence
  Synthetic oligonucleotide
ccgctcccatgtgtacggcttatcctgacc

SEQ ID NO: 232904 - DNA, 30 bp, Artificial Sequence
  Synthetic oligonucleotide
ctggcttcagtacgtctttctaggctgacc

SEQ ID NO: 232905 - DNA, 30 bp, Artificial Sequence
  Synthetic oligonucleotide
ggtcgactaggtacctttttgatgctgacc

SEQ ID NO: 232906 - DNA, 30 bp, Artificial Sequence
  Synthetic oligonucleotide
aaactaagggaaacgtgatgtcaagtgacc

SEQ ID NO: 232907 - DNA, 30 bp, Artificial Sequence
  Synthetic oligonucleotide
ccaaggtatacgcgtcgacgcccagtgacc

SEQ ID NO: 232908 - DNA, 30 bp, Artificial Sequence
  Synthetic oligonucleotide
gaatccactattgcagtatatccagtgacc

SEQ ID NO: 232909 - DNA, 30 bp, Artificial Sequence
  Synthetic oligonucleotide
cttgattcgatgagagaaatctccgtgacc

SEQ ID NO: 232910 - DNA, 30 bp, Artificial Sequence
  Synthetic oligonucleotide
caagagcgtttgatccggaagcaggtgacc

SEQ ID NO: 232911 - DNA, 30 bp, Artificial Sequence
  Synthetic oligonucleotide
cactagagtgacaagtaaagtatggtgacc

SEQ ID NO: 232912 - DNA, 30 bp, Artificial Sequence
  Synthetic oligonucleotide
ctgtccgggacattttcgcgacctgtgacc

SEQ ID NO: 232913 - DNA, 30 bp, Artificial Sequence
  Synthetic oligonucleotide
agtatagcgtatagaatttcccttgtgacc

SEQ ID NO: 232914 - DNA, 30 bp, Artificial Sequence
  Synthetic oligonucleotide
taaaggctatgctcctagtccgttgtgacc

SEQ ID NO: 232915 - DNA, 30 bp, Artificial Sequence
  Synthetic oligonucleotide
tccgccagtccaggaaacgaggttgtgacc

SEQ ID NO: 232916 - DNA, 30 bp, Artificial Sequence
  Synthetic oligonucleotide
tttcctaggaaagacttttgggttgtgacc

SEQ ID NO: 232917 - DNA, 30 bp, Artificial Sequence
  Synthetic oligonucleotide
ccatataacccgacactaaccatattgacc

SEQ ID NO: 232918 - DNA, 30 bp, Artificial Sequence
  Synthetic oligonucleotide
ggagtggttactccaattagggagttgacc

SEQ ID NO: 232919 - DNA, 30 bp, Artificial Sequence
  Synthetic oligonucleotide
ccttggtagccaaggtgcggatggttgacc

SEQ ID NO: 232920 - DNA, 30 bp, Artificial Sequence
  Synthetic oligonucleotide
tcgtccatgacgaaatatcgccaaaatacc

SEQ ID NO: 232921 - DNA, 30 bp, Artificial Sequence
  Synthetic oligonucleotide
cagatggggaaagcctcgtttggaaatacc

SEQ ID NO: 232922 - DNA, 30 bp, Artificial Sequence
  Synthetic oligonucleotide
cgtacttataagggggtctggtgcaatacc

SEQ ID NO: 232923 - DNA, 30 bp, Artificial Sequence
  Synthetic oligonucleotide
ttacaaaggaggcgttacgtaaagcatacc

SEQ ID NO: 232924 - DNA, 30 bp, Artificial Sequence
  Synthetic oligonucleotide
tgagcagacgtcaaatgaaagtgtcatacc

SEQ ID NO: 232925 - DNA, 30 bp, Artificial Sequence
  Synthetic oligonucleotide
ggtcatcaaccgggcgtgcgcgaagatacc

SEQ ID NO: 232926 - DNA, 30 bp, Artificial Sequence
  Synthetic oligonucleotide
tctgactcacaagcaaagagttaagatacc

SEQ ID NO: 232927 - DNA, 30 bp, Artificial Sequence
  Synthetic oligonucleotide
gtttacactaagggacagttcgtagatacc

SEQ ID NO: 232928 - DNA, 30 bp, Artificial Sequence
  Synthetic oligonucleotide
cttgcagacaaagtctgttgatccgatacc

SEQ ID NO: 232929 - DNA, 30 bp, Artificial Sequence
  Synthetic oligonucleotide
ctgtatagagcttgttatgaagatgatacc

SEQ ID NO: 232930 - DNA, 30 bp, Artificial Sequence
  Synthetic oligonucleotide
agtcggtcgctggaaaaccgacctgatacc

SEQ ID NO: 232931 - DNA, 30 bp, Artificial Sequence
  Synthetic oligonucleotide
tgcagtacccaacgagggaaggctgatacc

SEQ ID NO: 232932 - DNA, 30 bp, Artificial Sequence
  Synthetic oligonucleotide
tcgaccgtgctgaaaatgggagggtatacc

SEQ ID NO: 232933 - DNA, 30 bp, Artificial Sequence
  Synthetic oligonucleotide
acattcgcagaaggaagtaagcaaactacc

SEQ ID NO: 232934 - DNA, 30 bp, Artificial Sequence
  Synthetic oligonucleotide
gactttgaacagaggttcaacgcaactacc

SEQ ID NO: 232935 - DNA, 30 bp, Artificial Sequence
  Synthetic oligonucleotide
cagatgtaagctgtggatttaaacactacc

SEQ ID NO: 232936 - DNA, 30 bp, Artificial Sequence
  Synthetic oligonucleotide
cggctcgaatctacagacagagatactacc

SEQ ID NO: 232937 - DNA, 30 bp, Artificial Sequence
  Synthetic oligonucleotide
gaaaagtaaagacaccctcgatctactacc

SEQ ID NO: 232938 - DNA, 30 bp, Artificial Sequence
  Synthetic oligonucleotide
aacttccaacgaggcttgggcaaacctacc

SEQ ID NO: 232939 - DNA, 30 bp, Artificial Sequence
  Synthetic oligonucleotide
tctaatctccgagtgtttagggtacctacc

SEQ ID NO: 232940 - DNA, 30 bp, Artificial Sequence
  Synthetic oligonucleotide
gagcttgctagaaggaacaaacgtcctacc

SEQ ID NO: 232941 - DNA, 30 bp, Artificial Sequence
  Synthetic oligonucleotide
gtatcgcgtcactgtacggccaaagctacc

SEQ ID NO: 232942 - DNA, 30 bp, Artificial Sequence
  Synthetic oligonucleotide
tacgcatttttctccatatatatagctacc

SEQ ID NO: 232943 - DNA, 30 bp, Artificial Sequence
  Synthetic oligonucleotide
tgcgtataactcacaattcgcaacgctacc

SEQ ID NO: 232944 - DNA, 30 bp, Artificial Sequence
  Synthetic oligonucleotide
caagctagatggaacaggaggtgcgctacc

SEQ ID NO: 232945 - DNA, 30 bp, Artificial Sequence
  Synthetic oligonucleotide
agtcaataagaagttgattaatgggctacc

SEQ ID NO: 232946 - DNA, 30 bp, Artificial Sequence
  Synthetic oligonucleotide
gagggacaagtgtcaacgcgaaaatctacc

SEQ ID NO: 232947 - DNA, 30 bp, Artificial Sequence
  Synthetic oligonucleotide
aaacagagagctcgtcacaggatttctacc

SEQ ID NO: 232948 - DNA, 30 bp, Artificial Sequence
  Synthetic oligonucleotide
cgcctcccgatgagaataactagaagtacc

SEQ ID NO: 232949 - DNA, 30 bp, Artificial Sequence
  Synthetic oligonucleotide
gcatacacaatcgagttttatgccagtacc

SEQ ID NO: 232950 - DNA, 30 bp, Artificial Sequence
  Synthetic oligonucleotide
cccggaccgggtacactgaaggggagtacc

SEQ ID NO: 232951 - DNA, 30 bp, Artificial Sequence
  Synthetic oligonucleotide
aacagtggtttgaagtaatctatgagtacc

SEQ ID NO: 232952 - DNA, 30 bp, Artificial Sequence
  Synthetic oligonucleotide
gcgcgataaaacgcgggccgtctacgtacc

SEQ ID NO: 232953 - DNA, 30 bp, Artificial Sequence
  Synthetic oligonucleotide
cacaactaacaccttgtggacacccgtacc

SEQ ID NO: 232954 - DNA, 30 bp, Artificial Sequence
  Synthetic oligonucleotide
tcgcccgtcattacatacctctgccgtacc

SEQ ID NO: 232955 - DNA, 30 bp, Artificial Sequence
  Synthetic oligonucleotide
actactgagatgtcataggacgtccgtacc

SEQ ID NO: 232956 - DNA, 29 bp, Artificial Sequence
  Synthetic oligonucleotide
atggcatcctctgaggtattgtccgtacc

SEQ ID NO: 232957 - DNA, 30 bp, Artificial Sequence
  Synthetic oligonucleotide
ccgtatttagggaccgtagtcaagcgtacc

SEQ ID NO: 232958 - DNA, 30 bp, Artificial Sequence
  Synthetic oligonucleotide
gccacaatgatataggggtaatagcgtacc

SEQ ID NO: 232959 - DNA, 30 bp, Artificial Sequence
  Synthetic oligonucleotide
caatattcccacttggaaaacgtgcgtacc

SEQ ID NO: 232960 - DNA, 30 bp, Artificial Sequence
  Synthetic oligonucleotide
atctagttcatgtacgggagccatcgtacc

SEQ ID NO: 232961 - DNA, 30 bp, Artificial Sequence
  Synthetic oligonucleotide
ggggatgaggtggtttgaggggctcgtacc

SEQ ID NO: 232962 - DNA, 30 bp, Artificial Sequence
  Synthetic oligonucleotide
tcgttataggattggatagtgcgtcgtacc

SEQ ID NO: 232963 - DNA, 30 bp, Artificial Sequence
  Synthetic oligonucleotide
gataccccggaaacaaatgaaccaggtacc

SEQ ID NO: 232964 - DNA, 30 bp, Artificial Sequence
  Synthetic oligonucleotide
caatattggaagcgtcttaagccaggtacc

SEQ ID NO: 232965 - DNA, 30 bp, Artificial Sequence
  Synthetic oligonucleotide
gatgtccggaaagctagaggcaccggtacc

SEQ ID NO: 232966 - DNA, 30 bp, Artificial Sequence
  Synthetic oligonucleotide
gtcctatctcgaaggaagcccaggggtacc

SEQ ID NO: 232967 - DNA, 30 bp, Artificial Sequence
  Synthetic oligonucleotide
aacgtatatcatatgtaccggcggggtacc

SEQ ID NO: 232968 - DNA, 30 bp, Artificial Sequence
  Synthetic oligonucleotide
cgtggaatggaggggattccggggggtacc

SEQ ID NO: 232969 - DNA, 30 bp, Artificial Sequence
  Synthetic oligonucleotide
ctcgccgttaacggatccgcatggggtacc

SEQ ID NO: 232970 - DNA, 30 bp, Artificial Sequence
  Synthetic oligonucleotide
gtaaaagtggttttctcctcctgctgtacc

SEQ ID NO: 232971 - DNA, 30 bp, Artificial Sequence
  Synthetic oligonucleotide
gtgtagaactcttgctatacgatctgtacc

SEQ ID NO: 232972 - DNA, 30 bp, Artificial Sequence
  Synthetic oligonucleotide
gtgaactaggtggaaagagaatggtgtacc

SEQ ID NO: 232973 - DNA, 30 bp, Artificial Sequence
  Synthetic oligonucleotide
aaaccgcgatgtttaagcggtgcttgtacc

SEQ ID NO: 232974 - DNA, 30 bp, Artificial Sequence
  Synthetic oligonucleotide
acacggccctaagagtctagtagttgtacc

SEQ ID NO: 232975 - DNA, 30 bp, Artificial Sequence
  Synthetic oligonucleotide
cgactggtatgccagtttaaacaaattacc

SEQ ID NO: 232976 - DNA, 30 bp, Artificial Sequence
  Synthetic oligonucleotide
taggcgcatcacatattgcccgtcattacc

SEQ ID NO: 232977 - DNA, 30 bp, Artificial Sequence
  Synthetic oligonucleotide
acaggagacatccgctcttcctatattacc

SEQ ID NO: 232978 - DNA, 30 bp, Artificial Sequence
  Synthetic oligonucleotide
gtgtgtgcggaaaataaacccgttcttacc

SEQ ID NO: 232979 - DNA, 30 bp, Artificial Sequence
  Synthetic oligonucleotide
aggtcgtctcggtgttttgattccgttacc

SEQ ID NO: 232980 - DNA, 30 bp, Artificial Sequence
  Synthetic oligonucleotide
gtcggtggacctgtgtgtaaaggatttacc

SEQ ID NO: 232981 - DNA, 30 bp, Artificial Sequence
  Synthetic oligonucleotide
atcccgaggcgggtgacgctgaactttacc

SEQ ID NO: 232982 - DNA, 30 bp, Artificial Sequence
  Synthetic oligonucleotide
gctgaaactcatctagattaacccaaaccc

SEQ ID NO: 232983 - DNA, 31 bp, Artificial Sequence
  Synthetic oligonucleotide
ccgctccgagagtaattactaacgcaaaccc

SEQ ID NO: 232984 - DNA, 30 bp, Artificial Sequence
  Synthetic oligonucleotide
cgtacggaatccgtatcagcgctcaaaccc

SEQ ID NO: 232985 - DNA, 30 bp, Artificial Sequence
  Synthetic oligonucleotide
gtttggcgtgagagggcttggtggaaaccc

SEQ ID NO: 232986 - DNA, 30 bp, Artificial Sequence
  Synthetic oligonucleotide
aacgggatcgcgtattacactctgaaaccc

SEQ ID NO: 232987 - DNA, 30 bp, Artificial Sequence
  Synthetic oligonucleotide
gggttgcggatccagttacgtgataaaccc

SEQ ID NO: 232988 - DNA, 30 bp, Artificial Sequence
  Synthetic oligonucleotide
caatagggatacggacccgaagaacaaccc

SEQ ID NO: 232989 - DNA, 30 bp, Artificial Sequence
  Synthetic oligonucleotide
aatctgcaaacaaggtcaaccctacaaccc

SEQ ID NO: 232990 - DNA, 30 bp, Artificial Sequence
  Synthetic oligonucleotide
ctagcatttcggcagtgtagcggccaaccc

SEQ ID NO: 232991 - DNA, 30 bp, Artificial Sequence
  Synthetic oligonucleotide
atctcgggatataaaaacatagggcaaccc

SEQ ID NO: 232992 - DNA, 30 bp, Artificial Sequence
  Synthetic oligonucleotide
gaaagtatgcaaccccgatcagtgcaaccc

SEQ ID NO: 232993 - DNA, 30 bp, Artificial Sequence
  Synthetic oligonucleotide
tcgttagcctttcttgttaccgctcaaccc

SEQ ID NO: 232994 - DNA, 30 bp, Artificial Sequence
  Synthetic oligonucleotide
cagtgtcataattacagggatatagaaccc

SEQ ID NO: 232995 - DNA, 30 bp, Artificial Sequence
  Synthetic oligonucleotide
aagactgtttacctcacctgtttagaaccc

SEQ ID NO: 232996 - DNA, 30 bp, Artificial Sequence
  Synthetic oligonucleotide
aaggcggtagggtgctatcattacgaaccc

SEQ ID NO: 232997 - DNA, 30 bp, Artificial Sequence
  Synthetic oligonucleotide
ccgggacgaagtcacactcaataggaaccc

SEQ ID NO: 232998 - DNA, 30 bp, Artificial Sequence
  Synthetic oligonucleotide
ggcgctaatagcgaatctacgtaggaaccc

SEQ ID NO: 232999 - DNA, 30 bp, Artificial Sequence
  Synthetic oligonucleotide
gccaccaggagatcacaggctagtgaaccc

SEQ ID NO: 233000 - DNA, 30 bp, Artificial Sequence
  Synthetic oligonucleotide
ccactgcttgactaccatcggcttgaaccc

SEQ ID NO: 233001 - DNA, 30 bp, Artificial Sequence
  Synthetic oligonucleotide
ttattatggtgtccgaacgcggaataaccc

SEQ ID NO: 233002 - DNA, 30 bp, Artificial Sequence
  Synthetic oligonucleotide
agtcattcgcaatctaatgacgtctaaccc

SEQ ID NO: 233003 - DNA, 30 bp, Artificial Sequence
  Synthetic oligonucleotide
tgacgggcataatgacaccactagtaaccc

SEQ ID NO: 233004 - DNA, 30 bp, Artificial Sequence
  Synthetic oligonucleotide
aacaggttgatgtggggtaacctaacaccc

SEQ ID NO: 233005 - DNA, 30 bp, Artificial Sequence
  Synthetic oligonucleotide
agataatgggctcataattgcttgacaccc

SEQ ID NO: 233006 - DNA, 30 bp, Artificial Sequence
  Synthetic oligonucleotide
tttctgggacatccggtagttattacaccc

SEQ ID NO: 233007 - DNA, 30 bp, Artificial Sequence
  Synthetic oligonucleotide
acgtcgctgtgtccggtaataaaaccaccc

SEQ ID NO: 233008 - DNA, 30 bp, Artificial Sequence
  Synthetic oligonucleotide
tcgaggtatacgcggtaaagccggccaccc

SEQ ID NO: 233009 - DNA, 30 bp, Artificial Sequence
  Synthetic oligonucleotide
tcaagattctagaatcggcgtcggccaccc

SEQ ID NO: 233010 - DNA, 30 bp, Artificial Sequence
  Synthetic oligonucleotide
gggccagggaaagggaaggtataagcaccc

SEQ ID NO: 233011 - DNA, 30 bp, Artificial Sequence
  Synthetic oligonucleotide
ctgcgcgttgtgaggtaccgtgaggcaccc

SEQ ID NO: 233012 - DNA, 30 bp, Artificial Sequence
  Synthetic oligonucleotide
cgtaagtgtagcgagcctttctttgcaccc

SEQ ID NO: 233013 - DNA, 30 bp, Artificial Sequence
  Synthetic oligonucleotide
atatgcaacatcgctcgagattaatcaccc

SEQ ID NO: 233014 - DNA, 30 bp, Artificial Sequence
  Synthetic oligonucleotide
gtgcagtttcgtctactaatctccagaccc

SEQ ID NO: 233015 - DNA, 30 bp, Artificial Sequence
  Synthetic oligonucleotide
aggtaggtccttatatgatcccgcagaccc

SEQ ID NO: 233016 - DNA, 30 bp, Artificial Sequence
  Synthetic oligonucleotide
aattaacgtacggcttgttggttgagaccc

SEQ ID NO: 233017 - DNA, 30 bp, Artificial Sequence
  Synthetic oligonucleotide
agttgaccaaccaaccttgtgaatagaccc

SEQ ID NO: 233018 - DNA, 30 bp, Artificial Sequence
  Synthetic oligonucleotide
gaaatgataattggataggcacgtagaccc

SEQ ID NO: 233019 - DNA, 30 bp, Artificial Sequence
  Synthetic oligonucleotide
tcagccgtgtacgcccggtcttgacgaccc

SEQ ID NO: 233020 - DNA, 30 bp, Artificial Sequence
  Synthetic oligonucleotide
acgtattaaacactcataaacgtccgaccc

SEQ ID NO: 233021 - DNA, 30 bp, Artificial Sequence
  Synthetic oligonucleotide
tagggcgatgggagtagactatcgcgaccc

SEQ ID NO: 233022 - DNA, 30 bp, Artificial Sequence
  Synthetic oligonucleotide
gtgaaagcccggatgagggcgatcggaccc

SEQ ID NO: 233023 - DNA, 30 bp, Artificial Sequence
  Synthetic oligonucleotide
gtgtatgtggggatagtgaggatgggaccc

SEQ ID NO: 233024 - DNA, 30 bp, Artificial Sequence
  Synthetic oligonucleotide
agtggtacgttagtgacccgcatatgaccc

SEQ ID NO: 233025 - DNA, 30 bp, Artificial Sequence
  Synthetic oligonucleotide
ggggaggcctagtacaataggtactgaccc

SEQ ID NO: 233026 - DNA, 30 bp, Artificial Sequence
  Synthetic oligonucleotide
gcggccgcgtacctctacgtttcgtgaccc

SEQ ID NO: 233027 - DNA, 30 bp, Artificial Sequence
  Synthetic oligonucleotide
atgtgttacatgagtgcgtccataataccc

SEQ ID NO: 233028 - DNA, 30 bp, Artificial Sequence
  Synthetic oligonucleotide
caattgattcgcatgtttatagtcataccc

SEQ ID NO: 233029 - DNA, 30 bp, Artificial Sequence
  Synthetic oligonucleotide
ccacactattgaattaagggtaagataccc

SEQ ID NO: 233030 - DNA, 30 bp, Artificial Sequence
  Synthetic oligonucleotide
cgctaatcaccttcacttattgctataccc

SEQ ID NO: 233031 - DNA, 30 bp, Artificial Sequence
  Synthetic oligonucleotide
ggcacaacacgtaaagcattcaccctaccc

SEQ ID NO: 233032 - DNA, 30 bp, Artificial Sequence
  Synthetic oligonucleotide
ctccctgcggagaattagacggtgctaccc

SEQ ID NO: 233033 - DNA, 30 bp, Artificial Sequence
  Synthetic oligonucleotide
gacatgggaggcggcaatatggtgctaccc

SEQ ID NO: 233034 - DNA, 30 bp, Artificial Sequence
  Synthetic oligonucleotide
tggacagactaaagttcctaattgctaccc

SEQ ID NO: 233035 - DNA, 30 bp, Artificial Sequence
  Synthetic oligonucleotide
tctatcagtagttgcggtacacgtctaccc

SEQ ID NO: 233036 - DNA, 30 bp, Artificial Sequence
  Synthetic oligonucleotide
gctcatcaaggattaggtaatccagtaccc

SEQ ID NO: 233037 - DNA, 30 bp, Artificial Sequence
  Synthetic oligonucleotide
cctactagaattgctcgagtaggagtaccc

SEQ ID NO: 233038 - DNA, 30 bp, Artificial Sequence
  Synthetic oligonucleotide
ctataccggagacgaatcttattagtaccc

SEQ ID NO: 233039 - DNA, 30 bp, Artificial Sequence
  Synthetic oligonucleotide
tcggggtcctcaggtaagaattcggtaccc

SEQ ID NO: 233040 - DNA, 30 bp, Artificial Sequence
  Synthetic oligonucleotide
cgtgcatggagtagtgaacactgggtaccc

SEQ ID NO: 233041 - DNA, 30 bp, Artificial Sequence
  Synthetic oligonucleotide
ccttacggattttctggtgcggaattaccc

SEQ ID NO: 233042 - DNA, 30 bp, Artificial Sequence
  Synthetic oligonucleotide
ggacggagcagaaatcatcatctcttaccc

SEQ ID NO: 233043 - DNA, 30 bp, Artificial Sequence
  Synthetic oligonucleotide
gtaaggtgtcaaattcgggaaatgttaccc

SEQ ID NO: 233044 - DNA, 30 bp, Artificial Sequence
  Synthetic oligonucleotide
acgatgccgtttggagatacaggtttaccc

SEQ ID NO: 233045 - DNA, 30 bp, Artificial Sequence
  Synthetic oligonucleotide
atctaagtgcaggaaaagggcagaaacccc

SEQ ID NO: 233046 - DNA, 30 bp, Artificial Sequence
  Synthetic oligonucleotide
cgattgttaacgtctgagcacctaaacccc

SEQ ID NO: 233047 - DNA, 30 bp, Artificial Sequence
  Synthetic oligonucleotide
agagagattgggtccatggtcgtaaacccc

SEQ ID NO: 233048 - DNA, 30 bp, Artificial Sequence
  Synthetic oligonucleotide
agagttaatcggcgtacgggaaacaacccc

SEQ ID NO: 233049 - DNA, 30 bp, Artificial Sequence
  Synthetic oligonucleotide
cgccattgatatgtcaacttaatcaacccc

SEQ ID NO: 233050 - DNA, 30 bp, Artificial Sequence
  Synthetic oligonucleotide
ccgagggcggggatcccctctttcaacccc

SEQ ID NO: 233051 - DNA, 30 bp, Artificial Sequence
  Synthetic oligonucleotide
tagagacgatttgtaacgctacagaacccc

SEQ ID NO: 233052 - DNA, 30 bp, Artificial Sequence
  Synthetic oligonucleotide
tagacggtcacggacggactacctaacccc

SEQ ID NO: 233053 - DNA, 30 bp, Artificial Sequence
  Synthetic oligonucleotide
gagtctgcaacaacgtttgaggttcacccc

SEQ ID NO: 233054 - DNA, 30 bp, Artificial Sequence
  Synthetic oligonucleotide
ggcgttacgaagggttttgtagcagacccc

SEQ ID NO: 233055 - DNA, 30 bp, Artificial Sequence
  Synthetic oligonucleotide
cgcagggacgttctaaaaggagtagacccc

SEQ ID NO: 233056 - DNA, 30 bp, Artificial Sequence
  Synthetic oligonucleotide
ggacggtgtaggaacacctctcacgacccc

SEQ ID NO: 233057 - DNA, 30 bp, Artificial Sequence
  Synthetic oligonucleotide
taattgctataagaagatactcctgacccc

SEQ ID NO: 233058 - DNA, 30 bp, Artificial Sequence
  Synthetic oligonucleotide
ggagaagattacgagatgattgcatacccc

SEQ ID NO: 233059 - DNA, 30 bp, Artificial Sequence
  Synthetic oligonucleotide
gttggacacccggttttgtaacgaaccccc

SEQ ID NO: 233060 - DNA, 30 bp, Artificial Sequence
  Synthetic oligonucleotide
tacatagtctcgcccttatttagcaccccc

SEQ ID NO: 233061 - DNA, 30 bp, Artificial Sequence
  Synthetic oligonucleotide
tgcgaccgcaaccccagttttcttaccccc

SEQ ID NO: 233062 - DNA, 30 bp, Artificial Sequence
  Synthetic oligonucleotide
ctggtcccagagcataaaaacttacccccc

SEQ ID NO: 233063 - DNA, 30 bp, Artificial Sequence
  Synthetic oligonucleotide
ggaccgggcaaagcggaattcgaccccccc

SEQ ID NO: 233064 - DNA, 30 bp, Artificial Sequence
  Synthetic oligonucleotide
ggcacatgcccatgattgacgcgtcccccc

SEQ ID NO: 233065 - DNA, 30 bp, Artificial Sequence
  Synthetic oligonucleotide
ggtttctggaccgacggacctgacgccccc

SEQ ID NO: 233066 - DNA, 30 bp, Artificial Sequence
  Synthetic oligonucleotide
gggttaagcattgaagattaaagtgccccc

SEQ ID NO: 233067 - DNA, 30 bp, Artificial Sequence
  Synthetic oligonucleotide
actacataatatcgtccagcctcgtccccc

SEQ ID NO: 233068 - DNA, 30 bp, Artificial Sequence
  Synthetic oligonucleotide
gagagcatactcgttaggccaagaagcccc

SEQ ID NO: 233069 - DNA, 30 bp, Artificial Sequence
  Synthetic oligonucleotide
gaatcatattaaaagaatcaaggcagcccc

SEQ ID NO: 233070 - DNA, 30 bp, Artificial Sequence
  Synthetic oligonucleotide
cggccttatagaacacaggggaggagcccc

SEQ ID NO: 233071 - DNA, 30 bp, Artificial Sequence
  Synthetic oligonucleotide
aggatgacaggtgtaagtcctccacgcccc

SEQ ID NO: 233072 - DNA, 30 bp, Artificial Sequence
  Synthetic oligonucleotide
agacgccatgattatggagaagagggcccc

SEQ ID NO: 233073 - DNA, 30 bp, Artificial Sequence
  Synthetic oligonucleotide
ttatccgagagaaaatgagatattggcccc

SEQ ID NO: 233074 - DNA, 30 bp, Artificial Sequence
  Synthetic oligonucleotide
tcagaatcaattgacaccaaccgctgcccc

SEQ ID NO: 233075 - DNA, 30 bp, Artificial Sequence
  Synthetic oligonucleotide
tgcggggttaagaacctttaaatctgcccc

SEQ ID NO: 233076 - DNA, 30 bp, Artificial Sequence
  Synthetic oligonucleotide
caggggatcaacgcagtacacgtctgcccc

SEQ ID NO: 233077 - DNA, 30 bp, Artificial Sequence
  Synthetic oligonucleotide
tcggattacgtatttttatggtgcatcccc

SEQ ID NO: 233078 - DNA, 30 bp, Artificial Sequence
  Synthetic oligonucleotide
acgtaggatgatcgattacacgcgatcccc

SEQ ID NO: 233079 - DNA, 30 bp, Artificial Sequence
  Synthetic oligonucleotide
gtcgtaacggtgcaagtggtggggatcccc

SEQ ID NO: 233080 - DNA, 30 bp, Artificial Sequence
  Synthetic oligonucleotide
aatacacattcgtggcacttcactctcccc

SEQ ID NO: 233081 - DNA, 30 bp, Artificial Sequence
  Synthetic oligonucleotide
cggacgcagtagaaatgtagggtcgtcccc

SEQ ID NO: 233082 - DNA, 30 bp, Artificial Sequence
  Synthetic oligonucleotide
ggtgaggaacctctgatgttgtcggtcccc

SEQ ID NO: 233083 - DNA, 30 bp, Artificial Sequence
  Synthetic oligonucleotide
cagttagacgtggtataggtgcgtgtcccc

SEQ ID NO: 233084 - DNA, 30 bp, Artificial Sequence
  Synthetic oligonucleotide
gacgaatacgtgatgctagcagtaaagccc

SEQ ID NO: 233085 - DNA, 30 bp, Artificial Sequence
  Synthetic oligonucleotide
tttggcatttggcgtataaccttaaagccc

SEQ ID NO: 233086 - DNA, 30 bp, Artificial Sequence
  Synthetic oligonucleotide
ctagttgtccaggcgaaaagtaacaagccc

SEQ ID NO: 233087 - DNA, 29 bp, Artificial Sequence
  Synthetic oligonucleotide
ttggtttagctcaggtcaaaggcaagccc

SEQ ID NO: 233088 - DNA, 30 bp, Artificial Sequence
  Synthetic oligonucleotide
gaaaatcaactaatccgggggtgcaagccc

SEQ ID NO: 233089 - DNA, 30 bp, Artificial Sequence
  Synthetic oligonucleotide
aaacaagccaaaaagaagtcccggcagccc

SEQ ID NO: 233090 - DNA, 30 bp, Artificial Sequence
  Synthetic oligonucleotide
atacgctgcatcgacacgatcgatcagccc

SEQ ID NO: 233091 - DNA, 30 bp, Artificial Sequence
  Synthetic oligonucleotide
caagagtggttgccggggcccattcagccc

SEQ ID NO: 233092 - DNA, 30 bp, Artificial Sequence
  Synthetic oligonucleotide
agtcgtgtgcgttggtagtattcagagccc

SEQ ID NO: 233093 - DNA, 30 bp, Artificial Sequence
  Synthetic oligonucleotide
taggggaaaacatgaagcgaggacgagccc

SEQ ID NO: 233094 - DNA, 30 bp, Artificial Sequence
  Synthetic oligonucleotide
acgacaacgtctcttcagggggacgagccc

SEQ ID NO: 233095 - DNA, 30 bp, Artificial Sequence
  Synthetic oligonucleotide
atacgccgaaggaagtccaatggcgagccc

SEQ ID NO: 233096 - DNA, 30 bp, Artificial Sequence
  Synthetic oligonucleotide
cagtttggccaataaacgttaatcgagccc

SEQ ID NO: 233097 - DNA, 31 bp, Artificial Sequence
  Synthetic oligonucleotide
agcagggaactttcactgggtcatggagccc

SEQ ID NO: 233098 - DNA, 30 bp, Artificial Sequence
  Synthetic oligonucleotide
tcagtagggcatgaagataaatttgagccc

SEQ ID NO: 233099 - DNA, 30 bp, Artificial Sequence
  Synthetic oligonucleotide
ttaaatagcgctgagccgctgtaatagccc

SEQ ID NO: 233100 - DNA, 30 bp, Artificial Sequence
  Synthetic oligonucleotide
tcacagctacgtgtgtcctgcacctagccc

SEQ ID NO: 233101 - DNA, 30 bp, Artificial Sequence
  Synthetic oligonucleotide
tgccagaaatacgctcagtagagctagccc

SEQ ID NO: 233102 - DNA, 30 bp, Artificial Sequence
  Synthetic oligonucleotide
tagacaacgctgccggatttgggctagccc

SEQ ID NO: 233103 - DNA, 30 bp, Artificial Sequence
  Synthetic oligonucleotide
gtagagcctacggaaccactcatctagccc

SEQ ID NO: 233104 - DNA, 30 bp, Artificial Sequence
  Synthetic oligonucleotide
cgcttcaggggcaagcgaggcccaacgccc

SEQ ID NO: 233105 - DNA, 30 bp, Artificial Sequence
  Synthetic oligonucleotide
cgagcggagccgtggaagcgtgggacgccc

SEQ ID NO: 233106 - DNA, 30 bp, Artificial Sequence
  Synthetic oligonucleotide
acaccggggaaccaaatccagtcagcgccc

SEQ ID NO: 233107 - DNA, 30 bp, Artificial Sequence
  Synthetic oligonucleotide
agacgaacttcggttttgtttttagcgccc

SEQ ID NO: 233108 - DNA, 30 bp, Artificial Sequence
  Synthetic oligonucleotide
ccccccacttcgccaggaatacacgcgccc

SEQ ID NO: 233109 - DNA, 30 bp, Artificial Sequence
  Synthetic oligonucleotide
tgctaggacaaattgtcggactgggcgccc

SEQ ID NO: 233110 - DNA, 30 bp, Artificial Sequence
  Synthetic oligonucleotide
attggtacgtctcttctcctcaatgcgccc

SEQ ID NO: 233111 - DNA, 30 bp, Artificial Sequence
  Synthetic oligonucleotide
cggcatgcgactaggttgagaactgcgccc

SEQ ID NO: 233112 - DNA, 30 bp, Artificial Sequence
  Synthetic oligonucleotide
caggagctcaaccatatagcgcaatcgccc

SEQ ID NO: 233113 - DNA, 30 bp, Artificial Sequence
  Synthetic oligonucleotide
tacctgaaacatatttcccgcggcaggccc

SEQ ID NO: 233114 - DNA, 30 bp, Artificial Sequence
  Synthetic oligonucleotide
agtaacggtaatttttatcttgtgaggccc

SEQ ID NO: 233115 - DNA, 30 bp, Artificial Sequence
  Synthetic oligonucleotide
cgcgaaacttagaatttaaatgttaggccc

SEQ ID NO: 233116 - DNA, 30 bp, Artificial Sequence
  Synthetic oligonucleotide
gttagctcaggaatatccaacagacggccc

SEQ ID NO: 233117 - DNA, 30 bp, Artificial Sequence
  Synthetic oligonucleotide
tagaaggatgcctcagagccgatgcggccc

SEQ ID NO: 233118 - DNA, 30 bp, Artificial Sequence
  Synthetic oligonucleotide
acatcgttctcgatgctgccggaagggccc

SEQ ID NO: 233119 - DNA, 30 bp, Artificial Sequence
  Synthetic oligonucleotide
ggtggttaacttctgggaatactagggccc

SEQ ID NO: 233120 - DNA, 30 bp, Artificial Sequence
  Synthetic oligonucleotide
gactgattagaggaagttacggacgggccc

SEQ ID NO: 233121 - DNA, 30 bp, Artificial Sequence
  Synthetic oligonucleotide
actgaaccctacgaactcgcttccgggccc

SEQ ID NO: 233122 - DNA, 30 bp, Artificial Sequence
  Synthetic oligonucleotide
tcaatcgttctggtcatcctctatgggccc

SEQ ID NO: 233123 - DNA, 30 bp, Artificial Sequence
  Synthetic oligonucleotide
ttaggtcgtggggataacgtacaatggccc

SEQ ID NO: 233124 - DNA, 30 bp, Artificial Sequence
  Synthetic oligonucleotide
acctacaatagtctcggctcgaactggccc

SEQ ID NO: 233125 - DNA, 30 bp, Artificial Sequence
  Synthetic oligonucleotide
tcgaaccggtatcgcttgcgatggtggccc

SEQ ID NO: 233126 - DNA, 30 bp, Artificial Sequence
  Synthetic oligonucleotide
gaaagatggttcgggggacgggtgtggccc

SEQ ID NO: 233127 - DNA, 30 bp, Artificial Sequence
  Synthetic oligonucleotide
atcatacttacctgataagcaagttggccc

SEQ ID NO: 233128 - DNA, 30 bp, Artificial Sequence
  Synthetic oligonucleotide
acgcccacgcactacgtggcttacctgccc

SEQ ID NO: 233129 - DNA, 30 bp, Artificial Sequence
  Synthetic oligonucleotide
atcgtgttcctggtataaaagagcctgccc

SEQ ID NO: 233130 - DNA, 30 bp, Artificial Sequence
  Synthetic oligonucleotide
tcccggacacgtaggatacactgggtgccc

SEQ ID NO: 233131 - DNA, 30 bp, Artificial Sequence
  Synthetic oligonucleotide
cgctgctagagttaattcaggtgggtgccc

SEQ ID NO: 233132 - DNA, 30 bp, Artificial Sequence
  Synthetic oligonucleotide
tcgatgggcacttgtgaactcggattgccc

SEQ ID NO: 233133 - DNA, 30 bp, Artificial Sequence
  Synthetic oligonucleotide
agaaaaaccggaatcataagtttcttgccc

SEQ ID NO: 233134 - DNA, 30 bp, Artificial Sequence
  Synthetic oligonucleotide
ggaatgccaggtatgcagtaagagttgccc

SEQ ID NO: 233135 - DNA, 30 bp, Artificial Sequence
  Synthetic oligonucleotide
tcggttaggaatggtcgcatacggttgccc

SEQ ID NO: 233136 - DNA, 30 bp, Artificial Sequence
  Synthetic oligonucleotide
actgcgaggaacgtgctctaagctttgccc

SEQ ID NO: 233137 - DNA, 30 bp, Artificial Sequence
  Synthetic oligonucleotide
aggccttcgacagtcattcgttctttgccc

SEQ ID NO: 233138 - DNA, 30 bp, Artificial Sequence
  Synthetic oligonucleotide
gcatacactcaattagtaaggattttgccc

SEQ ID NO: 233139 - DNA, 30 bp, Artificial Sequence
  Synthetic oligonucleotide
gtaacagatatgcttaatagaacgaatccc

SEQ ID NO: 233140 - DNA, 30 bp, Artificial Sequence
  Synthetic oligonucleotide
acttgattacataatattcattgccatccc

SEQ ID NO: 233141 - DNA, 30 bp, Artificial Sequence
  Synthetic oligonucleotide
gtattcgcgatacgatagacagtgcatccc

SEQ ID NO: 233142 - DNA, 30 bp, Artificial Sequence
  Synthetic oligonucleotide
ggcacagtgctcagggtcaaacgtcatccc

SEQ ID NO: 233143 - DNA, 30 bp, Artificial Sequence
  Synthetic oligonucleotide
ttctcagctccgacttggaaaggtcatccc

SEQ ID NO: 233144 - DNA, 30 bp, Artificial Sequence
  Synthetic oligonucleotide
ggcctgcaaatcataatctgctcagatccc

SEQ ID NO: 233145 - DNA, 30 bp, Artificial Sequence
  Synthetic oligonucleotide
aacttccttgccaacctacctcacgatccc

SEQ ID NO: 233146 - DNA, 30 bp, Artificial Sequence
  Synthetic oligonucleotide
tcgttcgtgattgagcgtagaggcgatccc

SEQ ID NO: 233147 - DNA, 30 bp, Artificial Sequence
  Synthetic oligonucleotide
cctgttatactctagatttcaacggatccc

SEQ ID NO: 233148 - DNA, 30 bp, Artificial Sequence
  Synthetic oligonucleotide
acccggaagggaccttggcgcattgatccc

SEQ ID NO: 233149 - DNA, 30 bp, Artificial Sequence
  Synthetic oligonucleotide
gcctagaggtttagatgattttcctatccc

SEQ ID NO: 233150 - DNA, 30 bp, Artificial Sequence
  Synthetic oligonucleotide
tatttaatcatgttgtcaatcagctatccc

SEQ ID NO: 233151 - DNA, 30 bp, Artificial Sequence
  Synthetic oligonucleotide
cgccgtttgtcgaatgatatacagtatccc

SEQ ID NO: 233152 - DNA, 30 bp, Artificial Sequence
  Synthetic oligonucleotide
cgcataaatctcaagactgctcagtatccc

SEQ ID NO: 233153 - DNA, 30 bp, Artificial Sequence
  Synthetic oligonucleotide
cgttggttctgtagatcttcgaggactccc

SEQ ID NO: 233154 - DNA, 30 bp, Artificial Sequence
  Synthetic oligonucleotide
gtagtgcactatcacacgccctaacctccc

SEQ ID NO: 233155 - DNA, 30 bp, Artificial Sequence
  Synthetic oligonucleotide
tacgcataccgctgagcacaattccctccc

SEQ ID NO: 233156 - DNA, 30 bp, Artificial Sequence
  Synthetic oligonucleotide
ggtccgtcagggtatatgcgagaagctccc

SEQ ID NO: 233157 - DNA, 30 bp, Artificial Sequence
  Synthetic oligonucleotide
aagtgcattcccgcgagcattgaagctccc

SEQ ID NO: 233158 - DNA, 30 bp, Artificial Sequence
  Synthetic oligonucleotide
gtattggacacttaagatcaggatgctccc

SEQ ID NO: 233159 - DNA, 30 bp, Artificial Sequence
  Synthetic oligonucleotide
tgattgcgtcctcattccggaagtgctccc

SEQ ID NO: 233160 - DNA, 30 bp, Artificial Sequence
  Synthetic oligonucleotide
gtcgagccggaaccggctaggcgtgctccc

SEQ ID NO: 233161 - DNA, 30 bp, Artificial Sequence
  Synthetic oligonucleotide
aatgttggctaatctcacggaagatctccc

SEQ ID NO: 233162 - DNA, 30 bp, Artificial Sequence
  Synthetic oligonucleotide
aatgcgcgtgtcagcggcgatttctctccc

SEQ ID NO: 233163 - DNA, 30 bp, Artificial Sequence
  Synthetic oligonucleotide
aacttcacctatggtgttggccggtctccc

SEQ ID NO: 233164 - DNA, 30 bp, Artificial Sequence
  Synthetic oligonucleotide
tcgataatgggcatgccattgatttctccc

SEQ ID NO: 233165 - DNA, 30 bp, Artificial Sequence
  Synthetic oligonucleotide
tgtacccatgacgaaggcacggtttctccc

SEQ ID NO: 233166 - DNA, 30 bp, Artificial Sequence
  Synthetic oligonucleotide
aatgtaagaacaccaggggacagaagtccc

SEQ ID NO: 233167 - DNA, 30 bp, Artificial Sequence
  Synthetic oligonucleotide
gggacgtacgtcttcccgcggaccagtccc

SEQ ID NO: 233168 - DNA, 30 bp, Artificial Sequence
  Synthetic oligonucleotide
aacgatcttctatacggcgcgtggcgtccc

SEQ ID NO: 233169 - DNA, 30 bp, Artificial Sequence
  Synthetic oligonucleotide
aggttgtgtatctacatagtgctgcgtccc

SEQ ID NO: 233170 - DNA, 30 bp, Artificial Sequence
  Synthetic oligonucleotide
ctgtgttggacagaatacagcgatcgtccc

SEQ ID NO: 233171 - DNA, 30 bp, Artificial Sequence
  Synthetic oligonucleotide
gaataccgcattaaaacaaaggacggtccc

SEQ ID NO: 233172 - DNA, 30 bp, Artificial Sequence
  Synthetic oligonucleotide
gatgacaatttccgaaaaatatacggtccc

SEQ ID NO: 233173 - DNA, 30 bp, Artificial Sequence
  Synthetic oligonucleotide
tgaatatttcggaatgaaagttacggtccc

SEQ ID NO: 233174 - DNA, 30 bp, Artificial Sequence
  Synthetic oligonucleotide
tggcgttctatgagaaagccggccggtccc

SEQ ID NO: 233175 - DNA, 30 bp, Artificial Sequence
  Synthetic oligonucleotide
tggcacataattttccgaagtttgggtccc

SEQ ID NO: 233176 - DNA, 30 bp, Artificial Sequence
  Synthetic oligonucleotide
gaggtttcctgaggtatgtgaggtggtccc

SEQ ID NO: 233177 - DNA, 30 bp, Artificial Sequence
  Synthetic oligonucleotide
tcagatctgtggctccccttcggtggtccc

SEQ ID NO: 233178 - DNA, 30 bp, Artificial Sequence
  Synthetic oligonucleotide
agcgcccgcaatcgacctcgaagaattccc

SEQ ID NO: 233179 - DNA, 30 bp, Artificial Sequence
  Synthetic oligonucleotide
agggggggttggttacagccaggaattccc

SEQ ID NO: 233180 - DNA, 30 bp, Artificial Sequence
  Synthetic oligonucleotide
cgcttaaagattgacctttctcccattccc

SEQ ID NO: 233181 - DNA, 30 bp, Artificial Sequence
  Synthetic oligonucleotide
ggtaagtaacaaggggatcgcgagattccc

SEQ ID NO: 233182 - DNA, 30 bp, Artificial Sequence
  Synthetic oligonucleotide
cgttcaccgggacaaaggggtaagcttccc

SEQ ID NO: 233183 - DNA, 30 bp, Artificial Sequence
  Synthetic oligonucleotide
actacgcctaccctctagctatcagttccc

SEQ ID NO: 233184 - DNA, 30 bp, Artificial Sequence
  Synthetic oligonucleotide
tcgtttcgtttcaagcacgtccgagttccc

SEQ ID NO: 233185 - DNA, 30 bp, Artificial Sequence
  Synthetic oligonucleotide
gactgagacagtcaatacagagaggttccc

SEQ ID NO: 233186 - DNA, 30 bp, Artificial Sequence
  Synthetic oligonucleotide
aggagataccaacaacccttaatttttccc

SEQ ID NO: 233187 - DNA, 30 bp, Artificial Sequence
  Synthetic oligonucleotide
ctgtatggcaaagttgagtgtgtaaaagcc

SEQ ID NO: 233188 - DNA, 30 bp, Artificial Sequence
  Synthetic oligonucleotide
gattaataggttggccgttgtgtcaaagcc

SEQ ID NO: 233189 - DNA, 30 bp, Artificial Sequence
  Synthetic oligonucleotide
aaccgcacgccgttccgcgataagaaagcc

SEQ ID NO: 233190 - DNA, 30 bp, Artificial Sequence
  Synthetic oligonucleotide
gtctatgcggacaaggtctgtaaacaagcc

SEQ ID NO: 233191 - DNA, 30 bp, Artificial Sequence
  Synthetic oligonucleotide
tacttctaactaggtagtaataaccaagcc

SEQ ID NO: 233192 - DNA, 30 bp, Artificial Sequence
  Synthetic oligonucleotide
gcgggaccggaccttacagaacctcaagcc

SEQ ID NO: 233193 - DNA, 30 bp, Artificial Sequence
  Synthetic oligonucleotide
ttcagctcgcctagatggtaacttcaagcc

SEQ ID NO: 233194 - DNA, 30 bp, Artificial Sequence
  Synthetic oligonucleotide
ttgatacgactagaggaagatagagaagcc

SEQ ID NO: 233195 - DNA, 30 bp, Artificial Sequence
  Synthetic oligonucleotide
accaaagtacaatccaggcagatagaagcc

SEQ ID NO: 233196 - DNA, 30 bp, Artificial Sequence
  Synthetic oligonucleotide
cgtcgcaatgatcgatatcgctccgaagcc

SEQ ID NO: 233197 - DNA, 30 bp, Artificial Sequence
  Synthetic oligonucleotide
gatataaagtctcgtcacatcggggaagcc

SEQ ID NO: 233198 - DNA, 30 bp, Artificial Sequence
  Synthetic oligonucleotide
gttgtcagcgccatacgattgggtgaagcc

SEQ ID NO: 233199 - DNA, 30 bp, Artificial Sequence
  Synthetic oligonucleotide
tcaacgggcgagccttaacaaatctaagcc

SEQ ID NO: 233200 - DNA, 30 bp, Artificial Sequence
  Synthetic oligonucleotide
tggtagctcgggttgcgctgggggtaagcc

SEQ ID NO: 233201 - DNA, 30 bp, Artificial Sequence
  Synthetic oligonucleotide
caggctgattgaggacatgattcttaagcc

SEQ ID NO: 233202 - DNA, 30 bp, Artificial Sequence
  Synthetic oligonucleotide
agatgggccatgaggacggggcgttaagcc

SEQ ID NO: 233203 - DNA, 30 bp, Artificial Sequence
  Synthetic oligonucleotide
attcctcgtgaaagaatccccgcaacagcc

SEQ ID NO: 233204 - DNA, 30 bp, Artificial Sequence
  Synthetic oligonucleotide
gcgatcagtattacgacttcacgcacagcc

SEQ ID NO: 233205 - DNA, 30 bp, Artificial Sequence
  Synthetic oligonucleotide
ctgccaaatgcccgacagctaactacagcc

SEQ ID NO: 233206 - DNA, 30 bp, Artificial Sequence
  Synthetic oligonucleotide
gggtaggtaatgcactacgcagtaccagcc

SEQ ID NO: 233207 - DNA, 30 bp, Artificial Sequence
  Synthetic oligonucleotide
atgaaacggtagggtcctctcaacccagcc

SEQ ID NO: 233208 - DNA, 30 bp, Artificial Sequence
  Synthetic oligonucleotide
ataaaatccgctcggcatccgtcgccagcc

SEQ ID NO: 233209 - DNA, 30 bp, Artificial Sequence
  Synthetic oligonucleotide
ccaacatttgcaatcacatggaaggcagcc

SEQ ID NO: 233210 - DNA, 30 bp, Artificial Sequence
  Synthetic oligonucleotide
cataggtacaaggggcaggacattgcagcc

SEQ ID NO: 233211 - DNA, 30 bp, Artificial Sequence
  Synthetic oligonucleotide
ggtccgactgatgacggatcatttgcagcc

SEQ ID NO: 233212 - DNA, 30 bp, Artificial Sequence
  Synthetic oligonucleotide
acttcagagctacgaaataacgaatcagcc

SEQ ID NO: 233213 - DNA, 30 bp, Artificial Sequence
  Synthetic oligonucleotide
cagtggaggacgatcgagccagcctcagcc

SEQ ID NO: 233214 - DNA, 30 bp, Artificial Sequence
  Synthetic oligonucleotide
tgctcaagacaccgatcgatagcctcagcc

SEQ ID NO: 233215 - DNA, 30 bp, Artificial Sequence
  Synthetic oligonucleotide
tgttgggactagtcagtcgttgggtcagcc

SEQ ID NO: 233216 - DNA, 30 bp, Artificial Sequence
  Synthetic oligonucleotide
ttagcccccacgcccctattttcttcagcc

SEQ ID NO: 233217 - DNA, 30 bp, Artificial Sequence
  Synthetic oligonucleotide
ggctctaggatgctaagattggtttcagcc

SEQ ID NO: 233218 - DNA, 30 bp, Artificial Sequence
  Synthetic oligonucleotide
aacccggtaagagacaaagcactcagagcc

SEQ ID NO: 233219 - DNA, 30 bp, Artificial Sequence
  Synthetic oligonucleotide
tcggttgcaggaagttacagacatagagcc

SEQ ID NO: 233220 - DNA, 30 bp, Artificial Sequence
  Synthetic oligonucleotide
tttgcctgtatgcaaaagacggcacgagcc

SEQ ID NO: 233221 - DNA, 30 bp, Artificial Sequence
  Synthetic oligonucleotide
ggagttctggtcggttcggcgttccgagcc

SEQ ID NO: 233222 - DNA, 30 bp, Artificial Sequence
  Synthetic oligonucleotide
cagagcaccgggtcagcttaaaagcgagcc

SEQ ID NO: 233223 - DNA, 30 bp, Artificial Sequence
  Synthetic oligonucleotide
ccagacctacagacaggggggcagcgagcc

SEQ ID NO: 233224 - DNA, 30 bp, Artificial Sequence
  Synthetic oligonucleotide
tgtaacgcgcaattcgcgagtgtgcgagcc

SEQ ID NO: 233225 - DNA, 30 bp, Artificial Sequence
  Synthetic oligonucleotide
tactatgtgtagagattgctaaagggagcc

SEQ ID NO: 233226 - DNA, 30 bp, Artificial Sequence
  Synthetic oligonucleotide
tgtctagtggcatgccataaaacgggagcc

SEQ ID NO: 233227 - DNA, 30 bp, Artificial Sequence
  Synthetic oligonucleotide
gaagtgttacatccgtaaagagatggagcc

SEQ ID NO: 233228 - DNA, 30 bp, Artificial Sequence
  Synthetic oligonucleotide
tttacggaggtgcccgggatctatggagcc

SEQ ID NO: 233229 - DNA, 30 bp, Artificial Sequence
  Synthetic oligonucleotide
attcaagcggacggcgcaaaaattggagcc

SEQ ID NO: 233230 - DNA, 30 bp, Artificial Sequence
  Synthetic oligonucleotide
ccttcactcaggcgccatgctgtatgagcc

SEQ ID NO: 233231 - DNA, 30 bp, Artificial Sequence
  Synthetic oligonucleotide
ctgccttggaggaggagcccatactgagcc

SEQ ID NO: 233232 - DNA, 30 bp, Artificial Sequence
  Synthetic oligonucleotide
aagagggtgtaggcgtagcttgggtgagcc

SEQ ID NO: 233233 - DNA, 30 bp, Artificial Sequence
  Synthetic oligonucleotide
gtctgaacgttgtaagtctcatccatagcc

SEQ ID NO: 233234 - DNA, 30 bp, Artificial Sequence
  Synthetic oligonucleotide
tgtcgaactggtggtcggcgcttcatagcc

SEQ ID NO: 233235 - DNA, 30 bp, Artificial Sequence
  Synthetic oligonucleotide
cgatacgtcaggcgggtcacattgatagcc

SEQ ID NO: 233236 - DNA, 30 bp, Artificial Sequence
  Synthetic oligonucleotide
gtcacgcaaaaaccaaatgattctatagcc

SEQ ID NO: 233237 - DNA, 30 bp, Artificial Sequence
  Synthetic oligonucleotide
tcggtctctatacggtaacctaaactagcc

SEQ ID NO: 233238 - DNA, 30 bp, Artificial Sequence
  Synthetic oligonucleotide
atattaccgccctcggaacaagcactagcc

SEQ ID NO: 233239 - DNA, 30 bp, Artificial Sequence
  Synthetic oligonucleotide
gaaaatcagttaccgcttcaattcctagcc

SEQ ID NO: 233240 - DNA, 30 bp, Artificial Sequence
  Synthetic oligonucleotide
ggaggaaagtggtgcgcgtcctagctagcc

SEQ ID NO: 233241 - DNA, 30 bp, Artificial Sequence
  Synthetic oligonucleotide
aacaaatatgcgatgtaaactaggctagcc

SEQ ID NO: 233242 - DNA, 30 bp, Artificial Sequence
  Synthetic oligonucleotide
gctagcctacatcaagatttgagagtagcc

SEQ ID NO: 233243 - DNA, 30 bp, Artificial Sequence
  Synthetic oligonucleotide
acaggctgtgtatttactgactgagtagcc

SEQ ID NO: 233244 - DNA, 30 bp, Artificial Sequence
  Synthetic oligonucleotide
tgatctaggcgattctcgcgcgccgtagcc

SEQ ID NO: 233245 - DNA, 30 bp, Artificial Sequence
  Synthetic oligonucleotide
acttctgcttacgaaacggtatgggtagcc

SEQ ID NO: 233246 - DNA, 30 bp, Artificial Sequence
  Synthetic oligonucleotide
gaatcgtacaatgagttagtgactgtagcc

SEQ ID NO: 233247 - DNA, 30 bp, Artificial Sequence
  Synthetic oligonucleotide
actcctttagagagggtcatgcaattagcc

SEQ ID NO: 233248 - DNA, 30 bp, Artificial Sequence
  Synthetic oligonucleotide
gggctgattcaggcaagctcgttattagcc

SEQ ID NO: 233249 - DNA, 30 bp, Artificial Sequence
  Synthetic oligonucleotide
gaaatccccagcaacttaggcaagttagcc

SEQ ID NO: 233250 - DNA, 30 bp, Artificial Sequence
  Synthetic oligonucleotide
atcgtaatccatagcgcgatttagttagcc

SEQ ID NO: 233251 - DNA, 30 bp, Artificial Sequence
  Synthetic oligonucleotide
gatctgccaaggggggggtcgcggttagcc

SEQ ID NO: 233252 - DNA, 30 bp, Artificial Sequence
  Synthetic oligonucleotide
aaagcgtccaaaagctaactgcaaaacgcc

SEQ ID NO: 233253 - DNA, 30 bp, Artificial Sequence
  Synthetic oligonucleotide
aaaggctcgtgtcagacgaacataaacgcc

SEQ ID NO: 233254 - DNA, 30 bp, Artificial Sequence
  Synthetic oligonucleotide
gaaaagatccacccaaaaacgcataacgcc

SEQ ID NO: 233255 - DNA, 30 bp, Artificial Sequence
  Synthetic oligonucleotide
caaccatgcaagtgggctagttataacgcc

SEQ ID NO: 233256 - DNA, 30 bp, Artificial Sequence
  Synthetic oligonucleotide
gaaagcctcgtaagctgcacgagtaacgcc

SEQ ID NO: 233257 - DNA, 30 bp, Artificial Sequence
  Synthetic oligonucleotide
caatgtgagtatccatgaggggaggacgcc

SEQ ID NO: 233258 - DNA, 30 bp, Artificial Sequence
  Synthetic oligonucleotide
tctggattactatatagaatccaatacgcc

SEQ ID NO: 233259 - DNA, 30 bp, Artificial Sequence
  Synthetic oligonucleotide
tggccttaccatggctagggttcatacgcc

SEQ ID NO: 233260 - DNA, 30 bp, Artificial Sequence
  Synthetic oligonucleotide
agacgggttttatcggaatatagatacgcc

SEQ ID NO: 233261 - DNA, 30 bp, Artificial Sequence
  Synthetic oligonucleotide
ttacatccacgactatctggtaactacgcc

SEQ ID NO: 233262 - DNA, 30 bp, Artificial Sequence
  Synthetic oligonucleotide
gggttacttaagcgtcgagcactgtacgcc

SEQ ID NO: 233263 - DNA, 30 bp, Artificial Sequence
  Synthetic oligonucleotide
gcaggtaggaagcactgcgtctccaccgcc

SEQ ID NO: 233264 - DNA, 30 bp, Artificial Sequence
  Synthetic oligonucleotide
tggaccaaaatgtatgtcgtatagaccgcc

SEQ ID NO: 233265 - DNA, 30 bp, Artificial Sequence
  Synthetic oligonucleotide
ctaggatacgttcatctagaaccgaccgcc

SEQ ID NO: 233266 - DNA, 30 bp, Artificial Sequence
  Synthetic oligonucleotide
cggaatacttcctgaatccctgcgaccgcc

SEQ ID NO: 233267 - DNA, 30 bp, Artificial Sequence
  Synthetic oligonucleotide
ggcgtgaatttcaaagcaaacttccccgcc

SEQ ID NO: 233268 - DNA, 30 bp, Artificial Sequence
  Synthetic oligonucleotide
ttcctccatgaatatggtaacaagcccgcc

SEQ ID NO: 233269 - DNA, 30 bp, Artificial Sequence
  Synthetic oligonucleotide
gagttggtagtgtcaataaatccagccgcc

SEQ ID NO: 233270 - DNA, 30 bp, Artificial Sequence
  Synthetic oligonucleotide
gcaagctacatgcaatagagggccgccgcc

SEQ ID NO: 233271 - DNA, 30 bp, Artificial Sequence
  Synthetic oligonucleotide
tagtagcaagcttgcagcgaactcgccgcc

SEQ ID NO: 233272 - DNA, 30 bp, Artificial Sequence
  Synthetic oligonucleotide
agtgtgctaggttgatgactcgtcgccgcc

SEQ ID NO: 233273 - DNA, 30 bp, Artificial Sequence
  Synthetic oligonucleotide
gaagagaatctggtgtagctgcgaagcgcc

SEQ ID NO: 233274 - DNA, 30 bp, Artificial Sequence
  Synthetic oligonucleotide
tggtcgtggaggctggcttgaacgagcgcc

SEQ ID NO: 233275 - DNA, 30 bp, Artificial Sequence
  Synthetic oligonucleotide
tagtgaaaatctaggttcattatgagcgcc

SEQ ID NO: 233276 - DNA, 30 bp, Artificial Sequence
  Synthetic oligonucleotide
aagcaattggtttgagaagctgatagcgcc

SEQ ID NO: 233277 - DNA, 30 bp, Artificial Sequence
  Synthetic oligonucleotide
caggaggtttgaggttccgatgttagcgcc

SEQ ID NO: 233278 - DNA, 30 bp, Artificial Sequence
  Synthetic oligonucleotide
cggtagttaccatggctagtacaccgcgcc

SEQ ID NO: 233279 - DNA, 30 bp, Artificial Sequence
  Synthetic oligonucleotide
attatggctaaaatattaaaaacgcgcgcc

SEQ ID NO: 233280 - DNA, 30 bp, Artificial Sequence
  Synthetic oligonucleotide
aaatgaatggaaccctcgtggtggcgcgcc

SEQ ID NO: 233281 - DNA, 30 bp, Artificial Sequence
  Synthetic oligonucleotide
tgtggaaatcgtacagtagttggtcgcgcc

SEQ ID NO: 233282 - DNA, 30 bp, Artificial Sequence
  Synthetic oligonucleotide
attgtgttgaattaattctaagtcggcgcc

SEQ ID NO: 233283 - DNA, 30 bp, Artificial Sequence
  Synthetic oligonucleotide
tggattagtgctacaaatcgcttgggcgcc

SEQ ID NO: 233284 - DNA, 30 bp, Artificial Sequence
  Synthetic oligonucleotide
cagcaacgggtatgccgtgccaaatgcgcc

SEQ ID NO: 233285 - DNA, 30 bp, Artificial Sequence
  Synthetic oligonucleotide
tcaaaaacctatatgtgtcaaccttgcgcc

SEQ ID NO: 233286 - DNA, 30 bp, Artificial Sequence
  Synthetic oligonucleotide
atcgtgcgcaaggccggcgacagttgcgcc

SEQ ID NO: 233287 - DNA, 30 bp, Artificial Sequence
  Synthetic oligonucleotide
aactagtacgaatccaccaattatatcgcc

SEQ ID NO: 233288 - DNA, 30 bp, Artificial Sequence
  Synthetic oligonucleotide
aagaggttgatgctttgcggtcgtctcgcc

SEQ ID NO: 233289 - DNA, 30 bp, Artificial Sequence
  Synthetic oligonucleotide
gacgtcgttgtggtaaccaaatgtctcgcc

SEQ ID NO: 233290 - DNA, 30 bp, Artificial Sequence
  Synthetic oligonucleotide
gaacgcccttacggttagggtattctcgcc

SEQ ID NO: 233291 - DNA, 30 bp, Artificial Sequence
  Synthetic oligonucleotide
accggaatcgtattggacttaggggtcgcc

SEQ ID NO: 233292 - DNA, 30 bp, Artificial Sequence
  Synthetic oligonucleotide
caaaggggtcatccgagctttgatgtcgcc

SEQ ID NO: 233293 - DNA, 30 bp, Artificial Sequence
  Synthetic oligonucleotide
tattagaccgtgctatatcctttcttcgcc

SEQ ID NO: 233294 - DNA, 30 bp, Artificial Sequence
  Synthetic oligonucleotide
cgaattatgactgagtgcgttaatttcgcc

SEQ ID NO: 233295 - DNA, 30 bp, Artificial Sequence
  Synthetic oligonucleotide
tctgggggtgtaagctataacacaaaggcc

SEQ ID NO: 233296 - DNA, 30 bp, Artificial Sequence
  Synthetic oligonucleotide
taccaatccgctttcttatacgagaaggcc

SEQ ID NO: 233297 - DNA, 30 bp, Artificial Sequence
  Synthetic oligonucleotide
aaggcctaacccttagggctgtagaaggcc

SEQ ID NO: 233298 - DNA, 30 bp, Artificial Sequence
  Synthetic oligonucleotide
tcttcctcgccgtggactaacgcgaaggcc

SEQ ID NO: 233299 - DNA, 30 bp, Artificial Sequence
  Synthetic oligonucleotide
aagtacaggagatctattggttctaaggcc

SEQ ID NO: 233300 - DNA, 30 bp, Artificial Sequence
  Synthetic oligonucleotide
gaatacgtgtggcacgccaactaacaggcc

SEQ ID NO: 233301 - DNA, 30 bp, Artificial Sequence
  Synthetic oligonucleotide
catgttgggttgttgctagtgctacaggcc

SEQ ID NO: 233302 - DNA, 30 bp, Artificial Sequence
  Synthetic oligonucleotide
ttcgatgcgttatagtcttccttccaggcc

SEQ ID NO: 233303 - DNA, 30 bp, Artificial Sequence
  Synthetic oligonucleotide
gacgtgtgaagggagctagtagtgcaggcc

SEQ ID NO: 233304 - DNA, 30 bp, Artificial Sequence
  Synthetic oligonucleotide
gaactgcgggacaggcgtaaatatcaggcc

SEQ ID NO: 233305 - DNA, 30 bp, Artificial Sequence
  Synthetic oligonucleotide
cattgcagtgttacagtcaatcttcaggcc

SEQ ID NO: 233306 - DNA, 30 bp, Artificial Sequence
  Synthetic oligonucleotide
acacatcgaatgggagctgcacgggaggcc

SEQ ID NO: 233307 - DNA, 30 bp, Artificial Sequence
  Synthetic oligonucleotide
agactggttaaggtatagagacgtgaggcc

SEQ ID NO: 233308 - DNA, 30 bp, Artificial Sequence
  Synthetic oligonucleotide
ggatgaattggccgaccactaggtgaggcc

SEQ ID NO: 233309 - DNA, 30 bp, Artificial Sequence
  Synthetic oligonucleotide
gagtatgggaccctggtgatttgtgaggcc

SEQ ID NO: 233310 - DNA, 30 bp, Artificial Sequence
  Synthetic oligonucleotide
ttggcagagaggttctttctgattgaggcc

SEQ ID NO: 233311 - DNA, 30 bp, Artificial Sequence
  Synthetic oligonucleotide
tcgcgctttaggatttctggttttgaggcc

SEQ ID NO: 233312 - DNA, 30 bp, Artificial Sequence
  Synthetic oligonucleotide
ctaacgtctaataccgctcgataataggcc

SEQ ID NO: 233313 - DNA, 30 bp, Artificial Sequence
  Synthetic oligonucleotide
gggcctcagaacgccccgtcaccataggcc

SEQ ID NO: 233314 - DNA, 30 bp, Artificial Sequence
  Synthetic oligonucleotide
ttcgatagcagccaatgaacgagctaggcc

SEQ ID NO: 233315 - DNA, 30 bp, Artificial Sequence
  Synthetic oligonucleotide
gcgtggacgactttgtccagcccgtaggcc

SEQ ID NO: 233316 - DNA, 30 bp, Artificial Sequence
  Synthetic oligonucleotide
ggaaacggttccgtctcaattcgttaggcc

SEQ ID NO: 233317 - DNA, 30 bp, Artificial Sequence
  Synthetic oligonucleotide
ccacggaagcaagtgccgactaccacggcc

SEQ ID NO: 233318 - DNA, 30 bp, Artificial Sequence
  Synthetic oligonucleotide
tcctcaatactctagctcacacgcacggcc

SEQ ID NO: 233319 - DNA, 30 bp, Artificial Sequence
  Synthetic oligonucleotide
aatgtataaatctcagtagctactacggcc

SEQ ID NO: 233320 - DNA, 30 bp, Artificial Sequence
  Synthetic oligonucleotide
cgggggaggctcacaaaaggtagtacggcc

SEQ ID NO: 233321 - DNA, 30 bp, Artificial Sequence
  Synthetic oligonucleotide
gcataggcattagagaccaacgcaccggcc

SEQ ID NO: 233322 - DNA, 30 bp, Artificial Sequence
  Synthetic oligonucleotide
tgggaaatatcctggtctcgtccgccggcc

SEQ ID NO: 233323 - DNA, 30 bp, Artificial Sequence
  Synthetic oligonucleotide
catccgaggtattgtgctataatcgcggcc

SEQ ID NO: 233324 - DNA, 30 bp, Artificial Sequence
  Synthetic oligonucleotide
cgcgctactctgggtaatagtttcgcggcc

SEQ ID NO: 233325 - DNA, 30 bp, Artificial Sequence
  Synthetic oligonucleotide
gtctgctaaccagaagcaccaaatgcggcc

SEQ ID NO: 233326 - DNA, 30 bp, Artificial Sequence
  Synthetic oligonucleotide
caggtatcacagaaagtacggtcctcggcc

SEQ ID NO: 233327 - DNA, 30 bp, Artificial Sequence
  Synthetic oligonucleotide
tgttcccagttcaaaaagccttcgtcggcc

SEQ ID NO: 233328 - DNA, 30 bp, Artificial Sequence
  Synthetic oligonucleotide
ctaaaaatggcagtcgcatgttgttcggcc

SEQ ID NO: 233329 - DNA, 30 bp, Artificial Sequence
  Synthetic oligonucleotide
tgtggtacctgaaaacagaggttttcggcc

SEQ ID NO: 233330 - DNA, 30 bp, Artificial Sequence
  Synthetic oligonucleotide
tgtgagacagtatctacaatgaaaagggcc

SEQ ID NO: 233331 - DNA, 30 bp, Artificial Sequence
  Synthetic oligonucleotide
gcaacaaagtatgttaacagatacagggcc

SEQ ID NO: 233332 - DNA, 30 bp, Artificial Sequence
  Synthetic oligonucleotide
cggggggctagggggtagtttgctagggcc

SEQ ID NO: 233333 - DNA, 30 bp, Artificial Sequence
  Synthetic oligonucleotide
aacagcgaagagcccctttaaccacgggcc

SEQ ID NO: 233334 - DNA, 30 bp, Artificial Sequence
  Synthetic oligonucleotide
atcaaaaaaacacggcaccagtcacgggcc

SEQ ID NO: 233335 - DNA, 30 bp, Artificial Sequence
  Synthetic oligonucleotide
ggggaacaaggagatcctgttatacgggcc

SEQ ID NO: 233336 - DNA, 30 bp, Artificial Sequence
  Synthetic oligonucleotide
gatggcgttgcggtgcctcccgtacgggcc

SEQ ID NO: 233337 - DNA, 30 bp, Artificial Sequence
  Synthetic oligonucleotide
gaaggttggttggacctgacggagcgggcc

SEQ ID NO: 233338 - DNA, 30 bp, Artificial Sequence
  Synthetic oligonucleotide
gagggccccaactttctcatctagcgggcc

SEQ ID NO: 233339 - DNA, 30 bp, Artificial Sequence
  Synthetic oligonucleotide
gggaagcgtgggtgctgaataaggcgggcc

SEQ ID NO: 233340 - DNA, 30 bp, Artificial Sequence
  Synthetic oligonucleotide
ggctgagtattgctataggtggtgcgggcc

SEQ ID NO: 233341 - DNA, 30 bp, Artificial Sequence
  Synthetic oligonucleotide
gtagcaatccgagaggtatacggtcgggcc

SEQ ID NO: 233342 - DNA, 30 bp, Artificial Sequence
  Synthetic oligonucleotide
tggatgaagggacgttgatgccaaggggcc

SEQ ID NO: 233343 - DNA, 30 bp, Artificial Sequence
  Synthetic oligonucleotide
ctgctggtaaagaagatgcacataggggcc

SEQ ID NO: 233344 - DNA, 30 bp, Artificial Sequence
  Synthetic oligonucleotide
ccgtacagcagcggctgaaatgttggggcc

SEQ ID NO: 233345 - DNA, 30 bp, Artificial Sequence
  Synthetic oligonucleotide
agcccttctgccggaccgcacgtctgggcc

SEQ ID NO: 233346 - DNA, 30 bp, Artificial Sequence
  Synthetic oligonucleotide
acactaaatcaggagatattttagtgggcc

SEQ ID NO: 233347 - DNA, 30 bp, Artificial Sequence
  Synthetic oligonucleotide
ggcggagaaagagctacataaagttgggcc

SEQ ID NO: 233348 - DNA, 30 bp, Artificial Sequence
  Synthetic oligonucleotide
tatccggtgggacagcatagtaaaatggcc

SEQ ID NO: 233349 - DNA, 30 bp, Artificial Sequence
  Synthetic oligonucleotide
catgctctacatcatctcgcaaccatggcc

SEQ ID NO: 233350 - DNA, 30 bp, Artificial Sequence
  Synthetic oligonucleotide
tgcaattgctcatatggttctcgcatggcc

SEQ ID NO: 233351 - DNA, 30 bp, Artificial Sequence
  Synthetic oligonucleotide
cgaagcggcgaatgctatgaatttatggcc

SEQ ID NO: 233352 - DNA, 31 bp, Artificial Sequence
  Synthetic oligonucleotide
catgtgagcatataagcgcatgatactggcc

SEQ ID NO: 233353 - DNA, 30 bp, Artificial Sequence
  Synthetic oligonucleotide
caaaatcctactaccgcccacgtcctggcc

SEQ ID NO: 233354 - DNA, 30 bp, Artificial Sequence
  Synthetic oligonucleotide
cagtaatacatatctccgggacagctggcc

SEQ ID NO: 233355 - DNA, 30 bp, Artificial Sequence
  Synthetic oligonucleotide
ctgatcgtgaccgtcgccgcgttgctggcc

SEQ ID NO: 233356 - DNA, 30 bp, Artificial Sequence
  Synthetic oligonucleotide
tcttacagagtctcgacgcggagtctggcc

SEQ ID NO: 233357 - DNA, 30 bp, Artificial Sequence
  Synthetic oligonucleotide
gaccaaattgaaccaatgtagtgcgtggcc

SEQ ID NO: 233358 - DNA, 30 bp, Artificial Sequence
  Synthetic oligonucleotide
caatgtaagctcgggcgggcagtggtggcc

SEQ ID NO: 233359 - DNA, 30 bp, Artificial Sequence
  Synthetic oligonucleotide
gggatgcccaaagttaaataaactgtggcc

SEQ ID NO: 233360 - DNA, 30 bp, Artificial Sequence
  Synthetic oligonucleotide
ttatactggtggagtcaaattagattggcc

SEQ ID NO: 233361 - DNA, 30 bp, Artificial Sequence
  Synthetic oligonucleotide
agcggagtatcggatcatgcctgcttggcc

SEQ ID NO: 233362 - DNA, 30 bp, Artificial Sequence
  Synthetic oligonucleotide
tgagtccttactaatttcgcgacgttggcc

SEQ ID NO: 233363 - DNA, 29 bp, Artificial Sequence
  Synthetic oligonucleotide
tggctcgactacatgggttgtgtttggcc

SEQ ID NO: 233364 - DNA, 30 bp, Artificial Sequence
  Synthetic oligonucleotide
accggcctgcgtggcccgagagaaaatgcc

SEQ ID NO: 233365 - DNA, 30 bp, Artificial Sequence
  Synthetic oligonucleotide
cagtgatcctcccccacttactcaaatgcc

SEQ ID NO: 233366 - DNA, 30 bp, Artificial Sequence
  Synthetic oligonucleotide
cactgagaggtaacttaatagcacaatgcc

SEQ ID NO: 233367 - DNA, 30 bp, Artificial Sequence
  Synthetic oligonucleotide
cgccgcgcgctgtgagataaaggcaatgcc

SEQ ID NO: 233368 - DNA, 30 bp, Artificial Sequence
  Synthetic oligonucleotide
ccaaacgaatgataatgtcgttagaatgcc

SEQ ID NO: 233369 - DNA, 30 bp, Artificial Sequence
  Synthetic oligonucleotide
ttaacttcaaatcttaactcgattaatgcc

SEQ ID NO: 233370 - DNA, 30 bp, Artificial Sequence
  Synthetic oligonucleotide
cggggcagcggtaacggaaatgtacatgcc

SEQ ID NO: 233371 - DNA, 30 bp, Artificial Sequence
  Synthetic oligonucleotide
gtactgccaaattcgggagcgtcccatgcc

SEQ ID NO: 233372 - DNA, 30 bp, Artificial Sequence
  Synthetic oligonucleotide
gttgagtcgtgaggtgatgtcatccatgcc

SEQ ID NO: 233373 - DNA, 30 bp, Artificial Sequence
  Synthetic oligonucleotide
tccgacggacgggtccataagacgcatgcc

SEQ ID NO: 233374 - DNA, 30 bp, Artificial Sequence
  Synthetic oligonucleotide
attgggatttttgccgacattcctcatgcc

SEQ ID NO: 233375 - DNA, 30 bp, Artificial Sequence
  Synthetic oligonucleotide
ttggaacgattaatggttgcgtaagatgcc

SEQ ID NO: 233376 - DNA, 30 bp, Artificial Sequence
  Synthetic oligonucleotide
ataaacgatccggatccatagctagatgcc

SEQ ID NO: 233377 - DNA, 30 bp, Artificial Sequence
  Synthetic oligonucleotide
gaggtccactaatactgtaagtgcgatgcc

SEQ ID NO: 233378 - DNA, 30 bp, Artificial Sequence
  Synthetic oligonucleotide
tgccatatattatgtcaagtcaaggatgcc

SEQ ID NO: 233379 - DNA, 30 bp, Artificial Sequence
  Synthetic oligonucleotide
gcagaaccagagtatgttcttatggatgcc

SEQ ID NO: 233380 - DNA, 30 bp, Artificial Sequence
  Synthetic oligonucleotide
tacacgcaattgtttgggcgaactgatgcc

SEQ ID NO: 233381 - DNA, 30 bp, Artificial Sequence
  Synthetic oligonucleotide
tattaagtgagaaacaacatgcgtgatgcc

SEQ ID NO: 233382 - DNA, 30 bp, Artificial Sequence
  Synthetic oligonucleotide
gcacggtaggtgcggtatccaatctatgcc

SEQ ID NO: 233383 - DNA, 30 bp, Artificial Sequence
  Synthetic oligonucleotide
aagggcgcagcctagtccagaatgtatgcc

SEQ ID NO: 233384 - DNA, 30 bp, Artificial Sequence
  Synthetic oligonucleotide
aatacggttgcactggtcgaaccaactgcc

SEQ ID NO: 233385 - DNA, 30 bp, Artificial Sequence
  Synthetic oligonucleotide
tgacacggcgatccggtcagtgtcactgcc

SEQ ID NO: 233386 - DNA, 30 bp, Artificial Sequence
  Synthetic oligonucleotide
tagtgtaggtccttcctaatagtgactgcc

SEQ ID NO: 233387 - DNA, 30 bp, Artificial Sequence
  Synthetic oligonucleotide
cgaagtatgcgggggaaacaccatactgcc

SEQ ID NO: 233388 - DNA, 30 bp, Artificial Sequence
  Synthetic oligonucleotide
caagtaaaaacggaagcacatgatactgcc

SEQ ID NO: 233389 - DNA, 30 bp, Artificial Sequence
  Synthetic oligonucleotide
gcaatgtgtcaaaggcggctaattactgcc

SEQ ID NO: 233390 - DNA, 30 bp, Artificial Sequence
  Synthetic oligonucleotide
gaagatcagagcaccaagcggtcccctgcc

SEQ ID NO: 233391 - DNA, 30 bp, Artificial Sequence
  Synthetic oligonucleotide
gccctctggccgaactctgaagatcctgcc

SEQ ID NO: 233392 - DNA, 30 bp, Artificial Sequence
  Synthetic oligonucleotide
ttcccagaggttcaaccactgtcagctgcc

SEQ ID NO: 233393 - DNA, 30 bp, Artificial Sequence
  Synthetic oligonucleotide
gggtaccaagtatcaatccctcgagctgcc

SEQ ID NO: 233394 - DNA, 30 bp, Artificial Sequence
  Synthetic oligonucleotide
attggcaacccaaggagtctcttcgctgcc

SEQ ID NO: 233395 - DNA, 30 bp, Artificial Sequence
  Synthetic oligonucleotide
agtcttaggcagggttttccgacggctgcc

SEQ ID NO: 233396 - DNA, 30 bp, Artificial Sequence
  Synthetic oligonucleotide
aggttagagcgcagatcgaatcactctgcc

SEQ ID NO: 233397 - DNA, 30 bp, Artificial Sequence
  Synthetic oligonucleotide
cttctgtaggaaggtaaagttatctctgcc

SEQ ID NO: 233398 - DNA, 30 bp, Artificial Sequence
  Synthetic oligonucleotide
atctcaatagtgtccttatcaatgtctgcc

SEQ ID NO: 233399 - DNA, 30 bp, Artificial Sequence
  Synthetic oligonucleotide
ctcaattggatgaacgatttgggaagtgcc

SEQ ID NO: 233400 - DNA, 30 bp, Artificial Sequence
  Synthetic oligonucleotide
ccggagcgccctctggacttaataagtgcc

SEQ ID NO: 233401 - DNA, 30 bp, Artificial Sequence
  Synthetic oligonucleotide
tggtttaagggccccccacgcataagtgcc

SEQ ID NO: 233402 - DNA, 30 bp, Artificial Sequence
  Synthetic oligonucleotide
ggatcgataacgcgggagttgacgagtgcc

SEQ ID NO: 233403 - DNA, 30 bp, Artificial Sequence
  Synthetic oligonucleotide
gacaaactcatcacgagattttggagtgcc

SEQ ID NO: 233404 - DNA, 30 bp, Artificial Sequence
  Synthetic oligonucleotide
agccgacaatagaactattaaatgagtgcc

SEQ ID NO: 233405 - DNA, 30 bp, Artificial Sequence
  Synthetic oligonucleotide
aaggcttggttggacggcatacttagtgcc

SEQ ID NO: 233406 - DNA, 30 bp, Artificial Sequence
  Synthetic oligonucleotide
ctgtgttgttgcagggtttgtcttagtgcc

SEQ ID NO: 233407 - DNA, 30 bp, Artificial Sequence
  Synthetic oligonucleotide
tgaacgggtaaacgtatagtatttcgtgcc

SEQ ID NO: 233408 - DNA, 30 bp, Artificial Sequence
  Synthetic oligonucleotide
agtgaagttaatgcaatgcgcacatgtgcc

SEQ ID NO: 233409 - DNA, 30 bp, Artificial Sequence
  Synthetic oligonucleotide
atatgtagagtatgaaagaggacctgtgcc

SEQ ID NO: 233410 - DNA, 30 bp, Artificial Sequence
  Synthetic oligonucleotide
gctgagtcaaggttatatatagcctgtgcc

SEQ ID NO: 233411 - DNA, 30 bp, Artificial Sequence
  Synthetic oligonucleotide
tcatcggaaggtatcaggtataagtgtgcc

SEQ ID NO: 233412 - DNA, 30 bp, Artificial Sequence
  Synthetic oligonucleotide
aaacgagccgatcaggtagtatggtgtgcc

SEQ ID NO: 233413 - DNA, 30 bp, Artificial Sequence
  Synthetic oligonucleotide
gccacgacgcatgagaggaaacattgtgcc

SEQ ID NO: 233414 - DNA, 30 bp, Artificial Sequence
  Synthetic oligonucleotide
ggagaactcgatgtggggtcataaattgcc

SEQ ID NO: 233415 - DNA, 30 bp, Artificial Sequence
  Synthetic oligonucleotide
gacagtgatcacgttagcgatccgattgcc

SEQ ID NO: 233416 - DNA, 30 bp, Artificial Sequence
  Synthetic oligonucleotide
atatgaccaacgaagaacccgtcgattgcc

SEQ ID NO: 233417 - DNA, 30 bp, Artificial Sequence
  Synthetic oligonucleotide
agtctctaagtggggggagttagtattgcc

SEQ ID NO: 233418 - DNA, 30 bp, Artificial Sequence
  Synthetic oligonucleotide
agtgaacggataacgtctgttgaacttgcc

SEQ ID NO: 233419 - DNA, 30 bp, Artificial Sequence
  Synthetic oligonucleotide
ttgtaataatagtattatcctggacttgcc

SEQ ID NO: 233420 - DNA, 30 bp, Artificial Sequence
  Synthetic oligonucleotide
agattgccgtggagaacggggacgcttgcc

SEQ ID NO: 233421 - DNA, 30 bp, Artificial Sequence
  Synthetic oligonucleotide
tacatgtctcggtcgccattcttgcttgcc

SEQ ID NO: 233422 - DNA, 30 bp, Artificial Sequence
  Synthetic oligonucleotide
actactgttcagggaggaatgtgagttgcc

SEQ ID NO: 233423 - DNA, 30 bp, Artificial Sequence
  Synthetic oligonucleotide
tgcgatcggttctgtacagcttgatttgcc

SEQ ID NO: 233424 - DNA, 30 bp, Artificial Sequence
  Synthetic oligonucleotide
cctgtggactcaccggaaacagtatttgcc

SEQ ID NO: 233425 - DNA, 30 bp, Artificial Sequence
  Synthetic oligonucleotide
atcactggcaggtcggctagtttatttgcc

SEQ ID NO: 233426 - DNA, 30 bp, Artificial Sequence
  Synthetic oligonucleotide
attggaggttcggatagagggcggtttgcc

SEQ ID NO: 233427 - DNA, 30 bp, Artificial Sequence
  Synthetic oligonucleotide
ctaggacacataaggccttacaacaaatcc

SEQ ID NO: 233428 - DNA, 30 bp, Artificial Sequence
  Synthetic oligonucleotide
aggatcgagcaccagcagggcaccaaatcc

SEQ ID NO: 233429 - DNA, 30 bp, Artificial Sequence
  Synthetic oligonucleotide
gtgcgttgggccaaatctgcggtcaaatcc

SEQ ID NO: 233430 - DNA, 30 bp, Artificial Sequence
  Synthetic oligonucleotide
cagcagacgatccagatcagagcgaaatcc

SEQ ID NO: 233431 - DNA, 30 bp, Artificial Sequence
  Synthetic oligonucleotide
cgattagcgtgttagcgttgttataaatcc

SEQ ID NO: 233432 - DNA, 30 bp, Artificial Sequence
  Synthetic oligonucleotide
tgggacccgcttccctagcgaagtaaatcc

SEQ ID NO: 233433 - DNA, 30 bp, Artificial Sequence
  Synthetic oligonucleotide
gacaagattttgagtgcggtaggtaaatcc

SEQ ID NO: 233434 - DNA, 30 bp, Artificial Sequence
  Synthetic oligonucleotide
tcaaggaaaaggattttgggtttacaatcc

SEQ ID NO: 233435 - DNA, 30 bp, Artificial Sequence
  Synthetic oligonucleotide
ccttttcaactcaccataaagtcccaatcc

SEQ ID NO: 233436 - DNA, 30 bp, Artificial Sequence
  Synthetic oligonucleotide
atggtgtccctggctgctgccatccaatcc

SEQ ID NO: 233437 - DNA, 30 bp, Artificial Sequence
  Synthetic oligonucleotide
gacctacatgagcttacgggtggtcaatcc

SEQ ID NO: 233438 - DNA, 30 bp, Artificial Sequence
  Synthetic oligonucleotide
atttatgtcagcatcgaaagcgaagaatcc

SEQ ID NO: 233439 - DNA, 30 bp, Artificial Sequence
  Synthetic oligonucleotide
cacggtcatgtcgccggtcctacagaatcc

SEQ ID NO: 233440 - DNA, 30 bp, Artificial Sequence
  Synthetic oligonucleotide
cgagaaggtatgtagatcatgagagaatcc

SEQ ID NO: 233441 - DNA, 30 bp, Artificial Sequence
  Synthetic oligonucleotide
atatggccacatcgcattattttagaatcc

SEQ ID NO: 233442 - DNA, 30 bp, Artificial Sequence
  Synthetic oligonucleotide
ccagcgcatcgatcgtctaatgcggaatcc

SEQ ID NO: 233443 - DNA, 30 bp, Artificial Sequence
  Synthetic oligonucleotide
ctcctgtgtatcgctaacctataataatcc

SEQ ID NO: 233444 - DNA, 30 bp, Artificial Sequence
  Synthetic oligonucleotide
agttgcgacactcataacacttcgtaatcc

SEQ ID NO: 233445 - DNA, 30 bp, Artificial Sequence
  Synthetic oligonucleotide
ttcatggcacctggcctggggaattaatcc

SEQ ID NO: 233446 - DNA, 30 bp, Artificial Sequence
  Synthetic oligonucleotide
gccggtaaaaacatcttgatgtcttaatcc

SEQ ID NO: 233447 - DNA, 30 bp, Artificial Sequence
  Synthetic oligonucleotide
ggaacggagcggcaccctattgcgacatcc

SEQ ID NO: 233448 - DNA, 30 bp, Artificial Sequence
  Synthetic oligonucleotide
ttcaagcgttcaggcctctgcaggacatcc

SEQ ID NO: 233449 - DNA, 30 bp, Artificial Sequence
  Synthetic oligonucleotide
aagtcagagtctaccgggagagcaccatcc

SEQ ID NO: 233450 - DNA, 30 bp, Artificial Sequence
  Synthetic oligonucleotide
agggacccaagagaacgtcttggcgcatcc

SEQ ID NO: 233451 - DNA, 30 bp, Artificial Sequence
  Synthetic oligonucleotide
aacaggggccataagattggcggtgcatcc

SEQ ID NO: 233452 - DNA, 30 bp, Artificial Sequence
  Synthetic oligonucleotide
caccacacgctggtacgtaacgcatcatcc

SEQ ID NO: 233453 - DNA, 30 bp, Artificial Sequence
  Synthetic oligonucleotide
catgagcctccggagatgtcaggctcatcc

SEQ ID NO: 233454 - DNA, 30 bp, Artificial Sequence
  Synthetic oligonucleotide
tactcacaactggtgagaggggagtcatcc

SEQ ID NO: 233455 - DNA, 30 bp, Artificial Sequence
  Synthetic oligonucleotide
tgcgaggcagaacaaccggaaatttcatcc

SEQ ID NO: 233456 - DNA, 30 bp, Artificial Sequence
  Synthetic oligonucleotide
cgaagtgctttgtatagggtaaaaagatcc

SEQ ID NO: 233457 - DNA, 30 bp, Artificial Sequence
  Synthetic oligonucleotide
ttatgcgcaagaagccgtcgaccaagatcc

SEQ ID NO: 233458 - DNA, 30 bp, Artificial Sequence
  Synthetic oligonucleotide
gcgctacaggcccaggacgcggtaagatcc

SEQ ID NO: 233459 - DNA, 30 bp, Artificial Sequence
  Synthetic oligonucleotide
ataataaacttaaccctgaagtacagatcc

SEQ ID NO: 233460 - DNA, 30 bp, Artificial Sequence
  Synthetic oligonucleotide
tactcctagacatttgttgggatcagatcc

SEQ ID NO: 233461 - DNA, 30 bp, Artificial Sequence
  Synthetic oligonucleotide
caagtgaagctagacagtggcgttagatcc

SEQ ID NO: 233462 - DNA, 30 bp, Artificial Sequence
  Synthetic oligonucleotide
tcttgaagtgccgctagcgttactggatcc

SEQ ID NO: 233463 - DNA, 30 bp, Artificial Sequence
  Synthetic oligonucleotide
cgtagccgccggtgtcaacactctggatcc

SEQ ID NO: 233464 - DNA, 30 bp, Artificial Sequence
  Synthetic oligonucleotide
agttcccaggaggaataccgcagatgatcc

SEQ ID NO: 233465 - DNA, 30 bp, Artificial Sequence
  Synthetic oligonucleotide
gcgtggttacttccaaatcaatcctgatcc

SEQ ID NO: 233466 - DNA, 30 bp, Artificial Sequence
  Synthetic oligonucleotide
acttatttcagcaccacagaaatttgatcc

SEQ ID NO: 233467 - DNA, 30 bp, Artificial Sequence
  Synthetic oligonucleotide
ccttcgccacatacaaaccaagccatatcc

SEQ ID NO: 233468 - DNA, 30 bp, Artificial Sequence
  Synthetic oligonucleotide
catgatcgacactttgacttggctatatcc

SEQ ID NO: 233469 - DNA, 30 bp, Artificial Sequence
  Synthetic oligonucleotide
tgggccgacgccaggctaacatttatatcc

SEQ ID NO: 233470 - DNA, 30 bp, Artificial Sequence
  Synthetic oligonucleotide
cctacaaaggccacctgccgctcactatcc

SEQ ID NO: 233471 - DNA, 30 bp, Artificial Sequence
  Synthetic oligonucleotide
gctcttcaacgggtcgcaagcatgctatcc

SEQ ID NO: 233472 - DNA, 30 bp, Artificial Sequence
  Synthetic oligonucleotide
gcaaggtaccgaccgaatactgctctatcc

SEQ ID NO: 233473 - DNA, 30 bp, Artificial Sequence
  Synthetic oligonucleotide
ggcatctttctgccaggcccgggagtatcc

SEQ ID NO: 233474 - DNA, 30 bp, Artificial Sequence
  Synthetic oligonucleotide
actggatagcgcgaattcacctgagtatcc

SEQ ID NO: 233475 - DNA, 30 bp, Artificial Sequence
  Synthetic oligonucleotide
gacgtctcgaaacgggtgttcaacgtatcc

SEQ ID NO: 233476 - DNA, 30 bp, Artificial Sequence
  Synthetic oligonucleotide
ctagctgtaaccaattaatccatggtatcc

SEQ ID NO: 233477 - DNA, 30 bp, Artificial Sequence
  Synthetic oligonucleotide
cgttaatcggtgagattttcttacttatcc

SEQ ID NO: 233478 - DNA, 30 bp, Artificial Sequence
  Synthetic oligonucleotide
ggaaagaagatggcaggactggcgttatcc

SEQ ID NO: 233479 - DNA, 30 bp, Artificial Sequence
  Synthetic oligonucleotide
gatgagggaggattctcatactcgttatcc

SEQ ID NO: 233480 - DNA, 30 bp, Artificial Sequence
  Synthetic oligonucleotide
gtgaagttcaatgccagagggccaaactcc

SEQ ID NO: 233481 - DNA, 30 bp, Artificial Sequence
  Synthetic oligonucleotide
aagtacaagtgttgaatttaggtaaactcc

SEQ ID NO: 233482 - DNA, 30 bp, Artificial Sequence
  Synthetic oligonucleotide
gcagcgagcctagtctaattatcgaactcc

SEQ ID NO: 233483 - DNA, 30 bp, Artificial Sequence
  Synthetic oligonucleotide
ggcggagtgataaacggtgtgcataactcc

SEQ ID NO: 233484 - DNA, 30 bp, Artificial Sequence
  Synthetic oligonucleotide
cacgccggctttggaataggtaaacactcc

SEQ ID NO: 233485 - DNA, 30 bp, Artificial Sequence
  Synthetic oligonucleotide
cgtagggacaacggcctcctcggacactcc

SEQ ID NO: 233486 - DNA, 30 bp, Artificial Sequence
  Synthetic oligonucleotide
agatgtcaggagaccggaaggatacactcc

SEQ ID NO: 233487 - DNA, 30 bp, Artificial Sequence
  Synthetic oligonucleotide
ctcaaagggttatcccgtttgttacactcc

SEQ ID NO: 233488 - DNA, 30 bp, Artificial Sequence
  Synthetic oligonucleotide
gctcctcaaagtcatatagcttggcactcc

SEQ ID NO: 233489 - DNA, 30 bp, Artificial Sequence
  Synthetic oligonucleotide
aaacggaaaattggtacggtgcctcactcc

SEQ ID NO: 233490 - DNA, 30 bp, Artificial Sequence
  Synthetic oligonucleotide
cagctagagtgatttgacagattagactcc

SEQ ID NO: 233491 - DNA, 30 bp, Artificial Sequence
  Synthetic oligonucleotide
tatacaatgccggaaggtcacgtcgactcc

SEQ ID NO: 233492 - DNA, 30 bp, Artificial Sequence
  Synthetic oligonucleotide
atgaagtgaagacataaaatactggactcc

SEQ ID NO: 233493 - DNA, 30 bp, Artificial Sequence
  Synthetic oligonucleotide
taatgacagagcaccgaccggaatacctcc

SEQ ID NO: 233494 - DNA, 30 bp, Artificial Sequence
  Synthetic oligonucleotide
ctaatccaatcgttcgcgcactacccctcc

SEQ ID NO: 233495 - DNA, 30 bp, Artificial Sequence
  Synthetic oligonucleotide
ccattatgagtcgacaggcaggttccctcc

SEQ ID NO: 233496 - DNA, 30 bp, Artificial Sequence
  Synthetic oligonucleotide
ttgtctgagacacgatacaggaaagcctcc

SEQ ID NO: 233497 - DNA, 30 bp, Artificial Sequence
  Synthetic oligonucleotide
aggattgattatacgagactcagggcctcc

SEQ ID NO: 233498 - DNA, 30 bp, Artificial Sequence
  Synthetic oligonucleotide
cctaggcgcacaacggactgattatcctcc

SEQ ID NO: 233499 - DNA, 30 bp, Artificial Sequence
  Synthetic oligonucleotide
cgcctctacgtatacaacgggttctcctcc

SEQ ID NO: 233500 - DNA, 30 bp, Artificial Sequence
  Synthetic oligonucleotide
ctcggtgcgcgcatcatacgatattcctcc

SEQ ID NO: 233501 - DNA, 30 bp, Artificial Sequence
  Synthetic oligonucleotide
tgacgtttcattatgtgcactacttcctcc

SEQ ID NO: 233502 - DNA, 30 bp, Artificial Sequence
  Synthetic oligonucleotide
aggctcgtgagcacagcaagtcaaagctcc

SEQ ID NO: 233503 - DNA, 30 bp, Artificial Sequence
  Synthetic oligonucleotide
agctggtggtagtctgcggtgtcaagctcc

SEQ ID NO: 233504 - DNA, 30 bp, Artificial Sequence
  Synthetic oligonucleotide
cgttacgtggtaacaattaactgtagctcc

SEQ ID NO: 233505 - DNA, 30 bp, Artificial Sequence
  Synthetic oligonucleotide
accagcgcaatccgtattaaggcccgctcc

SEQ ID NO: 233506 - DNA, 30 bp, Artificial Sequence
  Synthetic oligonucleotide
agggtgcacagcgaccgtcttggccgctcc

SEQ ID NO: 233507 - DNA, 30 bp, Artificial Sequence
  Synthetic oligonucleotide
gcgatcaatgatgtgatattggggcgctcc

SEQ ID NO: 233508 - DNA, 30 bp, Artificial Sequence
  Synthetic oligonucleotide
aatggatccggtccagtaggctggcgctcc

SEQ ID NO: 233509 - DNA, 30 bp, Artificial Sequence
  Synthetic oligonucleotide
tgtaaacaatggagctgggttacaggctcc

SEQ ID NO: 233510 - DNA, 30 bp, Artificial Sequence
  Synthetic oligonucleotide
aacgagggcggatacttacccataggctcc

SEQ ID NO: 233511 - DNA, 30 bp, Artificial Sequence
  Synthetic oligonucleotide
cagttatggtcttaacaaacggaatgctcc

SEQ ID NO: 233512 - DNA, 30 bp, Artificial Sequence
  Synthetic oligonucleotide
aaaatctaacgaggtggcaatgaatgctcc

SEQ ID NO: 233513 - DNA, 30 bp, Artificial Sequence
  Synthetic oligonucleotide
tcgtcgcgcaaggcggttcataggtgctcc

SEQ ID NO: 233514 - DNA, 30 bp, Artificial Sequence
  Synthetic oligonucleotide
atagatgtcggtcagaggtggaattgctcc

SEQ ID NO: 233515 - DNA, 30 bp, Artificial Sequence
  Synthetic oligonucleotide
atggcgcatgcatccacttaatggatctcc

SEQ ID NO: 233516 - DNA, 30 bp, Artificial Sequence
  Synthetic oligonucleotide
agggctgcctctcagtttaccggactctcc

SEQ ID NO: 233517 - DNA, 30 bp, Artificial Sequence
  Synthetic oligonucleotide
gtgtatcataggggtattcacatactctcc

SEQ ID NO: 233518 - DNA, 30 bp, Artificial Sequence
  Synthetic oligonucleotide
tttaaacggggagaacggatcttactctcc

SEQ ID NO: 233519 - DNA, 30 bp, Artificial Sequence
  Synthetic oligonucleotide
gccggaggactacatagtggggcgctctcc

SEQ ID NO: 233520 - DNA, 30 bp, Artificial Sequence
  Synthetic oligonucleotide
aagcacgctatgagcaagatagaagtctcc

SEQ ID NO: 233521 - DNA, 30 bp, Artificial Sequence
  Synthetic oligonucleotide
atgcgtttgaatctgtcgaggtatgtctcc

SEQ ID NO: 233522 - DNA, 30 bp, Artificial Sequence
  Synthetic oligonucleotide
tgctaaagaaagtaacatataaccttctcc

SEQ ID NO: 233523 - DNA, 30 bp, Artificial Sequence
  Synthetic oligonucleotide
gtgttcgatcactgaacgctacaaaagtcc

SEQ ID NO: 233524 - DNA, 30 bp, Artificial Sequence
  Synthetic oligonucleotide
gctttaattacgtgagccaaaggaaagtcc

SEQ ID NO: 233525 - DNA, 30 bp, Artificial Sequence
  Synthetic oligonucleotide
tcgggaactatactcagaacacggaagtcc

SEQ ID NO: 233526 - DNA, 30 bp, Artificial Sequence
  Synthetic oligonucleotide
ccaaacaatttatccttacgttggaagtcc

SEQ ID NO: 233527 - DNA, 30 bp, Artificial Sequence
  Synthetic oligonucleotide
ggagataactcccggatctggtctaagtcc

SEQ ID NO: 233528 - DNA, 30 bp, Artificial Sequence
  Synthetic oligonucleotide
atcacgtagcgtaaaggacgaggacagtcc

SEQ ID NO: 233529 - DNA, 30 bp, Artificial Sequence
  Synthetic oligonucleotide
gtaaatagacggaccacttagagccagtcc

SEQ ID NO: 233530 - DNA, 30 bp, Artificial Sequence
  Synthetic oligonucleotide
ggagctggggttagcactgctttgcagtcc

SEQ ID NO: 233531 - DNA, 30 bp, Artificial Sequence
  Synthetic oligonucleotide
tcaagtcacaccagacgcaatagtcagtcc

SEQ ID NO: 233532 - DNA, 30 bp, Artificial Sequence
  Synthetic oligonucleotide
tccggtctaaggaaatcaaagccagagtcc

SEQ ID NO: 233533 - DNA, 30 bp, Artificial Sequence
  Synthetic oligonucleotide
aacgcgcagagggggactacatgagagtcc

SEQ ID NO: 233534 - DNA, 30 bp, Artificial Sequence
  Synthetic oligonucleotide
gcaatcagaagtagtagttccctagagtcc

SEQ ID NO: 233535 - DNA, 30 bp, Artificial Sequence
  Synthetic oligonucleotide
gacttaagaatcattcgggggaacgagtcc

SEQ ID NO: 233536 - DNA, 30 bp, Artificial Sequence
  Synthetic oligonucleotide
tttcgggcaaaactgcgggtaccatagtcc

SEQ ID NO: 233537 - DNA, 30 bp, Artificial Sequence
  Synthetic oligonucleotide
cacagaagccgctacatccgacgctagtcc

SEQ ID NO: 233538 - DNA, 30 bp, Artificial Sequence
  Synthetic oligonucleotide
tacacttctgatagctggataatctagtcc

SEQ ID NO: 233539 - DNA, 30 bp, Artificial Sequence
  Synthetic oligonucleotide
tgaagaaccggaatatacaagacgtagtcc

SEQ ID NO: 233540 - DNA, 30 bp, Artificial Sequence
  Synthetic oligonucleotide
acccgcactcatcatgagggcgattagtcc

SEQ ID NO: 233541 - DNA, 30 bp, Artificial Sequence
  Synthetic oligonucleotide
acgattcgcaatgaggcgttactttagtcc

SEQ ID NO: 233542 - DNA, 30 bp, Artificial Sequence
  Synthetic oligonucleotide
gagcccctagcgacttacaggcagacgtcc

SEQ ID NO: 233543 - DNA, 30 bp, Artificial Sequence
  Synthetic oligonucleotide
taaagtcaggatgattgagtatttacgtcc

SEQ ID NO: 233544 - DNA, 30 bp, Artificial Sequence
  Synthetic oligonucleotide
acattgattgtgtcgacttacaccccgtcc

SEQ ID NO: 233545 - DNA, 30 bp, Artificial Sequence
  Synthetic oligonucleotide
caattctctgcactcgttcacggcccgtcc

SEQ ID NO: 233546 - DNA, 30 bp, Artificial Sequence
  Synthetic oligonucleotide
atttacagcgggcaagggatatgtccgtcc

SEQ ID NO: 233547 - DNA, 30 bp, Artificial Sequence
  Synthetic oligonucleotide
cgtacgtaccagtatcaccattaggcgtcc

SEQ ID NO: 233548 - DNA, 30 bp, Artificial Sequence
  Synthetic oligonucleotide
gacatgtaaagttagtcgctcgaatcgtcc

SEQ ID NO: 233549 - DNA, 30 bp, Artificial Sequence
  Synthetic oligonucleotide
ttggtagttccttaccgttgtatatcgtcc

SEQ ID NO: 233550 - DNA, 30 bp, Artificial Sequence
  Synthetic oligonucleotide
agagcccggtccgggtatgctgacaggtcc

SEQ ID NO: 233551 - DNA, 30 bp, Artificial Sequence
  Synthetic oligonucleotide
cgcgttgtaagtacgtcaacagccaggtcc

SEQ ID NO: 233552 - DNA, 30 bp, Artificial Sequence
  Synthetic oligonucleotide
aaggtgtaaatcctccccgggagcaggtcc

SEQ ID NO: 233553 - DNA, 30 bp, Artificial Sequence
  Synthetic oligonucleotide
aggcagggtttgctcgttattcctcggtcc

SEQ ID NO: 233554 - DNA, 30 bp, Artificial Sequence
  Synthetic oligonucleotide
aaacgtaacgtgaatacagagcttcggtcc

SEQ ID NO: 233555 - DNA, 30 bp, Artificial Sequence
  Synthetic oligonucleotide
tcgtatcaagggttcccaactaccgggtcc

SEQ ID NO: 233556 - DNA, 30 bp, Artificial Sequence
  Synthetic oligonucleotide
attcccgggcgtgtgcatttcagatggtcc

SEQ ID NO: 233557 - DNA, 30 bp, Artificial Sequence
  Synthetic oligonucleotide
ctgattacacagcctccaccgagatggtcc

SEQ ID NO: 233558 - DNA, 30 bp, Artificial Sequence
  Synthetic oligonucleotide
cgtcggcagtcacagactggagactggtcc

SEQ ID NO: 233559 - DNA, 30 bp, Artificial Sequence
  Synthetic oligonucleotide
caggctccagaaataaacgaacgctggtcc

SEQ ID NO: 233560 - DNA, 30 bp, Artificial Sequence
  Synthetic oligonucleotide
tagcgaatactcagataccgggcgtggtcc

SEQ ID NO: 233561 - DNA, 30 bp, Artificial Sequence
  Synthetic oligonucleotide
cagtgtcccgggtccaacttattgtggtcc

SEQ ID NO: 233562 - DNA, 30 bp, Artificial Sequence
  Synthetic oligonucleotide
tgcacttctggagtcggcccaccaatgtcc

SEQ ID NO: 233563 - DNA, 30 bp, Artificial Sequence
  Synthetic oligonucleotide
ttcgccacctttaattacttcataatgtcc

SEQ ID NO: 233564 - DNA, 30 bp, Artificial Sequence
  Synthetic oligonucleotide
ccatactgtgtactcaatatggtaatgtcc

SEQ ID NO: 233565 - DNA, 30 bp, Artificial Sequence
  Synthetic oligonucleotide
cttgcattcagcgtacaatccgctatgtcc

SEQ ID NO: 233566 - DNA, 30 bp, Artificial Sequence
  Synthetic oligonucleotide
ttagttgatgaatacggccatcgtatgtcc

SEQ ID NO: 233567 - DNA, 30 bp, Artificial Sequence
  Synthetic oligonucleotide
tggatgggatcgggggtattcaaagtgtcc

SEQ ID NO: 233568 - DNA, 30 bp, Artificial Sequence
  Synthetic oligonucleotide
ataagcaagtatagccgggtacacgtgtcc

SEQ ID NO: 233569 - DNA, 30 bp, Artificial Sequence
  Synthetic oligonucleotide
tccttgtgggcgaggttaggtctggtgtcc

SEQ ID NO: 233570 - DNA, 30 bp, Artificial Sequence
  Synthetic oligonucleotide
ccatcaccccccattcggaagaccttgtcc

SEQ ID NO: 233571 - DNA, 30 bp, Artificial Sequence
  Synthetic oligonucleotide
taaagcagtagcatatttagagagttgtcc

SEQ ID NO: 233572 - DNA, 30 bp, Artificial Sequence
  Synthetic oligonucleotide
tcaaaacaacgagtggaactgacaaattcc

SEQ ID NO: 233573 - DNA, 30 bp, Artificial Sequence
  Synthetic oligonucleotide
ctgggggttttaataataggtttaaattcc

SEQ ID NO: 233574 - DNA, 30 bp, Artificial Sequence
  Synthetic oligonucleotide
tactcgctcaggagccggccgctcaattcc

SEQ ID NO: 233575 - DNA, 30 bp, Artificial Sequence
  Synthetic oligonucleotide
gaaaaacaagcacaaataatgaagaattcc

SEQ ID NO: 233576 - DNA, 31 bp, Artificial Sequence
  Synthetic oligonucleotide
gtgaataaaggtgcgcgagctagggaattcc

SEQ ID NO: 233577 - DNA, 30 bp, Artificial Sequence
  Synthetic oligonucleotide
aagaatcaccgcaatccagttcctaattcc

SEQ ID NO: 233578 - DNA, 30 bp, Artificial Sequence
  Synthetic oligonucleotide
cacggggactgtagattagctgttaattcc

SEQ ID NO: 233579 - DNA, 30 bp, Artificial Sequence
  Synthetic oligonucleotide
catgctgcgccattcacgctcagacattcc

SEQ ID NO: 233580 - DNA, 30 bp, Artificial Sequence
  Synthetic oligonucleotide
acaggtgacgaggaggtttctggtcattcc

SEQ ID NO: 233581 - DNA, 30 bp, Artificial Sequence
  Synthetic oligonucleotide
acttagatactacaggagtattgggattcc

SEQ ID NO: 233582 - DNA, 30 bp, Artificial Sequence
  Synthetic oligonucleotide
ggaggaagggtacagtttcaacatgattcc

SEQ ID NO: 233583 - DNA, 30 bp, Artificial Sequence
  Synthetic oligonucleotide
cagtgtgttcaggtgtaagttttatattcc

SEQ ID NO: 233584 - DNA, 30 bp, Artificial Sequence
  Synthetic oligonucleotide
actatgggattgagtcttggcgactattcc

SEQ ID NO: 233585 - DNA, 31 bp, Artificial Sequence
  Synthetic oligonucleotide
acatgtccgtcgcgcataacagtactattcc

SEQ ID NO: 233586 - DNA, 30 bp, Artificial Sequence
  Synthetic oligonucleotide
acgtgatcatcattaaggactgcgtattcc

SEQ ID NO: 233587 - DNA, 30 bp, Artificial Sequence
  Synthetic oligonucleotide
tgaatgaagagactacacgattggtattcc

SEQ ID NO: 233588 - DNA, 30 bp, Artificial Sequence
  Synthetic oligonucleotide
aacgtatgttatttggcaacgatgtattcc

SEQ ID NO: 233589 - DNA, 30 bp, Artificial Sequence
  Synthetic oligonucleotide
cttcaatgggagtcctacaccgtttattcc

SEQ ID NO: 233590 - DNA, 30 bp, Artificial Sequence
  Synthetic oligonucleotide
cattaccagacaattttactatcgacttcc

SEQ ID NO: 233591 - DNA, 30 bp, Artificial Sequence
  Synthetic oligonucleotide
gaataaaacgagggtcctgaactgacttcc

SEQ ID NO: 233592 - DNA, 30 bp, Artificial Sequence
  Synthetic oligonucleotide
tgcgacgctaggccggcgagggctacttcc

SEQ ID NO: 233593 - DNA, 30 bp, Artificial Sequence
  Synthetic oligonucleotide
tgacactgaatagtatctgcgccaccttcc

SEQ ID NO: 233594 - DNA, 30 bp, Artificial Sequence
  Synthetic oligonucleotide
gtatactcacattggttaggtccaccttcc

SEQ ID NO: 233595 - DNA, 30 bp, Artificial Sequence
  Synthetic oligonucleotide
acacagtacttacggaggatgggggcttcc

SEQ ID NO: 233596 - DNA, 30 bp, Artificial Sequence
  Synthetic oligonucleotide
ttatagtataaatagtcgggaatggcttcc

SEQ ID NO: 233597 - DNA, 30 bp, Artificial Sequence
  Synthetic oligonucleotide
ttgaggttatatacacgagacttggcttcc

SEQ ID NO: 233598 - DNA, 30 bp, Artificial Sequence
  Synthetic oligonucleotide
ttgtaagcgtagtagagcaaacttgcttcc

SEQ ID NO: 233599 - DNA, 30 bp, Artificial Sequence
  Synthetic oligonucleotide
atcattagagactatgaaccgccatcttcc

SEQ ID NO: 233600 - DNA, 30 bp, Artificial Sequence
  Synthetic oligonucleotide
cagcctacaaaagtttcagcctcgtcttcc

SEQ ID NO: 233601 - DNA, 30 bp, Artificial Sequence
  Synthetic oligonucleotide
cggcttctgactggtgcataaaattcttcc

SEQ ID NO: 233602 - DNA, 30 bp, Artificial Sequence
  Synthetic oligonucleotide
cacccatacaaggtccgaccgaaaagttcc

SEQ ID NO: 233603 - DNA, 30 bp, Artificial Sequence
  Synthetic oligonucleotide
gactaagctagagacgtctgagtcagttcc

SEQ ID NO: 233604 - DNA, 30 bp, Artificial Sequence
  Synthetic oligonucleotide
cacggggagccaagtcaaatttagagttcc

SEQ ID NO: 233605 - DNA, 30 bp, Artificial Sequence
  Synthetic oligonucleotide
agcggcatgttatccttgtaccaacgttcc

SEQ ID NO: 233606 - DNA, 30 bp, Artificial Sequence
  Synthetic oligonucleotide
ctatcgttattttagaggcggaatcgttcc

SEQ ID NO: 233607 - DNA, 30 bp, Artificial Sequence
  Synthetic oligonucleotide
cgagcaaagtgagtgggaggtgagggttcc

SEQ ID NO: 233608 - DNA, 30 bp, Artificial Sequence
  Synthetic oligonucleotide
caagatttcgtatacacacggggatgttcc

SEQ ID NO: 233609 - DNA, 30 bp, Artificial Sequence
  Synthetic oligonucleotide
aagaagggagtcacgacaatatagtgttcc

SEQ ID NO: 233610 - DNA, 30 bp, Artificial Sequence
  Synthetic oligonucleotide
caatgcggtgatctgataagctcaatttcc

SEQ ID NO: 233611 - DNA, 30 bp, Artificial Sequence
  Synthetic oligonucleotide
cgatttttcccgatcgtgaatcggatttcc

SEQ ID NO: 233612 - DNA, 39 bp, Artificial Sequence
  Synthetic oligonucleotide
tcttgccagaaacatagctaggcatagctaagtatttcc

SEQ ID NO: 233613 - DNA, 30 bp, Artificial Sequence
  Synthetic oligonucleotide
gaaccacagatgcggactacaatgctttcc

SEQ ID NO: 233614 - DNA, 30 bp, Artificial Sequence
  Synthetic oligonucleotide
aaaagcacagaagtcatcagaggtctttcc

SEQ ID NO: 233615 - DNA, 30 bp, Artificial Sequence
  Synthetic oligonucleotide
aactggggaataacgcccccgccggtttcc

SEQ ID NO: 233616 - DNA, 30 bp, Artificial Sequence
  Synthetic oligonucleotide
tcgtgttagtcgtcgtgtgcatcggtttcc

SEQ ID NO: 233617 - DNA, 30 bp, Artificial Sequence
  Synthetic oligonucleotide
aaggaaatggattaatgggactgtgtttcc

SEQ ID NO: 233618 - DNA, 30 bp, Artificial Sequence
  Synthetic oligonucleotide
agccgtatatcgagatcgttcgtcttttcc

SEQ ID NO: 233619 - DNA, 30 bp, Artificial Sequence
  Synthetic oligonucleotide
gtcagcgaaaagtcatatgcctggttttcc

SEQ ID NO: 233620 - DNA, 30 bp, Artificial Sequence
  Synthetic oligonucleotide
aagtttgttaagtgaatcacctgaaaaagc

SEQ ID NO: 233621 - DNA, 30 bp, Artificial Sequence
  Synthetic oligonucleotide
cttagttcttaatggatacagcataaaagc

SEQ ID NO: 233622 - DNA, 30 bp, Artificial Sequence
  Synthetic oligonucleotide
gaatgtctgaaggttgggcccaaacaaagc

SEQ ID NO: 233623 - DNA, 30 bp, Artificial Sequence
  Synthetic oligonucleotide
aatagctcccatggggggcaactacaaagc

SEQ ID NO: 233624 - DNA, 30 bp, Artificial Sequence
  Synthetic oligonucleotide
tatcacagatcatgataggtgagccaaagc

SEQ ID NO: 233625 - DNA, 30 bp, Artificial Sequence
  Synthetic oligonucleotide
tggtgagcatattttagtaatctccaaagc

SEQ ID NO: 233626 - DNA, 30 bp, Artificial Sequence
  Synthetic oligonucleotide
tctgccatagaaatcatgtattagcaaagc

SEQ ID NO: 233627 - DNA, 30 bp, Artificial Sequence
  Synthetic oligonucleotide
gcatcggaagggtttacatacagtcaaagc

SEQ ID NO: 233628 - DNA, 29 bp, Artificial Sequence
  Synthetic oligonucleotide
gtacaaagagcgacgtcatgtgtcaaagc

SEQ ID NO: 233629 - DNA, 30 bp, Artificial Sequence
  Synthetic oligonucleotide
aggtgaagatccagcgttcacgaagaaagc

SEQ ID NO: 233630 - DNA, 30 bp, Artificial Sequence
  Synthetic oligonucleotide
caggaaatggggacactaggaacagaaagc

SEQ ID NO: 233631 - DNA, 30 bp, Artificial Sequence
  Synthetic oligonucleotide
gaacagaacgttctaggacacccagaaagc

SEQ ID NO: 233632 - DNA, 30 bp, Artificial Sequence
  Synthetic oligonucleotide
tagcccattgaaaaggttatacgagaaagc

SEQ ID NO: 233633 - DNA, 30 bp, Artificial Sequence
  Synthetic oligonucleotide
aatacggcctcgtacaccaagaccgaaagc

SEQ ID NO: 233634 - DNA, 30 bp, Artificial Sequence
  Synthetic oligonucleotide
tcccatcaggggtcccaatagatcgaaagc

SEQ ID NO: 233635 - DNA, 30 bp, Artificial Sequence
  Synthetic oligonucleotide
ctcgtgcgcggcacgacatcacaataaagc

SEQ ID NO: 233636 - DNA, 30 bp, Artificial Sequence
  Synthetic oligonucleotide
agatctaggctgtgagtacatatgtaaagc

SEQ ID NO: 233637 - DNA, 30 bp, Artificial Sequence
  Synthetic oligonucleotide
atcgcatactaggaaagttatggttaaagc

SEQ ID NO: 233638 - DNA, 30 bp, Artificial Sequence
  Synthetic oligonucleotide
cgtataaaggaataaggtgtgttttaaagc

SEQ ID NO: 233639 - DNA, 30 bp, Artificial Sequence
  Synthetic oligonucleotide
aaaaacaccggagatctggcggcaacaagc

SEQ ID NO: 233640 - DNA, 30 bp, Artificial Sequence
  Synthetic oligonucleotide
cattgagatatggcatgggccaacacaagc

SEQ ID NO: 233641 - DNA, 30 bp, Artificial Sequence
  Synthetic oligonucleotide
agccggagtggggctacctgaggtacaagc

SEQ ID NO: 233642 - DNA, 30 bp, Artificial Sequence
  Synthetic oligonucleotide
tggcgccgtgcacttgagggaattacaagc

SEQ ID NO: 233643 - DNA, 30 bp, Artificial Sequence
  Synthetic oligonucleotide
agcaaccgtaaattgctaacttacccaagc

SEQ ID NO: 233644 - DNA, 30 bp, Artificial Sequence
  Synthetic oligonucleotide
gttctagagccttctaagctgggcccaagc

SEQ ID NO: 233645 - DNA, 30 bp, Artificial Sequence
  Synthetic oligonucleotide
catgtcaatgtgagaagcgactttccaagc

SEQ ID NO: 233646 - DNA, 30 bp, Artificial Sequence
  Synthetic oligonucleotide
gtccaattgtccaccgtaggtctagcaagc

SEQ ID NO: 233647 - DNA, 30 bp, Artificial Sequence
  Synthetic oligonucleotide
ttactatgtatcaagcacgcgttagcaagc

SEQ ID NO: 233648 - DNA, 30 bp, Artificial Sequence
  Synthetic oligonucleotide
aatcaggcacgtaagccaacgcccgcaagc

SEQ ID NO: 233649 - DNA, 30 bp, Artificial Sequence
  Synthetic oligonucleotide
ctcttccgaaggaccactgtgcccgcaagc

SEQ ID NO: 233650 - DNA, 30 bp, Artificial Sequence
  Synthetic oligonucleotide
gatgataggtcgccgcaagtatgggcaagc

SEQ ID NO: 233651 - DNA, 30 bp, Artificial Sequence
  Synthetic oligonucleotide
tcgcttacggacgtttctcacgttgcaagc

SEQ ID NO: 233652 - DNA, 30 bp, Artificial Sequence
  Synthetic oligonucleotide
cctactcacgtgcacggaaaacagtcaagc

SEQ ID NO: 233653 - DNA, 30 bp, Artificial Sequence
  Synthetic oligonucleotide
gtgatatactgcgttcatcctgttagaagc

SEQ ID NO: 233654 - DNA, 30 bp, Artificial Sequence
  Synthetic oligonucleotide
ctcgcctgaaggggatataagacacgaagc

SEQ ID NO: 233655 - DNA, 30 bp, Artificial Sequence
  Synthetic oligonucleotide
gcgcatacgggggataaatacatacgaagc

SEQ ID NO: 233656 - DNA, 30 bp, Artificial Sequence
  Synthetic oligonucleotide
cggagacgcaattcgaatcttgaccgaagc

SEQ ID NO: 233657 - DNA, 30 bp, Artificial Sequence
  Synthetic oligonucleotide
ctgtcatcccgtccgagcatgcgccgaagc

SEQ ID NO: 233658 - DNA, 30 bp, Artificial Sequence
  Synthetic oligonucleotide
ccttttcaggatggtatcacgaagcgaagc

SEQ ID NO: 233659 - DNA, 30 bp, Artificial Sequence
  Synthetic oligonucleotide
tgtataacagacagctaatataggcgaagc

SEQ ID NO: 233660 - DNA, 30 bp, Artificial Sequence
  Synthetic oligonucleotide
gagtatttgggagtgctggttattcgaagc

SEQ ID NO: 233661 - DNA, 31 bp, Artificial Sequence
  Synthetic oligonucleotide
gtctccaccggcgtgacctgaaaaaggaagc

SEQ ID NO: 233662 - DNA, 30 bp, Artificial Sequence
  Synthetic oligonucleotide
aagtccaagacttataatctatgaggaagc

SEQ ID NO: 233663 - DNA, 30 bp, Artificial Sequence
  Synthetic oligonucleotide
gccggatcgattcatagaccgggcggaagc

SEQ ID NO: 233664 - DNA, 30 bp, Artificial Sequence
  Synthetic oligonucleotide
tccgtccacaacctaagaacgctcggaagc

SEQ ID NO: 233665 - DNA, 30 bp, Artificial Sequence
  Synthetic oligonucleotide
gaacacggctacgactggcgccactgaagc

SEQ ID NO: 233666 - DNA, 30 bp, Artificial Sequence
  Synthetic oligonucleotide
tgaaccattcttgcctatagggactgaagc

SEQ ID NO: 233667 - DNA, 30 bp, Artificial Sequence
  Synthetic oligonucleotide
attgattgagttggtacgtaagcctgaagc

SEQ ID NO: 233668 - DNA, 30 bp, Artificial Sequence
  Synthetic oligonucleotide
ggaaaatccgtcctttagtgtcattgaagc

SEQ ID NO: 233669 - DNA, 30 bp, Artificial Sequence
  Synthetic oligonucleotide
aatagcagtagttgcagacctctttgaagc

SEQ ID NO: 233670 - DNA, 30 bp, Artificial Sequence
  Synthetic oligonucleotide
catgatgtggctctggacacaaaaataagc

SEQ ID NO: 233671 - DNA, 30 bp, Artificial Sequence
  Synthetic oligonucleotide
ggaggtgtcgtttacagggaactaataagc

SEQ ID NO: 233672 - DNA, 30 bp, Artificial Sequence
  Synthetic oligonucleotide
ctgatacagacacgtttcaggaacataagc

SEQ ID NO: 233673 - DNA, 30 bp, Artificial Sequence
  Synthetic oligonucleotide
gaaccgcttcgtccgccaattaccataagc

SEQ ID NO: 233674 - DNA, 30 bp, Artificial Sequence
  Synthetic oligonucleotide
gtacaagaacgtttggacagcctcataagc

SEQ ID NO: 233675 - DNA, 30 bp, Artificial Sequence
  Synthetic oligonucleotide
gaatcaggggcatctcccggcttcataagc

SEQ ID NO: 233676 - DNA, 30 bp, Artificial Sequence
  Synthetic oligonucleotide
cgtcagaccgcattattatcatggataagc

SEQ ID NO: 233677 - DNA, 30 bp, Artificial Sequence
  Synthetic oligonucleotide
ttagcgaaaacgcatgtataactgataagc

SEQ ID NO: 233678 - DNA, 30 bp, Artificial Sequence
  Synthetic oligonucleotide
ggggcaacattgcacagttgttatataagc

SEQ ID NO: 233679 - DNA, 30 bp, Artificial Sequence
  Synthetic oligonucleotide
tccaacaagttaattttgtctagtataagc

SEQ ID NO: 233680 - DNA, 30 bp, Artificial Sequence
  Synthetic oligonucleotide
atgcgtggcataacttttcctcacctaagc

SEQ ID NO: 233681 - DNA, 30 bp, Artificial Sequence
  Synthetic oligonucleotide
ttacgggcatatttcaccaatgtgctaagc

SEQ ID NO: 233682 - DNA, 30 bp, Artificial Sequence
  Synthetic oligonucleotide
aatatgtattccactatatcgcatctaagc

SEQ ID NO: 233683 - DNA, 30 bp, Artificial Sequence
  Synthetic oligonucleotide
aaaattgttacattaaaaggagaagtaagc

SEQ ID NO: 233684 - DNA, 30 bp, Artificial Sequence
  Synthetic oligonucleotide
tcattcgtcttaggcaggctggcagtaagc

SEQ ID NO: 233685 - DNA, 30 bp, Artificial Sequence
  Synthetic oligonucleotide
taaagggtgatatctcactaatcagtaagc

SEQ ID NO: 233686 - DNA, 30 bp, Artificial Sequence
  Synthetic oligonucleotide
gactgcgtggggtttaactgcagagtaagc

SEQ ID NO: 233687 - DNA, 30 bp, Artificial Sequence
  Synthetic oligonucleotide
agtgtacctcaacactcgttgttagtaagc

SEQ ID NO: 233688 - DNA, 30 bp, Artificial Sequence
  Synthetic oligonucleotide
acccgtcgaatgcgcctaatctaggtaagc

SEQ ID NO: 233689 - DNA, 30 bp, Artificial Sequence
  Synthetic oligonucleotide
gccactggcgggcccgaatgcattgtaagc

SEQ ID NO: 233690 - DNA, 30 bp, Artificial Sequence
  Synthetic oligonucleotide
gtggctgaagacaagacaattaaattaagc

SEQ ID NO: 233691 - DNA, 30 bp, Artificial Sequence
  Synthetic oligonucleotide
tgaggaccaagggcgattgtcctattaagc

SEQ ID NO: 233692 - DNA, 30 bp, Artificial Sequence
  Synthetic oligonucleotide
tatgcggtttgccgacgaaggcagttaagc

SEQ ID NO: 233693 - DNA, 30 bp, Artificial Sequence
  Synthetic oligonucleotide
gtgacactaagttccagatcaacgttaagc

SEQ ID NO: 233694 - DNA, 30 bp, Artificial Sequence
  Synthetic oligonucleotide
gtgcctggaatgtcaaagcggaatttaagc

SEQ ID NO: 233695 - DNA, 30 bp, Artificial Sequence
  Synthetic oligonucleotide
ctacgagaccgggctaaaccgcttttaagc

SEQ ID NO: 233696 - DNA, 30 bp, Artificial Sequence
  Synthetic oligonucleotide
gatttatagtctggcatgaacctaaacagc

SEQ ID NO: 233697 - DNA, 30 bp, Artificial Sequence
  Synthetic oligonucleotide
gttgcgagcataaacttacggcgtaacagc

SEQ ID NO: 233698 - DNA, 30 bp, Artificial Sequence
  Synthetic oligonucleotide
gcttccggctccgcactggcactacacagc

SEQ ID NO: 233699 - DNA, 30 bp, Artificial Sequence
  Synthetic oligonucleotide
gccaattgcgaacgagcagcacggcacagc

SEQ ID NO: 233700 - DNA, 30 bp, Artificial Sequence
  Synthetic oligonucleotide
ccaaccctctttcgaaggccagaagacagc

SEQ ID NO: 233701 - DNA, 30 bp, Artificial Sequence
  Synthetic oligonucleotide
agatacgagcacggaactaccctagacagc

SEQ ID NO: 233702 - DNA, 30 bp, Artificial Sequence
  Synthetic oligonucleotide
ttgcctaccgctaccagattgtttgacagc

SEQ ID NO: 233703 - DNA, 30 bp, Artificial Sequence
  Synthetic oligonucleotide
gatcctagtcggcggggtgaagtgtacagc

SEQ ID NO: 233704 - DNA, 30 bp, Artificial Sequence
  Synthetic oligonucleotide
gctggagaataactatagcggttgtacagc

SEQ ID NO: 233705 - DNA, 30 bp, Artificial Sequence
  Synthetic oligonucleotide
actgaattttcagtccgttccgcgaccagc

SEQ ID NO: 233706 - DNA, 30 bp, Artificial Sequence
  Synthetic oligonucleotide
aacaaaactaaggatgtaggtttccccagc

SEQ ID NO: 233707 - DNA, 30 bp, Artificial Sequence
  Synthetic oligonucleotide
gtcagtgcctcaggacgacttttccccagc

SEQ ID NO: 233708 - DNA, 30 bp, Artificial Sequence
  Synthetic oligonucleotide
gtgagcaatcccgaacggtaatagcccagc

SEQ ID NO: 233709 - DNA, 29 bp, Artificial Sequence
  Synthetic oligonucleotide
gtaaattatttcaacataatgatcccagc

SEQ ID NO: 233710 - DNA, 30 bp, Artificial Sequence
  Synthetic oligonucleotide
tccgcggacgaggagccgcccgcagccagc

SEQ ID NO: 233711 - DNA, 30 bp, Artificial Sequence
  Synthetic oligonucleotide
ggcgacgtccagaaatgtgtgaacgccagc

SEQ ID NO: 233712 - DNA, 30 bp, Artificial Sequence
  Synthetic oligonucleotide
aactactagtgtctaaggcatatggccagc

SEQ ID NO: 233713 - DNA, 30 bp, Artificial Sequence
  Synthetic oligonucleotide
atgtctcgatcataacgcttcttggccagc

SEQ ID NO: 233714 - DNA, 30 bp, Artificial Sequence
  Synthetic oligonucleotide
actaagtcgcggtagttagggaagtccagc

SEQ ID NO: 233715 - DNA, 30 bp, Artificial Sequence
  Synthetic oligonucleotide
tagtgaacttgattcgaatctgattccagc

SEQ ID NO: 233716 - DNA, 30 bp, Artificial Sequence
  Synthetic oligonucleotide
attagcctgatcataagtattgattccagc

SEQ ID NO: 233717 - DNA, 30 bp, Artificial Sequence
  Synthetic oligonucleotide
taggtctccttaacactttgataaagcagc

SEQ ID NO: 233718 - DNA, 30 bp, Artificial Sequence
  Synthetic oligonucleotide
cgtcgctgatgtataccattacacagcagc

SEQ ID NO: 233719 - DNA, 30 bp, Artificial Sequence
  Synthetic oligonucleotide
tgccaaggcgcgcatcatatcgacagcagc

SEQ ID NO: 233720 - DNA, 30 bp, Artificial Sequence
  Synthetic oligonucleotide
tgcttgggcttcccccgtataagcagcagc

SEQ ID NO: 233721 - DNA, 30 bp, Artificial Sequence
  Synthetic oligonucleotide
cagatgacacgtaattagcaaggcagcagc

SEQ ID NO: 233722 - DNA, 30 bp, Artificial Sequence
  Synthetic oligonucleotide
tctagacggatgctttatcgcgtgagcagc

SEQ ID NO: 233723 - DNA, 30 bp, Artificial Sequence
  Synthetic oligonucleotide
tgggggctcgtacccgtaccgcaccgcagc

SEQ ID NO: 233724 - DNA, 30 bp, Artificial Sequence
  Synthetic oligonucleotide
cgaaggttcatcacggggaaggaccgcagc

SEQ ID NO: 233725 - DNA, 30 bp, Artificial Sequence
  Synthetic oligonucleotide
ctgtggcctggtgaacttgtcaatcgcagc

SEQ ID NO: 233726 - DNA, 30 bp, Artificial Sequence
  Synthetic oligonucleotide
cgtgaaagtaaactgggtcggtgtcgcagc

SEQ ID NO: 233727 - DNA, 30 bp, Artificial Sequence
  Synthetic oligonucleotide
ccacacttccgaggagatttcacaggcagc

SEQ ID NO: 233728 - DNA, 30 bp, Artificial Sequence
  Synthetic oligonucleotide
gcaacaattttgaccgccactaccggcagc

SEQ ID NO: 233729 - DNA, 30 bp, Artificial Sequence
  Synthetic oligonucleotide
cagggtatacagcagtccgtaagcggcagc

SEQ ID NO: 233730 - DNA, 30 bp, Artificial Sequence
  Synthetic oligonucleotide
gtggaatcgcaaactgaacaattgggcagc

SEQ ID NO: 233731 - DNA, 30 bp, Artificial Sequence
  Synthetic oligonucleotide
acatcgggcctctgcagcgaaaaatgcagc

SEQ ID NO: 233732 - DNA, 30 bp, Artificial Sequence
  Synthetic oligonucleotide
gccggattaacgattgcctggtaaatcagc

SEQ ID NO: 233733 - DNA, 30 bp, Artificial Sequence
  Synthetic oligonucleotide
atgcggctctaatcacacgcgccgatcagc

SEQ ID NO: 233734 - DNA, 30 bp, Artificial Sequence
  Synthetic oligonucleotide
gtaatccgcggtaacaaacaataactcagc

SEQ ID NO: 233735 - DNA, 30 bp, Artificial Sequence
  Synthetic oligonucleotide
aactgatcagtatttgatccaccactcagc

SEQ ID NO: 233736 - DNA, 30 bp, Artificial Sequence
  Synthetic oligonucleotide
acactatgttttctacggcggtcactcagc

SEQ ID NO: 233737 - DNA, 30 bp, Artificial Sequence
  Synthetic oligonucleotide
cacaacgataattggccctcagggctcagc

SEQ ID NO: 233738 - DNA, 30 bp, Artificial Sequence
  Synthetic oligonucleotide
cggaagtccgttacgcgaaagtatctcagc

SEQ ID NO: 233739 - DNA, 30 bp, Artificial Sequence
  Synthetic oligonucleotide
cctgcacacaggattgggaaatgtctcagc

SEQ ID NO: 233740 - DNA, 30 bp, Artificial Sequence
  Synthetic oligonucleotide
ctactctctagcgtcggggagcccgtcagc

SEQ ID NO: 233741 - DNA, 30 bp, Artificial Sequence
  Synthetic oligonucleotide
gcggctacacaatcagcggagatcgtcagc

SEQ ID NO: 233742 - DNA, 31 bp, Artificial Sequence
  Synthetic oligonucleotide
cattccgactagagtttttgtcttcgtcagc

SEQ ID NO: 233743 - DNA, 30 bp, Artificial Sequence
  Synthetic oligonucleotide
atgtatcatgtacagattaacccggtcagc

SEQ ID NO: 233744 - DNA, 30 bp, Artificial Sequence
  Synthetic oligonucleotide
aaccaaatggcgtggctattctaattcagc

SEQ ID NO: 233745 - DNA, 30 bp, Artificial Sequence
  Synthetic oligonucleotide
aacacgaccatgcaaaataatatattcagc

SEQ ID NO: 233746 - DNA, 30 bp, Artificial Sequence
  Synthetic oligonucleotide
ttgcgacattgtacccgtagatacttcagc

SEQ ID NO: 233747 - DNA, 30 bp, Artificial Sequence
  Synthetic oligonucleotide
tgaagcgttattgcagttggcaagttcagc

SEQ ID NO: 233748 - DNA, 30 bp, Artificial Sequence
  Synthetic oligonucleotide
ggtctgagcatagtgtacccaaatttcagc

SEQ ID NO: 233749 - DNA, 30 bp, Artificial Sequence
  Synthetic oligonucleotide
agtttcttgttgcaacaacgtaatttcagc

SEQ ID NO: 233750 - DNA, 30 bp, Artificial Sequence
  Synthetic oligonucleotide
ctaactcggcgtctccgaataggaaagagc

SEQ ID NO: 233751 - DNA, 30 bp, Artificial Sequence
  Synthetic oligonucleotide
ttacggtgtaatcgtcacgtacccaagagc

SEQ ID NO: 233752 - DNA, 30 bp, Artificial Sequence
  Synthetic oligonucleotide
gaagatcgatcgtcgttgagatccaagagc

SEQ ID NO: 233753 - DNA, 30 bp, Artificial Sequence
  Synthetic oligonucleotide
gggtccaagggagggggcgtttaccagagc

SEQ ID NO: 233754 - DNA, 30 bp, Artificial Sequence
  Synthetic oligonucleotide
cacctacaaatccgggtatcgcgccagagc

SEQ ID NO: 233755 - DNA, 30 bp, Artificial Sequence
  Synthetic oligonucleotide
actcgacagtatcaaagggggtatcagagc

SEQ ID NO: 233756 - DNA, 30 bp, Artificial Sequence
  Synthetic oligonucleotide
tgatcacccactggtaacagcgttcagagc

SEQ ID NO: 233757 - DNA, 30 bp, Artificial Sequence
  Synthetic oligonucleotide
taggacaatggtgctaagtattttcagagc

SEQ ID NO: 233758 - DNA, 30 bp, Artificial Sequence
  Synthetic oligonucleotide
cattcattattcagataattttcatagagc

SEQ ID NO: 233759 - DNA, 30 bp, Artificial Sequence
  Synthetic oligonucleotide
caatgttactcaggcgataagctatagagc

SEQ ID NO: 233760 - DNA, 30 bp, Artificial Sequence
  Synthetic oligonucleotide
ctaggtaagccaagactgatgccctagagc

SEQ ID NO: 233761 - DNA, 30 bp, Artificial Sequence
  Synthetic oligonucleotide
atcagtaaactcagtgaatatagctagagc

SEQ ID NO: 233762 - DNA, 30 bp, Artificial Sequence
  Synthetic oligonucleotide
tttggccccccattagtacagaggtagagc

SEQ ID NO: 233763 - DNA, 30 bp, Artificial Sequence
  Synthetic oligonucleotide
atggaattgcacttcccgtacgggtagagc

SEQ ID NO: 233764 - DNA, 30 bp, Artificial Sequence
  Synthetic oligonucleotide
cattacgggtctgccgcttagatcacgagc

SEQ ID NO: 233765 - DNA, 30 bp, Artificial Sequence
  Synthetic oligonucleotide
gtagaagatcgacgactcagcgagacgagc

SEQ ID NO: 233766 - DNA, 30 bp, Artificial Sequence
  Synthetic oligonucleotide
ccaaccgacggctaggggtcggcgacgagc

SEQ ID NO: 233767 - DNA, 30 bp, Artificial Sequence
  Synthetic oligonucleotide
cgagttgccgatccgtagaggtaaccgagc

SEQ ID NO: 233768 - DNA, 30 bp, Artificial Sequence
  Synthetic oligonucleotide
gattatctgctactgcgattaccaccgagc

SEQ ID NO: 233769 - DNA, 30 bp, Artificial Sequence
  Synthetic oligonucleotide
acagcggtaacggccagtatgtcaccgagc

SEQ ID NO: 233770 - DNA, 30 bp, Artificial Sequence
  Synthetic oligonucleotide
atcactagcgactattccaattccccgagc

SEQ ID NO: 233771 - DNA, 30 bp, Artificial Sequence
  Synthetic oligonucleotide
caagagctttggcagggctgaagtccgagc

SEQ ID NO: 233772 - DNA, 30 bp, Artificial Sequence
  Synthetic oligonucleotide
gtcgatgacaccttaaattgttgagcgagc

SEQ ID NO: 233773 - DNA, 30 bp, Artificial Sequence
  Synthetic oligonucleotide
atggggtttactcgggggttgatagcgagc

SEQ ID NO: 233774 - DNA, 30 bp, Artificial Sequence
  Synthetic oligonucleotide
ctcgtgagacacaattttggggacgcgagc

SEQ ID NO: 233775 - DNA, 31 bp, Artificial Sequence
  Synthetic oligonucleotide
attgtgggtgcgtgcatattggtgggcgagc

SEQ ID NO: 233776 - DNA, 30 bp, Artificial Sequence
  Synthetic oligonucleotide
acagcgcagaagatctgcgcgggtgcgagc

SEQ ID NO: 233777 - DNA, 30 bp, Artificial Sequence
  Synthetic oligonucleotide
cggtcatattgaggtacacaggttgcgagc

SEQ ID NO: 233778 - DNA, 30 bp, Artificial Sequence
  Synthetic oligonucleotide
tggggcccgggtaaagttactaaatcgagc

SEQ ID NO: 233779 - DNA, 30 bp, Artificial Sequence
  Synthetic oligonucleotide
attctggcgactttagtgaggtgatcgagc

SEQ ID NO: 233780 - DNA, 30 bp, Artificial Sequence
  Synthetic oligonucleotide
ttgcatgagagtaaactaacgacgtcgagc

SEQ ID NO: 233781 - DNA, 30 bp, Artificial Sequence
  Synthetic oligonucleotide
ggcacaacaaactgccattgtgggtcgagc

SEQ ID NO: 233782 - DNA, 30 bp, Artificial Sequence
  Synthetic oligonucleotide
gggctgattgccttgaaccttgattcgagc

SEQ ID NO: 233783 - DNA, 30 bp, Artificial Sequence
  Synthetic oligonucleotide
tctctagatccaaacgatataaaaaggagc

SEQ ID NO: 233784 - DNA, 30 bp, Artificial Sequence
  Synthetic oligonucleotide
gtaaatatggtattcatctggatgaggagc

SEQ ID NO: 233785 - DNA, 30 bp, Artificial Sequence
  Synthetic oligonucleotide
catattcgtccgcgataatctttgaggagc

SEQ ID NO: 233786 - DNA, 30 bp, Artificial Sequence
  Synthetic oligonucleotide
atctttaagttatgccaggatactaggagc

SEQ ID NO: 233787 - DNA, 30 bp, Artificial Sequence
  Synthetic oligonucleotide
ttcaggtagaccgggtcccatcctaggagc

SEQ ID NO: 233788 - DNA, 30 bp, Artificial Sequence
  Synthetic oligonucleotide
cataataatgagcacctaactgttaggagc

SEQ ID NO: 233789 - DNA, 30 bp, Artificial Sequence
  Synthetic oligonucleotide
ccaaacatagtatttaggtgtgaacggagc

SEQ ID NO: 233790 - DNA, 30 bp, Artificial Sequence
  Synthetic oligonucleotide
gattgaggtggcaacaactaaacacggagc

SEQ ID NO: 233791 - DNA, 30 bp, Artificial Sequence
  Synthetic oligonucleotide
gacgtggcattagccggatccttccggagc

SEQ ID NO: 233792 - DNA, 30 bp, Artificial Sequence
  Synthetic oligonucleotide
ggggtccagctcaccagcctatatcggagc

SEQ ID NO: 233793 - DNA, 30 bp, Artificial Sequence
  Synthetic oligonucleotide
ttacacacggaagctgaattaatagggagc

SEQ ID NO: 233794 - DNA, 30 bp, Artificial Sequence
  Synthetic oligonucleotide
acgatggatggggaacgtatacgcgggagc

SEQ ID NO: 233795 - DNA, 30 bp, Artificial Sequence
  Synthetic oligonucleotide
ctaacgaacttggatgaaagacatgggagc

SEQ ID NO: 233796 - DNA, 30 bp, Artificial Sequence
  Synthetic oligonucleotide
aaagacgcaacaagtatggctacatggagc

SEQ ID NO: 233797 - DNA, 30 bp, Artificial Sequence
  Synthetic oligonucleotide
cggttggtcgagaaggcctctagatggagc

SEQ ID NO: 233798 - DNA, 30 bp, Artificial Sequence
  Synthetic oligonucleotide
agaagaggtccagcgttgagtcgatggagc

SEQ ID NO: 233799 - DNA, 30 bp, Artificial Sequence
  Synthetic oligonucleotide
gtgagcacccgcgatccctgtaactggagc

SEQ ID NO: 233800 - DNA, 30 bp, Artificial Sequence
  Synthetic oligonucleotide
cacccgacctgggttcacatcgactggagc

SEQ ID NO: 233801 - DNA, 30 bp, Artificial Sequence
  Synthetic oligonucleotide
tcggtatttcctccattggcttagtggagc

SEQ ID NO: 233802 - DNA, 30 bp, Artificial Sequence
  Synthetic oligonucleotide
atggatcgtactgggaccgcgttaatgagc

SEQ ID NO: 233803 - DNA, 30 bp, Artificial Sequence
  Synthetic oligonucleotide
gagatcaatcaaggtacgaactacatgagc

SEQ ID NO: 233804 - DNA, 28 bp, Artificial Sequence
  Synthetic oligonucleotide
attagctggtccaaaagactccatgagc

SEQ ID NO: 233805 - DNA, 30 bp, Artificial Sequence
  Synthetic oligonucleotide
aaagctgggattactttatgcgctatgagc

SEQ ID NO: 233806 - DNA, 30 bp, Artificial Sequence
  Synthetic oligonucleotide
gttaagtccctctgccttccactactgagc

SEQ ID NO: 233807 - DNA, 30 bp, Artificial Sequence
  Synthetic oligonucleotide
agaaaaacaaacttgccgcgtaccctgagc

SEQ ID NO: 233808 - DNA, 30 bp, Artificial Sequence
  Synthetic oligonucleotide
gtcgatttactccgcgttaacccgctgagc

SEQ ID NO: 233809 - DNA, 30 bp, Artificial Sequence
  Synthetic oligonucleotide
agaaaacgcttcaaaatatgctggctgagc

SEQ ID NO: 233810 - DNA, 30 bp, Artificial Sequence
  Synthetic oligonucleotide
gatcagttcttataatcaaaggaagtgagc

SEQ ID NO: 233811 - DNA, 30 bp, Artificial Sequence
  Synthetic oligonucleotide
ttccgcctcgtacaaaacggaagagtgagc

SEQ ID NO: 233812 - DNA, 30 bp, Artificial Sequence
  Synthetic oligonucleotide
gtcggcggtgtttcccgatgatcggtgagc

SEQ ID NO: 233813 - DNA, 30 bp, Artificial Sequence
  Synthetic oligonucleotide
gataagcgctagcagaactaacatgtgagc

SEQ ID NO: 233814 - DNA, 30 bp, Artificial Sequence
  Synthetic oligonucleotide
atagtcggaagctggaagatattcttgagc

SEQ ID NO: 233815 - DNA, 30 bp, Artificial Sequence
  Synthetic oligonucleotide
tatataaggtggcaatcgtttgggttgagc

SEQ ID NO: 233816 - DNA, 30 bp, Artificial Sequence
  Synthetic oligonucleotide
tactctactattgctagtgactggttgagc

SEQ ID NO: 233817 - DNA, 30 bp, Artificial Sequence
  Synthetic oligonucleotide
aactgagcgcccacgagatcgctgttgagc

SEQ ID NO: 233818 - DNA, 30 bp, Artificial Sequence
  Synthetic oligonucleotide
aaccgaaggaaatcgctttttggtttgagc

SEQ ID NO: 233819 - DNA, 30 bp, Artificial Sequence
  Synthetic oligonucleotide
ccagggggagtatttatggcccaaaatagc

SEQ ID NO: 233820 - DNA, 30 bp, Artificial Sequence
  Synthetic oligonucleotide
gtcaatccctgggacgaaggggggaatagc

SEQ ID NO: 233821 - DNA, 30 bp, Artificial Sequence
  Synthetic oligonucleotide
cgtggccgcaggaggacgggaatgaatagc

SEQ ID NO: 233822 - DNA, 30 bp, Artificial Sequence
  Synthetic oligonucleotide
gtttcgactgtaattcctcgtgataatagc

SEQ ID NO: 233823 - DNA, 30 bp, Artificial Sequence
  Synthetic oligonucleotide
gaacagtcggatagactaggatataatagc

SEQ ID NO: 233824 - DNA, 30 bp, Artificial Sequence
  Synthetic oligonucleotide
atcaacccctggcgtatgcggtctaatagc

SEQ ID NO: 233825 - DNA, 30 bp, Artificial Sequence
  Synthetic oligonucleotide
gcgatatcggaatgtattgcagaacatagc

SEQ ID NO: 233826 - DNA, 30 bp, Artificial Sequence
  Synthetic oligonucleotide
gtatccgcgtatatctaaaaccaccatagc

SEQ ID NO: 233827 - DNA, 30 bp, Artificial Sequence
  Synthetic oligonucleotide
cttaggtaccttgtgggagcagggcatagc

SEQ ID NO: 233828 - DNA, 30 bp, Artificial Sequence
  Synthetic oligonucleotide
ttcctggaatcatcgcccgtaaaagatagc

SEQ ID NO: 233829 - DNA, 30 bp, Artificial Sequence
  Synthetic oligonucleotide
cccatacgtgatgtgctgcatagagatagc

SEQ ID NO: 233830 - DNA, 30 bp, Artificial Sequence
  Synthetic oligonucleotide
ttcacgctaggacaatcatgtggggatagc

SEQ ID NO: 233831 - DNA, 30 bp, Artificial Sequence
  Synthetic oligonucleotide
acctcgtgcctgaggcactttcctgatagc

SEQ ID NO: 233832 - DNA, 30 bp, Artificial Sequence
  Synthetic oligonucleotide
aatgagacgtgggaccgggggtttgatagc

SEQ ID NO: 233833 - DNA, 30 bp, Artificial Sequence
  Synthetic oligonucleotide
gttgcaatgaggaggacaaaggcatatagc

SEQ ID NO: 233834 - DNA, 30 bp, Artificial Sequence
  Synthetic oligonucleotide
tgtgcgcgaaagctcgcatatggatatagc

SEQ ID NO: 233835 - DNA, 30 bp, Artificial Sequence
  Synthetic oligonucleotide
atacaggtggttcgaatgggtatatatagc

SEQ ID NO: 233836 - DNA, 30 bp, Artificial Sequence
  Synthetic oligonucleotide
gagggcattcatggtagcaaaagctatagc

SEQ ID NO: 233837 - DNA, 30 bp, Artificial Sequence
  Synthetic oligonucleotide
tcaatcgttatcatccagctggcgtatagc

SEQ ID NO: 233838 - DNA, 30 bp, Artificial Sequence
  Synthetic oligonucleotide
gagtttcagtcgggaaacacagggtatagc

SEQ ID NO: 233839 - DNA, 30 bp, Artificial Sequence
  Synthetic oligonucleotide
gtgcaaagatgaccctcacctcgttatagc

SEQ ID NO: 233840 - DNA, 30 bp, Artificial Sequence
  Synthetic oligonucleotide
gatacccctaaagcagaaactgatactagc

SEQ ID NO: 233841 - DNA, 30 bp, Artificial Sequence
  Synthetic oligonucleotide
tcaacgaacgttcattaggtaagacctagc

SEQ ID NO: 233842 - DNA, 30 bp, Artificial Sequence
  Synthetic oligonucleotide
aggggcggcatcaacggacagggacctagc

SEQ ID NO: 233843 - DNA, 30 bp, Artificial Sequence
  Synthetic oligonucleotide
ggggggagcattccacacttgtaagctagc

SEQ ID NO: 233844 - DNA, 30 bp, Artificial Sequence
  Synthetic oligonucleotide
ctatagtcgaagacagtggggtcggctagc

SEQ ID NO: 233845 - DNA, 30 bp, Artificial Sequence
  Synthetic oligonucleotide
cagatcggcatcataaatcagtaatctagc

SEQ ID NO: 233846 - DNA, 30 bp, Artificial Sequence
  Synthetic oligonucleotide
ggagccccggaagtgtgagggtcatctagc

SEQ ID NO: 233847 - DNA, 30 bp, Artificial Sequence
  Synthetic oligonucleotide
ccggcggcccaccttttttcgcggtctagc

SEQ ID NO: 233848 - DNA, 30 bp, Artificial Sequence
  Synthetic oligonucleotide
tgaccaatggttatggtgtatccaagtagc

SEQ ID NO: 233849 - DNA, 30 bp, Artificial Sequence
  Synthetic oligonucleotide
ttgtaagacagagtagcgtttctgagtagc

SEQ ID NO: 233850 - DNA, 30 bp, Artificial Sequence
  Synthetic oligonucleotide
gccaaatgaactttagcgtctttgagtagc

SEQ ID NO: 233851 - DNA, 30 bp, Artificial Sequence
  Synthetic oligonucleotide
gcattgttagctgcggaacttaaacgtagc

SEQ ID NO: 233852 - DNA, 30 bp, Artificial Sequence
  Synthetic oligonucleotide
cgcgatgagggcttcaaatgcgtacgtagc

SEQ ID NO: 233853 - DNA, 30 bp, Artificial Sequence
  Synthetic oligonucleotide
gtgttccgtagtatgtgtcagcatcgtagc

SEQ ID NO: 233854 - DNA, 30 bp, Artificial Sequence
  Synthetic oligonucleotide
atgctagtgggcaacccccgctttcgtagc

SEQ ID NO: 233855 - DNA, 30 bp, Artificial Sequence
  Synthetic oligonucleotide
atacatcggcgattcataaggcaaggtagc

SEQ ID NO: 233856 - DNA, 30 bp, Artificial Sequence
  Synthetic oligonucleotide
gaaagctcgcagagaggacagctgggtagc

SEQ ID NO: 233857 - DNA, 30 bp, Artificial Sequence
  Synthetic oligonucleotide
agattatccccgtctttcggctaatgtagc

SEQ ID NO: 233858 - DNA, 30 bp, Artificial Sequence
  Synthetic oligonucleotide
gagtggtctaaaatagaccaaatatgtagc

SEQ ID NO: 233859 - DNA, 30 bp, Artificial Sequence
  Synthetic oligonucleotide
acccgatcagatttttcacgcccctgtagc

SEQ ID NO: 233860 - DNA, 30 bp, Artificial Sequence
  Synthetic oligonucleotide
gcgatggctttagtacgatgctagtgtagc

SEQ ID NO: 233861 - DNA, 30 bp, Artificial Sequence
  Synthetic oligonucleotide
aagtgagcgagagtagcaaaaccttgtagc

SEQ ID NO: 233862 - DNA, 30 bp, Artificial Sequence
  Synthetic oligonucleotide
ttgggtggagttctcagggcgttttgtagc

SEQ ID NO: 233863 - DNA, 30 bp, Artificial Sequence
  Synthetic oligonucleotide
aagatcgtcacacgcgaagtggtcattagc

SEQ ID NO: 233864 - DNA, 30 bp, Artificial Sequence
  Synthetic oligonucleotide
gacatgatcagctagtctaaattcattagc

SEQ ID NO: 233865 - DNA, 30 bp, Artificial Sequence
  Synthetic oligonucleotide
gcatcaataggcagtccgtttagtattagc

SEQ ID NO: 233866 - DNA, 30 bp, Artificial Sequence
  Synthetic oligonucleotide
aagtgttttaggtgcaaggcagttattagc

SEQ ID NO: 233867 - DNA, 30 bp, Artificial Sequence
  Synthetic oligonucleotide
taccacaccaagttctacgaaacacttagc

SEQ ID NO: 233868 - DNA, 30 bp, Artificial Sequence
  Synthetic oligonucleotide
tcctaggcccacctatgcttgacccttagc

SEQ ID NO: 233869 - DNA, 30 bp, Artificial Sequence
  Synthetic oligonucleotide
agagtgtgggtaatatgtaaaggccttagc

SEQ ID NO: 233870 - DNA, 30 bp, Artificial Sequence
  Synthetic oligonucleotide
gacctggcaggacaacaccagctgcttagc

SEQ ID NO: 233871 - DNA, 30 bp, Artificial Sequence
  Synthetic oligonucleotide
tcacaacaaaacctgggatatattcttagc

SEQ ID NO: 233872 - DNA, 30 bp, Artificial Sequence
  Synthetic oligonucleotide
tatcggggttctcgaatgatccacgttagc

SEQ ID NO: 233873 - DNA, 30 bp, Artificial Sequence
  Synthetic oligonucleotide
ctgtagtagcagggtcagagtgccgttagc

SEQ ID NO: 233874 - DNA, 30 bp, Artificial Sequence
  Synthetic oligonucleotide
gggtcagttcaatttggataaatcgttagc

SEQ ID NO: 233875 - DNA, 30 bp, Artificial Sequence
  Synthetic oligonucleotide
taatatttacgaactaacatcaaatttagc

SEQ ID NO: 233876 - DNA, 30 bp, Artificial Sequence
  Synthetic oligonucleotide
gtttaacagcggaacgaacggaaatttagc

SEQ ID NO: 233877 - DNA, 30 bp, Artificial Sequence
  Synthetic oligonucleotide
tcgcctgtataagaatacaccagatttagc

SEQ ID NO: 233878 - DNA, 30 bp, Artificial Sequence
  Synthetic oligonucleotide
acatttgaggatacatatgactagtttagc

SEQ ID NO: 233879 - DNA, 30 bp, Artificial Sequence
  Synthetic oligonucleotide
tcaggagatcggtcatgcattcggtttagc

SEQ ID NO: 233880 - DNA, 30 bp, Artificial Sequence
  Synthetic oligonucleotide
agactcacatcttggtgaatttggtttagc

SEQ ID NO: 233881 - DNA, 30 bp, Artificial Sequence
  Synthetic oligonucleotide
caaggcgttaattggtctcgagcttttagc

SEQ ID NO: 233882 - DNA, 30 bp, Artificial Sequence
  Synthetic oligonucleotide
gacaccaaccggtacaaagcaggaaaacgc

SEQ ID NO: 233883 - DNA, 30 bp, Artificial Sequence
  Synthetic oligonucleotide
cgcgtttggcgatggctgaggaataaacgc

SEQ ID NO: 233884 - DNA, 30 bp, Artificial Sequence
  Synthetic oligonucleotide
ttattatgcctaaatgcattgacccaacgc

SEQ ID NO: 233885 - DNA, 30 bp, Artificial Sequence
  Synthetic oligonucleotide
aggcggtatcgaaagttttccgatcaacgc

SEQ ID NO: 233886 - DNA, 30 bp, Artificial Sequence
  Synthetic oligonucleotide
tataaaattggaataaagggcaaagaacgc

SEQ ID NO: 233887 - DNA, 30 bp, Artificial Sequence
  Synthetic oligonucleotide
ctatcgggagcagtctataagggggaacgc

SEQ ID NO: 233888 - DNA, 30 bp, Artificial Sequence
  Synthetic oligonucleotide
aagttagaggatctgaggggtgtggaacgc

SEQ ID NO: 233889 - DNA, 30 bp, Artificial Sequence
  Synthetic oligonucleotide
cctaggccaagacacgtcccaatataacgc

SEQ ID NO: 233890 - DNA, 30 bp, Artificial Sequence
  Synthetic oligonucleotide
cattataaggctacccgtgcaacgtaacgc

SEQ ID NO: 233891 - DNA, 30 bp, Artificial Sequence
  Synthetic oligonucleotide
atgtgacagtttgggtccccgtcttaacgc

SEQ ID NO: 233892 - DNA, 30 bp, Artificial Sequence
  Synthetic oligonucleotide
cgactaatacaatttaacttgtcttaacgc

SEQ ID NO: 233893 - DNA, 30 bp, Artificial Sequence
  Synthetic oligonucleotide
actgaaaagatcattcctggcttttaacgc

SEQ ID NO: 233894 - DNA, 30 bp, Artificial Sequence
  Synthetic oligonucleotide
gtggtcttgttcgatctcgttcaaacacgc

SEQ ID NO: 233895 - DNA, 30 bp, Artificial Sequence
  Synthetic oligonucleotide
gggtttatagacgatgacaagcacacacgc

SEQ ID NO: 233896 - DNA, 30 bp, Artificial Sequence
  Synthetic oligonucleotide
gataccgactaaagtaccgactcgacacgc

SEQ ID NO: 233897 - DNA, 30 bp, Artificial Sequence
  Synthetic oligonucleotide
agtaggtaaagacgtgaggtcactacacgc

SEQ ID NO: 233898 - DNA, 30 bp, Artificial Sequence
  Synthetic oligonucleotide
cgaaaggtcgccccgggaacgcaaccacgc

SEQ ID NO: 233899 - DNA, 30 bp, Artificial Sequence
  Synthetic oligonucleotide
aacagaaggtccgtctttgccgtaccacgc

SEQ ID NO: 233900 - DNA, 30 bp, Artificial Sequence
  Synthetic oligonucleotide
cgttaagaggtccaccatggtcgcccacgc

SEQ ID NO: 233901 - DNA, 30 bp, Artificial Sequence
  Synthetic oligonucleotide
aggtttactttttcgcatgtaacgccacgc

SEQ ID NO: 233902 - DNA, 30 bp, Artificial Sequence
  Synthetic oligonucleotide
gctataggacagttgagttactcagcacgc

SEQ ID NO: 233903 - DNA, 30 bp, Artificial Sequence
  Synthetic oligonucleotide
cctcttcgatgagtgagtcgtagagcacgc

SEQ ID NO: 233904 - DNA, 30 bp, Artificial Sequence
  Synthetic oligonucleotide
agcatgggacaaatcgccccattagcacgc

SEQ ID NO: 233905 - DNA, 30 bp, Artificial Sequence
  Synthetic oligonucleotide
attacggtgtctgggtcagcatgatcacgc

SEQ ID NO: 233906 - DNA, 30 bp, Artificial Sequence
  Synthetic oligonucleotide
agtggtgggacagtgtcagtagtatcacgc

SEQ ID NO: 233907 - DNA, 30 bp, Artificial Sequence
  Synthetic oligonucleotide
ttacgcaaaacgttataagggttaagacgc

SEQ ID NO: 233908 - DNA, 30 bp, Artificial Sequence
  Synthetic oligonucleotide
ataacgcgtcagcggcggaaagacatacgc

SEQ ID NO: 233909 - DNA, 31 bp, Artificial Sequence
  Synthetic oligonucleotide
cacacgataactgttattgtagaagatacgc

SEQ ID NO: 233910 - DNA, 30 bp, Artificial Sequence
  Synthetic oligonucleotide
tcagctcttagccttggtcatactatacgc

SEQ ID NO: 233911 - DNA, 30 bp, Artificial Sequence
  Synthetic oligonucleotide
gaccagtgagtagacttaccgagtatacgc

SEQ ID NO: 233912 - DNA, 30 bp, Artificial Sequence
  Synthetic oligonucleotide
tctggctcgtccttctgacgagaactacgc

SEQ ID NO: 233913 - DNA, 30 bp, Artificial Sequence
  Synthetic oligonucleotide
cgccctacagtgcttaaactcgcactacgc

SEQ ID NO: 233914 - DNA, 30 bp, Artificial Sequence
  Synthetic oligonucleotide
tcccgagaaacttgtcagcgtgtcctacgc

SEQ ID NO: 233915 - DNA, 29 bp, Artificial Sequence
  Synthetic oligonucleotide
cagattcatagtgttaactcatgctacgc

SEQ ID NO: 233916 - DNA, 30 bp, Artificial Sequence
  Synthetic oligonucleotide
gtggtacataagcgggttccacctctacgc

SEQ ID NO: 233917 - DNA, 30 bp, Artificial Sequence
  Synthetic oligonucleotide
cattgccaagggaagggctttggtctacgc

SEQ ID NO: 233918 - DNA, 30 bp, Artificial Sequence
  Synthetic oligonucleotide
cgatcgaaagtagacaactagctagtacgc

SEQ ID NO: 233919 - DNA, 30 bp, Artificial Sequence
  Synthetic oligonucleotide
cttgggatggtactagcgcgaacggtacgc

SEQ ID NO: 233920 - DNA, 30 bp, Artificial Sequence
  Synthetic oligonucleotide
tctgtactcggataacggctcgcattacgc

SEQ ID NO: 233921 - DNA, 30 bp, Artificial Sequence
  Synthetic oligonucleotide
ttacggatcgggttttcggcttacttacgc

SEQ ID NO: 233922 - DNA, 30 bp, Artificial Sequence
  Synthetic oligonucleotide
tgctgagaccctcgagcggaagagttacgc

SEQ ID NO: 233923 - DNA, 30 bp, Artificial Sequence
  Synthetic oligonucleotide
gtaccatccaagaatttcggtgagttacgc

SEQ ID NO: 233924 - DNA, 30 bp, Artificial Sequence
  Synthetic oligonucleotide
ggattcgatcaacgaaaacgcggtttacgc

SEQ ID NO: 233925 - DNA, 30 bp, Artificial Sequence
  Synthetic oligonucleotide
caggtacgttagtgtgtgcgaaacaaccgc

SEQ ID NO: 233926 - DNA, 30 bp, Artificial Sequence
  Synthetic oligonucleotide
gttttgtttgaccaaatcgaagtacaccgc

SEQ ID NO: 233927 - DNA, 30 bp, Artificial Sequence
  Synthetic oligonucleotide
cctgcatcgggtcaaataaactgccaccgc

SEQ ID NO: 233928 - DNA, 30 bp, Artificial Sequence
  Synthetic oligonucleotide
gactctatgggcatgatgaccttccaccgc

SEQ ID NO: 233929 - DNA, 30 bp, Artificial Sequence
  Synthetic oligonucleotide
cgctgagatacctgtattcaaacgcaccgc

SEQ ID NO: 233930 - DNA, 30 bp, Artificial Sequence
  Synthetic oligonucleotide
actgatcagacaaaaagtactcgtcaccgc

SEQ ID NO: 233931 - DNA, 30 bp, Artificial Sequence
  Synthetic oligonucleotide
ggctgtgtttcagtcgattgatctgaccgc

SEQ ID NO: 233932 - DNA, 30 bp, Artificial Sequence
  Synthetic oligonucleotide
atgtgctaggcctattccatgatataccgc

SEQ ID NO: 233933 - DNA, 30 bp, Artificial Sequence
  Synthetic oligonucleotide
gaaccgtttccgaagagacgggtctaccgc

SEQ ID NO: 233934 - DNA, 30 bp, Artificial Sequence
  Synthetic oligonucleotide
ctgaaattaccggacaaccaatgttaccgc

SEQ ID NO: 233935 - DNA, 30 bp, Artificial Sequence
  Synthetic oligonucleotide
caccactcggtgtgtatgaactgttaccgc

SEQ ID NO: 233936 - DNA, 30 bp, Artificial Sequence
  Synthetic oligonucleotide
catttaggcaccgtgatacctgtttaccgc

SEQ ID NO: 233937 - DNA, 30 bp, Artificial Sequence
  Synthetic oligonucleotide
actttctaaccgaatgcgccttacacccgc

SEQ ID NO: 233938 - DNA, 30 bp, Artificial Sequence
  Synthetic oligonucleotide
cacgattgataggcgcaaaatcggacccgc

SEQ ID NO: 233939 - DNA, 30 bp, Artificial Sequence
  Synthetic oligonucleotide
ccgactcacaagaaaagtgggggaccccgc

SEQ ID NO: 233940 - DNA, 30 bp, Artificial Sequence
  Synthetic oligonucleotide
ttaatagcgtagtagttgaaaaatgcccgc

SEQ ID NO: 233941 - DNA, 30 bp, Artificial Sequence
  Synthetic oligonucleotide
aacctttcaaggtccctatgttctgcccgc

SEQ ID NO: 233942 - DNA, 30 bp, Artificial Sequence
  Synthetic oligonucleotide
atcctacaaacagtaggcaattttgcccgc

SEQ ID NO: 233943 - DNA, 30 bp, Artificial Sequence
  Synthetic oligonucleotide
gcttgtgggttcgtacatgaggtatcccgc

SEQ ID NO: 233944 - DNA, 30 bp, Artificial Sequence
  Synthetic oligonucleotide
tgtcccaccatcgctacgaaacattcccgc

SEQ ID NO: 233945 - DNA, 30 bp, Artificial Sequence
  Synthetic oligonucleotide
gctaatgtcagctcgcctacgcaacgccgc

SEQ ID NO: 233946 - DNA, 30 bp, Artificial Sequence
  Synthetic oligonucleotide
tcgcggatttgtttaggaagagtaggccgc

SEQ ID NO: 233947 - DNA, 30 bp, Artificial Sequence
  Synthetic oligonucleotide
tccggcggtgccgtgttggcattaggccgc

SEQ ID NO: 233948 - DNA, 30 bp, Artificial Sequence
  Synthetic oligonucleotide
atacagaggtatcaatcacagggcggccgc

SEQ ID NO: 233949 - DNA, 30 bp, Artificial Sequence
  Synthetic oligonucleotide
agaggacacatcgcaaagcgattcggccgc

SEQ ID NO: 233950 - DNA, 30 bp, Artificial Sequence
  Synthetic oligonucleotide
tatcaaaagagagctaaacatccatgccgc

SEQ ID NO: 233951 - DNA, 30 bp, Artificial Sequence
  Synthetic oligonucleotide
aagagcagctggcgttgagacagatgccgc

SEQ ID NO: 233952 - DNA, 30 bp, Artificial Sequence
  Synthetic oligonucleotide
atgccagtaacacgtttttcgtactgccgc

SEQ ID NO: 233953 - DNA, 30 bp, Artificial Sequence
  Synthetic oligonucleotide
aagctctgtacagagttgtctaggtgccgc

SEQ ID NO: 233954 - DNA, 30 bp, Artificial Sequence
  Synthetic oligonucleotide
ggataaaaagtctcgaagcacacttgccgc

SEQ ID NO: 233955 - DNA, 30 bp, Artificial Sequence
  Synthetic oligonucleotide
ccaaaatgataccgatcgggtagcatccgc

SEQ ID NO: 233956 - DNA, 30 bp, Artificial Sequence
  Synthetic oligonucleotide
tactattactccagactagtctgtatccgc

SEQ ID NO: 233957 - DNA, 30 bp, Artificial Sequence
  Synthetic oligonucleotide
ccgggccccagcggtttagtcgaactccgc

SEQ ID NO: 233958 - DNA, 30 bp, Artificial Sequence
  Synthetic oligonucleotide
agaagttccatagagtgcccgtgtctccgc

SEQ ID NO: 233959 - DNA, 30 bp, Artificial Sequence
  Synthetic oligonucleotide
ctcaaagtacatagtatttatgtggtccgc

SEQ ID NO: 233960 - DNA, 30 bp, Artificial Sequence
  Synthetic oligonucleotide
agtaattccgacataagtattcaaaagcgc

SEQ ID NO: 233961 - DNA, 30 bp, Artificial Sequence
  Synthetic oligonucleotide
catggcgcaaccgtcaatgctgcaaagcgc

SEQ ID NO: 233962 - DNA, 30 bp, Artificial Sequence
  Synthetic oligonucleotide
tcattgatgaacaggaaggcgtgaaagcgc

SEQ ID NO: 233963 - DNA, 30 bp, Artificial Sequence
  Synthetic oligonucleotide
ggctgaaagcaattatggggttgcaagcgc

SEQ ID NO: 233964 - DNA, 30 bp, Artificial Sequence
  Synthetic oligonucleotide
tcaccgacaaggtcactataatcagagcgc

SEQ ID NO: 233965 - DNA, 30 bp, Artificial Sequence
  Synthetic oligonucleotide
acggcaaactgctgggaactgggcgagcgc

SEQ ID NO: 233966 - DNA, 30 bp, Artificial Sequence
  Synthetic oligonucleotide
gatgacacatcgtgcctaatacatgagcgc

SEQ ID NO: 233967 - DNA, 30 bp, Artificial Sequence
  Synthetic oligonucleotide
acgtacaggtgatcatagataggatagcgc

SEQ ID NO: 233968 - DNA, 30 bp, Artificial Sequence
  Synthetic oligonucleotide
gcagttggtagcaaatcctacgcctagcgc

SEQ ID NO: 233969 - DNA, 30 bp, Artificial Sequence
  Synthetic oligonucleotide
gcatagtataggtgctacaaatgttagcgc

SEQ ID NO: 233970 - DNA, 30 bp, Artificial Sequence
  Synthetic oligonucleotide
cagcccggtcgtagaagaagacacacgcgc

SEQ ID NO: 233971 - DNA, 30 bp, Artificial Sequence
  Synthetic oligonucleotide
agatgtcacatagttgagaggaggacgcgc

SEQ ID NO: 233972 - DNA, 30 bp, Artificial Sequence
  Synthetic oligonucleotide
aagtaatacgggttggtttgaaatacgcgc

SEQ ID NO: 233973 - DNA, 30 bp, Artificial Sequence
  Synthetic oligonucleotide
gtgtgcggcgggccttcgatccgtacgcgc

SEQ ID NO: 233974 - DNA, 30 bp, Artificial Sequence
  Synthetic oligonucleotide
tagctttcccagattacaagtgacccgcgc

SEQ ID NO: 233975 - DNA, 30 bp, Artificial Sequence
  Synthetic oligonucleotide
tgaaataatgaccttatgtcctccccgcgc

SEQ ID NO: 233976 - DNA, 30 bp, Artificial Sequence
  Synthetic oligonucleotide
tttaagaagccaaaccctcgcattccgcgc

SEQ ID NO: 233977 - DNA, 30 bp, Artificial Sequence
  Synthetic oligonucleotide
agcgagggtaagcacgtgtgacttccgcgc

SEQ ID NO: 233978 - DNA, 30 bp, Artificial Sequence
  Synthetic oligonucleotide
ctcccgcgcgattcgccgatggactcgcgc

SEQ ID NO: 233979 - DNA, 30 bp, Artificial Sequence
  Synthetic oligonucleotide
gcccattttatggggaaagaaccctcgcgc

SEQ ID NO: 233980 - DNA, 30 bp, Artificial Sequence
  Synthetic oligonucleotide
tcttccggtcaggaccttgccatctcgcgc

SEQ ID NO: 233981 - DNA, 30 bp, Artificial Sequence
  Synthetic oligonucleotide
tgaggcggtcggccactctgattgtcgcgc

SEQ ID NO: 233982 - DNA, 30 bp, Artificial Sequence
  Synthetic oligonucleotide
taaattgttctgacacgtttcgaaaggcgc

SEQ ID NO: 233983 - DNA, 30 bp, Artificial Sequence
  Synthetic oligonucleotide
tgataagtgtccgtcgttatctcacggcgc

SEQ ID NO: 233984 - DNA, 30 bp, Artificial Sequence
  Synthetic oligonucleotide
tatgtaccgtcaggccttattctagggcgc

SEQ ID NO: 233985 - DNA, 30 bp, Artificial Sequence
  Synthetic oligonucleotide
agccaagaataacaaggcaccgtggggcgc

SEQ ID NO: 233986 - DNA, 30 bp, Artificial Sequence
  Synthetic oligonucleotide
ggtgttatgcaaaaaacgtattaatggcgc

SEQ ID NO: 233987 - DNA, 30 bp, Artificial Sequence
  Synthetic oligonucleotide
cagtcaaccggtttggacatgtcatggcgc

SEQ ID NO: 233988 - DNA, 30 bp, Artificial Sequence
  Synthetic oligonucleotide
taatatggtatagtggtatctggctggcgc

SEQ ID NO: 233989 - DNA, 30 bp, Artificial Sequence
  Synthetic oligonucleotide
caatacagatgagtggacggggtctggcgc

SEQ ID NO: 233990 - DNA, 30 bp, Artificial Sequence
  Synthetic oligonucleotide
cggctatcgttagtgattaacgattggcgc

SEQ ID NO: 233991 - DNA, 30 bp, Artificial Sequence
  Synthetic oligonucleotide
gttcgagcgtccaggccacccgattggcgc

SEQ ID NO: 233992 - DNA, 30 bp, Artificial Sequence
  Synthetic oligonucleotide
ggagcttgattccgggggctggattggcgc

SEQ ID NO: 233993 - DNA, 30 bp, Artificial Sequence
  Synthetic oligonucleotide
aaagcttccccggaaaggcgcgaaatgcgc

SEQ ID NO: 233994 - DNA, 30 bp, Artificial Sequence
  Synthetic oligonucleotide
gatctgaaacataaaattagaagaatgcgc

SEQ ID NO: 233995 - DNA, 30 bp, Artificial Sequence
  Synthetic oligonucleotide
ggttaatatcaatcatgcgagagaatgcgc

SEQ ID NO: 233996 - DNA, 30 bp, Artificial Sequence
  Synthetic oligonucleotide
caggctagagactagcgtaaactcatgcgc

SEQ ID NO: 233997 - DNA, 30 bp, Artificial Sequence
  Synthetic oligonucleotide
gactgtgtccagtggagcccggagatgcgc

SEQ ID NO: 233998 - DNA, 30 bp, Artificial Sequence
  Synthetic oligonucleotide
ctgcacgggcatttacatcaggggatgcgc

SEQ ID NO: 233999 - DNA, 30 bp, Artificial Sequence
  Synthetic oligonucleotide
acgggtgaaactccaataccatgtatgcgc

SEQ ID NO: 234000 - DNA, 30 bp, Artificial Sequence
  Synthetic oligonucleotide
agacacgagttttagtaattcattatgcgc

SEQ ID NO: 234001 - DNA, 30 bp, Artificial Sequence
  Synthetic oligonucleotide
ggtcgtcgttggcgggccgatccactgcgc

SEQ ID NO: 234002 - DNA, 30 bp, Artificial Sequence
  Synthetic oligonucleotide
cagtctcgaggtggggattcatgcctgcgc

SEQ ID NO: 234003 - DNA, 30 bp, Artificial Sequence
  Synthetic oligonucleotide
gattactaagctacttctccagaagtgcgc

SEQ ID NO: 234004 - DNA, 30 bp, Artificial Sequence
  Synthetic oligonucleotide
aaggtatcatagctcgaccccaaattgcgc

SEQ ID NO: 234005 - DNA, 30 bp, Artificial Sequence
  Synthetic oligonucleotide
ggataaggtgaatctttaaactaattgcgc

SEQ ID NO: 234006 - DNA, 30 bp, Artificial Sequence
  Synthetic oligonucleotide
atttgtaaattgctttacccgatattgcgc

SEQ ID NO: 234007 - DNA, 30 bp, Artificial Sequence
  Synthetic oligonucleotide
gtgagagaaggggggcccagtctattgcgc

SEQ ID NO: 234008 - DNA, 30 bp, Artificial Sequence
  Synthetic oligonucleotide
cattactagtggtaagcgctaagcttgcgc

SEQ ID NO: 234009 - DNA, 30 bp, Artificial Sequence
  Synthetic oligonucleotide
tacggttacgccatctagcagccgttgcgc

SEQ ID NO: 234010 - DNA, 30 bp, Artificial Sequence
  Synthetic oligonucleotide
gtgccccaacggacgccggttgcaaatcgc

SEQ ID NO: 234011 - DNA, 30 bp, Artificial Sequence
  Synthetic oligonucleotide
attagcttacatcgtgccttgataaatcgc

SEQ ID NO: 234012 - DNA, 30 bp, Artificial Sequence
  Synthetic oligonucleotide
caaattgcgatcaacatatatgaacatcgc

SEQ ID NO: 234013 - DNA, 30 bp, Artificial Sequence
  Synthetic oligonucleotide
gaggactggacatccagcaagccacatcgc

SEQ ID NO: 234014 - DNA, 30 bp, Artificial Sequence
  Synthetic oligonucleotide
tatctgaagtttaatctataactacatcgc

SEQ ID NO: 234015 - DNA, 30 bp, Artificial Sequence
  Synthetic oligonucleotide
ctgaagagcggggcatcctctccccatcgc

SEQ ID NO: 234016 - DNA, 30 bp, Artificial Sequence
  Synthetic oligonucleotide
ttctagttttggcccgtccaccggcatcgc

SEQ ID NO: 234017 - DNA, 31 bp, Artificial Sequence
  Synthetic oligonucleotide
gagactcgaaaagggaattacgctgcatcgc

SEQ ID NO: 234018 - DNA, 30 bp, Artificial Sequence
  Synthetic oligonucleotide
tatcctaacgaaacgggctcacatcatcgc

SEQ ID NO: 234019 - DNA, 30 bp, Artificial Sequence
  Synthetic oligonucleotide
cgagttagtcgccccagatggcgtcatcgc

SEQ ID NO: 234020 - DNA, 30 bp, Artificial Sequence
  Synthetic oligonucleotide
tcaggaaccacaaaagtgctgcacgatcgc

SEQ ID NO: 234021 - DNA, 30 bp, Artificial Sequence
  Synthetic oligonucleotide
cgcttgctccgtttgacaaagggcgatcgc

SEQ ID NO: 234022 - DNA, 30 bp, Artificial Sequence
  Synthetic oligonucleotide
tgcacgacagagagagtacagtgcgatcgc

SEQ ID NO: 234023 - DNA, 30 bp, Artificial Sequence
  Synthetic oligonucleotide
gtatcattattgcaccgatataggtatcgc

SEQ ID NO: 234024 - DNA, 30 bp, Artificial Sequence
  Synthetic oligonucleotide
attgggacaagtaggcttgctgggtatcgc

SEQ ID NO: 234025 - DNA, 30 bp, Artificial Sequence
  Synthetic oligonucleotide
ctgttgggtcaaaaccagacggattatcgc

SEQ ID NO: 234026 - DNA, 30 bp, Artificial Sequence
  Synthetic oligonucleotide
aaggtgattggggtgtacgtcggcactcgc

SEQ ID NO: 234027 - DNA, 30 bp, Artificial Sequence
  Synthetic oligonucleotide
ggtgaaatcggccacagctttatgactcgc

SEQ ID NO: 234028 - DNA, 30 bp, Artificial Sequence
  Synthetic oligonucleotide
tggaccgtggtgtaagcaagggatcctcgc

SEQ ID NO: 234029 - DNA, 30 bp, Artificial Sequence
  Synthetic oligonucleotide
gggtccgaaaggtagtttaatgaagctcgc

SEQ ID NO: 234030 - DNA, 30 bp, Artificial Sequence
  Synthetic oligonucleotide
ttgaaacagggaacatgggtctaagctcgc

SEQ ID NO: 234031 - DNA, 30 bp, Artificial Sequence
  Synthetic oligonucleotide
atcgtacagcctaattctcaatgagctcgc

SEQ ID NO: 234032 - DNA, 30 bp, Artificial Sequence
  Synthetic oligonucleotide
atgctcagtaacgtttgaaaactagctcgc

SEQ ID NO: 234033 - DNA, 30 bp, Artificial Sequence
  Synthetic oligonucleotide
gcgcgtcgctgtgacaatatgacggctcgc

SEQ ID NO: 234034 - DNA, 30 bp, Artificial Sequence
  Synthetic oligonucleotide
gcaagctaaggcattctgagagcctctcgc

SEQ ID NO: 234035 - DNA, 30 bp, Artificial Sequence
  Synthetic oligonucleotide
agtaagtcgggtacactacgatgctctcgc

SEQ ID NO: 234036 - DNA, 30 bp, Artificial Sequence
  Synthetic oligonucleotide
aacagaatcactaccggatgctattctcgc

SEQ ID NO: 234037 - DNA, 30 bp, Artificial Sequence
  Synthetic oligonucleotide
cggccagacgtttgttgatttacgagtcgc

SEQ ID NO: 234038 - DNA, 30 bp, Artificial Sequence
  Synthetic oligonucleotide
aacctgggatatatattgcccgtgagtcgc

SEQ ID NO: 234039 - DNA, 30 bp, Artificial Sequence
  Synthetic oligonucleotide
tgtaataagacattggtgaatcatagtcgc

SEQ ID NO: 234040 - DNA, 30 bp, Artificial Sequence
  Synthetic oligonucleotide
ctagcaggacgtttagtcctgagtagtcgc

SEQ ID NO: 234041 - DNA, 30 bp, Artificial Sequence
  Synthetic oligonucleotide
caggcaatgcggatcactgtcgcgcgtcgc

SEQ ID NO: 234042 - DNA, 30 bp, Artificial Sequence
  Synthetic oligonucleotide
tcagagtgaggaaaattgattaggcgtcgc

SEQ ID NO: 234043 - DNA, 30 bp, Artificial Sequence
  Synthetic oligonucleotide
acctttagcaggtagtggctaatgcgtcgc

SEQ ID NO: 234044 - DNA, 30 bp, Artificial Sequence
  Synthetic oligonucleotide
cggggtcctgggagccaccgacgaggtcgc

SEQ ID NO: 234045 - DNA, 30 bp, Artificial Sequence
  Synthetic oligonucleotide
ttggacggccctctacatcgaaacggtcgc

SEQ ID NO: 234046 - DNA, 30 bp, Artificial Sequence
  Synthetic oligonucleotide
cctaaggtaagtggattaatactatgtcgc

SEQ ID NO: 234047 - DNA, 30 bp, Artificial Sequence
  Synthetic oligonucleotide
tttcgaaatctaccttcgcattcgtgtcgc

SEQ ID NO: 234048 - DNA, 30 bp, Artificial Sequence
  Synthetic oligonucleotide
agggggttggggttttcttaggattgtcgc

SEQ ID NO: 234049 - DNA, 30 bp, Artificial Sequence
  Synthetic oligonucleotide
cagtcgtgtcttgtagtaaagatttgtcgc

SEQ ID NO: 234050 - DNA, 30 bp, Artificial Sequence
  Synthetic oligonucleotide
ctggtccgagaaccagttctcggaattcgc

SEQ ID NO: 234051 - DNA, 30 bp, Artificial Sequence
  Synthetic oligonucleotide
aatgtacaccgatgggagatagccattcgc

SEQ ID NO: 234052 - DNA, 30 bp, Artificial Sequence
  Synthetic oligonucleotide
cggcaacttatgccatagcggaggattcgc

SEQ ID NO: 234053 - DNA, 30 bp, Artificial Sequence
  Synthetic oligonucleotide
caaccgaaacgatcagtggcagttattcgc

SEQ ID NO: 234054 - DNA, 30 bp, Artificial Sequence
  Synthetic oligonucleotide
tttccagagtgtatacggagtggacttcgc

SEQ ID NO: 234055 - DNA, 30 bp, Artificial Sequence
  Synthetic oligonucleotide
cgcccagcagtcaataatgtacagcttcgc

SEQ ID NO: 234056 - DNA, 30 bp, Artificial Sequence
  Synthetic oligonucleotide
tcagaaactaaaggaggacgaactcttcgc

SEQ ID NO: 234057 - DNA, 30 bp, Artificial Sequence
  Synthetic oligonucleotide
gaggaaagggtattcccgctgcaagttcgc

SEQ ID NO: 234058 - DNA, 30 bp, Artificial Sequence
  Synthetic oligonucleotide
tccctgtgcttttggggtcgtcaatttcgc

SEQ ID NO: 234059 - DNA, 30 bp, Artificial Sequence
  Synthetic oligonucleotide
tatgggctgtttggttaggtccaaaaaggc

SEQ ID NO: 234060 - DNA, 30 bp, Artificial Sequence
  Synthetic oligonucleotide
ggtcgcggtgagtgtccatcataaaaaggc

SEQ ID NO: 234061 - DNA, 30 bp, Artificial Sequence
  Synthetic oligonucleotide
gtgtgagttgacaaggtattgccaaaaggc

SEQ ID NO: 234062 - DNA, 30 bp, Artificial Sequence
  Synthetic oligonucleotide
tactagacgccgccgaaaacagagaaaggc

SEQ ID NO: 234063 - DNA, 30 bp, Artificial Sequence
  Synthetic oligonucleotide
taatcgcctgtttttgttcactaccaaggc

SEQ ID NO: 234064 - DNA, 30 bp, Artificial Sequence
  Synthetic oligonucleotide
taacggcactaacgctgacaagcagaaggc

SEQ ID NO: 234065 - DNA, 30 bp, Artificial Sequence
  Synthetic oligonucleotide
gaaatgcaaggcagcaattccaccgaaggc

SEQ ID NO: 234066 - DNA, 30 bp, Artificial Sequence
  Synthetic oligonucleotide
cagtaccctggctactcgtggaccgaaggc

SEQ ID NO: 234067 - DNA, 30 bp, Artificial Sequence
  Synthetic oligonucleotide
gacagcagtccgtttatggtagccgaaggc

SEQ ID NO: 234068 - DNA, 30 bp, Artificial Sequence
  Synthetic oligonucleotide
cggtatttcaccgcgcaggtcagcgaaggc

SEQ ID NO: 234069 - DNA, 30 bp, Artificial Sequence
  Synthetic oligonucleotide
tcttcataatacaaggaatataaggaaggc

SEQ ID NO: 234070 - DNA, 30 bp, Artificial Sequence
  Synthetic oligonucleotide
gtgagcagcgaattagatgacaatgaaggc

SEQ ID NO: 234071 - DNA, 30 bp, Artificial Sequence
  Synthetic oligonucleotide
tcaaggcgcacaaaagtcagtcatgaaggc

SEQ ID NO: 234072 - DNA, 30 bp, Artificial Sequence
  Synthetic oligonucleotide
gatgtgtctatcaccggatacgcataaggc

SEQ ID NO: 234073 - DNA, 30 bp, Artificial Sequence
  Synthetic oligonucleotide
tcaggcgacgtattaacttactgataaggc

SEQ ID NO: 234074 - DNA, 30 bp, Artificial Sequence
  Synthetic oligonucleotide
tgaaacccgagggccgtccgtgtataaggc

SEQ ID NO: 234075 - DNA, 30 bp, Artificial Sequence
  Synthetic oligonucleotide
tccttgtgcacggcaaagttaggctaaggc

SEQ ID NO: 234076 - DNA, 30 bp, Artificial Sequence
  Synthetic oligonucleotide
gttaaggtccctgctagtgatccgtaaggc

SEQ ID NO: 234077 - DNA, 30 bp, Artificial Sequence
  Synthetic oligonucleotide
acgtatacccatgttgtggagtggtaaggc

SEQ ID NO: 234078 - DNA, 30 bp, Artificial Sequence
  Synthetic oligonucleotide
gcctgtcgaatgcaattagccgtgtaaggc

SEQ ID NO: 234079 - DNA, 30 bp, Artificial Sequence
  Synthetic oligonucleotide
gcagcgtgcttagcgtaacttaattaaggc

SEQ ID NO: 234080 - DNA, 30 bp, Artificial Sequence
  Synthetic oligonucleotide
ttggcgaatatactagtacgcccttaaggc

SEQ ID NO: 234081 - DNA, 30 bp, Artificial Sequence
  Synthetic oligonucleotide
gcactgttataagtgaactccataacaggc

SEQ ID NO: 234082 - DNA, 30 bp, Artificial Sequence
  Synthetic oligonucleotide
agtcagcaatcgtatccagagaacacaggc

SEQ ID NO: 234083 - DNA, 30 bp, Artificial Sequence
  Synthetic oligonucleotide
cttcaactacactagtatgtttatacaggc

SEQ ID NO: 234084 - DNA, 30 bp, Artificial Sequence
  Synthetic oligonucleotide
gaacgtctaagagcgaagtgttttacaggc

SEQ ID NO: 234085 - DNA, 30 bp, Artificial Sequence
  Synthetic oligonucleotide
cctcgggcattgtgccttatttacccaggc

SEQ ID NO: 234086 - DNA, 30 bp, Artificial Sequence
  Synthetic oligonucleotide
ggttatgcgccgatttcgtttggcccaggc

SEQ ID NO: 234087 - DNA, 30 bp, Artificial Sequence
  Synthetic oligonucleotide
agctaagatagccgcaatacgctcccaggc

SEQ ID NO: 234088 - DNA, 30 bp, Artificial Sequence
  Synthetic oligonucleotide
ctcgaacataccggggtatgtatgccaggc

SEQ ID NO: 234089 - DNA, 30 bp, Artificial Sequence
  Synthetic oligonucleotide
ctatctcgttagttgacctatgtagcaggc

SEQ ID NO: 234090 - DNA, 30 bp, Artificial Sequence
  Synthetic oligonucleotide
acaagcaacgtgttacaacttggggcaggc

SEQ ID NO: 234091 - DNA, 30 bp, Artificial Sequence
  Synthetic oligonucleotide
ggcacggcatattaagagtaaatggcaggc

SEQ ID NO: 234092 - DNA, 30 bp, Artificial Sequence
  Synthetic oligonucleotide
gacacattcggctacagattgtatgcaggc

SEQ ID NO: 234093 - DNA, 30 bp, Artificial Sequence
  Synthetic oligonucleotide
gttagagtatggatgatttctagtgcaggc

SEQ ID NO: 234094 - DNA, 31 bp, Artificial Sequence
  Synthetic oligonucleotide
gtcttacttcaatcggagtaacacatcaggc

SEQ ID NO: 234095 - DNA, 30 bp, Artificial Sequence
  Synthetic oligonucleotide
ggcttatgcgccgagagcaagcgatcaggc

SEQ ID NO: 234096 - DNA, 30 bp, Artificial Sequence
  Synthetic oligonucleotide
ggaggcttgagcttcctgtttagctcaggc

SEQ ID NO: 234097 - DNA, 30 bp, Artificial Sequence
  Synthetic oligonucleotide
gggagtgatctcgtagcctgcggctcaggc

SEQ ID NO: 234098 - DNA, 30 bp, Artificial Sequence
  Synthetic oligonucleotide
atcgctatttaagtacagggatggtcaggc

SEQ ID NO: 234099 - DNA, 30 bp, Artificial Sequence
  Synthetic oligonucleotide
gtgctaggatcctacgggggcgattcaggc

SEQ ID NO: 234100 - DNA, 30 bp, Artificial Sequence
  Synthetic oligonucleotide
cctatgagcatcttggcgggcttaagaggc

SEQ ID NO: 234101 - DNA, 30 bp, Artificial Sequence
  Synthetic oligonucleotide
gagcaacgcctgaagtttcggtggagaggc

SEQ ID NO: 234102 - DNA, 30 bp, Artificial Sequence
  Synthetic oligonucleotide
agcgtaacacgcagctagagtaggcgaggc

SEQ ID NO: 234103 - DNA, 30 bp, Artificial Sequence
  Synthetic oligonucleotide
ttagtcggtgaactgttaatgactcgaggc

SEQ ID NO: 234104 - DNA, 30 bp, Artificial Sequence
  Synthetic oligonucleotide
tcatggtgagttaacatggggaagggaggc

SEQ ID NO: 234105 - DNA, 30 bp, Artificial Sequence
  Synthetic oligonucleotide
gagtactaaaaacagtgaggctcgggaggc

SEQ ID NO: 234106 - DNA, 30 bp, Artificial Sequence
  Synthetic oligonucleotide
gtgaacggtgagtgatagatatatggaggc

SEQ ID NO: 234107 - DNA, 30 bp, Artificial Sequence
  Synthetic oligonucleotide
ttggtgggttggctcattattctatgaggc

SEQ ID NO: 234108 - DNA, 30 bp, Artificial Sequence
  Synthetic oligonucleotide
aggtagttctaaacgattagttgctgaggc

SEQ ID NO: 234109 - DNA, 30 bp, Artificial Sequence
  Synthetic oligonucleotide
ctgaggtcccgcgaatccgccgtctgaggc

SEQ ID NO: 234110 - DNA, 31 bp, Artificial Sequence
  Synthetic oligonucleotide
ttagtgcgagtttgagaaatgatattgaggc

SEQ ID NO: 234111 - DNA, 30 bp, Artificial Sequence
  Synthetic oligonucleotide
taaggtggaggcattcaagtgatttgaggc

SEQ ID NO: 234112 - DNA, 30 bp, Artificial Sequence
  Synthetic oligonucleotide
agctggagtagtactcgttttaacataggc

SEQ ID NO: 234113 - DNA, 30 bp, Artificial Sequence
  Synthetic oligonucleotide
gtgcggatcacggctgaaggatcgataggc

SEQ ID NO: 234114 - DNA, 30 bp, Artificial Sequence
  Synthetic oligonucleotide
ttaaggccgttacaactgagccgtataggc

SEQ ID NO: 234115 - DNA, 30 bp, Artificial Sequence
  Synthetic oligonucleotide
gccaggagcataactggtggtgaactaggc

SEQ ID NO: 234116 - DNA, 30 bp, Artificial Sequence
  Synthetic oligonucleotide
aggttcgccgtaacagaacgaattctaggc

SEQ ID NO: 234117 - DNA, 30 bp, Artificial Sequence
  Synthetic oligonucleotide
tgtacgacggcttatcagctgcaggtaggc

SEQ ID NO: 234118 - DNA, 30 bp, Artificial Sequence
  Synthetic oligonucleotide
taaaactgaaggcacgcgagactggtaggc

SEQ ID NO: 234119 - DNA, 30 bp, Artificial Sequence
  Synthetic oligonucleotide
aatctcggcccgtacgacatccatgtaggc

SEQ ID NO: 234120 - DNA, 30 bp, Artificial Sequence
  Synthetic oligonucleotide
ctgtgaaggaagaagaattacccattaggc

SEQ ID NO: 234121 - DNA, 30 bp, Artificial Sequence
  Synthetic oligonucleotide
caacactcacgaatattccggtaaaacggc

SEQ ID NO: 234122 - DNA, 30 bp, Artificial Sequence
  Synthetic oligonucleotide
tctggagtaaaaaagacagggcgaaacggc

SEQ ID NO: 234123 - DNA, 30 bp, Artificial Sequence
  Synthetic oligonucleotide
cgatatatacccgggtaccttccgaacggc

SEQ ID NO: 234124 - DNA, 30 bp, Artificial Sequence
  Synthetic oligonucleotide
tgagtcggcaccggggacctggataacggc

SEQ ID NO: 234125 - DNA, 30 bp, Artificial Sequence
  Synthetic oligonucleotide
ggaaaggttagtaaagatgtgactaacggc

SEQ ID NO: 234126 - DNA, 30 bp, Artificial Sequence
  Synthetic oligonucleotide
ggttgctcataatcagtaacgaaacacggc

SEQ ID NO: 234127 - DNA, 30 bp, Artificial Sequence
  Synthetic oligonucleotide
gtagaagacgtcaaaatcaaaaaagacggc

SEQ ID NO: 234128 - DNA, 30 bp, Artificial Sequence
  Synthetic oligonucleotide
acggcacagttagcgcgcataggcgacggc

SEQ ID NO: 234129 - DNA, 30 bp, Artificial Sequence
  Synthetic oligonucleotide
gggagggcagatcgaagccaagaggacggc

SEQ ID NO: 234130 - DNA, 30 bp, Artificial Sequence
  Synthetic oligonucleotide
ccaaatactctggatgtacgccgggacggc

SEQ ID NO: 234131 - DNA, 30 bp, Artificial Sequence
  Synthetic oligonucleotide
aggtctgtacaggggaatcctcgggacggc

SEQ ID NO: 234132 - DNA, 30 bp, Artificial Sequence
  Synthetic oligonucleotide
aaggttacgcccttgtggctcactgacggc

SEQ ID NO: 234133 - DNA, 30 bp, Artificial Sequence
  Synthetic oligonucleotide
gcagtatccaagcccgatatgactgacggc

SEQ ID NO: 234134 - DNA, 30 bp, Artificial Sequence
  Synthetic oligonucleotide
gaacagggcatgggctggctccgtgacggc

SEQ ID NO: 234135 - DNA, 30 bp, Artificial Sequence
  Synthetic oligonucleotide
gatgtcgaggctcagtccgattactacggc

SEQ ID NO: 234136 - DNA, 30 bp, Artificial Sequence
  Synthetic oligonucleotide
atgtaagtgccagaccagagcccctacggc

SEQ ID NO: 234137 - DNA, 30 bp, Artificial Sequence
  Synthetic oligonucleotide
accacggggggcgttgacctcgcctacggc

SEQ ID NO: 234138 - DNA, 30 bp, Artificial Sequence
  Synthetic oligonucleotide
cagttgacaaggagggatgaccggtacggc

SEQ ID NO: 234139 - DNA, 30 bp, Artificial Sequence
  Synthetic oligonucleotide
agggcggtaaccaacctttctgagaccggc

SEQ ID NO: 234140 - DNA, 30 bp, Artificial Sequence
  Synthetic oligonucleotide
agcgagttagcctagccccgcaaccccggc

SEQ ID NO: 234141 - DNA, 30 bp, Artificial Sequence
  Synthetic oligonucleotide
cttgcgcagcggaagttgcgattccccggc

SEQ ID NO: 234142 - DNA, 30 bp, Artificial Sequence
  Synthetic oligonucleotide
tggcggaactcccgttactttccgcccggc

SEQ ID NO: 234143 - DNA, 30 bp, Artificial Sequence
  Synthetic oligonucleotide
agagagtggttcagagtaattactcccggc

SEQ ID NO: 234144 - DNA, 30 bp, Artificial Sequence
  Synthetic oligonucleotide
catattgaacaaaaaaaggctcgcgccggc

SEQ ID NO: 234145 - DNA, 30 bp, Artificial Sequence
  Synthetic oligonucleotide
cgtttcgattggtcgggcatggaggccggc

SEQ ID NO: 234146 - DNA, 30 bp, Artificial Sequence
  Synthetic oligonucleotide
tatccgaaggtcgttcgcacaacggccggc

SEQ ID NO: 234147 - DNA, 30 bp, Artificial Sequence
  Synthetic oligonucleotide
cggaaacgcttagtacaatatttctccggc

SEQ ID NO: 234148 - DNA, 30 bp, Artificial Sequence
  Synthetic oligonucleotide
gcacgaacccggtgcagtctcgcaagcggc

SEQ ID NO: 234149 - DNA, 30 bp, Artificial Sequence
  Synthetic oligonucleotide
gggatctcgtgatgcattcaaagaagcggc

SEQ ID NO: 234150 - DNA, 30 bp, Artificial Sequence
  Synthetic oligonucleotide
cagagggactccgcacaggtgttcagcggc

SEQ ID NO: 234151 - DNA, 30 bp, Artificial Sequence
  Synthetic oligonucleotide
gaaaagctcgtgaccttaggggggagcggc

SEQ ID NO: 234152 - DNA, 30 bp, Artificial Sequence
  Synthetic oligonucleotide
ggattactcggtaactattattatagcggc

SEQ ID NO: 234153 - DNA, 30 bp, Artificial Sequence
  Synthetic oligonucleotide
acccaagtgaaacatctcccgcctagcggc

SEQ ID NO: 234154 - DNA, 30 bp, Artificial Sequence
  Synthetic oligonucleotide
gaacccacaaagattatgaaaggtagcggc

SEQ ID NO: 234155 - DNA, 30 bp, Artificial Sequence
  Synthetic oligonucleotide
ggcagactaatttttgcgtgataacgcggc

SEQ ID NO: 234156 - DNA, 30 bp, Artificial Sequence
  Synthetic oligonucleotide
taagccccaacattcaagtgcccgcgcggc

SEQ ID NO: 234157 - DNA, 30 bp, Artificial Sequence
  Synthetic oligonucleotide
ctcggactctaacttaagtcgatgcgcggc

SEQ ID NO: 234158 - DNA, 30 bp, Artificial Sequence
  Synthetic oligonucleotide
gaattaaagctatacttgcctggtcgcggc

SEQ ID NO: 234159 - DNA, 30 bp, Artificial Sequence
  Synthetic oligonucleotide
acacttaagtcatcgatatgtgacggcggc

SEQ ID NO: 234160 - DNA, 30 bp, Artificial Sequence
  Synthetic oligonucleotide
atttagtgtgatcttgatatcatgggcggc

SEQ ID NO: 234161 - DNA, 30 bp, Artificial Sequence
  Synthetic oligonucleotide
acaaggacgtagtgcggtcgcgcctgcggc

SEQ ID NO: 234162 - DNA, 30 bp, Artificial Sequence
  Synthetic oligonucleotide
aactctcgtacaacataatatgcctgcggc

SEQ ID NO: 234163 - DNA, 30 bp, Artificial Sequence
  Synthetic oligonucleotide
gaatgatatcctgagcctgttcgctgcggc

SEQ ID NO: 234164 - DNA, 30 bp, Artificial Sequence
  Synthetic oligonucleotide
gttccagatgttccgttgtgatgctgcggc

SEQ ID NO: 234165 - DNA, 30 bp, Artificial Sequence
  Synthetic oligonucleotide
aaccgttgttcggaagcccctcattgcggc

SEQ ID NO: 234166 - DNA, 30 bp, Artificial Sequence
  Synthetic oligonucleotide
acgtatctaagtactaatcggagcatcggc

SEQ ID NO: 234167 - DNA, 30 bp, Artificial Sequence
  Synthetic oligonucleotide
agggggagggcgttcgcccgcgagatcggc

SEQ ID NO: 234168 - DNA, 30 bp, Artificial Sequence
  Synthetic oligonucleotide
gagaagctcatgtgttggtccgtgatcggc

SEQ ID NO: 234169 - DNA, 30 bp, Artificial Sequence
  Synthetic oligonucleotide
tactatgtagaacgaaattttattatcggc

SEQ ID NO: 234170 - DNA, 30 bp, Artificial Sequence
  Synthetic oligonucleotide
ctcctgtgtgcgctcaaccacgtactcggc

SEQ ID NO: 234171 - DNA, 30 bp, Artificial Sequence
  Synthetic oligonucleotide
attgtctaacccgggcgaggggtcctcggc

SEQ ID NO: 234172 - DNA, 30 bp, Artificial Sequence
  Synthetic oligonucleotide
tagctgtttttccgaatgagcgccgtcggc

SEQ ID NO: 234173 - DNA, 30 bp, Artificial Sequence
  Synthetic oligonucleotide
gtcttgggctatttggttgccccggtcggc

SEQ ID NO: 234174 - DNA, 30 bp, Artificial Sequence
  Synthetic oligonucleotide
cgttgatctaacatgttagtgacattcggc

SEQ ID NO: 234175 - DNA, 30 bp, Artificial Sequence
  Synthetic oligonucleotide
cccgcgggatagacgaaagcgagattcggc

SEQ ID NO: 234176 - DNA, 30 bp, Artificial Sequence
  Synthetic oligonucleotide
atgctagtatttatatattcatgcttcggc

SEQ ID NO: 234177 - DNA, 30 bp, Artificial Sequence
  Synthetic oligonucleotide
gaacagtctattgtcttcgtcatgttcggc

SEQ ID NO: 234178 - DNA, 30 bp, Artificial Sequence
  Synthetic oligonucleotide
cagactaagtaaggccgacaaattttcggc

SEQ ID NO: 234179 - DNA, 30 bp, Artificial Sequence
  Synthetic oligonucleotide
tatgtagaccgcgaggagagctaaaagggc

SEQ ID NO: 234180 - DNA, 30 bp, Artificial Sequence
  Synthetic oligonucleotide
accgaatggtacatacaatgttgcaagggc

SEQ ID NO: 234181 - DNA, 30 bp, Artificial Sequence
  Synthetic oligonucleotide
tcccaagatagggccgagtccctcaagggc

SEQ ID NO: 234182 - DNA, 30 bp, Artificial Sequence
  Synthetic oligonucleotide
tgactagtcggctaacgtgtatagaagggc

SEQ ID NO: 234183 - DNA, 30 bp, Artificial Sequence
  Synthetic oligonucleotide
taaattattaggtgagtacggcaccagggc

SEQ ID NO: 234184 - DNA, 30 bp, Artificial Sequence
  Synthetic oligonucleotide
aagggtacgagtcacatatggatgcagggc

SEQ ID NO: 234185 - DNA, 30 bp, Artificial Sequence
  Synthetic oligonucleotide
gccttagcttcttccctgaaagacgagggc

SEQ ID NO: 234186 - DNA, 30 bp, Artificial Sequence
  Synthetic oligonucleotide
aaccgtacacttgcaccggcacccgagggc

SEQ ID NO: 234187 - DNA, 30 bp, Artificial Sequence
  Synthetic oligonucleotide
ggtgtagcattattagtatattcatagggc

SEQ ID NO: 234188 - DNA, 30 bp, Artificial Sequence
  Synthetic oligonucleotide
accgccccattgtccatcggtggatagggc

SEQ ID NO: 234189 - DNA, 29 bp, Artificial Sequence
  Synthetic oligonucleotide
ttgaagaaagattcgcatcccagtagggc

SEQ ID NO: 234190 - DNA, 30 bp, Artificial Sequence
  Synthetic oligonucleotide
acatcctcttccaaagggcgtgcttagggc

SEQ ID NO: 234191 - DNA, 30 bp, Artificial Sequence
  Synthetic oligonucleotide
cgtttagaaaagacgaggctaagaacgggc

SEQ ID NO: 234192 - DNA, 29 bp, Artificial Sequence
  Synthetic oligonucleotide
taacgttttacaagatgttatacacgggc

SEQ ID NO: 234193 - DNA, 30 bp, Artificial Sequence
  Synthetic oligonucleotide
gaaggcacgaggatcgcggaccgcacgggc

SEQ ID NO: 234194 - DNA, 30 bp, Artificial Sequence
  Synthetic oligonucleotide
gggtaccgagagatttgcaacaggacgggc

SEQ ID NO: 234195 - DNA, 30 bp, Artificial Sequence
  Synthetic oligonucleotide
ccgcacggacctttgatccttacaccgggc

SEQ ID NO: 234196 - DNA, 30 bp, Artificial Sequence
  Synthetic oligonucleotide
cagtacaaacgtgcagaaagtctgccgggc

SEQ ID NO: 234197 - DNA, 30 bp, Artificial Sequence
  Synthetic oligonucleotide
gtactcatactgatacgtgcgtcagcgggc

SEQ ID NO: 234198 - DNA, 30 bp, Artificial Sequence
  Synthetic oligonucleotide
aacgttagacaaccatcagccaacgcgggc

SEQ ID NO: 234199 - DNA, 30 bp, Artificial Sequence
  Synthetic oligonucleotide
ggatcattaataacgcgtattaacgcgggc

SEQ ID NO: 234200 - DNA, 30 bp, Artificial Sequence
  Synthetic oligonucleotide
catatgtcatagctactatcgatggcgggc

SEQ ID NO: 234201 - DNA, 30 bp, Artificial Sequence
  Synthetic oligonucleotide
cttatggatgatctgtctgccttatcgggc

SEQ ID NO: 234202 - DNA, 30 bp, Artificial Sequence
  Synthetic oligonucleotide
ttctcaccagagatgaaagaatactcgggc

SEQ ID NO: 234203 - DNA, 30 bp, Artificial Sequence
  Synthetic oligonucleotide
acggttttagtcatgtatgtcgaaaggggc

SEQ ID NO: 234204 - DNA, 30 bp, Artificial Sequence
  Synthetic oligonucleotide
cgcaggcttaggatcgatatgaataggggc

SEQ ID NO: 234205 - DNA, 30 bp, Artificial Sequence
  Synthetic oligonucleotide
gtgctagaaaacggtctttaggctaggggc

SEQ ID NO: 234206 - DNA, 30 bp, Artificial Sequence
  Synthetic oligonucleotide
actcgatcgatcgcgtccaaaggtaggggc

SEQ ID NO: 234207 - DNA, 30 bp, Artificial Sequence
  Synthetic oligonucleotide
ctgtgcccagcgccacgggcggaacggggc

SEQ ID NO: 234208 - DNA, 30 bp, Artificial Sequence
  Synthetic oligonucleotide
aacgtgttctgcaggatttcatcacggggc

SEQ ID NO: 234209 - DNA, 30 bp, Artificial Sequence
  Synthetic oligonucleotide
gcttgcgaagtatgagcccgagggcggggc

SEQ ID NO: 234210 - DNA, 30 bp, Artificial Sequence
  Synthetic oligonucleotide
aaaacgggtagtcgcgcaagatctcggggc

SEQ ID NO: 234211 - DNA, 30 bp, Artificial Sequence
  Synthetic oligonucleotide
aagccaatgcgaaattcgctgtctcggggc

SEQ ID NO: 234212 - DNA, 30 bp, Artificial Sequence
  Synthetic oligonucleotide
cctatcgggagcagatcggtcgttcggggc

SEQ ID NO: 234213 - DNA, 30 bp, Artificial Sequence
  Synthetic oligonucleotide
tggcctgaattaagtcctacgccagggggc

SEQ ID NO: 234214 - DNA, 30 bp, Artificial Sequence
  Synthetic oligonucleotide
ccaacaagttacggacttgtcatagggggc

SEQ ID NO: 234215 - DNA, 30 bp, Artificial Sequence
  Synthetic oligonucleotide
atgcccaatatagacttcgcctacgggggc

SEQ ID NO: 234216 - DNA, 30 bp, Artificial Sequence
  Synthetic oligonucleotide
aggcattactgtgtgtacttctccgggggc

SEQ ID NO: 234217 - DNA, 30 bp, Artificial Sequence
  Synthetic oligonucleotide
ctgatacgtctggactactcgtgcgggggc

SEQ ID NO: 234218 - DNA, 30 bp, Artificial Sequence
  Synthetic oligonucleotide
gccaactggtttccttgtctataggggggc

SEQ ID NO: 234219 - DNA, 30 bp, Artificial Sequence
  Synthetic oligonucleotide
gacggtctagggaattccatgtctgggggc

SEQ ID NO: 234220 - DNA, 30 bp, Artificial Sequence
  Synthetic oligonucleotide
acatgacggtaacgtatacggcaatggggc

SEQ ID NO: 234221 - DNA, 30 bp, Artificial Sequence
  Synthetic oligonucleotide
ccgaccccatggaggcgtccagtatggggc

SEQ ID NO: 234222 - DNA, 30 bp, Artificial Sequence
  Synthetic oligonucleotide
cgccgcgttacgcaggtctctaagtggggc

SEQ ID NO: 234223 - DNA, 30 bp, Artificial Sequence
  Synthetic oligonucleotide
gcaacgggcaacgcagtttgctcgtggggc

SEQ ID NO: 234224 - DNA, 30 bp, Artificial Sequence
  Synthetic oligonucleotide
gaagcgttaggtgcgctagagtggtggggc

SEQ ID NO: 234225 - DNA, 30 bp, Artificial Sequence
  Synthetic oligonucleotide
gagctgccgggcaaggaaagtgagatgggc

SEQ ID NO: 234226 - DNA, 31 bp, Artificial Sequence
  Synthetic oligonucleotide
taaatttcagaaccagggcacaacgatgggc

SEQ ID NO: 234227 - DNA, 30 bp, Artificial Sequence
  Synthetic oligonucleotide
gtcggcatactagcatctggtatgatgggc

SEQ ID NO: 234228 - DNA, 30 bp, Artificial Sequence
  Synthetic oligonucleotide
aacgttaggcaagaggcgtgggtgatgggc

SEQ ID NO: 234229 - DNA, 30 bp, Artificial Sequence
  Synthetic oligonucleotide
tacggttcttgttattgccggtttatgggc

SEQ ID NO: 234230 - DNA, 31 bp, Artificial Sequence
  Synthetic oligonucleotide
ggggcgtcaagcggggctcgcacgactgggc

SEQ ID NO: 234231 - DNA, 30 bp, Artificial Sequence
  Synthetic oligonucleotide
aacattttccgccaatcgagcgtgctgggc

SEQ ID NO: 234232 - DNA, 30 bp, Artificial Sequence
  Synthetic oligonucleotide
cgcaatctactagccgtggcatatctgggc

SEQ ID NO: 234233 - DNA, 30 bp, Artificial Sequence
  Synthetic oligonucleotide
gaacggataactggctcttctacagtgggc

SEQ ID NO: 234234 - DNA, 30 bp, Artificial Sequence
  Synthetic oligonucleotide
tgataccccggcatcactatagacgtgggc

SEQ ID NO: 234235 - DNA, 30 bp, Artificial Sequence
  Synthetic oligonucleotide
tctgactttaccttggcaatgcccttgggc

SEQ ID NO: 234236 - DNA, 30 bp, Artificial Sequence
  Synthetic oligonucleotide
atgcacttaccctgccaaaatacgttgggc

SEQ ID NO: 234237 - DNA, 30 bp, Artificial Sequence
  Synthetic oligonucleotide
ccgtcgccgagtaaagtagatgatttgggc

SEQ ID NO: 234238 - DNA, 30 bp, Artificial Sequence
  Synthetic oligonucleotide
cagcttcgtaagacggtcaagtgtttgggc

SEQ ID NO: 234239 - DNA, 30 bp, Artificial Sequence
  Synthetic oligonucleotide
gcggaacggcacacatgatcagttttgggc

SEQ ID NO: 234240 - DNA, 30 bp, Artificial Sequence
  Synthetic oligonucleotide
cggccaatcgttagcggcgcttgaaatggc

SEQ ID NO: 234241 - DNA, 30 bp, Artificial Sequence
  Synthetic oligonucleotide
acccccgctaacaatgtttataacaatggc

SEQ ID NO: 234242 - DNA, 30 bp, Artificial Sequence
  Synthetic oligonucleotide
cccgaggaaatacaaacgtgatgcaatggc

SEQ ID NO: 234243 - DNA, 30 bp, Artificial Sequence
  Synthetic oligonucleotide
gaatccatcatgccgggagttacgaatggc

SEQ ID NO: 234244 - DNA, 30 bp, Artificial Sequence
  Synthetic oligonucleotide
ctaccccgatgcgccgaggggctgaatggc

SEQ ID NO: 234245 - DNA, 30 bp, Artificial Sequence
  Synthetic oligonucleotide
agatttcgtattagcgaaaggaataatggc

SEQ ID NO: 234246 - DNA, 30 bp, Artificial Sequence
  Synthetic oligonucleotide
gcggtgcgtcactgaatttggaataatggc

SEQ ID NO: 234247 - DNA, 30 bp, Artificial Sequence
  Synthetic oligonucleotide
atcgtttcacgttagagaattacacatggc

SEQ ID NO: 234248 - DNA, 30 bp, Artificial Sequence
  Synthetic oligonucleotide
cgggttaaggagttccctgggtcccatggc

SEQ ID NO: 234249 - DNA, 30 bp, Artificial Sequence
  Synthetic oligonucleotide
gtcctaaaagtgccttgcccaagccatggc

SEQ ID NO: 234250 - DNA, 30 bp, Artificial Sequence
  Synthetic oligonucleotide
atgactctaggttaacagtgctaagatggc

SEQ ID NO: 234251 - DNA, 30 bp, Artificial Sequence
  Synthetic oligonucleotide
tctcatggagattgcaagtttcacgatggc

SEQ ID NO: 234252 - DNA, 30 bp, Artificial Sequence
  Synthetic oligonucleotide
acaaaatcactctattaggttgacgatggc

SEQ ID NO: 234253 - DNA, 30 bp, Artificial Sequence
  Synthetic oligonucleotide
cgtgagcacaagacagcgctctgggatggc

SEQ ID NO: 234254 - DNA, 30 bp, Artificial Sequence
  Synthetic oligonucleotide
cattattccgctcgggaattaagatatggc

SEQ ID NO: 234255 - DNA, 30 bp, Artificial Sequence
  Synthetic oligonucleotide
gaccgcgcaggaaggtgccatcgatatggc

SEQ ID NO: 234256 - DNA, 30 bp, Artificial Sequence
  Synthetic oligonucleotide
cctgaggcagattcaacagtgacgtatggc

SEQ ID NO: 234257 - DNA, 30 bp, Artificial Sequence
  Synthetic oligonucleotide
gaatggagccaagcttcaaaagggtatggc

SEQ ID NO: 234258 - DNA, 30 bp, Artificial Sequence
  Synthetic oligonucleotide
gcaacatgtaggggattggcaatgtatggc

SEQ ID NO: 234259 - DNA, 30 bp, Artificial Sequence
  Synthetic oligonucleotide
aagggattgcggtggctcagattttatggc

SEQ ID NO: 234260 - DNA, 30 bp, Artificial Sequence
  Synthetic oligonucleotide
aaaccaggtggtgtcaccacgcaaactggc

SEQ ID NO: 234261 - DNA, 30 bp, Artificial Sequence
  Synthetic oligonucleotide
cttattgtagtaatgggcttgtgaactggc

SEQ ID NO: 234262 - DNA, 30 bp, Artificial Sequence
  Synthetic oligonucleotide
cgaggtaccccaaccagtaacataactggc

SEQ ID NO: 234263 - DNA, 30 bp, Artificial Sequence
  Synthetic oligonucleotide
agcatagacagcgcctggaacaccactggc

SEQ ID NO: 234264 - DNA, 30 bp, Artificial Sequence
  Synthetic oligonucleotide
atgtcaatggtgctctgggaaatcactggc

SEQ ID NO: 234265 - DNA, 30 bp, Artificial Sequence
  Synthetic oligonucleotide
agatggatgccttccgtggtagctactggc

SEQ ID NO: 234266 - DNA, 30 bp, Artificial Sequence
  Synthetic oligonucleotide
cggcgtataatggttcttataagtactggc

SEQ ID NO: 234267 - DNA, 30 bp, Artificial Sequence
  Synthetic oligonucleotide
gcgcaaagacagtgggtacggcaacctggc

SEQ ID NO: 234268 - DNA, 30 bp, Artificial Sequence
  Synthetic oligonucleotide
gtaggaggggactgatcctcgtctcctggc

SEQ ID NO: 234269 - DNA, 30 bp, Artificial Sequence
  Synthetic oligonucleotide
catgctctaacacccgagtttagatctggc

SEQ ID NO: 234270 - DNA, 30 bp, Artificial Sequence
  Synthetic oligonucleotide
cggccgtggccgtctcgttttagatctggc

SEQ ID NO: 234271 - DNA, 30 bp, Artificial Sequence
  Synthetic oligonucleotide
gcggtcacaaacgtcatttataagtctggc

SEQ ID NO: 234272 - DNA, 30 bp, Artificial Sequence
  Synthetic oligonucleotide
ttcgatctgagtagcgtataaaccagtggc

SEQ ID NO: 234273 - DNA, 30 bp, Artificial Sequence
  Synthetic oligonucleotide
ctgcccatacatgtgacctaactcagtggc

SEQ ID NO: 234274 - DNA, 30 bp, Artificial Sequence
  Synthetic oligonucleotide
gcgtacttagaagcctggcccgtcagtggc

SEQ ID NO: 234275 - DNA, 30 bp, Artificial Sequence
  Synthetic oligonucleotide
tgctgaccaattgaatggcttaaacgtggc

SEQ ID NO: 234276 - DNA, 30 bp, Artificial Sequence
  Synthetic oligonucleotide
gggtatactagatgaatttgagtacgtggc

SEQ ID NO: 234277 - DNA, 30 bp, Artificial Sequence
  Synthetic oligonucleotide
ttaccataggtagactacacatctcgtggc

SEQ ID NO: 234278 - DNA, 30 bp, Artificial Sequence
  Synthetic oligonucleotide
taagtaaaccttgagtatatctaaggtggc

SEQ ID NO: 234279 - DNA, 30 bp, Artificial Sequence
  Synthetic oligonucleotide
ggattcgggacggatacgatttccggtggc

SEQ ID NO: 234280 - DNA, 30 bp, Artificial Sequence
  Synthetic oligonucleotide
tgatctgggaaatggcgagaaaagggtggc

SEQ ID NO: 234281 - DNA, 30 bp, Artificial Sequence
  Synthetic oligonucleotide
tataacgtcgagagtgtggctgcgggtggc

SEQ ID NO: 234282 - DNA, 28 bp, Artificial Sequence
  Synthetic oligonucleotide
acctggatgacacaggtacaggggtggc

SEQ ID NO: 234283 - DNA, 30 bp, Artificial Sequence
  Synthetic oligonucleotide
agttggaaggcctcattcggtaggggtggc

SEQ ID NO: 234284 - DNA, 30 bp, Artificial Sequence
  Synthetic oligonucleotide
caaagaactttataagtacggcgatgtggc

SEQ ID NO: 234285 - DNA, 30 bp, Artificial Sequence
  Synthetic oligonucleotide
gcccagcgtcggaacacagtcatatgtggc

SEQ ID NO: 234286 - DNA, 30 bp, Artificial Sequence
  Synthetic oligonucleotide
gctatatcgccgaaatcccttgactgtggc

SEQ ID NO: 234287 - DNA, 30 bp, Artificial Sequence
  Synthetic oligonucleotide
atgtgcttgctgttcggcctaggctgtggc

SEQ ID NO: 234288 - DNA, 30 bp, Artificial Sequence
  Synthetic oligonucleotide
tacggctaccaaggccagcgaatttgtggc

SEQ ID NO: 234289 - DNA, 30 bp, Artificial Sequence
  Synthetic oligonucleotide
ggatgttacctagcgacaatacgcattggc

SEQ ID NO: 234290 - DNA, 30 bp, Artificial Sequence
  Synthetic oligonucleotide
caatgtagtacggcagaccgtggcattggc

SEQ ID NO: 234291 - DNA, 30 bp, Artificial Sequence
  Synthetic oligonucleotide
cagatcacaaaagagctggtctagattggc

SEQ ID NO: 234292 - DNA, 30 bp, Artificial Sequence
  Synthetic oligonucleotide
tacaaaagtgagagaattgtagtgattggc

SEQ ID NO: 234293 - DNA, 30 bp, Artificial Sequence
  Synthetic oligonucleotide
gcctctggtgagttccggtatagtattggc

SEQ ID NO: 234294 - DNA, 30 bp, Artificial Sequence
  Synthetic oligonucleotide
acagggcgtttatgtgcgaatgttattggc

SEQ ID NO: 234295 - DNA, 30 bp, Artificial Sequence
  Synthetic oligonucleotide
cagataaataccaaatactcaacgcttggc

SEQ ID NO: 234296 - DNA, 30 bp, Artificial Sequence
  Synthetic oligonucleotide
cgctggactattctatcacctactcttggc

SEQ ID NO: 234297 - DNA, 30 bp, Artificial Sequence
  Synthetic oligonucleotide
gggtgggtgtttgggaaggagctcgttggc

SEQ ID NO: 234298 - DNA, 30 bp, Artificial Sequence
  Synthetic oligonucleotide
actagtactaacatgggtggcgcggttggc

SEQ ID NO: 234299 - DNA, 30 bp, Artificial Sequence
  Synthetic oligonucleotide
ggttcgtaaggtaacgaactcgcggttggc

SEQ ID NO: 234300 - DNA, 30 bp, Artificial Sequence
  Synthetic oligonucleotide
acacggcacagggatcgtcgacgggttggc

SEQ ID NO: 234301 - DNA, 30 bp, Artificial Sequence
  Synthetic oligonucleotide
cggctggttggacggccagaatcctttggc

SEQ ID NO: 234302 - DNA, 30 bp, Artificial Sequence
  Synthetic oligonucleotide
agggtaactcctgctgattaactttttggc

SEQ ID NO: 234303 - DNA, 30 bp, Artificial Sequence
  Synthetic oligonucleotide
ataggagacgcatatatactgctttttggc

SEQ ID NO: 234304 - DNA, 30 bp, Artificial Sequence
  Synthetic oligonucleotide
cgaacgtgcggagcgacggaggtttttggc

SEQ ID NO: 234305 - DNA, 30 bp, Artificial Sequence
  Synthetic oligonucleotide
tgtgtatgggtcctatgccctaagaaatgc

SEQ ID NO: 234306 - DNA, 29 bp, Artificial Sequence
  Synthetic oligonucleotide
gagcctgtgcgtgatattacgtgaaatgc

SEQ ID NO: 234307 - DNA, 30 bp, Artificial Sequence
  Synthetic oligonucleotide
tcctaggcggctgtaaggaggtataaatgc

SEQ ID NO: 234308 - DNA, 30 bp, Artificial Sequence
  Synthetic oligonucleotide
ccaagtaggccgtttgtcaatcctaaatgc

SEQ ID NO: 234309 - DNA, 30 bp, Artificial Sequence
  Synthetic oligonucleotide
caagccactcagcggtaggagattaaatgc

SEQ ID NO: 234310 - DNA, 30 bp, Artificial Sequence
  Synthetic oligonucleotide
gagggtaatcctagatctaagtgacaatgc

SEQ ID NO: 234311 - DNA, 30 bp, Artificial Sequence
  Synthetic oligonucleotide
taacggtcaacatctcatttaacgcaatgc

SEQ ID NO: 234312 - DNA, 30 bp, Artificial Sequence
  Synthetic oligonucleotide
cgcggtcaaagtagtacgaatgcgcaatgc

SEQ ID NO: 234313 - DNA, 30 bp, Artificial Sequence
  Synthetic oligonucleotide
gttgcatcaccggtgtctcctgcgcaatgc

SEQ ID NO: 234314 - DNA, 29 bp, Artificial Sequence
  Synthetic oligonucleotide
cataagataagagatagcgatatcaatgc

SEQ ID NO: 234315 - DNA, 30 bp, Artificial Sequence
  Synthetic oligonucleotide
ggaaagaccatacggggcccccaagaatgc

SEQ ID NO: 234316 - DNA, 30 bp, Artificial Sequence
  Synthetic oligonucleotide
ttgtggtatttcataggcagcgaagaatgc

SEQ ID NO: 234317 - DNA, 30 bp, Artificial Sequence
  Synthetic oligonucleotide
gtgtccgaggcaggctccggtgaagaatgc

SEQ ID NO: 234318 - DNA, 30 bp, Artificial Sequence
  Synthetic oligonucleotide
tcggtgatctcgcgggtcggagtcgaatgc

SEQ ID NO: 234319 - DNA, 30 bp, Artificial Sequence
  Synthetic oligonucleotide
tcagagtgcatccctcttacgggtgaatgc

SEQ ID NO: 234320 - DNA, 30 bp, Artificial Sequence
  Synthetic oligonucleotide
taatgctcgtaaagcgcagtacaataatgc

SEQ ID NO: 234321 - DNA, 30 bp, Artificial Sequence
  Synthetic oligonucleotide
acataattgggaatttagacaagctaatgc

SEQ ID NO: 234322 - DNA, 30 bp, Artificial Sequence
  Synthetic oligonucleotide
ttaactcaagataggggacttatctaatgc

SEQ ID NO: 234323 - DNA, 30 bp, Artificial Sequence
  Synthetic oligonucleotide
agattgtgagtgacccgaagcttcacatgc

SEQ ID NO: 234324 - DNA, 30 bp, Artificial Sequence
  Synthetic oligonucleotide
ccagtcccagtacaattttcgtcaccatgc

SEQ ID NO: 234325 - DNA, 30 bp, Artificial Sequence
  Synthetic oligonucleotide
ttggttaggcctacctttaaccgaccatgc

SEQ ID NO: 234326 - DNA, 30 bp, Artificial Sequence
  Synthetic oligonucleotide
ctagtatctgggggttgtgaaggaccatgc

SEQ ID NO: 234327 - DNA, 30 bp, Artificial Sequence
  Synthetic oligonucleotide
ttgtgagatagcaaacatatatcgccatgc

SEQ ID NO: 234328 - DNA, 30 bp, Artificial Sequence
  Synthetic oligonucleotide
tatctggttaaaataaggcatgctccatgc

SEQ ID NO: 234329 - DNA, 30 bp, Artificial Sequence
  Synthetic oligonucleotide
agagtgtgccttggaccatattgcgcatgc

SEQ ID NO: 234330 - DNA, 30 bp, Artificial Sequence
  Synthetic oligonucleotide
ttgatgagtgtgtcacaccggatggcatgc

SEQ ID NO: 234331 - DNA, 30 bp, Artificial Sequence
  Synthetic oligonucleotide
aaagcgatgaggcatatctagttggcatgc

SEQ ID NO: 234332 - DNA, 30 bp, Artificial Sequence
  Synthetic oligonucleotide
acctacgggagagcaatagataactcatgc

SEQ ID NO: 234333 - DNA, 30 bp, Artificial Sequence
  Synthetic oligonucleotide
ttgagccgctgatggcgttaattctcatgc

SEQ ID NO: 234334 - DNA, 30 bp, Artificial Sequence
  Synthetic oligonucleotide
ttgaataatggacgctatgtccggtcatgc

SEQ ID NO: 234335 - DNA, 30 bp, Artificial Sequence
  Synthetic oligonucleotide
tagagttcacgatgaagaacgggttcatgc

SEQ ID NO: 234336 - DNA, 30 bp, Artificial Sequence
  Synthetic oligonucleotide
tatatgcatcgttatgcccggtgttcatgc

SEQ ID NO: 234337 - DNA, 30 bp, Artificial Sequence
  Synthetic oligonucleotide
cttctagaaatcgtgtcaatcgacagatgc

SEQ ID NO: 234338 - DNA, 30 bp, Artificial Sequence
  Synthetic oligonucleotide
cgcgatattgaccctcaagtctccagatgc

SEQ ID NO: 234339 - DNA, 30 bp, Artificial Sequence
  Synthetic oligonucleotide
cttagacagacctcccttttcagcagatgc

SEQ ID NO: 234340 - DNA, 30 bp, Artificial Sequence
  Synthetic oligonucleotide
gcgatcaatactaacaagtttgggagatgc

SEQ ID NO: 234341 - DNA, 30 bp, Artificial Sequence
  Synthetic oligonucleotide
atcagaggtcggaacaggcagatccgatgc

SEQ ID NO: 234342 - DNA, 30 bp, Artificial Sequence
  Synthetic oligonucleotide
cgttttatactcatactgaggtttcgatgc

SEQ ID NO: 234343 - DNA, 30 bp, Artificial Sequence
  Synthetic oligonucleotide
gttaatggatcgattacaatggaaggatgc

SEQ ID NO: 234344 - DNA, 30 bp, Artificial Sequence
  Synthetic oligonucleotide
gccaacccttcgactcagagaacaggatgc

SEQ ID NO: 234345 - DNA, 30 bp, Artificial Sequence
  Synthetic oligonucleotide
gtctcgggacgcaccgcgcggaatggatgc

SEQ ID NO: 234346 - DNA, 30 bp, Artificial Sequence
  Synthetic oligonucleotide
gtgcatcggggacatgcgacgcatggatgc

SEQ ID NO: 234347 - DNA, 30 bp, Artificial Sequence
  Synthetic oligonucleotide
gagcgctgtatacaacgcgtccgatgatgc

SEQ ID NO: 234348 - DNA, 30 bp, Artificial Sequence
  Synthetic oligonucleotide
tggtgacaagcatcagcagaatcctgatgc

SEQ ID NO: 234349 - DNA, 30 bp, Artificial Sequence
  Synthetic oligonucleotide
gaagtataacgtgtcgtggcgggaatatgc

SEQ ID NO: 234350 - DNA, 30 bp, Artificial Sequence
  Synthetic oligonucleotide
gcagaggagtccttagtatgttccatatgc

SEQ ID NO: 234351 - DNA, 30 bp, Artificial Sequence
  Synthetic oligonucleotide
cacacggcccttgcttccaccactatatgc

SEQ ID NO: 234352 - DNA, 30 bp, Artificial Sequence
  Synthetic oligonucleotide
gggagtggctacaattgctagaacctatgc

SEQ ID NO: 234353 - DNA, 30 bp, Artificial Sequence
  Synthetic oligonucleotide
atgtgtttaccgccaggagggctgctatgc

SEQ ID NO: 234354 - DNA, 30 bp, Artificial Sequence
  Synthetic oligonucleotide
cgcggggatgcccaaaggccaaaagtatgc

SEQ ID NO: 234355 - DNA, 30 bp, Artificial Sequence
  Synthetic oligonucleotide
aggaggtatgtcaggatattggaagtatgc

SEQ ID NO: 234356 - DNA, 30 bp, Artificial Sequence
  Synthetic oligonucleotide
ggacatgatgagggcggtggtatagtatgc

SEQ ID NO: 234357 - DNA, 30 bp, Artificial Sequence
  Synthetic oligonucleotide
tcgtggggcaggcttgaatatcctgtatgc

SEQ ID NO: 234358 - DNA, 30 bp, Artificial Sequence
  Synthetic oligonucleotide
atgtgattgacctactggatgtccttatgc

SEQ ID NO: 234359 - DNA, 30 bp, Artificial Sequence
  Synthetic oligonucleotide
tggatagcgtgaacaggcatagtgttatgc

SEQ ID NO: 234360 - DNA, 30 bp, Artificial Sequence
  Synthetic oligonucleotide
agaccggcgccactgaccacggaaaactgc

SEQ ID NO: 234361 - DNA, 30 bp, Artificial Sequence
  Synthetic oligonucleotide
ggattcgggattggtgtcatgctaaactgc

SEQ ID NO: 234362 - DNA, 30 bp, Artificial Sequence
  Synthetic oligonucleotide
gcttgcaggtcacttccttttgccaactgc

SEQ ID NO: 234363 - DNA, 30 bp, Artificial Sequence
  Synthetic oligonucleotide
gatttggaccggtaaccacctggcaactgc

SEQ ID NO: 234364 - DNA, 30 bp, Artificial Sequence
  Synthetic oligonucleotide
gccgaacaacaaaatttttgcttcaactgc

SEQ ID NO: 234365 - DNA, 30 bp, Artificial Sequence
  Synthetic oligonucleotide
tcacattgtgacttattattagcccactgc

SEQ ID NO: 234366 - DNA, 30 bp, Artificial Sequence
  Synthetic oligonucleotide
caccatagagttctagggctctgcgactgc

SEQ ID NO: 234367 - DNA, 30 bp, Artificial Sequence
  Synthetic oligonucleotide
aaatgttgacaacagcctaaaaaggactgc

SEQ ID NO: 234368 - DNA, 30 bp, Artificial Sequence
  Synthetic oligonucleotide
ttgactcgatgacttactcgtcatgactgc

SEQ ID NO: 234369 - DNA, 30 bp, Artificial Sequence
  Synthetic oligonucleotide
agttaagacacgacagggccgcctgactgc

SEQ ID NO: 234370 - DNA, 30 bp, Artificial Sequence
  Synthetic oligonucleotide
gatgacggaccatagactctcgaatactgc

SEQ ID NO: 234371 - DNA, 30 bp, Artificial Sequence
  Synthetic oligonucleotide
ccgccgacgacagagcggcagccatactgc

SEQ ID NO: 234372 - DNA, 30 bp, Artificial Sequence
  Synthetic oligonucleotide
ggattgcgaaaggaaggttgtagatactgc

SEQ ID NO: 234373 - DNA, 30 bp, Artificial Sequence
  Synthetic oligonucleotide
acagggcgggccaaagggcatataacctgc

SEQ ID NO: 234374 - DNA, 30 bp, Artificial Sequence
  Synthetic oligonucleotide
ttgggagttaagggctgaaagtagacctgc

SEQ ID NO: 234375 - DNA, 30 bp, Artificial Sequence
  Synthetic oligonucleotide
catgattcatgtctatgctcttgtacctgc

SEQ ID NO: 234376 - DNA, 30 bp, Artificial Sequence
  Synthetic oligonucleotide
gcgttaaaagcaacaacctaggttacctgc

SEQ ID NO: 234377 - DNA, 30 bp, Artificial Sequence
  Synthetic oligonucleotide
cttgtagaaccgaccgtcccgtgaccctgc

SEQ ID NO: 234378 - DNA, 30 bp, Artificial Sequence
  Synthetic oligonucleotide
caccagcattccaaaacaatacgagcctgc

SEQ ID NO: 234379 - DNA, 30 bp, Artificial Sequence
  Synthetic oligonucleotide
actgtgcacgtaaggagcgccctcgcctgc

SEQ ID NO: 234380 - DNA, 30 bp, Artificial Sequence
  Synthetic oligonucleotide
agttgggggtcgtactcagcgaaggcctgc

SEQ ID NO: 234381 - DNA, 30 bp, Artificial Sequence
  Synthetic oligonucleotide
atcgagttcacagatctactgtaggcctgc

SEQ ID NO: 234382 - DNA, 30 bp, Artificial Sequence
  Synthetic oligonucleotide
cctcggggttccgtcatggcaggatcctgc

SEQ ID NO: 234383 - DNA, 30 bp, Artificial Sequence
  Synthetic oligonucleotide
gaggtggcacgagttggtaaggactcctgc

SEQ ID NO: 234384 - DNA, 30 bp, Artificial Sequence
  Synthetic oligonucleotide
cactggccatcttctaagctcctgtcctgc

SEQ ID NO: 234385 - DNA, 30 bp, Artificial Sequence
  Synthetic oligonucleotide
gccgtaaaactcgtgaagttaggttcctgc

SEQ ID NO: 234386 - DNA, 30 bp, Artificial Sequence
  Synthetic oligonucleotide
aagcagtgggtcgcagaagctgagagctgc

SEQ ID NO: 234387 - DNA, 30 bp, Artificial Sequence
  Synthetic oligonucleotide
tcggagaaccatgtcagcgagaatggctgc

SEQ ID NO: 234388 - DNA, 30 bp, Artificial Sequence
  Synthetic oligonucleotide
aacaagacaagcctattgtaataaatctgc

SEQ ID NO: 234389 - DNA, 30 bp, Artificial Sequence
  Synthetic oligonucleotide
ggacggcgcctttaagaaagtctaatctgc

SEQ ID NO: 234390 - DNA, 30 bp, Artificial Sequence
  Synthetic oligonucleotide
aagtgtcggtgggaaagattctacatctgc

SEQ ID NO: 234391 - DNA, 30 bp, Artificial Sequence
  Synthetic oligonucleotide
accactggaccaagtatcacaatcatctgc

SEQ ID NO: 234392 - DNA, 30 bp, Artificial Sequence
  Synthetic oligonucleotide
gtcatgttaggggtatgagtcagactctgc

SEQ ID NO: 234393 - DNA, 30 bp, Artificial Sequence
  Synthetic oligonucleotide
taagtgggtacgtcgtttaagcagctctgc

SEQ ID NO: 234394 - DNA, 30 bp, Artificial Sequence
  Synthetic oligonucleotide
gtcatccgtctaggcaattcgcaagtctgc

SEQ ID NO: 234395 - DNA, 30 bp, Artificial Sequence
  Synthetic oligonucleotide
gtcaatactttcgcttccaaaggagtctgc

SEQ ID NO: 234396 - DNA, 30 bp, Artificial Sequence
  Synthetic oligonucleotide
gcgggaagaaatgggcgtcccgatgtctgc

SEQ ID NO: 234397 - DNA, 30 bp, Artificial Sequence
  Synthetic oligonucleotide
gccttggtgtacgaagtttgatcattctgc

SEQ ID NO: 234398 - DNA, 31 bp, Artificial Sequence
  Synthetic oligonucleotide
gcgagtatgtccacaaagtagtggattctgc

SEQ ID NO: 234399 - DNA, 30 bp, Artificial Sequence
  Synthetic oligonucleotide
acacaaaggatgtgagcgagcaggttctgc

SEQ ID NO: 234400 - DNA, 30 bp, Artificial Sequence
  Synthetic oligonucleotide
ttatttagcctgtgagccactgcaaagtgc

SEQ ID NO: 234401 - DNA, 30 bp, Artificial Sequence
  Synthetic oligonucleotide
tgcgtttgctatctggaaagtcagaagtgc

SEQ ID NO: 234402 - DNA, 30 bp, Artificial Sequence
  Synthetic oligonucleotide
aacatagtaggcttatagacgtggaagtgc

SEQ ID NO: 234403 - DNA, 30 bp, Artificial Sequence
  Synthetic oligonucleotide
tacaggctttgatacaggaccactaagtgc

SEQ ID NO: 234404 - DNA, 30 bp, Artificial Sequence
  Synthetic oligonucleotide
ggtgcaggaatgcatttacggattaagtgc

SEQ ID NO: 234405 - DNA, 30 bp, Artificial Sequence
  Synthetic oligonucleotide
tcggccgcatatagcgatcggaggcagtgc

SEQ ID NO: 234406 - DNA, 30 bp, Artificial Sequence
  Synthetic oligonucleotide
ccgcaagtgtgaccaaccattactcagtgc

SEQ ID NO: 234407 - DNA, 30 bp, Artificial Sequence
  Synthetic oligonucleotide
cgagcaatttctatgaacgcacgtcagtgc

SEQ ID NO: 234408 - DNA, 30 bp, Artificial Sequence
  Synthetic oligonucleotide
ctggtaggtggcaacccattcggtcagtgc

SEQ ID NO: 234409 - DNA, 30 bp, Artificial Sequence
  Synthetic oligonucleotide
ttaagggactagtcgaaactcatagagtgc

SEQ ID NO: 234410 - DNA, 30 bp, Artificial Sequence
  Synthetic oligonucleotide
tgtcatcagagcgccaataagcgtgagtgc

SEQ ID NO: 234411 - DNA, 30 bp, Artificial Sequence
  Synthetic oligonucleotide
tagagagggaacgcaaagttctagtagtgc

SEQ ID NO: 234412 - DNA, 30 bp, Artificial Sequence
  Synthetic oligonucleotide
tacagagtatgaggcacggccacgtagtgc

SEQ ID NO: 234413 - DNA, 30 bp, Artificial Sequence
  Synthetic oligonucleotide
cgcgatcgcggcacggatctagcgtagtgc

SEQ ID NO: 234414 - DNA, 30 bp, Artificial Sequence
  Synthetic oligonucleotide
gttcagttagcagcctgcgacgtgtagtgc

SEQ ID NO: 234415 - DNA, 30 bp, Artificial Sequence
  Synthetic oligonucleotide
tcagtttagatggatcgccatgcttagtgc

SEQ ID NO: 234416 - DNA, 30 bp, Artificial Sequence
  Synthetic oligonucleotide
aacgaccgccattaaggacgcggaacgtgc

SEQ ID NO: 234417 - DNA, 30 bp, Artificial Sequence
  Synthetic oligonucleotide
gtatgaaccaagtcgcaggccgggacgtgc

SEQ ID NO: 234418 - DNA, 30 bp, Artificial Sequence
  Synthetic oligonucleotide
aacacgtatagggtggctgactatacgtgc

SEQ ID NO: 234419 - DNA, 30 bp, Artificial Sequence
  Synthetic oligonucleotide
tctgatccaaattaggaaaattaaccgtgc

SEQ ID NO: 234420 - DNA, 30 bp, Artificial Sequence
  Synthetic oligonucleotide
gggggaggtaaataggcactaggaccgtgc

SEQ ID NO: 234421 - DNA, 30 bp, Artificial Sequence
  Synthetic oligonucleotide
tacgtacgtggcgggccgaatagcccgtgc

SEQ ID NO: 234422 - DNA, 30 bp, Artificial Sequence
  Synthetic oligonucleotide
tggtgtcctcaccaaaaaggcggcccgtgc

SEQ ID NO: 234423 - DNA, 30 bp, Artificial Sequence
  Synthetic oligonucleotide
caatgcaggaatgatcggttgctcccgtgc

SEQ ID NO: 234424 - DNA, 30 bp, Artificial Sequence
  Synthetic oligonucleotide
caggtactgtatctcatccaccagccgtgc

SEQ ID NO: 234425 - DNA, 30 bp, Artificial Sequence
  Synthetic oligonucleotide
atgggcagaggagtattcctaaggccgtgc

SEQ ID NO: 234426 - DNA, 30 bp, Artificial Sequence
  Synthetic oligonucleotide
ggcgccaaaggacgtcagtcagctccgtgc

SEQ ID NO: 234427 - DNA, 30 bp, Artificial Sequence
  Synthetic oligonucleotide
tcagttgccaagctgcgaactggagcgtgc

SEQ ID NO: 234428 - DNA, 30 bp, Artificial Sequence
  Synthetic oligonucleotide
gtcccgaattcagacctagtggtggcgtgc

SEQ ID NO: 234429 - DNA, 30 bp, Artificial Sequence
  Synthetic oligonucleotide
gagctacgaattggggccctggcatcgtgc

SEQ ID NO: 234430 - DNA, 30 bp, Artificial Sequence
  Synthetic oligonucleotide
ggcaacctcagcttaggcaccgtatcgtgc

SEQ ID NO: 234431 - DNA, 30 bp, Artificial Sequence
  Synthetic oligonucleotide
gcaggaggttaagagcactagccaaggtgc

SEQ ID NO: 234432 - DNA, 30 bp, Artificial Sequence
  Synthetic oligonucleotide
tactagaggacggtaggtcttgcaaggtgc

SEQ ID NO: 234433 - DNA, 30 bp, Artificial Sequence
  Synthetic oligonucleotide
gttgatcaaacgatcagatatggaaggtgc

SEQ ID NO: 234434 - DNA, 30 bp, Artificial Sequence
  Synthetic oligonucleotide
ggtggatgaggacggatggggtcacggtgc

SEQ ID NO: 234435 - DNA, 35 bp, Artificial Sequence
  Synthetic oligonucleotide
acatgggttggcgaggggaccgcgtggtagggtgc

SEQ ID NO: 234436 - DNA, 30 bp, Artificial Sequence
  Synthetic oligonucleotide
ccagcggcttcgcatttagttctcgggtgc

SEQ ID NO: 234437 - DNA, 30 bp, Artificial Sequence
  Synthetic oligonucleotide
tcaggagggggtgggggcatactggggtgc

SEQ ID NO: 234438 - DNA, 30 bp, Artificial Sequence
  Synthetic oligonucleotide
ccatttagtctgattcctatccctgggtgc

SEQ ID NO: 234439 - DNA, 30 bp, Artificial Sequence
  Synthetic oligonucleotide
ctctaggaactggaaggatgtgaatggtgc

SEQ ID NO: 234440 - DNA, 30 bp, Artificial Sequence
  Synthetic oligonucleotide
gttagatgtggatttcctaatacctggtgc

SEQ ID NO: 234441 - DNA, 30 bp, Artificial Sequence
  Synthetic oligonucleotide
tcctgggtcacgctcggtagacagtggtgc

SEQ ID NO: 234442 - DNA, 30 bp, Artificial Sequence
  Synthetic oligonucleotide
gaacatatttctcgattgtctcgttggtgc

SEQ ID NO: 234443 - DNA, 30 bp, Artificial Sequence
  Synthetic oligonucleotide
gtagtgatgtggcaaccatgcttttggtgc

SEQ ID NO: 234444 - DNA, 30 bp, Artificial Sequence
  Synthetic oligonucleotide
gttgtggcttcaagtggccgttgcatgtgc

SEQ ID NO: 234445 - DNA, 30 bp, Artificial Sequence
  Synthetic oligonucleotide
cgacgagttcagcaaaaagttcgtatgtgc

SEQ ID NO: 234446 - DNA, 30 bp, Artificial Sequence
  Synthetic oligonucleotide
gggaatgggccgacaggtagatgtatgtgc

SEQ ID NO: 234447 - DNA, 30 bp, Artificial Sequence
  Synthetic oligonucleotide
atgtgccagttttacattaatgtactgtgc

SEQ ID NO: 234448 - DNA, 30 bp, Artificial Sequence
  Synthetic oligonucleotide
gacacacatgatgtagctcttgccctgtgc

SEQ ID NO: 234449 - DNA, 30 bp, Artificial Sequence
  Synthetic oligonucleotide
aatatacactctctgggtaaggtgctgtgc

SEQ ID NO: 234450 - DNA, 30 bp, Artificial Sequence
  Synthetic oligonucleotide
ggcttcagttctgtctaggcgtatctgtgc

SEQ ID NO: 234451 - DNA, 30 bp, Artificial Sequence
  Synthetic oligonucleotide
ccgtagagcagacccaacggcgaagtgtgc

SEQ ID NO: 234452 - DNA, 30 bp, Artificial Sequence
  Synthetic oligonucleotide
ctcacttttcgccactagacgctagtgtgc

SEQ ID NO: 234453 - DNA, 30 bp, Artificial Sequence
  Synthetic oligonucleotide
tcacggtgtaggagtgggcttctggtgtgc

SEQ ID NO: 234454 - DNA, 30 bp, Artificial Sequence
  Synthetic oligonucleotide
gtctgtgcgcttagtcgggctgatgtgtgc

SEQ ID NO: 234455 - DNA, 30 bp, Artificial Sequence
  Synthetic oligonucleotide
aatgcagagcagctaaggtgggatttgtgc

SEQ ID NO: 234456 - DNA, 30 bp, Artificial Sequence
  Synthetic oligonucleotide
catcaagacgattttacagaaactttgtgc

SEQ ID NO: 234457 - DNA, 30 bp, Artificial Sequence
  Synthetic oligonucleotide
gcatggaccttgaggctgggaagtttgtgc

SEQ ID NO: 234458 - DNA, 30 bp, Artificial Sequence
  Synthetic oligonucleotide
aagcggctgactgaggcggggattttgtgc

SEQ ID NO: 234459 - DNA, 30 bp, Artificial Sequence
  Synthetic oligonucleotide
catgattatgacaggttttcgtttttgtgc

SEQ ID NO: 234460 - DNA, 30 bp, Artificial Sequence
  Synthetic oligonucleotide
gtattaactccgcataagtaccaaaattgc

SEQ ID NO: 234461 - DNA, 30 bp, Artificial Sequence
  Synthetic oligonucleotide
ttcctctcggatatcaaggcttcaaattgc

SEQ ID NO: 234462 - DNA, 30 bp, Artificial Sequence
  Synthetic oligonucleotide
gtgcggagttaagtgattccctggaattgc

SEQ ID NO: 234463 - DNA, 30 bp, Artificial Sequence
  Synthetic oligonucleotide
ggagtctaagcagtacgacatgtgaattgc

SEQ ID NO: 234464 - DNA, 30 bp, Artificial Sequence
  Synthetic oligonucleotide
cgctgaatctctggtcacaacactaattgc

SEQ ID NO: 234465 - DNA, 30 bp, Artificial Sequence
  Synthetic oligonucleotide
taatcaaggcgattgctttgccgtaattgc

SEQ ID NO: 234466 - DNA, 30 bp, Artificial Sequence
  Synthetic oligonucleotide
gtagaaggaggatggttgtagtgtaattgc

SEQ ID NO: 234467 - DNA, 30 bp, Artificial Sequence
  Synthetic oligonucleotide
tcagtcaattaatagactaatgttaattgc

SEQ ID NO: 234468 - DNA, 30 bp, Artificial Sequence
  Synthetic oligonucleotide
gtgcgaacccagaaaagtccctaacattgc

SEQ ID NO: 234469 - DNA, 30 bp, Artificial Sequence
  Synthetic oligonucleotide
agatttactgaagtcaacagaaagcattgc

SEQ ID NO: 234470 - DNA, 30 bp, Artificial Sequence
  Synthetic oligonucleotide
ggctcgggttactctgtagcgaagcattgc

SEQ ID NO: 234471 - DNA, 30 bp, Artificial Sequence
  Synthetic oligonucleotide
aatcgacgaggctgttttagggagcattgc

SEQ ID NO: 234472 - DNA, 30 bp, Artificial Sequence
  Synthetic oligonucleotide
cttgagctttattaagagagagggcattgc

SEQ ID NO: 234473 - DNA, 30 bp, Artificial Sequence
  Synthetic oligonucleotide
atccccctaatccgactatcaaatcattgc

SEQ ID NO: 234474 - DNA, 30 bp, Artificial Sequence
  Synthetic oligonucleotide
tgcaaaggtcttgcgctgggcgttcattgc

SEQ ID NO: 234475 - DNA, 30 bp, Artificial Sequence
  Synthetic oligonucleotide
gatcaacaacccggaatatgtcaagattgc

SEQ ID NO: 234476 - DNA, 30 bp, Artificial Sequence
  Synthetic oligonucleotide
tagtgctgttatgtacgagtgaacgattgc

SEQ ID NO: 234477 - DNA, 30 bp, Artificial Sequence
  Synthetic oligonucleotide
tccgtcacatgaacgtcgtctgtggattgc

SEQ ID NO: 234478 - DNA, 30 bp, Artificial Sequence
  Synthetic oligonucleotide
ctctcatggaagagcgggtgtggtgattgc

SEQ ID NO: 234479 - DNA, 30 bp, Artificial Sequence
  Synthetic oligonucleotide
gagaaccgcgcattgctaaggccatattgc

SEQ ID NO: 234480 - DNA, 30 bp, Artificial Sequence
  Synthetic oligonucleotide
tgtagccttaagggcgacgcgtgatattgc

SEQ ID NO: 234481 - DNA, 30 bp, Artificial Sequence
  Synthetic oligonucleotide
gaagcgtagtaaagcagtatggtatattgc

SEQ ID NO: 234482 - DNA, 30 bp, Artificial Sequence
  Synthetic oligonucleotide
tgcgattgggaatcctatcggcagtattgc

SEQ ID NO: 234483 - DNA, 30 bp, Artificial Sequence
  Synthetic oligonucleotide
ataaaaatcgtgcggcaaatcaattattgc

SEQ ID NO: 234484 - DNA, 30 bp, Artificial Sequence
  Synthetic oligonucleotide
tgggatcatgaacagggaaggcgttattgc

SEQ ID NO: 234485 - DNA, 30 bp, Artificial Sequence
  Synthetic oligonucleotide
agatggtccccctgaccagtctgttattgc

SEQ ID NO: 234486 - DNA, 30 bp, Artificial Sequence
  Synthetic oligonucleotide
atacagagattgttatgacctgcaacttgc

SEQ ID NO: 234487 - DNA, 30 bp, Artificial Sequence
  Synthetic oligonucleotide
tcagaaaggcctgcgcgaaaactaacttgc

SEQ ID NO: 234488 - DNA, 30 bp, Artificial Sequence
  Synthetic oligonucleotide
acgaacatgtgactcgggcaacacacttgc

SEQ ID NO: 234489 - DNA, 30 bp, Artificial Sequence
  Synthetic oligonucleotide
agcgtggtgtcctgctagttttacacttgc

SEQ ID NO: 234490 - DNA, 30 bp, Artificial Sequence
  Synthetic oligonucleotide
tcatatgtggatttgataagatgtacttgc

SEQ ID NO: 234491 - DNA, 30 bp, Artificial Sequence
  Synthetic oligonucleotide
ggctgacatgcttcggtccaagacccttgc

SEQ ID NO: 234492 - DNA, 30 bp, Artificial Sequence
  Synthetic oligonucleotide
ttcatgccgtggaagtctgttgccccttgc

SEQ ID NO: 234493 - DNA, 30 bp, Artificial Sequence
  Synthetic oligonucleotide
caaggcgctacctaaattatcgagccttgc

SEQ ID NO: 234494 - DNA, 30 bp, Artificial Sequence
  Synthetic oligonucleotide
aggccaagaattatcagctcgaggccttgc

SEQ ID NO: 234495 - DNA, 30 bp, Artificial Sequence
  Synthetic oligonucleotide
cacggttaatcatcttctcccgcagcttgc

SEQ ID NO: 234496 - DNA, 30 bp, Artificial Sequence
  Synthetic oligonucleotide
gatcaggacgagtaagcacgagtagcttgc

SEQ ID NO: 234497 - DNA, 30 bp, Artificial Sequence
  Synthetic oligonucleotide
ggttaggtcgtccacgacagactcgcttgc

SEQ ID NO: 234498 - DNA, 30 bp, Artificial Sequence
  Synthetic oligonucleotide
acgccacagagattaaccatgggatcttgc

SEQ ID NO: 234499 - DNA, 30 bp, Artificial Sequence
  Synthetic oligonucleotide
catgatctctatatgtgagttctctcttgc

SEQ ID NO: 234500 - DNA, 30 bp, Artificial Sequence
  Synthetic oligonucleotide
tcgtgtgttaggtgcaaggcgggttcttgc

SEQ ID NO: 234501 - DNA, 30 bp, Artificial Sequence
  Synthetic oligonucleotide
ctaataggtattggttcgttactgagttgc

SEQ ID NO: 234502 - DNA, 30 bp, Artificial Sequence
  Synthetic oligonucleotide
gcgataggtattttaaaccggtaacgttgc

SEQ ID NO: 234503 - DNA, 30 bp, Artificial Sequence
  Synthetic oligonucleotide
gcgggctcggtgttcacgaatctacgttgc

SEQ ID NO: 234504 - DNA, 30 bp, Artificial Sequence
  Synthetic oligonucleotide
aggatctgcgtacaacattaacgccgttgc

SEQ ID NO: 234505 - DNA, 30 bp, Artificial Sequence
  Synthetic oligonucleotide
tagagcggacaaaccgggtggcagcgttgc

SEQ ID NO: 234506 - DNA, 30 bp, Artificial Sequence
  Synthetic oligonucleotide
tacagcgagacttaacgatggcatcgttgc

SEQ ID NO: 234507 - DNA, 30 bp, Artificial Sequence
  Synthetic oligonucleotide
agtacctagaagtttgaggcagttcgttgc

SEQ ID NO: 234508 - DNA, 30 bp, Artificial Sequence
  Synthetic oligonucleotide
aaggctgggggaaagttcggggtaggttgc

SEQ ID NO: 234509 - DNA, 30 bp, Artificial Sequence
  Synthetic oligonucleotide
cgaaggtgggtcatatgtcacgccggttgc

SEQ ID NO: 234510 - DNA, 30 bp, Artificial Sequence
  Synthetic oligonucleotide
atgtttgagattgtacagaataatggttgc

SEQ ID NO: 234511 - DNA, 30 bp, Artificial Sequence
  Synthetic oligonucleotide
cgaaatgcaccgtgtgtgggtagtggttgc

SEQ ID NO: 234512 - DNA, 30 bp, Artificial Sequence
  Synthetic oligonucleotide
attggcgttgcgggtcggtggcgtggttgc

SEQ ID NO: 234513 - DNA, 30 bp, Artificial Sequence
  Synthetic oligonucleotide
atggaactctcggattttgatgaatgttgc

SEQ ID NO: 234514 - DNA, 30 bp, Artificial Sequence
  Synthetic oligonucleotide
agttggcaggtgtaacaacagctctgttgc

SEQ ID NO: 234515 - DNA, 30 bp, Artificial Sequence
  Synthetic oligonucleotide
aaagggaaatggccgactctagtgtgttgc

SEQ ID NO: 234516 - DNA, 30 bp, Artificial Sequence
  Synthetic oligonucleotide
tgatcggctacagacgtgtgaagaatttgc

SEQ ID NO: 234517 - DNA, 30 bp, Artificial Sequence
  Synthetic oligonucleotide
caattataagcgatcaaatccgtaatttgc

SEQ ID NO: 234518 - DNA, 30 bp, Artificial Sequence
  Synthetic oligonucleotide
ccgcatagaggacgctgatgattaatttgc

SEQ ID NO: 234519 - DNA, 30 bp, Artificial Sequence
  Synthetic oligonucleotide
tgataatatataggtatcgcttaactttgc

SEQ ID NO: 234520 - DNA, 30 bp, Artificial Sequence
  Synthetic oligonucleotide
acgcagtgggactagcagtaaacactttgc

SEQ ID NO: 234521 - DNA, 30 bp, Artificial Sequence
  Synthetic oligonucleotide
ggatagatgaaaagtaatagagatctttgc

SEQ ID NO: 234522 - DNA, 30 bp, Artificial Sequence
  Synthetic oligonucleotide
catccccacggcttctagtagtatctttgc

SEQ ID NO: 234523 - DNA, 30 bp, Artificial Sequence
  Synthetic oligonucleotide
aaccgacatatgaattcgggataagtttgc

SEQ ID NO: 234524 - DNA, 30 bp, Artificial Sequence
  Synthetic oligonucleotide
agtagggaggcttgcagttctagagtttgc

SEQ ID NO: 234525 - DNA, 30 bp, Artificial Sequence
  Synthetic oligonucleotide
gcgcgtataaacctaaaggcttgagtttgc

SEQ ID NO: 234526 - DNA, 30 bp, Artificial Sequence
  Synthetic oligonucleotide
cagcgagactggttttagtgcatagtttgc

SEQ ID NO: 234527 - DNA, 30 bp, Artificial Sequence
  Synthetic oligonucleotide
taaaaagaaggaagtaactttgacgtttgc

SEQ ID NO: 234528 - DNA, 30 bp, Artificial Sequence
  Synthetic oligonucleotide
aggtcaggcgaatgcatcttacgggtttgc

SEQ ID NO: 234529 - DNA, 30 bp, Artificial Sequence
  Synthetic oligonucleotide
acttgcatcccctcgcatgttattgtttgc

SEQ ID NO: 234530 - DNA, 30 bp, Artificial Sequence
  Synthetic oligonucleotide
tgcagtgttcggtcttaatggacattttgc

SEQ ID NO: 234531 - DNA, 30 bp, Artificial Sequence
  Synthetic oligonucleotide
acttctaggagggacctaaaccagttttgc

SEQ ID NO: 234532 - DNA, 30 bp, Artificial Sequence
  Synthetic oligonucleotide
ataacgcaactttggaggtgaaggttttgc

SEQ ID NO: 234533 - DNA, 30 bp, Artificial Sequence
  Synthetic oligonucleotide
cctagtaacatttagggcccggtgttttgc

SEQ ID NO: 234534 - DNA, 30 bp, Artificial Sequence
  Synthetic oligonucleotide
atagaaccagcacggcttgtccttttttgc

SEQ ID NO: 234535 - DNA, 30 bp, Artificial Sequence
  Synthetic oligonucleotide
acgcaatgcagggcagttaggcaaaaaatc

SEQ ID NO: 234536 - DNA, 30 bp, Artificial Sequence
  Synthetic oligonucleotide
agaaggtcgagtggcgtgactcaaaaaatc

SEQ ID NO: 234537 - DNA, 30 bp, Artificial Sequence
  Synthetic oligonucleotide
atgcattaaaacgcgagcgggcacaaaatc

SEQ ID NO: 234538 - DNA, 30 bp, Artificial Sequence
  Synthetic oligonucleotide
tcggagtctggacgtcgggataataaaatc

SEQ ID NO: 234539 - DNA, 30 bp, Artificial Sequence
  Synthetic oligonucleotide
tacgagagaggatataagttggataaaatc

SEQ ID NO: 234540 - DNA, 31 bp, Artificial Sequence
  Synthetic oligonucleotide
tgggggagtgcttactttaaactaacaaatc

SEQ ID NO: 234541 - DNA, 30 bp, Artificial Sequence
  Synthetic oligonucleotide
acggaccctataatcggcaattaacaaatc

SEQ ID NO: 234542 - DNA, 30 bp, Artificial Sequence
  Synthetic oligonucleotide
cgaacgtgcatgaaattattcgctcaaatc

SEQ ID NO: 234543 - DNA, 30 bp, Artificial Sequence
  Synthetic oligonucleotide
agttagtttaacagatgttgaatagaaatc

SEQ ID NO: 234544 - DNA, 30 bp, Artificial Sequence
  Synthetic oligonucleotide
tttctcgtctcatcgtgagcatacgaaatc

SEQ ID NO: 234545 - DNA, 30 bp, Artificial Sequence
  Synthetic oligonucleotide
agcatgttcacggggagactgggtgaaatc

SEQ ID NO: 234546 - DNA, 30 bp, Artificial Sequence
  Synthetic oligonucleotide
cccattacacgtcgaggtcgtatataaatc

SEQ ID NO: 234547 - DNA, 30 bp, Artificial Sequence
  Synthetic oligonucleotide
ggcaataccttacgaaagtcgaggtaaatc

SEQ ID NO: 234548 - DNA, 30 bp, Artificial Sequence
  Synthetic oligonucleotide
caaggagctattcgcgccaagcggtaaatc

SEQ ID NO: 234549 - DNA, 30 bp, Artificial Sequence
  Synthetic oligonucleotide
cggcagtaggaccccaaggactattaaatc

SEQ ID NO: 234550 - DNA, 30 bp, Artificial Sequence
  Synthetic oligonucleotide
cacgcgaaggttgcgacgtagtcttaaatc

SEQ ID NO: 234551 - DNA, 30 bp, Artificial Sequence
  Synthetic oligonucleotide
tgaaggaggcgaggtcatcctctttaaatc

SEQ ID NO: 234552 - DNA, 30 bp, Artificial Sequence
  Synthetic oligonucleotide
atctttaggtagagacacagaagcacaatc

SEQ ID NO: 234553 - DNA, 30 bp, Artificial Sequence
  Synthetic oligonucleotide
tgagtaaagaataccctactatgcacaatc

SEQ ID NO: 234554 - DNA, 30 bp, Artificial Sequence
  Synthetic oligonucleotide
ttgtctgacataatcacgctcgagacaatc

SEQ ID NO: 234555 - DNA, 30 bp, Artificial Sequence
  Synthetic oligonucleotide
ggagtcgcccacgagtaaggccatacaatc

SEQ ID NO: 234556 - DNA, 31 bp, Artificial Sequence
  Synthetic oligonucleotide
agcaaatagaatggtctacaaatgaccaatc

SEQ ID NO: 234557 - DNA, 39 bp, Artificial Sequence
  Synthetic oligonucleotide
taaaattggggactctcttcgtcctcggcattagcaatc

SEQ ID NO: 234558 - DNA, 30 bp, Artificial Sequence
  Synthetic oligonucleotide
aggcgttcatgacttaagaagaacgcaatc

SEQ ID NO: 234559 - DNA, 30 bp, Artificial Sequence
  Synthetic oligonucleotide
acgtagttgcttcgatatagtcccgcaatc

SEQ ID NO: 234560 - DNA, 30 bp, Artificial Sequence
  Synthetic oligonucleotide
aagagaattgatcagaggtttgccgcaatc

SEQ ID NO: 234561 - DNA, 31 bp, Artificial Sequence
  Synthetic oligonucleotide
atacctcgcaccttaggggacaagcgcaatc

SEQ ID NO: 234562 - DNA, 30 bp, Artificial Sequence
  Synthetic oligonucleotide
ctcactatatagagtggcccagcggcaatc

SEQ ID NO: 234563 - DNA, 30 bp, Artificial Sequence
  Synthetic oligonucleotide
aagaaggcacttccacgattaaatgcaatc

SEQ ID NO: 234564 - DNA, 30 bp, Artificial Sequence
  Synthetic oligonucleotide
ctaggcgtctgaacagacacacctgcaatc

SEQ ID NO: 234565 - DNA, 30 bp, Artificial Sequence
  Synthetic oligonucleotide
tgggtctaaagagtatgattagggtcaatc

SEQ ID NO: 234566 - DNA, 30 bp, Artificial Sequence
  Synthetic oligonucleotide
gcattatgatagttgtgcgattggtcaatc

SEQ ID NO: 234567 - DNA, 30 bp, Artificial Sequence
  Synthetic oligonucleotide
aagcgttccagggtgaaaggtaattcaatc

SEQ ID NO: 234568 - DNA, 30 bp, Artificial Sequence
  Synthetic oligonucleotide
atagacccgccactcggtatacgttcaatc

SEQ ID NO: 234569 - DNA, 30 bp, Artificial Sequence
  Synthetic oligonucleotide
tcacgttccttaatagacaggcacagaatc

SEQ ID NO: 234570 - DNA, 30 bp, Artificial Sequence
  Synthetic oligonucleotide
cccgtcaaccgcgaatacagatcgagaatc

SEQ ID NO: 234571 - DNA, 30 bp, Artificial Sequence
  Synthetic oligonucleotide
ggcgacgaataagtcgggaatctgagaatc

SEQ ID NO: 234572 - DNA, 30 bp, Artificial Sequence
  Synthetic oligonucleotide
cggcccttcgaaggcgatacaactagaatc

SEQ ID NO: 234573 - DNA, 30 bp, Artificial Sequence
  Synthetic oligonucleotide
cgagagagttcctgtatggcttttagaatc

SEQ ID NO: 234574 - DNA, 30 bp, Artificial Sequence
  Synthetic oligonucleotide
cgtgcttaaaaatacgggtcaatacgaatc

SEQ ID NO: 234575 - DNA, 30 bp, Artificial Sequence
  Synthetic oligonucleotide
gctccattgcgccttcgccaccagcgaatc

SEQ ID NO: 234576 - DNA, 30 bp, Artificial Sequence
  Synthetic oligonucleotide
gaggaattggagctttttaaatggggaatc

SEQ ID NO: 234577 - DNA, 30 bp, Artificial Sequence
  Synthetic oligonucleotide
tcataatcgtgttattgaagttggggaatc

SEQ ID NO: 234578 - DNA, 30 bp, Artificial Sequence
  Synthetic oligonucleotide
tgggtgggactgctctgagatttgggaatc

SEQ ID NO: 234579 - DNA, 30 bp, Artificial Sequence
  Synthetic oligonucleotide
gcctgtggatacttctcatatttgggaatc

SEQ ID NO: 234580 - DNA, 30 bp, Artificial Sequence
  Synthetic oligonucleotide
ctagtcaaaccctcgctagcacaatgaatc

SEQ ID NO: 234581 - DNA, 30 bp, Artificial Sequence
  Synthetic oligonucleotide
ggatagattgagcatggtttttaatgaatc

SEQ ID NO: 234582 - DNA, 30 bp, Artificial Sequence
  Synthetic oligonucleotide
ggcagtacgacgggtccaatactaataatc

SEQ ID NO: 234583 - DNA, 30 bp, Artificial Sequence
  Synthetic oligonucleotide
ccaaagaagcaggcccaaaggaggataatc

SEQ ID NO: 234584 - DNA, 30 bp, Artificial Sequence
  Synthetic oligonucleotide
caatggcaccgcttcgtcactgggataatc

SEQ ID NO: 234585 - DNA, 30 bp, Artificial Sequence
  Synthetic oligonucleotide
aaggaccatcgttataatacatcactaatc

SEQ ID NO: 234586 - DNA, 30 bp, Artificial Sequence
  Synthetic oligonucleotide
cagacgaacgccccgcgctcattcctaatc

SEQ ID NO: 234587 - DNA, 30 bp, Artificial Sequence
  Synthetic oligonucleotide
gggacccaccagctgatggggcatctaatc

SEQ ID NO: 234588 - DNA, 30 bp, Artificial Sequence
  Synthetic oligonucleotide
gccccggcaaaatgaccagttgctctaatc

SEQ ID NO: 234589 - DNA, 30 bp, Artificial Sequence
  Synthetic oligonucleotide
gacacagtcaggacgcgccaaggagtaatc

SEQ ID NO: 234590 - DNA, 30 bp, Artificial Sequence
  Synthetic oligonucleotide
ttttgcgccacttggatcggccgcgtaatc

SEQ ID NO: 234591 - DNA, 30 bp, Artificial Sequence
  Synthetic oligonucleotide
atcgccatccaaacagttatataggtaatc

SEQ ID NO: 234592 - DNA, 30 bp, Artificial Sequence
  Synthetic oligonucleotide
tacttaggcttttgagttcttacattaatc

SEQ ID NO: 234593 - DNA, 30 bp, Artificial Sequence
  Synthetic oligonucleotide
ctgagtgtggcgcaatttgtcgcattaatc

SEQ ID NO: 234594 - DNA, 30 bp, Artificial Sequence
  Synthetic oligonucleotide
cctagtgagatgcctacggagaccttaatc

SEQ ID NO: 234595 - DNA, 30 bp, Artificial Sequence
  Synthetic oligonucleotide
tatcccaacacagataatggtatcttaatc

SEQ ID NO: 234596 - DNA, 30 bp, Artificial Sequence
  Synthetic oligonucleotide
gatagccttattcagatgtgatggttaatc

SEQ ID NO: 234597 - DNA, 30 bp, Artificial Sequence
  Synthetic oligonucleotide
cggccattttgtctcaagctagcaaacatc

SEQ ID NO: 234598 - DNA, 30 bp, Artificial Sequence
  Synthetic oligonucleotide
ttaggccgaaaggcttcaaagttaaacatc

SEQ ID NO: 234599 - DNA, 30 bp, Artificial Sequence
  Synthetic oligonucleotide
gggtccctaccatatctaaaagataacatc

SEQ ID NO: 234600 - DNA, 30 bp, Artificial Sequence
  Synthetic oligonucleotide
ggcgattatgtgaattcccgccttaacatc

SEQ ID NO: 234601 - DNA, 30 bp, Artificial Sequence
  Synthetic oligonucleotide
ttaacgatgtcgacgggtcgagttaacatc

SEQ ID NO: 234602 - DNA, 30 bp, Artificial Sequence
  Synthetic oligonucleotide
cgacgagtcggaagggaagtagcacacatc

SEQ ID NO: 234603 - DNA, 30 bp, Artificial Sequence
  Synthetic oligonucleotide
tagttatagagttagaaagatctacacatc

SEQ ID NO: 234604 - DNA, 30 bp, Artificial Sequence
  Synthetic oligonucleotide
gcaaaaatgcgccataagtcgtagcacatc

SEQ ID NO: 234605 - DNA, 30 bp, Artificial Sequence
  Synthetic oligonucleotide
aggccttactcccaaaaactaactcacatc

SEQ ID NO: 234606 - DNA, 30 bp, Artificial Sequence
  Synthetic oligonucleotide
tggctcccggaggcggcaccccctcacatc

SEQ ID NO: 234607 - DNA, 30 bp, Artificial Sequence
  Synthetic oligonucleotide
actgggatcgttgtaccaatcgttcacatc

SEQ ID NO: 234608 - DNA, 29 bp, Artificial Sequence
  Synthetic oligonucleotide
agggttaatactaagattaagcggacatc

SEQ ID NO: 234609 - DNA, 30 bp, Artificial Sequence
  Synthetic oligonucleotide
ttgaagctgtaaatacgggcaatggacatc

SEQ ID NO: 234610 - DNA, 31 bp, Artificial Sequence
  Synthetic oligonucleotide
acagctttggtagaggattgccaatgacatc

SEQ ID NO: 234611 - DNA, 30 bp, Artificial Sequence
  Synthetic oligonucleotide
cttcttcaaaaacgtgttccaattgacatc

SEQ ID NO: 234612 - DNA, 30 bp, Artificial Sequence
  Synthetic oligonucleotide
agtccattcaccacacccttgttctacatc

SEQ ID NO: 234613 - DNA, 30 bp, Artificial Sequence
  Synthetic oligonucleotide
cactggcttggaggacgctcctagtacatc

SEQ ID NO: 234614 - DNA, 30 bp, Artificial Sequence
  Synthetic oligonucleotide
ccacaatgtttacggcatcccggcaccatc

SEQ ID NO: 234615 - DNA, 30 bp, Artificial Sequence
  Synthetic oligonucleotide
tgtggttttgcatcctgctggctgaccatc

SEQ ID NO: 234616 - DNA, 30 bp, Artificial Sequence
  Synthetic oligonucleotide
agccgtgtttaagactttagaactaccatc

SEQ ID NO: 234617 - DNA, 30 bp, Artificial Sequence
  Synthetic oligonucleotide
acagtgaggagctttaagacttttaccatc

SEQ ID NO: 234618 - DNA, 30 bp, Artificial Sequence
  Synthetic oligonucleotide
atgccatgggatacacctaacccccccatc

SEQ ID NO: 234619 - DNA, 30 bp, Artificial Sequence
  Synthetic oligonucleotide
ctgtacataaggcccaggattccgcccatc

SEQ ID NO: 234620 - DNA, 30 bp, Artificial Sequence
  Synthetic oligonucleotide
gaggggtctaggcggacatcaggtcccatc

SEQ ID NO: 234621 - DNA, 30 bp, Artificial Sequence
  Synthetic oligonucleotide
aggggcaaaaggtttccctctcttcccatc

SEQ ID NO: 234622 - DNA, 30 bp, Artificial Sequence
  Synthetic oligonucleotide
agggatgtaaggaaggctcgcctagccatc

SEQ ID NO: 234623 - DNA, 30 bp, Artificial Sequence
  Synthetic oligonucleotide
accctcgttgatacaatcacattagccatc

SEQ ID NO: 234624 - DNA, 30 bp, Artificial Sequence
  Synthetic oligonucleotide
atgtttaggtgcgtaaacaaagccgccatc

SEQ ID NO: 234625 - DNA, 30 bp, Artificial Sequence
  Synthetic oligonucleotide
cgtaatcgccccgcattgaaggcggccatc

SEQ ID NO: 234626 - DNA, 30 bp, Artificial Sequence
  Synthetic oligonucleotide
cgtgtcacaacaccccccgtcgtatccatc

SEQ ID NO: 234627 - DNA, 30 bp, Artificial Sequence
  Synthetic oligonucleotide
acgccccggtcttcatcaaggagctccatc

SEQ ID NO: 234628 - DNA, 30 bp, Artificial Sequence
  Synthetic oligonucleotide
agataaaaaatgccactgtctagtagcatc

SEQ ID NO: 234629 - DNA, 30 bp, Artificial Sequence
  Synthetic oligonucleotide
aaaatggacagataggcctgcgaacgcatc

SEQ ID NO: 234630 - DNA, 30 bp, Artificial Sequence
  Synthetic oligonucleotide
tgaataccgtgtacacacggatggcgcatc

SEQ ID NO: 234631 - DNA, 30 bp, Artificial Sequence
  Synthetic oligonucleotide
catgatcacgatttgttgggatacggcatc

SEQ ID NO: 234632 - DNA, 30 bp, Artificial Sequence
  Synthetic oligonucleotide
gcgaatgtgccaataaccaattagggcatc

SEQ ID NO: 234633 - DNA, 30 bp, Artificial Sequence
  Synthetic oligonucleotide
tgttcgttttcaagtagaggaaggggcatc

SEQ ID NO: 234634 - DNA, 30 bp, Artificial Sequence
  Synthetic oligonucleotide
gcagtcgttctccaaaataataatggcatc

SEQ ID NO: 234635 - DNA, 30 bp, Artificial Sequence
  Synthetic oligonucleotide
attgggattgtcggtatagttgatggcatc

SEQ ID NO: 234636 - DNA, 30 bp, Artificial Sequence
  Synthetic oligonucleotide
aactcgccagattacgtagagactggcatc

SEQ ID NO: 234637 - DNA, 31 bp, Artificial Sequence
  Synthetic oligonucleotide
ggaagccatcttaacgtccgatactggcatc

SEQ ID NO: 234638 - DNA, 30 bp, Artificial Sequence
  Synthetic oligonucleotide
ggtagcaacaatgttcaatcattctgcatc

SEQ ID NO: 234639 - DNA, 30 bp, Artificial Sequence
  Synthetic oligonucleotide
tcgttgatgagggggagttttcagtgcatc

SEQ ID NO: 234640 - DNA, 30 bp, Artificial Sequence
  Synthetic oligonucleotide
gactctcatagcgtcgaaagagagtgcatc

SEQ ID NO: 234641 - DNA, 30 bp, Artificial Sequence
  Synthetic oligonucleotide
accgaagccagcgcatgatttttgtgcatc

SEQ ID NO: 234642 - DNA, 30 bp, Artificial Sequence
  Synthetic oligonucleotide
ggcgagtcatgtacgctgcctctttgcatc

SEQ ID NO: 234643 - DNA, 30 bp, Artificial Sequence
  Synthetic oligonucleotide
aatctcatgttattaggatctacaatcatc

SEQ ID NO: 234644 - DNA, 30 bp, Artificial Sequence
  Synthetic oligonucleotide
tcgtcattatcagcgttttcacagatcatc

SEQ ID NO: 234645 - DNA, 30 bp, Artificial Sequence
  Synthetic oligonucleotide
agagagtccgcagagcggtagcatatcatc

SEQ ID NO: 234646 - DNA, 30 bp, Artificial Sequence
  Synthetic oligonucleotide
atgcataacgatcaccacgggcaactcatc

SEQ ID NO: 234647 - DNA, 30 bp, Artificial Sequence
  Synthetic oligonucleotide
gacgatttgtacgtaagatgtgacctcatc

SEQ ID NO: 234648 - DNA, 30 bp, Artificial Sequence
  Synthetic oligonucleotide
tttcgaaccgggacgtaggattccctcatc

SEQ ID NO: 234649 - DNA, 30 bp, Artificial Sequence
  Synthetic oligonucleotide
ggcttatgagtcttcggcggttcgctcatc

SEQ ID NO: 234650 - DNA, 30 bp, Artificial Sequence
  Synthetic oligonucleotide
cgtccaatgacattcaaatatcaagtcatc

SEQ ID NO: 234651 - DNA, 30 bp, Artificial Sequence
  Synthetic oligonucleotide
aattgcgctacggctcggacaagagtcatc

SEQ ID NO: 234652 - DNA, 30 bp, Artificial Sequence
  Synthetic oligonucleotide
tatgacccttgggagcattcgtgagtcatc

SEQ ID NO: 234653 - DNA, 30 bp, Artificial Sequence
  Synthetic oligonucleotide
ttcagggacagcacttaacgacaggtcatc

SEQ ID NO: 234654 - DNA, 30 bp, Artificial Sequence
  Synthetic oligonucleotide
tatttggctgaagaggtgtagagggtcatc

SEQ ID NO: 234655 - DNA, 30 bp, Artificial Sequence
  Synthetic oligonucleotide
atggtgagaacttgaaacgagcgcttcatc

SEQ ID NO: 234656 - DNA, 30 bp, Artificial Sequence
  Synthetic oligonucleotide
ataaaatgtggccggcatccgtagttcatc

SEQ ID NO: 234657 - DNA, 30 bp, Artificial Sequence
  Synthetic oligonucleotide
gaaaggtaggtacactcccaccatttcatc

SEQ ID NO: 234658 - DNA, 30 bp, Artificial Sequence
  Synthetic oligonucleotide
ttggttattactagcagctacataaagatc

SEQ ID NO: 234659 - DNA, 30 bp, Artificial Sequence
  Synthetic oligonucleotide
ttgtagacaagagagcttgagaacaagatc

SEQ ID NO: 234660 - DNA, 30 bp, Artificial Sequence
  Synthetic oligonucleotide
ataatgtcaggggcccctatcaataagatc

SEQ ID NO: 234661 - DNA, 30 bp, Artificial Sequence
  Synthetic oligonucleotide
attgagaaggacgacgcgctcggtaagatc

SEQ ID NO: 234662 - DNA, 30 bp, Artificial Sequence
  Synthetic oligonucleotide
ggaggggcacatacagggatatgtaagatc

SEQ ID NO: 234663 - DNA, 30 bp, Artificial Sequence
  Synthetic oligonucleotide
gcttcgatatgcggagatacggttaagatc

SEQ ID NO: 234664 - DNA, 30 bp, Artificial Sequence
  Synthetic oligonucleotide
cgatgtcactcccgaggcgcctcacagatc

SEQ ID NO: 234665 - DNA, 30 bp, Artificial Sequence
  Synthetic oligonucleotide
gggtgtctataactggttagattccagatc

SEQ ID NO: 234666 - DNA, 30 bp, Artificial Sequence
  Synthetic oligonucleotide
ggggatggccaaactttttctaagcagatc

SEQ ID NO: 234667 - DNA, 30 bp, Artificial Sequence
  Synthetic oligonucleotide
atcttacgcgtgaataatggagagcagatc

SEQ ID NO: 234668 - DNA, 30 bp, Artificial Sequence
  Synthetic oligonucleotide
gtaaaattatttattctacataggcagatc

SEQ ID NO: 234669 - DNA, 30 bp, Artificial Sequence
  Synthetic oligonucleotide
gccgtcattagattaatccactgtcagatc

SEQ ID NO: 234670 - DNA, 30 bp, Artificial Sequence
  Synthetic oligonucleotide
cacgtatatacagtggggtggttagagatc

SEQ ID NO: 234671 - DNA, 30 bp, Artificial Sequence
  Synthetic oligonucleotide
ggcagtcgggactgaccctttttcgagatc

SEQ ID NO: 234672 - DNA, 30 bp, Artificial Sequence
  Synthetic oligonucleotide
gcgatttcggactcgtgtcacacggagatc

SEQ ID NO: 234673 - DNA, 30 bp, Artificial Sequence
  Synthetic oligonucleotide
cccgaccagctcgtaggcaaactggagatc

SEQ ID NO: 234674 - DNA, 30 bp, Artificial Sequence
  Synthetic oligonucleotide
ggctgtctcacttcctggatattggagatc

SEQ ID NO: 234675 - DNA, 30 bp, Artificial Sequence
  Synthetic oligonucleotide
gggacgtctaaatattctgtacatgagatc

SEQ ID NO: 234676 - DNA, 30 bp, Artificial Sequence
  Synthetic oligonucleotide
ctgacactcgacgcctaaacaggctagatc

SEQ ID NO: 234677 - DNA, 30 bp, Artificial Sequence
  Synthetic oligonucleotide
gaatacaaactagtgcggacagggtagatc

SEQ ID NO: 234678 - DNA, 30 bp, Artificial Sequence
  Synthetic oligonucleotide
aagttacaaaataggtggcctaaaacgatc

SEQ ID NO: 234679 - DNA, 30 bp, Artificial Sequence
  Synthetic oligonucleotide
gttccattcagttcggaaaacggaacgatc

SEQ ID NO: 234680 - DNA, 30 bp, Artificial Sequence
  Synthetic oligonucleotide
gtaagggacttactcgaatgtagcacgatc

SEQ ID NO: 234681 - DNA, 30 bp, Artificial Sequence
  Synthetic oligonucleotide
ttaagtggcaatctttcagttaatacgatc

SEQ ID NO: 234682 - DNA, 30 bp, Artificial Sequence
  Synthetic oligonucleotide
catggccagtattgttcacagctcccgatc

SEQ ID NO: 234683 - DNA, 30 bp, Artificial Sequence
  Synthetic oligonucleotide
tcgggcttgccattatgcatggctccgatc

SEQ ID NO: 234684 - DNA, 30 bp, Artificial Sequence
  Synthetic oligonucleotide
aggtgactcggtcaggaggctaaagcgatc

SEQ ID NO: 234685 - DNA, 30 bp, Artificial Sequence
  Synthetic oligonucleotide
tggaacaagcatatgtctacaaccgcgatc

SEQ ID NO: 234686 - DNA, 30 bp, Artificial Sequence
  Synthetic oligonucleotide
atcacgagtagtcaagaccgggaggcgatc

SEQ ID NO: 234687 - DNA, 30 bp, Artificial Sequence
  Synthetic oligonucleotide
gaatcaatattctagaggcatggggcgatc

SEQ ID NO: 234688 - DNA, 30 bp, Artificial Sequence
  Synthetic oligonucleotide
cgcaaagcgctccttaattggttggcgatc

SEQ ID NO: 234689 - DNA, 30 bp, Artificial Sequence
  Synthetic oligonucleotide
gggccaaaatggccgcaatccaatgcgatc

SEQ ID NO: 234690 - DNA, 30 bp, Artificial Sequence
  Synthetic oligonucleotide
gacggcaacattcctctgctgaactcgatc

SEQ ID NO: 234691 - DNA, 30 bp, Artificial Sequence
  Synthetic oligonucleotide
tacagcggctccatccccgaggagtcgatc

SEQ ID NO: 234692 - DNA, 30 bp, Artificial Sequence
  Synthetic oligonucleotide
aaacccatctagggattcagatagtcgatc

SEQ ID NO: 234693 - DNA, 30 bp, Artificial Sequence
  Synthetic oligonucleotide
tggttaatgttctgaatttaagggtcgatc

SEQ ID NO: 234694 - DNA, 30 bp, Artificial Sequence
  Synthetic oligonucleotide
ttctcaaagaggaaatctgtcaattcgatc

SEQ ID NO: 234695 - DNA, 30 bp, Artificial Sequence
  Synthetic oligonucleotide
acctattctgaggccacgaaggacaggatc

SEQ ID NO: 234696 - DNA, 30 bp, Artificial Sequence
  Synthetic oligonucleotide
tgttgagaggggcggaatattatgaggatc

SEQ ID NO: 234697 - DNA, 30 bp, Artificial Sequence
  Synthetic oligonucleotide
actcacagagaaacacggtgagataggatc

SEQ ID NO: 234698 - DNA, 30 bp, Artificial Sequence
  Synthetic oligonucleotide
gaagggtaaagggatgaatttactaggatc

SEQ ID NO: 234699 - DNA, 30 bp, Artificial Sequence
  Synthetic oligonucleotide
tgtaagacataagaccactacacacggatc

SEQ ID NO: 234700 - DNA, 30 bp, Artificial Sequence
  Synthetic oligonucleotide
tgctaaatctacggcacacaagcccggatc

SEQ ID NO: 234701 - DNA, 30 bp, Artificial Sequence
  Synthetic oligonucleotide
gtaaggggagtacagtgttccgatcggatc

SEQ ID NO: 234702 - DNA, 30 bp, Artificial Sequence
  Synthetic oligonucleotide
acttgagtgaactttatgtttaacgggatc

SEQ ID NO: 234703 - DNA, 30 bp, Artificial Sequence
  Synthetic oligonucleotide
cgggccaacctaagtcaatgcttggggatc

SEQ ID NO: 234704 - DNA, 30 bp, Artificial Sequence
  Synthetic oligonucleotide
agaatcaaactatcagtggtgcatgggatc

SEQ ID NO: 234705 - DNA, 30 bp, Artificial Sequence
  Synthetic oligonucleotide
gcggaaagaagattcgggaagggatggatc

SEQ ID NO: 234706 - DNA, 30 bp, Artificial Sequence
  Synthetic oligonucleotide
cgcaaaaaagatagcgccgggacctggatc

SEQ ID NO: 234707 - DNA, 30 bp, Artificial Sequence
  Synthetic oligonucleotide
ttgagcgggagacaggaaacaacaatgatc

SEQ ID NO: 234708 - DNA, 30 bp, Artificial Sequence
  Synthetic oligonucleotide
gccagtgtgtcggcttagaactgcatgatc

SEQ ID NO: 234709 - DNA, 30 bp, Artificial Sequence
  Synthetic oligonucleotide
taggctatccacattcagatactcatgatc

SEQ ID NO: 234710 - DNA, 30 bp, Artificial Sequence
  Synthetic oligonucleotide
cagcgagcccagtccgcacgactactgatc

SEQ ID NO: 234711 - DNA, 30 bp, Artificial Sequence
  Synthetic oligonucleotide
agctgtcaggattgtgacatgcgcctgatc

SEQ ID NO: 234712 - DNA, 30 bp, Artificial Sequence
  Synthetic oligonucleotide
cagtaaccactcttagaactatatctgatc

SEQ ID NO: 234713 - DNA, 30 bp, Artificial Sequence
  Synthetic oligonucleotide
accgacgtcaggctcagaagaccagtgatc

SEQ ID NO: 234714 - DNA, 30 bp, Artificial Sequence
  Synthetic oligonucleotide
tggcgggccggatacggatttccagtgatc

SEQ ID NO: 234715 - DNA, 30 bp, Artificial Sequence
  Synthetic oligonucleotide
aatccggggcgaagaaccccatcagtgatc

SEQ ID NO: 234716 - DNA, 30 bp, Artificial Sequence
  Synthetic oligonucleotide
ctcctgcaggtaaacagcgtcaacgtgatc

SEQ ID NO: 234717 - DNA, 30 bp, Artificial Sequence
  Synthetic oligonucleotide
agtgtgggcccgatgtattaccgcgtgatc

SEQ ID NO: 234718 - DNA, 30 bp, Artificial Sequence
  Synthetic oligonucleotide
agtgaggatgctttcaaaggtgtcgtgatc

SEQ ID NO: 234719 - DNA, 30 bp, Artificial Sequence
  Synthetic oligonucleotide
ctacacccaagccggttatagtcggtgatc

SEQ ID NO: 234720 - DNA, 30 bp, Artificial Sequence
  Synthetic oligonucleotide
catactaatgtgtccgaaatctctgtgatc

SEQ ID NO: 234721 - DNA, 30 bp, Artificial Sequence
  Synthetic oligonucleotide
cgtacgccgtaaagaatacggtgtgtgatc

SEQ ID NO: 234722 - DNA, 30 bp, Artificial Sequence
  Synthetic oligonucleotide
gtcctatttaaactttgacagcctttgatc

SEQ ID NO: 234723 - DNA, 30 bp, Artificial Sequence
  Synthetic oligonucleotide
acgccaggtgcgaccttacagcctttgatc

SEQ ID NO: 234724 - DNA, 30 bp, Artificial Sequence
  Synthetic oligonucleotide
tgatgaggttaacaccgcttagcaaatatc

SEQ ID NO: 234725 - DNA, 31 bp, Artificial Sequence
  Synthetic oligonucleotide
ttagctcagtacccgcttaatgagaaatatc

SEQ ID NO: 234726 - DNA, 30 bp, Artificial Sequence
  Synthetic oligonucleotide
gccacatttgctccattacttgtcaatatc

SEQ ID NO: 234727 - DNA, 30 bp, Artificial Sequence
  Synthetic oligonucleotide
tgccgccggatgctcttaactgataatatc

SEQ ID NO: 234728 - DNA, 30 bp, Artificial Sequence
  Synthetic oligonucleotide
gtgtcgtacctccaatgtacagcacatatc

SEQ ID NO: 234729 - DNA, 30 bp, Artificial Sequence
  Synthetic oligonucleotide
tgtgtaccggcgcggtgcagggcacatatc

SEQ ID NO: 234730 - DNA, 30 bp, Artificial Sequence
  Synthetic oligonucleotide
aattcggacctaagtgatgccgtacatatc

SEQ ID NO: 234731 - DNA, 30 bp, Artificial Sequence
  Synthetic oligonucleotide
agcctaaaacgtacctttcaacggcatatc

SEQ ID NO: 234732 - DNA, 30 bp, Artificial Sequence
  Synthetic oligonucleotide
ccagtctagagttaacgtcgcgggcatatc

SEQ ID NO: 234733 - DNA, 30 bp, Artificial Sequence
  Synthetic oligonucleotide
tgcgcggtctcggtttgtacacatcatatc

SEQ ID NO: 234734 - DNA, 30 bp, Artificial Sequence
  Synthetic oligonucleotide
agccaagggagcttgatactccatcatatc

SEQ ID NO: 234735 - DNA, 30 bp, Artificial Sequence
  Synthetic oligonucleotide
tacttactctctggcctcttctatcatatc

SEQ ID NO: 234736 - DNA, 30 bp, Artificial Sequence
  Synthetic oligonucleotide
agctgtagggtcgcagtggctacagatatc

SEQ ID NO: 234737 - DNA, 30 bp, Artificial Sequence
  Synthetic oligonucleotide
ttccgagaacacgcgatcagcggagatatc

SEQ ID NO: 234738 - DNA, 30 bp, Artificial Sequence
  Synthetic oligonucleotide
aggttccagtacatataggggcacgatatc

SEQ ID NO: 234739 - DNA, 30 bp, Artificial Sequence
  Synthetic oligonucleotide
cctttgtcaggaggaccagtacctgatatc

SEQ ID NO: 234740 - DNA, 30 bp, Artificial Sequence
  Synthetic oligonucleotide
cctgagttagttgccggttatacatatatc

SEQ ID NO: 234741 - DNA, 30 bp, Artificial Sequence
  Synthetic oligonucleotide
tcgtgcagcacactgccgttcgagtatatc

SEQ ID NO: 234742 - DNA, 30 bp, Artificial Sequence
  Synthetic oligonucleotide
agagttgaggtgcccccaacgaggtatatc

SEQ ID NO: 234743 - DNA, 30 bp, Artificial Sequence
  Synthetic oligonucleotide
acacggtcatatgtaaccatctgaactatc

SEQ ID NO: 234744 - DNA, 30 bp, Artificial Sequence
  Synthetic oligonucleotide
tacatttacgagaccgaagagtcgcctatc

SEQ ID NO: 234745 - DNA, 30 bp, Artificial Sequence
  Synthetic oligonucleotide
gtacagcccaaacggggcgaccgtcctatc

SEQ ID NO: 234746 - DNA, 30 bp, Artificial Sequence
  Synthetic oligonucleotide
ttacaggatgggtaggttgcccacgctatc

SEQ ID NO: 234747 - DNA, 30 bp, Artificial Sequence
  Synthetic oligonucleotide
cgtatacccccaagtggactcacatctatc

SEQ ID NO: 234748 - DNA, 30 bp, Artificial Sequence
  Synthetic oligonucleotide
agccgtcttcggtatactagcggatctatc

SEQ ID NO: 234749 - DNA, 30 bp, Artificial Sequence
  Synthetic oligonucleotide
gctctggatttagggaaatgcgtatctatc

SEQ ID NO: 234750 - DNA, 30 bp, Artificial Sequence
  Synthetic oligonucleotide
caagaaacgcatccttcgcacacctctatc

SEQ ID NO: 234751 - DNA, 30 bp, Artificial Sequence
  Synthetic oligonucleotide
acaggtcggcgtcagagaaggtcctctatc

SEQ ID NO: 234752 - DNA, 30 bp, Artificial Sequence
  Synthetic oligonucleotide
gaactagttgacagccctaacctaagtatc

SEQ ID NO: 234753 - DNA, 30 bp, Artificial Sequence
  Synthetic oligonucleotide
agagctacaatgaacttacatgacagtatc

SEQ ID NO: 234754 - DNA, 30 bp, Artificial Sequence
  Synthetic oligonucleotide
tccgggctattctccataggctcgagtatc

SEQ ID NO: 234755 - DNA, 30 bp, Artificial Sequence
  Synthetic oligonucleotide
gccgcgtctagcatactgtggtctagtatc

SEQ ID NO: 234756 - DNA, 30 bp, Artificial Sequence
  Synthetic oligonucleotide
cacagtccaagtaatttatagtaccgtatc

SEQ ID NO: 234757 - DNA, 30 bp, Artificial Sequence
  Synthetic oligonucleotide
cggagataccgctgaaattgttaccgtatc

SEQ ID NO: 234758 - DNA, 30 bp, Artificial Sequence
  Synthetic oligonucleotide
cgctcaggcgaggactttgtgaggcgtatc

SEQ ID NO: 234759 - DNA, 30 bp, Artificial Sequence
  Synthetic oligonucleotide
aggtacatttcatctatgatgcgtcgtatc

SEQ ID NO: 234760 - DNA, 30 bp, Artificial Sequence
  Synthetic oligonucleotide
tagcgctctgaatgctttactctaggtatc

SEQ ID NO: 234761 - DNA, 30 bp, Artificial Sequence
  Synthetic oligonucleotide
gggcagggtcgtcgctaatggttaggtatc

SEQ ID NO: 234762 - DNA, 30 bp, Artificial Sequence
  Synthetic oligonucleotide
attggttggacccgccaagcgagcggtatc

SEQ ID NO: 234763 - DNA, 30 bp, Artificial Sequence
  Synthetic oligonucleotide
cttgagagggaatttgtttaagcgggtatc

SEQ ID NO: 234764 - DNA, 30 bp, Artificial Sequence
  Synthetic oligonucleotide
gtggaggataaggtggaacagcatggtatc

SEQ ID NO: 234765 - DNA, 30 bp, Artificial Sequence
  Synthetic oligonucleotide
tagctggactacttctcgagcggtggtatc

SEQ ID NO: 234766 - DNA, 30 bp, Artificial Sequence
  Synthetic oligonucleotide
gcagaccgtcgtagtataacggttggtatc

SEQ ID NO: 234767 - DNA, 30 bp, Artificial Sequence
  Synthetic oligonucleotide
gagtaaagatgtgctgttcatcaatgtatc

SEQ ID NO: 234768 - DNA, 30 bp, Artificial Sequence
  Synthetic oligonucleotide
ccgatcctgagaaaggcgacataatgtatc

SEQ ID NO: 234769 - DNA, 30 bp, Artificial Sequence
  Synthetic oligonucleotide
ttctgcaccgtacttcacagagtatgtatc

SEQ ID NO: 234770 - DNA, 30 bp, Artificial Sequence
  Synthetic oligonucleotide
tccttaagcacacgcctctgtccctgtatc

SEQ ID NO: 234771 - DNA, 30 bp, Artificial Sequence
  Synthetic oligonucleotide
gaggctgggtgcctacgttctgcgtgtatc

SEQ ID NO: 234772 - DNA, 30 bp, Artificial Sequence
  Synthetic oligonucleotide
atgggcagcactcacgagaaagaaattatc

SEQ ID NO: 234773 - DNA, 30 bp, Artificial Sequence
  Synthetic oligonucleotide
cagcaaacgaaaggcgcattaacaattatc

SEQ ID NO: 234774 - DNA, 30 bp, Artificial Sequence
  Synthetic oligonucleotide
gttgtcggtctagctgataactgaattatc

SEQ ID NO: 234775 - DNA, 30 bp, Artificial Sequence
  Synthetic oligonucleotide
tgcatcctgaccacaccaggcgtaattatc

SEQ ID NO: 234776 - DNA, 30 bp, Artificial Sequence
  Synthetic oligonucleotide
gacttcgcgcggagtcctggatgcattatc

SEQ ID NO: 234777 - DNA, 30 bp, Artificial Sequence
  Synthetic oligonucleotide
gcaggcgtgggttaactcggttctattatc

SEQ ID NO: 234778 - DNA, 30 bp, Artificial Sequence
  Synthetic oligonucleotide
ctacgataacagaaggggcccggccttatc

SEQ ID NO: 234779 - DNA, 30 bp, Artificial Sequence
  Synthetic oligonucleotide
gtatgttaaatacaagtggggtagcttatc

SEQ ID NO: 234780 - DNA, 30 bp, Artificial Sequence
  Synthetic oligonucleotide
ttaaacagtaaaggcacatttacgcttatc

SEQ ID NO: 234781 - DNA, 30 bp, Artificial Sequence
  Synthetic oligonucleotide
tgtcctagacgggtgcggcataatcttatc

SEQ ID NO: 234782 - DNA, 30 bp, Artificial Sequence
  Synthetic oligonucleotide
gttcgtatgcgctacctggggagtcttatc

SEQ ID NO: 234783 - DNA, 30 bp, Artificial Sequence
  Synthetic oligonucleotide
ccgttacagctcccgtctgagcgtcttatc

SEQ ID NO: 234784 - DNA, 30 bp, Artificial Sequence
  Synthetic oligonucleotide
tacgataggggcagtccagtcacagttatc

SEQ ID NO: 234785 - DNA, 30 bp, Artificial Sequence
  Synthetic oligonucleotide
taccgtttaactctgtctgcgtgagttatc

SEQ ID NO: 234786 - DNA, 30 bp, Artificial Sequence
  Synthetic oligonucleotide
tcagtttgcgtaactagagaattatttatc

SEQ ID NO: 234787 - DNA, 30 bp, Artificial Sequence
  Synthetic oligonucleotide
ttaacatgagttcaaagcagtaactttatc

SEQ ID NO: 234788 - DNA, 30 bp, Artificial Sequence
  Synthetic oligonucleotide
agggacggtaaggccagattacggtttatc

SEQ ID NO: 234789 - DNA, 30 bp, Artificial Sequence
  Synthetic oligonucleotide
ttagggcaaaaggcttaggaaatttttatc

SEQ ID NO: 234790 - DNA, 30 bp, Artificial Sequence
  Synthetic oligonucleotide
cgaaatctaaaccgtgaagttgtaaaactc

SEQ ID NO: 234791 - DNA, 29 bp, Artificial Sequence
  Synthetic oligonucleotide
gcttgtcgcggtatattatacccaaactc

SEQ ID NO: 234792 - DNA, 30 bp, Artificial Sequence
  Synthetic oligonucleotide
gtcccgcgagagtatgccgtaatcaaactc

SEQ ID NO: 234793 - DNA, 30 bp, Artificial Sequence
  Synthetic oligonucleotide
agaggggcgtgtacgtaactcgagaaactc

SEQ ID NO: 234794 - DNA, 30 bp, Artificial Sequence
  Synthetic oligonucleotide
cctgaggataacggcaccccgactaaactc

SEQ ID NO: 234795 - DNA, 30 bp, Artificial Sequence
  Synthetic oligonucleotide
caacagggcacgcgagtagttcaccaactc

SEQ ID NO: 234796 - DNA, 30 bp, Artificial Sequence
  Synthetic oligonucleotide
aacgttaatgctggacatgccagccaactc

SEQ ID NO: 234797 - DNA, 30 bp, Artificial Sequence
  Synthetic oligonucleotide
acagaggttgagtccactgagaggcaactc

SEQ ID NO: 234798 - DNA, 30 bp, Artificial Sequence
  Synthetic oligonucleotide
ccgcatacggagactctaaaacggcaactc

SEQ ID NO: 234799 - DNA, 30 bp, Artificial Sequence
  Synthetic oligonucleotide
tccagtcccatgaggtaacaccgagaactc

SEQ ID NO: 234800 - DNA, 30 bp, Artificial Sequence
  Synthetic oligonucleotide
ctgctgacttaaatgcggcaattagaactc

SEQ ID NO: 234801 - DNA, 30 bp, Artificial Sequence
  Synthetic oligonucleotide
gtaagggagctccacacagccatcgaactc

SEQ ID NO: 234802 - DNA, 30 bp, Artificial Sequence
  Synthetic oligonucleotide
tatgttgggattacggggaagggctaactc

SEQ ID NO: 234803 - DNA, 30 bp, Artificial Sequence
  Synthetic oligonucleotide
gtgacatcggtagttggacttaagtaactc

SEQ ID NO: 234804 - DNA, 30 bp, Artificial Sequence
  Synthetic oligonucleotide
atagaggacaccgacgatttcatgtaactc

SEQ ID NO: 234805 - DNA, 30 bp, Artificial Sequence
  Synthetic oligonucleotide
ggatactcccacaaaggaccgcgttaactc

SEQ ID NO: 234806 - DNA, 30 bp, Artificial Sequence
  Synthetic oligonucleotide
tgttgcgcaagtacaactcggcaaacactc

SEQ ID NO: 234807 - DNA, 30 bp, Artificial Sequence
  Synthetic oligonucleotide
ctgactgctccgtgcggcatgagtacactc

SEQ ID NO: 234808 - DNA, 30 bp, Artificial Sequence
  Synthetic oligonucleotide
gcgcgtctattcgctgtgagaaaaccactc

SEQ ID NO: 234809 - DNA, 30 bp, Artificial Sequence
  Synthetic oligonucleotide
gtgataactggcggatgtctataaccactc

SEQ ID NO: 234810 - DNA, 30 bp, Artificial Sequence
  Synthetic oligonucleotide
gcggctccaacagcgcacacgctaccactc

SEQ ID NO: 234811 - DNA, 30 bp, Artificial Sequence
  Synthetic oligonucleotide
tggtacataaacgccaattagcacccactc

SEQ ID NO: 234812 - DNA, 30 bp, Artificial Sequence
  Synthetic oligonucleotide
gttaggcgaggtacactccactacgcactc

SEQ ID NO: 234813 - DNA, 30 bp, Artificial Sequence
  Synthetic oligonucleotide
gggatcgagccaaagtcttagcccgcactc

SEQ ID NO: 234814 - DNA, 30 bp, Artificial Sequence
  Synthetic oligonucleotide
aagcacattactgggacccggtccgcactc

SEQ ID NO: 234815 - DNA, 30 bp, Artificial Sequence
  Synthetic oligonucleotide
acttgggggacggccaggtccggcgcactc

SEQ ID NO: 234816 - DNA, 30 bp, Artificial Sequence
  Synthetic oligonucleotide
tgataactttcgagggtaaacatcgcactc

SEQ ID NO: 234817 - DNA, 30 bp, Artificial Sequence
  Synthetic oligonucleotide
aacgcaaacgtctagacattgagggcactc

SEQ ID NO: 234818 - DNA, 31 bp, Artificial Sequence
  Synthetic oligonucleotide
cggagtgcactatgaccgttattatgcactc

SEQ ID NO: 234819 - DNA, 30 bp, Artificial Sequence
  Synthetic oligonucleotide
ctacaaggacacgcgcgagcttttgcactc

SEQ ID NO: 234820 - DNA, 30 bp, Artificial Sequence
  Synthetic oligonucleotide
catcttggttaagccactaagcagtcactc

SEQ ID NO: 234821 - DNA, 30 bp, Artificial Sequence
  Synthetic oligonucleotide
ataccgacaggccgaaaactggcgtcactc

SEQ ID NO: 234822 - DNA, 30 bp, Artificial Sequence
  Synthetic oligonucleotide
gaggtggactgcgatacaccatattcactc

SEQ ID NO: 234823 - DNA, 30 bp, Artificial Sequence
  Synthetic oligonucleotide
tcgccggacattacaaaaagttattcactc

SEQ ID NO: 234824 - DNA, 30 bp, Artificial Sequence
  Synthetic oligonucleotide
tgccacgtaaaaaaatgagtgccttcactc

SEQ ID NO: 234825 - DNA, 30 bp, Artificial Sequence
  Synthetic oligonucleotide
tggtacaggagcggatgatccggttcactc

SEQ ID NO: 234826 - DNA, 30 bp, Artificial Sequence
  Synthetic oligonucleotide
gggatcacccaaagggatgcgggttcactc

SEQ ID NO: 234827 - DNA, 30 bp, Artificial Sequence
  Synthetic oligonucleotide
ggtcgatctgtatcgacgccgcaaagactc

SEQ ID NO: 234828 - DNA, 30 bp, Artificial Sequence
  Synthetic oligonucleotide
tcagttggatatctacgacatactagactc

SEQ ID NO: 234829 - DNA, 30 bp, Artificial Sequence
  Synthetic oligonucleotide
acggtcatggatacgagaactggtagactc

SEQ ID NO: 234830 - DNA, 30 bp, Artificial Sequence
  Synthetic oligonucleotide
gtgtcataggcacgataacttcttagactc

SEQ ID NO: 234831 - DNA, 30 bp, Artificial Sequence
  Synthetic oligonucleotide
agatagaccggagaggataatgaacgactc

SEQ ID NO: 234832 - DNA, 30 bp, Artificial Sequence
  Synthetic oligonucleotide
ttttcacaacagaaaaagagttaacgactc

SEQ ID NO: 234833 - DNA, 30 bp, Artificial Sequence
  Synthetic oligonucleotide
gctccactaaactgtttgacaccacgactc

SEQ ID NO: 234834 - DNA, 30 bp, Artificial Sequence
  Synthetic oligonucleotide
tgttaagagaattgcatgccatcacgactc

SEQ ID NO: 234835 - DNA, 30 bp, Artificial Sequence
  Synthetic oligonucleotide
cgccacatagatcagttggtatgacgactc

SEQ ID NO: 234836 - DNA, 30 bp, Artificial Sequence
  Synthetic oligonucleotide
ccaacgataccgtacggcgccaaaggactc

SEQ ID NO: 234837 - DNA, 30 bp, Artificial Sequence
  Synthetic oligonucleotide
ccatacagggcgggaatctggcaaggactc

SEQ ID NO: 234838 - DNA, 30 bp, Artificial Sequence
  Synthetic oligonucleotide
gtccaggggtgtgccgtcagcggcggactc

SEQ ID NO: 234839 - DNA, 30 bp, Artificial Sequence
  Synthetic oligonucleotide
gcaggtcgaccgttaaaccgggaatgactc

SEQ ID NO: 234840 - DNA, 30 bp, Artificial Sequence
  Synthetic oligonucleotide
ttgactagatggtgttcactcgtatgactc

SEQ ID NO: 234841 - DNA, 30 bp, Artificial Sequence
  Synthetic oligonucleotide
aaatatcatctctcgcatcgaagctgactc

SEQ ID NO: 234842 - DNA, 30 bp, Artificial Sequence
  Synthetic oligonucleotide
ggattcagttctattatatcatgctgactc

SEQ ID NO: 234843 - DNA, 30 bp, Artificial Sequence
  Synthetic oligonucleotide
gcgcatagtactttacaccgtcgttgactc

SEQ ID NO: 234844 - DNA, 30 bp, Artificial Sequence
  Synthetic oligonucleotide
cgcgtctataacacagagaggggttgactc

SEQ ID NO: 234845 - DNA, 30 bp, Artificial Sequence
  Synthetic oligonucleotide
cttatatacaggtgcatgactctttgactc

SEQ ID NO: 234846 - DNA, 30 bp, Artificial Sequence
  Synthetic oligonucleotide
gtagacttactgccggactggccaatactc

SEQ ID NO: 234847 - DNA, 31 bp, Artificial Sequence
  Synthetic oligonucleotide
taaataataaatctagggagggcgcatactc

SEQ ID NO: 234848 - DNA, 30 bp, Artificial Sequence
  Synthetic oligonucleotide
gacaatggtatttgctcattcggactactc

SEQ ID NO: 234849 - DNA, 30 bp, Artificial Sequence
  Synthetic oligonucleotide
gcatcaaacgttataccttttcccctactc

SEQ ID NO: 234850 - DNA, 30 bp, Artificial Sequence
  Synthetic oligonucleotide
gcgaagagtgccataaaagatctgctactc

SEQ ID NO: 234851 - DNA, 30 bp, Artificial Sequence
  Synthetic oligonucleotide
ggaacggcttacgttataccacgagtactc

SEQ ID NO: 234852 - DNA, 30 bp, Artificial Sequence
  Synthetic oligonucleotide
cgcgcaagggagaacaggttaaaggtactc

SEQ ID NO: 234853 - DNA, 30 bp, Artificial Sequence
  Synthetic oligonucleotide
gaaacaacactgaatatatgcagattactc

SEQ ID NO: 234854 - DNA, 30 bp, Artificial Sequence
  Synthetic oligonucleotide
atggttagtgatctcgaaccgcgattactc

SEQ ID NO: 234855 - DNA, 30 bp, Artificial Sequence
  Synthetic oligonucleotide
atcggaatagtgggtgtatttctattactc

SEQ ID NO: 234856 - DNA, 30 bp, Artificial Sequence
  Synthetic oligonucleotide
agcatacgtataagactatatgacttactc

SEQ ID NO: 234857 - DNA, 30 bp, Artificial Sequence
  Synthetic oligonucleotide
ctgctaaattagagtccaatgaggttactc

SEQ ID NO: 234858 - DNA, 30 bp, Artificial Sequence
  Synthetic oligonucleotide
tgggcgtcaatagtctgagtgcacaacctc

SEQ ID NO: 234859 - DNA, 30 bp, Artificial Sequence
  Synthetic oligonucleotide
tagaatacatgatgtcgaagcgtcaacctc

SEQ ID NO: 234860 - DNA, 30 bp, Artificial Sequence
  Synthetic oligonucleotide
tatgcgctagggcgctcctacatgaacctc

SEQ ID NO: 234861 - DNA, 30 bp, Artificial Sequence
  Synthetic oligonucleotide
gcaggataaaactggaagaattgacacctc

SEQ ID NO: 234862 - DNA, 30 bp, Artificial Sequence
  Synthetic oligonucleotide
tcatcaacccaatgaagcaggaggcacctc

SEQ ID NO: 234863 - DNA, 30 bp, Artificial Sequence
  Synthetic oligonucleotide
tggaatagtgtgacttgaggctaggacctc

SEQ ID NO: 234864 - DNA, 30 bp, Artificial Sequence
  Synthetic oligonucleotide
gttcacaacgccgtgcctactgtggacctc

SEQ ID NO: 234865 - DNA, 30 bp, Artificial Sequence
  Synthetic oligonucleotide
taggacagcgtttagtataagaattacctc

SEQ ID NO: 234866 - DNA, 30 bp, Artificial Sequence
  Synthetic oligonucleotide
cgagttgatttatatccgaagtgcaccctc

SEQ ID NO: 234867 - DNA, 30 bp, Artificial Sequence
  Synthetic oligonucleotide
aatctaagaaggggcgaacggacgaccctc

SEQ ID NO: 234868 - DNA, 30 bp, Artificial Sequence
  Synthetic oligonucleotide
acgtctgtgtttttattcctcttgaccctc

SEQ ID NO: 234869 - DNA, 30 bp, Artificial Sequence
  Synthetic oligonucleotide
cagatatggttcctagcgtgaagacccctc

SEQ ID NO: 234870 - DNA, 30 bp, Artificial Sequence
  Synthetic oligonucleotide
gatggggtggggtacggaagggcgcccctc

SEQ ID NO: 234871 - DNA, 30 bp, Artificial Sequence
  Synthetic oligonucleotide
cctgcgggcatggcagttcaaaggcccctc

SEQ ID NO: 234872 - DNA, 30 bp, Artificial Sequence
  Synthetic oligonucleotide
cgttcgctcgttagcttgatttgcgccctc

SEQ ID NO: 234873 - DNA, 30 bp, Artificial Sequence
  Synthetic oligonucleotide
ccggacggggatctagggggcggtgccctc

SEQ ID NO: 234874 - DNA, 30 bp, Artificial Sequence
  Synthetic oligonucleotide
ctcgtcagtgtcggtgacctaatatccctc

SEQ ID NO: 234875 - DNA, 30 bp, Artificial Sequence
  Synthetic oligonucleotide
tgtgaacgcgcccccgacctggactccctc

SEQ ID NO: 234876 - DNA, 30 bp, Artificial Sequence
  Synthetic oligonucleotide
tgcgagcgcggtagttctctcggctccctc

SEQ ID NO: 234877 - DNA, 30 bp, Artificial Sequence
  Synthetic oligonucleotide
cttcgataggagactggtaacgattccctc

SEQ ID NO: 234878 - DNA, 30 bp, Artificial Sequence
  Synthetic oligonucleotide
ggattatcctaaggcgatacaatttccctc

SEQ ID NO: 234879 - DNA, 30 bp, Artificial Sequence
  Synthetic oligonucleotide
ccatcactctgggtattcaatctttccctc

SEQ ID NO: 234880 - DNA, 30 bp, Artificial Sequence
  Synthetic oligonucleotide
gagcttagtgtgctcagcccgttaagcctc

SEQ ID NO: 234881 - DNA, 30 bp, Artificial Sequence
  Synthetic oligonucleotide
cggtgcatcgaggaagcaattttcagcctc

SEQ ID NO: 234882 - DNA, 30 bp, Artificial Sequence
  Synthetic oligonucleotide
caatgcagagaatatccctccgcgagcctc

SEQ ID NO: 234883 - DNA, 30 bp, Artificial Sequence
  Synthetic oligonucleotide
ggcggacaggattccataggaactagcctc

SEQ ID NO: 234884 - DNA, 30 bp, Artificial Sequence
  Synthetic oligonucleotide
aggagttcggatagtattttttcgcgcctc

SEQ ID NO: 234885 - DNA, 30 bp, Artificial Sequence
  Synthetic oligonucleotide
ttgagaccatatgagcttagtatgcgcctc

SEQ ID NO: 234886 - DNA, 30 bp, Artificial Sequence
  Synthetic oligonucleotide
cactgtacgccaatttcacagactcgcctc

SEQ ID NO: 234887 - DNA, 30 bp, Artificial Sequence
  Synthetic oligonucleotide
ctgaatcgggctcacgacgcattgggcctc

SEQ ID NO: 234888 - DNA, 30 bp, Artificial Sequence
  Synthetic oligonucleotide
cgcataatggctgttaaagcctctggcctc

SEQ ID NO: 234889 - DNA, 30 bp, Artificial Sequence
  Synthetic oligonucleotide
cccgatgggttttatcacataggtggcctc

SEQ ID NO: 234890 - DNA, 30 bp, Artificial Sequence
  Synthetic oligonucleotide
gacatcaagccttaatattaagttggcctc

SEQ ID NO: 234891 - DNA, 30 bp, Artificial Sequence
  Synthetic oligonucleotide
tggaatatctgtgtcacaaaccagtgcctc

SEQ ID NO: 234892 - DNA, 29 bp, Artificial Sequence
  Synthetic oligonucleotide
ggtcgggtatgtaccgctccctttgcctc

SEQ ID NO: 234893 - DNA, 30 bp, Artificial Sequence
  Synthetic oligonucleotide
tcatccctatgtaaaggcgaaaccatcctc

SEQ ID NO: 234894 - DNA, 30 bp, Artificial Sequence
  Synthetic oligonucleotide
atcgtcatccgaatgacccgtggcatcctc

SEQ ID NO: 234895 - DNA, 30 bp, Artificial Sequence
  Synthetic oligonucleotide
attaatacatgataccgggcgacgatcctc

SEQ ID NO: 234896 - DNA, 30 bp, Artificial Sequence
  Synthetic oligonucleotide
agcatgtcttcgaacgttcttcgactcctc

SEQ ID NO: 234897 - DNA, 30 bp, Artificial Sequence
  Synthetic oligonucleotide
tcaacaggctaaagttaatgaggactcctc

SEQ ID NO: 234898 - DNA, 30 bp, Artificial Sequence
  Synthetic oligonucleotide
cgcgactgtgaagactcaaggcagctcctc

SEQ ID NO: 234899 - DNA, 30 bp, Artificial Sequence
  Synthetic oligonucleotide
cgcgttatcttcgataattaatctctcctc

SEQ ID NO: 234900 - DNA, 30 bp, Artificial Sequence
  Synthetic oligonucleotide
tccttgtagtgatccggggctacagtcctc

SEQ ID NO: 234901 - DNA, 30 bp, Artificial Sequence
  Synthetic oligonucleotide
tggtattggatcgtaacgtaccgagtcctc

SEQ ID NO: 234902 - DNA, 30 bp, Artificial Sequence
  Synthetic oligonucleotide
caagtagggtctcgaagggcttacgtcctc

SEQ ID NO: 234903 - DNA, 30 bp, Artificial Sequence
  Synthetic oligonucleotide
ccgccaattgagtgattggtcaaggtcctc

SEQ ID NO: 234904 - DNA, 30 bp, Artificial Sequence
  Synthetic oligonucleotide
gaaagcgatgtcaagttggattctgtcctc

SEQ ID NO: 234905 - DNA, 30 bp, Artificial Sequence
  Synthetic oligonucleotide
tgccatacgggactacttacatctttcctc

SEQ ID NO: 234906 - DNA, 30 bp, Artificial Sequence
  Synthetic oligonucleotide
aagagtggacattctagcactcaaaagctc

SEQ ID NO: 234907 - DNA, 30 bp, Artificial Sequence
  Synthetic oligonucleotide
aagtcaagatcaatacataccgacaagctc

SEQ ID NO: 234908 - DNA, 30 bp, Artificial Sequence
  Synthetic oligonucleotide
ggaaaaggcagccgtgcaacggccaagctc

SEQ ID NO: 234909 - DNA, 30 bp, Artificial Sequence
  Synthetic oligonucleotide
tatgctcttaagaaagtagttgccaagctc

SEQ ID NO: 234910 - DNA, 30 bp, Artificial Sequence
  Synthetic oligonucleotide
taaggtaccctacatccatctgataagctc

SEQ ID NO: 234911 - DNA, 30 bp, Artificial Sequence
  Synthetic oligonucleotide
taagacgtatgacgtcagtagactaagctc

SEQ ID NO: 234912 - DNA, 30 bp, Artificial Sequence
  Synthetic oligonucleotide
ataaatatgtgagtagaagccgttaagctc

SEQ ID NO: 234913 - DNA, 30 bp, Artificial Sequence
  Synthetic oligonucleotide
acacagctttttgcaagaaaataacagctc

SEQ ID NO: 234914 - DNA, 30 bp, Artificial Sequence
  Synthetic oligonucleotide
tgttgtagaacaggggtacttagacagctc

SEQ ID NO: 234915 - DNA, 30 bp, Artificial Sequence
  Synthetic oligonucleotide
cactggatcaccccagtccaggtacagctc

SEQ ID NO: 234916 - DNA, 30 bp, Artificial Sequence
  Synthetic oligonucleotide
tctgccctagagctcaaggactggcagctc

SEQ ID NO: 234917 - DNA, 30 bp, Artificial Sequence
  Synthetic oligonucleotide
ccgcactttactacggaatcaagtcagctc

SEQ ID NO: 234918 - DNA, 30 bp, Artificial Sequence
  Synthetic oligonucleotide
tgaggggccacgcggtgcttacgtcagctc

SEQ ID NO: 234919 - DNA, 30 bp, Artificial Sequence
  Synthetic oligonucleotide
ctcactttttacttcaaatcaggagagctc

SEQ ID NO: 234920 - DNA, 30 bp, Artificial Sequence
  Synthetic oligonucleotide
ctgaagggcacgagagggatcgacgagctc

SEQ ID NO: 234921 - DNA, 30 bp, Artificial Sequence
  Synthetic oligonucleotide
tccgactgacggacggattactatgagctc

SEQ ID NO: 234922 - DNA, 30 bp, Artificial Sequence
  Synthetic oligonucleotide
tagcaccatgcttctacgtctgttgagctc

SEQ ID NO: 234923 - DNA, 30 bp, Artificial Sequence
  Synthetic oligonucleotide
gattctgttaaagcgacttcaacaacgctc

SEQ ID NO: 234924 - DNA, 30 bp, Artificial Sequence
  Synthetic oligonucleotide
tgctacagcccgctcccttccgcaacgctc

SEQ ID NO: 234925 - DNA, 30 bp, Artificial Sequence
  Synthetic oligonucleotide
tgcaaaacgtaaaggaaacattacacgctc

SEQ ID NO: 234926 - DNA, 30 bp, Artificial Sequence
  Synthetic oligonucleotide
gggataaagtaaccatgtactagcacgctc

SEQ ID NO: 234927 - DNA, 30 bp, Artificial Sequence
  Synthetic oligonucleotide
caacataggtcgcataagaaaccgacgctc

SEQ ID NO: 234928 - DNA, 30 bp, Artificial Sequence
  Synthetic oligonucleotide
agttagggtcacccgccgtcgctgacgctc

SEQ ID NO: 234929 - DNA, 30 bp, Artificial Sequence
  Synthetic oligonucleotide
ccgtataattcaattacatcctcaccgctc

SEQ ID NO: 234930 - DNA, 30 bp, Artificial Sequence
  Synthetic oligonucleotide
cgaaagtatatcacctctaaacatccgctc

SEQ ID NO: 234931 - DNA, 30 bp, Artificial Sequence
  Synthetic oligonucleotide
actaacataagtcttacgaagaaggcgctc

SEQ ID NO: 234932 - DNA, 30 bp, Artificial Sequence
  Synthetic oligonucleotide
gagtagccgactgccccgagttttgcgctc

SEQ ID NO: 234933 - DNA, 30 bp, Artificial Sequence
  Synthetic oligonucleotide
tatacggtaccaaaatggtagcgatcgctc

SEQ ID NO: 234934 - DNA, 30 bp, Artificial Sequence
  Synthetic oligonucleotide
aagcacatgcaaaaggcagaaacctcgctc

SEQ ID NO: 234935 - DNA, 30 bp, Artificial Sequence
  Synthetic oligonucleotide
cataaattttgcgtggagagcaagtcgctc

SEQ ID NO: 234936 - DNA, 30 bp, Artificial Sequence
  Synthetic oligonucleotide
aggagattgcgagacggcagaaattcgctc

SEQ ID NO: 234937 - DNA, 31 bp, Artificial Sequence
  Synthetic oligonucleotide
ctggagccggcattaatgagtaacccggctc

SEQ ID NO: 234938 - DNA, 30 bp, Artificial Sequence
  Synthetic oligonucleotide
tatgtgacggtgcgagaaagatagcggctc

SEQ ID NO: 234939 - DNA, 30 bp, Artificial Sequence
  Synthetic oligonucleotide
aattaggcatgtggtggcccagggcggctc

SEQ ID NO: 234940 - DNA, 30 bp, Artificial Sequence
  Synthetic oligonucleotide
gccgagtttgggcgtcggaagctgcggctc

SEQ ID NO: 234941 - DNA, 30 bp, Artificial Sequence
  Synthetic oligonucleotide
caacgtgcccatgccatagcattgcggctc

SEQ ID NO: 234942 - DNA, 30 bp, Artificial Sequence
  Synthetic oligonucleotide
tcacgacgtattgggtaaacagatcggctc

SEQ ID NO: 234943 - DNA, 30 bp, Artificial Sequence
  Synthetic oligonucleotide
tcaccatctagtcccaactaacgtcggctc

SEQ ID NO: 234944 - DNA, 30 bp, Artificial Sequence
  Synthetic oligonucleotide
cgggtcgcttagagggagactttggggctc

SEQ ID NO: 234945 - DNA, 30 bp, Artificial Sequence
  Synthetic oligonucleotide
catgttttggagcctggttaatgtgggctc

SEQ ID NO: 234946 - DNA, 30 bp, Artificial Sequence
  Synthetic oligonucleotide
gagtctacccacatacaaaatggcatgctc

SEQ ID NO: 234947 - DNA, 30 bp, Artificial Sequence
  Synthetic oligonucleotide
actcgtaagtggtgagatatgttcatgctc

SEQ ID NO: 234948 - DNA, 30 bp, Artificial Sequence
  Synthetic oligonucleotide
taacagggtttagccttaatcagtatgctc

SEQ ID NO: 234949 - DNA, 30 bp, Artificial Sequence
  Synthetic oligonucleotide
tttatcaggtcagtacggatgagtatgctc

SEQ ID NO: 234950 - DNA, 30 bp, Artificial Sequence
  Synthetic oligonucleotide
tcagttgtcttacgggggcgcatgctgctc

SEQ ID NO: 234951 - DNA, 30 bp, Artificial Sequence
  Synthetic oligonucleotide
ttcggctgggcaagacgtgacctgctgctc

SEQ ID NO: 234952 - DNA, 30 bp, Artificial Sequence
  Synthetic oligonucleotide
cattagataatcgggagaggtcatctgctc

SEQ ID NO: 234953 - DNA, 30 bp, Artificial Sequence
  Synthetic oligonucleotide
gcccgtgtgcgcagaattaaggatctgctc

SEQ ID NO: 234954 - DNA, 30 bp, Artificial Sequence
  Synthetic oligonucleotide
ccggacattgagggcccatcgcctgtgctc

SEQ ID NO: 234955 - DNA, 30 bp, Artificial Sequence
  Synthetic oligonucleotide
gagcaacaagcatggaactagcgtgtgctc

SEQ ID NO: 234956 - DNA, 30 bp, Artificial Sequence
  Synthetic oligonucleotide
gcgggtctcagttttttgagaacattgctc

SEQ ID NO: 234957 - DNA, 30 bp, Artificial Sequence
  Synthetic oligonucleotide
ttgtttcgcgtgcgcactgagggcttgctc

SEQ ID NO: 234958 - DNA, 30 bp, Artificial Sequence
  Synthetic oligonucleotide
aagggggcatccgggtctacggggttgctc

SEQ ID NO: 234959 - DNA, 30 bp, Artificial Sequence
  Synthetic oligonucleotide
agaatggggggctacgccggattgttgctc

SEQ ID NO: 234960 - DNA, 30 bp, Artificial Sequence
  Synthetic oligonucleotide
cggcagggacaggatacgagtattttgctc

SEQ ID NO: 234961 - DNA, 30 bp, Artificial Sequence
  Synthetic oligonucleotide
atggtttaggaatctcaggcacttttgctc

SEQ ID NO: 234962 - DNA, 30 bp, Artificial Sequence
  Synthetic oligonucleotide
ttggtgcattacttggatgtcgtaaatctc

SEQ ID NO: 234963 - DNA, 30 bp, Artificial Sequence
  Synthetic oligonucleotide
aactatgtataaacttcgggaaacaatctc

SEQ ID NO: 234964 - DNA, 30 bp, Artificial Sequence
  Synthetic oligonucleotide
tatggcccatcagtgattggcgaagatctc

SEQ ID NO: 234965 - DNA, 30 bp, Artificial Sequence
  Synthetic oligonucleotide
ggctttaaagcatacatgaattaagatctc

SEQ ID NO: 234966 - DNA, 30 bp, Artificial Sequence
  Synthetic oligonucleotide
tcgcggatgagcgcttttctcgacgatctc

SEQ ID NO: 234967 - DNA, 30 bp, Artificial Sequence
  Synthetic oligonucleotide
gggaacagcaccagctatgaagtggatctc

SEQ ID NO: 234968 - DNA, 30 bp, Artificial Sequence
  Synthetic oligonucleotide
ccttgtttaggaccgatcgtgcgtgatctc

SEQ ID NO: 234969 - DNA, 30 bp, Artificial Sequence
  Synthetic oligonucleotide
tggcatttcgcccaaaaaatcagttatctc

SEQ ID NO: 234970 - DNA, 30 bp, Artificial Sequence
  Synthetic oligonucleotide
tcggtccttacaggcgactcatgttatctc

SEQ ID NO: 234971 - DNA, 30 bp, Artificial Sequence
  Synthetic oligonucleotide
cggctgtgtcattgaattcgttgttatctc

SEQ ID NO: 234972 - DNA, 30 bp, Artificial Sequence
  Synthetic oligonucleotide
aagggttgaagtgtgtcaggaaaaactctc

SEQ ID NO: 234973 - DNA, 30 bp, Artificial Sequence
  Synthetic oligonucleotide
actggaaagtcacagggtaaaatgactctc

SEQ ID NO: 234974 - DNA, 30 bp, Artificial Sequence
  Synthetic oligonucleotide
ggcctacgtcgattcgacaggttgactctc

SEQ ID NO: 234975 - DNA, 30 bp, Artificial Sequence
  Synthetic oligonucleotide
gtgtgagcgtaagggccttattttactctc

SEQ ID NO: 234976 - DNA, 30 bp, Artificial Sequence
  Synthetic oligonucleotide
cgcgtagtgtctacagcaggaccgcctctc

SEQ ID NO: 234977 - DNA, 30 bp, Artificial Sequence
  Synthetic oligonucleotide
tgattatgagcgtgatgtgcgggtcctctc

SEQ ID NO: 234978 - DNA, 30 bp, Artificial Sequence
  Synthetic oligonucleotide
ggggggtctagcaccgtacacctcgctctc

SEQ ID NO: 234979 - DNA, 30 bp, Artificial Sequence
  Synthetic oligonucleotide
gtatccagggcgagattggcctcggctctc

SEQ ID NO: 234980 - DNA, 30 bp, Artificial Sequence
  Synthetic oligonucleotide
cgactttgagtcaaggtcagaagggctctc

SEQ ID NO: 234981 - DNA, 30 bp, Artificial Sequence
  Synthetic oligonucleotide
cgatcataatctaagatggagcgggctctc

SEQ ID NO: 234982 - DNA, 30 bp, Artificial Sequence
  Synthetic oligonucleotide
gaggccgaaccgaagggactcctggctctc

SEQ ID NO: 234983 - DNA, 30 bp, Artificial Sequence
  Synthetic oligonucleotide
gccagtcggtgttcgtgctcaacatctctc

SEQ ID NO: 234984 - DNA, 30 bp, Artificial Sequence
  Synthetic oligonucleotide
tcgccagcctggtgtcgctctcattctctc

SEQ ID NO: 234985 - DNA, 30 bp, Artificial Sequence
  Synthetic oligonucleotide
caggagcgaatccacccggaacgttctctc

SEQ ID NO: 234986 - DNA, 30 bp, Artificial Sequence
  Synthetic oligonucleotide
tgcgggcgcaatacgacgctgtacagtctc

SEQ ID NO: 234987 - DNA, 30 bp, Artificial Sequence
  Synthetic oligonucleotide
ctatccttacttgcgttacaaaccagtctc

SEQ ID NO: 234988 - DNA, 30 bp, Artificial Sequence
  Synthetic oligonucleotide
ttgccgtggcatggtgagcaccccagtctc

SEQ ID NO: 234989 - DNA, 30 bp, Artificial Sequence
  Synthetic oligonucleotide
ggttacctgagaaaggggctcatacgtctc

SEQ ID NO: 234990 - DNA, 30 bp, Artificial Sequence
  Synthetic oligonucleotide
acttccgagcgtgatgagccgggccgtctc

SEQ ID NO: 234991 - DNA, 30 bp, Artificial Sequence
  Synthetic oligonucleotide
ggtcaaacctggaggcgtcgtcagcgtctc

SEQ ID NO: 234992 - DNA, 30 bp, Artificial Sequence
  Synthetic oligonucleotide
aatcaggaatgcgacctatgccaaggtctc

SEQ ID NO: 234993 - DNA, 30 bp, Artificial Sequence
  Synthetic oligonucleotide
tctataatgatcgggcacccaacaggtctc

SEQ ID NO: 234994 - DNA, 30 bp, Artificial Sequence
  Synthetic oligonucleotide
aatactgacggatgtggttcaaggggtctc

SEQ ID NO: 234995 - DNA, 30 bp, Artificial Sequence
  Synthetic oligonucleotide
taatgataataaggggaagttgggggtctc

SEQ ID NO: 234996 - DNA, 30 bp, Artificial Sequence
  Synthetic oligonucleotide
agccatacgtagtgatcaaactatggtctc

SEQ ID NO: 234997 - DNA, 30 bp, Artificial Sequence
  Synthetic oligonucleotide
gcgggttacttaaggacagtatctggtctc

SEQ ID NO: 234998 - DNA, 30 bp, Artificial Sequence
  Synthetic oligonucleotide
tcgacaggcatcaggattttgcaatgtctc

SEQ ID NO: 234999 - DNA, 30 bp, Artificial Sequence
  Synthetic oligonucleotide
ttcgtgtgatcactctcatgcagatgtctc

SEQ ID NO: 235000 - DNA, 30 bp, Artificial Sequence
  Synthetic oligonucleotide
caccgctagcataattgttgtaattgtctc

SEQ ID NO: 235001 - DNA, 30 bp, Artificial Sequence
  Synthetic oligonucleotide
ctcacggtctcagtcaaatatgccattctc

SEQ ID NO: 235002 - DNA, 30 bp, Artificial Sequence
  Synthetic oligonucleotide
agtaagggcatcaaacatcgaagcattctc

SEQ ID NO: 235003 - DNA, 30 bp, Artificial Sequence
  Synthetic oligonucleotide
gtatccgaaggaatagatcaggtgcttctc

SEQ ID NO: 235004 - DNA, 30 bp, Artificial Sequence
  Synthetic oligonucleotide
ccggaatggggtcacgacgtatgagttctc

SEQ ID NO: 235005 - DNA, 30 bp, Artificial Sequence
  Synthetic oligonucleotide
cacgttttattatatgggggtctagttctc

SEQ ID NO: 235006 - DNA, 31 bp, Artificial Sequence
  Synthetic oligonucleotide
cctagcgccgacgcatgcaatttacgttctc

SEQ ID NO: 235007 - DNA, 30 bp, Artificial Sequence
  Synthetic oligonucleotide
agtggagaattggtgcatataaccgttctc

SEQ ID NO: 235008 - DNA, 30 bp, Artificial Sequence
  Synthetic oligonucleotide
ggctctcgtaattattaacatggtgttctc

SEQ ID NO: 235009 - DNA, 30 bp, Artificial Sequence
  Synthetic oligonucleotide
atcgagtaataaacaacacattgatttctc

SEQ ID NO: 235010 - DNA, 30 bp, Artificial Sequence
  Synthetic oligonucleotide
aacggggaaaatgaacgtccatcgtttctc

SEQ ID NO: 235011 - DNA, 30 bp, Artificial Sequence
  Synthetic oligonucleotide
aaactagaataatccagtaaattgtttctc

SEQ ID NO: 235012 - DNA, 30 bp, Artificial Sequence
  Synthetic oligonucleotide
tgataccattaggacattccaggttttctc

SEQ ID NO: 235013 - DNA, 30 bp, Artificial Sequence
  Synthetic oligonucleotide
tagttcaatcgcaattttcttacaaaagtc

SEQ ID NO: 235014 - DNA, 30 bp, Artificial Sequence
  Synthetic oligonucleotide
cattcttgattgcaaggaaaccgcaaagtc

SEQ ID NO: 235015 - DNA, 30 bp, Artificial Sequence
  Synthetic oligonucleotide
ggggccatctcttaaacatggagacaagtc

SEQ ID NO: 235016 - DNA, 31 bp, Artificial Sequence
  Synthetic oligonucleotide
catcatgtcctacgcgctgccagtacaagtc

SEQ ID NO: 235017 - DNA, 30 bp, Artificial Sequence
  Synthetic oligonucleotide
tgtaccttggaggacggaccgccccaagtc

SEQ ID NO: 235018 - DNA, 30 bp, Artificial Sequence
  Synthetic oligonucleotide
ttagacggtcgcgtacaaaggcgccaagtc

SEQ ID NO: 235019 - DNA, 30 bp, Artificial Sequence
  Synthetic oligonucleotide
atgttaatgatgccgtctgagcatcaagtc

SEQ ID NO: 235020 - DNA, 30 bp, Artificial Sequence
  Synthetic oligonucleotide
agcagctttacggttcccaacagagaagtc

SEQ ID NO: 235021 - DNA, 30 bp, Artificial Sequence
  Synthetic oligonucleotide
taatgagcgtactgttgggtgtttgaagtc

SEQ ID NO: 235022 - DNA, 30 bp, Artificial Sequence
  Synthetic oligonucleotide
aatgtcagtcctttattacatcgctaagtc

SEQ ID NO: 235023 - DNA, 30 bp, Artificial Sequence
  Synthetic oligonucleotide
gacgtggaggaccactaccgccagtaagtc

SEQ ID NO: 235024 - DNA, 30 bp, Artificial Sequence
  Synthetic oligonucleotide
gaaagaagaatcttcaatcctgtaacagtc

SEQ ID NO: 235025 - DNA, 30 bp, Artificial Sequence
  Synthetic oligonucleotide
cgggcactgctatggtcgcaagtcacagtc

SEQ ID NO: 235026 - DNA, 29 bp, Artificial Sequence
  Synthetic oligonucleotide
atggaacatgcagaaaagccgtcacagtc

SEQ ID NO: 235027 - DNA, 30 bp, Artificial Sequence
  Synthetic oligonucleotide
ccctatgaggtacgatgcaagcggacagtc

SEQ ID NO: 235028 - DNA, 30 bp, Artificial Sequence
  Synthetic oligonucleotide
ctgagcgccagcttaagggtgcatacagtc

SEQ ID NO: 235029 - DNA, 30 bp, Artificial Sequence
  Synthetic oligonucleotide
ccatttcaggcacgatgcggtaaaccagtc

SEQ ID NO: 235030 - DNA, 30 bp, Artificial Sequence
  Synthetic oligonucleotide
acggatgttgcaaattcgcacgacccagtc

SEQ ID NO: 235031 - DNA, 30 bp, Artificial Sequence
  Synthetic oligonucleotide
taggctacataataaaacatagccccagtc

SEQ ID NO: 235032 - DNA, 30 bp, Artificial Sequence
  Synthetic oligonucleotide
tcttagccactaagtcatggatcgccagtc

SEQ ID NO: 235033 - DNA, 30 bp, Artificial Sequence
  Synthetic oligonucleotide
gtataatctacgcgccaagctttgccagtc

SEQ ID NO: 235034 - DNA, 30 bp, Artificial Sequence
  Synthetic oligonucleotide
taagacctctcatacccaaacgctccagtc

SEQ ID NO: 235035 - DNA, 30 bp, Artificial Sequence
  Synthetic oligonucleotide
tgatcggcaggggttcgttgtgctccagtc

SEQ ID NO: 235036 - DNA, 30 bp, Artificial Sequence
  Synthetic oligonucleotide
aacgtataatcgtagggagagaccgcagtc

SEQ ID NO: 235037 - DNA, 30 bp, Artificial Sequence
  Synthetic oligonucleotide
ctaatcaatttcaaattctaaaaggcagtc

SEQ ID NO: 235038 - DNA, 30 bp, Artificial Sequence
  Synthetic oligonucleotide
gggcaggtacttcccaaagccaaggcagtc

SEQ ID NO: 235039 - DNA, 30 bp, Artificial Sequence
  Synthetic oligonucleotide
gggtgcacggcgtaagacactgaggcagtc

SEQ ID NO: 235040 - DNA, 30 bp, Artificial Sequence
  Synthetic oligonucleotide
cagttgattggatccgctacacgggcagtc

SEQ ID NO: 235041 - DNA, 30 bp, Artificial Sequence
  Synthetic oligonucleotide
tcacgcatttaatgcaacaacagatcagtc

SEQ ID NO: 235042 - DNA, 30 bp, Artificial Sequence
  Synthetic oligonucleotide
aagaatagagtcattgtgcccagttcagtc

SEQ ID NO: 235043 - DNA, 30 bp, Artificial Sequence
  Synthetic oligonucleotide
ttaagccatggaaggtgctcagaaagagtc

SEQ ID NO: 235044 - DNA, 30 bp, Artificial Sequence
  Synthetic oligonucleotide
tttgtgcggtcgtaaccccacttaagagtc

SEQ ID NO: 235045 - DNA, 30 bp, Artificial Sequence
  Synthetic oligonucleotide
atgaccaggtagcttttggatgacagagtc

SEQ ID NO: 235046 - DNA, 30 bp, Artificial Sequence
  Synthetic oligonucleotide
tcaacatgggaattggccccatccagagtc

SEQ ID NO: 235047 - DNA, 30 bp, Artificial Sequence
  Synthetic oligonucleotide
gaacaggcgcatcggatttttttgagagtc

SEQ ID NO: 235048 - DNA, 30 bp, Artificial Sequence
  Synthetic oligonucleotide
attacgctgcgaaggaggtttagtagagtc

SEQ ID NO: 235049 - DNA, 30 bp, Artificial Sequence
  Synthetic oligonucleotide
tccacccagcttcggcttgtaaaacgagtc

SEQ ID NO: 235050 - DNA, 30 bp, Artificial Sequence
  Synthetic oligonucleotide
attgctaaacgaaggaatctttcccgagtc

SEQ ID NO: 235051 - DNA, 30 bp, Artificial Sequence
  Synthetic oligonucleotide
cgatgctacagaacatctatgcgtcgagtc

SEQ ID NO: 235052 - DNA, 30 bp, Artificial Sequence
  Synthetic oligonucleotide
cacccaacgtcattcgccggccatggagtc

SEQ ID NO: 235053 - DNA, 30 bp, Artificial Sequence
  Synthetic oligonucleotide
ccttaacgcatgagtcaggccagatgagtc

SEQ ID NO: 235054 - DNA, 30 bp, Artificial Sequence
  Synthetic oligonucleotide
attgtcttgtaatccaccgcacgatgagtc

SEQ ID NO: 235055 - DNA, 30 bp, Artificial Sequence
  Synthetic oligonucleotide
gctcaatgctcaggttcacgatattgagtc

SEQ ID NO: 235056 - DNA, 30 bp, Artificial Sequence
  Synthetic oligonucleotide
agtaaccgcggggcgagccagagcatagtc

SEQ ID NO: 235057 - DNA, 30 bp, Artificial Sequence
  Synthetic oligonucleotide
catgaggcatgacagatatcggagatagtc

SEQ ID NO: 235058 - DNA, 30 bp, Artificial Sequence
  Synthetic oligonucleotide
ggtaaagctaggatccagctggcgctagtc

SEQ ID NO: 235059 - DNA, 30 bp, Artificial Sequence
  Synthetic oligonucleotide
gcgcgcccctgatgcagtccaactctagtc

SEQ ID NO: 235060 - DNA, 30 bp, Artificial Sequence
  Synthetic oligonucleotide
aaacagagaatactggccccccacgtagtc

SEQ ID NO: 235061 - DNA, 30 bp, Artificial Sequence
  Synthetic oligonucleotide
tcgagcacctgtacggttcccaatgtagtc

SEQ ID NO: 235062 - DNA, 30 bp, Artificial Sequence
  Synthetic oligonucleotide
ggatgtctgacttaggcaccgtatgtagtc

SEQ ID NO: 235063 - DNA, 30 bp, Artificial Sequence
  Synthetic oligonucleotide
gagctgcctgcgtagcatttgcgattagtc

SEQ ID NO: 235064 - DNA, 30 bp, Artificial Sequence
  Synthetic oligonucleotide
tgtttggtattccgctattcttggttagtc

SEQ ID NO: 235065 - DNA, 30 bp, Artificial Sequence
  Synthetic oligonucleotide
gtagcagggcgagcttcgagactgttagtc

SEQ ID NO: 235066 - DNA, 30 bp, Artificial Sequence
  Synthetic oligonucleotide
acaagtggtaacgtataaggtcgtttagtc

SEQ ID NO: 235067 - DNA, 30 bp, Artificial Sequence
  Synthetic oligonucleotide
tggcgtatctggagtgtcgaggttttagtc

SEQ ID NO: 235068 - DNA, 30 bp, Artificial Sequence
  Synthetic oligonucleotide
tttcaatggtgggcgagacacagaaacgtc

SEQ ID NO: 235069 - DNA, 30 bp, Artificial Sequence
  Synthetic oligonucleotide
atgctatgcgatgtcgtgcgtggaaacgtc

SEQ ID NO: 235070 - DNA, 30 bp, Artificial Sequence
  Synthetic oligonucleotide
agccccatgcggtggggacgaataaacgtc

SEQ ID NO: 235071 - DNA, 30 bp, Artificial Sequence
  Synthetic oligonucleotide
tacggcttggttgggagaatgagcaacgtc

SEQ ID NO: 235072 - DNA, 30 bp, Artificial Sequence
  Synthetic oligonucleotide
aactctacacaatgtatcaaggagaacgtc

SEQ ID NO: 235073 - DNA, 30 bp, Artificial Sequence
  Synthetic oligonucleotide
ccaggcttccaagccgaataatcgaacgtc

SEQ ID NO: 235074 - DNA, 30 bp, Artificial Sequence
  Synthetic oligonucleotide
ttactagtgcggaacatccggattaacgtc

SEQ ID NO: 235075 - DNA, 30 bp, Artificial Sequence
  Synthetic oligonucleotide
cagctctctatcacccagtaatcacacgtc

SEQ ID NO: 235076 - DNA, 30 bp, Artificial Sequence
  Synthetic oligonucleotide
gcaactggcctagtacgttacccgcacgtc

SEQ ID NO: 235077 - DNA, 30 bp, Artificial Sequence
  Synthetic oligonucleotide
ttggtccatacatttacgttgaggcacgtc

SEQ ID NO: 235078 - DNA, 30 bp, Artificial Sequence
  Synthetic oligonucleotide
cgtgtcaggcagagaatcagtcctcacgtc

SEQ ID NO: 235079 - DNA, 30 bp, Artificial Sequence
  Synthetic oligonucleotide
gtctagccccctgttctgtttgacgacgtc

SEQ ID NO: 235080 - DNA, 30 bp, Artificial Sequence
  Synthetic oligonucleotide
gtggacatatactgtgggggcaatgacgtc

SEQ ID NO: 235081 - DNA, 30 bp, Artificial Sequence
  Synthetic oligonucleotide
ttaacaaagcacttacagtcggaatacgtc

SEQ ID NO: 235082 - DNA, 30 bp, Artificial Sequence
  Synthetic oligonucleotide
acccggtactctaggcctgtgagatacgtc

SEQ ID NO: 235083 - DNA, 30 bp, Artificial Sequence
  Synthetic oligonucleotide
cgacggcgtgtaaaggtatttgtctacgtc

SEQ ID NO: 235084 - DNA, 30 bp, Artificial Sequence
  Synthetic oligonucleotide
cggggacgctttcataacagtgggtacgtc

SEQ ID NO: 235085 - DNA, 30 bp, Artificial Sequence
  Synthetic oligonucleotide
gatacgtgccgaccgtggctgcgttacgtc

SEQ ID NO: 235086 - DNA, 30 bp, Artificial Sequence
  Synthetic oligonucleotide
ctccgaagaagaaaccgaataacaaccgtc

SEQ ID NO: 235087 - DNA, 30 bp, Artificial Sequence
  Synthetic oligonucleotide
taagacggtaggctcagcaaggtaaccgtc

SEQ ID NO: 235088 - DNA, 30 bp, Artificial Sequence
  Synthetic oligonucleotide
caggattcgtacaaacgtcaattcaccgtc

SEQ ID NO: 235089 - DNA, 30 bp, Artificial Sequence
  Synthetic oligonucleotide
ctggtcggaaattcggatggcaataccgtc

SEQ ID NO: 235090 - DNA, 30 bp, Artificial Sequence
  Synthetic oligonucleotide
gcgaggagtcatggccaggcacataccgtc

SEQ ID NO: 235091 - DNA, 30 bp, Artificial Sequence
  Synthetic oligonucleotide
tcagaggcagtctttgtataaatacccgtc

SEQ ID NO: 235092 - DNA, 29 bp, Artificial Sequence
  Synthetic oligonucleotide
gcaactcgactaccgccggcgtacccgtc

SEQ ID NO: 235093 - DNA, 29 bp, Artificial Sequence
  Synthetic oligonucleotide
tcggggacgctattatcagggcccccgtc

SEQ ID NO: 235094 - DNA, 30 bp, Artificial Sequence
  Synthetic oligonucleotide
gataaaatcatggactattttccagccgtc

SEQ ID NO: 235095 - DNA, 30 bp, Artificial Sequence
  Synthetic oligonucleotide
gttttaaagttcagtcaacagcctgccgtc

SEQ ID NO: 235096 - DNA, 30 bp, Artificial Sequence
  Synthetic oligonucleotide
gcgaaggccagatgctcgtaactatccgtc

SEQ ID NO: 235097 - DNA, 30 bp, Artificial Sequence
  Synthetic oligonucleotide
tagtcggtgctcgagtgttaggcctccgtc

SEQ ID NO: 235098 - DNA, 30 bp, Artificial Sequence
  Synthetic oligonucleotide
accagcggtcatccttagtggtgttccgtc

SEQ ID NO: 235099 - DNA, 30 bp, Artificial Sequence
  Synthetic oligonucleotide
agccgcactaccatggatccgtcaagcgtc

SEQ ID NO: 235100 - DNA, 30 bp, Artificial Sequence
  Synthetic oligonucleotide
ccgactggtaaggtttataggaccagcgtc

SEQ ID NO: 235101 - DNA, 30 bp, Artificial Sequence
  Synthetic oligonucleotide
cggtaaatcatacagccgtgtagcagcgtc

SEQ ID NO: 235102 - DNA, 30 bp, Artificial Sequence
  Synthetic oligonucleotide
gtccatcagggtcaccaggtatcgagcgtc

SEQ ID NO: 235103 - DNA, 30 bp, Artificial Sequence
  Synthetic oligonucleotide
ccattaggcccttagacagcatgtagcgtc

SEQ ID NO: 235104 - DNA, 30 bp, Artificial Sequence
  Synthetic oligonucleotide
aacaaaacgtaccgggttaggagccgcgtc

SEQ ID NO: 235105 - DNA, 30 bp, Artificial Sequence
  Synthetic oligonucleotide
taagtatcagggttagggagatgccgcgtc

SEQ ID NO: 235106 - DNA, 30 bp, Artificial Sequence
  Synthetic oligonucleotide
gccatctgcaggctagcacaagtccgcgtc

SEQ ID NO: 235107 - DNA, 30 bp, Artificial Sequence
  Synthetic oligonucleotide
atgtttgttgttaaagccgggatgcgcgtc

SEQ ID NO: 235108 - DNA, 30 bp, Artificial Sequence
  Synthetic oligonucleotide
ctagtcgtcttcggaagtttccatcgcgtc

SEQ ID NO: 235109 - DNA, 30 bp, Artificial Sequence
  Synthetic oligonucleotide
catacgggcatgaacgttccgtaaggcgtc

SEQ ID NO: 235110 - DNA, 30 bp, Artificial Sequence
  Synthetic oligonucleotide
ttagttaaaaaggggaactttggaggcgtc

SEQ ID NO: 235111 - DNA, 30 bp, Artificial Sequence
  Synthetic oligonucleotide
gtatgggcaaaataatcaccacggggcgtc

SEQ ID NO: 235112 - DNA, 30 bp, Artificial Sequence
  Synthetic oligonucleotide
agtggtgcggacgtctggggtgttggcgtc

SEQ ID NO: 235113 - DNA, 30 bp, Artificial Sequence
  Synthetic oligonucleotide
aagttggaattgatgaggcacgcatgcgtc

SEQ ID NO: 235114 - DNA, 30 bp, Artificial Sequence
  Synthetic oligonucleotide
gcagatattcgcaggcgtggttactgcgtc

SEQ ID NO: 235115 - DNA, 30 bp, Artificial Sequence
  Synthetic oligonucleotide
caaggcgaccgttcttgcgtcagctgcgtc

SEQ ID NO: 235116 - DNA, 30 bp, Artificial Sequence
  Synthetic oligonucleotide
cacgccgaattcttactactccagtgcgtc

SEQ ID NO: 235117 - DNA, 30 bp, Artificial Sequence
  Synthetic oligonucleotide
tggtaagaaatggaaggtataaattgcgtc

SEQ ID NO: 235118 - DNA, 30 bp, Artificial Sequence
  Synthetic oligonucleotide
gtaccgatgccacaactcgcggattgcgtc

SEQ ID NO: 235119 - DNA, 30 bp, Artificial Sequence
  Synthetic oligonucleotide
tcgcgaaaaaagaaggtctcggtaatcgtc

SEQ ID NO: 235120 - DNA, 30 bp, Artificial Sequence
  Synthetic oligonucleotide
tgttatttttggaatgatctggacatcgtc

SEQ ID NO: 235121 - DNA, 30 bp, Artificial Sequence
  Synthetic oligonucleotide
caaaaagtcatggatgttcgttgcatcgtc

SEQ ID NO: 235122 - DNA, 30 bp, Artificial Sequence
  Synthetic oligonucleotide
agccccagtcctcaaccggttcagatcgtc

SEQ ID NO: 235123 - DNA, 30 bp, Artificial Sequence
  Synthetic oligonucleotide
gttcgaacttccgggagtgtttagatcgtc

SEQ ID NO: 235124 - DNA, 30 bp, Artificial Sequence
  Synthetic oligonucleotide
ccctcagacggctagcacataaggatcgtc

SEQ ID NO: 235125 - DNA, 30 bp, Artificial Sequence
  Synthetic oligonucleotide
aggttagagtacaagtagtgctggatcgtc

SEQ ID NO: 235126 - DNA, 30 bp, Artificial Sequence
  Synthetic oligonucleotide
gtccaaagaaagtccgatcagtatatcgtc

SEQ ID NO: 235127 - DNA, 31 bp, Artificial Sequence
  Synthetic oligonucleotide
gtgcgtttgcgatagatccaggggactcgtc

SEQ ID NO: 235128 - DNA, 30 bp, Artificial Sequence
  Synthetic oligonucleotide
catcaatgcagagacttataggccctcgtc

SEQ ID NO: 235129 - DNA, 30 bp, Artificial Sequence
  Synthetic oligonucleotide
gaggtccccgaaatgtacaaataggtcgtc

SEQ ID NO: 235130 - DNA, 30 bp, Artificial Sequence
  Synthetic oligonucleotide
tggcccagcgaagtttttctagcggtcgtc

SEQ ID NO: 235131 - DNA, 30 bp, Artificial Sequence
  Synthetic oligonucleotide
cggatgtaaggctcttccgacgcggtcgtc

SEQ ID NO: 235132 - DNA, 30 bp, Artificial Sequence
  Synthetic oligonucleotide
agaggttccgtgtattcttacagggtcgtc

SEQ ID NO: 235133 - DNA, 30 bp, Artificial Sequence
  Synthetic oligonucleotide
gactacgacagggttcgaacacgggtcgtc

SEQ ID NO: 235134 - DNA, 30 bp, Artificial Sequence
  Synthetic oligonucleotide
gttcttcgcgtaagaagaagtcgggtcgtc

SEQ ID NO: 235135 - DNA, 30 bp, Artificial Sequence
  Synthetic oligonucleotide
ttagaaaggaacgatcggagtatattcgtc

SEQ ID NO: 235136 - DNA, 30 bp, Artificial Sequence
  Synthetic oligonucleotide
cagtcgccgagacctattagacacttcgtc

SEQ ID NO: 235137 - DNA, 30 bp, Artificial Sequence
  Synthetic oligonucleotide
acgcccaggacgccgttcgcttccttcgtc

SEQ ID NO: 235138 - DNA, 30 bp, Artificial Sequence
  Synthetic oligonucleotide
ggctgatggtgatgtcatatagagttcgtc

SEQ ID NO: 235139 - DNA, 30 bp, Artificial Sequence
  Synthetic oligonucleotide
tacaatgacaaatcgtagtgcgagttcgtc

SEQ ID NO: 235140 - DNA, 30 bp, Artificial Sequence
  Synthetic oligonucleotide
accaaagtagcctagcccgtaaggttcgtc

SEQ ID NO: 235141 - DNA, 30 bp, Artificial Sequence
  Synthetic oligonucleotide
tagctattgttccgtgcggagctgttcgtc

SEQ ID NO: 235142 - DNA, 30 bp, Artificial Sequence
  Synthetic oligonucleotide
gagaaatcgacagttgagaaaaatttcgtc

SEQ ID NO: 235143 - DNA, 30 bp, Artificial Sequence
  Synthetic oligonucleotide
tagaagccacaagagttaacatgtttcgtc

SEQ ID NO: 235144 - DNA, 30 bp, Artificial Sequence
  Synthetic oligonucleotide
cagcgatctacgactcggggcctaaaggtc

SEQ ID NO: 235145 - DNA, 30 bp, Artificial Sequence
  Synthetic oligonucleotide
acaaaaagcggatgagcccctgtaaaggtc

SEQ ID NO: 235146 - DNA, 30 bp, Artificial Sequence
  Synthetic oligonucleotide
tgttagcaacgaaggcgataccacaaggtc

SEQ ID NO: 235147 - DNA, 30 bp, Artificial Sequence
  Synthetic oligonucleotide
accaaatggtctatcgcatcgggcaaggtc

SEQ ID NO: 235148 - DNA, 30 bp, Artificial Sequence
  Synthetic oligonucleotide
atgatgttactaacgcatatgggcaaggtc

SEQ ID NO: 235149 - DNA, 30 bp, Artificial Sequence
  Synthetic oligonucleotide
gatagggatctctagcacccagagaaggtc

SEQ ID NO: 235150 - DNA, 30 bp, Artificial Sequence
  Synthetic oligonucleotide
ccaaaagggctgagagcccgaccgaaggtc

SEQ ID NO: 235151 - DNA, 30 bp, Artificial Sequence
  Synthetic oligonucleotide
agaacatgtatatagttaagtatgaaggtc

SEQ ID NO: 235152 - DNA, 30 bp, Artificial Sequence
  Synthetic oligonucleotide
ctaggtcccgtatatgtcttgtgtaaggtc

SEQ ID NO: 235153 - DNA, 30 bp, Artificial Sequence
  Synthetic oligonucleotide
acgcgacatcatgtggagaatgttaaggtc

SEQ ID NO: 235154 - DNA, 30 bp, Artificial Sequence
  Synthetic oligonucleotide
gcgctcatgttgtccacagtaacacaggtc

SEQ ID NO: 235155 - DNA, 30 bp, Artificial Sequence
  Synthetic oligonucleotide
ataggtggggactcggatccaatccaggtc

SEQ ID NO: 235156 - DNA, 30 bp, Artificial Sequence
  Synthetic oligonucleotide
aaattgatggtccaaacatgattgcaggtc

SEQ ID NO: 235157 - DNA, 30 bp, Artificial Sequence
  Synthetic oligonucleotide
ggttctcggcctgattatcggacagaggtc

SEQ ID NO: 235158 - DNA, 30 bp, Artificial Sequence
  Synthetic oligonucleotide
ccactatggaaaatcaaccttcgcgaggtc

SEQ ID NO: 235159 - DNA, 30 bp, Artificial Sequence
  Synthetic oligonucleotide
gacaaagcaatcacagcaccgaaggaggtc

SEQ ID NO: 235160 - DNA, 30 bp, Artificial Sequence
  Synthetic oligonucleotide
tcaattgcagggttcttcccaggggaggtc

SEQ ID NO: 235161 - DNA, 30 bp, Artificial Sequence
  Synthetic oligonucleotide
ggaagacggaagcggccggacgtggaggtc

SEQ ID NO: 235162 - DNA, 30 bp, Artificial Sequence
  Synthetic oligonucleotide
gaaccggctcgtaacatccacgatgaggtc

SEQ ID NO: 235163 - DNA, 30 bp, Artificial Sequence
  Synthetic oligonucleotide
gaggcgccatagtcgtacagagcttaggtc

SEQ ID NO: 235164 - DNA, 30 bp, Artificial Sequence
  Synthetic oligonucleotide
tcgtcgtgcaataaggaatgacgaacggtc

SEQ ID NO: 235165 - DNA, 30 bp, Artificial Sequence
  Synthetic oligonucleotide
tgggatatacgaatgggaacgggcacggtc

SEQ ID NO: 235166 - DNA, 30 bp, Artificial Sequence
  Synthetic oligonucleotide
gtatagcgttctgagtgagtgcatacggtc

SEQ ID NO: 235167 - DNA, 30 bp, Artificial Sequence
  Synthetic oligonucleotide
gaaaacagcagtgggagatggtttacggtc

SEQ ID NO: 235168 - DNA, 30 bp, Artificial Sequence
  Synthetic oligonucleotide
tatattattcaggttcgagtaagaccggtc

SEQ ID NO: 235169 - DNA, 30 bp, Artificial Sequence
  Synthetic oligonucleotide
ggccaaaactctgatttttaggtaccggtc

SEQ ID NO: 235170 - DNA, 30 bp, Artificial Sequence
  Synthetic oligonucleotide
cctaccagtacactatcactttcgccggtc

SEQ ID NO: 235171 - DNA, 30 bp, Artificial Sequence
  Synthetic oligonucleotide
catagagttgttcttcaaaataaagcggtc

SEQ ID NO: 235172 - DNA, 30 bp, Artificial Sequence
  Synthetic oligonucleotide
accagctagaagtagtcggatgaggcggtc

SEQ ID NO: 235173 - DNA, 30 bp, Artificial Sequence
  Synthetic oligonucleotide
agaaggtcttaaaatcccaagcgatcggtc

SEQ ID NO: 235174 - DNA, 30 bp, Artificial Sequence
  Synthetic oligonucleotide
tgatagtaaagttcaactagagtatcggtc

SEQ ID NO: 235175 - DNA, 30 bp, Artificial Sequence
  Synthetic oligonucleotide
ggctcttatactaaccaagcacactcggtc

SEQ ID NO: 235176 - DNA, 30 bp, Artificial Sequence
  Synthetic oligonucleotide
cattctgagcaatcgaacaaaagctcggtc

SEQ ID NO: 235177 - DNA, 30 bp, Artificial Sequence
  Synthetic oligonucleotide
accaattgctcgtgacagggtgtctcggtc

SEQ ID NO: 235178 - DNA, 30 bp, Artificial Sequence
  Synthetic oligonucleotide
tcttagtgtcgaggcccaaaaaaaagggtc

SEQ ID NO: 235179 - DNA, 30 bp, Artificial Sequence
  Synthetic oligonucleotide
atgtacaccgagctcacagggccaagggtc

SEQ ID NO: 235180 - DNA, 30 bp, Artificial Sequence
  Synthetic oligonucleotide
caaacatagggatcataaaatccaagggtc

SEQ ID NO: 235181 - DNA, 30 bp, Artificial Sequence
  Synthetic oligonucleotide
cctgtccggatcaaacactggcccagggtc

SEQ ID NO: 235182 - DNA, 30 bp, Artificial Sequence
  Synthetic oligonucleotide
tctattcaatatagcagagggcaccgggtc

SEQ ID NO: 235183 - DNA, 30 bp, Artificial Sequence
  Synthetic oligonucleotide
atcgcgggatcggaaacaccagttcgggtc

SEQ ID NO: 235184 - DNA, 30 bp, Artificial Sequence
  Synthetic oligonucleotide
gcaacctcggtgcaatataacccaggggtc

SEQ ID NO: 235185 - DNA, 30 bp, Artificial Sequence
  Synthetic oligonucleotide
gcttccacatgaaacagggctgagggggtc

SEQ ID NO: 235186 - DNA, 30 bp, Artificial Sequence
  Synthetic oligonucleotide
actttagcaaagtacaaaccccggggggtc

SEQ ID NO: 235187 - DNA, 30 bp, Artificial Sequence
  Synthetic oligonucleotide
tgcaaagtacgtaggagggccgtgggggtc

SEQ ID NO: 235188 - DNA, 27 bp, Artificial Sequence
  Synthetic oligonucleotide
cggacgatatcacatgtaccatgggtc

SEQ ID NO: 235189 - DNA, 30 bp, Artificial Sequence
  Synthetic oligonucleotide
tgcttttaacgtgagagacagggctgggtc

SEQ ID NO: 235190 - DNA, 31 bp, Artificial Sequence
  Synthetic oligonucleotide
cacttgaatcgtgtggggagtggtctgggtc

SEQ ID NO: 235191 - DNA, 30 bp, Artificial Sequence
  Synthetic oligonucleotide
cgatccgacagccgggtattggtctgggtc

SEQ ID NO: 235192 - DNA, 30 bp, Artificial Sequence
  Synthetic oligonucleotide
gccccactaccaaaatcgtgtgcgtgggtc

SEQ ID NO: 235193 - DNA, 30 bp, Artificial Sequence
  Synthetic oligonucleotide
aggtatagcatatatcgattgatgtgggtc

SEQ ID NO: 235194 - DNA, 30 bp, Artificial Sequence
  Synthetic oligonucleotide
tcactccctgggagccgagaaagttgggtc

SEQ ID NO: 235195 - DNA, 30 bp, Artificial Sequence
  Synthetic oligonucleotide
cgtgcttagagacgcggtcacatttgggtc

SEQ ID NO: 235196 - DNA, 30 bp, Artificial Sequence
  Synthetic oligonucleotide
atggggcctagtgctcttattgcaatggtc

SEQ ID NO: 235197 - DNA, 30 bp, Artificial Sequence
  Synthetic oligonucleotide
ccccacaacaatactgcgcagcacatggtc

SEQ ID NO: 235198 - DNA, 30 bp, Artificial Sequence
  Synthetic oligonucleotide
gcagagtagcatacctatggattactggtc

SEQ ID NO: 235199 - DNA, 30 bp, Artificial Sequence
  Synthetic oligonucleotide
gatgagtgctttttgggagacaggctggtc

SEQ ID NO: 235200 - DNA, 30 bp, Artificial Sequence
  Synthetic oligonucleotide
cgcatagggccatactgagatattctggtc

SEQ ID NO: 235201 - DNA, 30 bp, Artificial Sequence
  Synthetic oligonucleotide
taacggctccgtcggaaacgttaattggtc

SEQ ID NO: 235202 - DNA, 30 bp, Artificial Sequence
  Synthetic oligonucleotide
cgtattcgtgatagggattcgaacttggtc

SEQ ID NO: 235203 - DNA, 30 bp, Artificial Sequence
  Synthetic oligonucleotide
ttgaagcaaaacaatgctatccacttggtc

SEQ ID NO: 235204 - DNA, 30 bp, Artificial Sequence
  Synthetic oligonucleotide
cacttcaagctatacaagaccgaaaatgtc

SEQ ID NO: 235205 - DNA, 30 bp, Artificial Sequence
  Synthetic oligonucleotide
cagacaacactggaattggttaaccatgtc

SEQ ID NO: 235206 - DNA, 30 bp, Artificial Sequence
  Synthetic oligonucleotide
gttgtcaattgtgtcatctcaacccatgtc

SEQ ID NO: 235207 - DNA, 30 bp, Artificial Sequence
  Synthetic oligonucleotide
gctgggtcggttactcggacgatccatgtc

SEQ ID NO: 235208 - DNA, 30 bp, Artificial Sequence
  Synthetic oligonucleotide
cacgcataaattgctagcgtgttagatgtc

SEQ ID NO: 235209 - DNA, 30 bp, Artificial Sequence
  Synthetic oligonucleotide
tacacagtcataggacgcttggccgatgtc

SEQ ID NO: 235210 - DNA, 30 bp, Artificial Sequence
  Synthetic oligonucleotide
ttagttggtacggccggaatgggcgatgtc

SEQ ID NO: 235211 - DNA, 30 bp, Artificial Sequence
  Synthetic oligonucleotide
aaccacattcaaaatatgtaaaatgatgtc

SEQ ID NO: 235212 - DNA, 30 bp, Artificial Sequence
  Synthetic oligonucleotide
atgaagatcctaaagtagtagtctgatgtc

SEQ ID NO: 235213 - DNA, 30 bp, Artificial Sequence
  Synthetic oligonucleotide
gcattgcgtaagtagttagattttgatgtc

SEQ ID NO: 235214 - DNA, 30 bp, Artificial Sequence
  Synthetic oligonucleotide
ggttggcgacattgtcacttacgatatgtc

SEQ ID NO: 235215 - DNA, 30 bp, Artificial Sequence
  Synthetic oligonucleotide
gcgcaagcgctctgatccgtctggtatgtc

SEQ ID NO: 235216 - DNA, 30 bp, Artificial Sequence
  Synthetic oligonucleotide
gcaagtacgactggcttggctaattatgtc

SEQ ID NO: 235217 - DNA, 30 bp, Artificial Sequence
  Synthetic oligonucleotide
agtgttcacctgaagcgtccagtttatgtc

SEQ ID NO: 235218 - DNA, 30 bp, Artificial Sequence
  Synthetic oligonucleotide
gagaagataagctaaaacaggcaaactgtc

SEQ ID NO: 235219 - DNA, 30 bp, Artificial Sequence
  Synthetic oligonucleotide
gcctaacaccgctcgctcggtcccactgtc

SEQ ID NO: 235220 - DNA, 30 bp, Artificial Sequence
  Synthetic oligonucleotide
ggagactagctgtttcgacatactactgtc

SEQ ID NO: 235221 - DNA, 30 bp, Artificial Sequence
  Synthetic oligonucleotide
ggtcctacctgattaaacgaacctactgtc

SEQ ID NO: 235222 - DNA, 30 bp, Artificial Sequence
  Synthetic oligonucleotide
ctgttggccgccacgttctacacacctgtc

SEQ ID NO: 235223 - DNA, 30 bp, Artificial Sequence
  Synthetic oligonucleotide
tatcctttacccagtacctgagcacctgtc

SEQ ID NO: 235224 - DNA, 30 bp, Artificial Sequence
  Synthetic oligonucleotide
gggtgactccgtgtgagccgggtccctgtc

SEQ ID NO: 235225 - DNA, 30 bp, Artificial Sequence
  Synthetic oligonucleotide
ccagcagcgactcataagttggggcctgtc

SEQ ID NO: 235226 - DNA, 30 bp, Artificial Sequence
  Synthetic oligonucleotide
cccaagcggaatgctatcattcaagctgtc

SEQ ID NO: 235227 - DNA, 30 bp, Artificial Sequence
  Synthetic oligonucleotide
cgtccctcgtaacgcaccattgcagctgtc

SEQ ID NO: 235228 - DNA, 30 bp, Artificial Sequence
  Synthetic oligonucleotide
gttgatcgtgcatttcaattttgagctgtc

SEQ ID NO: 235229 - DNA, 30 bp, Artificial Sequence
  Synthetic oligonucleotide
tccaaatgtcgggtaacgtggaaggctgtc

SEQ ID NO: 235230 - DNA, 30 bp, Artificial Sequence
  Synthetic oligonucleotide
aaggtcctgggtgaacttgatccggctgtc

SEQ ID NO: 235231 - DNA, 30 bp, Artificial Sequence
  Synthetic oligonucleotide
cttagggtaacctgcgttctactggctgtc

SEQ ID NO: 235232 - DNA, 29 bp, Artificial Sequence
  Synthetic oligonucleotide
atgaagcactcttgagtcggggatctgtc

SEQ ID NO: 235233 - DNA, 30 bp, Artificial Sequence
  Synthetic oligonucleotide
gaatcagaccccaccactacagagtctgtc

SEQ ID NO: 235234 - DNA, 30 bp, Artificial Sequence
  Synthetic oligonucleotide
tattgatagtatgaggagtgactcagtgtc

SEQ ID NO: 235235 - DNA, 30 bp, Artificial Sequence
  Synthetic oligonucleotide
agctgtcaggcgtcttttttcgcgagtgtc

SEQ ID NO: 235236 - DNA, 30 bp, Artificial Sequence
  Synthetic oligonucleotide
cgagcggcaagtacgataactaaccgtgtc

SEQ ID NO: 235237 - DNA, 30 bp, Artificial Sequence
  Synthetic oligonucleotide
accccgattcctagtgtcagcgggcgtgtc

SEQ ID NO: 235238 - DNA, 30 bp, Artificial Sequence
  Synthetic oligonucleotide
gacgtatacatcataagatgcatgcgtgtc

SEQ ID NO: 235239 - DNA, 30 bp, Artificial Sequence
  Synthetic oligonucleotide
atgatgatgacttgcccacattaaggtgtc

SEQ ID NO: 235240 - DNA, 30 bp, Artificial Sequence
  Synthetic oligonucleotide
aagacctaaatgagcatataaccaggtgtc

SEQ ID NO: 235241 - DNA, 30 bp, Artificial Sequence
  Synthetic oligonucleotide
acagaaaatccccttaattggtcaggtgtc

SEQ ID NO: 235242 - DNA, 30 bp, Artificial Sequence
  Synthetic oligonucleotide
cgggctgtaggcgtagtacacgtgggtgtc

SEQ ID NO: 235243 - DNA, 30 bp, Artificial Sequence
  Synthetic oligonucleotide
tagaggcagcattgatgatatttgggtgtc

SEQ ID NO: 235244 - DNA, 30 bp, Artificial Sequence
  Synthetic oligonucleotide
ggcgccttctaattagcataatatggtgtc

SEQ ID NO: 235245 - DNA, 30 bp, Artificial Sequence
  Synthetic oligonucleotide
cagctttgaattgctcaggcatctggtgtc

SEQ ID NO: 235246 - DNA, 30 bp, Artificial Sequence
  Synthetic oligonucleotide
aggtcaattagcaattcgccaccatgtgtc

SEQ ID NO: 235247 - DNA, 30 bp, Artificial Sequence
  Synthetic oligonucleotide
gacctgagttaaactatagcggcatgtgtc

SEQ ID NO: 235248 - DNA, 30 bp, Artificial Sequence
  Synthetic oligonucleotide
gagatctgcgggtgtatattggtatgtgtc

SEQ ID NO: 235249 - DNA, 30 bp, Artificial Sequence
  Synthetic oligonucleotide
gtctcgggccgaatccatggttagtgtgtc

SEQ ID NO: 235250 - DNA, 30 bp, Artificial Sequence
  Synthetic oligonucleotide
ttgcgataacacaccattcttatgtgtgtc

SEQ ID NO: 235251 - DNA, 30 bp, Artificial Sequence
  Synthetic oligonucleotide
aatgagtggcttgtcggctgacgttgtgtc

SEQ ID NO: 235252 - DNA, 30 bp, Artificial Sequence
  Synthetic oligonucleotide
cgctgagacgaacagaggattcaaattgtc

SEQ ID NO: 235253 - DNA, 30 bp, Artificial Sequence
  Synthetic oligonucleotide
gtccatcacagcatccaagagaacattgtc

SEQ ID NO: 235254 - DNA, 30 bp, Artificial Sequence
  Synthetic oligonucleotide
ataggccgaatagctggtaatcccattgtc

SEQ ID NO: 235255 - DNA, 30 bp, Artificial Sequence
  Synthetic oligonucleotide
caaatcgaacgtctagtgtggcggattgtc

SEQ ID NO: 235256 - DNA, 30 bp, Artificial Sequence
  Synthetic oligonucleotide
tagaggcaacatacgcgcgaagaccttgtc

SEQ ID NO: 235257 - DNA, 30 bp, Artificial Sequence
  Synthetic oligonucleotide
gcatatagatagatcacatcactccttgtc

SEQ ID NO: 235258 - DNA, 30 bp, Artificial Sequence
  Synthetic oligonucleotide
ggtaagatagtgaactctgatgtgcttgtc

SEQ ID NO: 235259 - DNA, 30 bp, Artificial Sequence
  Synthetic oligonucleotide
tcgccagaccttgagttagtaagtcttgtc

SEQ ID NO: 235260 - DNA, 30 bp, Artificial Sequence
  Synthetic oligonucleotide
ccgaaggtttgttgatagagcatagttgtc

SEQ ID NO: 235261 - DNA, 30 bp, Artificial Sequence
  Synthetic oligonucleotide
tcgagcaacaaaatgcacatgcacgttgtc

SEQ ID NO: 235262 - DNA, 30 bp, Artificial Sequence
  Synthetic oligonucleotide
gacaacaaccatattccatcatgcgttgtc

SEQ ID NO: 235263 - DNA, 30 bp, Artificial Sequence
  Synthetic oligonucleotide
tgtggcggtatcctgatgggggctgttgtc

SEQ ID NO: 235264 - DNA, 30 bp, Artificial Sequence
  Synthetic oligonucleotide
ttgatctcaacggctgccccgagtgttgtc

SEQ ID NO: 235265 - DNA, 30 bp, Artificial Sequence
  Synthetic oligonucleotide
ggaacgacaactctgtgggctcaatttgtc

SEQ ID NO: 235266 - DNA, 30 bp, Artificial Sequence
  Synthetic oligonucleotide
ctacttgggttggcaatgaaagtatttgtc

SEQ ID NO: 235267 - DNA, 30 bp, Artificial Sequence
  Synthetic oligonucleotide
gtccggaggttggcctaataagtatttgtc

SEQ ID NO: 235268 - DNA, 30 bp, Artificial Sequence
  Synthetic oligonucleotide
accccggcgcgcgaacggacaaagtttgtc

SEQ ID NO: 235269 - DNA, 30 bp, Artificial Sequence
  Synthetic oligonucleotide
atacgcaagatgcataccgcatagtttgtc

SEQ ID NO: 235270 - DNA, 30 bp, Artificial Sequence
  Synthetic oligonucleotide
gaacgaggcaatgcgtcggacagttttgtc

SEQ ID NO: 235271 - DNA, 30 bp, Artificial Sequence
  Synthetic oligonucleotide
ttccatagatagttaagatcattttttgtc

SEQ ID NO: 235272 - DNA, 30 bp, Artificial Sequence
  Synthetic oligonucleotide
aggagtatgttcaccgaaacccgaaaattc

SEQ ID NO: 235273 - DNA, 30 bp, Artificial Sequence
  Synthetic oligonucleotide
ccgatatctagaacattcttgggcaaattc

SEQ ID NO: 235274 - DNA, 30 bp, Artificial Sequence
  Synthetic oligonucleotide
gccagaagacatggaggcaggaagcaattc

SEQ ID NO: 235275 - DNA, 30 bp, Artificial Sequence
  Synthetic oligonucleotide
tggagcagaagaatttatggccaagaattc

SEQ ID NO: 235276 - DNA, 30 bp, Artificial Sequence
  Synthetic oligonucleotide
actaggtgtatcggccttcccatagaattc

SEQ ID NO: 235277 - DNA, 30 bp, Artificial Sequence
  Synthetic oligonucleotide
ttcacgagtatccggacccccctagaattc

SEQ ID NO: 235278 - DNA, 30 bp, Artificial Sequence
  Synthetic oligonucleotide
atggcgcgccaagctcggcaggtagaattc

SEQ ID NO: 235279 - DNA, 30 bp, Artificial Sequence
  Synthetic oligonucleotide
cactatccatctagtattcgccgggaattc

SEQ ID NO: 235280 - DNA, 30 bp, Artificial Sequence
  Synthetic oligonucleotide
tagggtgagtacataccctgtaatgaattc

SEQ ID NO: 235281 - DNA, 30 bp, Artificial Sequence
  Synthetic oligonucleotide
ccctaaagctctgtgcgcggagtataattc

SEQ ID NO: 235282 - DNA, 30 bp, Artificial Sequence
  Synthetic oligonucleotide
tagtacaaccttccatttgcgacctaattc

SEQ ID NO: 235283 - DNA, 30 bp, Artificial Sequence
  Synthetic oligonucleotide
tattaagccagcgcatatgaaaggtaattc

SEQ ID NO: 235284 - DNA, 30 bp, Artificial Sequence
  Synthetic oligonucleotide
gaggtacaaatctaagctaagaggtaattc

SEQ ID NO: 235285 - DNA, 30 bp, Artificial Sequence
  Synthetic oligonucleotide
tctgaatcgcccacattgacgaggtaattc

SEQ ID NO: 235286 - DNA, 30 bp, Artificial Sequence
  Synthetic oligonucleotide
actggcacgtggcactgagctgccacattc

SEQ ID NO: 235287 - DNA, 30 bp, Artificial Sequence
  Synthetic oligonucleotide
gcctataacagagcggcctataggacattc

SEQ ID NO: 235288 - DNA, 30 bp, Artificial Sequence
  Synthetic oligonucleotide
gtaacacctgggacctgagcaatgacattc

SEQ ID NO: 235289 - DNA, 30 bp, Artificial Sequence
  Synthetic oligonucleotide
ggtgtagtgtgtcacgtgttcgttacattc

SEQ ID NO: 235290 - DNA, 30 bp, Artificial Sequence
  Synthetic oligonucleotide
agtgatctatacttcgcgccatcaccattc

SEQ ID NO: 235291 - DNA, 30 bp, Artificial Sequence
  Synthetic oligonucleotide
aggatgtgtttaccggctaggaatccattc

SEQ ID NO: 235292 - DNA, 30 bp, Artificial Sequence
  Synthetic oligonucleotide
gaaattctcatgaaagattgtttagcattc

SEQ ID NO: 235293 - DNA, 30 bp, Artificial Sequence
  Synthetic oligonucleotide
acactctaaaatataaaataggtcgcattc

SEQ ID NO: 235294 - DNA, 30 bp, Artificial Sequence
  Synthetic oligonucleotide
atgaagagctgatgctccgtccaggcattc

SEQ ID NO: 235295 - DNA, 30 bp, Artificial Sequence
  Synthetic oligonucleotide
atgtggcgcactaccagcgatcaggcattc

SEQ ID NO: 235296 - DNA, 30 bp, Artificial Sequence
  Synthetic oligonucleotide
aatagctgtaatgtagtccatacggcattc

SEQ ID NO: 235297 - DNA, 30 bp, Artificial Sequence
  Synthetic oligonucleotide
taggccaaacttgtcaggacgggggcattc

SEQ ID NO: 235298 - DNA, 30 bp, Artificial Sequence
  Synthetic oligonucleotide
cggtaactatatgggaatcatagtgcattc

SEQ ID NO: 235299 - DNA, 30 bp, Artificial Sequence
  Synthetic oligonucleotide
ggggggacccattagatatttcaatcattc

SEQ ID NO: 235300 - DNA, 30 bp, Artificial Sequence
  Synthetic oligonucleotide
ccggattaattagccggagtggcatcattc

SEQ ID NO: 235301 - DNA, 30 bp, Artificial Sequence
  Synthetic oligonucleotide
tctgcacggtagggctgtggacagtcattc

SEQ ID NO: 235302 - DNA, 29 bp, Artificial Sequence
  Synthetic oligonucleotide
acgcgaactaccatgttactgggtcattc

SEQ ID NO: 235303 - DNA, 30 bp, Artificial Sequence
  Synthetic oligonucleotide
ggaggtaaacgtcatggaattgattcattc

SEQ ID NO: 235304 - DNA, 30 bp, Artificial Sequence
  Synthetic oligonucleotide
gagtaacccatggtccaagtgctttcattc

SEQ ID NO: 235305 - DNA, 30 bp, Artificial Sequence
  Synthetic oligonucleotide
cagagaaccgcggttgcagttcgaagattc

SEQ ID NO: 235306 - DNA, 30 bp, Artificial Sequence
  Synthetic oligonucleotide
gtacgaaattgcttttatccaaacagattc

SEQ ID NO: 235307 - DNA, 30 bp, Artificial Sequence
  Synthetic oligonucleotide
gtaggggtccattgtctccaatacagattc

SEQ ID NO: 235308 - DNA, 30 bp, Artificial Sequence
  Synthetic oligonucleotide
tcagcgtgataagattaggtgcggagattc

SEQ ID NO: 235309 - DNA, 30 bp, Artificial Sequence
  Synthetic oligonucleotide
ttgggcccggtatccccccgaaaacgattc

SEQ ID NO: 235310 - DNA, 30 bp, Artificial Sequence
  Synthetic oligonucleotide
aactgccaaatgtcggttacgccacgattc

SEQ ID NO: 235311 - DNA, 30 bp, Artificial Sequence
  Synthetic oligonucleotide
ctctgccggctttcacccagctggcgattc

SEQ ID NO: 235312 - DNA, 30 bp, Artificial Sequence
  Synthetic oligonucleotide
aagactgcagcgctcaccaaggaaggattc

SEQ ID NO: 235313 - DNA, 30 bp, Artificial Sequence
  Synthetic oligonucleotide
agttagcatttgctaagttgaacaggattc

SEQ ID NO: 235314 - DNA, 30 bp, Artificial Sequence
  Synthetic oligonucleotide
acgggcggaataagaagattgctgggattc

SEQ ID NO: 235315 - DNA, 30 bp, Artificial Sequence
  Synthetic oligonucleotide
gcaatagaagccacgacccagttatgattc

SEQ ID NO: 235316 - DNA, 30 bp, Artificial Sequence
  Synthetic oligonucleotide
aacgcgacattgccacgtgttacctgattc

SEQ ID NO: 235317 - DNA, 30 bp, Artificial Sequence
  Synthetic oligonucleotide
ctaagaatggtaagacattcgctctgattc

SEQ ID NO: 235318 - DNA, 30 bp, Artificial Sequence
  Synthetic oligonucleotide
attcatccgcggtatgcctttttgtgattc

SEQ ID NO: 235319 - DNA, 30 bp, Artificial Sequence
  Synthetic oligonucleotide
cgaccacttaaatagttacaatcttgattc

SEQ ID NO: 235320 - DNA, 30 bp, Artificial Sequence
  Synthetic oligonucleotide
ataccactggtcatggcggcaagttgattc

SEQ ID NO: 235321 - DNA, 30 bp, Artificial Sequence
  Synthetic oligonucleotide
cgatagtgtcgaatatgggacctcatattc

SEQ ID NO: 235322 - DNA, 31 bp, Artificial Sequence
  Synthetic oligonucleotide
tgctatcggcgggcccatgatctacctattc

SEQ ID NO: 235323 - DNA, 30 bp, Artificial Sequence
  Synthetic oligonucleotide
ataggccggagattttcgcaagccctattc

SEQ ID NO: 235324 - DNA, 30 bp, Artificial Sequence
  Synthetic oligonucleotide
tgctagacggacggcgaaaatttcctattc

SEQ ID NO: 235325 - DNA, 30 bp, Artificial Sequence
  Synthetic oligonucleotide
ctcgaatcgcacttctcgatagctctattc

SEQ ID NO: 235326 - DNA, 30 bp, Artificial Sequence
  Synthetic oligonucleotide
aggacgcctataaaggtcagcggtgtattc

SEQ ID NO: 235327 - DNA, 30 bp, Artificial Sequence
  Synthetic oligonucleotide
tgaacatgaacactcggatgctgtgtattc

SEQ ID NO: 235328 - DNA, 30 bp, Artificial Sequence
  Synthetic oligonucleotide
gccaggcctcatgtcggtgggcttgtattc

SEQ ID NO: 235329 - DNA, 30 bp, Artificial Sequence
  Synthetic oligonucleotide
cgtacttacggctgcccccggtagttattc

SEQ ID NO: 235330 - DNA, 30 bp, Artificial Sequence
  Synthetic oligonucleotide
acaacgcgaaactgagtgctcatgttattc

SEQ ID NO: 235331 - DNA, 30 bp, Artificial Sequence
  Synthetic oligonucleotide
gacaagttggcctgagtgcgtcgaaacttc

SEQ ID NO: 235332 - DNA, 30 bp, Artificial Sequence
  Synthetic oligonucleotide
ctgactgtggaaggtttgtggatcaacttc

SEQ ID NO: 235333 - DNA, 30 bp, Artificial Sequence
  Synthetic oligonucleotide
tccatgagcgaaaaagccgattataacttc

SEQ ID NO: 235334 - DNA, 30 bp, Artificial Sequence
  Synthetic oligonucleotide
gagcggcatgtcgcacaattcagccacttc

SEQ ID NO: 235335 - DNA, 30 bp, Artificial Sequence
  Synthetic oligonucleotide
ccggccacattcccacgacaaaagcacttc

SEQ ID NO: 235336 - DNA, 30 bp, Artificial Sequence
  Synthetic oligonucleotide
tgcaccaccgacttgtaccttgtcgacttc

SEQ ID NO: 235337 - DNA, 30 bp, Artificial Sequence
  Synthetic oligonucleotide
acactatacattctgcagtgacaggacttc

SEQ ID NO: 235338 - DNA, 30 bp, Artificial Sequence
  Synthetic oligonucleotide
aaatcgataccacaaacgcaacaatacttc

SEQ ID NO: 235339 - DNA, 30 bp, Artificial Sequence
  Synthetic oligonucleotide
cattgatcgctatgatcaggcgaatacttc

SEQ ID NO: 235340 - DNA, 30 bp, Artificial Sequence
  Synthetic oligonucleotide
tagatcattgccttttgcctgaggtacttc

SEQ ID NO: 235341 - DNA, 30 bp, Artificial Sequence
  Synthetic oligonucleotide
ggatacaagcggaaagattgtttgaccttc

SEQ ID NO: 235342 - DNA, 30 bp, Artificial Sequence
  Synthetic oligonucleotide
aatcttcccgcttcgaccaactctaccttc

SEQ ID NO: 235343 - DNA, 30 bp, Artificial Sequence
  Synthetic oligonucleotide
gggccaaaagtagccggttatcttaccttc

SEQ ID NO: 235344 - DNA, 30 bp, Artificial Sequence
  Synthetic oligonucleotide
caatacgtagatgcagatcacaaacccttc

SEQ ID NO: 235345 - DNA, 30 bp, Artificial Sequence
  Synthetic oligonucleotide
caaccatggaccccgggtgcaagacccttc

SEQ ID NO: 235346 - DNA, 30 bp, Artificial Sequence
  Synthetic oligonucleotide
acactatccaggtgaggggtataccccttc

SEQ ID NO: 235347 - DNA, 30 bp, Artificial Sequence
  Synthetic oligonucleotide
agggttaaagaggtgttagttgggcccttc

SEQ ID NO: 235348 - DNA, 30 bp, Artificial Sequence
  Synthetic oligonucleotide
aatgtagccctagaacgatgtacggccttc

SEQ ID NO: 235349 - DNA, 30 bp, Artificial Sequence
  Synthetic oligonucleotide
tgtgtagtgtagcgcagaacaattgccttc

SEQ ID NO: 235350 - DNA, 30 bp, Artificial Sequence
  Synthetic oligonucleotide
ccttccagagtggagccacttagatccttc

SEQ ID NO: 235351 - DNA, 30 bp, Artificial Sequence
  Synthetic oligonucleotide
gacgtgactaaatcatacggaggttccttc

SEQ ID NO: 235352 - DNA, 30 bp, Artificial Sequence
  Synthetic oligonucleotide
tgctacggacagaaacgacagtccagcttc

SEQ ID NO: 235353 - DNA, 30 bp, Artificial Sequence
  Synthetic oligonucleotide
ccaatatacgtttgaacacggtcgagcttc

SEQ ID NO: 235354 - DNA, 30 bp, Artificial Sequence
  Synthetic oligonucleotide
gtttgtagctactcgctgagagctagcttc

SEQ ID NO: 235355 - DNA, 30 bp, Artificial Sequence
  Synthetic oligonucleotide
caggaattgagggcatgggaccaccgcttc

SEQ ID NO: 235356 - DNA, 30 bp, Artificial Sequence
  Synthetic oligonucleotide
tataaacataactatcctccatttcgcttc

SEQ ID NO: 235357 - DNA, 30 bp, Artificial Sequence
  Synthetic oligonucleotide
tcgtatcccgatcagcaagataacggcttc

SEQ ID NO: 235358 - DNA, 30 bp, Artificial Sequence
  Synthetic oligonucleotide
acgggtattgcgccgataaacttgggcttc

SEQ ID NO: 235359 - DNA, 30 bp, Artificial Sequence
  Synthetic oligonucleotide
ctgtagcgtcgaaacgctgtacctggcttc

SEQ ID NO: 235360 - DNA, 30 bp, Artificial Sequence
  Synthetic oligonucleotide
ggtggcggatgctccacaagccactgcttc

SEQ ID NO: 235361 - DNA, 30 bp, Artificial Sequence
  Synthetic oligonucleotide
aaggggcgcccttggagaagttactgcttc

SEQ ID NO: 235362 - DNA, 30 bp, Artificial Sequence
  Synthetic oligonucleotide
ttctaatgcgaacatccccctggttgcttc

SEQ ID NO: 235363 - DNA, 30 bp, Artificial Sequence
  Synthetic oligonucleotide
agatcaggctcatcttagcataaactcttc

SEQ ID NO: 235364 - DNA, 30 bp, Artificial Sequence
  Synthetic oligonucleotide
gtcgggacttgcagtacgcgtggactcttc

SEQ ID NO: 235365 - DNA, 30 bp, Artificial Sequence
  Synthetic oligonucleotide
gccttgaacagggggtcgcgtattctcttc

SEQ ID NO: 235366 - DNA, 30 bp, Artificial Sequence
  Synthetic oligonucleotide
gttactttcggaacgtcccccacagtcttc

SEQ ID NO: 235367 - DNA, 30 bp, Artificial Sequence
  Synthetic oligonucleotide
catcgggtgggccatccaatgtcagtcttc

SEQ ID NO: 235368 - DNA, 30 bp, Artificial Sequence
  Synthetic oligonucleotide
agcgctacccatcttagcgtccacgtcttc

SEQ ID NO: 235369 - DNA, 30 bp, Artificial Sequence
  Synthetic oligonucleotide
tccggtgcgccgacataatagctggtcttc

SEQ ID NO: 235370 - DNA, 30 bp, Artificial Sequence
  Synthetic oligonucleotide
cagaatgtggatgtattgcagcgattcttc

SEQ ID NO: 235371 - DNA, 30 bp, Artificial Sequence
  Synthetic oligonucleotide
agggaacaaacactttggatctatttcttc

SEQ ID NO: 235372 - DNA, 30 bp, Artificial Sequence
  Synthetic oligonucleotide
tggtcctaaagtcacatcattggaaagttc

SEQ ID NO: 235373 - DNA, 30 bp, Artificial Sequence
  Synthetic oligonucleotide
cagttgcggtgtatgcttatatgaaagttc

SEQ ID NO: 235374 - DNA, 30 bp, Artificial Sequence
  Synthetic oligonucleotide
gtctctgggcaagagcgctgttagaagttc

SEQ ID NO: 235375 - DNA, 30 bp, Artificial Sequence
  Synthetic oligonucleotide
tgacgacgtctagatgcttcagggaagttc

SEQ ID NO: 235376 - DNA, 30 bp, Artificial Sequence
  Synthetic oligonucleotide
gcacagtctgttgtataagcattgaagttc

SEQ ID NO: 235377 - DNA, 30 bp, Artificial Sequence
  Synthetic oligonucleotide
caatgtagtcaaatacgggtctgtaagttc

SEQ ID NO: 235378 - DNA, 30 bp, Artificial Sequence
  Synthetic oligonucleotide
cgttaagctacagagccattattacagttc

SEQ ID NO: 235379 - DNA, 30 bp, Artificial Sequence
  Synthetic oligonucleotide
cgcacatggtttaagttatccgtccagttc

SEQ ID NO: 235380 - DNA, 30 bp, Artificial Sequence
  Synthetic oligonucleotide
cggggacggcaaaaaataatttttcagttc

SEQ ID NO: 235381 - DNA, 30 bp, Artificial Sequence
  Synthetic oligonucleotide
atctgagggccatcattacgcttcgagttc

SEQ ID NO: 235382 - DNA, 30 bp, Artificial Sequence
  Synthetic oligonucleotide
atgaaggggaatggcgatcggaaggagttc

SEQ ID NO: 235383 - DNA, 30 bp, Artificial Sequence
  Synthetic oligonucleotide
attgcagagtaaacacaaagtcgggagttc

SEQ ID NO: 235384 - DNA, 30 bp, Artificial Sequence
  Synthetic oligonucleotide
ggactgcaacggggattattgatggagttc

SEQ ID NO: 235385 - DNA, 30 bp, Artificial Sequence
  Synthetic oligonucleotide
acagtggggggtacttcccaccttgagttc

SEQ ID NO: 235386 - DNA, 30 bp, Artificial Sequence
  Synthetic oligonucleotide
ctcgccatgaccttcgaaccttttgagttc

SEQ ID NO: 235387 - DNA, 30 bp, Artificial Sequence
  Synthetic oligonucleotide
gtacaaccaatggcaatggtttaatagttc

SEQ ID NO: 235388 - DNA, 30 bp, Artificial Sequence
  Synthetic oligonucleotide
aagccaaaaggaggtcccgatctctagttc

SEQ ID NO: 235389 - DNA, 30 bp, Artificial Sequence
  Synthetic oligonucleotide
cacaaaagcctatcttagggcaggtagttc

SEQ ID NO: 235390 - DNA, 30 bp, Artificial Sequence
  Synthetic oligonucleotide
ctgattgccccctcgtgtaggacttagttc

SEQ ID NO: 235391 - DNA, 30 bp, Artificial Sequence
  Synthetic oligonucleotide
ggccatcagcgtcgctatcattctacgttc

SEQ ID NO: 235392 - DNA, 30 bp, Artificial Sequence
  Synthetic oligonucleotide
cacggtgaaacgttagtatcggtaccgttc

SEQ ID NO: 235393 - DNA, 30 bp, Artificial Sequence
  Synthetic oligonucleotide
aagaaacgtactagtatcaataaggcgttc

SEQ ID NO: 235394 - DNA, 30 bp, Artificial Sequence
  Synthetic oligonucleotide
attcgcggtaccccctatgaaccatcgttc

SEQ ID NO: 235395 - DNA, 30 bp, Artificial Sequence
  Synthetic oligonucleotide
ccgtatggaagttccaacgtactatcgttc

SEQ ID NO: 235396 - DNA, 30 bp, Artificial Sequence
  Synthetic oligonucleotide
ccgcgcttcggttgtaagtctgtatcgttc

SEQ ID NO: 235397 - DNA, 30 bp, Artificial Sequence
  Synthetic oligonucleotide
ctattatataaaccggcgcgcgcctcgttc

SEQ ID NO: 235398 - DNA, 30 bp, Artificial Sequence
  Synthetic oligonucleotide
cgcttcggatcctattactggcgttcgttc

SEQ ID NO: 235399 - DNA, 30 bp, Artificial Sequence
  Synthetic oligonucleotide
ccgttatggtcgcctataaacgcaaggttc

SEQ ID NO: 235400 - DNA, 30 bp, Artificial Sequence
  Synthetic oligonucleotide
cccaggccatgtagaagtgagaccaggttc

SEQ ID NO: 235401 - DNA, 30 bp, Artificial Sequence
  Synthetic oligonucleotide
tacgggcttcttgtctaaaaagtgaggttc

SEQ ID NO: 235402 - DNA, 30 bp, Artificial Sequence
  Synthetic oligonucleotide
aatcccgagcgtcaggtttaatgccggttc

SEQ ID NO: 235403 - DNA, 30 bp, Artificial Sequence
  Synthetic oligonucleotide
taatagcattgcagccgaagtgtccggttc

SEQ ID NO: 235404 - DNA, 30 bp, Artificial Sequence
  Synthetic oligonucleotide
tgttccacgatcaagcacaaccctcggttc

SEQ ID NO: 235405 - DNA, 30 bp, Artificial Sequence
  Synthetic oligonucleotide
gtcatggtgcatcgcctcaagccagggttc

SEQ ID NO: 235406 - DNA, 30 bp, Artificial Sequence
  Synthetic oligonucleotide
cgggcgaacacctgtattctgggagggttc

SEQ ID NO: 235407 - DNA, 30 bp, Artificial Sequence
  Synthetic oligonucleotide
ggggcggcgtggccgtcacgctgagggttc

SEQ ID NO: 235408 - DNA, 30 bp, Artificial Sequence
  Synthetic oligonucleotide
tagaacaatacagtctaagaaacggggttc

SEQ ID NO: 235409 - DNA, 30 bp, Artificial Sequence
  Synthetic oligonucleotide
caacgggtatactggtcgccgtctgggttc

SEQ ID NO: 235410 - DNA, 30 bp, Artificial Sequence
  Synthetic oligonucleotide
ctaggcgcccaggattgtactagtgggttc

SEQ ID NO: 235411 - DNA, 30 bp, Artificial Sequence
  Synthetic oligonucleotide
gttatgtattattcgtcacgtattgggttc

SEQ ID NO: 235412 - DNA, 30 bp, Artificial Sequence
  Synthetic oligonucleotide
atataagaaattagccgcaacacatggttc

SEQ ID NO: 235413 - DNA, 30 bp, Artificial Sequence
  Synthetic oligonucleotide
ccgccatgctgtagtcactatgactggttc

SEQ ID NO: 235414 - DNA, 30 bp, Artificial Sequence
  Synthetic oligonucleotide
agtagctaaaggagaccagtaagctggttc

SEQ ID NO: 235415 - DNA, 30 bp, Artificial Sequence
  Synthetic oligonucleotide
cgatccatcgacggacacaataagtggttc

SEQ ID NO: 235416 - DNA, 30 bp, Artificial Sequence
  Synthetic oligonucleotide
agtcgcaagaggctctggcctttgtggttc

SEQ ID NO: 235417 - DNA, 30 bp, Artificial Sequence
  Synthetic oligonucleotide
aacgaaggcggtaggtgtgaattttggttc

SEQ ID NO: 235418 - DNA, 31 bp, Artificial Sequence
  Synthetic oligonucleotide
cgtcttattcgggacgaactagacaatgttc

SEQ ID NO: 235419 - DNA, 30 bp, Artificial Sequence
  Synthetic oligonucleotide
gtaagggcagtgggttacttatcaatgttc

SEQ ID NO: 235420 - DNA, 30 bp, Artificial Sequence
  Synthetic oligonucleotide
ggggaattaagatgatagcgcggaatgttc

SEQ ID NO: 235421 - DNA, 30 bp, Artificial Sequence
  Synthetic oligonucleotide
gaaccaaacctatcaacatgcccgatgttc

SEQ ID NO: 235422 - DNA, 30 bp, Artificial Sequence
  Synthetic oligonucleotide
ggcgccaggaaatactgccaatcgatgttc

SEQ ID NO: 235423 - DNA, 30 bp, Artificial Sequence
  Synthetic oligonucleotide
aacatcatcaagcgtcccgcgtcgatgttc

SEQ ID NO: 235424 - DNA, 30 bp, Artificial Sequence
  Synthetic oligonucleotide
ccccgtaaaaagagcaattgcggtctgttc

SEQ ID NO: 235425 - DNA, 30 bp, Artificial Sequence
  Synthetic oligonucleotide
caacaagagctgggactaggttttctgttc

SEQ ID NO: 235426 - DNA, 30 bp, Artificial Sequence
  Synthetic oligonucleotide
gtagaggttctcgctagaagaggcgtgttc

SEQ ID NO: 235427 - DNA, 30 bp, Artificial Sequence
  Synthetic oligonucleotide
acttcacatgcctactcgatttaggtgttc

SEQ ID NO: 235428 - DNA, 30 bp, Artificial Sequence
  Synthetic oligonucleotide
aatggaaacacgccaaattcccatgtgttc

SEQ ID NO: 235429 - DNA, 30 bp, Artificial Sequence
  Synthetic oligonucleotide
cacgatttctactcctgaacaacattgttc

SEQ ID NO: 235430 - DNA, 30 bp, Artificial Sequence
  Synthetic oligonucleotide
ctgatatgacacagtgcgtcaagattgttc

SEQ ID NO: 235431 - DNA, 30 bp, Artificial Sequence
  Synthetic oligonucleotide
ggatttctggagctagcgacgtgattgttc

SEQ ID NO: 235432 - DNA, 30 bp, Artificial Sequence
  Synthetic oligonucleotide
ggacaaaattaggtacggccgactttgttc

SEQ ID NO: 235433 - DNA, 30 bp, Artificial Sequence
  Synthetic oligonucleotide
catctaagtgagattgctctacgaaatttc

SEQ ID NO: 235434 - DNA, 30 bp, Artificial Sequence
  Synthetic oligonucleotide
ggagtagactctagcatcagggcgaatttc

SEQ ID NO: 235435 - DNA, 30 bp, Artificial Sequence
  Synthetic oligonucleotide
taatagaatctcagtggccatcaacatttc

SEQ ID NO: 235436 - DNA, 30 bp, Artificial Sequence
  Synthetic oligonucleotide
gatgctggtaattagttcattgagcatttc

SEQ ID NO: 235437 - DNA, 30 bp, Artificial Sequence
  Synthetic oligonucleotide
tcctagtagcaggtgatggggtcgcatttc

SEQ ID NO: 235438 - DNA, 30 bp, Artificial Sequence
  Synthetic oligonucleotide
gatgataagcttcgaacaactccagatttc

SEQ ID NO: 235439 - DNA, 30 bp, Artificial Sequence
  Synthetic oligonucleotide
gtgttgttgaaccctgagggcgtagatttc

SEQ ID NO: 235440 - DNA, 31 bp, Artificial Sequence
  Synthetic oligonucleotide
tagggggcgcatggtggtctcgggggatttc

SEQ ID NO: 235441 - DNA, 30 bp, Artificial Sequence
  Synthetic oligonucleotide
tccgatcaagcgagcctgtgcttggatttc

SEQ ID NO: 235442 - DNA, 30 bp, Artificial Sequence
  Synthetic oligonucleotide
ccaattcgcactaaacgctaggaatatttc

SEQ ID NO: 235443 - DNA, 30 bp, Artificial Sequence
  Synthetic oligonucleotide
cccgtagacggcccgggttctccatatttc

SEQ ID NO: 235444 - DNA, 30 bp, Artificial Sequence
  Synthetic oligonucleotide
tgcgaggatcgcgccagttcaccgtatttc

SEQ ID NO: 235445 - DNA, 30 bp, Artificial Sequence
  Synthetic oligonucleotide
gctacaatgctagtaagctaacattatttc

SEQ ID NO: 235446 - DNA, 30 bp, Artificial Sequence
  Synthetic oligonucleotide
tcagacaattgaagtctcccccaaactttc

SEQ ID NO: 235447 - DNA, 30 bp, Artificial Sequence
  Synthetic oligonucleotide
ttattgcccgggtacgattgacgaactttc

SEQ ID NO: 235448 - DNA, 30 bp, Artificial Sequence
  Synthetic oligonucleotide
agagacccatggcttcgcgccaggactttc

SEQ ID NO: 235449 - DNA, 30 bp, Artificial Sequence
  Synthetic oligonucleotide
atgttttaaattgttgccaagaggactttc

SEQ ID NO: 235450 - DNA, 30 bp, Artificial Sequence
  Synthetic oligonucleotide
gatgggcaccacgatttgaggcggactttc

SEQ ID NO: 235451 - DNA, 30 bp, Artificial Sequence
  Synthetic oligonucleotide
cactgcagattggattcgtagtggactttc

SEQ ID NO: 235452 - DNA, 30 bp, Artificial Sequence
  Synthetic oligonucleotide
cgttatatgcggacgttgttggatactttc

SEQ ID NO: 235453 - DNA, 30 bp, Artificial Sequence
  Synthetic oligonucleotide
ttagttgaacgaacttccgggggacctttc

SEQ ID NO: 235454 - DNA, 30 bp, Artificial Sequence
  Synthetic oligonucleotide
tgactgtacaggtctgagtacgatcctttc

SEQ ID NO: 235455 - DNA, 30 bp, Artificial Sequence
  Synthetic oligonucleotide
gcatctacggtcgtgacggttagtcctttc

SEQ ID NO: 235456 - DNA, 30 bp, Artificial Sequence
  Synthetic oligonucleotide
ggataaagagtgcgataatgccgtcctttc

SEQ ID NO: 235457 - DNA, 30 bp, Artificial Sequence
  Synthetic oligonucleotide
taacgatccgccctggggtcttgtcctttc

SEQ ID NO: 235458 - DNA, 30 bp, Artificial Sequence
  Synthetic oligonucleotide
gaccgtagagcactgcccgtgattcctttc

SEQ ID NO: 235459 - DNA, 30 bp, Artificial Sequence
  Synthetic oligonucleotide
ggaaagtagtaaaccttgtagtctgctttc

SEQ ID NO: 235460 - DNA, 30 bp, Artificial Sequence
  Synthetic oligonucleotide
tagggtgtatggagagggagtggtgctttc

SEQ ID NO: 235461 - DNA, 30 bp, Artificial Sequence
  Synthetic oligonucleotide
taaagtagcaacttggtgtgcgcatctttc

SEQ ID NO: 235462 - DNA, 30 bp, Artificial Sequence
  Synthetic oligonucleotide
ccattgactttcctcgtcatacagtctttc

SEQ ID NO: 235463 - DNA, 30 bp, Artificial Sequence
  Synthetic oligonucleotide
tatcttggttagtgcgtcacgtcgtctttc

SEQ ID NO: 235464 - DNA, 30 bp, Artificial Sequence
  Synthetic oligonucleotide
acaaagcgactccgggttgcttattctttc

SEQ ID NO: 235465 - DNA, 30 bp, Artificial Sequence
  Synthetic oligonucleotide
tggaaccagatgctgaccagggcaagtttc

SEQ ID NO: 235466 - DNA, 30 bp, Artificial Sequence
  Synthetic oligonucleotide
cgaagaatttagcgctaacggagaagtttc

SEQ ID NO: 235467 - DNA, 30 bp, Artificial Sequence
  Synthetic oligonucleotide
ctatgtagttgtggctgcatgttgagtttc

SEQ ID NO: 235468 - DNA, 30 bp, Artificial Sequence
  Synthetic oligonucleotide
ccacgagggctaaccaacgctccacgtttc

SEQ ID NO: 235469 - DNA, 30 bp, Artificial Sequence
  Synthetic oligonucleotide
tacgtcaccggccggtattgataccgtttc

SEQ ID NO: 235470 - DNA, 30 bp, Artificial Sequence
  Synthetic oligonucleotide
gaaatataggttatcagcggtttccgtttc

SEQ ID NO: 235471 - DNA, 30 bp, Artificial Sequence
  Synthetic oligonucleotide
acgcttgtcggagtggtattctcgcgtttc

SEQ ID NO: 235472 - DNA, 30 bp, Artificial Sequence
  Synthetic oligonucleotide
gcaccgcggtgcgtaattaccactcgtttc

SEQ ID NO: 235473 - DNA, 32 bp, Artificial Sequence
  Synthetic oligonucleotide
aggaaattgactatcggcaacatgcaggtttc

SEQ ID NO: 235474 - DNA, 30 bp, Artificial Sequence
  Synthetic oligonucleotide
caagccacaatgagatgtatccccggtttc

SEQ ID NO: 235475 - DNA, 30 bp, Artificial Sequence
  Synthetic oligonucleotide
gcttgtaacgttgtggttgaaatcggtttc

SEQ ID NO: 235476 - DNA, 30 bp, Artificial Sequence
  Synthetic oligonucleotide
aaagagcccgcgttggcataggttggtttc

SEQ ID NO: 235477 - DNA, 30 bp, Artificial Sequence
  Synthetic oligonucleotide
cttgctgatcaaaggtgcttggttggtttc

SEQ ID NO: 235478 - DNA, 30 bp, Artificial Sequence
  Synthetic oligonucleotide
aatgcaaggtttgtttcgatgagatgtttc

SEQ ID NO: 235479 - DNA, 30 bp, Artificial Sequence
  Synthetic oligonucleotide
agtcggatgactgtctcggggacctgtttc

SEQ ID NO: 235480 - DNA, 30 bp, Artificial Sequence
  Synthetic oligonucleotide
accacgaggcaaatttccattggttgtttc

SEQ ID NO: 235481 - DNA, 30 bp, Artificial Sequence
  Synthetic oligonucleotide
gggaggacctggaggagggttgcgattttc

SEQ ID NO: 235482 - DNA, 30 bp, Artificial Sequence
  Synthetic oligonucleotide
ggggttggggggtgaactttttcgattttc

SEQ ID NO: 235483 - DNA, 30 bp, Artificial Sequence
  Synthetic oligonucleotide
gcagtgggaaaacgtatttctcggattttc

SEQ ID NO: 235484 - DNA, 30 bp, Artificial Sequence
  Synthetic oligonucleotide
acctaaccgctgagttaagacatgattttc

SEQ ID NO: 235485 - DNA, 30 bp, Artificial Sequence
  Synthetic oligonucleotide
gcgctgagtcggcggcatggtgaacttttc

SEQ ID NO: 235486 - DNA, 30 bp, Artificial Sequence
  Synthetic oligonucleotide
gaatagcatcgatcacccagaacccttttc

SEQ ID NO: 235487 - DNA, 30 bp, Artificial Sequence
  Synthetic oligonucleotide
gctaccggtctcacctaatccaaatttttc

SEQ ID NO: 235488 - DNA, 30 bp, Artificial Sequence
  Synthetic oligonucleotide
gcctcacaaagtaagaagcaaaattttttc

SEQ ID NO: 235489 - DNA, 30 bp, Artificial Sequence
  Synthetic oligonucleotide
ggcctctgtaaggggggacagaattttttc

SEQ ID NO: 235490 - DNA, 30 bp, Artificial Sequence
  Synthetic oligonucleotide
tctccgaacaacacagcgatgtaaaaaaag

SEQ ID NO: 235491 - DNA, 30 bp, Artificial Sequence
  Synthetic oligonucleotide
tcccgataggagactgcttgaccaaaaaag

SEQ ID NO: 235492 - DNA, 30 bp, Artificial Sequence
  Synthetic oligonucleotide
aaagcgttgcttcaaaacggctccaaaaag

SEQ ID NO: 235493 - DNA, 30 bp, Artificial Sequence
  Synthetic oligonucleotide
tcgaattgcagtaatcgaaagttcaaaaag

SEQ ID NO: 235494 - DNA, 30 bp, Artificial Sequence
  Synthetic oligonucleotide
tattctaaacacggacacccgaataaaaag

SEQ ID NO: 235495 - DNA, 30 bp, Artificial Sequence
  Synthetic oligonucleotide
ccggtgcgttacacctggcaacctaaaaag

SEQ ID NO: 235496 - DNA, 30 bp, Artificial Sequence
  Synthetic oligonucleotide
gttagagcgctctgtctataaggtaaaaag

SEQ ID NO: 235497 - DNA, 30 bp, Artificial Sequence
  Synthetic oligonucleotide
agcggtacggttttcggcaagccacaaaag

SEQ ID NO: 235498 - DNA, 30 bp, Artificial Sequence
  Synthetic oligonucleotide
acgactaggctctaattttccagacaaaag

SEQ ID NO: 235499 - DNA, 30 bp, Artificial Sequence
  Synthetic oligonucleotide
ctttctaacgcgaaggacaacgtacaaaag

SEQ ID NO: 235500 - DNA, 30 bp, Artificial Sequence
  Synthetic oligonucleotide
gccatcgttattttatcactgagccaaaag

SEQ ID NO: 235501 - DNA, 30 bp, Artificial Sequence
  Synthetic oligonucleotide
ccgagccggtttcctctcgcaggccaaaag

SEQ ID NO: 235502 - DNA, 30 bp, Artificial Sequence
  Synthetic oligonucleotide
ggtgtacggttacagagtaatgtccaaaag

SEQ ID NO: 235503 - DNA, 30 bp, Artificial Sequence
  Synthetic oligonucleotide
tactgatcaacacccaaaaagtctcaaaag

SEQ ID NO: 235504 - DNA, 30 bp, Artificial Sequence
  Synthetic oligonucleotide
ttgatccatcagggacgggcctgtcaaaag

SEQ ID NO: 235505 - DNA, 30 bp, Artificial Sequence
  Synthetic oligonucleotide
agttgactgattgggtaggagacagaaaag

SEQ ID NO: 235506 - DNA, 30 bp, Artificial Sequence
  Synthetic oligonucleotide
aagtcgggtgtgattaattgatgggaaaag

SEQ ID NO: 235507 - DNA, 30 bp, Artificial Sequence
  Synthetic oligonucleotide
agtcccaacgccctgggtttatgggaaaag

SEQ ID NO: 235508 - DNA, 30 bp, Artificial Sequence
  Synthetic oligonucleotide
ggatgattgtgcgtagttcgtcatgaaaag

SEQ ID NO: 235509 - DNA, 30 bp, Artificial Sequence
  Synthetic oligonucleotide
ccctgcccaaggaccgcggtcagtgaaaag

SEQ ID NO: 235510 - DNA, 30 bp, Artificial Sequence
  Synthetic oligonucleotide
ctgccaagggtgttgtcaccgtttgaaaag

SEQ ID NO: 235511 - DNA, 30 bp, Artificial Sequence
  Synthetic oligonucleotide
tctgagtaggggccgtccagttaataaaag

SEQ ID NO: 235512 - DNA, 30 bp, Artificial Sequence
  Synthetic oligonucleotide
acactgagaaggcagttccatatataaaag

SEQ ID NO: 235513 - DNA, 30 bp, Artificial Sequence
  Synthetic oligonucleotide
cctaacgacaccatgataagctggtaaaag

SEQ ID NO: 235514 - DNA, 30 bp, Artificial Sequence
  Synthetic oligonucleotide
aggatttaaaagcgagggggattttaaaag

SEQ ID NO: 235515 - DNA, 30 bp, Artificial Sequence
  Synthetic oligonucleotide
taggaacccggagcacgagcgcaaacaaag

SEQ ID NO: 235516 - DNA, 30 bp, Artificial Sequence
  Synthetic oligonucleotide
ccgtgatcatttcggcgtacatgaacaaag

SEQ ID NO: 235517 - DNA, 30 bp, Artificial Sequence
  Synthetic oligonucleotide
acagaaccgcgcgggcaacttcgcacaaag

SEQ ID NO: 235518 - DNA, 30 bp, Artificial Sequence
  Synthetic oligonucleotide
ccgttaaaagccgagtaaggtggcacaaag

SEQ ID NO: 235519 - DNA, 30 bp, Artificial Sequence
  Synthetic oligonucleotide
atccctgaaactggtttggagccgacaaag

SEQ ID NO: 235520 - DNA, 30 bp, Artificial Sequence
  Synthetic oligonucleotide
taagtgttatcatactccacagggacaaag

SEQ ID NO: 235521 - DNA, 30 bp, Artificial Sequence
  Synthetic oligonucleotide
aagaggttttacagtattggatggacaaag

SEQ ID NO: 235522 - DNA, 30 bp, Artificial Sequence
  Synthetic oligonucleotide
ataatctcgtcagttaagtacgttacaaag

SEQ ID NO: 235523 - DNA, 30 bp, Artificial Sequence
  Synthetic oligonucleotide
gggttcgttacaaggtgatacaacccaaag

SEQ ID NO: 235524 - DNA, 30 bp, Artificial Sequence
  Synthetic oligonucleotide
attcggccacgggcctagtgggccccaaag

SEQ ID NO: 235525 - DNA, 30 bp, Artificial Sequence
  Synthetic oligonucleotide
ttacgtaatccgccattaaggtccccaaag

SEQ ID NO: 235526 - DNA, 30 bp, Artificial Sequence
  Synthetic oligonucleotide
gactctacgaattagcagtgactgccaaag

SEQ ID NO: 235527 - DNA, 30 bp, Artificial Sequence
  Synthetic oligonucleotide
ccccacggaattgcctagcggttgccaaag

SEQ ID NO: 235528 - DNA, 30 bp, Artificial Sequence
  Synthetic oligonucleotide
ttaggcgtttgccgtaccacaaatccaaag

SEQ ID NO: 235529 - DNA, 30 bp, Artificial Sequence
  Synthetic oligonucleotide
atccttgtcaagagttgagccggtccaaag

SEQ ID NO: 235530 - DNA, 30 bp, Artificial Sequence
  Synthetic oligonucleotide
cagaccgcgggcgcatatactacagcaaag

SEQ ID NO: 235531 - DNA, 28 bp, Artificial Sequence
  Synthetic oligonucleotide
cgtcagcacggaggcgggaccagcaaag

SEQ ID NO: 235532 - DNA, 30 bp, Artificial Sequence
  Synthetic oligonucleotide
ccaggctcataatcgctcttcgcagcaaag

SEQ ID NO: 235533 - DNA, 30 bp, Artificial Sequence
  Synthetic oligonucleotide
cgttggtggacggggggtaagtcagcaaag

SEQ ID NO: 235534 - DNA, 30 bp, Artificial Sequence
  Synthetic oligonucleotide
ggcctcgatggctggatatcggtcgcaaag

SEQ ID NO: 235535 - DNA, 30 bp, Artificial Sequence
  Synthetic oligonucleotide
tatactgtgaggactatgcgtgaggcaaag

SEQ ID NO: 235536 - DNA, 30 bp, Artificial Sequence
  Synthetic oligonucleotide
acatctagggcaagggggctaagggcaaag

SEQ ID NO: 235537 - DNA, 30 bp, Artificial Sequence
  Synthetic oligonucleotide
acatgtaacggaatttataagatggcaaag

SEQ ID NO: 235538 - DNA, 30 bp, Artificial Sequence
  Synthetic oligonucleotide
atagaatggactttaatagacttggcaaag

SEQ ID NO: 235539 - DNA, 30 bp, Artificial Sequence
  Synthetic oligonucleotide
actctcctgatcgcgagccagattgcaaag

SEQ ID NO: 235540 - DNA, 30 bp, Artificial Sequence
  Synthetic oligonucleotide
agactgggtaaggtctagactgtctcaaag

SEQ ID NO: 235541 - DNA, 30 bp, Artificial Sequence
  Synthetic oligonucleotide
tgcatgatcgtgctttggcatttctcaaag

SEQ ID NO: 235542 - DNA, 30 bp, Artificial Sequence
  Synthetic oligonucleotide
aacctggaagtcgaaatcatctggtcaaag

SEQ ID NO: 235543 - DNA, 30 bp, Artificial Sequence
  Synthetic oligonucleotide
taatataacgcattcccctactattcaaag

SEQ ID NO: 235544 - DNA, 30 bp, Artificial Sequence
  Synthetic oligonucleotide
aaccgccttggggtcggtgtggcaagaaag

SEQ ID NO: 235545 - DNA, 30 bp, Artificial Sequence
  Synthetic oligonucleotide
gttgtgcatcaataagcgatctacagaaag

SEQ ID NO: 235546 - DNA, 30 bp, Artificial Sequence
  Synthetic oligonucleotide
cgctgcatagtcgggactcgtttcagaaag

SEQ ID NO: 235547 - DNA, 30 bp, Artificial Sequence
  Synthetic oligonucleotide
gcatgaaggttaagcccaaaggcgagaaag

SEQ ID NO: 235548 - DNA, 30 bp, Artificial Sequence
  Synthetic oligonucleotide
ctcacttttcgctacaagcttaatagaaag

SEQ ID NO: 235549 - DNA, 30 bp, Artificial Sequence
  Synthetic oligonucleotide
tcttccatgggtgctagttacacccgaaag

SEQ ID NO: 235550 - DNA, 30 bp, Artificial Sequence
  Synthetic oligonucleotide
aggctgcatttctaaaacttggtccgaaag

SEQ ID NO: 235551 - DNA, 30 bp, Artificial Sequence
  Synthetic oligonucleotide
ccaacggcggcatacccgccacggcgaaag

SEQ ID NO: 235552 - DNA, 30 bp, Artificial Sequence
  Synthetic oligonucleotide
aaccctggcgatcgcagtcggcggcgaaag

SEQ ID NO: 235553 - DNA, 31 bp, Artificial Sequence
  Synthetic oligonucleotide
gctcctactagagccgctccatcggcgaaag

SEQ ID NO: 235554 - DNA, 30 bp, Artificial Sequence
  Synthetic oligonucleotide
gtcctgtacggtcggacaacgttgcgaaag

SEQ ID NO: 235555 - DNA, 30 bp, Artificial Sequence
  Synthetic oligonucleotide
tgacaacaattcgcggtagctgctcgaaag

SEQ ID NO: 235556 - DNA, 30 bp, Artificial Sequence
  Synthetic oligonucleotide
aagtgtaatgccaagggaagttctcgaaag

SEQ ID NO: 235557 - DNA, 30 bp, Artificial Sequence
  Synthetic oligonucleotide
ttgccggattgctgtggatgtagtcgaaag

SEQ ID NO: 235558 - DNA, 30 bp, Artificial Sequence
  Synthetic oligonucleotide
ctttgtgtcacaacagtgctctaaggaaag

SEQ ID NO: 235559 - DNA, 30 bp, Artificial Sequence
  Synthetic oligonucleotide
gccccataatttcgttggacagtaggaaag

SEQ ID NO: 235560 - DNA, 30 bp, Artificial Sequence
  Synthetic oligonucleotide
tttgcggtatccgaaaacttgaacggaaag

SEQ ID NO: 235561 - DNA, 30 bp, Artificial Sequence
  Synthetic oligonucleotide
gagacataggatgcgggaaaccgcggaaag

SEQ ID NO: 235562 - DNA, 30 bp, Artificial Sequence
  Synthetic oligonucleotide
agttgaacaaggccttttggtcagggaaag

SEQ ID NO: 235563 - DNA, 30 bp, Artificial Sequence
  Synthetic oligonucleotide
aacaaaaaaggtgtataatatcgtggaaag

SEQ ID NO: 235564 - DNA, 30 bp, Artificial Sequence
  Synthetic oligonucleotide
ttaagtccaataaaaagacgtattggaaag

SEQ ID NO: 235565 - DNA, 30 bp, Artificial Sequence
  Synthetic oligonucleotide
cgtccaactataactcgataagttggaaag

SEQ ID NO: 235566 - DNA, 30 bp, Artificial Sequence
  Synthetic oligonucleotide
ttgtttgaaatgtagtcaaggaaatgaaag

SEQ ID NO: 235567 - DNA, 30 bp, Artificial Sequence
  Synthetic oligonucleotide
agtatttccagaaaattatggctatgaaag

SEQ ID NO: 235568 - DNA, 30 bp, Artificial Sequence
  Synthetic oligonucleotide
attgagcgttaagatagaagtaagtgaaag

SEQ ID NO: 235569 - DNA, 30 bp, Artificial Sequence
  Synthetic oligonucleotide
gctccacaggtgtatgggcctctgtgaaag

SEQ ID NO: 235570 - DNA, 30 bp, Artificial Sequence
  Synthetic oligonucleotide
ctccggtgcagttagaacttaggaataaag

SEQ ID NO: 235571 - DNA, 30 bp, Artificial Sequence
  Synthetic oligonucleotide
aaccctcactagggcattcctgtaataaag

SEQ ID NO: 235572 - DNA, 30 bp, Artificial Sequence
  Synthetic oligonucleotide
gtgcttgacctatcggaatatgctataaag

SEQ ID NO: 235573 - DNA, 30 bp, Artificial Sequence
  Synthetic oligonucleotide
acggacacctagactgcgacgcttataaag

SEQ ID NO: 235574 - DNA, 30 bp, Artificial Sequence
  Synthetic oligonucleotide
tcgatatgggtctagggaatatcactaaag

SEQ ID NO: 235575 - DNA, 30 bp, Artificial Sequence
  Synthetic oligonucleotide
attaaagtaaacgtatacagctcactaaag

SEQ ID NO: 235576 - DNA, 30 bp, Artificial Sequence
  Synthetic oligonucleotide
agccaacgttttgtggatccgaacctaaag

SEQ ID NO: 235577 - DNA, 30 bp, Artificial Sequence
  Synthetic oligonucleotide
attagacctcgaaacaatggatagctaaag

SEQ ID NO: 235578 - DNA, 30 bp, Artificial Sequence
  Synthetic oligonucleotide
ccatcggacctccaggatcaaagtctaaag

SEQ ID NO: 235579 - DNA, 30 bp, Artificial Sequence
  Synthetic oligonucleotide
cggacttgccgtatactcaaaccagtaaag

SEQ ID NO: 235580 - DNA, 30 bp, Artificial Sequence
  Synthetic oligonucleotide
acacgacacgtaaataagctttacgtaaag

SEQ ID NO: 235581 - DNA, 30 bp, Artificial Sequence
  Synthetic oligonucleotide
gggacgggccggccacttaatgtcgtaaag

SEQ ID NO: 235582 - DNA, 30 bp, Artificial Sequence
  Synthetic oligonucleotide
gaatgctagacggaacttaacaaggtaaag

SEQ ID NO: 235583 - DNA, 30 bp, Artificial Sequence
  Synthetic oligonucleotide
aatctgccaggacagctgagtatggtaaag

SEQ ID NO: 235584 - DNA, 30 bp, Artificial Sequence
  Synthetic oligonucleotide
agcgcaccaggaattcacgtaaatgtaaag

SEQ ID NO: 235585 - DNA, 30 bp, Artificial Sequence
  Synthetic oligonucleotide
cggacgcctggattccatgaagatgtaaag

SEQ ID NO: 235586 - DNA, 30 bp, Artificial Sequence
  Synthetic oligonucleotide
actcagtgatgttaattaacatatgtaaag

SEQ ID NO: 235587 - DNA, 30 bp, Artificial Sequence
  Synthetic oligonucleotide
gtatccaacgtacggggggtccctgtaaag

SEQ ID NO: 235588 - DNA, 30 bp, Artificial Sequence
  Synthetic oligonucleotide
agtagagctcgctcagtacccagtgtaaag

SEQ ID NO: 235589 - DNA, 30 bp, Artificial Sequence
  Synthetic oligonucleotide
tctggtgctgtaacgcgttggtgtgtaaag

SEQ ID NO: 235590 - DNA, 30 bp, Artificial Sequence
  Synthetic oligonucleotide
taggctgttcagggccaatcaaacttaaag

SEQ ID NO: 235591 - DNA, 29 bp, Artificial Sequence
  Synthetic oligonucleotide
attgtgtaagtgagagtcaagacttaaag

SEQ ID NO: 235592 - DNA, 30 bp, Artificial Sequence
  Synthetic oligonucleotide
gtcaaagatacttctgatgttgacttaaag

SEQ ID NO: 235593 - DNA, 30 bp, Artificial Sequence
  Synthetic oligonucleotide
gcaacttggctcgcattctactagttaaag

SEQ ID NO: 235594 - DNA, 31 bp, Artificial Sequence
  Synthetic oligonucleotide
agttccgagtcgcagggccataatgttaaag

SEQ ID NO: 235595 - DNA, 30 bp, Artificial Sequence
  Synthetic oligonucleotide
taacaataagaaaagtcctacattttaaag

SEQ ID NO: 235596 - DNA, 30 bp, Artificial Sequence
  Synthetic oligonucleotide
cccgtgggataaacgcagtagcgaaacaag

SEQ ID NO: 235597 - DNA, 30 bp, Artificial Sequence
  Synthetic oligonucleotide
agcccatctatagccggacactagaacaag

SEQ ID NO: 235598 - DNA, 30 bp, Artificial Sequence
  Synthetic oligonucleotide
tatgactaagctacccgctagtagaacaag

SEQ ID NO: 235599 - DNA, 30 bp, Artificial Sequence
  Synthetic oligonucleotide
gaactcaaactacgtggactgcggaacaag

SEQ ID NO: 235600 - DNA, 30 bp, Artificial Sequence
  Synthetic oligonucleotide
tcgaataaccaggtctctatagtgaacaag

SEQ ID NO: 235601 - DNA, 30 bp, Artificial Sequence
  Synthetic oligonucleotide
tgtcatggcgtcggtagctgcaataacaag

SEQ ID NO: 235602 - DNA, 30 bp, Artificial Sequence
  Synthetic oligonucleotide
gctaccctaggatgtgacaaccctaacaag

SEQ ID NO: 235603 - DNA, 30 bp, Artificial Sequence
  Synthetic oligonucleotide
gccacagtacgactaaccggaggacacaag

SEQ ID NO: 235604 - DNA, 30 bp, Artificial Sequence
  Synthetic oligonucleotide
ctgtgaatctgaccgacactttgacacaag

SEQ ID NO: 235605 - DNA, 30 bp, Artificial Sequence
  Synthetic oligonucleotide
gtactagaacgaaaaatacgaccgcacaag

SEQ ID NO: 235606 - DNA, 30 bp, Artificial Sequence
  Synthetic oligonucleotide
taagggttatgtactggttaggtagacaag

SEQ ID NO: 235607 - DNA, 30 bp, Artificial Sequence
  Synthetic oligonucleotide
accctaccctaattatccttatgtgacaag

SEQ ID NO: 235608 - DNA, 30 bp, Artificial Sequence
  Synthetic oligonucleotide
tcactcgccgtgccttttttgctatacaag

SEQ ID NO: 235609 - DNA, 30 bp, Artificial Sequence
  Synthetic oligonucleotide
ttcgccagtaccacggtagttgactacaag

SEQ ID NO: 235610 - DNA, 30 bp, Artificial Sequence
  Synthetic oligonucleotide
gacggcctgtagaatcattcgtcctacaag

SEQ ID NO: 235611 - DNA, 30 bp, Artificial Sequence
  Synthetic oligonucleotide
agaaactcacttggtgcggtcggctacaag

SEQ ID NO: 235612 - DNA, 30 bp, Artificial Sequence
  Synthetic oligonucleotide
aagtcgctctaagagggagatttctacaag

SEQ ID NO: 235613 - DNA, 30 bp, Artificial Sequence
  Synthetic oligonucleotide
gtgctagccatgtatggttcttggtacaag

SEQ ID NO: 235614 - DNA, 30 bp, Artificial Sequence
  Synthetic oligonucleotide
ggaggtgatctaaatacaaagctttacaag

SEQ ID NO: 235615 - DNA, 30 bp, Artificial Sequence
  Synthetic oligonucleotide
acagcactgcctcggccaagtacaaccaag

SEQ ID NO: 235616 - DNA, 30 bp, Artificial Sequence
  Synthetic oligonucleotide
tgttaatgccgtttgattgtgataaccaag

SEQ ID NO: 235617 - DNA, 30 bp, Artificial Sequence
  Synthetic oligonucleotide
aaagggtcaagcacttatggacgcaccaag

SEQ ID NO: 235618 - DNA, 30 bp, Artificial Sequence
  Synthetic oligonucleotide
catgtctctatcttatggatggctaccaag

SEQ ID NO: 235619 - DNA, 30 bp, Artificial Sequence
  Synthetic oligonucleotide
cacaaacacgtgacgcccgggagtaccaag

SEQ ID NO: 235620 - DNA, 30 bp, Artificial Sequence
  Synthetic oligonucleotide
acttttccttgctccaacctcgtacccaag

SEQ ID NO: 235621 - DNA, 30 bp, Artificial Sequence
  Synthetic oligonucleotide
ttcaccatgacgttagggcttccccccaag

SEQ ID NO: 235622 - DNA, 30 bp, Artificial Sequence
  Synthetic oligonucleotide
ataactgggcggtggtagtgtctccccaag

SEQ ID NO: 235623 - DNA, 30 bp, Artificial Sequence
  Synthetic oligonucleotide
tgctcatgtactgagcgcttacggcccaag

SEQ ID NO: 235624 - DNA, 30 bp, Artificial Sequence
  Synthetic oligonucleotide
cggccgcgtggtcaatgacccaatcccaag

SEQ ID NO: 235625 - DNA, 30 bp, Artificial Sequence
  Synthetic oligonucleotide
catggaaggcggtatcatagcggagccaag

SEQ ID NO: 235626 - DNA, 30 bp, Artificial Sequence
  Synthetic oligonucleotide
aggatgtccggagtgaagggagtagccaag

SEQ ID NO: 235627 - DNA, 30 bp, Artificial Sequence
  Synthetic oligonucleotide
ttgcgggcttcaaaacgacacatcgccaag

SEQ ID NO: 235628 - DNA, 30 bp, Artificial Sequence
  Synthetic oligonucleotide
tcgctatgcaggaccatgcgtatcgccaag

SEQ ID NO: 235629 - DNA, 30 bp, Artificial Sequence
  Synthetic oligonucleotide
ctatattgcgaccttggtgattcggccaag

SEQ ID NO: 235630 - DNA, 30 bp, Artificial Sequence
  Synthetic oligonucleotide
gggttgtgtatcctatgtaatggggccaag

SEQ ID NO: 235631 - DNA, 30 bp, Artificial Sequence
  Synthetic oligonucleotide
attcctgaccttgcgcgaaggatgtccaag

SEQ ID NO: 235632 - DNA, 30 bp, Artificial Sequence
  Synthetic oligonucleotide
tcctcgctactaagcaggattcattccaag

SEQ ID NO: 235633 - DNA, 30 bp, Artificial Sequence
  Synthetic oligonucleotide
cttgacgttcgcgtaatactggcttccaag

SEQ ID NO: 235634 - DNA, 30 bp, Artificial Sequence
  Synthetic oligonucleotide
cgatcactcaactcaaagcaatgttccaag

SEQ ID NO: 235635 - DNA, 30 bp, Artificial Sequence
  Synthetic oligonucleotide
gatatagcgccgcacgagtgccgaagcaag

SEQ ID NO: 235636 - DNA, 30 bp, Artificial Sequence
  Synthetic oligonucleotide
aatgtagctttaccggtcaacggcagcaag

SEQ ID NO: 235637 - DNA, 30 bp, Artificial Sequence
  Synthetic oligonucleotide
actggtattacggtgaatgcaccgagcaag

SEQ ID NO: 235638 - DNA, 30 bp, Artificial Sequence
  Synthetic oligonucleotide
tggcgatcgcaaagggaaagccctagcaag

SEQ ID NO: 235639 - DNA, 30 bp, Artificial Sequence
  Synthetic oligonucleotide
ggaatttgtcaaagtcgtggcccacgcaag

SEQ ID NO: 235640 - DNA, 30 bp, Artificial Sequence
  Synthetic oligonucleotide
gcgtgctttgtgggacggtacatgcgcaag

SEQ ID NO: 235641 - DNA, 30 bp, Artificial Sequence
  Synthetic oligonucleotide
gataggtcattcggagtaggagtaggcaag

SEQ ID NO: 235642 - DNA, 30 bp, Artificial Sequence
  Synthetic oligonucleotide
cggccgcgacggtgccgcgtgaccggcaag

SEQ ID NO: 235643 - DNA, 30 bp, Artificial Sequence
  Synthetic oligonucleotide
aaggtctcgttagtcggttgacccggcaag

SEQ ID NO: 235644 - DNA, 30 bp, Artificial Sequence
  Synthetic oligonucleotide
gaccgccttagagccatgcaccagggcaag

SEQ ID NO: 235645 - DNA, 30 bp, Artificial Sequence
  Synthetic oligonucleotide
tttcaagcttcctaatgggcggggggcaag

SEQ ID NO: 235646 - DNA, 30 bp, Artificial Sequence
  Synthetic oligonucleotide
tcgtaattaattagccgccatttgggcaag

SEQ ID NO: 235647 - DNA, 30 bp, Artificial Sequence
  Synthetic oligonucleotide
taaggaggagtcacattttgctctggcaag

SEQ ID NO: 235648 - DNA, 30 bp, Artificial Sequence
  Synthetic oligonucleotide
agaacacacgtagccgcggaaccgtgcaag

SEQ ID NO: 235649 - DNA, 30 bp, Artificial Sequence
  Synthetic oligonucleotide
ggatgttgcctgttttgggtaaattgcaag

SEQ ID NO: 235650 - DNA, 30 bp, Artificial Sequence
  Synthetic oligonucleotide
cgcttcctcctgagtcgcttaatttgcaag

SEQ ID NO: 235651 - DNA, 30 bp, Artificial Sequence
  Synthetic oligonucleotide
aaatcgcctaacacccctacggaaatcaag

SEQ ID NO: 235652 - DNA, 30 bp, Artificial Sequence
  Synthetic oligonucleotide
gtaagctataaggtacttaccagcatcaag

SEQ ID NO: 235653 - DNA, 30 bp, Artificial Sequence
  Synthetic oligonucleotide
gtgaaggacaaaggtggcatactcatcaag

SEQ ID NO: 235654 - DNA, 30 bp, Artificial Sequence
  Synthetic oligonucleotide
ctagaaaaagattacacttgaaatatcaag

SEQ ID NO: 235655 - DNA, 30 bp, Artificial Sequence
  Synthetic oligonucleotide
aagtagtataagcggtcgtacaatatcaag

SEQ ID NO: 235656 - DNA, 30 bp, Artificial Sequence
  Synthetic oligonucleotide
ttcgacagcgagctgttcttcagtatcaag

SEQ ID NO: 235657 - DNA, 30 bp, Artificial Sequence
  Synthetic oligonucleotide
ggacaatgtggcactctgatccgtatcaag

SEQ ID NO: 235658 - DNA, 30 bp, Artificial Sequence
  Synthetic oligonucleotide
cagacactattggtcttaggcacactcaag

SEQ ID NO: 235659 - DNA, 30 bp, Artificial Sequence
  Synthetic oligonucleotide
gttaaataagattcaattagacgactcaag

SEQ ID NO: 235660 - DNA, 30 bp, Artificial Sequence
  Synthetic oligonucleotide
gtgtacggcagaaatgaacctgccctcaag

SEQ ID NO: 235661 - DNA, 30 bp, Artificial Sequence
  Synthetic oligonucleotide
atccacaggataaggcaatcggtgctcaag

SEQ ID NO: 235662 - DNA, 30 bp, Artificial Sequence
  Synthetic oligonucleotide
cttaggtcccgaaattgggactatctcaag

SEQ ID NO: 235663 - DNA, 30 bp, Artificial Sequence
  Synthetic oligonucleotide
tgcagcagtatgcttcggaattatctcaag

SEQ ID NO: 235664 - DNA, 30 bp, Artificial Sequence
  Synthetic oligonucleotide
agtgaagtatgtagcgtcggtcgtctcaag

SEQ ID NO: 235665 - DNA, 30 bp, Artificial Sequence
  Synthetic oligonucleotide
tcactccccgatcaaagtcttacagtcaag

SEQ ID NO: 235666 - DNA, 30 bp, Artificial Sequence
  Synthetic oligonucleotide
cagtagggggcaaaattgtgattagtcaag

SEQ ID NO: 235667 - DNA, 30 bp, Artificial Sequence
  Synthetic oligonucleotide
tttaagcaacaatgttggctatcggtcaag

SEQ ID NO: 235668 - DNA, 30 bp, Artificial Sequence
  Synthetic oligonucleotide
aacggtgtctaagtggaagttagggtcaag

SEQ ID NO: 235669 - DNA, 30 bp, Artificial Sequence
  Synthetic oligonucleotide
tggggacggctaagctgcgattgtgtcaag

SEQ ID NO: 235670 - DNA, 30 bp, Artificial Sequence
  Synthetic oligonucleotide
cacgattcatgcagttcagtacgattcaag

SEQ ID NO: 235671 - DNA, 30 bp, Artificial Sequence
  Synthetic oligonucleotide
gcaaacatccgaatcaagtactgattcaag

SEQ ID NO: 235672 - DNA, 30 bp, Artificial Sequence
  Synthetic oligonucleotide
gcaaagactgcttctcggatcctattcaag

SEQ ID NO: 235673 - DNA, 30 bp, Artificial Sequence
  Synthetic oligonucleotide
aaggttcgctacctggcaggacttttcaag

SEQ ID NO: 235674 - DNA, 30 bp, Artificial Sequence
  Synthetic oligonucleotide
ggcaaactacattcatttctataaaagaag

SEQ ID NO: 235675 - DNA, 30 bp, Artificial Sequence
  Synthetic oligonucleotide
aaccgataactcttcacatatttaaagaag

SEQ ID NO: 235676 - DNA, 30 bp, Artificial Sequence
  Synthetic oligonucleotide
gactagttcccatactgtttgcacaagaag

SEQ ID NO: 235677 - DNA, 30 bp, Artificial Sequence
  Synthetic oligonucleotide
gcacgctactacgagtagagctacaagaag

SEQ ID NO: 235678 - DNA, 30 bp, Artificial Sequence
  Synthetic oligonucleotide
attcagactatctggtgatcccgtaagaag

SEQ ID NO: 235679 - DNA, 30 bp, Artificial Sequence
  Synthetic oligonucleotide
acggggtgcttcacggatgcttgtaagaag

SEQ ID NO: 235680 - DNA, 30 bp, Artificial Sequence
  Synthetic oligonucleotide
caaaagtggagattccgtttttgtaagaag

SEQ ID NO: 235681 - DNA, 30 bp, Artificial Sequence
  Synthetic oligonucleotide
atactaactatcaacctatcgtcagagaag

SEQ ID NO: 235682 - DNA, 30 bp, Artificial Sequence
  Synthetic oligonucleotide
gcaccgagcggaggatataatttagagaag

SEQ ID NO: 235683 - DNA, 30 bp, Artificial Sequence
  Synthetic oligonucleotide
ctgtcaaaatttattaagagtgaggagaag

SEQ ID NO: 235684 - DNA, 30 bp, Artificial Sequence
  Synthetic oligonucleotide
ggatgcgaccgcccaagcggcgcggagaag

SEQ ID NO: 235685 - DNA, 30 bp, Artificial Sequence
  Synthetic oligonucleotide
tcggaaacatgtgatcttgacgatgagaag

SEQ ID NO: 235686 - DNA, 30 bp, Artificial Sequence
  Synthetic oligonucleotide
cgggcgtaacctgtggacagcacatagaag

SEQ ID NO: 235687 - DNA, 30 bp, Artificial Sequence
  Synthetic oligonucleotide
gctaccttaacagagattaaggcatagaag

SEQ ID NO: 235688 - DNA, 30 bp, Artificial Sequence
  Synthetic oligonucleotide
gatacgattctagcgtactatggatagaag

SEQ ID NO: 235689 - DNA, 30 bp, Artificial Sequence
  Synthetic oligonucleotide
tcgattggtctccgcgaatacctatagaag

SEQ ID NO: 235690 - DNA, 30 bp, Artificial Sequence
  Synthetic oligonucleotide
acaagccgtagccctgcatgctcctagaag

SEQ ID NO: 235691 - DNA, 30 bp, Artificial Sequence
  Synthetic oligonucleotide
acttcatgtgcaatgggttcttgctagaag

SEQ ID NO: 235692 - DNA, 30 bp, Artificial Sequence
  Synthetic oligonucleotide
catgtgacacgttcgatgatatgttagaag

SEQ ID NO: 235693 - DNA, 30 bp, Artificial Sequence
  Synthetic oligonucleotide
ggaaacttgctattatcttggagtacgaag

SEQ ID NO: 235694 - DNA, 30 bp, Artificial Sequence
  Synthetic oligonucleotide
acccatctttacctgaagaacgcaccgaag

SEQ ID NO: 235695 - DNA, 30 bp, Artificial Sequence
  Synthetic oligonucleotide
gctgataatctgcgataataaagtccgaag

SEQ ID NO: 235696 - DNA, 30 bp, Artificial Sequence
  Synthetic oligonucleotide
caggcccacgtatagctccagtttccgaag

SEQ ID NO: 235697 - DNA, 30 bp, Artificial Sequence
  Synthetic oligonucleotide
ctcgagaccatggcttcggcgaaagcgaag

SEQ ID NO: 235698 - DNA, 30 bp, Artificial Sequence
  Synthetic oligonucleotide
gagacatagcgctgggaagcattagcgaag

SEQ ID NO: 235699 - DNA, 30 bp, Artificial Sequence
  Synthetic oligonucleotide
cccacataatttagaaagcttaaggcgaag

SEQ ID NO: 235700 - DNA, 30 bp, Artificial Sequence
  Synthetic oligonucleotide
acgcttattaacttaaagccggaggcgaag

SEQ ID NO: 235701 - DNA, 30 bp, Artificial Sequence
  Synthetic oligonucleotide
aggcttagataatggttttcatgggcgaag

SEQ ID NO: 235702 - DNA, 30 bp, Artificial Sequence
  Synthetic oligonucleotide
gaatcaggggaccattgggctcctgcgaag

SEQ ID NO: 235703 - DNA, 30 bp, Artificial Sequence
  Synthetic oligonucleotide
acgcacggtattcctcatttgcgtgcgaag

SEQ ID NO: 235704 - DNA, 30 bp, Artificial Sequence
  Synthetic oligonucleotide
tctccgcgagcatcggaacataaatcgaag

SEQ ID NO: 235705 - DNA, 30 bp, Artificial Sequence
  Synthetic oligonucleotide
ggatgtactatcactgtattgcaatcgaag

SEQ ID NO: 235706 - DNA, 30 bp, Artificial Sequence
  Synthetic oligonucleotide
atccagccctatctcgactctgactcgaag

SEQ ID NO: 235707 - DNA, 30 bp, Artificial Sequence
  Synthetic oligonucleotide
atagagcgactgctgacgaatcagtcgaag

SEQ ID NO: 235708 - DNA, 30 bp, Artificial Sequence
  Synthetic oligonucleotide
gaggcacgtcgtggaacagccgtgtcgaag

SEQ ID NO: 235709 - DNA, 30 bp, Artificial Sequence
  Synthetic oligonucleotide
tggagttctacgcaatcgtgtatttcgaag

SEQ ID NO: 235710 - DNA, 30 bp, Artificial Sequence
  Synthetic oligonucleotide
tgatacgtcggcatgttcatagtttcgaag

SEQ ID NO: 235711 - DNA, 30 bp, Artificial Sequence
  Synthetic oligonucleotide
ttgtaagaacatatggctcaaggtaggaag

SEQ ID NO: 235712 - DNA, 30 bp, Artificial Sequence
  Synthetic oligonucleotide
tagagaatagcgtactggcggccacggaag

SEQ ID NO: 235713 - DNA, 30 bp, Artificial Sequence
  Synthetic oligonucleotide
agtctttgcctactttccaacagacggaag

SEQ ID NO: 235714 - DNA, 30 bp, Artificial Sequence
  Synthetic oligonucleotide
tatgtgtcgggaatcgacgagtaccggaag

SEQ ID NO: 235715 - DNA, 30 bp, Artificial Sequence
  Synthetic oligonucleotide
ggtcagagtctcgggatcgagggccggaag

SEQ ID NO: 235716 - DNA, 30 bp, Artificial Sequence
  Synthetic oligonucleotide
gcgctccggccaagtcatgctcggcggaag

SEQ ID NO: 235717 - DNA, 30 bp, Artificial Sequence
  Synthetic oligonucleotide
gccgaagtatgggacacacaggggcggaag

SEQ ID NO: 235718 - DNA, 30 bp, Artificial Sequence
  Synthetic oligonucleotide
agtacaatatagcggtcctcgcaagggaag

SEQ ID NO: 235719 - DNA, 30 bp, Artificial Sequence
  Synthetic oligonucleotide
ggtcttttttggtaacaagtataagggaag

SEQ ID NO: 235720 - DNA, 30 bp, Artificial Sequence
  Synthetic oligonucleotide
atcttgtcacacgtgcgggacaacgggaag

SEQ ID NO: 235721 - DNA, 30 bp, Artificial Sequence
  Synthetic oligonucleotide
aatgcgcaataatacccagcaaccgggaag

SEQ ID NO: 235722 - DNA, 30 bp, Artificial Sequence
  Synthetic oligonucleotide
tactactattccatggaagggtccgggaag

SEQ ID NO: 235723 - DNA, 30 bp, Artificial Sequence
  Synthetic oligonucleotide
gcgaggctactgctcgtcgcgtgcgggaag

SEQ ID NO: 235724 - DNA, 30 bp, Artificial Sequence
  Synthetic oligonucleotide
catcagggcgacacatttcttgcggggaag

SEQ ID NO: 235725 - DNA, 30 bp, Artificial Sequence
  Synthetic oligonucleotide
gagaagtcatcacaagaaaaaattgggaag

SEQ ID NO: 235726 - DNA, 30 bp, Artificial Sequence
  Synthetic oligonucleotide
aaccggagtacctataaaacataatggaag

SEQ ID NO: 235727 - DNA, 30 bp, Artificial Sequence
  Synthetic oligonucleotide
cgtttgaggcacttttagcgtacatggaag

SEQ ID NO: 235728 - DNA, 30 bp, Artificial Sequence
  Synthetic oligonucleotide
ttccccgttccttgcccacgcggatggaag

SEQ ID NO: 235729 - DNA, 30 bp, Artificial Sequence
  Synthetic oligonucleotide
atattggaacaaacgttttcgttgtggaag

SEQ ID NO: 235730 - DNA, 30 bp, Artificial Sequence
  Synthetic oligonucleotide
gctcaaccggggtttaagtgagcttggaag

SEQ ID NO: 235731 - DNA, 30 bp, Artificial Sequence
  Synthetic oligonucleotide
tacgtcaagtataaagtttttgcttggaag

SEQ ID NO: 235732 - DNA, 30 bp, Artificial Sequence
  Synthetic oligonucleotide
ggaaccgcggggtcatgaggactttggaag

SEQ ID NO: 235733 - DNA, 30 bp, Artificial Sequence
  Synthetic oligonucleotide
acgtcagccaagctcatgcatgtaatgaag

SEQ ID NO: 235734 - DNA, 30 bp, Artificial Sequence
  Synthetic oligonucleotide
ccatcaagctcagacggccaggacatgaag

SEQ ID NO: 235735 - DNA, 30 bp, Artificial Sequence
  Synthetic oligonucleotide
gtagaacgcagatcctgtttcggcatgaag

SEQ ID NO: 235736 - DNA, 30 bp, Artificial Sequence
  Synthetic oligonucleotide
cgcgtaattcattggcacgttttcatgaag

SEQ ID NO: 235737 - DNA, 30 bp, Artificial Sequence
  Synthetic oligonucleotide
cacagggggtgtagggaaatggagatgaag

SEQ ID NO: 235738 - DNA, 30 bp, Artificial Sequence
  Synthetic oligonucleotide
aacacgggggtgagtttctgtcggatgaag

SEQ ID NO: 235739 - DNA, 30 bp, Artificial Sequence
  Synthetic oligonucleotide
aagggtcgctatcactggcttaatatgaag

SEQ ID NO: 235740 - DNA, 30 bp, Artificial Sequence
  Synthetic oligonucleotide
atagtaagttaccttaaacttgacctgaag

SEQ ID NO: 235741 - DNA, 30 bp, Artificial Sequence
  Synthetic oligonucleotide
gatgtaaaaaaagtatccgtcaccctgaag

SEQ ID NO: 235742 - DNA, 30 bp, Artificial Sequence
  Synthetic oligonucleotide
gcggcgggggccattggggttgccctgaag

SEQ ID NO: 235743 - DNA, 30 bp, Artificial Sequence
  Synthetic oligonucleotide
agttcatgccttacacattaaaatctgaag

SEQ ID NO: 235744 - DNA, 30 bp, Artificial Sequence
  Synthetic oligonucleotide
cctattcgcactttcgagtccaaagtgaag

SEQ ID NO: 235745 - DNA, 30 bp, Artificial Sequence
  Synthetic oligonucleotide
gttaggaaaggctaaatcttaacagtgaag

SEQ ID NO: 235746 - DNA, 30 bp, Artificial Sequence
  Synthetic oligonucleotide
cgtagggggcttggccacgcaaccgtgaag

SEQ ID NO: 235747 - DNA, 30 bp, Artificial Sequence
  Synthetic oligonucleotide
acaatatctgaatagctcttcgtcgtgaag

SEQ ID NO: 235748 - DNA, 30 bp, Artificial Sequence
  Synthetic oligonucleotide
aaagtgcacggcgaaacgtacttcgtgaag

SEQ ID NO: 235749 - DNA, 30 bp, Artificial Sequence
  Synthetic oligonucleotide
gagcttcttcgaagactttggcaggtgaag

SEQ ID NO: 235750 - DNA, 30 bp, Artificial Sequence
  Synthetic oligonucleotide
aaagtagatagtaatttcttcagggtgaag

SEQ ID NO: 235751 - DNA, 30 bp, Artificial Sequence
  Synthetic oligonucleotide
tacccttgaaaataatgtcagctggtgaag

SEQ ID NO: 235752 - DNA, 30 bp, Artificial Sequence
  Synthetic oligonucleotide
gggtttacggggtaggagtagggtgtgaag

SEQ ID NO: 235753 - DNA, 30 bp, Artificial Sequence
  Synthetic oligonucleotide
aacaaacgattagatcattatcttgtgaag

SEQ ID NO: 235754 - DNA, 30 bp, Artificial Sequence
  Synthetic oligonucleotide
gcagtttgtagcaaagggggggccttgaag

SEQ ID NO: 235755 - DNA, 30 bp, Artificial Sequence
  Synthetic oligonucleotide
tgaagtgcctcgacaatcttgcggttgaag

SEQ ID NO: 235756 - DNA, 30 bp, Artificial Sequence
  Synthetic oligonucleotide
acgaaaatgtcaaatcctattttgttgaag

SEQ ID NO: 235757 - DNA, 30 bp, Artificial Sequence
  Synthetic oligonucleotide
cgtttatttgtacggtaatccggtttgaag

SEQ ID NO: 235758 - DNA, 30 bp, Artificial Sequence
  Synthetic oligonucleotide
acctactttatgtgggccgtatcaaataag

SEQ ID NO: 235759 - DNA, 30 bp, Artificial Sequence
  Synthetic oligonucleotide
tccttctgagttcagggtggcataaataag

SEQ ID NO: 235760 - DNA, 30 bp, Artificial Sequence
  Synthetic oligonucleotide
gctttcaattacaactagttaaccaataag

SEQ ID NO: 235761 - DNA, 30 bp, Artificial Sequence
  Synthetic oligonucleotide
atgaatgaagctcatgccttattgaataag

SEQ ID NO: 235762 - DNA, 30 bp, Artificial Sequence
  Synthetic oligonucleotide
ggcaatccgttactacctgcggataataag

SEQ ID NO: 235763 - DNA, 30 bp, Artificial Sequence
  Synthetic oligonucleotide
tgcaacttaagatgatcggagtctaataag

SEQ ID NO: 235764 - DNA, 30 bp, Artificial Sequence
  Synthetic oligonucleotide
cgaacattactcacaaataaaggtaataag

SEQ ID NO: 235765 - DNA, 30 bp, Artificial Sequence
  Synthetic oligonucleotide
ttaccacaaggtcgtaacttagaacataag

SEQ ID NO: 235766 - DNA, 30 bp, Artificial Sequence
  Synthetic oligonucleotide
caggacaacaacatgcacgctcgccataag

SEQ ID NO: 235767 - DNA, 30 bp, Artificial Sequence
  Synthetic oligonucleotide
gggctcggtaatggctatgggttccataag

SEQ ID NO: 235768 - DNA, 30 bp, Artificial Sequence
  Synthetic oligonucleotide
tgttcagtattttccacgtgtttccataag

SEQ ID NO: 235769 - DNA, 30 bp, Artificial Sequence
  Synthetic oligonucleotide
acaaataacatcatgttataaacgcataag

SEQ ID NO: 235770 - DNA, 30 bp, Artificial Sequence
  Synthetic oligonucleotide
ttcgggcccggggtcaaaaggactcataag

SEQ ID NO: 235771 - DNA, 30 bp, Artificial Sequence
  Synthetic oligonucleotide
gatcatgacgatagtaatgggggtcataag

SEQ ID NO: 235772 - DNA, 30 bp, Artificial Sequence
  Synthetic oligonucleotide
gcgggcacatcgaagcacttgcaagataag

SEQ ID NO: 235773 - DNA, 30 bp, Artificial Sequence
  Synthetic oligonucleotide
gagtggagtcgtatgttaagtgacgataag

SEQ ID NO: 235774 - DNA, 30 bp, Artificial Sequence
  Synthetic oligonucleotide
gacagggactaatgtcgtggctgcgataag

SEQ ID NO: 235775 - DNA, 30 bp, Artificial Sequence
  Synthetic oligonucleotide
cactagccgacggaagcgccactcgataag

SEQ ID NO: 235776 - DNA, 30 bp, Artificial Sequence
  Synthetic oligonucleotide
aataggctacgttgcgcgctcctcgataag

SEQ ID NO: 235777 - DNA, 30 bp, Artificial Sequence
  Synthetic oligonucleotide
cgggttgggaatggaatcgggctcgataag

SEQ ID NO: 235778 - DNA, 30 bp, Artificial Sequence
  Synthetic oligonucleotide
cagggtatcgttgcctctttaaaggataag

SEQ ID NO: 235779 - DNA, 30 bp, Artificial Sequence
  Synthetic oligonucleotide
tcagttcgcaaagctaccgcggaggataag

SEQ ID NO: 235780 - DNA, 30 bp, Artificial Sequence
  Synthetic oligonucleotide
gagttagatcactctcgagtagatgataag

SEQ ID NO: 235781 - DNA, 30 bp, Artificial Sequence
  Synthetic oligonucleotide
actctatatgtaggaagaaatccatataag

SEQ ID NO: 235782 - DNA, 30 bp, Artificial Sequence
  Synthetic oligonucleotide
gaagacgtgtctgctataaaaatatataag

SEQ ID NO: 235783 - DNA, 30 bp, Artificial Sequence
  Synthetic oligonucleotide
aatttaaggctgagggcgccctcctataag

SEQ ID NO: 235784 - DNA, 31 bp, Artificial Sequence
  Synthetic oligonucleotide
agtgtgcttatatgtaggcacaggctataag

SEQ ID NO: 235785 - DNA, 30 bp, Artificial Sequence
  Synthetic oligonucleotide
aggatgctgcattcaggttcacggtataag

SEQ ID NO: 235786 - DNA, 30 bp, Artificial Sequence
  Synthetic oligonucleotide
gcagaataaggcacacatgtggggtataag

SEQ ID NO: 235787 - DNA, 30 bp, Artificial Sequence
  Synthetic oligonucleotide
tatctacacacataaccagacttgtataag

SEQ ID NO: 235788 - DNA, 30 bp, Artificial Sequence
  Synthetic oligonucleotide
cctccgtgcacgccgggtacatagactaag

SEQ ID NO: 235789 - DNA, 30 bp, Artificial Sequence
  Synthetic oligonucleotide
ttagctaaatcatatgtccatgatactaag

SEQ ID NO: 235790 - DNA, 30 bp, Artificial Sequence
  Synthetic oligonucleotide
gaggacagacaggccggtatagttactaag

SEQ ID NO: 235791 - DNA, 30 bp, Artificial Sequence
  Synthetic oligonucleotide
cagtttctaacgccagattttgtacctaag

SEQ ID NO: 235792 - DNA, 30 bp, Artificial Sequence
  Synthetic oligonucleotide
tagtgatcattgatcgaaactacccctaag

SEQ ID NO: 235793 - DNA, 30 bp, Artificial Sequence
  Synthetic oligonucleotide
ttccgcacgggtcagctggaacttcctaag

SEQ ID NO: 235794 - DNA, 30 bp, Artificial Sequence
  Synthetic oligonucleotide
ttgaaatttaaacggatcgaaaaagctaag

SEQ ID NO: 235795 - DNA, 30 bp, Artificial Sequence
  Synthetic oligonucleotide
taccggtcaggagcggtatgtatcgctaag

SEQ ID NO: 235796 - DNA, 30 bp, Artificial Sequence
  Synthetic oligonucleotide
cacagggacatattcttagtcccggctaag

SEQ ID NO: 235797 - DNA, 30 bp, Artificial Sequence
  Synthetic oligonucleotide
acttgggttcgcgttgtgaggcgggctaag

SEQ ID NO: 235798 - DNA, 30 bp, Artificial Sequence
  Synthetic oligonucleotide
ttgcgatcgctcagttgtttgtgggctaag

SEQ ID NO: 235799 - DNA, 30 bp, Artificial Sequence
  Synthetic oligonucleotide
aaagcacgaaaacttccgtatccttctaag

SEQ ID NO: 235800 - DNA, 30 bp, Artificial Sequence
  Synthetic oligonucleotide
cacagggatccggcatggcagtagagtaag

SEQ ID NO: 235801 - DNA, 30 bp, Artificial Sequence
  Synthetic oligonucleotide
caataactttcgcaacaactcgggagtaag

SEQ ID NO: 235802 - DNA, 30 bp, Artificial Sequence
  Synthetic oligonucleotide
aagtgaaccggcgcttgaggatgtagtaag

SEQ ID NO: 235803 - DNA, 30 bp, Artificial Sequence
  Synthetic oligonucleotide
cacgtcctagtttcctaggctcaccgtaag

SEQ ID NO: 235804 - DNA, 30 bp, Artificial Sequence
  Synthetic oligonucleotide
aacagatcatgacattgagttagccgtaag

SEQ ID NO: 235805 - DNA, 30 bp, Artificial Sequence
  Synthetic oligonucleotide
cagtatagccgtatagtgcaagggcgtaag

SEQ ID NO: 235806 - DNA, 30 bp, Artificial Sequence
  Synthetic oligonucleotide
cccacacgtatgagtcctcaactgcgtaag

SEQ ID NO: 235807 - DNA, 30 bp, Artificial Sequence
  Synthetic oligonucleotide
gggtttttcaccgaagatctactgcgtaag

SEQ ID NO: 235808 - DNA, 30 bp, Artificial Sequence
  Synthetic oligonucleotide
ctaactcgataggtcaaagggttaggtaag

SEQ ID NO: 235809 - DNA, 31 bp, Artificial Sequence
  Synthetic oligonucleotide
gagggagaggcgtacttcacccgacggtaag

SEQ ID NO: 235810 - DNA, 30 bp, Artificial Sequence
  Synthetic oligonucleotide
gggtatcatttttgtttaactcagggtaag

SEQ ID NO: 235811 - DNA, 30 bp, Artificial Sequence
  Synthetic oligonucleotide
agcgcagtgtcggtttcgccaaggggtaag

SEQ ID NO: 235812 - DNA, 30 bp, Artificial Sequence
  Synthetic oligonucleotide
ttggtcggcggtctccctcttaggggtaag

SEQ ID NO: 235813 - DNA, 30 bp, Artificial Sequence
  Synthetic oligonucleotide
tgtgcggcatgtacaaagacagatggtaag

SEQ ID NO: 235814 - DNA, 30 bp, Artificial Sequence
  Synthetic oligonucleotide
cctaattaaattacgtaataatgtggtaag

SEQ ID NO: 235815 - DNA, 30 bp, Artificial Sequence
  Synthetic oligonucleotide
cgttatacagtgcctagggcattatgtaag

SEQ ID NO: 235816 - DNA, 30 bp, Artificial Sequence
  Synthetic oligonucleotide
actgctatggaagtccgtaatgagtgtaag

SEQ ID NO: 235817 - DNA, 30 bp, Artificial Sequence
  Synthetic oligonucleotide
caggcgactcacgaactgtggacttgtaag

SEQ ID NO: 235818 - DNA, 30 bp, Artificial Sequence
  Synthetic oligonucleotide
ctgagactgggactaaactcaaaaattaag

SEQ ID NO: 235819 - DNA, 30 bp, Artificial Sequence
  Synthetic oligonucleotide
cgaggtagttctgtacacgctaaaattaag

SEQ ID NO: 235820 - DNA, 30 bp, Artificial Sequence
  Synthetic oligonucleotide
actacacgagcccgcgcgattcagattaag

SEQ ID NO: 235821 - DNA, 30 bp, Artificial Sequence
  Synthetic oligonucleotide
agggatgtttatcgtcccacacggattaag

SEQ ID NO: 235822 - DNA, 30 bp, Artificial Sequence
  Synthetic oligonucleotide
tggcatgtgttcaatctcgaggggattaag

SEQ ID NO: 235823 - DNA, 30 bp, Artificial Sequence
  Synthetic oligonucleotide
tctacgaagggacttggtcgacaacttaag

SEQ ID NO: 235824 - DNA, 30 bp, Artificial Sequence
  Synthetic oligonucleotide
taagccgctccttggtcaaaccgacttaag

SEQ ID NO: 235825 - DNA, 30 bp, Artificial Sequence
  Synthetic oligonucleotide
cgtgaccagctgtctccttcaaagcttaag

SEQ ID NO: 235826 - DNA, 30 bp, Artificial Sequence
  Synthetic oligonucleotide
gatctcggcaatttttatgttccgcttaag

SEQ ID NO: 235827 - DNA, 30 bp, Artificial Sequence
  Synthetic oligonucleotide
gagaatcaactgatggactgaaggcttaag

SEQ ID NO: 235828 - DNA, 30 bp, Artificial Sequence
  Synthetic oligonucleotide
gacgaaccgcacaagtcgtctgatcttaag

SEQ ID NO: 235829 - DNA, 30 bp, Artificial Sequence
  Synthetic oligonucleotide
atcccgtcgtatgattgattacgtcttaag

SEQ ID NO: 235830 - DNA, 30 bp, Artificial Sequence
  Synthetic oligonucleotide
aatgaaggcatcatctttgacattcttaag

SEQ ID NO: 235831 - DNA, 30 bp, Artificial Sequence
  Synthetic oligonucleotide
gtgcaacaacatttatagcccgaagttaag

SEQ ID NO: 235832 - DNA, 30 bp, Artificial Sequence
  Synthetic oligonucleotide
ggacttaaagtttgtgctggacgagttaag

SEQ ID NO: 235833 - DNA, 30 bp, Artificial Sequence
  Synthetic oligonucleotide
cggttaaactgaacaccagtctgagttaag

SEQ ID NO: 235834 - DNA, 30 bp, Artificial Sequence
  Synthetic oligonucleotide
ttggaagcgttagtctcgtctaccgttaag

SEQ ID NO: 235835 - DNA, 30 bp, Artificial Sequence
  Synthetic oligonucleotide
gggtagcaaggtaataaatccagcgttaag

SEQ ID NO: 235836 - DNA, 30 bp, Artificial Sequence
  Synthetic oligonucleotide
aattctcgtgaccccgtaacacaggttaag

SEQ ID NO: 235837 - DNA, 30 bp, Artificial Sequence
  Synthetic oligonucleotide
aatatgctgaaacaattcagcggtgttaag

SEQ ID NO: 235838 - DNA, 30 bp, Artificial Sequence
  Synthetic oligonucleotide
gaaaggagcgtgataagtttctgtgttaag

SEQ ID NO: 235839 - DNA, 30 bp, Artificial Sequence
  Synthetic oligonucleotide
ctgcataaaaatcatgaccgtcgatttaag

SEQ ID NO: 235840 - DNA, 30 bp, Artificial Sequence
  Synthetic oligonucleotide
aagtagttatctcttggacgtctatttaag

SEQ ID NO: 235841 - DNA, 30 bp, Artificial Sequence
  Synthetic oligonucleotide
ctccgtacaccacgaagatgctagtttaag

SEQ ID NO: 235842 - DNA, 30 bp, Artificial Sequence
  Synthetic oligonucleotide
tgtccagcgttatggccactcccaaaacag

SEQ ID NO: 235843 - DNA, 31 bp, Artificial Sequence
  Synthetic oligonucleotide
ggcgtacctttaaagaaaagggggaaaacag

SEQ ID NO: 235844 - DNA, 30 bp, Artificial Sequence
  Synthetic oligonucleotide
aattgccctacagtctatcgggccaaacag

SEQ ID NO: 235845 - DNA, 30 bp, Artificial Sequence
  Synthetic oligonucleotide
gggtttagctgggatagcgtagtcaaacag

SEQ ID NO: 235846 - DNA, 30 bp, Artificial Sequence
  Synthetic oligonucleotide
tcaacccacgggaatgtgcggacgaaacag

SEQ ID NO: 235847 - DNA, 30 bp, Artificial Sequence
  Synthetic oligonucleotide
gtgggcgggtccgcgtatttagggaaacag

SEQ ID NO: 235848 - DNA, 30 bp, Artificial Sequence
  Synthetic oligonucleotide
tatcaatcggtattgtgtttaagacaacag

SEQ ID NO: 235849 - DNA, 30 bp, Artificial Sequence
  Synthetic oligonucleotide
actcgtcttgaaggagatcaaacgcaacag

SEQ ID NO: 235850 - DNA, 30 bp, Artificial Sequence
  Synthetic oligonucleotide
ctcttaaaacacgccactagcaggcaacag

SEQ ID NO: 235851 - DNA, 30 bp, Artificial Sequence
  Synthetic oligonucleotide
cagcattcgagatctatctgcattcaacag

SEQ ID NO: 235852 - DNA, 30 bp, Artificial Sequence
  Synthetic oligonucleotide
aacggcttaagttatttatatgttcaacag

SEQ ID NO: 235853 - DNA, 30 bp, Artificial Sequence
  Synthetic oligonucleotide
acggttgggcgggtaagtggttttcaacag

SEQ ID NO: 235854 - DNA, 30 bp, Artificial Sequence
  Synthetic oligonucleotide
ataaggttttggtcaagaaagtcagaacag

SEQ ID NO: 235855 - DNA, 30 bp, Artificial Sequence
  Synthetic oligonucleotide
tgtattggtaactgggtttcgggagaacag

SEQ ID NO: 235856 - DNA, 30 bp, Artificial Sequence
  Synthetic oligonucleotide
cctactctcaggcttctgccgtgggaacag

SEQ ID NO: 235857 - DNA, 30 bp, Artificial Sequence
  Synthetic oligonucleotide
gggtaagtgggtttttttcttaaataacag

SEQ ID NO: 235858 - DNA, 30 bp, Artificial Sequence
  Synthetic oligonucleotide
tggtctccaaacctcaggacctattaacag

SEQ ID NO: 235859 - DNA, 30 bp, Artificial Sequence
  Synthetic oligonucleotide
acggtttgttttaaatccatggcttaacag

SEQ ID NO: 235860 - DNA, 30 bp, Artificial Sequence
  Synthetic oligonucleotide
acatcgttagtagtaataggagtttaacag

SEQ ID NO: 235861 - DNA, 30 bp, Artificial Sequence
  Synthetic oligonucleotide
gctcggaaacatatgacacatttttaacag

SEQ ID NO: 235862 - DNA, 30 bp, Artificial Sequence
  Synthetic oligonucleotide
gcaacattcttaggtgccgtcgaaacacag

SEQ ID NO: 235863 - DNA, 30 bp, Artificial Sequence
  Synthetic oligonucleotide
ctcctcacgatacgatcgcgcgacacacag

SEQ ID NO: 235864 - DNA, 30 bp, Artificial Sequence
  Synthetic oligonucleotide
gacaactaaagcgcgtcgatgcgcacacag

SEQ ID NO: 235865 - DNA, 30 bp, Artificial Sequence
  Synthetic oligonucleotide
gcaaactcgacgcgtaacccgctgacacag

SEQ ID NO: 235866 - DNA, 30 bp, Artificial Sequence
  Synthetic oligonucleotide
actacctatctactttcgtgtgatacacag

SEQ ID NO: 235867 - DNA, 30 bp, Artificial Sequence
  Synthetic oligonucleotide
gggcgggagtaggcaacgtcttgtacacag

SEQ ID NO: 235868 - DNA, 30 bp, Artificial Sequence
  Synthetic oligonucleotide
tcggacactgacaattccagaattacacag

SEQ ID NO: 235869 - DNA, 30 bp, Artificial Sequence
  Synthetic oligonucleotide
taatgaagcggtacaactgtataaccacag

SEQ ID NO: 235870 - DNA, 30 bp, Artificial Sequence
  Synthetic oligonucleotide
aaagtaacccacagggcccattgcccacag

SEQ ID NO: 235871 - DNA, 30 bp, Artificial Sequence
  Synthetic oligonucleotide
gagaacatgtgagccatccatgagccacag

SEQ ID NO: 235872 - DNA, 30 bp, Artificial Sequence
  Synthetic oligonucleotide
cattgtttacggggtgtgtacaaagcacag

SEQ ID NO: 235873 - DNA, 30 bp, Artificial Sequence
  Synthetic oligonucleotide
ggatggaacgatgacgacggtgcagcacag

SEQ ID NO: 235874 - DNA, 30 bp, Artificial Sequence
  Synthetic oligonucleotide
acagccgaatgggtagtgggacgcgcacag

SEQ ID NO: 235875 - DNA, 30 bp, Artificial Sequence
  Synthetic oligonucleotide
ggccgtgtataagagttcttacaggcacag

SEQ ID NO: 235876 - DNA, 30 bp, Artificial Sequence
  Synthetic oligonucleotide
cagagtaactgatttggctaagaggcacag

SEQ ID NO: 235877 - DNA, 30 bp, Artificial Sequence
  Synthetic oligonucleotide
tatacaaataaaacataatagactgcacag

SEQ ID NO: 235878 - DNA, 30 bp, Artificial Sequence
  Synthetic oligonucleotide
ttggatcgagatagtatgtgagctgcacag

SEQ ID NO: 235879 - DNA, 30 bp, Artificial Sequence
  Synthetic oligonucleotide
tgctcgaggcgaatcagcgagtcatcacag

SEQ ID NO: 235880 - DNA, 30 bp, Artificial Sequence
  Synthetic oligonucleotide
cccacaggccaagataataatgcctcacag

SEQ ID NO: 235881 - DNA, 30 bp, Artificial Sequence
  Synthetic oligonucleotide
ttatatttgcagatgtggatcggctcacag

SEQ ID NO: 235882 - DNA, 31 bp, Artificial Sequence
  Synthetic oligonucleotide
acgagatgagtacattctcacagtgtcacag

SEQ ID NO: 235883 - DNA, 30 bp, Artificial Sequence
  Synthetic oligonucleotide
ctataactgggggtcaattaccgttcacag

SEQ ID NO: 235884 - DNA, 30 bp, Artificial Sequence
  Synthetic oligonucleotide
ctcggtggttgccctccaatacacagacag

SEQ ID NO: 235885 - DNA, 30 bp, Artificial Sequence
  Synthetic oligonucleotide
cgtagattttccagtattgtttttagacag

SEQ ID NO: 235886 - DNA, 30 bp, Artificial Sequence
  Synthetic oligonucleotide
gcacaggatctaataatagaattccgacag

SEQ ID NO: 235887 - DNA, 30 bp, Artificial Sequence
  Synthetic oligonucleotide
ctcacactgttctaagctactgagcgacag

SEQ ID NO: 235888 - DNA, 30 bp, Artificial Sequence
  Synthetic oligonucleotide
attatcttgctcagttagtcaccgcgacag

SEQ ID NO: 235889 - DNA, 30 bp, Artificial Sequence
  Synthetic oligonucleotide
ttataggaacgtttaggtttaagtcgacag

SEQ ID NO: 235890 - DNA, 30 bp, Artificial Sequence
  Synthetic oligonucleotide
atgttattacggggtcacggtagtcgacag

SEQ ID NO: 235891 - DNA, 30 bp, Artificial Sequence
  Synthetic oligonucleotide
cgtgaaaccaggcgctctacgcacggacag

SEQ ID NO: 235892 - DNA, 30 bp, Artificial Sequence
  Synthetic oligonucleotide
cgcagtgtacttaacttcatgagcggacag

SEQ ID NO: 235893 - DNA, 30 bp, Artificial Sequence
  Synthetic oligonucleotide
accaggaaacgaaggctacttccgggacag

SEQ ID NO: 235894 - DNA, 30 bp, Artificial Sequence
  Synthetic oligonucleotide
ccgcaccctaaacttgtttaacggggacag

SEQ ID NO: 235895 - DNA, 30 bp, Artificial Sequence
  Synthetic oligonucleotide
taatcattcggaacacgtaatcctggacag

SEQ ID NO: 235896 - DNA, 30 bp, Artificial Sequence
  Synthetic oligonucleotide
cgaaatatgaaatgattcatagctggacag

SEQ ID NO: 235897 - DNA, 30 bp, Artificial Sequence
  Synthetic oligonucleotide
atttaatgggaggggcagtagttatgacag

SEQ ID NO: 235898 - DNA, 30 bp, Artificial Sequence
  Synthetic oligonucleotide
gtgtctagcaaagtttctagcacctgacag

SEQ ID NO: 235899 - DNA, 30 bp, Artificial Sequence
  Synthetic oligonucleotide
tggatattatcagtaggtaacgagtgacag

SEQ ID NO: 235900 - DNA, 30 bp, Artificial Sequence
  Synthetic oligonucleotide
caaagggatgtagacacacttgcgtgacag

SEQ ID NO: 235901 - DNA, 30 bp, Artificial Sequence
  Synthetic oligonucleotide
aaatacggtatgtcccgatcgcggtgacag

SEQ ID NO: 235902 - DNA, 30 bp, Artificial Sequence
  Synthetic oligonucleotide
gtgcgtagatgtttgacaccactgtgacag

SEQ ID NO: 235903 - DNA, 30 bp, Artificial Sequence
  Synthetic oligonucleotide
cctagcatacatgttatttaaatttgacag

SEQ ID NO: 235904 - DNA, 30 bp, Artificial Sequence
  Synthetic oligonucleotide
ggaggtcgacatcgttgctccatttgacag

SEQ ID NO: 235905 - DNA, 30 bp, Artificial Sequence
  Synthetic oligonucleotide
atccggcgagagcacacttggcaaatacag

SEQ ID NO: 235906 - DNA, 30 bp, Artificial Sequence
  Synthetic oligonucleotide
taccccaaggcggactggtgtgcaatacag

SEQ ID NO: 235907 - DNA, 30 bp, Artificial Sequence
  Synthetic oligonucleotide
gtcgctttacgcaatgaattacgaatacag

SEQ ID NO: 235908 - DNA, 30 bp, Artificial Sequence
  Synthetic oligonucleotide
agaagttaccttttgagctaagtaatacag

SEQ ID NO: 235909 - DNA, 30 bp, Artificial Sequence
  Synthetic oligonucleotide
caatctcagagacaacattaaagtatacag

SEQ ID NO: 235910 - DNA, 30 bp, Artificial Sequence
  Synthetic oligonucleotide
gacatcctgagtagttttaagtgtatacag

SEQ ID NO: 235911 - DNA, 30 bp, Artificial Sequence
  Synthetic oligonucleotide
tatcccccggaggtcaagcgttttatacag

SEQ ID NO: 235912 - DNA, 30 bp, Artificial Sequence
  Synthetic oligonucleotide
ctctcggtcattaaggagggcgtcctacag

SEQ ID NO: 235913 - DNA, 30 bp, Artificial Sequence
  Synthetic oligonucleotide
tcagctcggtaggcgaggtgattgctacag

SEQ ID NO: 235914 - DNA, 30 bp, Artificial Sequence
  Synthetic oligonucleotide
ccgggttgaatgtcggatgagtatctacag

SEQ ID NO: 235915 - DNA, 30 bp, Artificial Sequence
  Synthetic oligonucleotide
accataacaaagaccgtggaggttctacag

SEQ ID NO: 235916 - DNA, 30 bp, Artificial Sequence
  Synthetic oligonucleotide
gcgaagagaatgggataatcggttctacag

SEQ ID NO: 235917 - DNA, 30 bp, Artificial Sequence
  Synthetic oligonucleotide
tcaactgaactgggagaagccgaagtacag

SEQ ID NO: 235918 - DNA, 30 bp, Artificial Sequence
  Synthetic oligonucleotide
tgcgcacatagttagcgcggaacagtacag

SEQ ID NO: 235919 - DNA, 30 bp, Artificial Sequence
  Synthetic oligonucleotide
aacgtccccatagggtacgtctcagtacag

SEQ ID NO: 235920 - DNA, 30 bp, Artificial Sequence
  Synthetic oligonucleotide
atatatcgtaactaatattgctacgtacag

SEQ ID NO: 235921 - DNA, 30 bp, Artificial Sequence
  Synthetic oligonucleotide
cgcgcatttaaagcttattaataggtacag

SEQ ID NO: 235922 - DNA, 30 bp, Artificial Sequence
  Synthetic oligonucleotide
aacttgcgggaacatatggtatatgtacag

SEQ ID NO: 235923 - DNA, 30 bp, Artificial Sequence
  Synthetic oligonucleotide
aaaacgaatcccgtcaagcgtcctgtacag

SEQ ID NO: 235924 - DNA, 30 bp, Artificial Sequence
  Synthetic oligonucleotide
cggacgatgcccgaccggtctgctgtacag

SEQ ID NO: 235925 - DNA, 30 bp, Artificial Sequence
  Synthetic oligonucleotide
ctaggtaccgttctgtaactacttgtacag

SEQ ID NO: 235926 - DNA, 30 bp, Artificial Sequence
  Synthetic oligonucleotide
tcccggcttgggtgtacgagcgtattacag

SEQ ID NO: 235927 - DNA, 30 bp, Artificial Sequence
  Synthetic oligonucleotide
gtaaactggggagttgcactggcgttacag

SEQ ID NO: 235928 - DNA, 30 bp, Artificial Sequence
  Synthetic oligonucleotide
gcgtaaagccacacaactctatcgttacag

SEQ ID NO: 235929 - DNA, 30 bp, Artificial Sequence
  Synthetic oligonucleotide
tgacggggtgacacaccttgttcgttacag

SEQ ID NO: 235930 - DNA, 30 bp, Artificial Sequence
  Synthetic oligonucleotide
ccacctaaagcaataattttacttttacag

SEQ ID NO: 235931 - DNA, 30 bp, Artificial Sequence
  Synthetic oligonucleotide
caccctactctaatcacgtattaaaaccag

SEQ ID NO: 235932 - DNA, 30 bp, Artificial Sequence
  Synthetic oligonucleotide
ccatataacatcaaggcttgcacaaaccag

SEQ ID NO: 235933 - DNA, 30 bp, Artificial Sequence
  Synthetic oligonucleotide
gtgtagaaatataaatacagacgcaaccag

SEQ ID NO: 235934 - DNA, 30 bp, Artificial Sequence
  Synthetic oligonucleotide
attgcatgagatcagcattcctgcaaccag

SEQ ID NO: 235935 - DNA, 30 bp, Artificial Sequence
  Synthetic oligonucleotide
tcgtgggtttgaaactcggcttttaaccag

SEQ ID NO: 235936 - DNA, 30 bp, Artificial Sequence
  Synthetic oligonucleotide
ttgattcaatttaatggtaattaacaccag

SEQ ID NO: 235937 - DNA, 30 bp, Artificial Sequence
  Synthetic oligonucleotide
caagaatactagctagtaacgggacaccag

SEQ ID NO: 235938 - DNA, 30 bp, Artificial Sequence
  Synthetic oligonucleotide
taggttggaaacctacaaccatcgcaccag

SEQ ID NO: 235939 - DNA, 30 bp, Artificial Sequence
  Synthetic oligonucleotide
gtcatgcggctatgtcggcacttgcaccag

SEQ ID NO: 235940 - DNA, 30 bp, Artificial Sequence
  Synthetic oligonucleotide
ccccccgaaaaagagttgaaacctcaccag

SEQ ID NO: 235941 - DNA, 30 bp, Artificial Sequence
  Synthetic oligonucleotide
gcggccttggagacgtgtctcagcgaccag

SEQ ID NO: 235942 - DNA, 30 bp, Artificial Sequence
  Synthetic oligonucleotide
attccagggttagaaagtagtagcgaccag

SEQ ID NO: 235943 - DNA, 30 bp, Artificial Sequence
  Synthetic oligonucleotide
acgttctttgtacgtgatttttaggaccag

SEQ ID NO: 235944 - DNA, 30 bp, Artificial Sequence
  Synthetic oligonucleotide
gaaaggatctaggaaggctaattggaccag

SEQ ID NO: 235945 - DNA, 30 bp, Artificial Sequence
  Synthetic oligonucleotide
ggtggaggcggcaagtacgtttatgaccag

SEQ ID NO: 235946 - DNA, 30 bp, Artificial Sequence
  Synthetic oligonucleotide
tacaggccgagtatcgccgcaattgaccag

SEQ ID NO: 235947 - DNA, 30 bp, Artificial Sequence
  Synthetic oligonucleotide
ttcttcccagaaggggcgcggtttgaccag

SEQ ID NO: 235948 - DNA, 30 bp, Artificial Sequence
  Synthetic oligonucleotide
ttccaaccgctaggaacagggacataccag

SEQ ID NO: 235949 - DNA, 30 bp, Artificial Sequence
  Synthetic oligonucleotide
gtagtttatcgattatacaacccataccag

SEQ ID NO: 235950 - DNA, 30 bp, Artificial Sequence
  Synthetic oligonucleotide
taatcgtgtatagagcgctccagctaccag

SEQ ID NO: 235951 - DNA, 30 bp, Artificial Sequence
  Synthetic oligonucleotide
ggcgtttgccggtgatagcacttctaccag

SEQ ID NO: 235952 - DNA, 30 bp, Artificial Sequence
  Synthetic oligonucleotide
ttcaattgaggtaaaatgacagagtaccag

SEQ ID NO: 235953 - DNA, 30 bp, Artificial Sequence
  Synthetic oligonucleotide
tgcagggtacccaacatggtgcgaacccag

SEQ ID NO: 235954 - DNA, 30 bp, Artificial Sequence
  Synthetic oligonucleotide
tgctatttctacaacgttatgtgaacccag

SEQ ID NO: 235955 - DNA, 30 bp, Artificial Sequence
  Synthetic oligonucleotide
ttcgttcgccccctattttacataacccag

SEQ ID NO: 235956 - DNA, 30 bp, Artificial Sequence
  Synthetic oligonucleotide
gtaacaacaaccaatatatcgtggacccag

SEQ ID NO: 235957 - DNA, 30 bp, Artificial Sequence
  Synthetic oligonucleotide
gggcgatactattaaacggtaattacccag

SEQ ID NO: 235958 - DNA, 30 bp, Artificial Sequence
  Synthetic oligonucleotide
gatcgatcatacatgcaaaaatccccccag

SEQ ID NO: 235959 - DNA, 30 bp, Artificial Sequence
  Synthetic oligonucleotide
cggcccatatttggaggtgcctccccccag

SEQ ID NO: 235960 - DNA, 30 bp, Artificial Sequence
  Synthetic oligonucleotide
taagggtaaccctcggcaatagggccccag

SEQ ID NO: 235961 - DNA, 30 bp, Artificial Sequence
  Synthetic oligonucleotide
agtcattcgtttatgcgtagagtgccccag

SEQ ID NO: 235962 - DNA, 30 bp, Artificial Sequence
  Synthetic oligonucleotide
gacgaatacagtccggccgtcggcgcccag

SEQ ID NO: 235963 - DNA, 30 bp, Artificial Sequence
  Synthetic oligonucleotide
tctatcctttcaaaagcgcttgaatcccag

SEQ ID NO: 235964 - DNA, 30 bp, Artificial Sequence
  Synthetic oligonucleotide
tgccatactttatattaaggcacgtcccag

SEQ ID NO: 235965 - DNA, 30 bp, Artificial Sequence
  Synthetic oligonucleotide
atagttctatgagtaggtcctccgagccag

SEQ ID NO: 235966 - DNA, 30 bp, Artificial Sequence
  Synthetic oligonucleotide
ggctaaacaccagctggagtttggagccag

SEQ ID NO: 235967 - DNA, 30 bp, Artificial Sequence
  Synthetic oligonucleotide
gtgacctcaggcatcttatgccctagccag

SEQ ID NO: 235968 - DNA, 30 bp, Artificial Sequence
  Synthetic oligonucleotide
tgccacgttgcaatcttatggttacgccag

SEQ ID NO: 235969 - DNA, 30 bp, Artificial Sequence
  Synthetic oligonucleotide
tcaatatagggcacaggcaggcatcgccag

SEQ ID NO: 235970 - DNA, 30 bp, Artificial Sequence
  Synthetic oligonucleotide
accttcggatcactttgtgcgtatcgccag

SEQ ID NO: 235971 - DNA, 30 bp, Artificial Sequence
  Synthetic oligonucleotide
tccaattagtcaagtattccagcaggccag

SEQ ID NO: 235972 - DNA, 30 bp, Artificial Sequence
  Synthetic oligonucleotide
atacgtcgtgccatcaacatgatcggccag

SEQ ID NO: 235973 - DNA, 30 bp, Artificial Sequence
  Synthetic oligonucleotide
acagtgcatgggggaccaggcacgggccag

SEQ ID NO: 235974 - DNA, 30 bp, Artificial Sequence
  Synthetic oligonucleotide
tgcagggcaggcatcaagtagtcgggccag

SEQ ID NO: 235975 - DNA, 30 bp, Artificial Sequence
  Synthetic oligonucleotide
atagccactggtctcagaaccaggggccag

SEQ ID NO: 235976 - DNA, 30 bp, Artificial Sequence
  Synthetic oligonucleotide
gcatacgaccatattatcgacgcctgccag

SEQ ID NO: 235977 - DNA, 30 bp, Artificial Sequence
  Synthetic oligonucleotide
cagtgccaagagtgtgacggccgctgccag

SEQ ID NO: 235978 - DNA, 30 bp, Artificial Sequence
  Synthetic oligonucleotide
aaggcttaaagatacagcctttggtgccag

SEQ ID NO: 235979 - DNA, 30 bp, Artificial Sequence
  Synthetic oligonucleotide
ctataacagcagggtgtagccctcatccag

SEQ ID NO: 235980 - DNA, 30 bp, Artificial Sequence
  Synthetic oligonucleotide
gaacggcttccagaaccggcgcagatccag

SEQ ID NO: 235981 - DNA, 30 bp, Artificial Sequence
  Synthetic oligonucleotide
gtaaaaccgcggaggtagcctagtatccag

SEQ ID NO: 235982 - DNA, 30 bp, Artificial Sequence
  Synthetic oligonucleotide
gcgcccatagcgcattacgctggtatccag

SEQ ID NO: 235983 - DNA, 30 bp, Artificial Sequence
  Synthetic oligonucleotide
ccgggggtacttatgcggattgcactccag

SEQ ID NO: 235984 - DNA, 30 bp, Artificial Sequence
  Synthetic oligonucleotide
taacagctacgttgaggtaaagtactccag

SEQ ID NO: 235985 - DNA, 30 bp, Artificial Sequence
  Synthetic oligonucleotide
caatatcacgtggtcagttgcaacctccag

SEQ ID NO: 235986 - DNA, 30 bp, Artificial Sequence
  Synthetic oligonucleotide
gtagtattacgtaataagatagacctccag

SEQ ID NO: 235987 - DNA, 30 bp, Artificial Sequence
  Synthetic oligonucleotide
tgcaaaaaagacacggcctctcaagtccag

SEQ ID NO: 235988 - DNA, 30 bp, Artificial Sequence
  Synthetic oligonucleotide
atctcatagaaaaaaagggctgtagtccag

SEQ ID NO: 235989 - DNA, 30 bp, Artificial Sequence
  Synthetic oligonucleotide
aaggaagaactcctgtgcccgttagtccag

SEQ ID NO: 235990 - DNA, 30 bp, Artificial Sequence
  Synthetic oligonucleotide
ggaatatgtaggacaatcaatcaggtccag

SEQ ID NO: 235991 - DNA, 30 bp, Artificial Sequence
  Synthetic oligonucleotide
cctaggagggtggttacagagaatgtccag

SEQ ID NO: 235992 - DNA, 30 bp, Artificial Sequence
  Synthetic oligonucleotide
agtggtcagtttttatgataattattccag

SEQ ID NO: 235993 - DNA, 30 bp, Artificial Sequence
  Synthetic oligonucleotide
tctcgggaaaggacagtttagggcttccag

SEQ ID NO: 235994 - DNA, 30 bp, Artificial Sequence
  Synthetic oligonucleotide
acaaaagtaatggtggagacgatgttccag

SEQ ID NO: 235995 - DNA, 30 bp, Artificial Sequence
  Synthetic oligonucleotide
ggacgattaaacacctatgctgttttccag

SEQ ID NO: 235996 - DNA, 30 bp, Artificial Sequence
  Synthetic oligonucleotide
tccgcctcttcgatttccgcactaaagcag

SEQ ID NO: 235997 - DNA, 30 bp, Artificial Sequence
  Synthetic oligonucleotide
tccagtcattcgtaatacagtgccaagcag

SEQ ID NO: 235998 - DNA, 30 bp, Artificial Sequence
  Synthetic oligonucleotide
agatctgttaagatgagccttttcaagcag

SEQ ID NO: 235999 - DNA, 30 bp, Artificial Sequence
  Synthetic oligonucleotide
gacatttggcgcgagataacgatgaagcag

SEQ ID NO: 236000 - DNA, 30 bp, Artificial Sequence
  Synthetic oligonucleotide
tctggaagccgattcccacccgtgaagcag

SEQ ID NO: 236001 - DNA, 30 bp, Artificial Sequence
  Synthetic oligonucleotide
tgccgaatcctccattcacaatataagcag

SEQ ID NO: 236002 - DNA, 30 bp, Artificial Sequence
  Synthetic oligonucleotide
ctgtaatacgaataaacagtggcacagcag

SEQ ID NO: 236003 - DNA, 30 bp, Artificial Sequence
  Synthetic oligonucleotide
gcacgctgtacttaggaaggctggcagcag

SEQ ID NO: 236004 - DNA, 30 bp, Artificial Sequence
  Synthetic oligonucleotide
tctcccggagttatcatactgattcagcag

SEQ ID NO: 236005 - DNA, 30 bp, Artificial Sequence
  Synthetic oligonucleotide
cataatttagctggtgcccatcaagagcag

SEQ ID NO: 236006 - DNA, 30 bp, Artificial Sequence
  Synthetic oligonucleotide
atttggcgcggtgtgggtataagcgagcag

SEQ ID NO: 236007 - DNA, 30 bp, Artificial Sequence
  Synthetic oligonucleotide
aaaacctcctaaaatatgtcggtcgagcag

SEQ ID NO: 236008 - DNA, 30 bp, Artificial Sequence
  Synthetic oligonucleotide
ctgtggggataactctggaagaaggagcag

SEQ ID NO: 236009 - DNA, 30 bp, Artificial Sequence
  Synthetic oligonucleotide
cacagcacgataagaatatatcgggagcag

SEQ ID NO: 236010 - DNA, 30 bp, Artificial Sequence
  Synthetic oligonucleotide
tttagtgcttaatcgctaaagctggagcag

SEQ ID NO: 236011 - DNA, 30 bp, Artificial Sequence
  Synthetic oligonucleotide
gacgagggcctctgtcgcgagtctgagcag

SEQ ID NO: 236012 - DNA, 30 bp, Artificial Sequence
  Synthetic oligonucleotide
ttactgactactgaacggtaagaatagcag

SEQ ID NO: 236013 - DNA, 30 bp, Artificial Sequence
  Synthetic oligonucleotide
gccgtaagtgagcctagtggatcatagcag

SEQ ID NO: 236014 - DNA, 30 bp, Artificial Sequence
  Synthetic oligonucleotide
atctgtgtagtgaacctgtctagatagcag

SEQ ID NO: 236015 - DNA, 30 bp, Artificial Sequence
  Synthetic oligonucleotide
ctcaactaactgtgggtcctaatatagcag

SEQ ID NO: 236016 - DNA, 30 bp, Artificial Sequence
  Synthetic oligonucleotide
gatcgtgacgaagcgtaccaattgtagcag

SEQ ID NO: 236017 - DNA, 30 bp, Artificial Sequence
  Synthetic oligonucleotide
tggaggaacgaggttgataatagcacgcag

SEQ ID NO: 236018 - DNA, 30 bp, Artificial Sequence
  Synthetic oligonucleotide
tgaaaagtgactgtctaaccgcatacgcag

SEQ ID NO: 236019 - DNA, 30 bp, Artificial Sequence
  Synthetic oligonucleotide
tagatttccgctgaaggggatggaccgcag

SEQ ID NO: 236020 - DNA, 30 bp, Artificial Sequence
  Synthetic oligonucleotide
tcttatgtagataacctgatcgtaccgcag

SEQ ID NO: 236021 - DNA, 30 bp, Artificial Sequence
  Synthetic oligonucleotide
cagggagggggttaactttcgcgcccgcag

SEQ ID NO: 236022 - DNA, 30 bp, Artificial Sequence
  Synthetic oligonucleotide
aagcacggtgaaagctagggctgcccgcag

SEQ ID NO: 236023 - DNA, 30 bp, Artificial Sequence
  Synthetic oligonucleotide
taatataaccgtgcgccttcatgagcgcag

SEQ ID NO: 236024 - DNA, 30 bp, Artificial Sequence
  Synthetic oligonucleotide
aaactagaccggcgaattacgttggcgcag

SEQ ID NO: 236025 - DNA, 30 bp, Artificial Sequence
  Synthetic oligonucleotide
atattattaaacgggcggtgccttgcgcag

SEQ ID NO: 236026 - DNA, 30 bp, Artificial Sequence
  Synthetic oligonucleotide
aagaggagtagtacagaaagcttttcgcag

SEQ ID NO: 236027 - DNA, 30 bp, Artificial Sequence
  Synthetic oligonucleotide
aggaaaacgtggggggttattacaaggcag

SEQ ID NO: 236028 - DNA, 30 bp, Artificial Sequence
  Synthetic oligonucleotide
gcccccatggcattctcagaatcaaggcag

SEQ ID NO: 236029 - DNA, 30 bp, Artificial Sequence
  Synthetic oligonucleotide
acaatagattcgcgttcaggttgaaggcag

SEQ ID NO: 236030 - DNA, 30 bp, Artificial Sequence
  Synthetic oligonucleotide
aattatctaaggttcaaaccgttcaggcag

SEQ ID NO: 236031 - DNA, 30 bp, Artificial Sequence
  Synthetic oligonucleotide
caaaataagggagatttcactgagaggcag

SEQ ID NO: 236032 - DNA, 30 bp, Artificial Sequence
  Synthetic oligonucleotide
ggccagtcttaacaaaaatctccgaggcag

SEQ ID NO: 236033 - DNA, 30 bp, Artificial Sequence
  Synthetic oligonucleotide
cttttgaattcagcgtcaattctccggcag

SEQ ID NO: 236034 - DNA, 30 bp, Artificial Sequence
  Synthetic oligonucleotide
gatgagcagatactgattactgagcggcag

SEQ ID NO: 236035 - DNA, 30 bp, Artificial Sequence
  Synthetic oligonucleotide
ataaggtcggtgggttggcgacggcggcag

SEQ ID NO: 236036 - DNA, 30 bp, Artificial Sequence
  Synthetic oligonucleotide
tagatgcttcagatcgatatcggtcggcag

SEQ ID NO: 236037 - DNA, 30 bp, Artificial Sequence
  Synthetic oligonucleotide
atgtgagaactagtagttattggtcggcag

SEQ ID NO: 236038 - DNA, 30 bp, Artificial Sequence
  Synthetic oligonucleotide
acgccgtaattacggggggtgacagggcag

SEQ ID NO: 236039 - DNA, 30 bp, Artificial Sequence
  Synthetic oligonucleotide
gcaggggggactgggccgttcgcagggcag

SEQ ID NO: 236040 - DNA, 30 bp, Artificial Sequence
  Synthetic oligonucleotide
ctttaaatgagggcaacgcagagagggcag

SEQ ID NO: 236041 - DNA, 30 bp, Artificial Sequence
  Synthetic oligonucleotide
ctcttccggccccactttagaatcgggcag

SEQ ID NO: 236042 - DNA, 30 bp, Artificial Sequence
  Synthetic oligonucleotide
cccaaaagcatgttaagttgattttggcag

SEQ ID NO: 236043 - DNA, 30 bp, Artificial Sequence
  Synthetic oligonucleotide
acaacggaatgttgtttgtagtgcatgcag

SEQ ID NO: 236044 - DNA, 30 bp, Artificial Sequence
  Synthetic oligonucleotide
tggtatcactacgtggtacgtgtcatgcag

SEQ ID NO: 236045 - DNA, 30 bp, Artificial Sequence
  Synthetic oligonucleotide
gggaagtttcgcctgacggcggggatgcag

SEQ ID NO: 236046 - DNA, 30 bp, Artificial Sequence
  Synthetic oligonucleotide
cccgtgccttacgatacatctaatctgcag

SEQ ID NO: 236047 - DNA, 30 bp, Artificial Sequence
  Synthetic oligonucleotide
agtgctacctgtacattcgcacctctgcag

SEQ ID NO: 236048 - DNA, 30 bp, Artificial Sequence
  Synthetic oligonucleotide
accgggctgacgaaatgctcgtctctgcag

SEQ ID NO: 236049 - DNA, 30 bp, Artificial Sequence
  Synthetic oligonucleotide
cctaccggatccgacaaatgctcagtgcag

SEQ ID NO: 236050 - DNA, 30 bp, Artificial Sequence
  Synthetic oligonucleotide
agcgaaaacttacctttacgcttagtgcag

SEQ ID NO: 236051 - DNA, 30 bp, Artificial Sequence
  Synthetic oligonucleotide
ttgtatcttaacgaccaggtttcattgcag

SEQ ID NO: 236052 - DNA, 30 bp, Artificial Sequence
  Synthetic oligonucleotide
tcgcggcgcttgcgcaagtgactattgcag

SEQ ID NO: 236053 - DNA, 30 bp, Artificial Sequence
  Synthetic oligonucleotide
attttgttacctctgtgcggagacttgcag

SEQ ID NO: 236054 - DNA, 30 bp, Artificial Sequence
  Synthetic oligonucleotide
aatcgagggcacattaggagacgcttgcag

SEQ ID NO: 236055 - DNA, 30 bp, Artificial Sequence
  Synthetic oligonucleotide
aatgaatcgagcagaagtagtaatttgcag

SEQ ID NO: 236056 - DNA, 30 bp, Artificial Sequence
  Synthetic oligonucleotide
ggaatacacttaactcgagacagaaatcag

SEQ ID NO: 236057 - DNA, 30 bp, Artificial Sequence
  Synthetic oligonucleotide
tttggtggctcccgaaacaagttaaatcag

SEQ ID NO: 236058 - DNA, 30 bp, Artificial Sequence
  Synthetic oligonucleotide
gtaccggactttaaatcagggttaaatcag

SEQ ID NO: 236059 - DNA, 30 bp, Artificial Sequence
  Synthetic oligonucleotide
tggggggttaagctattatataccaatcag

SEQ ID NO: 236060 - DNA, 30 bp, Artificial Sequence
  Synthetic oligonucleotide
actttaataaggcgccgaaaccgcaatcag

SEQ ID NO: 236061 - DNA, 30 bp, Artificial Sequence
  Synthetic oligonucleotide
ccgagcggaaaccggtgtcagtgcaatcag

SEQ ID NO: 236062 - DNA, 30 bp, Artificial Sequence
  Synthetic oligonucleotide
ccacattgagaaatattggcaatcaatcag

SEQ ID NO: 236063 - DNA, 30 bp, Artificial Sequence
  Synthetic oligonucleotide
taggaaggtgctggagtcagtgataatcag

SEQ ID NO: 236064 - DNA, 30 bp, Artificial Sequence
  Synthetic oligonucleotide
gtacctcggggtcaccggccgtgtaatcag

SEQ ID NO: 236065 - DNA, 30 bp, Artificial Sequence
  Synthetic oligonucleotide
cggtagttagatcaggtctgagtacatcag

SEQ ID NO: 236066 - DNA, 30 bp, Artificial Sequence
  Synthetic oligonucleotide
cactgttggtgaggcataaaaacccatcag

SEQ ID NO: 236067 - DNA, 30 bp, Artificial Sequence
  Synthetic oligonucleotide
cctactaagcctcatcgcaattatcatcag

SEQ ID NO: 236068 - DNA, 30 bp, Artificial Sequence
  Synthetic oligonucleotide
tcctgggtgagcccaactaaatttcatcag

SEQ ID NO: 236069 - DNA, 30 bp, Artificial Sequence
  Synthetic oligonucleotide
ctcttatttgtttcaaattaccgagatcag

SEQ ID NO: 236070 - DNA, 30 bp, Artificial Sequence
  Synthetic oligonucleotide
ctttctaggaaaggccattgatgagatcag

SEQ ID NO: 236071 - DNA, 30 bp, Artificial Sequence
  Synthetic oligonucleotide
aattgagaccggttacgattacacgatcag

SEQ ID NO: 236072 - DNA, 30 bp, Artificial Sequence
  Synthetic oligonucleotide
aaggtagggacgggataatgatgtgatcag

SEQ ID NO: 236073 - DNA, 30 bp, Artificial Sequence
  Synthetic oligonucleotide
ggctagatgatattatctctctgatatcag

SEQ ID NO: 236074 - DNA, 30 bp, Artificial Sequence
  Synthetic oligonucleotide
gtatttgaatgaccactgacacactatcag

SEQ ID NO: 236075 - DNA, 30 bp, Artificial Sequence
  Synthetic oligonucleotide
ccaactaacaatggcggtcgtacaactcag

SEQ ID NO: 236076 - DNA, 30 bp, Artificial Sequence
  Synthetic oligonucleotide
gagttcgcccttaacggacttataactcag

SEQ ID NO: 236077 - DNA, 30 bp, Artificial Sequence
  Synthetic oligonucleotide
ctcatcaaacttgccgtacacgacactcag

SEQ ID NO: 236078 - DNA, 30 bp, Artificial Sequence
  Synthetic oligonucleotide
gccggtacagcatggacgtgagagactcag

SEQ ID NO: 236079 - DNA, 30 bp, Artificial Sequence
  Synthetic oligonucleotide
ctcagcgaaatttacttagaactgactcag

SEQ ID NO: 236080 - DNA, 30 bp, Artificial Sequence
  Synthetic oligonucleotide
aggaatctctgttgcagaatagtgactcag

SEQ ID NO: 236081 - DNA, 30 bp, Artificial Sequence
  Synthetic oligonucleotide
agcctatgggacgcgaggggctatactcag

SEQ ID NO: 236082 - DNA, 30 bp, Artificial Sequence
  Synthetic oligonucleotide
taaggtattgagtaaacgccgattactcag

SEQ ID NO: 236083 - DNA, 30 bp, Artificial Sequence
  Synthetic oligonucleotide
gtgtatcacatatgtggcaatgcacctcag

SEQ ID NO: 236084 - DNA, 30 bp, Artificial Sequence
  Synthetic oligonucleotide
gtacccgtatgagatagtccagtacctcag

SEQ ID NO: 236085 - DNA, 29 bp, Artificial Sequence
  Synthetic oligonucleotide
gccaggtcctagcggaaattaaccctcag

SEQ ID NO: 236086 - DNA, 30 bp, Artificial Sequence
  Synthetic oligonucleotide
tagtggcacggataagatctttcgcctcag

SEQ ID NO: 236087 - DNA, 30 bp, Artificial Sequence
  Synthetic oligonucleotide
aggtttacgcttaatagcaaccgtcctcag

SEQ ID NO: 236088 - DNA, 30 bp, Artificial Sequence
  Synthetic oligonucleotide
ctttacgttgatttcgaacgagcggctcag

SEQ ID NO: 236089 - DNA, 30 bp, Artificial Sequence
  Synthetic oligonucleotide
gaagctacaagtaagagagaccgggctcag

SEQ ID NO: 236090 - DNA, 30 bp, Artificial Sequence
  Synthetic oligonucleotide
catgcttgatgattagcccgatatgctcag

SEQ ID NO: 236091 - DNA, 30 bp, Artificial Sequence
  Synthetic oligonucleotide
catctttattattcccgaaacaaatctcag

SEQ ID NO: 236092 - DNA, 30 bp, Artificial Sequence
  Synthetic oligonucleotide
cacatacagtttaaatgggaggcatctcag

SEQ ID NO: 236093 - DNA, 30 bp, Artificial Sequence
  Synthetic oligonucleotide
attagacagccatcggattcttcatctcag

SEQ ID NO: 236094 - DNA, 30 bp, Artificial Sequence
  Synthetic oligonucleotide
gtagccacagcagttatcgaacactctcag

SEQ ID NO: 236095 - DNA, 30 bp, Artificial Sequence
  Synthetic oligonucleotide
ctctaatcccataaggacgaagactctcag

SEQ ID NO: 236096 - DNA, 30 bp, Artificial Sequence
  Synthetic oligonucleotide
taattggcgatattcgagcgcatctctcag

SEQ ID NO: 236097 - DNA, 30 bp, Artificial Sequence
  Synthetic oligonucleotide
acaagtggatcatgcttgattgtctctcag

SEQ ID NO: 236098 - DNA, 30 bp, Artificial Sequence
  Synthetic oligonucleotide
ggaacggactttcaatccccattctctcag

SEQ ID NO: 236099 - DNA, 30 bp, Artificial Sequence
  Synthetic oligonucleotide
aggggcggcacccggcacgtttcgtctcag

SEQ ID NO: 236100 - DNA, 30 bp, Artificial Sequence
  Synthetic oligonucleotide
aagatgataaatattgcaagggtttctcag

SEQ ID NO: 236101 - DNA, 30 bp, Artificial Sequence
  Synthetic oligonucleotide
tgtcgacaatcactcatcatgggaagtcag

SEQ ID NO: 236102 - DNA, 30 bp, Artificial Sequence
  Synthetic oligonucleotide
tatgtccaggaaccggtagatataagtcag

SEQ ID NO: 236103 - DNA, 30 bp, Artificial Sequence
  Synthetic oligonucleotide
tgcatcttacatggatacagaaccagtcag

SEQ ID NO: 236104 - DNA, 30 bp, Artificial Sequence
  Synthetic oligonucleotide
tacatagtatgtgctcacattcccagtcag

SEQ ID NO: 236105 - DNA, 30 bp, Artificial Sequence
  Synthetic oligonucleotide
atctaggattcccttggagactcgagtcag

SEQ ID NO: 236106 - DNA, 30 bp, Artificial Sequence
  Synthetic oligonucleotide
tctacacatagatataggcagtggagtcag

SEQ ID NO: 236107 - DNA, 30 bp, Artificial Sequence
  Synthetic oligonucleotide
cagcaggtatccacgccatccatgagtcag

SEQ ID NO: 236108 - DNA, 29 bp, Artificial Sequence
  Synthetic oligonucleotide
caaaggcttaacctgagattactagtcag

SEQ ID NO: 236109 - DNA, 30 bp, Artificial Sequence
  Synthetic oligonucleotide
ctgatatgcagtctcgagggagaccgtcag

SEQ ID NO: 236110 - DNA, 30 bp, Artificial Sequence
  Synthetic oligonucleotide
tcatgatcgtgtcggtaaaaaacccgtcag

SEQ ID NO: 236111 - DNA, 30 bp, Artificial Sequence
  Synthetic oligonucleotide
cttggtttctagggctcggggatgcgtcag

SEQ ID NO: 236112 - DNA, 30 bp, Artificial Sequence
  Synthetic oligonucleotide
aacatgctgtctgccccagggaatcgtcag

SEQ ID NO: 236113 - DNA, 30 bp, Artificial Sequence
  Synthetic oligonucleotide
tcttctgccaaaagaggatcgtgcggtcag

SEQ ID NO: 236114 - DNA, 30 bp, Artificial Sequence
  Synthetic oligonucleotide
gtaattcgcgatcagtctgagttcggtcag

SEQ ID NO: 236115 - DNA, 30 bp, Artificial Sequence
  Synthetic oligonucleotide
gcactacgttgtggggagggttttggtcag

SEQ ID NO: 236116 - DNA, 30 bp, Artificial Sequence
  Synthetic oligonucleotide
ggcattcgactacggaaccaatgatgtcag

SEQ ID NO: 236117 - DNA, 30 bp, Artificial Sequence
  Synthetic oligonucleotide
acactgcaagactctagttatttatgtcag

SEQ ID NO: 236118 - DNA, 30 bp, Artificial Sequence
  Synthetic oligonucleotide
gccacgctccttccttggaagaagtgtcag

SEQ ID NO: 236119 - DNA, 30 bp, Artificial Sequence
  Synthetic oligonucleotide
aaagaaggcggaagttatatggcgtgtcag

SEQ ID NO: 236120 - DNA, 30 bp, Artificial Sequence
  Synthetic oligonucleotide
aacggttagtctcatacgtccagcattcag

SEQ ID NO: 236121 - DNA, 30 bp, Artificial Sequence
  Synthetic oligonucleotide
tctaaagctggatggccgcgcagtattcag

SEQ ID NO: 236122 - DNA, 30 bp, Artificial Sequence
  Synthetic oligonucleotide
tgtcaaggggccccgtttatggtgcttcag

SEQ ID NO: 236123 - DNA, 30 bp, Artificial Sequence
  Synthetic oligonucleotide
aggctgtaggcgcagagcgtacctcttcag

SEQ ID NO: 236124 - DNA, 30 bp, Artificial Sequence
  Synthetic oligonucleotide
gccagatataaatagcacgtgcttcttcag

SEQ ID NO: 236125 - DNA, 30 bp, Artificial Sequence
  Synthetic oligonucleotide
aggagatcagatcgtgactgaagagttcag

SEQ ID NO: 236126 - DNA, 30 bp, Artificial Sequence
  Synthetic oligonucleotide
tctaggctgctctagggttaacacgttcag

SEQ ID NO: 236127 - DNA, 30 bp, Artificial Sequence
  Synthetic oligonucleotide
tcccagttacactctgaagtacccgttcag

SEQ ID NO: 236128 - DNA, 30 bp, Artificial Sequence
  Synthetic oligonucleotide
taaacaggcatggttgtttgaaaggttcag

SEQ ID NO: 236129 - DNA, 30 bp, Artificial Sequence
  Synthetic oligonucleotide
gtacgcacaggcgcagtgttataggttcag

SEQ ID NO: 236130 - DNA, 30 bp, Artificial Sequence
  Synthetic oligonucleotide
atacgggctatcgttgtcccctgctttcag

SEQ ID NO: 236131 - DNA, 30 bp, Artificial Sequence
  Synthetic oligonucleotide
ctccggatcggtgtataatgatggtttcag

SEQ ID NO: 236132 - DNA, 30 bp, Artificial Sequence
  Synthetic oligonucleotide
actgagatacccttcaccatacaaaaagag

SEQ ID NO: 236133 - DNA, 30 bp, Artificial Sequence
  Synthetic oligonucleotide
ccacgcatctgtgatccgtccgtaaaagag

SEQ ID NO: 236134 - DNA, 30 bp, Artificial Sequence
  Synthetic oligonucleotide
atctcctataaagcactagttcacaaagag

SEQ ID NO: 236135 - DNA, 30 bp, Artificial Sequence
  Synthetic oligonucleotide
attcggtcatatgagcgcacggtgaaagag

SEQ ID NO: 236136 - DNA, 30 bp, Artificial Sequence
  Synthetic oligonucleotide
tatcatctggagtcttatccctataaagag

SEQ ID NO: 236137 - DNA, 30 bp, Artificial Sequence
  Synthetic oligonucleotide
cgtgggccaggtttttttatcgcacaagag

SEQ ID NO: 236138 - DNA, 30 bp, Artificial Sequence
  Synthetic oligonucleotide
attgtaaattggtcataggttagacaagag

SEQ ID NO: 236139 - DNA, 30 bp, Artificial Sequence
  Synthetic oligonucleotide
ttggtcgccgcgggcggggctggccaagag

SEQ ID NO: 236140 - DNA, 30 bp, Artificial Sequence
  Synthetic oligonucleotide
gctgttctcttgcaggaagaacagcaagag

SEQ ID NO: 236141 - DNA, 30 bp, Artificial Sequence
  Synthetic oligonucleotide
ggttggggattaccaactatgtagcaagag

SEQ ID NO: 236142 - DNA, 30 bp, Artificial Sequence
  Synthetic oligonucleotide
tatcgagcattagtagaggactggcaagag

SEQ ID NO: 236143 - DNA, 30 bp, Artificial Sequence
  Synthetic oligonucleotide
caccttatttacgcactccgaagtcaagag

SEQ ID NO: 236144 - DNA, 30 bp, Artificial Sequence
  Synthetic oligonucleotide
aagcaggataaaattcagtaggaagaagag

SEQ ID NO: 236145 - DNA, 30 bp, Artificial Sequence
  Synthetic oligonucleotide
actacaattacatgattgtcatgcgaagag

SEQ ID NO: 236146 - DNA, 30 bp, Artificial Sequence
  Synthetic oligonucleotide
taactatgtacaatgtaggagcgggaagag

SEQ ID NO: 236147 - DNA, 30 bp, Artificial Sequence
  Synthetic oligonucleotide
tgttgggattagacaaacaggggggaagag

SEQ ID NO: 236148 - DNA, 30 bp, Artificial Sequence
  Synthetic oligonucleotide
attccagagtagaatcggtgtctggaagag

SEQ ID NO: 236149 - DNA, 30 bp, Artificial Sequence
  Synthetic oligonucleotide
tagatactaaaagtatcgatgcgtgaagag

SEQ ID NO: 236150 - DNA, 30 bp, Artificial Sequence
  Synthetic oligonucleotide
aagcgccctcttggaggcaattttgaagag

SEQ ID NO: 236151 - DNA, 30 bp, Artificial Sequence
  Synthetic oligonucleotide
aattattgcgatccaatccgttttgaagag

SEQ ID NO: 236152 - DNA, 30 bp, Artificial Sequence
  Synthetic oligonucleotide
aatgtcgtacacaccacagagacataagag

SEQ ID NO: 236153 - DNA, 30 bp, Artificial Sequence
  Synthetic oligonucleotide
atgcggagcactttcgcggtgcaaacagag

SEQ ID NO: 236154 - DNA, 30 bp, Artificial Sequence
  Synthetic oligonucleotide
cgttagtggcgtattatgggcccaacagag

SEQ ID NO: 236155 - DNA, 30 bp, Artificial Sequence
  Synthetic oligonucleotide
ggagaactataaattctggtcgtaacagag

SEQ ID NO: 236156 - DNA, 30 bp, Artificial Sequence
  Synthetic oligonucleotide
ctttgcaagcagtaatcccactccacagag

SEQ ID NO: 236157 - DNA, 30 bp, Artificial Sequence
  Synthetic oligonucleotide
ctagtcgagtttagacagcggtgcacagag

SEQ ID NO: 236158 - DNA, 30 bp, Artificial Sequence
  Synthetic oligonucleotide
ctcttaagtgggacgagattatatacagag

SEQ ID NO: 236159 - DNA, 30 bp, Artificial Sequence
  Synthetic oligonucleotide
gttagtcatagcggcatactaactacagag

SEQ ID NO: 236160 - DNA, 30 bp, Artificial Sequence
  Synthetic oligonucleotide
gaagttacatgagtgacatattgagcagag

SEQ ID NO: 236161 - DNA, 30 bp, Artificial Sequence
  Synthetic oligonucleotide
aacacaaagtttgctatctgaaacgcagag

SEQ ID NO: 236162 - DNA, 30 bp, Artificial Sequence
  Synthetic oligonucleotide
tgggcttttggacatgatcaatgcgcagag

SEQ ID NO: 236163 - DNA, 30 bp, Artificial Sequence
  Synthetic oligonucleotide
tccagctttgatctcgacgttcaggcagag

SEQ ID NO: 236164 - DNA, 30 bp, Artificial Sequence
  Synthetic oligonucleotide
gcttacctatagcccgggtcttgggcagag

SEQ ID NO: 236165 - DNA, 30 bp, Artificial Sequence
  Synthetic oligonucleotide
aataagtgtgaagtcgcggcgagtgcagag

SEQ ID NO: 236166 - DNA, 30 bp, Artificial Sequence
  Synthetic oligonucleotide
gccttagtaatacacagcaagattgcagag

SEQ ID NO: 236167 - DNA, 30 bp, Artificial Sequence
  Synthetic oligonucleotide
tcggtagagtgtagattctgcggatcagag

SEQ ID NO: 236168 - DNA, 30 bp, Artificial Sequence
  Synthetic oligonucleotide
tatcaaggtaaaagctctaatctctcagag

SEQ ID NO: 236169 - DNA, 30 bp, Artificial Sequence
  Synthetic oligonucleotide
acgatagcagtcacacattacaattcagag

SEQ ID NO: 236170 - DNA, 30 bp, Artificial Sequence
  Synthetic oligonucleotide
gatattctgtactgacgacgggaaagagag

SEQ ID NO: 236171 - DNA, 30 bp, Artificial Sequence
  Synthetic oligonucleotide
acagtcaaatacactcgggcgttaagagag

SEQ ID NO: 236172 - DNA, 30 bp, Artificial Sequence
  Synthetic oligonucleotide
gcctgaaggtaggtttgtaagcacagagag

SEQ ID NO: 236173 - DNA, 30 bp, Artificial Sequence
  Synthetic oligonucleotide
atctgattccgtggatgccaatacagagag

SEQ ID NO: 236174 - DNA, 30 bp, Artificial Sequence
  Synthetic oligonucleotide
tcttctgcccgaccaggatcacgcagagag

SEQ ID NO: 236175 - DNA, 30 bp, Artificial Sequence
  Synthetic oligonucleotide
aacgacggcagattgtacagtcggagagag

SEQ ID NO: 236176 - DNA, 30 bp, Artificial Sequence
  Synthetic oligonucleotide
tacctctatcatcgtattagttggagagag

SEQ ID NO: 236177 - DNA, 30 bp, Artificial Sequence
  Synthetic oligonucleotide
ttgctggttacgcctaagttaatgagagag

SEQ ID NO: 236178 - DNA, 30 bp, Artificial Sequence
  Synthetic oligonucleotide
ttctagcgatactccaggaggctgagagag

SEQ ID NO: 236179 - DNA, 30 bp, Artificial Sequence
  Synthetic oligonucleotide
ctccaccttgctttgacgtatactagagag

SEQ ID NO: 236180 - DNA, 30 bp, Artificial Sequence
  Synthetic oligonucleotide
cccgcttgctttaataaaacgggtagagag

SEQ ID NO: 236181 - DNA, 30 bp, Artificial Sequence
  Synthetic oligonucleotide
caagccccccccgagcactttacacgagag

SEQ ID NO: 236182 - DNA, 30 bp, Artificial Sequence
  Synthetic oligonucleotide
tgctttgatataagctgttcgtcgcgagag

SEQ ID NO: 236183 - DNA, 30 bp, Artificial Sequence
  Synthetic oligonucleotide
agtcaaagactcactctgtccattcgagag

SEQ ID NO: 236184 - DNA, 30 bp, Artificial Sequence
  Synthetic oligonucleotide
tagcggatgcgtattcttttaggcggagag

SEQ ID NO: 236185 - DNA, 30 bp, Artificial Sequence
  Synthetic oligonucleotide
cggtataagcttcgacgcttaacgggagag

SEQ ID NO: 236186 - DNA, 30 bp, Artificial Sequence
  Synthetic oligonucleotide
gggtggaggtggtctttagctacgggagag

SEQ ID NO: 236187 - DNA, 30 bp, Artificial Sequence
  Synthetic oligonucleotide
tggaataagactaaacacgccactggagag

SEQ ID NO: 236188 - DNA, 30 bp, Artificial Sequence
  Synthetic oligonucleotide
atatagtaggagagtttaggtcgatgagag

SEQ ID NO: 236189 - DNA, 30 bp, Artificial Sequence
  Synthetic oligonucleotide
ctagtgatatagtggtaggaaacgtgagag

SEQ ID NO: 236190 - DNA, 30 bp, Artificial Sequence
  Synthetic oligonucleotide
atgtatgggcacaattttttcgattgagag

SEQ ID NO: 236191 - DNA, 30 bp, Artificial Sequence
  Synthetic oligonucleotide
gtaatgcgggccttgcgtagtacttgagag

SEQ ID NO: 236192 - DNA, 30 bp, Artificial Sequence
  Synthetic oligonucleotide
ggaggggctggttaaactgaatcttgagag

SEQ ID NO: 236193 - DNA, 30 bp, Artificial Sequence
  Synthetic oligonucleotide
tcgccttgctacgttgtcagtcagatagag

SEQ ID NO: 236194 - DNA, 30 bp, Artificial Sequence
  Synthetic oligonucleotide
gcggaggtgaccgtagtggccacgatagag

SEQ ID NO: 236195 - DNA, 30 bp, Artificial Sequence
  Synthetic oligonucleotide
actaataagcggccaagcgttggtatagag

SEQ ID NO: 236196 - DNA, 30 bp, Artificial Sequence
  Synthetic oligonucleotide
tgttgcgttgcggacgatctaacactagag

SEQ ID NO: 236197 - DNA, 30 bp, Artificial Sequence
  Synthetic oligonucleotide
tatatgtcggatctggcagtcatactagag

SEQ ID NO: 236198 - DNA, 30 bp, Artificial Sequence
  Synthetic oligonucleotide
gcatgaggtgttttatcactgagcctagag

SEQ ID NO: 236199 - DNA, 30 bp, Artificial Sequence
  Synthetic oligonucleotide
tacatagccgcaatagctcttatcctagag

SEQ ID NO: 236200 - DNA, 30 bp, Artificial Sequence
  Synthetic oligonucleotide
gtctcgagcacgcatgatcatttcctagag

SEQ ID NO: 236201 - DNA, 30 bp, Artificial Sequence
  Synthetic oligonucleotide
gtactatatcttgggacaagacagctagag

SEQ ID NO: 236202 - DNA, 30 bp, Artificial Sequence
  Synthetic oligonucleotide
aattacacggaaatgagtctttggctagag

SEQ ID NO: 236203 - DNA, 30 bp, Artificial Sequence
  Synthetic oligonucleotide
cgattagattctgatgacagtctgctagag

SEQ ID NO: 236204 - DNA, 30 bp, Artificial Sequence
  Synthetic oligonucleotide
acggaccgttttcattctttgcatctagag

SEQ ID NO: 236205 - DNA, 30 bp, Artificial Sequence
  Synthetic oligonucleotide
ctggcactaggatcgtaaacgggtctagag

SEQ ID NO: 236206 - DNA, 30 bp, Artificial Sequence
  Synthetic oligonucleotide
cgcagggatacctgtctacgggtagtagag

SEQ ID NO: 236207 - DNA, 30 bp, Artificial Sequence
  Synthetic oligonucleotide
attcaactactgcgaccttgtttcgtagag

SEQ ID NO: 236208 - DNA, 30 bp, Artificial Sequence
  Synthetic oligonucleotide
tttaggtgtgatccgctagtcgatgtagag

SEQ ID NO: 236209 - DNA, 30 bp, Artificial Sequence
  Synthetic oligonucleotide
gcaagttaggctcttagattgtatgtagag

SEQ ID NO: 236210 - DNA, 30 bp, Artificial Sequence
  Synthetic oligonucleotide
ctgattatgccgctcacgttgagtgtagag

SEQ ID NO: 236211 - DNA, 30 bp, Artificial Sequence
  Synthetic oligonucleotide
gttagaaatatgtacgagcgaggtgtagag

SEQ ID NO: 236212 - DNA, 30 bp, Artificial Sequence
  Synthetic oligonucleotide
acaaatgcaaaagtactcttagaattagag

SEQ ID NO: 236213 - DNA, 30 bp, Artificial Sequence
  Synthetic oligonucleotide
ggttggtataaagttgccaaatcattagag

SEQ ID NO: 236214 - DNA, 30 bp, Artificial Sequence
  Synthetic oligonucleotide
gtaggcattgctcgacagggtggattagag

SEQ ID NO: 236215 - DNA, 30 bp, Artificial Sequence
  Synthetic oligonucleotide
ctagatcatttccagccaggggtattagag

SEQ ID NO: 236216 - DNA, 30 bp, Artificial Sequence
  Synthetic oligonucleotide
caccttacagcgtaagtgtgtttattagag

SEQ ID NO: 236217 - DNA, 30 bp, Artificial Sequence
  Synthetic oligonucleotide
tcatggtccaataacttggttcggttagag

SEQ ID NO: 236218 - DNA, 30 bp, Artificial Sequence
  Synthetic oligonucleotide
tcgggttcctatacagcggcagggttagag

SEQ ID NO: 236219 - DNA, 30 bp, Artificial Sequence
  Synthetic oligonucleotide
gattattcacactcacgaggatgtttagag

SEQ ID NO: 236220 - DNA, 30 bp, Artificial Sequence
  Synthetic oligonucleotide
gtgtaagcgctgtaccgagatattttagag

SEQ ID NO: 236221 - DNA, 30 bp, Artificial Sequence
  Synthetic oligonucleotide
catggaatgtggtctcccatctttttagag

SEQ ID NO: 236222 - DNA, 30 bp, Artificial Sequence
  Synthetic oligonucleotide
ccgaggtgtctgaaaccgaattttttagag

SEQ ID NO: 236223 - DNA, 30 bp, Artificial Sequence
  Synthetic oligonucleotide
aatggaagagcaccttgtgatacaaacgag

SEQ ID NO: 236224 - DNA, 30 bp, Artificial Sequence
  Synthetic oligonucleotide
ctcttgccttaacgagtgaagctaaacgag

SEQ ID NO: 236225 - DNA, 31 bp, Artificial Sequence
  Synthetic oligonucleotide
cctccagttcgtgtcttagagtgacaacgag

SEQ ID NO: 236226 - DNA, 30 bp, Artificial Sequence
  Synthetic oligonucleotide
caaataaccgccctatcttacgtcaacgag

SEQ ID NO: 236227 - DNA, 30 bp, Artificial Sequence
  Synthetic oligonucleotide
tacggagggctcgttactagcacgaacgag

SEQ ID NO: 236228 - DNA, 30 bp, Artificial Sequence
  Synthetic oligonucleotide
ttcacgtattaatcgttatagaggaacgag

SEQ ID NO: 236229 - DNA, 30 bp, Artificial Sequence
  Synthetic oligonucleotide
acccccgcctaccgacaactaattaacgag

SEQ ID NO: 236230 - DNA, 30 bp, Artificial Sequence
  Synthetic oligonucleotide
ccccgccctgtttaaggctgacttaacgag

SEQ ID NO: 236231 - DNA, 30 bp, Artificial Sequence
  Synthetic oligonucleotide
tctaatgcatttccaatgttacaacacgag

SEQ ID NO: 236232 - DNA, 30 bp, Artificial Sequence
  Synthetic oligonucleotide
cgtcgcaggcacctgaagcatcaacacgag

SEQ ID NO: 236233 - DNA, 30 bp, Artificial Sequence
  Synthetic oligonucleotide
tatgtgttgggtatcgcggagacacacgag

SEQ ID NO: 236234 - DNA, 30 bp, Artificial Sequence
  Synthetic oligonucleotide
agatatgattctggtttatgtaagcacgag

SEQ ID NO: 236235 - DNA, 30 bp, Artificial Sequence
  Synthetic oligonucleotide
acttgcagtacatggccagtcggtcacgag

SEQ ID NO: 236236 - DNA, 30 bp, Artificial Sequence
  Synthetic oligonucleotide
tgctttcgctcggatctgcgaggagacgag

SEQ ID NO: 236237 - DNA, 30 bp, Artificial Sequence
  Synthetic oligonucleotide
ccagtgactgcagcctaaagtatcgacgag

SEQ ID NO: 236238 - DNA, 30 bp, Artificial Sequence
  Synthetic oligonucleotide
ggaggaacaaggggtaaggacgcggacgag

SEQ ID NO: 236239 - DNA, 30 bp, Artificial Sequence
  Synthetic oligonucleotide
acaggccagtggtagcgtaaatcggacgag

SEQ ID NO: 236240 - DNA, 30 bp, Artificial Sequence
  Synthetic oligonucleotide
gttcgtatagaacttgccgcatctgacgag

SEQ ID NO: 236241 - DNA, 29 bp, Artificial Sequence
  Synthetic oligonucleotide
cgagaaccgtgtggtatcacgttgacgag

SEQ ID NO: 236242 - DNA, 30 bp, Artificial Sequence
  Synthetic oligonucleotide
tgccataaattggtaacggttccgtacgag

SEQ ID NO: 236243 - DNA, 30 bp, Artificial Sequence
  Synthetic oligonucleotide
tacacgcatagggggtttctgcgttacgag

SEQ ID NO: 236244 - DNA, 30 bp, Artificial Sequence
  Synthetic oligonucleotide
aacataccccatgtgcggagtaaaaccgag

SEQ ID NO: 236245 - DNA, 30 bp, Artificial Sequence
  Synthetic oligonucleotide
gatccttcgcgtggacgatgctaaaccgag

SEQ ID NO: 236246 - DNA, 30 bp, Artificial Sequence
  Synthetic oligonucleotide
aaatacgtttcaaataaaacatgaaccgag

SEQ ID NO: 236247 - DNA, 30 bp, Artificial Sequence
  Synthetic oligonucleotide
tcacgtgctcggtctgcaaagttaaccgag

SEQ ID NO: 236248 - DNA, 30 bp, Artificial Sequence
  Synthetic oligonucleotide
tgtctatatgggagcgtggcaagtaccgag

SEQ ID NO: 236249 - DNA, 30 bp, Artificial Sequence
  Synthetic oligonucleotide
aagtaagaaagattagtgttacgtaccgag

SEQ ID NO: 236250 - DNA, 30 bp, Artificial Sequence
  Synthetic oligonucleotide
cagcaaaaacgattggcaaccattaccgag

SEQ ID NO: 236251 - DNA, 30 bp, Artificial Sequence
  Synthetic oligonucleotide
taaatccaacgggcttggagtgtccccgag

SEQ ID NO: 236252 - DNA, 30 bp, Artificial Sequence
  Synthetic oligonucleotide
taaatgatggactaacccacgtagcccgag

SEQ ID NO: 236253 - DNA, 30 bp, Artificial Sequence
  Synthetic oligonucleotide
tgaagcagcggcgtgggagccagggccgag

SEQ ID NO: 236254 - DNA, 30 bp, Artificial Sequence
  Synthetic oligonucleotide
ggtgggggtattcatccttacaaatccgag

SEQ ID NO: 236255 - DNA, 30 bp, Artificial Sequence
  Synthetic oligonucleotide
gtacatcttatggatcccttattatccgag

SEQ ID NO: 236256 - DNA, 30 bp, Artificial Sequence
  Synthetic oligonucleotide
gaggtggccaggggttccaggcggtccgag

SEQ ID NO: 236257 - DNA, 30 bp, Artificial Sequence
  Synthetic oligonucleotide
tattggctggaggttcgtcatcattccgag

SEQ ID NO: 236258 - DNA, 30 bp, Artificial Sequence
  Synthetic oligonucleotide
attcggggtgagtcttaaggacccagcgag

SEQ ID NO: 236259 - DNA, 30 bp, Artificial Sequence
  Synthetic oligonucleotide
gaattcttgcagctgggacatgccagcgag

SEQ ID NO: 236260 - DNA, 30 bp, Artificial Sequence
  Synthetic oligonucleotide
acttttgacaggcacggtgcgtggagcgag

SEQ ID NO: 236261 - DNA, 30 bp, Artificial Sequence
  Synthetic oligonucleotide
tagaggtgtcctggattcgcagaccgcgag

SEQ ID NO: 236262 - DNA, 30 bp, Artificial Sequence
  Synthetic oligonucleotide
tgattgtaacaatcgcccaactagcgcgag

SEQ ID NO: 236263 - DNA, 30 bp, Artificial Sequence
  Synthetic oligonucleotide
taagcaacttgcatgcaccttgcaggcgag

SEQ ID NO: 236264 - DNA, 30 bp, Artificial Sequence
  Synthetic oligonucleotide
ttcaattcgctagtcgaagactacggcgag

SEQ ID NO: 236265 - DNA, 30 bp, Artificial Sequence
  Synthetic oligonucleotide
gggaccgcctgtaggatcacgaggggcgag

SEQ ID NO: 236266 - DNA, 30 bp, Artificial Sequence
  Synthetic oligonucleotide
tggggccaaattttcacaaagttgggcgag

SEQ ID NO: 236267 - DNA, 30 bp, Artificial Sequence
  Synthetic oligonucleotide
acaatcttgagagaaagggagactggcgag

SEQ ID NO: 236268 - DNA, 30 bp, Artificial Sequence
  Synthetic oligonucleotide
ctttgtactaaagtagtggcctctggcgag

SEQ ID NO: 236269 - DNA, 30 bp, Artificial Sequence
  Synthetic oligonucleotide
ttgctcggagcgatcgcgggcagtggcgag

SEQ ID NO: 236270 - DNA, 30 bp, Artificial Sequence
  Synthetic oligonucleotide
tcgatttctctttgttctgttcgtggcgag

SEQ ID NO: 236271 - DNA, 30 bp, Artificial Sequence
  Synthetic oligonucleotide
aaaccgtcttaattaaaaggagtatgcgag

SEQ ID NO: 236272 - DNA, 30 bp, Artificial Sequence
  Synthetic oligonucleotide
ggattcattccctctaggataagctgcgag

SEQ ID NO: 236273 - DNA, 30 bp, Artificial Sequence
  Synthetic oligonucleotide
acactttactacggttcatcttgctgcgag

SEQ ID NO: 236274 - DNA, 30 bp, Artificial Sequence
  Synthetic oligonucleotide
tagggcgacatgcggcagctcgagtgcgag

SEQ ID NO: 236275 - DNA, 30 bp, Artificial Sequence
  Synthetic oligonucleotide
aacatggcgggttcatatttcccgtgcgag

SEQ ID NO: 236276 - DNA, 30 bp, Artificial Sequence
  Synthetic oligonucleotide
agcggaacgagcgtgagacaaaggtgcgag

SEQ ID NO: 236277 - DNA, 30 bp, Artificial Sequence
  Synthetic oligonucleotide
gagaagtagcgccgattgtggtacatcgag

SEQ ID NO: 236278 - DNA, 30 bp, Artificial Sequence
  Synthetic oligonucleotide
tctcgcatccgaaaatatttcggcatcgag

SEQ ID NO: 236279 - DNA, 30 bp, Artificial Sequence
  Synthetic oligonucleotide
gagatcgacggatcggtgccccggatcgag

SEQ ID NO: 236280 - DNA, 30 bp, Artificial Sequence
  Synthetic oligonucleotide
tcagaccggttgaggcaaagtcggatcgag

SEQ ID NO: 236281 - DNA, 30 bp, Artificial Sequence
  Synthetic oligonucleotide
gcaatatgggaattggatatttggatcgag

SEQ ID NO: 236282 - DNA, 30 bp, Artificial Sequence
  Synthetic oligonucleotide
cttcgcgacttttatcatcacggactcgag

SEQ ID NO: 236283 - DNA, 30 bp, Artificial Sequence
  Synthetic oligonucleotide
taaataccgggatacggtgagatactcgag

SEQ ID NO: 236284 - DNA, 30 bp, Artificial Sequence
  Synthetic oligonucleotide
tactggagctaaactctcggtctgctcgag

SEQ ID NO: 236285 - DNA, 30 bp, Artificial Sequence
  Synthetic oligonucleotide
acgcttcgctgtgatgctatgagtctcgag

SEQ ID NO: 236286 - DNA, 30 bp, Artificial Sequence
  Synthetic oligonucleotide
gggccgatagggatggcggccggtctcgag

SEQ ID NO: 236287 - DNA, 30 bp, Artificial Sequence
  Synthetic oligonucleotide
aaggtctgtaaatcagtatactgagtcgag

SEQ ID NO: 236288 - DNA, 30 bp, Artificial Sequence
  Synthetic oligonucleotide
tagagacagtccacatcatcgctagtcgag

SEQ ID NO: 236289 - DNA, 30 bp, Artificial Sequence
  Synthetic oligonucleotide
tctaacccggagggaaaaggcactgtcgag

SEQ ID NO: 236290 - DNA, 30 bp, Artificial Sequence
  Synthetic oligonucleotide
acagaggggcctgcggcgtgtcctgtcgag

SEQ ID NO: 236291 - DNA, 30 bp, Artificial Sequence
  Synthetic oligonucleotide
ctgattgaagcaagtaactgatcattcgag

SEQ ID NO: 236292 - DNA, 30 bp, Artificial Sequence
  Synthetic oligonucleotide
cgggcagcatatgcagctgggtcattcgag

SEQ ID NO: 236293 - DNA, 30 bp, Artificial Sequence
  Synthetic oligonucleotide
gtcgataactaataaaagagccccttcgag

SEQ ID NO: 236294 - DNA, 30 bp, Artificial Sequence
  Synthetic oligonucleotide
gcacgagtactaaaaggcttaaagttcgag

SEQ ID NO: 236295 - DNA, 30 bp, Artificial Sequence
  Synthetic oligonucleotide
ctctgtaagtctcagctcagaccgttcgag

SEQ ID NO: 236296 - DNA, 30 bp, Artificial Sequence
  Synthetic oligonucleotide
gctggtgtccaatggttcaagctgttcgag

SEQ ID NO: 236297 - DNA, 30 bp, Artificial Sequence
  Synthetic oligonucleotide
gggcagtgttatcattgggtgcgtttcgag

SEQ ID NO: 236298 - DNA, 30 bp, Artificial Sequence
  Synthetic oligonucleotide
ctataggatctattgccttttctcaaggag

SEQ ID NO: 236299 - DNA, 30 bp, Artificial Sequence
  Synthetic oligonucleotide
tctgatgcatgcgcaggctataagaaggag

SEQ ID NO: 236300 - DNA, 30 bp, Artificial Sequence
  Synthetic oligonucleotide
ggatctgtgtggcttcgccctaggaaggag

SEQ ID NO: 236301 - DNA, 30 bp, Artificial Sequence
  Synthetic oligonucleotide
gaggctagtgcggaggacgacgataaggag

SEQ ID NO: 236302 - DNA, 30 bp, Artificial Sequence
  Synthetic oligonucleotide
agtgaatccgaattgccggctgcacaggag

SEQ ID NO: 236303 - DNA, 30 bp, Artificial Sequence
  Synthetic oligonucleotide
aaatgccgagataggggtttgtgacaggag

SEQ ID NO: 236304 - DNA, 30 bp, Artificial Sequence
  Synthetic oligonucleotide
ccgggccgatcaccgacgcggagccaggag

SEQ ID NO: 236305 - DNA, 30 bp, Artificial Sequence
  Synthetic oligonucleotide
cccgtagactcgcttgaaaaacgccaggag

SEQ ID NO: 236306 - DNA, 30 bp, Artificial Sequence
  Synthetic oligonucleotide
cgtcggctatcatgtagtcccgtgcaggag

SEQ ID NO: 236307 - DNA, 30 bp, Artificial Sequence
  Synthetic oligonucleotide
tagcttgcgcgttggcagtggcaagaggag

SEQ ID NO: 236308 - DNA, 30 bp, Artificial Sequence
  Synthetic oligonucleotide
gccgtatattagataattcatctagaggag

SEQ ID NO: 236309 - DNA, 30 bp, Artificial Sequence
  Synthetic oligonucleotide
ttactgcttcatgtccgacgtcccgaggag

SEQ ID NO: 236310 - DNA, 30 bp, Artificial Sequence
  Synthetic oligonucleotide
gcccaggtgtttactgcggcccgggaggag

SEQ ID NO: 236311 - DNA, 30 bp, Artificial Sequence
  Synthetic oligonucleotide
atcatatggcgaagcgtcacagtataggag

SEQ ID NO: 236312 - DNA, 30 bp, Artificial Sequence
  Synthetic oligonucleotide
ttacgagtccaagccagggacaactaggag

SEQ ID NO: 236313 - DNA, 30 bp, Artificial Sequence
  Synthetic oligonucleotide
tcgggggcagcctccctaattatctaggag

SEQ ID NO: 236314 - DNA, 30 bp, Artificial Sequence
  Synthetic oligonucleotide
taagttagttggtaaagtgaaatgtaggag

SEQ ID NO: 236315 - DNA, 30 bp, Artificial Sequence
  Synthetic oligonucleotide
tatggggcggaagaaccggtcctgtaggag

SEQ ID NO: 236316 - DNA, 30 bp, Artificial Sequence
  Synthetic oligonucleotide
gaatgtagctttataccacgaaattaggag

SEQ ID NO: 236317 - DNA, 30 bp, Artificial Sequence
  Synthetic oligonucleotide
ttgccaagggcaatatcccgaagttaggag

SEQ ID NO: 236318 - DNA, 30 bp, Artificial Sequence
  Synthetic oligonucleotide
agatgcgccttcgttcgatgtaccacggag

SEQ ID NO: 236319 - DNA, 30 bp, Artificial Sequence
  Synthetic oligonucleotide
aaatctaggacaggaaggaaatccacggag

SEQ ID NO: 236320 - DNA, 29 bp, Artificial Sequence
  Synthetic oligonucleotide
gtcatggcattatgcgaagagtcacggag

SEQ ID NO: 236321 - DNA, 30 bp, Artificial Sequence
  Synthetic oligonucleotide
cagttagatgaaccgagtagaattacggag

SEQ ID NO: 236322 - DNA, 30 bp, Artificial Sequence
  Synthetic oligonucleotide
tgtagtcaattaagctactgtaaaccggag

SEQ ID NO: 236323 - DNA, 30 bp, Artificial Sequence
  Synthetic oligonucleotide
caaaatgtgtagcacagcaaccaaccggag

SEQ ID NO: 236324 - DNA, 30 bp, Artificial Sequence
  Synthetic oligonucleotide
tgggttgcggatcttaccaaaatcccggag

SEQ ID NO: 236325 - DNA, 30 bp, Artificial Sequence
  Synthetic oligonucleotide
gctggattactggtgtttcgtcagccggag

SEQ ID NO: 236326 - DNA, 30 bp, Artificial Sequence
  Synthetic oligonucleotide
tttcgggtttcatattagatctctccggag

SEQ ID NO: 236327 - DNA, 30 bp, Artificial Sequence
  Synthetic oligonucleotide
ctgaggattatgcaaacagcgagtccggag

SEQ ID NO: 236328 - DNA, 30 bp, Artificial Sequence
  Synthetic oligonucleotide
aaaggcgcagaggggtcggccaaatcggag

SEQ ID NO: 236329 - DNA, 30 bp, Artificial Sequence
  Synthetic oligonucleotide
tccacgttatttcaagtacacggatcggag

SEQ ID NO: 236330 - DNA, 30 bp, Artificial Sequence
  Synthetic oligonucleotide
aagttaacatcccttaaagcgaactcggag

SEQ ID NO: 236331 - DNA, 30 bp, Artificial Sequence
  Synthetic oligonucleotide
caaacttgtcagggccatcgttcgtcggag

SEQ ID NO: 236332 - DNA, 30 bp, Artificial Sequence
  Synthetic oligonucleotide
taccggccaaggtgtgtctatctttcggag

SEQ ID NO: 236333 - DNA, 30 bp, Artificial Sequence
  Synthetic oligonucleotide
cttccggaaagtgatataagaaaaagggag

SEQ ID NO: 236334 - DNA, 30 bp, Artificial Sequence
  Synthetic oligonucleotide
tttaatgatatgttctactcggacagggag

SEQ ID NO: 236335 - DNA, 30 bp, Artificial Sequence
  Synthetic oligonucleotide
cgtttagttagaaaactgtacaccagggag

SEQ ID NO: 236336 - DNA, 30 bp, Artificial Sequence
  Synthetic oligonucleotide
agggccccggcgtttaacagctccagggag

SEQ ID NO: 236337 - DNA, 30 bp, Artificial Sequence
  Synthetic oligonucleotide
ctacaagtgttaatgcggacatggagggag

SEQ ID NO: 236338 - DNA, 30 bp, Artificial Sequence
  Synthetic oligonucleotide
tttcgtgtagcaggtttcagtcctagggag

SEQ ID NO: 236339 - DNA, 30 bp, Artificial Sequence
  Synthetic oligonucleotide
ggtgctggcgatgggagtttgttacgggag

SEQ ID NO: 236340 - DNA, 30 bp, Artificial Sequence
  Synthetic oligonucleotide
tcgctgaatcagaagagtccccaccgggag

SEQ ID NO: 236341 - DNA, 30 bp, Artificial Sequence
  Synthetic oligonucleotide
aagagtggatcgagaagatggccccgggag

SEQ ID NO: 236342 - DNA, 30 bp, Artificial Sequence
  Synthetic oligonucleotide
tttgcagatcgatctagaaatatccgggag

SEQ ID NO: 236343 - DNA, 30 bp, Artificial Sequence
  Synthetic oligonucleotide
tggtagctatcattgagattctggcgggag

SEQ ID NO: 236344 - DNA, 30 bp, Artificial Sequence
  Synthetic oligonucleotide
accgagtgattctgtagcgtcggtcgggag

SEQ ID NO: 236345 - DNA, 30 bp, Artificial Sequence
  Synthetic oligonucleotide
gcaaagagtgcaccgtgccgacacggggag

SEQ ID NO: 236346 - DNA, 30 bp, Artificial Sequence
  Synthetic oligonucleotide
gacgggagtaggggaccgcttatgggggag

SEQ ID NO: 236347 - DNA, 30 bp, Artificial Sequence
  Synthetic oligonucleotide
attggacccaaaatcattatatatggggag

SEQ ID NO: 236348 - DNA, 30 bp, Artificial Sequence
  Synthetic oligonucleotide
ggatcccgtgaactatcagtgtcctgggag

SEQ ID NO: 236349 - DNA, 30 bp, Artificial Sequence
  Synthetic oligonucleotide
tgagataaccccgggtcacgtgtctgggag

SEQ ID NO: 236350 - DNA, 30 bp, Artificial Sequence
  Synthetic oligonucleotide
cgcctgcgatgcggcgcccgtgggtgggag

SEQ ID NO: 236351 - DNA, 30 bp, Artificial Sequence
  Synthetic oligonucleotide
agaactttccggggtaattgaaattgggag

SEQ ID NO: 236352 - DNA, 30 bp, Artificial Sequence
  Synthetic oligonucleotide
tatccagggagagtgttaagttattgggag

SEQ ID NO: 236353 - DNA, 30 bp, Artificial Sequence
  Synthetic oligonucleotide
gttgcccaccgactcggattccaaatggag

SEQ ID NO: 236354 - DNA, 30 bp, Artificial Sequence
  Synthetic oligonucleotide
cgcatctcgtccggatgcgctaacatggag

SEQ ID NO: 236355 - DNA, 30 bp, Artificial Sequence
  Synthetic oligonucleotide
acctaatcatgttagctctaaatcatggag

SEQ ID NO: 236356 - DNA, 30 bp, Artificial Sequence
  Synthetic oligonucleotide
agcgttcccagaggtatcatcgcactggag

SEQ ID NO: 236357 - DNA, 30 bp, Artificial Sequence
  Synthetic oligonucleotide
acatcccgaactgtgtgcacgatactggag

SEQ ID NO: 236358 - DNA, 30 bp, Artificial Sequence
  Synthetic oligonucleotide
gttacccatagataggtcccagtactggag

SEQ ID NO: 236359 - DNA, 30 bp, Artificial Sequence
  Synthetic oligonucleotide
gaggatcagctgaaatcctcccccctggag

SEQ ID NO: 236360 - DNA, 30 bp, Artificial Sequence
  Synthetic oligonucleotide
aagatgactgaccatagtagcagcctggag

SEQ ID NO: 236361 - DNA, 30 bp, Artificial Sequence
  Synthetic oligonucleotide
ttttgaacttacgtatcttagtagctggag

SEQ ID NO: 236362 - DNA, 30 bp, Artificial Sequence
  Synthetic oligonucleotide
tgttggcacgcgatggcatatacgctggag

SEQ ID NO: 236363 - DNA, 30 bp, Artificial Sequence
  Synthetic oligonucleotide
gtcccgtatctggatgagctctggctggag

SEQ ID NO: 236364 - DNA, 30 bp, Artificial Sequence
  Synthetic oligonucleotide
aaggattttagatcattggaatgtctggag

SEQ ID NO: 236365 - DNA, 30 bp, Artificial Sequence
  Synthetic oligonucleotide
tcctaagtccagcgacacaggattctggag

SEQ ID NO: 236366 - DNA, 30 bp, Artificial Sequence
  Synthetic oligonucleotide
gcctggtcattcacattagtctacgtggag

SEQ ID NO: 236367 - DNA, 30 bp, Artificial Sequence
  Synthetic oligonucleotide
tactacaccgcgaaccgcagcgcggtggag

SEQ ID NO: 236368 - DNA, 30 bp, Artificial Sequence
  Synthetic oligonucleotide
ttaagactgttgtacaagccatcggtggag

SEQ ID NO: 236369 - DNA, 30 bp, Artificial Sequence
  Synthetic oligonucleotide
tttcacgactaactgatatagtatgtggag

SEQ ID NO: 236370 - DNA, 30 bp, Artificial Sequence
  Synthetic oligonucleotide
tggctcgtactttttgtgcgatctgtggag

SEQ ID NO: 236371 - DNA, 30 bp, Artificial Sequence
  Synthetic oligonucleotide
tctggacagccacctctgggacgtgtggag

SEQ ID NO: 236372 - DNA, 30 bp, Artificial Sequence
  Synthetic oligonucleotide
tcattaaattaaggtgtgtcagttgtggag

SEQ ID NO: 236373 - DNA, 30 bp, Artificial Sequence
  Synthetic oligonucleotide
ccggagtactacgcaagtgcgacattggag

SEQ ID NO: 236374 - DNA, 30 bp, Artificial Sequence
  Synthetic oligonucleotide
ggacgctatgaatcacggctgacgttggag

SEQ ID NO: 236375 - DNA, 30 bp, Artificial Sequence
  Synthetic oligonucleotide
ttggtagggaagtggacccgcaggttggag

SEQ ID NO: 236376 - DNA, 30 bp, Artificial Sequence
  Synthetic oligonucleotide
gcaaggcgatttgcaggggggtgtttggag

SEQ ID NO: 236377 - DNA, 30 bp, Artificial Sequence
  Synthetic oligonucleotide
tattccggagggggcacgctgcgaaatgag

SEQ ID NO: 236378 - DNA, 30 bp, Artificial Sequence
  Synthetic oligonucleotide
caaattctcggagctcacgcggacaatgag

SEQ ID NO: 236379 - DNA, 30 bp, Artificial Sequence
  Synthetic oligonucleotide
aggcatgcgctatctgcgattcccaatgag

SEQ ID NO: 236380 - DNA, 30 bp, Artificial Sequence
  Synthetic oligonucleotide
cacgagtgagcccgtccccatcgccatgag

SEQ ID NO: 236381 - DNA, 30 bp, Artificial Sequence
  Synthetic oligonucleotide
acaggctatgcacacggagcaaagcatgag

SEQ ID NO: 236382 - DNA, 30 bp, Artificial Sequence
  Synthetic oligonucleotide
atactgaggggctgagctgaaaggcatgag

SEQ ID NO: 236383 - DNA, 30 bp, Artificial Sequence
  Synthetic oligonucleotide
taggggagttataacagctggcttcatgag

SEQ ID NO: 236384 - DNA, 30 bp, Artificial Sequence
  Synthetic oligonucleotide
gttacatacaatcggcgcgaagacgatgag

SEQ ID NO: 236385 - DNA, 30 bp, Artificial Sequence
  Synthetic oligonucleotide
atctattaccgtaggaagaaggatgatgag

SEQ ID NO: 236386 - DNA, 30 bp, Artificial Sequence
  Synthetic oligonucleotide
ttgttttgacttccaatagcggggtatgag

SEQ ID NO: 236387 - DNA, 31 bp, Artificial Sequence
  Synthetic oligonucleotide
aatttaaagggcttgcaccgttagttatgag

SEQ ID NO: 236388 - DNA, 30 bp, Artificial Sequence
  Synthetic oligonucleotide
aatgtacggattggcactccagtttatgag

SEQ ID NO: 236389 - DNA, 30 bp, Artificial Sequence
  Synthetic oligonucleotide
tcggacgaagttgtgttgatttacactgag

SEQ ID NO: 236390 - DNA, 30 bp, Artificial Sequence
  Synthetic oligonucleotide
gatttaacgtaccagccagggcccactgag

SEQ ID NO: 236391 - DNA, 30 bp, Artificial Sequence
  Synthetic oligonucleotide
acgctcaacccggcgcgtgccttcactgag

SEQ ID NO: 236392 - DNA, 30 bp, Artificial Sequence
  Synthetic oligonucleotide
acatgatgctttagtaccttgaggactgag

SEQ ID NO: 236393 - DNA, 30 bp, Artificial Sequence
  Synthetic oligonucleotide
gacatgggttactgggtacggggacctgag

SEQ ID NO: 236394 - DNA, 30 bp, Artificial Sequence
  Synthetic oligonucleotide
aggatgagctaatgcgaggggggccctgag

SEQ ID NO: 236395 - DNA, 30 bp, Artificial Sequence
  Synthetic oligonucleotide
tgtgtcacgagtgatcgaacgaagcctgag

SEQ ID NO: 236396 - DNA, 30 bp, Artificial Sequence
  Synthetic oligonucleotide
ttcaaaggtttttcgcaatgtccgcctgag

SEQ ID NO: 236397 - DNA, 30 bp, Artificial Sequence
  Synthetic oligonucleotide
cgatttgtacttcgccgacgttgagctgag

SEQ ID NO: 236398 - DNA, 30 bp, Artificial Sequence
  Synthetic oligonucleotide
ctccagcagccagctcaagtataggctgag

SEQ ID NO: 236399 - DNA, 30 bp, Artificial Sequence
  Synthetic oligonucleotide
gcacatcagaagtatctgcaaactgctgag

SEQ ID NO: 236400 - DNA, 30 bp, Artificial Sequence
  Synthetic oligonucleotide
gatctaggcgcagggcagcgcaaatctgag

SEQ ID NO: 236401 - DNA, 30 bp, Artificial Sequence
  Synthetic oligonucleotide
gagattcgggatcggttcgccggatctgag

SEQ ID NO: 236402 - DNA, 30 bp, Artificial Sequence
  Synthetic oligonucleotide
ataatctctgcaaccagctccgtatctgag

SEQ ID NO: 236403 - DNA, 30 bp, Artificial Sequence
  Synthetic oligonucleotide
caccatatgtggtctcgaggtgacagtgag

SEQ ID NO: 236404 - DNA, 30 bp, Artificial Sequence
  Synthetic oligonucleotide
tggcgctgcagctcagaaatcgccagtgag

SEQ ID NO: 236405 - DNA, 30 bp, Artificial Sequence
  Synthetic oligonucleotide
ctatggggtgacggaggcccttgcagtgag

SEQ ID NO: 236406 - DNA, 30 bp, Artificial Sequence
  Synthetic oligonucleotide
tatgacatgatatcttttatgtcgagtgag

SEQ ID NO: 236407 - DNA, 30 bp, Artificial Sequence
  Synthetic oligonucleotide
aacccatagacacagcttagaattagtgag

SEQ ID NO: 236408 - DNA, 30 bp, Artificial Sequence
  Synthetic oligonucleotide
agaattgtgatgtaccgcgggcttagtgag

SEQ ID NO: 236409 - DNA, 30 bp, Artificial Sequence
  Synthetic oligonucleotide
gttgaaaccccaacagttaaacaccgtgag

SEQ ID NO: 236410 - DNA, 30 bp, Artificial Sequence
  Synthetic oligonucleotide
tcgcatatatgcactgctcgatcccgtgag

SEQ ID NO: 236411 - DNA, 30 bp, Artificial Sequence
  Synthetic oligonucleotide
tcggagctgggagctttttagcgccgtgag

SEQ ID NO: 236412 - DNA, 30 bp, Artificial Sequence
  Synthetic oligonucleotide
ttactcatgcaaagtctaattattcgtgag

SEQ ID NO: 236413 - DNA, 30 bp, Artificial Sequence
  Synthetic oligonucleotide
gttggtacgtttccgatgtgcccaggtgag

SEQ ID NO: 236414 - DNA, 30 bp, Artificial Sequence
  Synthetic oligonucleotide
gaagagttaacgccgctgtgagcaggtgag

SEQ ID NO: 236415 - DNA, 30 bp, Artificial Sequence
  Synthetic oligonucleotide
gcgtgcccgcagtcaaagataggaggtgag

SEQ ID NO: 236416 - DNA, 30 bp, Artificial Sequence
  Synthetic oligonucleotide
ttcaagatatcgcaccctctgaagggtgag

SEQ ID NO: 236417 - DNA, 30 bp, Artificial Sequence
  Synthetic oligonucleotide
ttcctgaggtgaaaatccctattgggtgag

SEQ ID NO: 236418 - DNA, 30 bp, Artificial Sequence
  Synthetic oligonucleotide
atattcgtcgtgagcagctggaactgtgag

SEQ ID NO: 236419 - DNA, 30 bp, Artificial Sequence
  Synthetic oligonucleotide
acggggatataggatacaaattactgtgag

SEQ ID NO: 236420 - DNA, 30 bp, Artificial Sequence
  Synthetic oligonucleotide
tatcagctaaattttctgaaaccgtgtgag

SEQ ID NO: 236421 - DNA, 30 bp, Artificial Sequence
  Synthetic oligonucleotide
gcatcacaactggtaccttactttattgag

SEQ ID NO: 236422 - DNA, 30 bp, Artificial Sequence
  Synthetic oligonucleotide
acaaacatgtgttaagggcgatttcttgag

SEQ ID NO: 236423 - DNA, 30 bp, Artificial Sequence
  Synthetic oligonucleotide
aatgctatagatatcgacgtagaagttgag

SEQ ID NO: 236424 - DNA, 30 bp, Artificial Sequence
  Synthetic oligonucleotide
ctctgccttagttaggatcgtgttgttgag

SEQ ID NO: 236425 - DNA, 30 bp, Artificial Sequence
  Synthetic oligonucleotide
ccttgcatagggcttaggcattttgttgag

SEQ ID NO: 236426 - DNA, 30 bp, Artificial Sequence
  Synthetic oligonucleotide
ccgaccagagctctgcctatggcatttgag

SEQ ID NO: 236427 - DNA, 30 bp, Artificial Sequence
  Synthetic oligonucleotide
ctcatcgtttctcgggcacctgcatttgag

SEQ ID NO: 236428 - DNA, 30 bp, Artificial Sequence
  Synthetic oligonucleotide
ccgtggggtcgcatacgtcaatcatttgag

SEQ ID NO: 236429 - DNA, 30 bp, Artificial Sequence
  Synthetic oligonucleotide
ttccttctgaaataacgatacctatttgag

SEQ ID NO: 236430 - DNA, 30 bp, Artificial Sequence
  Synthetic oligonucleotide
aggggaacttgggacaagtgaccctttgag

SEQ ID NO: 236431 - DNA, 31 bp, Artificial Sequence
  Synthetic oligonucleotide
tagactcctagaaacaacggggaggtttgag

SEQ ID NO: 236432 - DNA, 30 bp, Artificial Sequence
  Synthetic oligonucleotide
gtagacatatgcggacgccgaatgtttgag

SEQ ID NO: 236433 - DNA, 30 bp, Artificial Sequence
  Synthetic oligonucleotide
tcacgttaccaatgcatgtttgtgtttgag

SEQ ID NO: 236434 - DNA, 30 bp, Artificial Sequence
  Synthetic oligonucleotide
tttcggtacattctacagaacgcttttgag

SEQ ID NO: 236435 - DNA, 30 bp, Artificial Sequence
  Synthetic oligonucleotide
cacggtaaggaacgtcgcgcagtttttgag

SEQ ID NO: 236436 - DNA, 30 bp, Artificial Sequence
  Synthetic oligonucleotide
tattggaccggcttagcaattgataaatag

SEQ ID NO: 236437 - DNA, 30 bp, Artificial Sequence
  Synthetic oligonucleotide
tccctcgagtgtagtggaggcatacaatag

SEQ ID NO: 236438 - DNA, 30 bp, Artificial Sequence
  Synthetic oligonucleotide
tatgtggctcggtgtttcatgcatcaatag

SEQ ID NO: 236439 - DNA, 30 bp, Artificial Sequence
  Synthetic oligonucleotide
gcttagcctagaagtttgtgcattcaatag

SEQ ID NO: 236440 - DNA, 30 bp, Artificial Sequence
  Synthetic oligonucleotide
cccagcagtgcccggcctatattagaatag

SEQ ID NO: 236441 - DNA, 30 bp, Artificial Sequence
  Synthetic oligonucleotide
gaagtgtattaaggcccacgtggcgaatag

SEQ ID NO: 236442 - DNA, 30 bp, Artificial Sequence
  Synthetic oligonucleotide
tagtaacggtctccgacggcaggggaatag

SEQ ID NO: 236443 - DNA, 30 bp, Artificial Sequence
  Synthetic oligonucleotide
tgatatatatcaccgacatattgggaatag

SEQ ID NO: 236444 - DNA, 30 bp, Artificial Sequence
  Synthetic oligonucleotide
gaccatagtctgtcatatatagtataatag

SEQ ID NO: 236445 - DNA, 30 bp, Artificial Sequence
  Synthetic oligonucleotide
acaactatcatttacatgggcggctaatag

SEQ ID NO: 236446 - DNA, 30 bp, Artificial Sequence
  Synthetic oligonucleotide
ggtcgttcgactgatcgccgcgtgtaatag

SEQ ID NO: 236447 - DNA, 30 bp, Artificial Sequence
  Synthetic oligonucleotide
taaagggagagcagggggttattgtaatag

SEQ ID NO: 236448 - DNA, 30 bp, Artificial Sequence
  Synthetic oligonucleotide
agtggccgtttgattcggggttgttaatag

SEQ ID NO: 236449 - DNA, 30 bp, Artificial Sequence
  Synthetic oligonucleotide
tttgcgtctgcgtagtgaaatatttaatag

SEQ ID NO: 236450 - DNA, 30 bp, Artificial Sequence
  Synthetic oligonucleotide
atactataagtgggtcggtaaataacatag

SEQ ID NO: 236451 - DNA, 30 bp, Artificial Sequence
  Synthetic oligonucleotide
gtagtaattaggtaagttcggcgcacatag

SEQ ID NO: 236452 - DNA, 30 bp, Artificial Sequence
  Synthetic oligonucleotide
atatgatggttacatgtagcattgacatag

SEQ ID NO: 236453 - DNA, 29 bp, Artificial Sequence
  Synthetic oligonucleotide
attctagcaccgatttagggtctacatag

SEQ ID NO: 236454 - DNA, 30 bp, Artificial Sequence
  Synthetic oligonucleotide
taggagccctgtcgttatacttgaccatag

SEQ ID NO: 236455 - DNA, 30 bp, Artificial Sequence
  Synthetic oligonucleotide
ataaggccggtaatattagcaaccgcatag

SEQ ID NO: 236456 - DNA, 30 bp, Artificial Sequence
  Synthetic oligonucleotide
ccattcctttttaattcgtacctggcatag

SEQ ID NO: 236457 - DNA, 30 bp, Artificial Sequence
  Synthetic oligonucleotide
aagtgctgtggaagccgtactaatgcatag

SEQ ID NO: 236458 - DNA, 30 bp, Artificial Sequence
  Synthetic oligonucleotide
aacaaggacacctgagtcgctagatcatag

SEQ ID NO: 236459 - DNA, 30 bp, Artificial Sequence
  Synthetic oligonucleotide
ctccgaaacctttctcgtattacctcatag

SEQ ID NO: 236460 - DNA, 30 bp, Artificial Sequence
  Synthetic oligonucleotide
ctagttcggtggatagcgaggcattcatag

SEQ ID NO: 236461 - DNA, 30 bp, Artificial Sequence
  Synthetic oligonucleotide
ctacgtgttaggtcttattccataagatag

SEQ ID NO: 236462 - DNA, 30 bp, Artificial Sequence
  Synthetic oligonucleotide
gctcggtcgaccgcagttttaactagatag

SEQ ID NO: 236463 - DNA, 30 bp, Artificial Sequence
  Synthetic oligonucleotide
aaggccggtcgcccaaggcccacacgatag

SEQ ID NO: 236464 - DNA, 30 bp, Artificial Sequence
  Synthetic oligonucleotide
gcgcccatcctaatgagactctcacgatag

SEQ ID NO: 236465 - DNA, 30 bp, Artificial Sequence
  Synthetic oligonucleotide
ctgagtcactacattgtgttaagacgatag

SEQ ID NO: 236466 - DNA, 30 bp, Artificial Sequence
  Synthetic oligonucleotide
aggccttatgaggttggttctggacgatag

SEQ ID NO: 236467 - DNA, 30 bp, Artificial Sequence
  Synthetic oligonucleotide
accacataaacaacgattactaaccgatag

SEQ ID NO: 236468 - DNA, 30 bp, Artificial Sequence
  Synthetic oligonucleotide
attagagtcgacatattcctcttgcgatag

SEQ ID NO: 236469 - DNA, 30 bp, Artificial Sequence
  Synthetic oligonucleotide
tagtatctcgcgtgtagcttttatcgatag

SEQ ID NO: 236470 - DNA, 30 bp, Artificial Sequence
  Synthetic oligonucleotide
actgagcccggcgtggacatcacaggatag

SEQ ID NO: 236471 - DNA, 30 bp, Artificial Sequence
  Synthetic oligonucleotide
taattctctacctcacaacgtgcaggatag

SEQ ID NO: 236472 - DNA, 30 bp, Artificial Sequence
  Synthetic oligonucleotide
aaccgaagcccagcgcttcagtgaggatag

SEQ ID NO: 236473 - DNA, 30 bp, Artificial Sequence
  Synthetic oligonucleotide
ttgccaagtactaaaggctcgaccggatag

SEQ ID NO: 236474 - DNA, 30 bp, Artificial Sequence
  Synthetic oligonucleotide
taacggcttcggtgatatatcacatgatag

SEQ ID NO: 236475 - DNA, 30 bp, Artificial Sequence
  Synthetic oligonucleotide
caggactataaccccccgctaccatgatag

SEQ ID NO: 236476 - DNA, 30 bp, Artificial Sequence
  Synthetic oligonucleotide
aacgaagagaggccctgcactatatgatag

SEQ ID NO: 236477 - DNA, 30 bp, Artificial Sequence
  Synthetic oligonucleotide
ttcctagggcgagatatttgtgtatgatag

SEQ ID NO: 236478 - DNA, 30 bp, Artificial Sequence
  Synthetic oligonucleotide
ggggcaaggctttctcggcacaggtgatag

SEQ ID NO: 236479 - DNA, 30 bp, Artificial Sequence
  Synthetic oligonucleotide
atcgtatggctaaagcatctgcggtgatag

SEQ ID NO: 236480 - DNA, 30 bp, Artificial Sequence
  Synthetic oligonucleotide
taatgccttgttcctcatgccgcaatatag

SEQ ID NO: 236481 - DNA, 30 bp, Artificial Sequence
  Synthetic oligonucleotide
aattgtagatgagtacttagacacatatag

SEQ ID NO: 236482 - DNA, 30 bp, Artificial Sequence
  Synthetic oligonucleotide
aagcagccattattagggtagcacatatag

SEQ ID NO: 236483 - DNA, 30 bp, Artificial Sequence
  Synthetic oligonucleotide
tttcgcaataggcagagacggatcatatag

SEQ ID NO: 236484 - DNA, 30 bp, Artificial Sequence
  Synthetic oligonucleotide
gagccacgatcggcgtccgttacgatatag

SEQ ID NO: 236485 - DNA, 30 bp, Artificial Sequence
  Synthetic oligonucleotide
tgaaggccttgttccattagggctatatag

SEQ ID NO: 236486 - DNA, 30 bp, Artificial Sequence
  Synthetic oligonucleotide
tctatcgtgctatagtcgtttattatatag

SEQ ID NO: 236487 - DNA, 30 bp, Artificial Sequence
  Synthetic oligonucleotide
ggtgcgcaagaaactgtcttactactatag

SEQ ID NO: 236488 - DNA, 30 bp, Artificial Sequence
  Synthetic oligonucleotide
agctctggtgaagaactcatcgggctatag

SEQ ID NO: 236489 - DNA, 30 bp, Artificial Sequence
  Synthetic oligonucleotide
gtgtctccgttcttaagtctgcctctatag

SEQ ID NO: 236490 - DNA, 30 bp, Artificial Sequence
  Synthetic oligonucleotide
aagctacaatactaaagatagacagtatag

SEQ ID NO: 236491 - DNA, 30 bp, Artificial Sequence
  Synthetic oligonucleotide
ggccgtacgttgtggagggcctcagtatag

SEQ ID NO: 236492 - DNA, 30 bp, Artificial Sequence
  Synthetic oligonucleotide
atgattaaatcgcggatatagggcgtatag

SEQ ID NO: 236493 - DNA, 30 bp, Artificial Sequence
  Synthetic oligonucleotide
gatctgtctatatttgtcagactggtatag

SEQ ID NO: 236494 - DNA, 30 bp, Artificial Sequence
  Synthetic oligonucleotide
agctactgagtaacgagtatctctgtatag

SEQ ID NO: 236495 - DNA, 30 bp, Artificial Sequence
  Synthetic oligonucleotide
acttactggttgtgatgagcgggtgtatag

SEQ ID NO: 236496 - DNA, 30 bp, Artificial Sequence
  Synthetic oligonucleotide
cccaaattaatctggtcagtgattgtatag

SEQ ID NO: 236497 - DNA, 30 bp, Artificial Sequence
  Synthetic oligonucleotide
tagatttatgcgggcgccaaatttgtatag

SEQ ID NO: 236498 - DNA, 30 bp, Artificial Sequence
  Synthetic oligonucleotide
ggtgcttgcttgatgcagggaaaattatag

SEQ ID NO: 236499 - DNA, 30 bp, Artificial Sequence
  Synthetic oligonucleotide
cgtatcagttacaccgttggatcattatag

SEQ ID NO: 236500 - DNA, 30 bp, Artificial Sequence
  Synthetic oligonucleotide
atgtggacttaagtattttcgagattatag

SEQ ID NO: 236501 - DNA, 30 bp, Artificial Sequence
  Synthetic oligonucleotide
agtagcgcgctcccgtggaacgtcttatag

SEQ ID NO: 236502 - DNA, 30 bp, Artificial Sequence
  Synthetic oligonucleotide
acctagctattaggattcatcgtcttatag

SEQ ID NO: 236503 - DNA, 30 bp, Artificial Sequence
  Synthetic oligonucleotide
ttagcaatgaagcatcgtttcctgttatag

SEQ ID NO: 236504 - DNA, 30 bp, Artificial Sequence
  Synthetic oligonucleotide
gggcgctccctagcgatagagattttatag

SEQ ID NO: 236505 - DNA, 30 bp, Artificial Sequence
  Synthetic oligonucleotide
tcgaattcacttccctcaaatctaaactag

SEQ ID NO: 236506 - DNA, 30 bp, Artificial Sequence
  Synthetic oligonucleotide
tcgtgctgacactcctcgcctgtaaactag

SEQ ID NO: 236507 - DNA, 30 bp, Artificial Sequence
  Synthetic oligonucleotide
acgcggagttcgaacttaaacaacaactag

SEQ ID NO: 236508 - DNA, 30 bp, Artificial Sequence
  Synthetic oligonucleotide
atgactccaacgcaaggtgtgagcaactag

SEQ ID NO: 236509 - DNA, 30 bp, Artificial Sequence
  Synthetic oligonucleotide
cccaatatgaggattcggcatgagaactag

SEQ ID NO: 236510 - DNA, 30 bp, Artificial Sequence
  Synthetic oligonucleotide
aattgggttatatcgccggctgcgaactag

SEQ ID NO: 236511 - DNA, 30 bp, Artificial Sequence
  Synthetic oligonucleotide
gtaagttcgcgtgggctcggcgaccactag

SEQ ID NO: 236512 - DNA, 30 bp, Artificial Sequence
  Synthetic oligonucleotide
gttcagcacaacgctaaaagactccactag

SEQ ID NO: 236513 - DNA, 30 bp, Artificial Sequence
  Synthetic oligonucleotide
aaccatggtcaaagacctggggagcactag

SEQ ID NO: 236514 - DNA, 30 bp, Artificial Sequence
  Synthetic oligonucleotide
gttaaatatcagaagaagccatcgcactag

SEQ ID NO: 236515 - DNA, 30 bp, Artificial Sequence
  Synthetic oligonucleotide
ttggaatttagaaaacatgagaggcactag

SEQ ID NO: 236516 - DNA, 30 bp, Artificial Sequence
  Synthetic oligonucleotide
gaagtgattttcgaggcatgcgggcactag

SEQ ID NO: 236517 - DNA, 30 bp, Artificial Sequence
  Synthetic oligonucleotide
tttcctgcgggtatgtaacatcttcactag

SEQ ID NO: 236518 - DNA, 30 bp, Artificial Sequence
  Synthetic oligonucleotide
gtcagtgggtaaggcgccttgccggactag

SEQ ID NO: 236519 - DNA, 30 bp, Artificial Sequence
  Synthetic oligonucleotide
atataaagtatgaaggccaaacgggactag

SEQ ID NO: 236520 - DNA, 30 bp, Artificial Sequence
  Synthetic oligonucleotide
gtacaggcggtgcaagttaaatttgactag

SEQ ID NO: 236521 - DNA, 30 bp, Artificial Sequence
  Synthetic oligonucleotide
tatcggttcgccctcaatcaacagtactag

SEQ ID NO: 236522 - DNA, 30 bp, Artificial Sequence
  Synthetic oligonucleotide
atcaccctggagagtgtaatggtgtactag

SEQ ID NO: 236523 - DNA, 30 bp, Artificial Sequence
  Synthetic oligonucleotide
tgaacgtgaatgtctttcgataattactag

SEQ ID NO: 236524 - DNA, 30 bp, Artificial Sequence
  Synthetic oligonucleotide
acgtcctttaatataaccggttaaacctag

SEQ ID NO: 236525 - DNA, 30 bp, Artificial Sequence
  Synthetic oligonucleotide
aaaagccagtgtaaacatgttaccacctag

SEQ ID NO: 236526 - DNA, 30 bp, Artificial Sequence
  Synthetic oligonucleotide
tttagagcagagcgagttaataggacctag

SEQ ID NO: 236527 - DNA, 30 bp, Artificial Sequence
  Synthetic oligonucleotide
aaagcaaggcgtggtagagatactacctag

SEQ ID NO: 236528 - DNA, 30 bp, Artificial Sequence
  Synthetic oligonucleotide
aaataacatagctctctaacgcgtacctag

SEQ ID NO: 236529 - DNA, 30 bp, Artificial Sequence
  Synthetic oligonucleotide
acctgtagatctcaccaccaaggtacctag

SEQ ID NO: 236530 - DNA, 30 bp, Artificial Sequence
  Synthetic oligonucleotide
gaaagttgacgaaaacttatccaaccctag

SEQ ID NO: 236531 - DNA, 30 bp, Artificial Sequence
  Synthetic oligonucleotide
catcgtgtttgaaaattttgcaacccctag

SEQ ID NO: 236532 - DNA, 30 bp, Artificial Sequence
  Synthetic oligonucleotide
acaccatcttaaaatattttatacccctag

SEQ ID NO: 236533 - DNA, 30 bp, Artificial Sequence
  Synthetic oligonucleotide
atcaatttggtaaatgtcggaccgccctag

SEQ ID NO: 236534 - DNA, 30 bp, Artificial Sequence
  Synthetic oligonucleotide
atcgcaccggcttcaacaataccgccctag

SEQ ID NO: 236535 - DNA, 30 bp, Artificial Sequence
  Synthetic oligonucleotide
tggacggttcccgtgggcataccgccctag

SEQ ID NO: 236536 - DNA, 30 bp, Artificial Sequence
  Synthetic oligonucleotide
gggatttaggacggattggtaagagcctag

SEQ ID NO: 236537 - DNA, 30 bp, Artificial Sequence
  Synthetic oligonucleotide
gaattcagtgcaatcccacataccgcctag

SEQ ID NO: 236538 - DNA, 30 bp, Artificial Sequence
  Synthetic oligonucleotide
tgcgcattcttacacgggtgttccgcctag

SEQ ID NO: 236539 - DNA, 30 bp, Artificial Sequence
  Synthetic oligonucleotide
ggacagggcatagtccgattgtatgcctag

SEQ ID NO: 236540 - DNA, 30 bp, Artificial Sequence
  Synthetic oligonucleotide
gtgcgtagccatctattggctgcctcctag

SEQ ID NO: 236541 - DNA, 30 bp, Artificial Sequence
  Synthetic oligonucleotide
gtctcatcaaaaaatacgctccaaagctag

SEQ ID NO: 236542 - DNA, 30 bp, Artificial Sequence
  Synthetic oligonucleotide
gacgcgtgcataagtatggcctaaagctag

SEQ ID NO: 236543 - DNA, 30 bp, Artificial Sequence
  Synthetic oligonucleotide
tcacaccgccaaccgcgctgtgtaagctag

SEQ ID NO: 236544 - DNA, 30 bp, Artificial Sequence
  Synthetic oligonucleotide
aggtgattaagttagggtaaactgagctag

SEQ ID NO: 236545 - DNA, 30 bp, Artificial Sequence
  Synthetic oligonucleotide
gtccaattgcggccatctgtataccgctag

SEQ ID NO: 236546 - DNA, 30 bp, Artificial Sequence
  Synthetic oligonucleotide
aaatgaattggcagtaggttttgccgctag

SEQ ID NO: 236547 - DNA, 30 bp, Artificial Sequence
  Synthetic oligonucleotide
ctagccattcgcacggtcaaactgcgctag

SEQ ID NO: 236548 - DNA, 30 bp, Artificial Sequence
  Synthetic oligonucleotide
cgcgtatgccttgtcgctcatacaggctag

SEQ ID NO: 236549 - DNA, 30 bp, Artificial Sequence
  Synthetic oligonucleotide
agagggtcgcgggaagtgcgtacaggctag

SEQ ID NO: 236550 - DNA, 30 bp, Artificial Sequence
  Synthetic oligonucleotide
tgaccctcaaggagatagtctcagggctag

SEQ ID NO: 236551 - DNA, 30 bp, Artificial Sequence
  Synthetic oligonucleotide
gtccaagtctaatgctaatcagggggctag

SEQ ID NO: 236552 - DNA, 30 bp, Artificial Sequence
  Synthetic oligonucleotide
gaaacatctgacattgaggtcagtggctag

SEQ ID NO: 236553 - DNA, 30 bp, Artificial Sequence
  Synthetic oligonucleotide
agggggatctttttaagtcgcgaatgctag

SEQ ID NO: 236554 - DNA, 30 bp, Artificial Sequence
  Synthetic oligonucleotide
gcatagtaggatgggcatcgggcatgctag

SEQ ID NO: 236555 - DNA, 30 bp, Artificial Sequence
  Synthetic oligonucleotide
cactaacgtactccaggctcatgatgctag

SEQ ID NO: 236556 - DNA, 30 bp, Artificial Sequence
  Synthetic oligonucleotide
gttgcaactgttcatgtgctcttatgctag

SEQ ID NO: 236557 - DNA, 30 bp, Artificial Sequence
  Synthetic oligonucleotide
tggcatatccttctcggcataaactgctag

SEQ ID NO: 236558 - DNA, 30 bp, Artificial Sequence
  Synthetic oligonucleotide
actcgttggcatccacccaagtaaatctag

SEQ ID NO: 236559 - DNA, 30 bp, Artificial Sequence
  Synthetic oligonucleotide
gagggggttgacgcgatcaatctaatctag

SEQ ID NO: 236560 - DNA, 30 bp, Artificial Sequence
  Synthetic oligonucleotide
acataacattaggttaaagtctatatctag

SEQ ID NO: 236561 - DNA, 30 bp, Artificial Sequence
  Synthetic oligonucleotide
ggggcgaatacgcatcaattgactatctag

SEQ ID NO: 236562 - DNA, 30 bp, Artificial Sequence
  Synthetic oligonucleotide
ctgtacaggatggacagtcgtccactctag

SEQ ID NO: 236563 - DNA, 30 bp, Artificial Sequence
  Synthetic oligonucleotide
aattagcttcaaaacccataaaacctctag

SEQ ID NO: 236564 - DNA, 30 bp, Artificial Sequence
  Synthetic oligonucleotide
ggaacgagccattggctctgcattctctag

SEQ ID NO: 236565 - DNA, 30 bp, Artificial Sequence
  Synthetic oligonucleotide
gtgtcaactaattttaggtaacaagtctag

SEQ ID NO: 236566 - DNA, 30 bp, Artificial Sequence
  Synthetic oligonucleotide
tctgtcggcccaagtctttccgtagtctag

SEQ ID NO: 236567 - DNA, 30 bp, Artificial Sequence
  Synthetic oligonucleotide
gtgtaggtaccggcacccgagaaggtctag

SEQ ID NO: 236568 - DNA, 30 bp, Artificial Sequence
  Synthetic oligonucleotide
agaccctaggccgtgcccccaacattctag

SEQ ID NO: 236569 - DNA, 30 bp, Artificial Sequence
  Synthetic oligonucleotide
gcagtcgggagatatccctgtccattctag

SEQ ID NO: 236570 - DNA, 30 bp, Artificial Sequence
  Synthetic oligonucleotide
ggtggctagctttaggagatatgtttctag

SEQ ID NO: 236571 - DNA, 30 bp, Artificial Sequence
  Synthetic oligonucleotide
cgctttatacagggccgctgcgcaaagtag

SEQ ID NO: 236572 - DNA, 30 bp, Artificial Sequence
  Synthetic oligonucleotide
ggacttaggaggggaacagcggtaaagtag

SEQ ID NO: 236573 - DNA, 30 bp, Artificial Sequence
  Synthetic oligonucleotide
ggacgcgtatatcgtgcggtaatgaagtag

SEQ ID NO: 236574 - DNA, 30 bp, Artificial Sequence
  Synthetic oligonucleotide
gccgccgagctggggttatgactgaagtag

SEQ ID NO: 236575 - DNA, 30 bp, Artificial Sequence
  Synthetic oligonucleotide
tccgggtattctgggaatgtttttaagtag

SEQ ID NO: 236576 - DNA, 30 bp, Artificial Sequence
  Synthetic oligonucleotide
ttactgcttaaaccatatgatctccagtag

SEQ ID NO: 236577 - DNA, 30 bp, Artificial Sequence
  Synthetic oligonucleotide
taacggacaggtcaatatgccactcagtag

SEQ ID NO: 236578 - DNA, 30 bp, Artificial Sequence
  Synthetic oligonucleotide
gaaagtggagcacggtctcaacctcagtag

SEQ ID NO: 236579 - DNA, 30 bp, Artificial Sequence
  Synthetic oligonucleotide
ggtatacccacggttgtgccatgagagtag

SEQ ID NO: 236580 - DNA, 30 bp, Artificial Sequence
  Synthetic oligonucleotide
atatgaaatgggccgatccttctcgagtag

SEQ ID NO: 236581 - DNA, 30 bp, Artificial Sequence
  Synthetic oligonucleotide
tcaatctcctcggataacccaagggagtag

SEQ ID NO: 236582 - DNA, 30 bp, Artificial Sequence
  Synthetic oligonucleotide
aagttgactttgcccggagcaagggagtag

SEQ ID NO: 236583 - DNA, 30 bp, Artificial Sequence
  Synthetic oligonucleotide
tctcccctagtagcgaggtcctgggagtag

SEQ ID NO: 236584 - DNA, 30 bp, Artificial Sequence
  Synthetic oligonucleotide
atgattgatgtactatacgggtttgagtag

SEQ ID NO: 236585 - DNA, 30 bp, Artificial Sequence
  Synthetic oligonucleotide
acaatgcgcgggcggaactatcaatagtag

SEQ ID NO: 236586 - DNA, 30 bp, Artificial Sequence
  Synthetic oligonucleotide
ctctctaggcgttcactcaaactctagtag

SEQ ID NO: 236587 - DNA, 30 bp, Artificial Sequence
  Synthetic oligonucleotide
ataaacggtttccatcttacgaattagtag

SEQ ID NO: 236588 - DNA, 30 bp, Artificial Sequence
  Synthetic oligonucleotide
taaatattgcttgcatgaattaaaacgtag

SEQ ID NO: 236589 - DNA, 30 bp, Artificial Sequence
  Synthetic oligonucleotide
ttagatggtgttaacagcccaagaacgtag

SEQ ID NO: 236590 - DNA, 30 bp, Artificial Sequence
  Synthetic oligonucleotide
ctacgtacgtcattaattagcagaacgtag

SEQ ID NO: 236591 - DNA, 30 bp, Artificial Sequence
  Synthetic oligonucleotide
agtaatgcatctgaaaaagtgagaacgtag

SEQ ID NO: 236592 - DNA, 30 bp, Artificial Sequence
  Synthetic oligonucleotide
cgattgtctcgcagacaagggggaacgtag

SEQ ID NO: 236593 - DNA, 30 bp, Artificial Sequence
  Synthetic oligonucleotide
ttagttccaagtcacaaccatttaacgtag

SEQ ID NO: 236594 - DNA, 30 bp, Artificial Sequence
  Synthetic oligonucleotide
cttacgcgggtgtgagcctatctcacgtag

SEQ ID NO: 236595 - DNA, 30 bp, Artificial Sequence
  Synthetic oligonucleotide
catttggccgtccaagacctgtcgacgtag

SEQ ID NO: 236596 - DNA, 30 bp, Artificial Sequence
  Synthetic oligonucleotide
tgcggaagcagcttagaagtcggtacgtag

SEQ ID NO: 236597 - DNA, 30 bp, Artificial Sequence
  Synthetic oligonucleotide
agtttaaaggcagaattgcggtcaccgtag

SEQ ID NO: 236598 - DNA, 40 bp, Artificial Sequence
  Synthetic oligonucleotide
cgcacggcagtctcggcacacacgaggagttaagccgtag

SEQ ID NO: 236599 - DNA, 30 bp, Artificial Sequence
  Synthetic oligonucleotide
ttagttgatgggacagatgtgcggccgtag

SEQ ID NO: 236600 - DNA, 30 bp, Artificial Sequence
  Synthetic oligonucleotide
ggtaggcaagcctgtggagtttctccgtag

SEQ ID NO: 236601 - DNA, 30 bp, Artificial Sequence
  Synthetic oligonucleotide
tttaggacttcgattggaagctttccgtag

SEQ ID NO: 236602 - DNA, 30 bp, Artificial Sequence
  Synthetic oligonucleotide
ggctctgtgctgggctaagctgaagcgtag

SEQ ID NO: 236603 - DNA, 30 bp, Artificial Sequence
  Synthetic oligonucleotide
gcgtgaccaaccgatgatgcctcagcgtag

SEQ ID NO: 236604 - DNA, 30 bp, Artificial Sequence
  Synthetic oligonucleotide
ctatacccataaggcagcttactggcgtag

SEQ ID NO: 236605 - DNA, 30 bp, Artificial Sequence
  Synthetic oligonucleotide
gtgtcgagcaatgcctacatatctgcgtag

SEQ ID NO: 236606 - DNA, 30 bp, Artificial Sequence
  Synthetic oligonucleotide
gtgaagtcctagtgggacaatattgcgtag

SEQ ID NO: 236607 - DNA, 30 bp, Artificial Sequence
  Synthetic oligonucleotide
tactgataccgtgtgccaagatgctcgtag

SEQ ID NO: 236608 - DNA, 30 bp, Artificial Sequence
  Synthetic oligonucleotide
ccctcctgtaactattagaatgtctcgtag

SEQ ID NO: 236609 - DNA, 30 bp, Artificial Sequence
  Synthetic oligonucleotide
cactattatctagcctgccttaagtcgtag

SEQ ID NO: 236610 - DNA, 30 bp, Artificial Sequence
  Synthetic oligonucleotide
gactgttgtactagaaaggcatcaaggtag

SEQ ID NO: 236611 - DNA, 30 bp, Artificial Sequence
  Synthetic oligonucleotide
acccggtatcgcattgggtggaacaggtag

SEQ ID NO: 236612 - DNA, 30 bp, Artificial Sequence
  Synthetic oligonucleotide
tcgagctgctggtatcgtcggtacaggtag

SEQ ID NO: 236613 - DNA, 30 bp, Artificial Sequence
  Synthetic oligonucleotide
gtgaggtgggtccctctcacctccaggtag

SEQ ID NO: 236614 - DNA, 30 bp, Artificial Sequence
  Synthetic oligonucleotide
ttagctcctctggtataagtcctacggtag

SEQ ID NO: 236615 - DNA, 30 bp, Artificial Sequence
  Synthetic oligonucleotide
ctgcttcctgcacttgctcaaaacgggtag

SEQ ID NO: 236616 - DNA, 30 bp, Artificial Sequence
  Synthetic oligonucleotide
gattggggctacgctcccgacggcgggtag

SEQ ID NO: 236617 - DNA, 30 bp, Artificial Sequence
  Synthetic oligonucleotide
tgaatcgtagatcgggtacattgcgggtag

SEQ ID NO: 236618 - DNA, 30 bp, Artificial Sequence
  Synthetic oligonucleotide
atgaggcctgggtaattgttcagggggtag

SEQ ID NO: 236619 - DNA, 30 bp, Artificial Sequence
  Synthetic oligonucleotide
gggaccgacggtctgtcgatatgggggtag

SEQ ID NO: 236620 - DNA, 30 bp, Artificial Sequence
  Synthetic oligonucleotide
ctgcacaccgtgcgcaggggctctgggtag

SEQ ID NO: 236621 - DNA, 30 bp, Artificial Sequence
  Synthetic oligonucleotide
gtcaaatcctaaattctactcattgggtag

SEQ ID NO: 236622 - DNA, 30 bp, Artificial Sequence
  Synthetic oligonucleotide
ttgacgtaaaccggacgaagctttgggtag

SEQ ID NO: 236623 - DNA, 30 bp, Artificial Sequence
  Synthetic oligonucleotide
tttccagctactgcccagggacaatggtag

SEQ ID NO: 236624 - DNA, 30 bp, Artificial Sequence
  Synthetic oligonucleotide
gatttcaacgaacgtaaagtccgctggtag

SEQ ID NO: 236625 - DNA, 30 bp, Artificial Sequence
  Synthetic oligonucleotide
agtataattccgatccatagctcttggtag

SEQ ID NO: 236626 - DNA, 30 bp, Artificial Sequence
  Synthetic oligonucleotide
aaactggatggggctaatataggaatgtag

SEQ ID NO: 236627 - DNA, 30 bp, Artificial Sequence
  Synthetic oligonucleotide
aacactgtgtcgggttgcctattaatgtag

SEQ ID NO: 236628 - DNA, 30 bp, Artificial Sequence
  Synthetic oligonucleotide
acgtggtcttgattagtctgcactatgtag

SEQ ID NO: 236629 - DNA, 29 bp, Artificial Sequence
  Synthetic oligonucleotide
gggagacgtgttaaccgggctttatgtag

SEQ ID NO: 236630 - DNA, 30 bp, Artificial Sequence
  Synthetic oligonucleotide
ggagtagcggaatttgtatgaatactgtag

SEQ ID NO: 236631 - DNA, 30 bp, Artificial Sequence
  Synthetic oligonucleotide
tacttcattatgcttgggactaacctgtag

SEQ ID NO: 236632 - DNA, 30 bp, Artificial Sequence
  Synthetic oligonucleotide
gtgcgcagatagggacttcatttgctgtag

SEQ ID NO: 236633 - DNA, 30 bp, Artificial Sequence
  Synthetic oligonucleotide
aaagattggacttattagggatctctgtag

SEQ ID NO: 236634 - DNA, 30 bp, Artificial Sequence
  Synthetic oligonucleotide
aaacgtcgaatcagccttttgttcgtgtag

SEQ ID NO: 236635 - DNA, 30 bp, Artificial Sequence
  Synthetic oligonucleotide
gtctcagatcagcggggagtcaaggtgtag

SEQ ID NO: 236636 - DNA, 30 bp, Artificial Sequence
  Synthetic oligonucleotide
tcagtacacttctcaatttgacgggtgtag

SEQ ID NO: 236637 - DNA, 30 bp, Artificial Sequence
  Synthetic oligonucleotide
cacaacagcaagtttgaaactgaattgtag

SEQ ID NO: 236638 - DNA, 30 bp, Artificial Sequence
  Synthetic oligonucleotide
ataatgggaccctaggctgggtagttgtag

SEQ ID NO: 236639 - DNA, 30 bp, Artificial Sequence
  Synthetic oligonucleotide
aggttgcgtatccggtacacgtcgttgtag

SEQ ID NO: 236640 - DNA, 30 bp, Artificial Sequence
  Synthetic oligonucleotide
gttaaaaccagtaccagcagttcgttgtag

SEQ ID NO: 236641 - DNA, 30 bp, Artificial Sequence
  Synthetic oligonucleotide
agagacgggggaatacggggtcggttgtag

SEQ ID NO: 236642 - DNA, 30 bp, Artificial Sequence
  Synthetic oligonucleotide
aaccaaattcagagggtgtgcctgttgtag

SEQ ID NO: 236643 - DNA, 30 bp, Artificial Sequence
  Synthetic oligonucleotide
acctggtacagcaacatcacagtgttgtag

SEQ ID NO: 236644 - DNA, 30 bp, Artificial Sequence
  Synthetic oligonucleotide
cctgtacagggtatcgcccagaatttgtag

SEQ ID NO: 236645 - DNA, 30 bp, Artificial Sequence
  Synthetic oligonucleotide
taaagtcgatcgtacacggcatgaaattag

SEQ ID NO: 236646 - DNA, 30 bp, Artificial Sequence
  Synthetic oligonucleotide
tactatttctcttatcaacacacgaattag

SEQ ID NO: 236647 - DNA, 30 bp, Artificial Sequence
  Synthetic oligonucleotide
tcctgccggctcgtctatgtctggaattag

SEQ ID NO: 236648 - DNA, 30 bp, Artificial Sequence
  Synthetic oligonucleotide
ggttggtaactgatccgagttatgaattag

SEQ ID NO: 236649 - DNA, 30 bp, Artificial Sequence
  Synthetic oligonucleotide
aaacgtattcgtgtctacagaactaattag

SEQ ID NO: 236650 - DNA, 30 bp, Artificial Sequence
  Synthetic oligonucleotide
actgccaactccgagaggcagggacattag

SEQ ID NO: 236651 - DNA, 30 bp, Artificial Sequence
  Synthetic oligonucleotide
gcatgggagggcgatcatattggacattag

SEQ ID NO: 236652 - DNA, 30 bp, Artificial Sequence
  Synthetic oligonucleotide
ttttccagcgccaagaacgggttacattag

SEQ ID NO: 236653 - DNA, 30 bp, Artificial Sequence
  Synthetic oligonucleotide
tcaggtgtgatcgaaaccgggtatcattag

SEQ ID NO: 236654 - DNA, 30 bp, Artificial Sequence
  Synthetic oligonucleotide
gccaattcacattcagaacactctcattag

SEQ ID NO: 236655 - DNA, 30 bp, Artificial Sequence
  Synthetic oligonucleotide
ccacctagtgttcatcacttagttcattag

SEQ ID NO: 236656 - DNA, 30 bp, Artificial Sequence
  Synthetic oligonucleotide
gtgggtcaatttagagatgttaaagattag

SEQ ID NO: 236657 - DNA, 30 bp, Artificial Sequence
  Synthetic oligonucleotide
ctgcctcgtctggtaacggactaagattag

SEQ ID NO: 236658 - DNA, 30 bp, Artificial Sequence
  Synthetic oligonucleotide
ggggatagtttcggttgcatgtcggattag

SEQ ID NO: 236659 - DNA, 30 bp, Artificial Sequence
  Synthetic oligonucleotide
ttacgctcaaggactaggctcttggattag

SEQ ID NO: 236660 - DNA, 30 bp, Artificial Sequence
  Synthetic oligonucleotide
accggtgtagtttgaaaatacaaatattag

SEQ ID NO: 236661 - DNA, 30 bp, Artificial Sequence
  Synthetic oligonucleotide
gtatgtaatacgttaaactaagaatattag

SEQ ID NO: 236662 - DNA, 30 bp, Artificial Sequence
  Synthetic oligonucleotide
aagacgaagatttatatgtctaactattag

SEQ ID NO: 236663 - DNA, 30 bp, Artificial Sequence
  Synthetic oligonucleotide
ttcggcgacatcgtggaactcaggtattag

SEQ ID NO: 236664 - DNA, 30 bp, Artificial Sequence
  Synthetic oligonucleotide
attagcgataggggaaggtggtattattag

SEQ ID NO: 236665 - DNA, 30 bp, Artificial Sequence
  Synthetic oligonucleotide
accgcattcaggcgggacaggctttattag

SEQ ID NO: 236666 - DNA, 29 bp, Artificial Sequence
  Synthetic oligonucleotide
ggaatggatacgggtcatctgtttattag

SEQ ID NO: 236667 - DNA, 30 bp, Artificial Sequence
  Synthetic oligonucleotide
gcaccatgacaaacagactcttccacttag

SEQ ID NO: 236668 - DNA, 30 bp, Artificial Sequence
  Synthetic oligonucleotide
ttagtgtaaatcatgacggtgggcacttag

SEQ ID NO: 236669 - DNA, 30 bp, Artificial Sequence
  Synthetic oligonucleotide
tcaaagcttccggtatacatgtggacttag

SEQ ID NO: 236670 - DNA, 30 bp, Artificial Sequence
  Synthetic oligonucleotide
gttccagctgaatgatgtaagttgccttag

SEQ ID NO: 236671 - DNA, 30 bp, Artificial Sequence
  Synthetic oligonucleotide
ttctaggaggtgaacaaagtataagcttag

SEQ ID NO: 236672 - DNA, 30 bp, Artificial Sequence
  Synthetic oligonucleotide
acagaataatgttgacacgaagccgcttag

SEQ ID NO: 236673 - DNA, 30 bp, Artificial Sequence
  Synthetic oligonucleotide
ataaagcctgaaatgttgctcagcgcttag

SEQ ID NO: 236674 - DNA, 30 bp, Artificial Sequence
  Synthetic oligonucleotide
ggcggactatagaatgctgcataggcttag

SEQ ID NO: 236675 - DNA, 30 bp, Artificial Sequence
  Synthetic oligonucleotide
ggttcgataacatgggataatgtaagttag

SEQ ID NO: 236676 - DNA, 30 bp, Artificial Sequence
  Synthetic oligonucleotide
taatcaggctatggtggagtgtctagttag

SEQ ID NO: 236677 - DNA, 30 bp, Artificial Sequence
  Synthetic oligonucleotide
gtgcacgtagttgcaaccattttacgttag

SEQ ID NO: 236678 - DNA, 30 bp, Artificial Sequence
  Synthetic oligonucleotide
agcatgctcacatgcaggaaacggcgttag

SEQ ID NO: 236679 - DNA, 30 bp, Artificial Sequence
  Synthetic oligonucleotide
gctaacgttacaacaaccatatggcgttag

SEQ ID NO: 236680 - DNA, 30 bp, Artificial Sequence
  Synthetic oligonucleotide
ccgcgaggatacgcgcagatacaaggttag

SEQ ID NO: 236681 - DNA, 30 bp, Artificial Sequence
  Synthetic oligonucleotide
tcccaagcgcgccctcagggcgaaggttag

SEQ ID NO: 236682 - DNA, 30 bp, Artificial Sequence
  Synthetic oligonucleotide
aattgcacattatggaactcataaggttag

SEQ ID NO: 236683 - DNA, 30 bp, Artificial Sequence
  Synthetic oligonucleotide
caaacccagatgtcgatacggataggttag

SEQ ID NO: 236684 - DNA, 30 bp, Artificial Sequence
  Synthetic oligonucleotide
ttatccccgagtttccttaacgcgggttag

SEQ ID NO: 236685 - DNA, 30 bp, Artificial Sequence
  Synthetic oligonucleotide
tttgaggcaatgagggcctatctatgttag

SEQ ID NO: 236686 - DNA, 30 bp, Artificial Sequence
  Synthetic oligonucleotide
ccctgcaatctaaatgtcggacagtgttag

SEQ ID NO: 236687 - DNA, 30 bp, Artificial Sequence
  Synthetic oligonucleotide
tcacctggctgggcgtgaacatcttgttag

SEQ ID NO: 236688 - DNA, 30 bp, Artificial Sequence
  Synthetic oligonucleotide
tcgcatgcatggtaacatgtaagttgttag

SEQ ID NO: 236689 - DNA, 30 bp, Artificial Sequence
  Synthetic oligonucleotide
atgactactccggagatgcggggttgttag

SEQ ID NO: 236690 - DNA, 30 bp, Artificial Sequence
  Synthetic oligonucleotide
agggtcgggcagctggccatgagaatttag

SEQ ID NO: 236691 - DNA, 30 bp, Artificial Sequence
  Synthetic oligonucleotide
gcggtatagcagatatggcgacgcatttag

SEQ ID NO: 236692 - DNA, 30 bp, Artificial Sequence
  Synthetic oligonucleotide
tttcggtacataaaggtaaaaagtatttag

SEQ ID NO: 236693 - DNA, 30 bp, Artificial Sequence
  Synthetic oligonucleotide
gctgcgaatcactctaggagaattatttag

SEQ ID NO: 236694 - DNA, 29 bp, Artificial Sequence
  Synthetic oligonucleotide
acagctctgggccttgtagcgcactttag

SEQ ID NO: 236695 - DNA, 30 bp, Artificial Sequence
  Synthetic oligonucleotide
caagaagttgttagaacaggattcctttag

SEQ ID NO: 236696 - DNA, 30 bp, Artificial Sequence
  Synthetic oligonucleotide
taggcgtctgaagttgggacatcgctttag

SEQ ID NO: 236697 - DNA, 30 bp, Artificial Sequence
  Synthetic oligonucleotide
tcagtatctagtgtaaaagagatgctttag

SEQ ID NO: 236698 - DNA, 30 bp, Artificial Sequence
  Synthetic oligonucleotide
gaccaaagcagatcttagtcgcctctttag

SEQ ID NO: 236699 - DNA, 30 bp, Artificial Sequence
  Synthetic oligonucleotide
cgtcgtggttggactaagcagcttctttag

SEQ ID NO: 236700 - DNA, 30 bp, Artificial Sequence
  Synthetic oligonucleotide
cgcactaggtcctgtcgaggtagagtttag

SEQ ID NO: 236701 - DNA, 30 bp, Artificial Sequence
  Synthetic oligonucleotide
agctgggtgtatgcggccttgtacgtttag

SEQ ID NO: 236702 - DNA, 30 bp, Artificial Sequence
  Synthetic oligonucleotide
acttgagcgatttctagtggtaaggtttag

SEQ ID NO: 236703 - DNA, 30 bp, Artificial Sequence
  Synthetic oligonucleotide
tggacgtattatccatggtccatggtttag

SEQ ID NO: 236704 - DNA, 30 bp, Artificial Sequence
  Synthetic oligonucleotide
tgcgcccagccgatatctctccctgtttag

SEQ ID NO: 236705 - DNA, 30 bp, Artificial Sequence
  Synthetic oligonucleotide
atcaacacactttgaacgccgtttgtttag

SEQ ID NO: 236706 - DNA, 30 bp, Artificial Sequence
  Synthetic oligonucleotide
acgtctgaagatagtatggtgtgattttag

SEQ ID NO: 236707 - DNA, 30 bp, Artificial Sequence
  Synthetic oligonucleotide
ccatgcggccggcagtgatctctattttag

SEQ ID NO: 236708 - DNA, 30 bp, Artificial Sequence
  Synthetic oligonucleotide
gttgaaggacaggactcgagtgtattttag

SEQ ID NO: 236709 - DNA, 30 bp, Artificial Sequence
  Synthetic oligonucleotide
tgagcccctcccttgcccggtaacttttag

SEQ ID NO: 236710 - DNA, 30 bp, Artificial Sequence
  Synthetic oligonucleotide
tacagcctggtaatattccggcaaaaaacg

SEQ ID NO: 236711 - DNA, 29 bp, Artificial Sequence
  Synthetic oligonucleotide
tcttggaaaggcccatcggggcaaaaacg

SEQ ID NO: 236712 - DNA, 30 bp, Artificial Sequence
  Synthetic oligonucleotide
acttgttaccgcttggcgaccgtgaaaacg

SEQ ID NO: 236713 - DNA, 30 bp, Artificial Sequence
  Synthetic oligonucleotide
agtttaccgtaaactctcgttcaacaaacg

SEQ ID NO: 236714 - DNA, 30 bp, Artificial Sequence
  Synthetic oligonucleotide
tttgatgatcagtgtcatcgcttccaaacg

SEQ ID NO: 236715 - DNA, 30 bp, Artificial Sequence
  Synthetic oligonucleotide
accggtacacccgctaagatccggcaaacg

SEQ ID NO: 236716 - DNA, 30 bp, Artificial Sequence
  Synthetic oligonucleotide
gggtccaaggtctaactagtgtctcaaacg

SEQ ID NO: 236717 - DNA, 30 bp, Artificial Sequence
  Synthetic oligonucleotide
gatggggagacggacggttgtcgtcaaacg

SEQ ID NO: 236718 - DNA, 30 bp, Artificial Sequence
  Synthetic oligonucleotide
agcttaactcgggtggagtaaatagaaacg

SEQ ID NO: 236719 - DNA, 30 bp, Artificial Sequence
  Synthetic oligonucleotide
ccgtgagccggagcataatatttagaaacg

SEQ ID NO: 236720 - DNA, 30 bp, Artificial Sequence
  Synthetic oligonucleotide
gtagatcttaacatggacccacgggaaacg

SEQ ID NO: 236721 - DNA, 30 bp, Artificial Sequence
  Synthetic oligonucleotide
catgtacaaatgacaggcgcgccataaacg

SEQ ID NO: 236722 - DNA, 30 bp, Artificial Sequence
  Synthetic oligonucleotide
tgcggtgggaatagtggcaccaggtaaacg

SEQ ID NO: 236723 - DNA, 30 bp, Artificial Sequence
  Synthetic oligonucleotide
cgatagtaaggctacgggggcatttaaacg

SEQ ID NO: 236724 - DNA, 30 bp, Artificial Sequence
  Synthetic oligonucleotide
cctgtcgacaagcacttgtccgtttaaacg

SEQ ID NO: 236725 - DNA, 30 bp, Artificial Sequence
  Synthetic oligonucleotide
attgagtctattataggtagtgacacaacg

SEQ ID NO: 236726 - DNA, 30 bp, Artificial Sequence
  Synthetic oligonucleotide
gagcgctaccgggttcttccggagacaacg

SEQ ID NO: 236727 - DNA, 30 bp, Artificial Sequence
  Synthetic oligonucleotide
ccgaagtcttttcttaagatgaggacaacg

SEQ ID NO: 236728 - DNA, 30 bp, Artificial Sequence
  Synthetic oligonucleotide
cggggtgcgtcgtggggctttgtgacaacg

SEQ ID NO: 236729 - DNA, 30 bp, Artificial Sequence
  Synthetic oligonucleotide
gcaaacgtaccgaattcctcgaatacaacg

SEQ ID NO: 236730 - DNA, 30 bp, Artificial Sequence
  Synthetic oligonucleotide
ctgtaactggaggagacgcgtattacaacg

SEQ ID NO: 236731 - DNA, 30 bp, Artificial Sequence
  Synthetic oligonucleotide
cgaaggaacgctggcgacaactttacaacg

SEQ ID NO: 236732 - DNA, 30 bp, Artificial Sequence
  Synthetic oligonucleotide
catccgacgagccattggggtaaaccaacg

SEQ ID NO: 236733 - DNA, 30 bp, Artificial Sequence
  Synthetic oligonucleotide
ttataatttgacgctaggaaagaaccaacg

SEQ ID NO: 236734 - DNA, 30 bp, Artificial Sequence
  Synthetic oligonucleotide
cttccggggatctggccttactaaccaacg

SEQ ID NO: 236735 - DNA, 30 bp, Artificial Sequence
  Synthetic oligonucleotide
ccgcccttaagattcaaagtaggaccaacg

SEQ ID NO: 236736 - DNA, 30 bp, Artificial Sequence
  Synthetic oligonucleotide
cggcaaactaggagattttgcttgccaacg

SEQ ID NO: 236737 - DNA, 30 bp, Artificial Sequence
  Synthetic oligonucleotide
accgacgatgtgcttcactttttggcaacg

SEQ ID NO: 236738 - DNA, 30 bp, Artificial Sequence
  Synthetic oligonucleotide
gttcgggcaacgggttgaacgtatgcaacg

SEQ ID NO: 236739 - DNA, 30 bp, Artificial Sequence
  Synthetic oligonucleotide
acgagtagggacatgcacgagcctgcaacg

SEQ ID NO: 236740 - DNA, 30 bp, Artificial Sequence
  Synthetic oligonucleotide
gcgttgaggacggcacggtccagctcaacg

SEQ ID NO: 236741 - DNA, 30 bp, Artificial Sequence
  Synthetic oligonucleotide
gtgaaatcaacgggtgcatgccgctcaacg

SEQ ID NO: 236742 - DNA, 30 bp, Artificial Sequence
  Synthetic oligonucleotide
gtagtctcgcaataacttaaagagtcaacg

SEQ ID NO: 236743 - DNA, 30 bp, Artificial Sequence
  Synthetic oligonucleotide
gtgtattcgtttctgcgttctatttcaacg

SEQ ID NO: 236744 - DNA, 30 bp, Artificial Sequence
  Synthetic oligonucleotide
gtagtgaatatactcgaggctgacagaacg

SEQ ID NO: 236745 - DNA, 30 bp, Artificial Sequence
  Synthetic oligonucleotide
tgccgatctcgtcttgttaccggcagaacg

SEQ ID NO: 236746 - DNA, 30 bp, Artificial Sequence
  Synthetic oligonucleotide
ggaaattagcagtagacaatgttgagaacg

SEQ ID NO: 236747 - DNA, 30 bp, Artificial Sequence
  Synthetic oligonucleotide
gggggtagtttagagagctctatgcgaacg

SEQ ID NO: 236748 - DNA, 30 bp, Artificial Sequence
  Synthetic oligonucleotide
gttaggccaaggtgtgcccttcaaggaacg

SEQ ID NO: 236749 - DNA, 30 bp, Artificial Sequence
  Synthetic oligonucleotide
ggttatgaagtacaggtaacttaaggaacg

SEQ ID NO: 236750 - DNA, 30 bp, Artificial Sequence
  Synthetic oligonucleotide
ttgcttatggtggggcgtcaggagggaacg

SEQ ID NO: 236751 - DNA, 30 bp, Artificial Sequence
  Synthetic oligonucleotide
aaaatactttagcttagatgatggggaacg

SEQ ID NO: 236752 - DNA, 30 bp, Artificial Sequence
  Synthetic oligonucleotide
ggaacccaggggcataggttaactggaacg

SEQ ID NO: 236753 - DNA, 30 bp, Artificial Sequence
  Synthetic oligonucleotide
acaaggggtacgtacgtactgtttggaacg

SEQ ID NO: 236754 - DNA, 30 bp, Artificial Sequence
  Synthetic oligonucleotide
actgcgattacctcaccgccacgatgaacg

SEQ ID NO: 236755 - DNA, 30 bp, Artificial Sequence
  Synthetic oligonucleotide
gtctgattccgaaggacaagatgatgaacg

SEQ ID NO: 236756 - DNA, 30 bp, Artificial Sequence
  Synthetic oligonucleotide
gtatattgacgggaggtttgcaagtgaacg

SEQ ID NO: 236757 - DNA, 30 bp, Artificial Sequence
  Synthetic oligonucleotide
gagagtattgcatcttcaatgtattgaacg

SEQ ID NO: 236758 - DNA, 30 bp, Artificial Sequence
  Synthetic oligonucleotide
aatgaccaaggatccaccgtcatttgaacg

SEQ ID NO: 236759 - DNA, 30 bp, Artificial Sequence
  Synthetic oligonucleotide
catccgctataagatttctcaaaaataacg

SEQ ID NO: 236760 - DNA, 30 bp, Artificial Sequence
  Synthetic oligonucleotide
gctctaatccatttctagaggtaaataacg

SEQ ID NO: 236761 - DNA, 30 bp, Artificial Sequence
  Synthetic oligonucleotide
agagtactaacgtttagcccaaacataacg

SEQ ID NO: 236762 - DNA, 30 bp, Artificial Sequence
  Synthetic oligonucleotide
gctccttgatgagttcccacctgcataacg

SEQ ID NO: 236763 - DNA, 30 bp, Artificial Sequence
  Synthetic oligonucleotide
attgtggatggtcatcagccaagactaacg

SEQ ID NO: 236764 - DNA, 30 bp, Artificial Sequence
  Synthetic oligonucleotide
tccgtggacgacaccacctcgctactaacg

SEQ ID NO: 236765 - DNA, 30 bp, Artificial Sequence
  Synthetic oligonucleotide
cgttttcgcaactttggccgagacctaacg

SEQ ID NO: 236766 - DNA, 30 bp, Artificial Sequence
  Synthetic oligonucleotide
catcatcacagtatttaacgtgtcctaacg

SEQ ID NO: 236767 - DNA, 30 bp, Artificial Sequence
  Synthetic oligonucleotide
cgcaataatcgactgtctattaatctaacg

SEQ ID NO: 236768 - DNA, 30 bp, Artificial Sequence
  Synthetic oligonucleotide
aaatagggcctgaagcttccaactctaacg

SEQ ID NO: 236769 - DNA, 30 bp, Artificial Sequence
  Synthetic oligonucleotide
tagtttggggacactacttgctttctaacg

SEQ ID NO: 236770 - DNA, 30 bp, Artificial Sequence
  Synthetic oligonucleotide
gtttgcactgtagtatcgaatcaagtaacg

SEQ ID NO: 236771 - DNA, 30 bp, Artificial Sequence
  Synthetic oligonucleotide
gatgtagctgtgagcagagatggagtaacg

SEQ ID NO: 236772 - DNA, 30 bp, Artificial Sequence
  Synthetic oligonucleotide
cagaccccaatgcgcgccaaggtagtaacg

SEQ ID NO: 236773 - DNA, 30 bp, Artificial Sequence
  Synthetic oligonucleotide
cgtctatggtggtgacctactgccgtaacg

SEQ ID NO: 236774 - DNA, 30 bp, Artificial Sequence
  Synthetic oligonucleotide
attgcgcatcttctccaatagtccgtaacg

SEQ ID NO: 236775 - DNA, 30 bp, Artificial Sequence
  Synthetic oligonucleotide
attcagcacaataccttcgtttccgtaacg

SEQ ID NO: 236776 - DNA, 30 bp, Artificial Sequence
  Synthetic oligonucleotide
aggcctggcgcgtggtgcaactgcgtaacg

SEQ ID NO: 236777 - DNA, 30 bp, Artificial Sequence
  Synthetic oligonucleotide
caggttttagatccacagacagcggtaacg

SEQ ID NO: 236778 - DNA, 30 bp, Artificial Sequence
  Synthetic oligonucleotide
gtccctgcgcaagataatatctcggtaacg

SEQ ID NO: 236779 - DNA, 30 bp, Artificial Sequence
  Synthetic oligonucleotide
ccgggtgtagtcatggttagcggggtaacg

SEQ ID NO: 236780 - DNA, 30 bp, Artificial Sequence
  Synthetic oligonucleotide
aaatagtgggcaatgctttctctggtaacg

SEQ ID NO: 236781 - DNA, 30 bp, Artificial Sequence
  Synthetic oligonucleotide
tcatgcaactgagtttgggtcaatgtaacg

SEQ ID NO: 236782 - DNA, 30 bp, Artificial Sequence
  Synthetic oligonucleotide
cgggagcacttaggacgtgagtttgtaacg

SEQ ID NO: 236783 - DNA, 30 bp, Artificial Sequence
  Synthetic oligonucleotide
aattgaccaacaatagatgacgcattaacg

SEQ ID NO: 236784 - DNA, 30 bp, Artificial Sequence
  Synthetic oligonucleotide
cttcaaagctgaggataattaatattaacg

SEQ ID NO: 236785 - DNA, 30 bp, Artificial Sequence
  Synthetic oligonucleotide
aaccagcatcttgtaactaccctattaacg

SEQ ID NO: 236786 - DNA, 30 bp, Artificial Sequence
  Synthetic oligonucleotide
ggacatagcaatgcgcgttcctagttaacg

SEQ ID NO: 236787 - DNA, 29 bp, Artificial Sequence
  Synthetic oligonucleotide
gcaggtcactgagaccgtttcgtttaacg

SEQ ID NO: 236788 - DNA, 30 bp, Artificial Sequence
  Synthetic oligonucleotide
gattcttcaagctcattcggaaaaaacacg

SEQ ID NO: 236789 - DNA, 30 bp, Artificial Sequence
  Synthetic oligonucleotide
cgtttgactgtcgggtaaaatgaaaacacg

SEQ ID NO: 236790 - DNA, 30 bp, Artificial Sequence
  Synthetic oligonucleotide
caaggggggttttggcacggatcaaacacg

SEQ ID NO: 236791 - DNA, 30 bp, Artificial Sequence
  Synthetic oligonucleotide
ccttagacagagctggataggttcaacacg

SEQ ID NO: 236792 - DNA, 30 bp, Artificial Sequence
  Synthetic oligonucleotide
ttgatagactatgaatgtgcgaaacacacg

SEQ ID NO: 236793 - DNA, 30 bp, Artificial Sequence
  Synthetic oligonucleotide
ccgaacatctaaaacgggtgacaacacacg

SEQ ID NO: 236794 - DNA, 30 bp, Artificial Sequence
  Synthetic oligonucleotide
aatacgtgctttatctatcgcgcacacacg

SEQ ID NO: 236795 - DNA, 30 bp, Artificial Sequence
  Synthetic oligonucleotide
atttgctgtcttatgccctctgcacacacg

SEQ ID NO: 236796 - DNA, 30 bp, Artificial Sequence
  Synthetic oligonucleotide
atcccaggaatccggaggaaaacccacacg

SEQ ID NO: 236797 - DNA, 30 bp, Artificial Sequence
  Synthetic oligonucleotide
gaaaggatatacatcaatttatgcgacacg

SEQ ID NO: 236798 - DNA, 30 bp, Artificial Sequence
  Synthetic oligonucleotide
ccgcactgggagttcagaaccgaggacacg

SEQ ID NO: 236799 - DNA, 30 bp, Artificial Sequence
  Synthetic oligonucleotide
taataagaatcagggtatttataggacacg

SEQ ID NO: 236800 - DNA, 30 bp, Artificial Sequence
  Synthetic oligonucleotide
cggtagatacggacaacgcgtgcggacacg

SEQ ID NO: 236801 - DNA, 30 bp, Artificial Sequence
  Synthetic oligonucleotide
cagacctaatgggttcaaacatcatacacg

SEQ ID NO: 236802 - DNA, 30 bp, Artificial Sequence
  Synthetic oligonucleotide
taggcaagaaagaattagcacgcctacacg

SEQ ID NO: 236803 - DNA, 30 bp, Artificial Sequence
  Synthetic oligonucleotide
tgattgagaccaattgtttaacgctacacg

SEQ ID NO: 236804 - DNA, 30 bp, Artificial Sequence
  Synthetic oligonucleotide
aaggaactgaattagggtaacgtctacacg

SEQ ID NO: 236805 - DNA, 30 bp, Artificial Sequence
  Synthetic oligonucleotide
agtggaagaaatttctgtggttcgtacacg

SEQ ID NO: 236806 - DNA, 30 bp, Artificial Sequence
  Synthetic oligonucleotide
atatgtctcaagaagacagacgtttacacg

SEQ ID NO: 236807 - DNA, 30 bp, Artificial Sequence
  Synthetic oligonucleotide
ggcgttgctctgtcatggggataaaccacg

SEQ ID NO: 236808 - DNA, 30 bp, Artificial Sequence
  Synthetic oligonucleotide
aacactttacgaggtatgaatacaaccacg

SEQ ID NO: 236809 - DNA, 30 bp, Artificial Sequence
  Synthetic oligonucleotide
acgattgatatgagcgagcgtcgacccacg

SEQ ID NO: 236810 - DNA, 30 bp, Artificial Sequence
  Synthetic oligonucleotide
gtctaggggaggggattcactatacccacg

SEQ ID NO: 236811 - DNA, 30 bp, Artificial Sequence
  Synthetic oligonucleotide
gttcgggacatctacgcatggatgcccacg

SEQ ID NO: 236812 - DNA, 30 bp, Artificial Sequence
  Synthetic oligonucleotide
aggatgactgttaagatctaactgcccacg

SEQ ID NO: 236813 - DNA, 30 bp, Artificial Sequence
  Synthetic oligonucleotide
agttagccgccaatcagagaaaatcccacg

SEQ ID NO: 236814 - DNA, 30 bp, Artificial Sequence
  Synthetic oligonucleotide
acatgtgaccccgacggtcgggtcgccacg

SEQ ID NO: 236815 - DNA, 30 bp, Artificial Sequence
  Synthetic oligonucleotide
agtcgaggtgctccttagggcccggccacg

SEQ ID NO: 236816 - DNA, 30 bp, Artificial Sequence
  Synthetic oligonucleotide
ggttggtgggtcgtacagacgtcggccacg

SEQ ID NO: 236817 - DNA, 30 bp, Artificial Sequence
  Synthetic oligonucleotide
gactgttcggcccgatatagcagtgccacg

SEQ ID NO: 236818 - DNA, 30 bp, Artificial Sequence
  Synthetic oligonucleotide
ctaagagaccaggaacagcgccgtgccacg

SEQ ID NO: 236819 - DNA, 30 bp, Artificial Sequence
  Synthetic oligonucleotide
gagaaccggacggtagttcgaacatccacg

SEQ ID NO: 236820 - DNA, 30 bp, Artificial Sequence
  Synthetic oligonucleotide
gtagtaatcaaagaccggattacatccacg

SEQ ID NO: 236821 - DNA, 30 bp, Artificial Sequence
  Synthetic oligonucleotide
tgtgatcgtccaatcctttgaatttccacg

SEQ ID NO: 236822 - DNA, 30 bp, Artificial Sequence
  Synthetic oligonucleotide
aacgtcgggtcgtgcggaacagacagcacg

SEQ ID NO: 236823 - DNA, 30 bp, Artificial Sequence
  Synthetic oligonucleotide
ggagaaatccggagcagctgtcctagcacg

SEQ ID NO: 236824 - DNA, 30 bp, Artificial Sequence
  Synthetic oligonucleotide
cttggtgccgggaattgaccgaggcgcacg

SEQ ID NO: 236825 - DNA, 30 bp, Artificial Sequence
  Synthetic oligonucleotide
ctagaacttacctttgtgacagcgggcacg

SEQ ID NO: 236826 - DNA, 30 bp, Artificial Sequence
  Synthetic oligonucleotide
gcaacacaagttcagtcaatggggggcacg

SEQ ID NO: 236827 - DNA, 30 bp, Artificial Sequence
  Synthetic oligonucleotide
ggtggcattttcacaacaagaactggcacg

SEQ ID NO: 236828 - DNA, 30 bp, Artificial Sequence
  Synthetic oligonucleotide
accgtgagggttacactgacgcaatgcacg

SEQ ID NO: 236829 - DNA, 30 bp, Artificial Sequence
  Synthetic oligonucleotide
taggtgcctaggtcagaactacactgcacg

SEQ ID NO: 236830 - DNA, 30 bp, Artificial Sequence
  Synthetic oligonucleotide
atgggtatgtagtatcgagggctctgcacg

SEQ ID NO: 236831 - DNA, 30 bp, Artificial Sequence
  Synthetic oligonucleotide
ggtggtggatctagggaactgggttgcacg

SEQ ID NO: 236832 - DNA, 30 bp, Artificial Sequence
  Synthetic oligonucleotide
agcagattacggtgaggttacctttgcacg

SEQ ID NO: 236833 - DNA, 27 bp, Artificial Sequence
  Synthetic oligonucleotide
ttattacgcgggtggtcataaatcacg

SEQ ID NO: 236834 - DNA, 30 bp, Artificial Sequence
  Synthetic oligonucleotide
ttgtacatgcgttgaagcaccggaatcacg

SEQ ID NO: 236835 - DNA, 30 bp, Artificial Sequence
  Synthetic oligonucleotide
ctggcatgggcagtggccgaattgatcacg

SEQ ID NO: 236836 - DNA, 30 bp, Artificial Sequence
  Synthetic oligonucleotide
ttgcaaaggttgaagccaggcggtatcacg

SEQ ID NO: 236837 - DNA, 30 bp, Artificial Sequence
  Synthetic oligonucleotide
gaacagcgaacatggcggctccacctcacg

SEQ ID NO: 236838 - DNA, 30 bp, Artificial Sequence
  Synthetic oligonucleotide
aaatacagggaacgccgcttggtcctcacg

SEQ ID NO: 236839 - DNA, 30 bp, Artificial Sequence
  Synthetic oligonucleotide
ggaaaccgttctaggtgttagagtctcacg

SEQ ID NO: 236840 - DNA, 30 bp, Artificial Sequence
  Synthetic oligonucleotide
tagtgagtggggagagcttacacagtcacg

SEQ ID NO: 236841 - DNA, 30 bp, Artificial Sequence
  Synthetic oligonucleotide
tccagagggtcaccaggtcgatccgtcacg

SEQ ID NO: 236842 - DNA, 30 bp, Artificial Sequence
  Synthetic oligonucleotide
ggactcttgagtttctggcagaaggtcacg

SEQ ID NO: 236843 - DNA, 30 bp, Artificial Sequence
  Synthetic oligonucleotide
agagtgagtaagacacgcgtttgggtcacg

SEQ ID NO: 236844 - DNA, 30 bp, Artificial Sequence
  Synthetic oligonucleotide
tgatgcggatgtttgcataatggattcacg

SEQ ID NO: 236845 - DNA, 30 bp, Artificial Sequence
  Synthetic oligonucleotide
aaggctgatgggggtaatccatgcttcacg

SEQ ID NO: 236846 - DNA, 30 bp, Artificial Sequence
  Synthetic oligonucleotide
tgcgctgcgtgtgcttaaacagagttcacg

SEQ ID NO: 236847 - DNA, 30 bp, Artificial Sequence
  Synthetic oligonucleotide
tgcagtgattagctcgctcgtccgttcacg

SEQ ID NO: 236848 - DNA, 30 bp, Artificial Sequence
  Synthetic oligonucleotide
acagaaagttacccgagactatatttcacg

SEQ ID NO: 236849 - DNA, 30 bp, Artificial Sequence
  Synthetic oligonucleotide
tacggtatttgggacaccagctaaaagacg

SEQ ID NO: 236850 - DNA, 30 bp, Artificial Sequence
  Synthetic oligonucleotide
aagtttgagtcgttgacatcgtaaaagacg

SEQ ID NO: 236851 - DNA, 30 bp, Artificial Sequence
  Synthetic oligonucleotide
gaacaaaagagaacggctaggggaaagacg

SEQ ID NO: 236852 - DNA, 30 bp, Artificial Sequence
  Synthetic oligonucleotide
cttatgctaggcggttttcaataacagacg

SEQ ID NO: 236853 - DNA, 30 bp, Artificial Sequence
  Synthetic oligonucleotide
gatggttaccggagggagccagcacagacg

SEQ ID NO: 236854 - DNA, 30 bp, Artificial Sequence
  Synthetic oligonucleotide
ctcactttcgctctttgggatcgccagacg

SEQ ID NO: 236855 - DNA, 30 bp, Artificial Sequence
  Synthetic oligonucleotide
ttgtctctaacggtcggtgcgggccagacg

SEQ ID NO: 236856 - DNA, 30 bp, Artificial Sequence
  Synthetic oligonucleotide
tgcaggtatgacatggtacgcaggcagacg

SEQ ID NO: 236857 - DNA, 30 bp, Artificial Sequence
  Synthetic oligonucleotide
ggactaccgtagctcaaggattgtgagacg

SEQ ID NO: 236858 - DNA, 30 bp, Artificial Sequence
  Synthetic oligonucleotide
acctcaagaagagatgtagcggttgagacg

SEQ ID NO: 236859 - DNA, 30 bp, Artificial Sequence
  Synthetic oligonucleotide
ggtctgcgtattcgacaagaggcatagacg

SEQ ID NO: 236860 - DNA, 30 bp, Artificial Sequence
  Synthetic oligonucleotide
tctatggtcagtaaaggaaggaactagacg

SEQ ID NO: 236861 - DNA, 30 bp, Artificial Sequence
  Synthetic oligonucleotide
ctattcgtccacaggtctggtcgctagacg

SEQ ID NO: 236862 - DNA, 30 bp, Artificial Sequence
  Synthetic oligonucleotide
caggggaaaacagtagtaattcagtagacg

SEQ ID NO: 236863 - DNA, 30 bp, Artificial Sequence
  Synthetic oligonucleotide
gacgatttccatattaggcgtatgtagacg

SEQ ID NO: 236864 - DNA, 30 bp, Artificial Sequence
  Synthetic oligonucleotide
caataagatgggtttggcggaggttagacg

SEQ ID NO: 236865 - DNA, 30 bp, Artificial Sequence
  Synthetic oligonucleotide
gtccaagttattgtactgcttgtaacgacg

SEQ ID NO: 236866 - DNA, 30 bp, Artificial Sequence
  Synthetic oligonucleotide
taactttgagggacaatgtgtcaaccgacg

SEQ ID NO: 236867 - DNA, 30 bp, Artificial Sequence
  Synthetic oligonucleotide
cctcaccatgaagccgccgaatacccgacg

SEQ ID NO: 236868 - DNA, 30 bp, Artificial Sequence
  Synthetic oligonucleotide
gggaaaatgtttattacgagtaccccgacg

SEQ ID NO: 236869 - DNA, 30 bp, Artificial Sequence
  Synthetic oligonucleotide
agaagttaataggcctctgcatagccgacg

SEQ ID NO: 236870 - DNA, 30 bp, Artificial Sequence
  Synthetic oligonucleotide
tctctgaactcaaatgtaaaacgtccgacg

SEQ ID NO: 236871 - DNA, 30 bp, Artificial Sequence
  Synthetic oligonucleotide
cgtaagaaccttcaacaccgctaagcgacg

SEQ ID NO: 236872 - DNA, 30 bp, Artificial Sequence
  Synthetic oligonucleotide
ggcgtgtttaatgtcgagttacacgcgacg

SEQ ID NO: 236873 - DNA, 30 bp, Artificial Sequence
  Synthetic oligonucleotide
aagggtactttagttccaggctacgcgacg

SEQ ID NO: 236874 - DNA, 30 bp, Artificial Sequence
  Synthetic oligonucleotide
gccatgtcctaattgcgtaggaccgcgacg

SEQ ID NO: 236875 - DNA, 30 bp, Artificial Sequence
  Synthetic oligonucleotide
agtagtgttggttttcagctacgcgcgacg

SEQ ID NO: 236876 - DNA, 30 bp, Artificial Sequence
  Synthetic oligonucleotide
tagactcaaatttaagtagtgccggcgacg

SEQ ID NO: 236877 - DNA, 30 bp, Artificial Sequence
  Synthetic oligonucleotide
ggcgcgcacaagtaaaatgtatttgcgacg

SEQ ID NO: 236878 - DNA, 30 bp, Artificial Sequence
  Synthetic oligonucleotide
gcagctccccgtgtaggctgcagatcgacg

SEQ ID NO: 236879 - DNA, 30 bp, Artificial Sequence
  Synthetic oligonucleotide
caaggtgcgtccgtaggcagccattcgacg

SEQ ID NO: 236880 - DNA, 30 bp, Artificial Sequence
  Synthetic oligonucleotide
agaggttactgagcatggaggtattcgacg

SEQ ID NO: 236881 - DNA, 30 bp, Artificial Sequence
  Synthetic oligonucleotide
ttaatccattaagtgagtgtttcaaggacg

SEQ ID NO: 236882 - DNA, 30 bp, Artificial Sequence
  Synthetic oligonucleotide
actcactatggccggggggggtataggacg

SEQ ID NO: 236883 - DNA, 30 bp, Artificial Sequence
  Synthetic oligonucleotide
tccgctacttaagtattttaacctaggacg

SEQ ID NO: 236884 - DNA, 30 bp, Artificial Sequence
  Synthetic oligonucleotide
ctgattgaacatctaaggattacacggacg

SEQ ID NO: 236885 - DNA, 30 bp, Artificial Sequence
  Synthetic oligonucleotide
acgcgatacgtaaggtatggttcacggacg

SEQ ID NO: 236886 - DNA, 30 bp, Artificial Sequence
  Synthetic oligonucleotide
ctgtcgttctcttacgtcggaaggcggacg

SEQ ID NO: 236887 - DNA, 30 bp, Artificial Sequence
  Synthetic oligonucleotide
gattcacgatgagcagagagcttgcggacg

SEQ ID NO: 236888 - DNA, 30 bp, Artificial Sequence
  Synthetic oligonucleotide
ggctcctggccagtctatgcatcatggacg

SEQ ID NO: 236889 - DNA, 30 bp, Artificial Sequence
  Synthetic oligonucleotide
acctacttcccagccgttgactcgtggacg

SEQ ID NO: 236890 - DNA, 30 bp, Artificial Sequence
  Synthetic oligonucleotide
ggcgacagtaaccatggcacgttgtggacg

SEQ ID NO: 236891 - DNA, 30 bp, Artificial Sequence
  Synthetic oligonucleotide
ttgtagctggtaacaccgtctccttggacg

SEQ ID NO: 236892 - DNA, 30 bp, Artificial Sequence
  Synthetic oligonucleotide
gggcctcgacaaggtgtcatcggaatgacg

SEQ ID NO: 236893 - DNA, 30 bp, Artificial Sequence
  Synthetic oligonucleotide
gttcgtaactcattggacagggtaatgacg

SEQ ID NO: 236894 - DNA, 30 bp, Artificial Sequence
  Synthetic oligonucleotide
caattataagtgacagacaaggtcatgacg

SEQ ID NO: 236895 - DNA, 30 bp, Artificial Sequence
  Synthetic oligonucleotide
tagtcttgtgtgtttgaggataggatgacg

SEQ ID NO: 236896 - DNA, 30 bp, Artificial Sequence
  Synthetic oligonucleotide
gagatcactgaacggccaagttatatgacg

SEQ ID NO: 236897 - DNA, 30 bp, Artificial Sequence
  Synthetic oligonucleotide
tcctacgaaagactggttctctttatgacg

SEQ ID NO: 236898 - DNA, 30 bp, Artificial Sequence
  Synthetic oligonucleotide
aagatagggagggatcggatgtttatgacg

SEQ ID NO: 236899 - DNA, 30 bp, Artificial Sequence
  Synthetic oligonucleotide
gcgtacaggcagtaatgcgtccaactgacg

SEQ ID NO: 236900 - DNA, 30 bp, Artificial Sequence
  Synthetic oligonucleotide
tcaaacagtcatgtggacaaaacactgacg

SEQ ID NO: 236901 - DNA, 30 bp, Artificial Sequence
  Synthetic oligonucleotide
atggtcgcaccgatgtaaccctagctgacg

SEQ ID NO: 236902 - DNA, 30 bp, Artificial Sequence
  Synthetic oligonucleotide
aataggactgtcgatgtattggatctgacg

SEQ ID NO: 236903 - DNA, 30 bp, Artificial Sequence
  Synthetic oligonucleotide
tgcgtgctagatgtaggagtccgtctgacg

SEQ ID NO: 236904 - DNA, 30 bp, Artificial Sequence
  Synthetic oligonucleotide
tggaagtgacgatccactgcgcgtctgacg

SEQ ID NO: 236905 - DNA, 30 bp, Artificial Sequence
  Synthetic oligonucleotide
aggcgcggacatgacacaggttttctgacg

SEQ ID NO: 236906 - DNA, 30 bp, Artificial Sequence
  Synthetic oligonucleotide
cgaaaggtgcgtatgtcaggggaagtgacg

SEQ ID NO: 236907 - DNA, 30 bp, Artificial Sequence
  Synthetic oligonucleotide
gttaaaggtgggaacagccccttagtgacg

SEQ ID NO: 236908 - DNA, 30 bp, Artificial Sequence
  Synthetic oligonucleotide
ggccagaccacctgcaaaatatctgtgacg

SEQ ID NO: 236909 - DNA, 30 bp, Artificial Sequence
  Synthetic oligonucleotide
atgtcgcgaaattactttttcgcattgacg

SEQ ID NO: 236910 - DNA, 30 bp, Artificial Sequence
  Synthetic oligonucleotide
caccacatgatagcaccgacttcattgacg

SEQ ID NO: 236911 - DNA, 30 bp, Artificial Sequence
  Synthetic oligonucleotide
gagccaggttatgtatgagggaacttgacg

SEQ ID NO: 236912 - DNA, 30 bp, Artificial Sequence
  Synthetic oligonucleotide
gactgaagtccagaggatggccgtttgacg

SEQ ID NO: 236913 - DNA, 30 bp, Artificial Sequence
  Synthetic oligonucleotide
gcacgcctgcgaaaagccgggataaatacg

SEQ ID NO: 236914 - DNA, 30 bp, Artificial Sequence
  Synthetic oligonucleotide
aagtcttacataacagaggatataaatacg

SEQ ID NO: 236915 - DNA, 30 bp, Artificial Sequence
  Synthetic oligonucleotide
gggcagaggtcaatgcctagtcacaatacg

SEQ ID NO: 236916 - DNA, 30 bp, Artificial Sequence
  Synthetic oligonucleotide
agtttgtggataagacatgggtacaatacg

SEQ ID NO: 236917 - DNA, 30 bp, Artificial Sequence
  Synthetic oligonucleotide
gaacaaaatgaattttaggaaatcaatacg

SEQ ID NO: 236918 - DNA, 30 bp, Artificial Sequence
  Synthetic oligonucleotide
acgaatttaaagggctttagtcggaatacg

SEQ ID NO: 236919 - DNA, 30 bp, Artificial Sequence
  Synthetic oligonucleotide
cccaggtgtatcgaagaaagctataatacg

SEQ ID NO: 236920 - DNA, 30 bp, Artificial Sequence
  Synthetic oligonucleotide
aaaagaggaagtcagcgttccactaatacg

SEQ ID NO: 236921 - DNA, 30 bp, Artificial Sequence
  Synthetic oligonucleotide
aaccgcatgccagctccttcacctaatacg

SEQ ID NO: 236922 - DNA, 30 bp, Artificial Sequence
  Synthetic oligonucleotide
tgacacattggtccgttcaaatgtaatacg

SEQ ID NO: 236923 - DNA, 30 bp, Artificial Sequence
  Synthetic oligonucleotide
gtgcttttcgagcgttcagtcattaatacg

SEQ ID NO: 236924 - DNA, 30 bp, Artificial Sequence
  Synthetic oligonucleotide
tgatgtctaggggcctaagatcttaatacg

SEQ ID NO: 236925 - DNA, 30 bp, Artificial Sequence
  Synthetic oligonucleotide
taacctacgatcgggcgtgagtttaatacg

SEQ ID NO: 236926 - DNA, 30 bp, Artificial Sequence
  Synthetic oligonucleotide
caatgtccatgtggggccgcttgacatacg

SEQ ID NO: 236927 - DNA, 30 bp, Artificial Sequence
  Synthetic oligonucleotide
cgcgtcgctggtttttgggtggggcatacg

SEQ ID NO: 236928 - DNA, 30 bp, Artificial Sequence
  Synthetic oligonucleotide
taaaacaaaataatttgacgcctgcatacg

SEQ ID NO: 236929 - DNA, 30 bp, Artificial Sequence
  Synthetic oligonucleotide
actaggctatccattacttcagtgcatacg

SEQ ID NO: 236930 - DNA, 30 bp, Artificial Sequence
  Synthetic oligonucleotide
ggaataacccattaaaaatagactcatacg

SEQ ID NO: 236931 - DNA, 30 bp, Artificial Sequence
  Synthetic oligonucleotide
agcagctattgcgttaaggggaaagatacg

SEQ ID NO: 236932 - DNA, 30 bp, Artificial Sequence
  Synthetic oligonucleotide
ctattcctcggtgtgtttcaagacgatacg

SEQ ID NO: 236933 - DNA, 30 bp, Artificial Sequence
  Synthetic oligonucleotide
acgcgggccacagggaaaccccgtgatacg

SEQ ID NO: 236934 - DNA, 30 bp, Artificial Sequence
  Synthetic oligonucleotide
tctattacgcgacttcgagtctgatatacg

SEQ ID NO: 236935 - DNA, 30 bp, Artificial Sequence
  Synthetic oligonucleotide
gctatcgcctccaaggtgtgatcctatacg

SEQ ID NO: 236936 - DNA, 30 bp, Artificial Sequence
  Synthetic oligonucleotide
tctattatcgaatgggatcgcccgtatacg

SEQ ID NO: 236937 - DNA, 30 bp, Artificial Sequence
  Synthetic oligonucleotide
agcttaaagtcgctgttggcagcgtatacg

SEQ ID NO: 236938 - DNA, 30 bp, Artificial Sequence
  Synthetic oligonucleotide
agttagagcacttcgtctatacggtatacg

SEQ ID NO: 236939 - DNA, 30 bp, Artificial Sequence
  Synthetic oligonucleotide
caccagtaatctctcccttgccaaactacg

SEQ ID NO: 236940 - DNA, 30 bp, Artificial Sequence
  Synthetic oligonucleotide
ctgctaacgcagaagctaacagacactacg

SEQ ID NO: 236941 - DNA, 30 bp, Artificial Sequence
  Synthetic oligonucleotide
aacagcgtcgcgttagcgcccacgactacg

SEQ ID NO: 236942 - DNA, 30 bp, Artificial Sequence
  Synthetic oligonucleotide
ggccaggggttgatgtgtcgggggactacg

SEQ ID NO: 236943 - DNA, 30 bp, Artificial Sequence
  Synthetic oligonucleotide
gagaaggttttctgcaccgatcatactacg

SEQ ID NO: 236944 - DNA, 30 bp, Artificial Sequence
  Synthetic oligonucleotide
ggggcgtgggcggttcgtagtagtactacg

SEQ ID NO: 236945 - DNA, 30 bp, Artificial Sequence
  Synthetic oligonucleotide
aaggatgccccgtaaggtttgtcacctacg

SEQ ID NO: 236946 - DNA, 30 bp, Artificial Sequence
  Synthetic oligonucleotide
acagtttgcactttgtttccattacctacg

SEQ ID NO: 236947 - DNA, 30 bp, Artificial Sequence
  Synthetic oligonucleotide
ccattgggaaaaacggcatacggccctacg

SEQ ID NO: 236948 - DNA, 30 bp, Artificial Sequence
  Synthetic oligonucleotide
ctcactctaacagaggcgagcccgcctacg

SEQ ID NO: 236949 - DNA, 30 bp, Artificial Sequence
  Synthetic oligonucleotide
ttggggccaagtgatataaaatgcgctacg

SEQ ID NO: 236950 - DNA, 30 bp, Artificial Sequence
  Synthetic oligonucleotide
agatcaaatttagaggctctggaggctacg

SEQ ID NO: 236951 - DNA, 29 bp, Artificial Sequence
  Synthetic oligonucleotide
cctgtcattggctactaagggcggctacg

SEQ ID NO: 236952 - DNA, 30 bp, Artificial Sequence
  Synthetic oligonucleotide
tggaatgatgcgaaaatggtactggctacg

SEQ ID NO: 236953 - DNA, 30 bp, Artificial Sequence
  Synthetic oligonucleotide
ctaagatatatgggtcaggcctttgctacg

SEQ ID NO: 236954 - DNA, 30 bp, Artificial Sequence
  Synthetic oligonucleotide
tgcttttcacagctaacaatacaatctacg

SEQ ID NO: 236955 - DNA, 30 bp, Artificial Sequence
  Synthetic oligonucleotide
aacatcgcagtctcgcggaatctctctacg

SEQ ID NO: 236956 - DNA, 30 bp, Artificial Sequence
  Synthetic oligonucleotide
aaccgcccagtgtagatgcttaggtctacg

SEQ ID NO: 236957 - DNA, 30 bp, Artificial Sequence
  Synthetic oligonucleotide
tgctccgttgggaatacatgtcggtctacg

SEQ ID NO: 236958 - DNA, 30 bp, Artificial Sequence
  Synthetic oligonucleotide
accacgtagactggggacaacgaaagtacg

SEQ ID NO: 236959 - DNA, 30 bp, Artificial Sequence
  Synthetic oligonucleotide
aaagaagctgaataaagcctccagagtacg

SEQ ID NO: 236960 - DNA, 30 bp, Artificial Sequence
  Synthetic oligonucleotide
tagaaaagccccgtgatgggacggagtacg

SEQ ID NO: 236961 - DNA, 30 bp, Artificial Sequence
  Synthetic oligonucleotide
gaccggtggttagagtgtggcaatagtacg

SEQ ID NO: 236962 - DNA, 30 bp, Artificial Sequence
  Synthetic oligonucleotide
gaagtcatgggcattataaaccttagtacg

SEQ ID NO: 236963 - DNA, 30 bp, Artificial Sequence
  Synthetic oligonucleotide
ggacggctttagccctgctcataacgtacg

SEQ ID NO: 236964 - DNA, 30 bp, Artificial Sequence
  Synthetic oligonucleotide
gaagttatacagcacggcacactacgtacg

SEQ ID NO: 236965 - DNA, 30 bp, Artificial Sequence
  Synthetic oligonucleotide
gtgcgtatgatttgcgtgagagcgcgtacg

SEQ ID NO: 236966 - DNA, 30 bp, Artificial Sequence
  Synthetic oligonucleotide
cgtaccaattcttgccgggaggcgcgtacg

SEQ ID NO: 236967 - DNA, 30 bp, Artificial Sequence
  Synthetic oligonucleotide
tatcgactatagtgaaatctggggcgtacg

SEQ ID NO: 236968 - DNA, 30 bp, Artificial Sequence
  Synthetic oligonucleotide
ccatcgggtagtagcccaagtgccggtacg

SEQ ID NO: 236969 - DNA, 30 bp, Artificial Sequence
  Synthetic oligonucleotide
ctgtgctaaagttcattgcacaggggtacg

SEQ ID NO: 236970 - DNA, 30 bp, Artificial Sequence
  Synthetic oligonucleotide
acgcaggccggaggggcttcgaatggtacg

SEQ ID NO: 236971 - DNA, 30 bp, Artificial Sequence
  Synthetic oligonucleotide
ccgaatcgtccacggtattggaatggtacg

SEQ ID NO: 236972 - DNA, 30 bp, Artificial Sequence
  Synthetic oligonucleotide
tgcatgtaaatgagatgcgggtctggtacg

SEQ ID NO: 236973 - DNA, 30 bp, Artificial Sequence
  Synthetic oligonucleotide
tcccgatcggattgccgtgaaattggtacg

SEQ ID NO: 236974 - DNA, 30 bp, Artificial Sequence
  Synthetic oligonucleotide
gagctgctgagctcttgaaaatttggtacg

SEQ ID NO: 236975 - DNA, 30 bp, Artificial Sequence
  Synthetic oligonucleotide
ttgtcggctcaagaccgggccgaatgtacg

SEQ ID NO: 236976 - DNA, 30 bp, Artificial Sequence
  Synthetic oligonucleotide
gcatagtaatttaagaagcatgcgtgtacg

SEQ ID NO: 236977 - DNA, 30 bp, Artificial Sequence
  Synthetic oligonucleotide
gtgggaaacttaacgactttgtggtgtacg

SEQ ID NO: 236978 - DNA, 30 bp, Artificial Sequence
  Synthetic oligonucleotide
ttctaacgacagcggactataatttgtacg

SEQ ID NO: 236979 - DNA, 30 bp, Artificial Sequence
  Synthetic oligonucleotide
aacggaacatggggacgactaataattacg

SEQ ID NO: 236980 - DNA, 30 bp, Artificial Sequence
  Synthetic oligonucleotide
ggataggacgctactcttatgctcattacg

SEQ ID NO: 236981 - DNA, 30 bp, Artificial Sequence
  Synthetic oligonucleotide
acatccgcgggaatcatgtcagcacttacg

SEQ ID NO: 236982 - DNA, 30 bp, Artificial Sequence
  Synthetic oligonucleotide
caccaaatttagattctcatggcacttacg

SEQ ID NO: 236983 - DNA, 30 bp, Artificial Sequence
  Synthetic oligonucleotide
atcgtgggtcgtcatacagcccaccttacg

SEQ ID NO: 236984 - DNA, 30 bp, Artificial Sequence
  Synthetic oligonucleotide
gcggggcacgcaaagaagttatagcttacg

SEQ ID NO: 236985 - DNA, 30 bp, Artificial Sequence
  Synthetic oligonucleotide
accggcggaagtagctacatatcagttacg

SEQ ID NO: 236986 - DNA, 30 bp, Artificial Sequence
  Synthetic oligonucleotide
gggggatgtcacctttgggggtgagttacg

SEQ ID NO: 236987 - DNA, 30 bp, Artificial Sequence
  Synthetic oligonucleotide
gtgtactggtgggacaaacaaaacgttacg

SEQ ID NO: 236988 - DNA, 30 bp, Artificial Sequence
  Synthetic oligonucleotide
atggggcggtcggtgcagtgggccgttacg

SEQ ID NO: 236989 - DNA, 30 bp, Artificial Sequence
  Synthetic oligonucleotide
tgcccaactagtagaaaaattaaggttacg

SEQ ID NO: 236990 - DNA, 30 bp, Artificial Sequence
  Synthetic oligonucleotide
ccaatgtcggttttttggcttacggttacg

SEQ ID NO: 236991 - DNA, 30 bp, Artificial Sequence
  Synthetic oligonucleotide
agggggcccatcaaagacactagggttacg

SEQ ID NO: 236992 - DNA, 30 bp, Artificial Sequence
  Synthetic oligonucleotide
atcacggaatactttatatggcgatttacg

SEQ ID NO: 236993 - DNA, 30 bp, Artificial Sequence
  Synthetic oligonucleotide
cttaggatctgactattaagccagtttacg

SEQ ID NO: 236994 - DNA, 30 bp, Artificial Sequence
  Synthetic oligonucleotide
acgtactgtgccaaaggtcactggtttacg

SEQ ID NO: 236995 - DNA, 30 bp, Artificial Sequence
  Synthetic oligonucleotide
ctggaaagttcgactggaccgcattttacg

SEQ ID NO: 236996 - DNA, 30 bp, Artificial Sequence
  Synthetic oligonucleotide
ggagtgcgccgactcgtagtctgttttacg

SEQ ID NO: 236997 - DNA, 30 bp, Artificial Sequence
  Synthetic oligonucleotide
gccctggaccgaatttcgcgtaccaaaccg

SEQ ID NO: 236998 - DNA, 30 bp, Artificial Sequence
  Synthetic oligonucleotide
ttagtggtgaggtgtttgaagccgaaaccg

SEQ ID NO: 236999 - DNA, 30 bp, Artificial Sequence
  Synthetic oligonucleotide
aaggtgattatattcaaagaccgtaaaccg

SEQ ID NO: 237000 - DNA, 30 bp, Artificial Sequence
  Synthetic oligonucleotide
tgtactagctctagaacataccaacaaccg

SEQ ID NO: 237001 - DNA, 30 bp, Artificial Sequence
  Synthetic oligonucleotide
ataggcagccgggagtaccgaaaccaaccg

SEQ ID NO: 237002 - DNA, 30 bp, Artificial Sequence
  Synthetic oligonucleotide
gaagttggtgaacacaggaaggggcaaccg

SEQ ID NO: 237003 - DNA, 30 bp, Artificial Sequence
  Synthetic oligonucleotide
ggaacgccagttggcgaatacggtcaaccg

SEQ ID NO: 237004 - DNA, 30 bp, Artificial Sequence
  Synthetic oligonucleotide
tacggagcgttttcaaatactgtagaaccg

SEQ ID NO: 237005 - DNA, 30 bp, Artificial Sequence
  Synthetic oligonucleotide
gcgcggctagctgatgcgtaaagcgaaccg

SEQ ID NO: 237006 - DNA, 30 bp, Artificial Sequence
  Synthetic oligonucleotide
tgtcgtcccatcggtccttggctggaaccg

SEQ ID NO: 237007 - DNA, 30 bp, Artificial Sequence
  Synthetic oligonucleotide
gaacctcgctcatgggacacatctgaaccg

SEQ ID NO: 237008 - DNA, 30 bp, Artificial Sequence
  Synthetic oligonucleotide
tcaagcttaatgggagctttcgttgaaccg

SEQ ID NO: 237009 - DNA, 30 bp, Artificial Sequence
  Synthetic oligonucleotide
acttgtcaatcggtaacgatagaataaccg

SEQ ID NO: 237010 - DNA, 30 bp, Artificial Sequence
  Synthetic oligonucleotide
ccttaaagcatgatcagtcccccataaccg

SEQ ID NO: 237011 - DNA, 30 bp, Artificial Sequence
  Synthetic oligonucleotide
tccttgtcctcaaggagcataggataaccg

SEQ ID NO: 237012 - DNA, 30 bp, Artificial Sequence
  Synthetic oligonucleotide
agcccaggtgacaggattgccgagtaaccg

SEQ ID NO: 237013 - DNA, 30 bp, Artificial Sequence
  Synthetic oligonucleotide
gttatattataacgttctactcggtaaccg

SEQ ID NO: 237014 - DNA, 30 bp, Artificial Sequence
  Synthetic oligonucleotide
aacagtcaccgcttcaaagacaattaaccg

SEQ ID NO: 237015 - DNA, 30 bp, Artificial Sequence
  Synthetic oligonucleotide
ataagttgtttcggactgaatacttaaccg

SEQ ID NO: 237016 - DNA, 30 bp, Artificial Sequence
  Synthetic oligonucleotide
ctgcatcgagtggactgacccttcacaccg

SEQ ID NO: 237017 - DNA, 30 bp, Artificial Sequence
  Synthetic oligonucleotide
tacttaatgtgagttatccattagacaccg

SEQ ID NO: 237018 - DNA, 30 bp, Artificial Sequence
  Synthetic oligonucleotide
aatgcttatgagcatactcctcggacaccg

SEQ ID NO: 237019 - DNA, 30 bp, Artificial Sequence
  Synthetic oligonucleotide
ctctctgtgacattcccacagcgtacaccg

SEQ ID NO: 237020 - DNA, 30 bp, Artificial Sequence
  Synthetic oligonucleotide
gggtgaccggttcatcatacaagaccaccg

SEQ ID NO: 237021 - DNA, 30 bp, Artificial Sequence
  Synthetic oligonucleotide
ctaggttggtacaagtcgggggagccaccg

SEQ ID NO: 237022 - DNA, 30 bp, Artificial Sequence
  Synthetic oligonucleotide
ggacggattcattccctcgggtcgccaccg

SEQ ID NO: 237023 - DNA, 30 bp, Artificial Sequence
  Synthetic oligonucleotide
tgaatcccgaaactaatgggttcgccaccg

SEQ ID NO: 237024 - DNA, 30 bp, Artificial Sequence
  Synthetic oligonucleotide
gctaaccccatgttgatttgcttgccaccg

SEQ ID NO: 237025 - DNA, 30 bp, Artificial Sequence
  Synthetic oligonucleotide
tgttcgatgcgaaaatttgcaggtccaccg

SEQ ID NO: 237026 - DNA, 30 bp, Artificial Sequence
  Synthetic oligonucleotide
ggtcgccctctatgggcaaagcaagcaccg

SEQ ID NO: 237027 - DNA, 30 bp, Artificial Sequence
  Synthetic oligonucleotide
ggctattgctgagaacttgctcaggcaccg

SEQ ID NO: 237028 - DNA, 30 bp, Artificial Sequence
  Synthetic oligonucleotide
tctaattatcgttcaaatcggcgatcaccg

SEQ ID NO: 237029 - DNA, 30 bp, Artificial Sequence
  Synthetic oligonucleotide
ctagtccgcacgccaaagctaggatcaccg

SEQ ID NO: 237030 - DNA, 30 bp, Artificial Sequence
  Synthetic oligonucleotide
tagagccgcgtcagtctatccgtctcaccg

SEQ ID NO: 237031 - DNA, 30 bp, Artificial Sequence
  Synthetic oligonucleotide
tcccactgtccggaagccaaagcgtcaccg

SEQ ID NO: 237032 - DNA, 30 bp, Artificial Sequence
  Synthetic oligonucleotide
tggccgctggtcctgagtgtaggttcaccg

SEQ ID NO: 237033 - DNA, 30 bp, Artificial Sequence
  Synthetic oligonucleotide
tgtgaatgctaacgccattaggaaagaccg

SEQ ID NO: 237034 - DNA, 30 bp, Artificial Sequence
  Synthetic oligonucleotide
tgttcctcttaattgagtccgtacagaccg

SEQ ID NO: 237035 - DNA, 30 bp, Artificial Sequence
  Synthetic oligonucleotide
catttgttgtccgcatagtttgagagaccg

SEQ ID NO: 237036 - DNA, 30 bp, Artificial Sequence
  Synthetic oligonucleotide
agtcgatatttcactataactattagaccg

SEQ ID NO: 237037 - DNA, 30 bp, Artificial Sequence
  Synthetic oligonucleotide
tactaaatagggcacggccgcgcccgaccg

SEQ ID NO: 237038 - DNA, 30 bp, Artificial Sequence
  Synthetic oligonucleotide
aacaatgcgcatgcttcgtggtcccgaccg

SEQ ID NO: 237039 - DNA, 30 bp, Artificial Sequence
  Synthetic oligonucleotide
ggttcaagttctcatcaagaggctcgaccg

SEQ ID NO: 237040 - DNA, 30 bp, Artificial Sequence
  Synthetic oligonucleotide
acttaatgggcgcgagaaggacgaggaccg

SEQ ID NO: 237041 - DNA, 30 bp, Artificial Sequence
  Synthetic oligonucleotide
gtgtccgcaagatcagcctacgtaggaccg

SEQ ID NO: 237042 - DNA, 30 bp, Artificial Sequence
  Synthetic oligonucleotide
aatacaaagagtgttaggtagttaggaccg

SEQ ID NO: 237043 - DNA, 30 bp, Artificial Sequence
  Synthetic oligonucleotide
gaaagcattatgtaagtaggctgcggaccg

SEQ ID NO: 237044 - DNA, 30 bp, Artificial Sequence
  Synthetic oligonucleotide
ctcatcactgctatccaaataaggggaccg

SEQ ID NO: 237045 - DNA, 30 bp, Artificial Sequence
  Synthetic oligonucleotide
agggctaagcgaacagtgcttttgggaccg

SEQ ID NO: 237046 - DNA, 30 bp, Artificial Sequence
  Synthetic oligonucleotide
ccaacagtttccttggtcagcttgtgaccg

SEQ ID NO: 237047 - DNA, 30 bp, Artificial Sequence
  Synthetic oligonucleotide
aagatacttctgggatgccagaattgaccg

SEQ ID NO: 237048 - DNA, 30 bp, Artificial Sequence
  Synthetic oligonucleotide
ccttgcagagtattaactctactttgaccg

SEQ ID NO: 237049 - DNA, 30 bp, Artificial Sequence
  Synthetic oligonucleotide
tgcacggaaccaatgatcagagcaataccg

SEQ ID NO: 237050 - DNA, 30 bp, Artificial Sequence
  Synthetic oligonucleotide
catctcaggcacggccttgaattaataccg

SEQ ID NO: 237051 - DNA, 30 bp, Artificial Sequence
  Synthetic oligonucleotide
ttcccgttgtgccccgatgggttgataccg

SEQ ID NO: 237052 - DNA, 30 bp, Artificial Sequence
  Synthetic oligonucleotide
cggcgggtggttagggagacccctataccg

SEQ ID NO: 237053 - DNA, 30 bp, Artificial Sequence
  Synthetic oligonucleotide
acctacatacaacacgtgtctatactaccg

SEQ ID NO: 237054 - DNA, 30 bp, Artificial Sequence
  Synthetic oligonucleotide
acataaatgtggcacaacgcaaacctaccg

SEQ ID NO: 237055 - DNA, 30 bp, Artificial Sequence
  Synthetic oligonucleotide
ataacttggtgcatagacgaagtcctaccg

SEQ ID NO: 237056 - DNA, 30 bp, Artificial Sequence
  Synthetic oligonucleotide
aataggttattaataccgagaatgctaccg

SEQ ID NO: 237057 - DNA, 30 bp, Artificial Sequence
  Synthetic oligonucleotide
taacctaattagtactgctatgaagtaccg

SEQ ID NO: 237058 - DNA, 30 bp, Artificial Sequence
  Synthetic oligonucleotide
cggcccgtagaatcggccgacaacgtaccg

SEQ ID NO: 237059 - DNA, 30 bp, Artificial Sequence
  Synthetic oligonucleotide
acaatgcgctagccctcggcacgggtaccg

SEQ ID NO: 237060 - DNA, 30 bp, Artificial Sequence
  Synthetic oligonucleotide
ctagcagcagttgccaagtaggatgtaccg

SEQ ID NO: 237061 - DNA, 30 bp, Artificial Sequence
  Synthetic oligonucleotide
taactcaaccgttactcttagatattaccg

SEQ ID NO: 237062 - DNA, 30 bp, Artificial Sequence
  Synthetic oligonucleotide
aaaccgtttgctagcctccgctcgttaccg

SEQ ID NO: 237063 - DNA, 30 bp, Artificial Sequence
  Synthetic oligonucleotide
cagtattaaactcaaagactagttttaccg

SEQ ID NO: 237064 - DNA, 30 bp, Artificial Sequence
  Synthetic oligonucleotide
gacgggtccaaggggcccacgagaaacccg

SEQ ID NO: 237065 - DNA, 30 bp, Artificial Sequence
  Synthetic oligonucleotide
ccattttctcgggagtcattgtgaaacccg

SEQ ID NO: 237066 - DNA, 30 bp, Artificial Sequence
  Synthetic oligonucleotide
cgtgcatgttaaggaccgacttgaaacccg

SEQ ID NO: 237067 - DNA, 30 bp, Artificial Sequence
  Synthetic oligonucleotide
cagagatgaataccggatgatcccaacccg

SEQ ID NO: 237068 - DNA, 30 bp, Artificial Sequence
  Synthetic oligonucleotide
cttctgggacgcaacttaattatcaacccg

SEQ ID NO: 237069 - DNA, 30 bp, Artificial Sequence
  Synthetic oligonucleotide
gtgtagaatgctgtcctcgggcataacccg

SEQ ID NO: 237070 - DNA, 30 bp, Artificial Sequence
  Synthetic oligonucleotide
atttaagacagagtgctatcaattaacccg

SEQ ID NO: 237071 - DNA, 30 bp, Artificial Sequence
  Synthetic oligonucleotide
tccctaccagaaggtaaggactttaacccg

SEQ ID NO: 237072 - DNA, 30 bp, Artificial Sequence
  Synthetic oligonucleotide
gatagagtggtgatgacaccagaacacccg

SEQ ID NO: 237073 - DNA, 30 bp, Artificial Sequence
  Synthetic oligonucleotide
actggtaggtgagctatgagtagacacccg

SEQ ID NO: 237074 - DNA, 30 bp, Artificial Sequence
  Synthetic oligonucleotide
gcagagctgaccggtgcagggcgacacccg

SEQ ID NO: 237075 - DNA, 30 bp, Artificial Sequence
  Synthetic oligonucleotide
atatttcagttctatgagaaacaagacccg

SEQ ID NO: 237076 - DNA, 30 bp, Artificial Sequence
  Synthetic oligonucleotide
caagtctattaaagcgtgggcacggacccg

SEQ ID NO: 237077 - DNA, 30 bp, Artificial Sequence
  Synthetic oligonucleotide
ggtccgaagcatcggacaatgttatacccg

SEQ ID NO: 237078 - DNA, 30 bp, Artificial Sequence
  Synthetic oligonucleotide
aatgctcgacaaccgatgcgttagtacccg

SEQ ID NO: 237079 - DNA, 30 bp, Artificial Sequence
  Synthetic oligonucleotide
cctcagtaactgtgtactgccacgtacccg

SEQ ID NO: 237080 - DNA, 30 bp, Artificial Sequence
  Synthetic oligonucleotide
ccaccgacgggcatgcgtaatccgtacccg

SEQ ID NO: 237081 - DNA, 30 bp, Artificial Sequence
  Synthetic oligonucleotide
gcgcctagatttagacagatttattacccg

SEQ ID NO: 237082 - DNA, 30 bp, Artificial Sequence
  Synthetic oligonucleotide
gcgtgctatcaacctcggggacaaaccccg

SEQ ID NO: 237083 - DNA, 30 bp, Artificial Sequence
  Synthetic oligonucleotide
aaaggcatggttggctatcgaagtaccccg

SEQ ID NO: 237084 - DNA, 30 bp, Artificial Sequence
  Synthetic oligonucleotide
caggggcagggttcccaagaaattaccccg

SEQ ID NO: 237085 - DNA, 30 bp, Artificial Sequence
  Synthetic oligonucleotide
tcggagtttctgaattgcttgatacccccg

SEQ ID NO: 237086 - DNA, 30 bp, Artificial Sequence
  Synthetic oligonucleotide
tattggcaccaggttatcaccgtacccccg

SEQ ID NO: 237087 - DNA, 30 bp, Artificial Sequence
  Synthetic oligonucleotide
atcgcacagtgattcatggtatcccccccg

SEQ ID NO: 237088 - DNA, 30 bp, Artificial Sequence
  Synthetic oligonucleotide
gttttgaacgtttaggcgagtcccgccccg

SEQ ID NO: 237089 - DNA, 30 bp, Artificial Sequence
  Synthetic oligonucleotide
cgtactgcttgcgggttcactctggccccg

SEQ ID NO: 237090 - DNA, 30 bp, Artificial Sequence
  Synthetic oligonucleotide
gatgtgtccagagtcaaacaaaatgccccg

SEQ ID NO: 237091 - DNA, 30 bp, Artificial Sequence
  Synthetic oligonucleotide
ccaaaaggtcaacggaactttgaatccccg

SEQ ID NO: 237092 - DNA, 30 bp, Artificial Sequence
  Synthetic oligonucleotide
ggtgttcgagcgcagacctgagtctccccg

SEQ ID NO: 237093 - DNA, 30 bp, Artificial Sequence
  Synthetic oligonucleotide
tagagcacctgcgctactttcacgtccccg

SEQ ID NO: 237094 - DNA, 30 bp, Artificial Sequence
  Synthetic oligonucleotide
caatctgcttctgagcacgtaaggtccccg

SEQ ID NO: 237095 - DNA, 30 bp, Artificial Sequence
  Synthetic oligonucleotide
gaaacctaccgcgacgtttgcaaaagcccg

SEQ ID NO: 237096 - DNA, 30 bp, Artificial Sequence
  Synthetic oligonucleotide
gccgacggccctgtaacaaaggaaagcccg

SEQ ID NO: 237097 - DNA, 30 bp, Artificial Sequence
  Synthetic oligonucleotide
cagagtctgggagccagaagatcaagcccg

SEQ ID NO: 237098 - DNA, 30 bp, Artificial Sequence
  Synthetic oligonucleotide
cgtttgaacttgcaccgtagtggaagcccg

SEQ ID NO: 237099 - DNA, 30 bp, Artificial Sequence
  Synthetic oligonucleotide
gaggttcctaaatatacaaaaggcagcccg

SEQ ID NO: 237100 - DNA, 30 bp, Artificial Sequence
  Synthetic oligonucleotide
acaggtagcgtgtgaaatatgcagagcccg

SEQ ID NO: 237101 - DNA, 30 bp, Artificial Sequence
  Synthetic oligonucleotide
agatcgattcctagtcggagtaatagcccg

SEQ ID NO: 237102 - DNA, 30 bp, Artificial Sequence
  Synthetic oligonucleotide
gacccgtgatcagctcgaacaagtagcccg

SEQ ID NO: 237103 - DNA, 30 bp, Artificial Sequence
  Synthetic oligonucleotide
attgacggtcggattagcttaggtagcccg

SEQ ID NO: 237104 - DNA, 30 bp, Artificial Sequence
  Synthetic oligonucleotide
tggacgggtttgaacgccggtagccgcccg

SEQ ID NO: 237105 - DNA, 30 bp, Artificial Sequence
  Synthetic oligonucleotide
gtaacacgaccggtgagaatccgccgcccg

SEQ ID NO: 237106 - DNA, 30 bp, Artificial Sequence
  Synthetic oligonucleotide
gctgacccgtatggaactgtgctccgcccg

SEQ ID NO: 237107 - DNA, 30 bp, Artificial Sequence
  Synthetic oligonucleotide
gccgccgacgatgcgatataagagcgcccg

SEQ ID NO: 237108 - DNA, 30 bp, Artificial Sequence
  Synthetic oligonucleotide
ctccagatcgtatcataatatagtcgcccg

SEQ ID NO: 237109 - DNA, 30 bp, Artificial Sequence
  Synthetic oligonucleotide
attgcggttaaccggtgtaccgtaggcccg

SEQ ID NO: 237110 - DNA, 30 bp, Artificial Sequence
  Synthetic oligonucleotide
tacgcgccggtggacaatacgaccggcccg

SEQ ID NO: 237111 - DNA, 30 bp, Artificial Sequence
  Synthetic oligonucleotide
gagagaaccaagccccgtgcgggcggcccg

SEQ ID NO: 237112 - DNA, 30 bp, Artificial Sequence
  Synthetic oligonucleotide
ttccaccatgttccagacaagcggggcccg

SEQ ID NO: 237113 - DNA, 30 bp, Artificial Sequence
  Synthetic oligonucleotide
ccggcttaaaacattccccacttgggcccg

SEQ ID NO: 237114 - DNA, 30 bp, Artificial Sequence
  Synthetic oligonucleotide
attaggtggcgtaattataactatggcccg

SEQ ID NO: 237115 - DNA, 30 bp, Artificial Sequence
  Synthetic oligonucleotide
gccggaaatcggagttgggaatttggcccg

SEQ ID NO: 237116 - DNA, 30 bp, Artificial Sequence
  Synthetic oligonucleotide
ggctggataaaaacacttatccaatgcccg

SEQ ID NO: 237117 - DNA, 30 bp, Artificial Sequence
  Synthetic oligonucleotide
ccgtacacccgcttaccaacttaatgcccg

SEQ ID NO: 237118 - DNA, 30 bp, Artificial Sequence
  Synthetic oligonucleotide
aacaaagttcgctccaagcagatctgcccg

SEQ ID NO: 237119 - DNA, 30 bp, Artificial Sequence
  Synthetic oligonucleotide
aacatgaagcaactgcgcctccattgcccg

SEQ ID NO: 237120 - DNA, 31 bp, Artificial Sequence
  Synthetic oligonucleotide
gggtccctatcaatgaatagcgacttgcccg

SEQ ID NO: 237121 - DNA, 30 bp, Artificial Sequence
  Synthetic oligonucleotide
cgcgtaatgtttgcgctactcggttgcccg

SEQ ID NO: 237122 - DNA, 30 bp, Artificial Sequence
  Synthetic oligonucleotide
tattctggtcatattggcatatgttgcccg

SEQ ID NO: 237123 - DNA, 30 bp, Artificial Sequence
  Synthetic oligonucleotide
taaggtgcttttagagctaatatttgcccg

SEQ ID NO: 237124 - DNA, 30 bp, Artificial Sequence
  Synthetic oligonucleotide
cagctccgattacggtaatgtaacatcccg

SEQ ID NO: 237125 - DNA, 30 bp, Artificial Sequence
  Synthetic oligonucleotide
cgtgtatgttagtcttggaaccatatcccg

SEQ ID NO: 237126 - DNA, 30 bp, Artificial Sequence
  Synthetic oligonucleotide
accttgagggtgtctggttggaacctcccg

SEQ ID NO: 237127 - DNA, 30 bp, Artificial Sequence
  Synthetic oligonucleotide
atccagagacactcatgcttcatcctcccg

SEQ ID NO: 237128 - DNA, 30 bp, Artificial Sequence
  Synthetic oligonucleotide
cttcaagttcacgactaactcatgctcccg

SEQ ID NO: 237129 - DNA, 30 bp, Artificial Sequence
  Synthetic oligonucleotide
atattgaatccggcggtgacggccgtcccg

SEQ ID NO: 237130 - DNA, 30 bp, Artificial Sequence
  Synthetic oligonucleotide
ctcaagaagatgtccgcaaagttcgtcccg

SEQ ID NO: 237131 - DNA, 30 bp, Artificial Sequence
  Synthetic oligonucleotide
gaagacttgaaaaacctcgagcatgtcccg

SEQ ID NO: 237132 - DNA, 30 bp, Artificial Sequence
  Synthetic oligonucleotide
gatgtcataaactgcgcggatacattcccg

SEQ ID NO: 237133 - DNA, 30 bp, Artificial Sequence
  Synthetic oligonucleotide
atttgggcctcaatgagtctgggcttcccg

SEQ ID NO: 237134 - DNA, 30 bp, Artificial Sequence
  Synthetic oligonucleotide
ctagcgtcagcattcggccataaaaagccg

SEQ ID NO: 237135 - DNA, 30 bp, Artificial Sequence
  Synthetic oligonucleotide
ttgttcgagctatgctatatacgaaagccg

SEQ ID NO: 237136 - DNA, 30 bp, Artificial Sequence
  Synthetic oligonucleotide
tgtagtctgataatctcactgataaagccg

SEQ ID NO: 237137 - DNA, 30 bp, Artificial Sequence
  Synthetic oligonucleotide
atgaatgcaccagtccgtctaatccagccg

SEQ ID NO: 237138 - DNA, 30 bp, Artificial Sequence
  Synthetic oligonucleotide
ttaactagttatagcgactacgggcagccg

SEQ ID NO: 237139 - DNA, 30 bp, Artificial Sequence
  Synthetic oligonucleotide
caccaaaaggttggacggagttatcagccg

SEQ ID NO: 237140 - DNA, 30 bp, Artificial Sequence
  Synthetic oligonucleotide
ttcccactccttgaatattgcgaagagccg

SEQ ID NO: 237141 - DNA, 30 bp, Artificial Sequence
  Synthetic oligonucleotide
atactagtaggtaggcaaattcaatagccg

SEQ ID NO: 237142 - DNA, 30 bp, Artificial Sequence
  Synthetic oligonucleotide
tctgacaacagtcacgaatttttatagccg

SEQ ID NO: 237143 - DNA, 30 bp, Artificial Sequence
  Synthetic oligonucleotide
ggagccctccctcaggtccgccaaacgccg

SEQ ID NO: 237144 - DNA, 30 bp, Artificial Sequence
  Synthetic oligonucleotide
ggttagtcacaggcttgttgggcaacgccg

SEQ ID NO: 237145 - DNA, 30 bp, Artificial Sequence
  Synthetic oligonucleotide
tgttcatttgcctcaactgaatgcacgccg

SEQ ID NO: 237146 - DNA, 30 bp, Artificial Sequence
  Synthetic oligonucleotide
aattggtcagtaggctggggccggacgccg

SEQ ID NO: 237147 - DNA, 30 bp, Artificial Sequence
  Synthetic oligonucleotide
caaatagggagaagagcggcttggacgccg

SEQ ID NO: 237148 - DNA, 30 bp, Artificial Sequence
  Synthetic oligonucleotide
tctaccctgatagctgttactagaccgccg

SEQ ID NO: 237149 - DNA, 30 bp, Artificial Sequence
  Synthetic oligonucleotide
tcatatcttcggtcggaaatgggaccgccg

SEQ ID NO: 237150 - DNA, 30 bp, Artificial Sequence
  Synthetic oligonucleotide
tgaagcggtcttctcgcagctggaccgccg

SEQ ID NO: 237151 - DNA, 30 bp, Artificial Sequence
  Synthetic oligonucleotide
tggtaaaggacgagcattaggataccgccg

SEQ ID NO: 237152 - DNA, 30 bp, Artificial Sequence
  Synthetic oligonucleotide
tgctgggactgatgatatgagcccccgccg

SEQ ID NO: 237153 - DNA, 30 bp, Artificial Sequence
  Synthetic oligonucleotide
gcacttgggttacgtttcatcgccccgccg

SEQ ID NO: 237154 - DNA, 30 bp, Artificial Sequence
  Synthetic oligonucleotide
acccccagtctgtgcatgaatcgcccgccg

SEQ ID NO: 237155 - DNA, 30 bp, Artificial Sequence
  Synthetic oligonucleotide
ctggttgcacatcatttgtggcttccgccg

SEQ ID NO: 237156 - DNA, 30 bp, Artificial Sequence
  Synthetic oligonucleotide
ggtgggtttgtgccgatccatgtcgcgccg

SEQ ID NO: 237157 - DNA, 30 bp, Artificial Sequence
  Synthetic oligonucleotide
tgcgcactatcgtaatctgcttttgcgccg

SEQ ID NO: 237158 - DNA, 30 bp, Artificial Sequence
  Synthetic oligonucleotide
atgactggttatatagctagcagatcgccg

SEQ ID NO: 237159 - DNA, 30 bp, Artificial Sequence
  Synthetic oligonucleotide
gaattgaggtgaccaacgctgccgtcgccg

SEQ ID NO: 237160 - DNA, 30 bp, Artificial Sequence
  Synthetic oligonucleotide
ggtagcttgcatgaggttactatgtcgccg

SEQ ID NO: 237161 - DNA, 30 bp, Artificial Sequence
  Synthetic oligonucleotide
aatgcgacactgtaggattagtattcgccg

SEQ ID NO: 237162 - DNA, 30 bp, Artificial Sequence
  Synthetic oligonucleotide
gaacacgggatgttctctcgtgacaggccg

SEQ ID NO: 237163 - DNA, 30 bp, Artificial Sequence
  Synthetic oligonucleotide
atgccatggactccacgccgttcgaggccg

SEQ ID NO: 237164 - DNA, 30 bp, Artificial Sequence
  Synthetic oligonucleotide
agggtaagtcgttcaatcacgcaacggccg

SEQ ID NO: 237165 - DNA, 30 bp, Artificial Sequence
  Synthetic oligonucleotide
gaccttgcaaactaagaccagcaccggccg

SEQ ID NO: 237166 - DNA, 30 bp, Artificial Sequence
  Synthetic oligonucleotide
cgcaaacattttctgtttttcgaccggccg

SEQ ID NO: 237167 - DNA, 30 bp, Artificial Sequence
  Synthetic oligonucleotide
gaacacccgctcacagtccctggccggccg

SEQ ID NO: 237168 - DNA, 30 bp, Artificial Sequence
  Synthetic oligonucleotide
tagtgggtagtatgttctatgactcggccg

SEQ ID NO: 237169 - DNA, 30 bp, Artificial Sequence
  Synthetic oligonucleotide
aataatcaaaggaccaggatgtaagggccg

SEQ ID NO: 237170 - DNA, 30 bp, Artificial Sequence
  Synthetic oligonucleotide
caggttttagggggggcaattcgcgggccg

SEQ ID NO: 237171 - DNA, 30 bp, Artificial Sequence
  Synthetic oligonucleotide
gatatcaacagcgtaagccaacaggggccg

SEQ ID NO: 237172 - DNA, 30 bp, Artificial Sequence
  Synthetic oligonucleotide
cggtcttggtcatgttatcgtgcggggccg

SEQ ID NO: 237173 - DNA, 30 bp, Artificial Sequence
  Synthetic oligonucleotide
gtagacagagttcaaaaagacgaatggccg

SEQ ID NO: 237174 - DNA, 30 bp, Artificial Sequence
  Synthetic oligonucleotide
tcaagaactcagacgagtatgagctggccg

SEQ ID NO: 237175 - DNA, 30 bp, Artificial Sequence
  Synthetic oligonucleotide
tcaaacagcattcgtcagcatacgtggccg

SEQ ID NO: 237176 - DNA, 31 bp, Artificial Sequence
  Synthetic oligonucleotide
tagacgaatgaccgcacttacaatgtggccg

SEQ ID NO: 237177 - DNA, 30 bp, Artificial Sequence
  Synthetic oligonucleotide
ttgggtaataagcgtattgtgcattggccg

SEQ ID NO: 237178 - DNA, 30 bp, Artificial Sequence
  Synthetic oligonucleotide
cgggctgttaggggacatgcaaaaatgccg

SEQ ID NO: 237179 - DNA, 30 bp, Artificial Sequence
  Synthetic oligonucleotide
actaaaaacgactgatcagttacgatgccg

SEQ ID NO: 237180 - DNA, 30 bp, Artificial Sequence
  Synthetic oligonucleotide
cttgagatttgagaagggggtaggatgccg

SEQ ID NO: 237181 - DNA, 30 bp, Artificial Sequence
  Synthetic oligonucleotide
ttgcggcttatgagcgaataccgactgccg

SEQ ID NO: 237182 - DNA, 30 bp, Artificial Sequence
  Synthetic oligonucleotide
gcggtgctcctccaggagttgggactgccg

SEQ ID NO: 237183 - DNA, 30 bp, Artificial Sequence
  Synthetic oligonucleotide
tgtcaaaaataagcatctgtagtactgccg

SEQ ID NO: 237184 - DNA, 30 bp, Artificial Sequence
  Synthetic oligonucleotide
ggaaagtggatcatgaagctctacctgccg

SEQ ID NO: 237185 - DNA, 30 bp, Artificial Sequence
  Synthetic oligonucleotide
ttaaatctaaggatgccttaacccctgccg

SEQ ID NO: 237186 - DNA, 30 bp, Artificial Sequence
  Synthetic oligonucleotide
atccatccgaatgaagctttggccctgccg

SEQ ID NO: 237187 - DNA, 30 bp, Artificial Sequence
  Synthetic oligonucleotide
tccaagcctggtaagcactttagcctgccg

SEQ ID NO: 237188 - DNA, 29 bp, Artificial Sequence
  Synthetic oligonucleotide
tcagcgtccatgggaaaccccagctgccg

SEQ ID NO: 237189 - DNA, 30 bp, Artificial Sequence
  Synthetic oligonucleotide
ttggtgtgtacgggtacaggaactgtgccg

SEQ ID NO: 237190 - DNA, 30 bp, Artificial Sequence
  Synthetic oligonucleotide
gaaaggtaaggtatgatgcccgcattgccg

SEQ ID NO: 237191 - DNA, 30 bp, Artificial Sequence
  Synthetic oligonucleotide
cttatggcagccagtagtaaatcaaatccg

SEQ ID NO: 237192 - DNA, 30 bp, Artificial Sequence
  Synthetic oligonucleotide
ttgtaaaagggggctcgacaaagaaatccg

SEQ ID NO: 237193 - DNA, 30 bp, Artificial Sequence
  Synthetic oligonucleotide
ctggttcagtccatagccgagtgaaatccg

SEQ ID NO: 237194 - DNA, 30 bp, Artificial Sequence
  Synthetic oligonucleotide
gggcccccattcttcaaggacgtcaatccg

SEQ ID NO: 237195 - DNA, 30 bp, Artificial Sequence
  Synthetic oligonucleotide
ctgacaaggtgcatttacgctcgtaatccg

SEQ ID NO: 237196 - DNA, 30 bp, Artificial Sequence
  Synthetic oligonucleotide
cggccgcgaacatgggcccggttacatccg

SEQ ID NO: 237197 - DNA, 30 bp, Artificial Sequence
  Synthetic oligonucleotide
cgacaacctcctatatgaggatagcatccg

SEQ ID NO: 237198 - DNA, 30 bp, Artificial Sequence
  Synthetic oligonucleotide
tttatgcaaagagtccatgtaaggcatccg

SEQ ID NO: 237199 - DNA, 30 bp, Artificial Sequence
  Synthetic oligonucleotide
agccttgtgaatacacggtgctaggatccg

SEQ ID NO: 237200 - DNA, 30 bp, Artificial Sequence
  Synthetic oligonucleotide
tcaggcaagcagtccaacggggggtatccg

SEQ ID NO: 237201 - DNA, 30 bp, Artificial Sequence
  Synthetic oligonucleotide
aatgtctattgaccaagtcaacagactccg

SEQ ID NO: 237202 - DNA, 30 bp, Artificial Sequence
  Synthetic oligonucleotide
gtggcacgcaccgcaagaagatagactccg

SEQ ID NO: 237203 - DNA, 30 bp, Artificial Sequence
  Synthetic oligonucleotide
cctccagaaccttgggcactctagactccg

SEQ ID NO: 237204 - DNA, 30 bp, Artificial Sequence
  Synthetic oligonucleotide
gatttaaggtaggttaccgtctagactccg

SEQ ID NO: 237205 - DNA, 30 bp, Artificial Sequence
  Synthetic oligonucleotide
ctgtatgtagagttcacatcaaggactccg

SEQ ID NO: 237206 - DNA, 30 bp, Artificial Sequence
  Synthetic oligonucleotide
cagtagtattcactgtattcaaggactccg

SEQ ID NO: 237207 - DNA, 30 bp, Artificial Sequence
  Synthetic oligonucleotide
gcattgaggttaacattggtaactactccg

SEQ ID NO: 237208 - DNA, 30 bp, Artificial Sequence
  Synthetic oligonucleotide
tgcgtttaaaacacacagataatacctccg

SEQ ID NO: 237209 - DNA, 30 bp, Artificial Sequence
  Synthetic oligonucleotide
agcatagtctattggccgtgcacccctccg

SEQ ID NO: 237210 - DNA, 30 bp, Artificial Sequence
  Synthetic oligonucleotide
cctccacttctaccaactggaagtcctccg

SEQ ID NO: 237211 - DNA, 30 bp, Artificial Sequence
  Synthetic oligonucleotide
agctaaaaacggtcaggtggcggagctccg

SEQ ID NO: 237212 - DNA, 30 bp, Artificial Sequence
  Synthetic oligonucleotide
ccgtcgtggtttgaaagtcggagcgctccg

SEQ ID NO: 237213 - DNA, 30 bp, Artificial Sequence
  Synthetic oligonucleotide
accaaataccgagccaagcatctggctccg

SEQ ID NO: 237214 - DNA, 30 bp, Artificial Sequence
  Synthetic oligonucleotide
cctagggcttcttccctggttggtgctccg

SEQ ID NO: 237215 - DNA, 30 bp, Artificial Sequence
  Synthetic oligonucleotide
atgacgcgtttcgagcacgcgtaatctccg

SEQ ID NO: 237216 - DNA, 30 bp, Artificial Sequence
  Synthetic oligonucleotide
gattagaggtctatcgaaggtacttctccg

SEQ ID NO: 237217 - DNA, 30 bp, Artificial Sequence
  Synthetic oligonucleotide
ctcagcgctgcgtgatcggttccttctccg

SEQ ID NO: 237218 - DNA, 31 bp, Artificial Sequence
  Synthetic oligonucleotide
gcgagcaaaccgcgcgcaggtttaaagtccg

SEQ ID NO: 237219 - DNA, 30 bp, Artificial Sequence
  Synthetic oligonucleotide
taagaatgcggcaaggaaaggtccagtccg

SEQ ID NO: 237220 - DNA, 30 bp, Artificial Sequence
  Synthetic oligonucleotide
cagataaacgtctaaggctctcgacgtccg

SEQ ID NO: 237221 - DNA, 30 bp, Artificial Sequence
  Synthetic oligonucleotide
ttcgagacatacatcgaatatgagcgtccg

SEQ ID NO: 237222 - DNA, 30 bp, Artificial Sequence
  Synthetic oligonucleotide
tgatgctagcatacatcgctaatgcgtccg

SEQ ID NO: 237223 - DNA, 30 bp, Artificial Sequence
  Synthetic oligonucleotide
aagattgaatggtaggggttccctcgtccg

SEQ ID NO: 237224 - DNA, 30 bp, Artificial Sequence
  Synthetic oligonucleotide
cagccatcgggtctaaggtaagacggtccg

SEQ ID NO: 237225 - DNA, 30 bp, Artificial Sequence
  Synthetic oligonucleotide
aggaccaccttatggtatgacagcggtccg

SEQ ID NO: 237226 - DNA, 28 bp, Artificial Sequence
  Synthetic oligonucleotide
tacaaccagtctcaccggcacgggtccg

SEQ ID NO: 237227 - DNA, 30 bp, Artificial Sequence
  Synthetic oligonucleotide
gcgtactgcacggtaaacacagatggtccg

SEQ ID NO: 237228 - DNA, 30 bp, Artificial Sequence
  Synthetic oligonucleotide
gtatcttttagagttcgtactgctggtccg

SEQ ID NO: 237229 - DNA, 30 bp, Artificial Sequence
  Synthetic oligonucleotide
accagggcaaccggactagcacttggtccg

SEQ ID NO: 237230 - DNA, 31 bp, Artificial Sequence
  Synthetic oligonucleotide
atgcatgagtttcattagagcgcattgtccg

SEQ ID NO: 237231 - DNA, 30 bp, Artificial Sequence
  Synthetic oligonucleotide
tattgtgtgtggcgaatgctccaaattccg

SEQ ID NO: 237232 - DNA, 30 bp, Artificial Sequence
  Synthetic oligonucleotide
gtgttgactgtggcgagctactcaattccg

SEQ ID NO: 237233 - DNA, 30 bp, Artificial Sequence
  Synthetic oligonucleotide
tatggagcccgccatgaagcgataattccg

SEQ ID NO: 237234 - DNA, 30 bp, Artificial Sequence
  Synthetic oligonucleotide
cgggtactacatgcgatggtggtaattccg

SEQ ID NO: 237235 - DNA, 30 bp, Artificial Sequence
  Synthetic oligonucleotide
taaggtgcaactctcctgaggttaattccg

SEQ ID NO: 237236 - DNA, 30 bp, Artificial Sequence
  Synthetic oligonucleotide
aaacatttaagctagacacaaggcattccg

SEQ ID NO: 237237 - DNA, 31 bp, Artificial Sequence
  Synthetic oligonucleotide
aatcacagggccacaggcccatgatattccg

SEQ ID NO: 237238 - DNA, 30 bp, Artificial Sequence
  Synthetic oligonucleotide
aatggtgggtcccaaccgaagactattccg

SEQ ID NO: 237239 - DNA, 30 bp, Artificial Sequence
  Synthetic oligonucleotide
tcgcggaatgatgatcgacgagctattccg

SEQ ID NO: 237240 - DNA, 30 bp, Artificial Sequence
  Synthetic oligonucleotide
ttcaaggctaaagcgtggtcgcccgttccg

SEQ ID NO: 237241 - DNA, 30 bp, Artificial Sequence
  Synthetic oligonucleotide
taaacaagcaccttcattttactcgttccg

SEQ ID NO: 237242 - DNA, 30 bp, Artificial Sequence
  Synthetic oligonucleotide
ctagggacgtactgatctgttggtgttccg

SEQ ID NO: 237243 - DNA, 30 bp, Artificial Sequence
  Synthetic oligonucleotide
ctggcttcaattcaagtcgtcgaatttccg

SEQ ID NO: 237244 - DNA, 30 bp, Artificial Sequence
  Synthetic oligonucleotide
aagggtcatgacggatagaaagtctttccg

SEQ ID NO: 237245 - DNA, 30 bp, Artificial Sequence
  Synthetic oligonucleotide
gtggtcgtttttatatatactacgtttccg

SEQ ID NO: 237246 - DNA, 30 bp, Artificial Sequence
  Synthetic oligonucleotide
gtgcgaatgtttacaggtaacgaaaaagcg

SEQ ID NO: 237247 - DNA, 30 bp, Artificial Sequence
  Synthetic oligonucleotide
cggaatatgtctaattagcgttcaaaagcg

SEQ ID NO: 237248 - DNA, 30 bp, Artificial Sequence
  Synthetic oligonucleotide
agggtatttcatccggatcgcagaaaagcg

SEQ ID NO: 237249 - DNA, 30 bp, Artificial Sequence
  Synthetic oligonucleotide
agcacacatcgtgggaatatcttaaaagcg

SEQ ID NO: 237250 - DNA, 30 bp, Artificial Sequence
  Synthetic oligonucleotide
cgccaaaaaaccacctggccagacaaagcg

SEQ ID NO: 237251 - DNA, 30 bp, Artificial Sequence
  Synthetic oligonucleotide
ggcaatagctcacggtgaggcaccaaagcg

SEQ ID NO: 237252 - DNA, 30 bp, Artificial Sequence
  Synthetic oligonucleotide
gacaaatctagggcagccatacgcaaagcg

SEQ ID NO: 237253 - DNA, 30 bp, Artificial Sequence
  Synthetic oligonucleotide
aagtaagggtcggtccctctatgtaaagcg

SEQ ID NO: 237254 - DNA, 30 bp, Artificial Sequence
  Synthetic oligonucleotide
tcgctgcgttgattacataggtttaaagcg

SEQ ID NO: 237255 - DNA, 30 bp, Artificial Sequence
  Synthetic oligonucleotide
ctcagcgatggtctaaacgcaaatcaagcg

SEQ ID NO: 237256 - DNA, 30 bp, Artificial Sequence
  Synthetic oligonucleotide
gatcgagtgaggagtcacagtcatcaagcg

SEQ ID NO: 237257 - DNA, 30 bp, Artificial Sequence
  Synthetic oligonucleotide
tagaatgaccctccgtcctacagtcaagcg

SEQ ID NO: 237258 - DNA, 30 bp, Artificial Sequence
  Synthetic oligonucleotide
atgtaataccgtcctccactcaacgaagcg

SEQ ID NO: 237259 - DNA, 30 bp, Artificial Sequence
  Synthetic oligonucleotide
cacctaacacttccggacgtgtcggaagcg

SEQ ID NO: 237260 - DNA, 30 bp, Artificial Sequence
  Synthetic oligonucleotide
attgcaagcaggggttccaggcatgaagcg

SEQ ID NO: 237261 - DNA, 30 bp, Artificial Sequence
  Synthetic oligonucleotide
gacggttcatcttcgattggaaaataagcg

SEQ ID NO: 237262 - DNA, 30 bp, Artificial Sequence
  Synthetic oligonucleotide
gaacgctgcaattgtattatgtgctaagcg

SEQ ID NO: 237263 - DNA, 30 bp, Artificial Sequence
  Synthetic oligonucleotide
gagggccaggcatagatgttatagtaagcg

SEQ ID NO: 237264 - DNA, 30 bp, Artificial Sequence
  Synthetic oligonucleotide
agaaaggctccggtccgttatgggtaagcg

SEQ ID NO: 237265 - DNA, 30 bp, Artificial Sequence
  Synthetic oligonucleotide
gtcatgcgttaagtacgtacaaattaagcg

SEQ ID NO: 237266 - DNA, 30 bp, Artificial Sequence
  Synthetic oligonucleotide
caaatacactattacagtgtcaattaagcg

SEQ ID NO: 237267 - DNA, 30 bp, Artificial Sequence
  Synthetic oligonucleotide
acctcagggaaagcccttagggcttaagcg

SEQ ID NO: 237268 - DNA, 30 bp, Artificial Sequence
  Synthetic oligonucleotide
agacgttttgaaagatattttgtaacagcg

SEQ ID NO: 237269 - DNA, 30 bp, Artificial Sequence
  Synthetic oligonucleotide
ggaacacgcaaccagggtctaccgacagcg

SEQ ID NO: 237270 - DNA, 30 bp, Artificial Sequence
  Synthetic oligonucleotide
gcactagggatgaatagagagaggacagcg

SEQ ID NO: 237271 - DNA, 30 bp, Artificial Sequence
  Synthetic oligonucleotide
atatagattctcaacgcatttgatccagcg

SEQ ID NO: 237272 - DNA, 30 bp, Artificial Sequence
  Synthetic oligonucleotide
gctgcgccgaactcctttcagactccagcg

SEQ ID NO: 237273 - DNA, 30 bp, Artificial Sequence
  Synthetic oligonucleotide
gtgttcttgtggaggacaaataatgcagcg

SEQ ID NO: 237274 - DNA, 30 bp, Artificial Sequence
  Synthetic oligonucleotide
taccggaaacacattacacccggtgcagcg

SEQ ID NO: 237275 - DNA, 30 bp, Artificial Sequence
  Synthetic oligonucleotide
ctgcacaactcgtccgtagcgtaatcagcg

SEQ ID NO: 237276 - DNA, 30 bp, Artificial Sequence
  Synthetic oligonucleotide
gccatttcataaactgcctctacatcagcg

SEQ ID NO: 237277 - DNA, 30 bp, Artificial Sequence
  Synthetic oligonucleotide
tgtagtgaacaagcattccggacgtcagcg

SEQ ID NO: 237278 - DNA, 30 bp, Artificial Sequence
  Synthetic oligonucleotide
tagcctcgcggagtgccatgacggtcagcg

SEQ ID NO: 237279 - DNA, 30 bp, Artificial Sequence
  Synthetic oligonucleotide
taaaggggtccatactttttttattcagcg

SEQ ID NO: 237280 - DNA, 30 bp, Artificial Sequence
  Synthetic oligonucleotide
tccggtaggcggctgtcggtttcttcagcg

SEQ ID NO: 237281 - DNA, 30 bp, Artificial Sequence
  Synthetic oligonucleotide
cgtaaatcgcaagcagtcgcttcgagagcg

SEQ ID NO: 237282 - DNA, 30 bp, Artificial Sequence
  Synthetic oligonucleotide
actgcagttctatgtatttttaggagagcg

SEQ ID NO: 237283 - DNA, 30 bp, Artificial Sequence
  Synthetic oligonucleotide
ggcgcgattgacagcttatacgatagagcg

SEQ ID NO: 237284 - DNA, 30 bp, Artificial Sequence
  Synthetic oligonucleotide
tccacgtcagcgataattggctcacgagcg

SEQ ID NO: 237285 - DNA, 30 bp, Artificial Sequence
  Synthetic oligonucleotide
aagccgcctcagcgcactatgggacgagcg

SEQ ID NO: 237286 - DNA, 30 bp, Artificial Sequence
  Synthetic oligonucleotide
ttacttaggacttggaaaatcaaccgagcg

SEQ ID NO: 237287 - DNA, 30 bp, Artificial Sequence
  Synthetic oligonucleotide
ggggccaaatcgttgagttttcagcgagcg

SEQ ID NO: 237288 - DNA, 30 bp, Artificial Sequence
  Synthetic oligonucleotide
ttgcgacttttggtacacggaggaggagcg

SEQ ID NO: 237289 - DNA, 30 bp, Artificial Sequence
  Synthetic oligonucleotide
gtcggcatggccccatgcatgcagggagcg

SEQ ID NO: 237290 - DNA, 30 bp, Artificial Sequence
  Synthetic oligonucleotide
gatggcaaggtttcgccagatacgggagcg

SEQ ID NO: 237291 - DNA, 30 bp, Artificial Sequence
  Synthetic oligonucleotide
caggttgttgcgctttgtacattgggagcg

SEQ ID NO: 237292 - DNA, 30 bp, Artificial Sequence
  Synthetic oligonucleotide
caggcaacacaatccgataaagttggagcg

SEQ ID NO: 237293 - DNA, 30 bp, Artificial Sequence
  Synthetic oligonucleotide
gcgcgctatgcggaagattcaggatgagcg

SEQ ID NO: 237294 - DNA, 30 bp, Artificial Sequence
  Synthetic oligonucleotide
ttaataatacacgggccgtataagtgagcg

SEQ ID NO: 237295 - DNA, 30 bp, Artificial Sequence
  Synthetic oligonucleotide
cacaaccacctgcaagcactctattgagcg

SEQ ID NO: 237296 - DNA, 30 bp, Artificial Sequence
  Synthetic oligonucleotide
cggttcgtccgaatccagtcctcttgagcg

SEQ ID NO: 237297 - DNA, 30 bp, Artificial Sequence
  Synthetic oligonucleotide
ccagctaggtcaaatgggaccgtttgagcg

SEQ ID NO: 237298 - DNA, 30 bp, Artificial Sequence
  Synthetic oligonucleotide
gttatggcgatcgcgttgaggtcaatagcg

SEQ ID NO: 237299 - DNA, 30 bp, Artificial Sequence
  Synthetic oligonucleotide
ataatgtaacacgttggttattcaatagcg

SEQ ID NO: 237300 - DNA, 30 bp, Artificial Sequence
  Synthetic oligonucleotide
tcccgacatgcgtacaaggggcaactagcg

SEQ ID NO: 237301 - DNA, 30 bp, Artificial Sequence
  Synthetic oligonucleotide
tctgcaatcatgcttaacatataactagcg

SEQ ID NO: 237302 - DNA, 30 bp, Artificial Sequence
  Synthetic oligonucleotide
tgtcttcgtcggtaaaatataatgctagcg

SEQ ID NO: 237303 - DNA, 30 bp, Artificial Sequence
  Synthetic oligonucleotide
tgctcgacagtgacgtctcagaatctagcg

SEQ ID NO: 237304 - DNA, 30 bp, Artificial Sequence
  Synthetic oligonucleotide
gccaccattacgttaattgcgtctctagcg

SEQ ID NO: 237305 - DNA, 30 bp, Artificial Sequence
  Synthetic oligonucleotide
gcgtgaggccctagccaaaacgtagtagcg

SEQ ID NO: 237306 - DNA, 30 bp, Artificial Sequence
  Synthetic oligonucleotide
gtagatctggggtatccatcgaaggtagcg

SEQ ID NO: 237307 - DNA, 30 bp, Artificial Sequence
  Synthetic oligonucleotide
taagcatgtcggacgcgcgtgtctgtagcg

SEQ ID NO: 237308 - DNA, 30 bp, Artificial Sequence
  Synthetic oligonucleotide
caacgagcacacgatacgaaatttgtagcg

SEQ ID NO: 237309 - DNA, 30 bp, Artificial Sequence
  Synthetic oligonucleotide
cccgtcagatacataacacgtcccttagcg

SEQ ID NO: 237310 - DNA, 30 bp, Artificial Sequence
  Synthetic oligonucleotide
atgcactaaggcattgacaggatcttagcg

SEQ ID NO: 237311 - DNA, 30 bp, Artificial Sequence
  Synthetic oligonucleotide
atgagtggcacgtctgtaccggcgttagcg

SEQ ID NO: 237312 - DNA, 30 bp, Artificial Sequence
  Synthetic oligonucleotide
ttaagacagattgatttcatctcgttagcg

SEQ ID NO: 237313 - DNA, 30 bp, Artificial Sequence
  Synthetic oligonucleotide
cttggtttgtagtgagcgccgtatttagcg

SEQ ID NO: 237314 - DNA, 30 bp, Artificial Sequence
  Synthetic oligonucleotide
ggggaaggaactcactgttcgggaaacgcg

SEQ ID NO: 237315 - DNA, 30 bp, Artificial Sequence
  Synthetic oligonucleotide
gatagaacattgcgaagagatagcaacgcg

SEQ ID NO: 237316 - DNA, 30 bp, Artificial Sequence
  Synthetic oligonucleotide
gtccagttcattatatggttagtgaacgcg

SEQ ID NO: 237317 - DNA, 30 bp, Artificial Sequence
  Synthetic oligonucleotide
aaccgagttgcctcgtgaggatataacgcg

SEQ ID NO: 237318 - DNA, 30 bp, Artificial Sequence
  Synthetic oligonucleotide
aggtaacggaggaatccgtaacgagacgcg

SEQ ID NO: 237319 - DNA, 30 bp, Artificial Sequence
  Synthetic oligonucleotide
cgtgacagtatgggcaattaagatgacgcg

SEQ ID NO: 237320 - DNA, 30 bp, Artificial Sequence
  Synthetic oligonucleotide
aaactgtcctccccaagaaagcaatacgcg

SEQ ID NO: 237321 - DNA, 30 bp, Artificial Sequence
  Synthetic oligonucleotide
agggaaaaaattaccggagtcccatacgcg

SEQ ID NO: 237322 - DNA, 30 bp, Artificial Sequence
  Synthetic oligonucleotide
tcggggaagtctttgcatggctcatacgcg

SEQ ID NO: 237323 - DNA, 31 bp, Artificial Sequence
  Synthetic oligonucleotide
tatgtgaatgtgcccgacattcctatacgcg

SEQ ID NO: 237324 - DNA, 30 bp, Artificial Sequence
  Synthetic oligonucleotide
atggagcaaccagatttactaaggtacgcg

SEQ ID NO: 237325 - DNA, 30 bp, Artificial Sequence
  Synthetic oligonucleotide
acagtcactttgcctgtgatctgttacgcg

SEQ ID NO: 237326 - DNA, 30 bp, Artificial Sequence
  Synthetic oligonucleotide
aggctgccccggtaaatagattaaaccgcg

SEQ ID NO: 237327 - DNA, 30 bp, Artificial Sequence
  Synthetic oligonucleotide
ggatctatcaagccagttttttctaccgcg

SEQ ID NO: 237328 - DNA, 30 bp, Artificial Sequence
  Synthetic oligonucleotide
acactaaaacgcctggcactggaccccgcg

SEQ ID NO: 237329 - DNA, 30 bp, Artificial Sequence
  Synthetic oligonucleotide
agcgtgaccgaaatgcacaggtaagccgcg

SEQ ID NO: 237330 - DNA, 30 bp, Artificial Sequence
  Synthetic oligonucleotide
tgctcagacccactacataacggcgccgcg

SEQ ID NO: 237331 - DNA, 30 bp, Artificial Sequence
  Synthetic oligonucleotide
cctgcgatcaggtgggaggggggggccgcg

SEQ ID NO: 237332 - DNA, 30 bp, Artificial Sequence
  Synthetic oligonucleotide
agtaagcttctccattctgcctgtgccgcg

SEQ ID NO: 237333 - DNA, 30 bp, Artificial Sequence
  Synthetic oligonucleotide
atatcacatacagttcaaaatctctccgcg

SEQ ID NO: 237334 - DNA, 30 bp, Artificial Sequence
  Synthetic oligonucleotide
tctagaggaacacggtaacacgggtccgcg

SEQ ID NO: 237335 - DNA, 30 bp, Artificial Sequence
  Synthetic oligonucleotide
tatttgtgcttatgacggtacgtgtccgcg

SEQ ID NO: 237336 - DNA, 30 bp, Artificial Sequence
  Synthetic oligonucleotide
cacactaatagaaactttacgggttccgcg

SEQ ID NO: 237337 - DNA, 30 bp, Artificial Sequence
  Synthetic oligonucleotide
ttagtaggataataatttgcgttcagcgcg

SEQ ID NO: 237338 - DNA, 30 bp, Artificial Sequence
  Synthetic oligonucleotide
agtgttcaaactcattagctcctgagcgcg

SEQ ID NO: 237339 - DNA, 30 bp, Artificial Sequence
  Synthetic oligonucleotide
taagaatgaggagagtatttttatagcgcg

SEQ ID NO: 237340 - DNA, 30 bp, Artificial Sequence
  Synthetic oligonucleotide
actagattcgcaagaacattctctagcgcg

SEQ ID NO: 237341 - DNA, 30 bp, Artificial Sequence
  Synthetic oligonucleotide
cgattattagcacaagtgtcaaaacgcgcg

SEQ ID NO: 237342 - DNA, 30 bp, Artificial Sequence
  Synthetic oligonucleotide
tgtacagaaattcagcctgattcacgcgcg

SEQ ID NO: 237343 - DNA, 30 bp, Artificial Sequence
  Synthetic oligonucleotide
ctggccatgtagcgaacgtccatccgcgcg

SEQ ID NO: 237344 - DNA, 30 bp, Artificial Sequence
  Synthetic oligonucleotide
ggcctcgccacgatgattattaagcgcgcg

SEQ ID NO: 237345 - DNA, 30 bp, Artificial Sequence
  Synthetic oligonucleotide
tttccggaaggatttcagatgtggcgcgcg

SEQ ID NO: 237346 - DNA, 30 bp, Artificial Sequence
  Synthetic oligonucleotide
aatcccgtgccaggttaaatgggaggcgcg

SEQ ID NO: 237347 - DNA, 30 bp, Artificial Sequence
  Synthetic oligonucleotide
agaaagctcccccacccactccgcggcgcg

SEQ ID NO: 237348 - DNA, 30 bp, Artificial Sequence
  Synthetic oligonucleotide
cctcgtagggactggaacaattagggcgcg

SEQ ID NO: 237349 - DNA, 30 bp, Artificial Sequence
  Synthetic oligonucleotide
atgaaggatatcaacgcagtagggggcgcg

SEQ ID NO: 237350 - DNA, 30 bp, Artificial Sequence
  Synthetic oligonucleotide
ttaggggaccgtaattactggtgtggcgcg

SEQ ID NO: 237351 - DNA, 30 bp, Artificial Sequence
  Synthetic oligonucleotide
atatgatatccgagagctctaagaatcgcg

SEQ ID NO: 237352 - DNA, 30 bp, Artificial Sequence
  Synthetic oligonucleotide
ccaggtatggcgaaaagtgtcgccatcgcg

SEQ ID NO: 237353 - DNA, 30 bp, Artificial Sequence
  Synthetic oligonucleotide
aaaacgactaagactcagactagcatcgcg

SEQ ID NO: 237354 - DNA, 30 bp, Artificial Sequence
  Synthetic oligonucleotide
tacatatgttagatgggattatcactcgcg

SEQ ID NO: 237355 - DNA, 30 bp, Artificial Sequence
  Synthetic oligonucleotide
caaccacctggatagccttttgtactcgcg

SEQ ID NO: 237356 - DNA, 30 bp, Artificial Sequence
  Synthetic oligonucleotide
agcccggagacctgcggagtcgagctcgcg

SEQ ID NO: 237357 - DNA, 30 bp, Artificial Sequence
  Synthetic oligonucleotide
taggcctggtagtggggtagcgatctcgcg

SEQ ID NO: 237358 - DNA, 30 bp, Artificial Sequence
  Synthetic oligonucleotide
ctcttcacataggtcgatggttacgtcgcg

SEQ ID NO: 237359 - DNA, 30 bp, Artificial Sequence
  Synthetic oligonucleotide
atagccgatgcggtacggccgggggtcgcg

SEQ ID NO: 237360 - DNA, 30 bp, Artificial Sequence
  Synthetic oligonucleotide
gacgaaacttttctagggacgaacttcgcg

SEQ ID NO: 237361 - DNA, 30 bp, Artificial Sequence
  Synthetic oligonucleotide
tctatctccccttggtgcaggttgttcgcg

SEQ ID NO: 237362 - DNA, 30 bp, Artificial Sequence
  Synthetic oligonucleotide
cagatgcgtacgggcacccaacgaaaggcg

SEQ ID NO: 237363 - DNA, 30 bp, Artificial Sequence
  Synthetic oligonucleotide
cacccaatccggaccgatcagtacaaggcg

SEQ ID NO: 237364 - DNA, 30 bp, Artificial Sequence
  Synthetic oligonucleotide
tcgcgggtcggcagatgccggaagaaggcg

SEQ ID NO: 237365 - DNA, 30 bp, Artificial Sequence
  Synthetic oligonucleotide
tatagaaagtcgtcgttcgtatggaaggcg

SEQ ID NO: 237366 - DNA, 30 bp, Artificial Sequence
  Synthetic oligonucleotide
tccagcgacgatcttgctagtcgtaaggcg

SEQ ID NO: 237367 - DNA, 30 bp, Artificial Sequence
  Synthetic oligonucleotide
tttgagggaacaggagcacaggaccaggcg

SEQ ID NO: 237368 - DNA, 30 bp, Artificial Sequence
  Synthetic oligonucleotide
gaccctcagaactaaaggataggccaggcg

SEQ ID NO: 237369 - DNA, 30 bp, Artificial Sequence
  Synthetic oligonucleotide
aagtctagaacattcgggaggcatcaggcg

SEQ ID NO: 237370 - DNA, 30 bp, Artificial Sequence
  Synthetic oligonucleotide
ttagtgaggacacttttttagacagaggcg

SEQ ID NO: 237371 - DNA, 30 bp, Artificial Sequence
  Synthetic oligonucleotide
gaaaccgcttcaggcgttaggcgagaggcg

SEQ ID NO: 237372 - DNA, 30 bp, Artificial Sequence
  Synthetic oligonucleotide
cacgtcaagttccagtataaacccgaggcg

SEQ ID NO: 237373 - DNA, 30 bp, Artificial Sequence
  Synthetic oligonucleotide
gataactaagaacgcaattggaaataggcg

SEQ ID NO: 237374 - DNA, 30 bp, Artificial Sequence
  Synthetic oligonucleotide
ggaggcggttcaacagagggccgataggcg

SEQ ID NO: 237375 - DNA, 30 bp, Artificial Sequence
  Synthetic oligonucleotide
ttctatgacgtttcttctcgagggtaggcg

SEQ ID NO: 237376 - DNA, 30 bp, Artificial Sequence
  Synthetic oligonucleotide
ttcatacagtctctctagggacattaggcg

SEQ ID NO: 237377 - DNA, 30 bp, Artificial Sequence
  Synthetic oligonucleotide
gttgtgtggatttctgtaagctgaacggcg

SEQ ID NO: 237378 - DNA, 30 bp, Artificial Sequence
  Synthetic oligonucleotide
gtttttcacctagattcccaggtaacggcg

SEQ ID NO: 237379 - DNA, 30 bp, Artificial Sequence
  Synthetic oligonucleotide
aagcacactgagagtcatccccagacggcg

SEQ ID NO: 237380 - DNA, 30 bp, Artificial Sequence
  Synthetic oligonucleotide
attgtcaaacgtcgatgtagggcgacggcg

SEQ ID NO: 237381 - DNA, 31 bp, Artificial Sequence
  Synthetic oligonucleotide
gatatggacagtccctcggaggactacggcg

SEQ ID NO: 237382 - DNA, 30 bp, Artificial Sequence
  Synthetic oligonucleotide
tgttgatacaacaaccgttctagtacggcg

SEQ ID NO: 237383 - DNA, 30 bp, Artificial Sequence
  Synthetic oligonucleotide
ggtcattatgttcggtgtggcccagcggcg

SEQ ID NO: 237384 - DNA, 30 bp, Artificial Sequence
  Synthetic oligonucleotide
accatagcgcaggagtacctgtgtgcggcg

SEQ ID NO: 237385 - DNA, 30 bp, Artificial Sequence
  Synthetic oligonucleotide
gagattgcgattaggaacatcgtatcggcg

SEQ ID NO: 237386 - DNA, 30 bp, Artificial Sequence
  Synthetic oligonucleotide
taaacgacgtccgtatactcggtatcggcg

SEQ ID NO: 237387 - DNA, 30 bp, Artificial Sequence
  Synthetic oligonucleotide
ggcaacgtcaagataagtgtagactcggcg

SEQ ID NO: 237388 - DNA, 30 bp, Artificial Sequence
  Synthetic oligonucleotide
catcacggctacaggggctttatctcggcg

SEQ ID NO: 237389 - DNA, 29 bp, Artificial Sequence
  Synthetic oligonucleotide
gtactgacggtctagatttctcgtcggcg

SEQ ID NO: 237390 - DNA, 30 bp, Artificial Sequence
  Synthetic oligonucleotide
atgtaaagatttatcctgcgaatgtcggcg

SEQ ID NO: 237391 - DNA, 30 bp, Artificial Sequence
  Synthetic oligonucleotide
catgtaatattgtcaggttatttgtcggcg

SEQ ID NO: 237392 - DNA, 30 bp, Artificial Sequence
  Synthetic oligonucleotide
gatctcaagtagaaagcgtggccaagggcg

SEQ ID NO: 237393 - DNA, 30 bp, Artificial Sequence
  Synthetic oligonucleotide
tttaacccggcaattgcgaaggtaagggcg

SEQ ID NO: 237394 - DNA, 30 bp, Artificial Sequence
  Synthetic oligonucleotide
gtatgggaaacacttgcaattgtcagggcg

SEQ ID NO: 237395 - DNA, 30 bp, Artificial Sequence
  Synthetic oligonucleotide
atcagttgtgatctgataacaggtagggcg

SEQ ID NO: 237396 - DNA, 30 bp, Artificial Sequence
  Synthetic oligonucleotide
gcagcggtaaaagtgaactactgtagggcg

SEQ ID NO: 237397 - DNA, 30 bp, Artificial Sequence
  Synthetic oligonucleotide
cccgggtaaggaatgagttgggaacgggcg

SEQ ID NO: 237398 - DNA, 30 bp, Artificial Sequence
  Synthetic oligonucleotide
attaatgaagatcactacgggtaccgggcg

SEQ ID NO: 237399 - DNA, 30 bp, Artificial Sequence
  Synthetic oligonucleotide
gtatgtagatgtccggtcagttaccgggcg

SEQ ID NO: 237400 - DNA, 30 bp, Artificial Sequence
  Synthetic oligonucleotide
cgagtcactagtgtagtatagtcgcgggcg

SEQ ID NO: 237401 - DNA, 30 bp, Artificial Sequence
  Synthetic oligonucleotide
tggtgtgcgctagggtttagtctgcgggcg

SEQ ID NO: 237402 - DNA, 30 bp, Artificial Sequence
  Synthetic oligonucleotide
ggcatcattccaagagggactgcaggggcg

SEQ ID NO: 237403 - DNA, 30 bp, Artificial Sequence
  Synthetic oligonucleotide
cgatactcggcgcacactcagagaggggcg

SEQ ID NO: 237404 - DNA, 30 bp, Artificial Sequence
  Synthetic oligonucleotide
cgtaggtggcattacttaggagacggggcg

SEQ ID NO: 237405 - DNA, 30 bp, Artificial Sequence
  Synthetic oligonucleotide
ctttaggagtttccccggcccctgggggcg

SEQ ID NO: 237406 - DNA, 30 bp, Artificial Sequence
  Synthetic oligonucleotide
catcctcgtttagagtggctgcgtggggcg

SEQ ID NO: 237407 - DNA, 30 bp, Artificial Sequence
  Synthetic oligonucleotide
ttgtccctacattttggttctcgtggggcg

SEQ ID NO: 237408 - DNA, 30 bp, Artificial Sequence
  Synthetic oligonucleotide
cattggggtggagtcccaggcctttgggcg

SEQ ID NO: 237409 - DNA, 30 bp, Artificial Sequence
  Synthetic oligonucleotide
gagggaatggaatggctatcggtttgggcg

SEQ ID NO: 237410 - DNA, 30 bp, Artificial Sequence
  Synthetic oligonucleotide
aaggccacacgctagcttagagacatggcg

SEQ ID NO: 237411 - DNA, 30 bp, Artificial Sequence
  Synthetic oligonucleotide
taatgtagtcatgtgtgtagagccatggcg

SEQ ID NO: 237412 - DNA, 30 bp, Artificial Sequence
  Synthetic oligonucleotide
acgtgcaagttttcttgcacgtcgatggcg

SEQ ID NO: 237413 - DNA, 30 bp, Artificial Sequence
  Synthetic oligonucleotide
tgacacttcctgacccgaactctcctggcg

SEQ ID NO: 237414 - DNA, 30 bp, Artificial Sequence
  Synthetic oligonucleotide
gcatcttcagcgaatgctgcccagctggcg

SEQ ID NO: 237415 - DNA, 30 bp, Artificial Sequence
  Synthetic oligonucleotide
tcccaatactgaaagaactttgatctggcg

SEQ ID NO: 237416 - DNA, 30 bp, Artificial Sequence
  Synthetic oligonucleotide
taaacactgcaaggaaaccgcagtctggcg

SEQ ID NO: 237417 - DNA, 30 bp, Artificial Sequence
  Synthetic oligonucleotide
acccggggcaccgtggaggttcgtctggcg

SEQ ID NO: 237418 - DNA, 30 bp, Artificial Sequence
  Synthetic oligonucleotide
ccagggatagaagaccgttcattggtggcg

SEQ ID NO: 237419 - DNA, 30 bp, Artificial Sequence
  Synthetic oligonucleotide
actggaaccgagggcctagcccccttggcg

SEQ ID NO: 237420 - DNA, 30 bp, Artificial Sequence
  Synthetic oligonucleotide
ccaccaatgtctcaccttagcatcttggcg

SEQ ID NO: 237421 - DNA, 30 bp, Artificial Sequence
  Synthetic oligonucleotide
acttgccatcgcccccaagagttcttggcg

SEQ ID NO: 237422 - DNA, 30 bp, Artificial Sequence
  Synthetic oligonucleotide
ccagtacaaaagccctccacgagaaatgcg

SEQ ID NO: 237423 - DNA, 30 bp, Artificial Sequence
  Synthetic oligonucleotide
ggatggcacctcatcctggttcacaatgcg

SEQ ID NO: 237424 - DNA, 30 bp, Artificial Sequence
  Synthetic oligonucleotide
gagcatagatttggttggctttccaatgcg

SEQ ID NO: 237425 - DNA, 30 bp, Artificial Sequence
  Synthetic oligonucleotide
gtaagtcaagacgcgcggttggtcaatgcg

SEQ ID NO: 237426 - DNA, 30 bp, Artificial Sequence
  Synthetic oligonucleotide
gttcgacacaaaggtgatttttagaatgcg

SEQ ID NO: 237427 - DNA, 30 bp, Artificial Sequence
  Synthetic oligonucleotide
gtcttgccgtctcggccggagttgaatgcg

SEQ ID NO: 237428 - DNA, 30 bp, Artificial Sequence
  Synthetic oligonucleotide
ggtgattgaattgtcacggtgaataatgcg

SEQ ID NO: 237429 - DNA, 30 bp, Artificial Sequence
  Synthetic oligonucleotide
attcgatgacagagttaccacgataatgcg

SEQ ID NO: 237430 - DNA, 30 bp, Artificial Sequence
  Synthetic oligonucleotide
acgggcctttaggtaaaccccaggcatgcg

SEQ ID NO: 237431 - DNA, 30 bp, Artificial Sequence
  Synthetic oligonucleotide
gtggagtctatggcaacttgcatagatgcg

SEQ ID NO: 237432 - DNA, 30 bp, Artificial Sequence
  Synthetic oligonucleotide
cggccgtaggtgacagcaggatcggatgcg

SEQ ID NO: 237433 - DNA, 30 bp, Artificial Sequence
  Synthetic oligonucleotide
agaagatacttgataatataccgggatgcg

SEQ ID NO: 237434 - DNA, 30 bp, Artificial Sequence
  Synthetic oligonucleotide
taaatgaggagacgtctatttattgatgcg

SEQ ID NO: 237435 - DNA, 30 bp, Artificial Sequence
  Synthetic oligonucleotide
ggcactcggggaacaagtgtagttgatgcg

SEQ ID NO: 237436 - DNA, 30 bp, Artificial Sequence
  Synthetic oligonucleotide
tgcactcttgtgatttgataataatatgcg

SEQ ID NO: 237437 - DNA, 30 bp, Artificial Sequence
  Synthetic oligonucleotide
gggatatacggtcagaaaggtctatatgcg

SEQ ID NO: 237438 - DNA, 30 bp, Artificial Sequence
  Synthetic oligonucleotide
cagattgcgaaatgtcctaggacctatgcg

SEQ ID NO: 237439 - DNA, 30 bp, Artificial Sequence
  Synthetic oligonucleotide
ccctatcgtcacatatactatccctatgcg

SEQ ID NO: 237440 - DNA, 30 bp, Artificial Sequence
  Synthetic oligonucleotide
tgtgcctagaaatggcaactacgctatgcg

SEQ ID NO: 237441 - DNA, 30 bp, Artificial Sequence
  Synthetic oligonucleotide
tcacggaaccagttagtcggctcttatgcg

SEQ ID NO: 237442 - DNA, 30 bp, Artificial Sequence
  Synthetic oligonucleotide
gaactccttaatcatgaactggtgactgcg

SEQ ID NO: 237443 - DNA, 30 bp, Artificial Sequence
  Synthetic oligonucleotide
tgttgagtttaaattgcagcctgtactgcg

SEQ ID NO: 237444 - DNA, 30 bp, Artificial Sequence
  Synthetic oligonucleotide
tacgttacttagaggggtgaataacctgcg

SEQ ID NO: 237445 - DNA, 30 bp, Artificial Sequence
  Synthetic oligonucleotide
tagtcttttagtactacacgggtccctgcg

SEQ ID NO: 237446 - DNA, 30 bp, Artificial Sequence
  Synthetic oligonucleotide
ctcgccaagggcgattaaatattccctgcg

SEQ ID NO: 237447 - DNA, 30 bp, Artificial Sequence
  Synthetic oligonucleotide
gtgaaattgggattaacgccctgtcctgcg

SEQ ID NO: 237448 - DNA, 30 bp, Artificial Sequence
  Synthetic oligonucleotide
gaggattcatagatagcacagagggctgcg

SEQ ID NO: 237449 - DNA, 30 bp, Artificial Sequence
  Synthetic oligonucleotide
ttggcgcactgacacgagtaggatgctgcg

SEQ ID NO: 237450 - DNA, 30 bp, Artificial Sequence
  Synthetic oligonucleotide
tggaccttgttagcctgacacgtatctgcg

SEQ ID NO: 237451 - DNA, 30 bp, Artificial Sequence
  Synthetic oligonucleotide
tttcacgggtaataaaagggggtatctgcg

SEQ ID NO: 237452 - DNA, 30 bp, Artificial Sequence
  Synthetic oligonucleotide
catgccctgactatcggggctaggtctgcg

SEQ ID NO: 237453 - DNA, 30 bp, Artificial Sequence
  Synthetic oligonucleotide
agtcggtgaattgtttcctgtctttctgcg

SEQ ID NO: 237454 - DNA, 30 bp, Artificial Sequence
  Synthetic oligonucleotide
gggatcactgacagattccaaggaagtgcg

SEQ ID NO: 237455 - DNA, 30 bp, Artificial Sequence
  Synthetic oligonucleotide
tacggcaacatcgccggtttggacagtgcg

SEQ ID NO: 237456 - DNA, 30 bp, Artificial Sequence
  Synthetic oligonucleotide
aaagacagtgaatgaagtcacatgagtgcg

SEQ ID NO: 237457 - DNA, 30 bp, Artificial Sequence
  Synthetic oligonucleotide
tgggtggttggggttgatttggtgagtgcg

SEQ ID NO: 237458 - DNA, 30 bp, Artificial Sequence
  Synthetic oligonucleotide
gtattaacgattccgactcgagtacgtgcg

SEQ ID NO: 237459 - DNA, 30 bp, Artificial Sequence
  Synthetic oligonucleotide
cgacgtaaggacagtttgcatgggcgtgcg

SEQ ID NO: 237460 - DNA, 30 bp, Artificial Sequence
  Synthetic oligonucleotide
tcgaaccaatgcaggaaattctctcgtgcg

SEQ ID NO: 237461 - DNA, 30 bp, Artificial Sequence
  Synthetic oligonucleotide
catgctaaaaccacggagtcctttcgtgcg

SEQ ID NO: 237462 - DNA, 30 bp, Artificial Sequence
  Synthetic oligonucleotide
gataaacggtttgatgataagaaaggtgcg

SEQ ID NO: 237463 - DNA, 30 bp, Artificial Sequence
  Synthetic oligonucleotide
tcgcaccgttgcagtgagctctaaggtgcg

SEQ ID NO: 237464 - DNA, 30 bp, Artificial Sequence
  Synthetic oligonucleotide
gggccctagctccaatgctgggggggtgcg

SEQ ID NO: 237465 - DNA, 30 bp, Artificial Sequence
  Synthetic oligonucleotide
tggtgtgattaggacgctgtacactgtgcg

SEQ ID NO: 237466 - DNA, 30 bp, Artificial Sequence
  Synthetic oligonucleotide
agtaggaacgtttgttgattccactgtgcg

SEQ ID NO: 237467 - DNA, 30 bp, Artificial Sequence
  Synthetic oligonucleotide
tacaatgagacaaccacatcactctgtgcg

SEQ ID NO: 237468 - DNA, 30 bp, Artificial Sequence
  Synthetic oligonucleotide
gtctgcaagggcatgcgcaggaattgtgcg

SEQ ID NO: 237469 - DNA, 30 bp, Artificial Sequence
  Synthetic oligonucleotide
aagaagggagatcagcgtcgtggttgtgcg

SEQ ID NO: 237470 - DNA, 30 bp, Artificial Sequence
  Synthetic oligonucleotide
tatgggtgtgagatacttggaatttgtgcg

SEQ ID NO: 237471 - DNA, 30 bp, Artificial Sequence
  Synthetic oligonucleotide
cgtatctgtatccggctgtaggaaattgcg

SEQ ID NO: 237472 - DNA, 30 bp, Artificial Sequence
  Synthetic oligonucleotide
agccactgagcaacaccatcggtaattgcg

SEQ ID NO: 237473 - DNA, 30 bp, Artificial Sequence
  Synthetic oligonucleotide
tggccgcaaaaccgggcgcccgagattgcg

SEQ ID NO: 237474 - DNA, 30 bp, Artificial Sequence
  Synthetic oligonucleotide
ctaggggacagagagcctagggagattgcg

SEQ ID NO: 237475 - DNA, 30 bp, Artificial Sequence
  Synthetic oligonucleotide
aaggcctcatgatagccttcgctgattgcg

SEQ ID NO: 237476 - DNA, 30 bp, Artificial Sequence
  Synthetic oligonucleotide
gtcgcgtataaagttctcgggaaacttgcg

SEQ ID NO: 237477 - DNA, 30 bp, Artificial Sequence
  Synthetic oligonucleotide
cgatatttaaacccctcattgacacttgcg

SEQ ID NO: 237478 - DNA, 30 bp, Artificial Sequence
  Synthetic oligonucleotide
ggataaataggaattcgaccgggacttgcg

SEQ ID NO: 237479 - DNA, 36 bp, Artificial Sequence
  Synthetic oligonucleotide
ttgcgcttttgtgtaggtttactcctctaccttgcg

SEQ ID NO: 237480 - DNA, 32 bp, Artificial Sequence
  Synthetic oligonucleotide
tttgttgtgtatgtttactcctctaccttgcg

SEQ ID NO: 237481 - DNA, 30 bp, Artificial Sequence
  Synthetic oligonucleotide
attcgtcccgcgtagcgacgggcgcttgcg

SEQ ID NO: 237482 - DNA, 30 bp, Artificial Sequence
  Synthetic oligonucleotide
gtaacagccccccctatcgtatatcttgcg

SEQ ID NO: 237483 - DNA, 30 bp, Artificial Sequence
  Synthetic oligonucleotide
accctatttgataaagagtcagctcttgcg

SEQ ID NO: 237484 - DNA, 30 bp, Artificial Sequence
  Synthetic oligonucleotide
aatatccaaacccagggaacacgggttgcg

SEQ ID NO: 237485 - DNA, 30 bp, Artificial Sequence
  Synthetic oligonucleotide
gtatcggaactctataaacagcatgttgcg

SEQ ID NO: 237486 - DNA, 30 bp, Artificial Sequence
  Synthetic oligonucleotide
aacctcggttggggaagtctcaagtttgcg

SEQ ID NO: 237487 - DNA, 30 bp, Artificial Sequence
  Synthetic oligonucleotide
tgagctactaaaccgtcgtcgaagtttgcg

SEQ ID NO: 237488 - DNA, 30 bp, Artificial Sequence
  Synthetic oligonucleotide
aaacaatcaagggacaccgtcgattttgcg

SEQ ID NO: 237489 - DNA, 30 bp, Artificial Sequence
  Synthetic oligonucleotide
cacggtaaaaggcttagataaagttttgcg

SEQ ID NO: 237490 - DNA, 30 bp, Artificial Sequence
  Synthetic oligonucleotide
taaccaccgtagcattcgggactaaaatcg

SEQ ID NO: 237491 - DNA, 30 bp, Artificial Sequence
  Synthetic oligonucleotide
gaactatttttgcttaaagagcgcaaatcg

SEQ ID NO: 237492 - DNA, 30 bp, Artificial Sequence
  Synthetic oligonucleotide
aatcgactagcgagacatgcgctcaaatcg

SEQ ID NO: 237493 - DNA, 30 bp, Artificial Sequence
  Synthetic oligonucleotide
actgtctgttggagcgggaattagaaatcg

SEQ ID NO: 237494 - DNA, 30 bp, Artificial Sequence
  Synthetic oligonucleotide
cgcatccggtgcagcattatgggtaaatcg

SEQ ID NO: 237495 - DNA, 30 bp, Artificial Sequence
  Synthetic oligonucleotide
tacgtcaagtgagcaatgggttttaaatcg

SEQ ID NO: 237496 - DNA, 30 bp, Artificial Sequence
  Synthetic oligonucleotide
tctatcaataaagctaaacggaaacaatcg

SEQ ID NO: 237497 - DNA, 30 bp, Artificial Sequence
  Synthetic oligonucleotide
agagaggcgcgacctggttagcaacaatcg

SEQ ID NO: 237498 - DNA, 30 bp, Artificial Sequence
  Synthetic oligonucleotide
cctatcgcctagcctacgggcccacaatcg

SEQ ID NO: 237499 - DNA, 30 bp, Artificial Sequence
  Synthetic oligonucleotide
gcattattctggtccagaggagcgcaatcg

SEQ ID NO: 237500 - DNA, 30 bp, Artificial Sequence
  Synthetic oligonucleotide
gggtagtaataattgccgttaggagaatcg

SEQ ID NO: 237501 - DNA, 30 bp, Artificial Sequence
  Synthetic oligonucleotide
tgcttaattacctatgtccgactagaatcg

SEQ ID NO: 237502 - DNA, 30 bp, Artificial Sequence
  Synthetic oligonucleotide
taccatctaaagacggccctgcccgaatcg

SEQ ID NO: 237503 - DNA, 30 bp, Artificial Sequence
  Synthetic oligonucleotide
gccaccaccgttggcacggccagcgaatcg

SEQ ID NO: 237504 - DNA, 30 bp, Artificial Sequence
  Synthetic oligonucleotide
cgcgtgcccgccagtatcggcctcgaatcg

SEQ ID NO: 237505 - DNA, 30 bp, Artificial Sequence
  Synthetic oligonucleotide
acaaggctgctatgttcaatgtactaatcg

SEQ ID NO: 237506 - DNA, 30 bp, Artificial Sequence
  Synthetic oligonucleotide
gtgatacaacatgcacctgcgtcctaatcg

SEQ ID NO: 237507 - DNA, 30 bp, Artificial Sequence
  Synthetic oligonucleotide
gcaattctgtccatcacacgggtctaatcg

SEQ ID NO: 237508 - DNA, 30 bp, Artificial Sequence
  Synthetic oligonucleotide
tatgcaggcaagttcacccggacttaatcg

SEQ ID NO: 237509 - DNA, 30 bp, Artificial Sequence
  Synthetic oligonucleotide
tttcaggccggacgctattttagttaatcg

SEQ ID NO: 237510 - DNA, 30 bp, Artificial Sequence
  Synthetic oligonucleotide
agggacggcgggcagggctaaatttaatcg

SEQ ID NO: 237511 - DNA, 30 bp, Artificial Sequence
  Synthetic oligonucleotide
agttaggcagtcacttcttcacgaacatcg

SEQ ID NO: 237512 - DNA, 30 bp, Artificial Sequence
  Synthetic oligonucleotide
gcttatgtctaggttttcttcgagacatcg

SEQ ID NO: 237513 - DNA, 30 bp, Artificial Sequence
  Synthetic oligonucleotide
agacaaccaaccactattgaggggacatcg

SEQ ID NO: 237514 - DNA, 30 bp, Artificial Sequence
  Synthetic oligonucleotide
ctgcacctgcatcagtagcttggtacatcg

SEQ ID NO: 237515 - DNA, 30 bp, Artificial Sequence
  Synthetic oligonucleotide
ccggacctgctacattgcacttgtacatcg

SEQ ID NO: 237516 - DNA, 30 bp, Artificial Sequence
  Synthetic oligonucleotide
ccatcagaggatccggccttgttaccatcg

SEQ ID NO: 237517 - DNA, 30 bp, Artificial Sequence
  Synthetic oligonucleotide
attatagctccataggcgaaagccccatcg

SEQ ID NO: 237518 - DNA, 30 bp, Artificial Sequence
  Synthetic oligonucleotide
gatccaccttggatcacgccacgcccatcg

SEQ ID NO: 237519 - DNA, 30 bp, Artificial Sequence
  Synthetic oligonucleotide
aacgaggactaataatctggaggcccatcg

SEQ ID NO: 237520 - DNA, 31 bp, Artificial Sequence
  Synthetic oligonucleotide
cacgtggtctgagcgcacgctgaggccatcg

SEQ ID NO: 237521 - DNA, 30 bp, Artificial Sequence
  Synthetic oligonucleotide
gatttctgaggcacggaacggcatccatcg

SEQ ID NO: 237522 - DNA, 30 bp, Artificial Sequence
  Synthetic oligonucleotide
gctcctgacgcaaggcaaatggatccatcg

SEQ ID NO: 237523 - DNA, 30 bp, Artificial Sequence
  Synthetic oligonucleotide
gtactgttcaagttccacaggcccgcatcg

SEQ ID NO: 237524 - DNA, 30 bp, Artificial Sequence
  Synthetic oligonucleotide
cacatacaagagggcggcgttccggcatcg

SEQ ID NO: 237525 - DNA, 30 bp, Artificial Sequence
  Synthetic oligonucleotide
agaatgaacattgaattcatcacatcatcg

SEQ ID NO: 237526 - DNA, 30 bp, Artificial Sequence
  Synthetic oligonucleotide
atatcgtttatacttgttcgtacctcatcg

SEQ ID NO: 237527 - DNA, 30 bp, Artificial Sequence
  Synthetic oligonucleotide
gatgacgatttccggagtgttaagtcatcg

SEQ ID NO: 237528 - DNA, 35 bp, Artificial Sequence
  Synthetic oligonucleotide
gacatatcttattaggaaatggcgtcgcgtcatcg

SEQ ID NO: 237529 - DNA, 30 bp, Artificial Sequence
  Synthetic oligonucleotide
tgtatggctctccatgaaccctggtcatcg

SEQ ID NO: 237530 - DNA, 30 bp, Artificial Sequence
  Synthetic oligonucleotide
tgtttatgaggggaaacttgttattcatcg

SEQ ID NO: 237531 - DNA, 30 bp, Artificial Sequence
  Synthetic oligonucleotide
ccagagtggagcgtgtaacgagcaagatcg

SEQ ID NO: 237532 - DNA, 30 bp, Artificial Sequence
  Synthetic oligonucleotide
ggacaagcaatggggttccacctaagatcg

SEQ ID NO: 237533 - DNA, 30 bp, Artificial Sequence
  Synthetic oligonucleotide
ctgatagacttgaacacaggagatagatcg

SEQ ID NO: 237534 - DNA, 30 bp, Artificial Sequence
  Synthetic oligonucleotide
tcaggtgatttaaaacctagtgttagatcg

SEQ ID NO: 237535 - DNA, 30 bp, Artificial Sequence
  Synthetic oligonucleotide
ccggtctcgtgtggatatcgtcgacgatcg

SEQ ID NO: 237536 - DNA, 30 bp, Artificial Sequence
  Synthetic oligonucleotide
gagctaattcataatacgcggcgccgatcg

SEQ ID NO: 237537 - DNA, 30 bp, Artificial Sequence
  Synthetic oligonucleotide
ctaatcgagttagttttccaggagcgatcg

SEQ ID NO: 237538 - DNA, 30 bp, Artificial Sequence
  Synthetic oligonucleotide
taaatgggctctgagcgaaaatctcgatcg

SEQ ID NO: 237539 - DNA, 30 bp, Artificial Sequence
  Synthetic oligonucleotide
cgccgtagcataaattatctaggtcgatcg

SEQ ID NO: 237540 - DNA, 30 bp, Artificial Sequence
  Synthetic oligonucleotide
tcccgacatagttaaaacaagtttcgatcg

SEQ ID NO: 237541 - DNA, 30 bp, Artificial Sequence
  Synthetic oligonucleotide
aaccgttgaattgattgtaccaacggatcg

SEQ ID NO: 237542 - DNA, 30 bp, Artificial Sequence
  Synthetic oligonucleotide
ttacaaaaagaaccacgcttaaagggatcg

SEQ ID NO: 237543 - DNA, 30 bp, Artificial Sequence
  Synthetic oligonucleotide
gcccatcttaacgtgtgggcgccgggatcg

SEQ ID NO: 237544 - DNA, 30 bp, Artificial Sequence
  Synthetic oligonucleotide
ttggtcgtcgcaccgtcttgtgtctgatcg

SEQ ID NO: 237545 - DNA, 30 bp, Artificial Sequence
  Synthetic oligonucleotide
aacaggttgccgcgtcgtaacttctgatcg

SEQ ID NO: 237546 - DNA, 30 bp, Artificial Sequence
  Synthetic oligonucleotide
ttagcgtctgcagctgagcctcaaatatcg

SEQ ID NO: 237547 - DNA, 30 bp, Artificial Sequence
  Synthetic oligonucleotide
ccgaccaccttcagtttttaataaatatcg

SEQ ID NO: 237548 - DNA, 30 bp, Artificial Sequence
  Synthetic oligonucleotide
cgtggatagggtggtggattgttaatatcg

SEQ ID NO: 237549 - DNA, 30 bp, Artificial Sequence
  Synthetic oligonucleotide
gtgtcgtaagcttgttttcccaacatatcg

SEQ ID NO: 237550 - DNA, 30 bp, Artificial Sequence
  Synthetic oligonucleotide
cgcgtatgaaataagactaggagcatatcg

SEQ ID NO: 237551 - DNA, 30 bp, Artificial Sequence
  Synthetic oligonucleotide
ccggataattaggtaatgactccgatatcg

SEQ ID NO: 237552 - DNA, 30 bp, Artificial Sequence
  Synthetic oligonucleotide
tctcacaggcctttcgggtctggtatatcg

SEQ ID NO: 237553 - DNA, 31 bp, Artificial Sequence
  Synthetic oligonucleotide
aacaatcggataaagtaagactcccctatcg

SEQ ID NO: 237554 - DNA, 30 bp, Artificial Sequence
  Synthetic oligonucleotide
gctggacgtatgccagtgggcgccctatcg

SEQ ID NO: 237555 - DNA, 30 bp, Artificial Sequence
  Synthetic oligonucleotide
catcagtacagcgtgtgtcgattcctatcg

SEQ ID NO: 237556 - DNA, 30 bp, Artificial Sequence
  Synthetic oligonucleotide
ttgacctctccccacgaaaactaagtatcg

SEQ ID NO: 237557 - DNA, 30 bp, Artificial Sequence
  Synthetic oligonucleotide
gccacggagggatcccgagatctagtatcg

SEQ ID NO: 237558 - DNA, 30 bp, Artificial Sequence
  Synthetic oligonucleotide
tgccatggttgggaaagcggcaaggtatcg

SEQ ID NO: 237559 - DNA, 30 bp, Artificial Sequence
  Synthetic oligonucleotide
ccttaaaggatagatagacctccggtatcg

SEQ ID NO: 237560 - DNA, 30 bp, Artificial Sequence
  Synthetic oligonucleotide
gactataaaactgcggggtagagggtatcg

SEQ ID NO: 237561 - DNA, 30 bp, Artificial Sequence
  Synthetic oligonucleotide
cgcacacggaaccctgaagtctcattatcg

SEQ ID NO: 237562 - DNA, 30 bp, Artificial Sequence
  Synthetic oligonucleotide
gagctcggtttgggagctcgggacttatcg

SEQ ID NO: 237563 - DNA, 30 bp, Artificial Sequence
  Synthetic oligonucleotide
acgcctgttctcggtttacttgtcttatcg

SEQ ID NO: 237564 - DNA, 30 bp, Artificial Sequence
  Synthetic oligonucleotide
ttcgttttaagtagcaaaatgcagttatcg

SEQ ID NO: 237565 - DNA, 30 bp, Artificial Sequence
  Synthetic oligonucleotide
gcctgagcgatggacggggacgatttatcg

SEQ ID NO: 237566 - DNA, 30 bp, Artificial Sequence
  Synthetic oligonucleotide
ggccgtatacacacgtcacggtgaaactcg

SEQ ID NO: 237567 - DNA, 30 bp, Artificial Sequence
  Synthetic oligonucleotide
gccaccctggtaaagccaaaacagaactcg

SEQ ID NO: 237568 - DNA, 30 bp, Artificial Sequence
  Synthetic oligonucleotide
cgagtaggcctactctatcctgggaactcg

SEQ ID NO: 237569 - DNA, 30 bp, Artificial Sequence
  Synthetic oligonucleotide
gatgtcgagtatatagcagcatttaactcg

SEQ ID NO: 237570 - DNA, 30 bp, Artificial Sequence
  Synthetic oligonucleotide
agttccacactatttcaatccgtccactcg

SEQ ID NO: 237571 - DNA, 30 bp, Artificial Sequence
  Synthetic oligonucleotide
aaaggaaacggatatgaaagcttccactcg

SEQ ID NO: 237572 - DNA, 30 bp, Artificial Sequence
  Synthetic oligonucleotide
gtgcgtaaccgatgaagtaaacatcactcg

SEQ ID NO: 237573 - DNA, 30 bp, Artificial Sequence
  Synthetic oligonucleotide
ctatcgagctcgggtttttctgccgactcg

SEQ ID NO: 237574 - DNA, 30 bp, Artificial Sequence
  Synthetic oligonucleotide
tctttctaacgggggagagcatttgactcg

SEQ ID NO: 237575 - DNA, 30 bp, Artificial Sequence
  Synthetic oligonucleotide
gtataatgtcgttctgagtaaagctactcg

SEQ ID NO: 237576 - DNA, 30 bp, Artificial Sequence
  Synthetic oligonucleotide
acatagattgaggatccctctcgttactcg

SEQ ID NO: 237577 - DNA, 30 bp, Artificial Sequence
  Synthetic oligonucleotide
tcctacattagagtttaaataagaacctcg

SEQ ID NO: 237578 - DNA, 30 bp, Artificial Sequence
  Synthetic oligonucleotide
cagccgaacatcgagttgacatggacctcg

SEQ ID NO: 237579 - DNA, 30 bp, Artificial Sequence
  Synthetic oligonucleotide
tggtataatctttgccaagcgtaaccctcg

SEQ ID NO: 237580 - DNA, 30 bp, Artificial Sequence
  Synthetic oligonucleotide
ggacctagctgacgtttagcctaatcctcg

SEQ ID NO: 237581 - DNA, 30 bp, Artificial Sequence
  Synthetic oligonucleotide
gcatactgcgctgtggtttggtcctcctcg

SEQ ID NO: 237582 - DNA, 30 bp, Artificial Sequence
  Synthetic oligonucleotide
acctcaaaatttttggcagttgggtcctcg

SEQ ID NO: 237583 - DNA, 30 bp, Artificial Sequence
  Synthetic oligonucleotide
ccacccaatatgtgtagtctctagagctcg

SEQ ID NO: 237584 - DNA, 30 bp, Artificial Sequence
  Synthetic oligonucleotide
ggcaggaagcaggcgttcccgggtagctcg

SEQ ID NO: 237585 - DNA, 30 bp, Artificial Sequence
  Synthetic oligonucleotide
acgcgcctaaattcggaactgatacgctcg

SEQ ID NO: 237586 - DNA, 30 bp, Artificial Sequence
  Synthetic oligonucleotide
tagtctgggcgttacgcagtattgcgctcg

SEQ ID NO: 237587 - DNA, 30 bp, Artificial Sequence
  Synthetic oligonucleotide
gcaccgctcgcacttcggcggagaggctcg

SEQ ID NO: 237588 - DNA, 30 bp, Artificial Sequence
  Synthetic oligonucleotide
gataaggacgattctgccttcggaggctcg

SEQ ID NO: 237589 - DNA, 30 bp, Artificial Sequence
  Synthetic oligonucleotide
ttcctgccttttatagcaacgggaggctcg

SEQ ID NO: 237590 - DNA, 30 bp, Artificial Sequence
  Synthetic oligonucleotide
agatatcaatggtggacacatctaggctcg

SEQ ID NO: 237591 - DNA, 30 bp, Artificial Sequence
  Synthetic oligonucleotide
aaagtgtttggtccattgaaacacggctcg

SEQ ID NO: 237592 - DNA, 30 bp, Artificial Sequence
  Synthetic oligonucleotide
tggccgtgctctatccattggtgcggctcg

SEQ ID NO: 237593 - DNA, 30 bp, Artificial Sequence
  Synthetic oligonucleotide
atgacccggccacatcagatggttggctcg

SEQ ID NO: 237594 - DNA, 30 bp, Artificial Sequence
  Synthetic oligonucleotide
ttgctatatcgggggtgcgatagctgctcg

SEQ ID NO: 237595 - DNA, 30 bp, Artificial Sequence
  Synthetic oligonucleotide
aaggatgtagcagattagaagaggtgctcg

SEQ ID NO: 237596 - DNA, 30 bp, Artificial Sequence
  Synthetic oligonucleotide
gatcaaggctgacctcgtcgagtgtgctcg

SEQ ID NO: 237597 - DNA, 30 bp, Artificial Sequence
  Synthetic oligonucleotide
gctcgcggtccggacctggaatattgctcg

SEQ ID NO: 237598 - DNA, 30 bp, Artificial Sequence
  Synthetic oligonucleotide
ttcgcaggtatacggaatatcacaatctcg

SEQ ID NO: 237599 - DNA, 30 bp, Artificial Sequence
  Synthetic oligonucleotide
ggcggataaactgatgagtttacaatctcg

SEQ ID NO: 237600 - DNA, 30 bp, Artificial Sequence
  Synthetic oligonucleotide
caccccgatgacttgagctgggcaatctcg

SEQ ID NO: 237601 - DNA, 30 bp, Artificial Sequence
  Synthetic oligonucleotide
aatgtggccaagcacctcatgtgaatctcg

SEQ ID NO: 237602 - DNA, 30 bp, Artificial Sequence
  Synthetic oligonucleotide
gagatcgaatctactcgccataagatctcg

SEQ ID NO: 237603 - DNA, 30 bp, Artificial Sequence
  Synthetic oligonucleotide
gaggtttgctctcagctatggagtatctcg

SEQ ID NO: 237604 - DNA, 30 bp, Artificial Sequence
  Synthetic oligonucleotide
gcattcaatcagcatccgacgaaactctcg

SEQ ID NO: 237605 - DNA, 30 bp, Artificial Sequence
  Synthetic oligonucleotide
attgaaaggagctagactgttagactctcg

SEQ ID NO: 237606 - DNA, 30 bp, Artificial Sequence
  Synthetic oligonucleotide
acgaatgatcgtttcacgcacatactctcg

SEQ ID NO: 237607 - DNA, 30 bp, Artificial Sequence
  Synthetic oligonucleotide
gtggtaacatgtccaactaaaagcctctcg

SEQ ID NO: 237608 - DNA, 30 bp, Artificial Sequence
  Synthetic oligonucleotide
gggatagtggcccttatccatctgctctcg

SEQ ID NO: 237609 - DNA, 30 bp, Artificial Sequence
  Synthetic oligonucleotide
tcgagggctttgcattagggtatagtctcg

SEQ ID NO: 237610 - DNA, 30 bp, Artificial Sequence
  Synthetic oligonucleotide
gttgacaagggtgatcttatgtaattctcg

SEQ ID NO: 237611 - DNA, 30 bp, Artificial Sequence
  Synthetic oligonucleotide
taaaagagccaggtaggagtaacattctcg

SEQ ID NO: 237612 - DNA, 30 bp, Artificial Sequence
  Synthetic oligonucleotide
taaggttatgggaggttcgactcattctcg

SEQ ID NO: 237613 - DNA, 30 bp, Artificial Sequence
  Synthetic oligonucleotide
taccctacggcaggttcgaccagattctcg

SEQ ID NO: 237614 - DNA, 30 bp, Artificial Sequence
  Synthetic oligonucleotide
cactcccattctgtttaccgggccttctcg

SEQ ID NO: 237615 - DNA, 30 bp, Artificial Sequence
  Synthetic oligonucleotide
ttaacctattgtagaggaattctgttctcg

SEQ ID NO: 237616 - DNA, 30 bp, Artificial Sequence
  Synthetic oligonucleotide
gtgacagctaccaatgagttagtaaagtcg

SEQ ID NO: 237617 - DNA, 30 bp, Artificial Sequence
  Synthetic oligonucleotide
acaaagaaaactagtggatggtataagtcg

SEQ ID NO: 237618 - DNA, 30 bp, Artificial Sequence
  Synthetic oligonucleotide
aaagagttgccggcaaccgtgactcagtcg

SEQ ID NO: 237619 - DNA, 30 bp, Artificial Sequence
  Synthetic oligonucleotide
aaactatactctagagacatgagtcagtcg

SEQ ID NO: 237620 - DNA, 30 bp, Artificial Sequence
  Synthetic oligonucleotide
ggtgtagatcagcttcttgcataagagtcg

SEQ ID NO: 237621 - DNA, 30 bp, Artificial Sequence
  Synthetic oligonucleotide
ttactgtatacgtaggaagggttagagtcg

SEQ ID NO: 237622 - DNA, 31 bp, Artificial Sequence
  Synthetic oligonucleotide
gggcgggcaggatggtcgtcgttccgagtcg

SEQ ID NO: 237623 - DNA, 30 bp, Artificial Sequence
  Synthetic oligonucleotide
gaatggttgagtgtggatgaagtggagtcg

SEQ ID NO: 237624 - DNA, 30 bp, Artificial Sequence
  Synthetic oligonucleotide
actaatcgacgattacgagcgtcatagtcg

SEQ ID NO: 237625 - DNA, 30 bp, Artificial Sequence
  Synthetic oligonucleotide
tttgtacccgttgtaggaaatagatagtcg

SEQ ID NO: 237626 - DNA, 30 bp, Artificial Sequence
  Synthetic oligonucleotide
aggtgcctgggattcccccctttatagtcg

SEQ ID NO: 237627 - DNA, 30 bp, Artificial Sequence
  Synthetic oligonucleotide
gcaaaatgtgtgtttaaagcatgctagtcg

SEQ ID NO: 237628 - DNA, 30 bp, Artificial Sequence
  Synthetic oligonucleotide
cgcctgaaacggcatattcaacgttagtcg

SEQ ID NO: 237629 - DNA, 30 bp, Artificial Sequence
  Synthetic oligonucleotide
tcaaaagattatactcgcaaagaaacgtcg

SEQ ID NO: 237630 - DNA, 30 bp, Artificial Sequence
  Synthetic oligonucleotide
cccggtgtgcctgcaccatgaaccacgtcg

SEQ ID NO: 237631 - DNA, 30 bp, Artificial Sequence
  Synthetic oligonucleotide
ctttcacaggttcttggctcaggcacgtcg

SEQ ID NO: 237632 - DNA, 30 bp, Artificial Sequence
  Synthetic oligonucleotide
cccgacattgactgaaaggtcacgacgtcg

SEQ ID NO: 237633 - DNA, 30 bp, Artificial Sequence
  Synthetic oligonucleotide
cttgctagtcttggtacgactaatacgtcg

SEQ ID NO: 237634 - DNA, 26 bp, Artificial Sequence
  Synthetic oligonucleotide
attcgccacagtacggtactacgtcg

SEQ ID NO: 237635 - DNA, 30 bp, Artificial Sequence
  Synthetic oligonucleotide
attcccaagcgtgatgccgtggctacgtcg

SEQ ID NO: 237636 - DNA, 30 bp, Artificial Sequence
  Synthetic oligonucleotide
attgcagtggtaacagcaccctttccgtcg

SEQ ID NO: 237637 - DNA, 30 bp, Artificial Sequence
  Synthetic oligonucleotide
gccggacagccgggatacacacaagcgtcg

SEQ ID NO: 237638 - DNA, 30 bp, Artificial Sequence
  Synthetic oligonucleotide
agtagggttaaacatcaccaattagcgtcg

SEQ ID NO: 237639 - DNA, 30 bp, Artificial Sequence
  Synthetic oligonucleotide
tagaagataacgtttgtagttaccgcgtcg

SEQ ID NO: 237640 - DNA, 30 bp, Artificial Sequence
  Synthetic oligonucleotide
gattttaaggtcttgagagcaatcgcgtcg

SEQ ID NO: 237641 - DNA, 30 bp, Artificial Sequence
  Synthetic oligonucleotide
ttatccagttcgatggggtctgtggcgtcg

SEQ ID NO: 237642 - DNA, 30 bp, Artificial Sequence
  Synthetic oligonucleotide
tagattgtagggctgaaggaggaaaggtcg

SEQ ID NO: 237643 - DNA, 30 bp, Artificial Sequence
  Synthetic oligonucleotide
acccagggtctaataatccccggaaggtcg

SEQ ID NO: 237644 - DNA, 30 bp, Artificial Sequence
  Synthetic oligonucleotide
aatggatgcgactgggacacggacaggtcg

SEQ ID NO: 237645 - DNA, 30 bp, Artificial Sequence
  Synthetic oligonucleotide
taaaagaaagcacgcaggggtttgaggtcg

SEQ ID NO: 237646 - DNA, 30 bp, Artificial Sequence
  Synthetic oligonucleotide
ctacattaacgtgcgctgccagataggtcg

SEQ ID NO: 237647 - DNA, 30 bp, Artificial Sequence
  Synthetic oligonucleotide
caggagtaagcaggcacaaccattaggtcg

SEQ ID NO: 237648 - DNA, 30 bp, Artificial Sequence
  Synthetic oligonucleotide
ccgatcgacagtcggtttatacgacggtcg

SEQ ID NO: 237649 - DNA, 30 bp, Artificial Sequence
  Synthetic oligonucleotide
tgtacatcttgttggaaagaagcgcggtcg

SEQ ID NO: 237650 - DNA, 30 bp, Artificial Sequence
  Synthetic oligonucleotide
ggacatacttatggcggctgaatgcggtcg

SEQ ID NO: 237651 - DNA, 30 bp, Artificial Sequence
  Synthetic oligonucleotide
tacaagctgttggcgacggctagtcggtcg

SEQ ID NO: 237652 - DNA, 30 bp, Artificial Sequence
  Synthetic oligonucleotide
acacattcctaatatggctctaaagggtcg

SEQ ID NO: 237653 - DNA, 30 bp, Artificial Sequence
  Synthetic oligonucleotide
attagatcatcgggctggcttagagggtcg

SEQ ID NO: 237654 - DNA, 30 bp, Artificial Sequence
  Synthetic oligonucleotide
aatgaccttgggattagtgaggtagggtcg

SEQ ID NO: 237655 - DNA, 30 bp, Artificial Sequence
  Synthetic oligonucleotide
ggttaatttacaagaaccacgcacgggtcg

SEQ ID NO: 237656 - DNA, 30 bp, Artificial Sequence
  Synthetic oligonucleotide
tgttagctcgctaaaccagttatcgggtcg

SEQ ID NO: 237657 - DNA, 30 bp, Artificial Sequence
  Synthetic oligonucleotide
gtcaatcatcgttatcaggatcagtggtcg

SEQ ID NO: 237658 - DNA, 30 bp, Artificial Sequence
  Synthetic oligonucleotide
gaggagcatagtcgcacaggaaggtggtcg

SEQ ID NO: 237659 - DNA, 30 bp, Artificial Sequence
  Synthetic oligonucleotide
agtcgtcaagaatactttctgccaatgtcg

SEQ ID NO: 237660 - DNA, 30 bp, Artificial Sequence
  Synthetic oligonucleotide
caccgttgctaaatggttcatagactgtcg

SEQ ID NO: 237661 - DNA, 30 bp, Artificial Sequence
  Synthetic oligonucleotide
cgaggtagacggcgaaataacggcctgtcg

SEQ ID NO: 237662 - DNA, 30 bp, Artificial Sequence
  Synthetic oligonucleotide
tgccagcctataccgtttcacggcctgtcg

SEQ ID NO: 237663 - DNA, 30 bp, Artificial Sequence
  Synthetic oligonucleotide
gatgcctaacgtgctaaggtatagctgtcg

SEQ ID NO: 237664 - DNA, 30 bp, Artificial Sequence
  Synthetic oligonucleotide
acgctttaaaggtttacatgttcgctgtcg

SEQ ID NO: 237665 - DNA, 30 bp, Artificial Sequence
  Synthetic oligonucleotide
aggacgtcctagaaccggcgcttgctgtcg

SEQ ID NO: 237666 - DNA, 30 bp, Artificial Sequence
  Synthetic oligonucleotide
gcaataagggccgatcagtgtttgctgtcg

SEQ ID NO: 237667 - DNA, 30 bp, Artificial Sequence
  Synthetic oligonucleotide
gcggcagatccgggcgctgtgtatctgtcg

SEQ ID NO: 237668 - DNA, 30 bp, Artificial Sequence
  Synthetic oligonucleotide
aatcgttacggaggatgttgataagtgtcg

SEQ ID NO: 237669 - DNA, 30 bp, Artificial Sequence
  Synthetic oligonucleotide
agatcggaacgccttaaaatttaagtgtcg

SEQ ID NO: 237670 - DNA, 30 bp, Artificial Sequence
  Synthetic oligonucleotide
ggtgatagatagttttagaaccgggtgtcg

SEQ ID NO: 237671 - DNA, 30 bp, Artificial Sequence
  Synthetic oligonucleotide
tataattttcgggcacggctccatgtgtcg

SEQ ID NO: 237672 - DNA, 30 bp, Artificial Sequence
  Synthetic oligonucleotide
gactagatgactacctaagatggtgtgtcg

SEQ ID NO: 237673 - DNA, 30 bp, Artificial Sequence
  Synthetic oligonucleotide
ataggggtttcccggtttaaattattgtcg

SEQ ID NO: 237674 - DNA, 30 bp, Artificial Sequence
  Synthetic oligonucleotide
gtcggtggagcagtcgttactgccttgtcg

SEQ ID NO: 237675 - DNA, 30 bp, Artificial Sequence
  Synthetic oligonucleotide
caaccacctcgccaagcgagcaagttgtcg

SEQ ID NO: 237676 - DNA, 30 bp, Artificial Sequence
  Synthetic oligonucleotide
aaaaaggttaaagtgagttgttgaaattcg

SEQ ID NO: 237677 - DNA, 30 bp, Artificial Sequence
  Synthetic oligonucleotide
gactcggatccatgtaggccggacaattcg

SEQ ID NO: 237678 - DNA, 30 bp, Artificial Sequence
  Synthetic oligonucleotide
cggatgtgtacggttgatgtatagaattcg

SEQ ID NO: 237679 - DNA, 30 bp, Artificial Sequence
  Synthetic oligonucleotide
cctccagattgctgcatgatagctaattcg

SEQ ID NO: 237680 - DNA, 30 bp, Artificial Sequence
  Synthetic oligonucleotide
gaattaaaccctcccgtcatgagacattcg

SEQ ID NO: 237681 - DNA, 30 bp, Artificial Sequence
  Synthetic oligonucleotide
tacgtgctcggaatgatatgctcccattcg

SEQ ID NO: 237682 - DNA, 30 bp, Artificial Sequence
  Synthetic oligonucleotide
accggtagtgagacatgtcagagccattcg

SEQ ID NO: 237683 - DNA, 30 bp, Artificial Sequence
  Synthetic oligonucleotide
cccacacggaatagtccaataaggcattcg

SEQ ID NO: 237684 - DNA, 30 bp, Artificial Sequence
  Synthetic oligonucleotide
ctagaattgatgcgcgacatccgtcattcg

SEQ ID NO: 237685 - DNA, 30 bp, Artificial Sequence
  Synthetic oligonucleotide
gtgctagaggcatctatcgtcgtagattcg

SEQ ID NO: 237686 - DNA, 30 bp, Artificial Sequence
  Synthetic oligonucleotide
cccctcggtgtcaagttctgtgtcgattcg

SEQ ID NO: 237687 - DNA, 30 bp, Artificial Sequence
  Synthetic oligonucleotide
attaataatgatgagaataccgcggattcg

SEQ ID NO: 237688 - DNA, 30 bp, Artificial Sequence
  Synthetic oligonucleotide
agcatacggagtagacttggggcggattcg

SEQ ID NO: 237689 - DNA, 30 bp, Artificial Sequence
  Synthetic oligonucleotide
tactgtcgaagaaatccgcatagtgattcg

SEQ ID NO: 237690 - DNA, 30 bp, Artificial Sequence
  Synthetic oligonucleotide
catactaggacagcaggacagggtgattcg

SEQ ID NO: 237691 - DNA, 30 bp, Artificial Sequence
  Synthetic oligonucleotide
ttcgcttcatcactactattccgatattcg

SEQ ID NO: 237692 - DNA, 30 bp, Artificial Sequence
  Synthetic oligonucleotide
ttcagctttgagttgtatgctatctattcg

SEQ ID NO: 237693 - DNA, 30 bp, Artificial Sequence
  Synthetic oligonucleotide
aaaccgagcgggagctataacaagtattcg

SEQ ID NO: 237694 - DNA, 30 bp, Artificial Sequence
  Synthetic oligonucleotide
acccatgtactcgaggtctgtgggtattcg

SEQ ID NO: 237695 - DNA, 30 bp, Artificial Sequence
  Synthetic oligonucleotide
cccgcaagggacgacatcatgaaaacttcg

SEQ ID NO: 237696 - DNA, 30 bp, Artificial Sequence
  Synthetic oligonucleotide
acaaagtgcaaatgtgtgtttaaaacttcg

SEQ ID NO: 237697 - DNA, 30 bp, Artificial Sequence
  Synthetic oligonucleotide
aaacaccgtaatcgtgaccgaatcacttcg

SEQ ID NO: 237698 - DNA, 30 bp, Artificial Sequence
  Synthetic oligonucleotide
atactggtgaaaggagggttattcacttcg

SEQ ID NO: 237699 - DNA, 30 bp, Artificial Sequence
  Synthetic oligonucleotide
ctggttggccgcgcgttcgcaaagacttcg

SEQ ID NO: 237700 - DNA, 30 bp, Artificial Sequence
  Synthetic oligonucleotide
cgtctggccgggtacttcgaagtgacttcg

SEQ ID NO: 237701 - DNA, 30 bp, Artificial Sequence
  Synthetic oligonucleotide
tcttagcagacatacgcatttaatacttcg

SEQ ID NO: 237702 - DNA, 30 bp, Artificial Sequence
  Synthetic oligonucleotide
atcagacccaagcatcttatgggtacttcg

SEQ ID NO: 237703 - DNA, 30 bp, Artificial Sequence
  Synthetic oligonucleotide
ttgccaagcagtaaaatgatttgtacttcg

SEQ ID NO: 237704 - DNA, 30 bp, Artificial Sequence
  Synthetic oligonucleotide
tagtgtcacccaaacacatggagcccttcg

SEQ ID NO: 237705 - DNA, 30 bp, Artificial Sequence
  Synthetic oligonucleotide
atgctgcctacccgcagggggatgccttcg

SEQ ID NO: 237706 - DNA, 30 bp, Artificial Sequence
  Synthetic oligonucleotide
ggggcctcccctaaagggggtacggcttcg

SEQ ID NO: 237707 - DNA, 30 bp, Artificial Sequence
  Synthetic oligonucleotide
aaggatgattttcaaccgcgagtggcttcg

SEQ ID NO: 237708 - DNA, 30 bp, Artificial Sequence
  Synthetic oligonucleotide
gcacctagtctcgtcatgcactgtgcttcg

SEQ ID NO: 237709 - DNA, 30 bp, Artificial Sequence
  Synthetic oligonucleotide
acgcactatgcacttattgatacatcttcg

SEQ ID NO: 237710 - DNA, 30 bp, Artificial Sequence
  Synthetic oligonucleotide
caatttagcggaggtaaagggtgctcttcg

SEQ ID NO: 237711 - DNA, 30 bp, Artificial Sequence
  Synthetic oligonucleotide
caatgtggctgatagcattaaatgtcttcg

SEQ ID NO: 237712 - DNA, 30 bp, Artificial Sequence
  Synthetic oligonucleotide
tcggtgatttcaccactaggtgattcttcg

SEQ ID NO: 237713 - DNA, 30 bp, Artificial Sequence
  Synthetic oligonucleotide
aactcatcccaatccttctatacttcttcg

SEQ ID NO: 237714 - DNA, 30 bp, Artificial Sequence
  Synthetic oligonucleotide
ggacccgtaattttgaagaacgaaagttcg

SEQ ID NO: 237715 - DNA, 30 bp, Artificial Sequence
  Synthetic oligonucleotide
acttggttaaggtatgtgtacgaaagttcg

SEQ ID NO: 237716 - DNA, 30 bp, Artificial Sequence
  Synthetic oligonucleotide
ccagattagtcattgcgtctattaagttcg

SEQ ID NO: 237717 - DNA, 30 bp, Artificial Sequence
  Synthetic oligonucleotide
gcgggtggtgaagggttcctgtgcagttcg

SEQ ID NO: 237718 - DNA, 30 bp, Artificial Sequence
  Synthetic oligonucleotide
caaacgatcctaagcgagctcatcagttcg

SEQ ID NO: 237719 - DNA, 30 bp, Artificial Sequence
  Synthetic oligonucleotide
caggtcttcataccagtgttgccgagttcg

SEQ ID NO: 237720 - DNA, 30 bp, Artificial Sequence
  Synthetic oligonucleotide
agtaggttagtaactcacttacggagttcg

SEQ ID NO: 237721 - DNA, 30 bp, Artificial Sequence
  Synthetic oligonucleotide
ttgataaggctgtattgaggaccacgttcg

SEQ ID NO: 237722 - DNA, 30 bp, Artificial Sequence
  Synthetic oligonucleotide
tcggcgcgctcattgtaacgaatacgttcg

SEQ ID NO: 237723 - DNA, 30 bp, Artificial Sequence
  Synthetic oligonucleotide
caaaagttaagttctaggaaaatgcgttcg

SEQ ID NO: 237724 - DNA, 30 bp, Artificial Sequence
  Synthetic oligonucleotide
agaccttacatggacgagcagagtcgttcg

SEQ ID NO: 237725 - DNA, 30 bp, Artificial Sequence
  Synthetic oligonucleotide
gatggcacagtgggccaagaggcaggttcg

SEQ ID NO: 237726 - DNA, 30 bp, Artificial Sequence
  Synthetic oligonucleotide
tacattgagctcatcgggtattcaggttcg

SEQ ID NO: 237727 - DNA, 30 bp, Artificial Sequence
  Synthetic oligonucleotide
gacgtacttctagctttgactataggttcg

SEQ ID NO: 237728 - DNA, 30 bp, Artificial Sequence
  Synthetic oligonucleotide
cgctcgtcactccacgtacgggtcggttcg

SEQ ID NO: 237729 - DNA, 31 bp, Artificial Sequence
  Synthetic oligonucleotide
acggtcgccccactatgttcattattgttcg

SEQ ID NO: 237730 - DNA, 30 bp, Artificial Sequence
  Synthetic oligonucleotide
ggctggtctccatatatggttggttgttcg

SEQ ID NO: 237731 - DNA, 30 bp, Artificial Sequence
  Synthetic oligonucleotide
cggttaaaggcttctccgggtgcaatttcg

SEQ ID NO: 237732 - DNA, 30 bp, Artificial Sequence
  Synthetic oligonucleotide
tgccttttggactaatcatattgaatttcg

SEQ ID NO: 237733 - DNA, 30 bp, Artificial Sequence
  Synthetic oligonucleotide
gacgtagcgagaggctgaccgaagatttcg

SEQ ID NO: 237734 - DNA, 30 bp, Artificial Sequence
  Synthetic oligonucleotide
tgtccgacaggccggtgatgcgggatttcg

SEQ ID NO: 237735 - DNA, 30 bp, Artificial Sequence
  Synthetic oligonucleotide
tgcccggaggactcgtacttggtgatttcg

SEQ ID NO: 237736 - DNA, 30 bp, Artificial Sequence
  Synthetic oligonucleotide
atgtcacgaacaaatagctaatctatttcg

SEQ ID NO: 237737 - DNA, 30 bp, Artificial Sequence
  Synthetic oligonucleotide
gggttaaaatcacgtggagtgggactttcg

SEQ ID NO: 237738 - DNA, 30 bp, Artificial Sequence
  Synthetic oligonucleotide
gagtaatggagtaagctgataaacctttcg

SEQ ID NO: 237739 - DNA, 30 bp, Artificial Sequence
  Synthetic oligonucleotide
cgctatgctcatgggccggtcgctctttcg

SEQ ID NO: 237740 - DNA, 30 bp, Artificial Sequence
  Synthetic oligonucleotide
gccataatctgtggacatgtaagtctttcg

SEQ ID NO: 237741 - DNA, 30 bp, Artificial Sequence
  Synthetic oligonucleotide
cacatgaagtagctatcctcatttctttcg

SEQ ID NO: 237742 - DNA, 30 bp, Artificial Sequence
  Synthetic oligonucleotide
gcatgcttgttggtcactcgttaagtttcg

SEQ ID NO: 237743 - DNA, 30 bp, Artificial Sequence
  Synthetic oligonucleotide
cgcaatagtgccaacacctagcacgtttcg

SEQ ID NO: 237744 - DNA, 30 bp, Artificial Sequence
  Synthetic oligonucleotide
ggctaaatattagggtcctggcatgtttcg

SEQ ID NO: 237745 - DNA, 30 bp, Artificial Sequence
  Synthetic oligonucleotide
ctctgtcaacaccatgttgagacattttcg

SEQ ID NO: 237746 - DNA, 30 bp, Artificial Sequence
  Synthetic oligonucleotide
gaagacaaaacagtgtgtaacctcttttcg

SEQ ID NO: 237747 - DNA, 30 bp, Artificial Sequence
  Synthetic oligonucleotide
cacgccctacggattcaggcggagttttcg

SEQ ID NO: 237748 - DNA, 30 bp, Artificial Sequence
  Synthetic oligonucleotide
catccggatattggaaacgatgggttttcg

SEQ ID NO: 237749 - DNA, 30 bp, Artificial Sequence
  Synthetic oligonucleotide
aactaggccgaagttacaatagttttttcg

SEQ ID NO: 237750 - DNA, 30 bp, Artificial Sequence
  Synthetic oligonucleotide
tttaaccgaattaaaagacctgacaaaagg

SEQ ID NO: 237751 - DNA, 30 bp, Artificial Sequence
  Synthetic oligonucleotide
agatatggtatcgggtcaatacgcaaaagg

SEQ ID NO: 237752 - DNA, 30 bp, Artificial Sequence
  Synthetic oligonucleotide
agactatactagctcatcccagtcaaaagg

SEQ ID NO: 237753 - DNA, 30 bp, Artificial Sequence
  Synthetic oligonucleotide
ctatggcggtttctaagaccctagaaaagg

SEQ ID NO: 237754 - DNA, 30 bp, Artificial Sequence
  Synthetic oligonucleotide
acccgtttaccttgttacaggcggaaaagg

SEQ ID NO: 237755 - DNA, 30 bp, Artificial Sequence
  Synthetic oligonucleotide
accgtgtgcttgcaatttgcactgaaaagg

SEQ ID NO: 237756 - DNA, 30 bp, Artificial Sequence
  Synthetic oligonucleotide
gtgaaacgacttcacgtctgatgacaaagg

SEQ ID NO: 237757 - DNA, 30 bp, Artificial Sequence
  Synthetic oligonucleotide
acgcagggggatgtgtgggggccccaaagg

SEQ ID NO: 237758 - DNA, 30 bp, Artificial Sequence
  Synthetic oligonucleotide
agcagcgaggtacgcatctagtgccaaagg

SEQ ID NO: 237759 - DNA, 30 bp, Artificial Sequence
  Synthetic oligonucleotide
gtgagagaggaacgtgtacaaaagcaaagg

SEQ ID NO: 237760 - DNA, 30 bp, Artificial Sequence
  Synthetic oligonucleotide
ctaacggctgaatagtaatcgtttcaaagg

SEQ ID NO: 237761 - DNA, 30 bp, Artificial Sequence
  Synthetic oligonucleotide
gtttctgtggggataagaaacagagaaagg

SEQ ID NO: 237762 - DNA, 30 bp, Artificial Sequence
  Synthetic oligonucleotide
tgacggcattactgtaaacgcgtagaaagg

SEQ ID NO: 237763 - DNA, 30 bp, Artificial Sequence
  Synthetic oligonucleotide
gggtacgaagcggaggcagacttagaaagg

SEQ ID NO: 237764 - DNA, 30 bp, Artificial Sequence
  Synthetic oligonucleotide
ctgtagcagcgccgaccttactacgaaagg

SEQ ID NO: 237765 - DNA, 30 bp, Artificial Sequence
  Synthetic oligonucleotide
cagtggtgacggcctcttttcggcgaaagg

SEQ ID NO: 237766 - DNA, 30 bp, Artificial Sequence
  Synthetic oligonucleotide
caagtttgtcaatgacacaatggcgaaagg

SEQ ID NO: 237767 - DNA, 30 bp, Artificial Sequence
  Synthetic oligonucleotide
gatacaaactttcatgcaaccaaggaaagg

SEQ ID NO: 237768 - DNA, 30 bp, Artificial Sequence
  Synthetic oligonucleotide
tacgtgtgcctagtttgtttagcataaagg

SEQ ID NO: 237769 - DNA, 30 bp, Artificial Sequence
  Synthetic oligonucleotide
ggggaaatcactacagacttcatataaagg

SEQ ID NO: 237770 - DNA, 30 bp, Artificial Sequence
  Synthetic oligonucleotide
aagtccagagatctgagagtattataaagg

SEQ ID NO: 237771 - DNA, 30 bp, Artificial Sequence
  Synthetic oligonucleotide
cacttcttatgttttttaactacgtaaagg

SEQ ID NO: 237772 - DNA, 30 bp, Artificial Sequence
  Synthetic oligonucleotide
ctaatactctggttcacccaaaggtaaagg

SEQ ID NO: 237773 - DNA, 30 bp, Artificial Sequence
  Synthetic oligonucleotide
gcgtacgtcgtaattgagggaaattaaagg

SEQ ID NO: 237774 - DNA, 30 bp, Artificial Sequence
  Synthetic oligonucleotide
atcatatagtcgcctgacgtgggaacaagg

SEQ ID NO: 237775 - DNA, 30 bp, Artificial Sequence
  Synthetic oligonucleotide
tgtcgcataggtcgtataacggacacaagg

SEQ ID NO: 237776 - DNA, 30 bp, Artificial Sequence
  Synthetic oligonucleotide
ggctacagagttttggaggtgcccacaagg

SEQ ID NO: 237777 - DNA, 30 bp, Artificial Sequence
  Synthetic oligonucleotide
aaagtgatccttatcggtagtcccacaagg

SEQ ID NO: 237778 - DNA, 30 bp, Artificial Sequence
  Synthetic oligonucleotide
attcgaatcacaaactgggatagcacaagg

SEQ ID NO: 237779 - DNA, 30 bp, Artificial Sequence
  Synthetic oligonucleotide
cataaattgcccgcaacgcgaggcacaagg

SEQ ID NO: 237780 - DNA, 30 bp, Artificial Sequence
  Synthetic oligonucleotide
ctagttgggtcgccttaggtgaagacaagg

SEQ ID NO: 237781 - DNA, 30 bp, Artificial Sequence
  Synthetic oligonucleotide
ccatgctttgactctgctacccgaccaagg

SEQ ID NO: 237782 - DNA, 30 bp, Artificial Sequence
  Synthetic oligonucleotide
ggtccgtcgtctgtaacttttgtgccaagg

SEQ ID NO: 237783 - DNA, 30 bp, Artificial Sequence
  Synthetic oligonucleotide
cgtgttggtatatttgctagttatccaagg

SEQ ID NO: 237784 - DNA, 30 bp, Artificial Sequence
  Synthetic oligonucleotide
ccaaagagacttcttgtgtagagagcaagg

SEQ ID NO: 237785 - DNA, 30 bp, Artificial Sequence
  Synthetic oligonucleotide
tgtagcatggccatcaagttagtagcaagg

SEQ ID NO: 237786 - DNA, 30 bp, Artificial Sequence
  Synthetic oligonucleotide
ggcattagaacagttagataagacgcaagg

SEQ ID NO: 237787 - DNA, 30 bp, Artificial Sequence
  Synthetic oligonucleotide
tgagtaggggggaggcctgagaaggcaagg

SEQ ID NO: 237788 - DNA, 30 bp, Artificial Sequence
  Synthetic oligonucleotide
tcgctttcaacccgcagaggcacggcaagg

SEQ ID NO: 237789 - DNA, 30 bp, Artificial Sequence
  Synthetic oligonucleotide
aggtacagtactgcccttgctccggcaagg

SEQ ID NO: 237790 - DNA, 30 bp, Artificial Sequence
  Synthetic oligonucleotide
ctcacggttagaggtcgaggaaatgcaagg

SEQ ID NO: 237791 - DNA, 30 bp, Artificial Sequence
  Synthetic oligonucleotide
ccgattcaagtttataaggctagatcaagg

SEQ ID NO: 237792 - DNA, 30 bp, Artificial Sequence
  Synthetic oligonucleotide
ttgcgtagcgacttttgttcgtaaagaagg

SEQ ID NO: 237793 - DNA, 30 bp, Artificial Sequence
  Synthetic oligonucleotide
gtataatgggatctcggcgcaagaagaagg

SEQ ID NO: 237794 - DNA, 30 bp, Artificial Sequence
  Synthetic oligonucleotide
tgaatatctggtagtctcattagaagaagg

SEQ ID NO: 237795 - DNA, 30 bp, Artificial Sequence
  Synthetic oligonucleotide
ttcgagttcggctgccgacgcccgagaagg

SEQ ID NO: 237796 - DNA, 30 bp, Artificial Sequence
  Synthetic oligonucleotide
actcgtctgcagtgcaccataggtagaagg

SEQ ID NO: 237797 - DNA, 30 bp, Artificial Sequence
  Synthetic oligonucleotide
aaaacggctgcgtcatggggttgacgaagg

SEQ ID NO: 237798 - DNA, 30 bp, Artificial Sequence
  Synthetic oligonucleotide
agtacgacgtcctggcagcgattccgaagg

SEQ ID NO: 237799 - DNA, 30 bp, Artificial Sequence
  Synthetic oligonucleotide
cggatagttcgagatccagcggcgcgaagg

SEQ ID NO: 237800 - DNA, 30 bp, Artificial Sequence
  Synthetic oligonucleotide
ttttaatcgcataaacgaaccgggcgaagg

SEQ ID NO: 237801 - DNA, 30 bp, Artificial Sequence
  Synthetic oligonucleotide
atcggacctatgattagtgtctggcgaagg

SEQ ID NO: 237802 - DNA, 30 bp, Artificial Sequence
  Synthetic oligonucleotide
gaccagtaaccagaatggcaacatcgaagg

SEQ ID NO: 237803 - DNA, 30 bp, Artificial Sequence
  Synthetic oligonucleotide
aaacccgtcgcagttcggctatatcgaagg

SEQ ID NO: 237804 - DNA, 30 bp, Artificial Sequence
  Synthetic oligonucleotide
atattcgcatagaataccagttatcgaagg

SEQ ID NO: 237805 - DNA, 30 bp, Artificial Sequence
  Synthetic oligonucleotide
ctagttggacggtatgtaacattcggaagg

SEQ ID NO: 237806 - DNA, 30 bp, Artificial Sequence
  Synthetic oligonucleotide
tctacctagttgtgttacggtcagggaagg

SEQ ID NO: 237807 - DNA, 30 bp, Artificial Sequence
  Synthetic oligonucleotide
gtgcacggcatcctccgaaaatggggaagg

SEQ ID NO: 237808 - DNA, 30 bp, Artificial Sequence
  Synthetic oligonucleotide
ttggagtggaagtctcgctattggggaagg

SEQ ID NO: 237809 - DNA, 30 bp, Artificial Sequence
  Synthetic oligonucleotide
ctccaggaggcttacctccagggtggaagg

SEQ ID NO: 237810 - DNA, 28 bp, Artificial Sequence
  Synthetic oligonucleotide
gaaataggtagaaagattgggtggaagg

SEQ ID NO: 237811 - DNA, 30 bp, Artificial Sequence
  Synthetic oligonucleotide
acttactttggaagaagggcaggatgaagg

SEQ ID NO: 237812 - DNA, 30 bp, Artificial Sequence
  Synthetic oligonucleotide
tatgagcggtaagagacacgatagtgaagg

SEQ ID NO: 237813 - DNA, 30 bp, Artificial Sequence
  Synthetic oligonucleotide
ttccacgaggtagtggaaggtgcgtgaagg

SEQ ID NO: 237814 - DNA, 30 bp, Artificial Sequence
  Synthetic oligonucleotide
gtagcgcaaccctgcatacagatcataagg

SEQ ID NO: 237815 - DNA, 30 bp, Artificial Sequence
  Synthetic oligonucleotide
ctgctatattaaccgcggactatgataagg

SEQ ID NO: 237816 - DNA, 30 bp, Artificial Sequence
  Synthetic oligonucleotide
ggcgccgggtcagcgggcaaaactataagg

SEQ ID NO: 237817 - DNA, 30 bp, Artificial Sequence
  Synthetic oligonucleotide
ttagcttagaggagaagaagtagtataagg

SEQ ID NO: 237818 - DNA, 30 bp, Artificial Sequence
  Synthetic oligonucleotide
taaataggacttaagacacccacactaagg

SEQ ID NO: 237819 - DNA, 30 bp, Artificial Sequence
  Synthetic oligonucleotide
tctacatgttgaggtcccagaagactaagg

SEQ ID NO: 237820 - DNA, 30 bp, Artificial Sequence
  Synthetic oligonucleotide
agttctggttttgcccactcccccctaagg

SEQ ID NO: 237821 - DNA, 30 bp, Artificial Sequence
  Synthetic oligonucleotide
atgcgtgcagtagccgcgatcgatctaagg

SEQ ID NO: 237822 - DNA, 30 bp, Artificial Sequence
  Synthetic oligonucleotide
tagctccaataacttggggtcaacgtaagg

SEQ ID NO: 237823 - DNA, 30 bp, Artificial Sequence
  Synthetic oligonucleotide
cataaagtattaagccgatttccggtaagg

SEQ ID NO: 237824 - DNA, 30 bp, Artificial Sequence
  Synthetic oligonucleotide
aaagaattactggatgacttggcggtaagg

SEQ ID NO: 237825 - DNA, 30 bp, Artificial Sequence
  Synthetic oligonucleotide
gtacagtaactgcttagagcagaattaagg

SEQ ID NO: 237826 - DNA, 30 bp, Artificial Sequence
  Synthetic oligonucleotide
aaatcgcgaagtttcctgggaacattaagg

SEQ ID NO: 237827 - DNA, 30 bp, Artificial Sequence
  Synthetic oligonucleotide
tatgcttgctctcagtaggtattattaagg

SEQ ID NO: 237828 - DNA, 30 bp, Artificial Sequence
  Synthetic oligonucleotide
cccggatgagggtactaagtatacttaagg

SEQ ID NO: 237829 - DNA, 30 bp, Artificial Sequence
  Synthetic oligonucleotide
caatggtgaacgcttcttgcgcccttaagg

SEQ ID NO: 237830 - DNA, 30 bp, Artificial Sequence
  Synthetic oligonucleotide
gcatctggggttaaacagatctatttaagg

SEQ ID NO: 237831 - DNA, 30 bp, Artificial Sequence
  Synthetic oligonucleotide
ttgaggtggactgggggtgctacaaacagg

SEQ ID NO: 237832 - DNA, 30 bp, Artificial Sequence
  Synthetic oligonucleotide
cgttaccgctgtggcctttattgtaacagg

SEQ ID NO: 237833 - DNA, 30 bp, Artificial Sequence
  Synthetic oligonucleotide
taataaaacatggggcaaccgagacacagg

SEQ ID NO: 237834 - DNA, 30 bp, Artificial Sequence
  Synthetic oligonucleotide
caatgatatcatgtggcgtgggaccacagg

SEQ ID NO: 237835 - DNA, 30 bp, Artificial Sequence
  Synthetic oligonucleotide
ggtttcataaggggatgtgagtcgcacagg

SEQ ID NO: 237836 - DNA, 30 bp, Artificial Sequence
  Synthetic oligonucleotide
tcgtttccatcacgagtcgggactcacagg

SEQ ID NO: 237837 - DNA, 30 bp, Artificial Sequence
  Synthetic oligonucleotide
gaatcggtggtgatgaaaatagcagacagg

SEQ ID NO: 237838 - DNA, 30 bp, Artificial Sequence
  Synthetic oligonucleotide
gttccaggagctaggtgggagatagacagg

SEQ ID NO: 237839 - DNA, 30 bp, Artificial Sequence
  Synthetic oligonucleotide
cctccgggtttaatttgctaggtagacagg

SEQ ID NO: 237840 - DNA, 30 bp, Artificial Sequence
  Synthetic oligonucleotide
tgtctccttcatgagggttgaaaggacagg

SEQ ID NO: 237841 - DNA, 30 bp, Artificial Sequence
  Synthetic oligonucleotide
tgaggttcccttggtacctacgcggacagg

SEQ ID NO: 237842 - DNA, 30 bp, Artificial Sequence
  Synthetic oligonucleotide
tgcaaaggtggtcggtggctccttgacagg

SEQ ID NO: 237843 - DNA, 30 bp, Artificial Sequence
  Synthetic oligonucleotide
gagggtgtagtactcggcaacaaatacagg

SEQ ID NO: 237844 - DNA, 30 bp, Artificial Sequence
  Synthetic oligonucleotide
cgctagtgatactagatcagcgaatacagg

SEQ ID NO: 237845 - DNA, 30 bp, Artificial Sequence
  Synthetic oligonucleotide
accttcggactaactggctttacatacagg

SEQ ID NO: 237846 - DNA, 30 bp, Artificial Sequence
  Synthetic oligonucleotide
tgaagcgttctgagttgtgtctgatacagg

SEQ ID NO: 237847 - DNA, 30 bp, Artificial Sequence
  Synthetic oligonucleotide
gggttctcagagtctactgaaccctacagg

SEQ ID NO: 237848 - DNA, 30 bp, Artificial Sequence
  Synthetic oligonucleotide
ctattatatgaaaaactggcgccctacagg

SEQ ID NO: 237849 - DNA, 30 bp, Artificial Sequence
  Synthetic oligonucleotide
ggtccacgctggttaatcaaattgtacagg

SEQ ID NO: 237850 - DNA, 30 bp, Artificial Sequence
  Synthetic oligonucleotide
actacaaagcattcatggcgcccttacagg

SEQ ID NO: 237851 - DNA, 30 bp, Artificial Sequence
  Synthetic oligonucleotide
agggctggtgataaggagatctcttacagg

SEQ ID NO: 237852 - DNA, 30 bp, Artificial Sequence
  Synthetic oligonucleotide
catttattagagatgagtatagtttacagg

SEQ ID NO: 237853 - DNA, 30 bp, Artificial Sequence
  Synthetic oligonucleotide
aaacggccgtccggcgttatctccaccagg

SEQ ID NO: 237854 - DNA, 30 bp, Artificial Sequence
  Synthetic oligonucleotide
agtggaatttttgcctgaacgtgcaccagg

SEQ ID NO: 237855 - DNA, 30 bp, Artificial Sequence
  Synthetic oligonucleotide
acaagtacgtataagctcataccgaccagg

SEQ ID NO: 237856 - DNA, 30 bp, Artificial Sequence
  Synthetic oligonucleotide
cttataggcgattgggcgttttggaccagg

SEQ ID NO: 237857 - DNA, 30 bp, Artificial Sequence
  Synthetic oligonucleotide
tatattatagcgatattaaaaaataccagg

SEQ ID NO: 237858 - DNA, 30 bp, Artificial Sequence
  Synthetic oligonucleotide
gacaggtgcaacccagtcgaatataccagg

SEQ ID NO: 237859 - DNA, 30 bp, Artificial Sequence
  Synthetic oligonucleotide
tatggggcactgagggtggacccacccagg

SEQ ID NO: 237860 - DNA, 30 bp, Artificial Sequence
  Synthetic oligonucleotide
cattttattgggccatgatggttacccagg

SEQ ID NO: 237861 - DNA, 30 bp, Artificial Sequence
  Synthetic oligonucleotide
gtccggaactgagccgcccgaacccccagg

SEQ ID NO: 237862 - DNA, 30 bp, Artificial Sequence
  Synthetic oligonucleotide
aacgtgcgctacgcggcttcgggccccagg

SEQ ID NO: 237863 - DNA, 30 bp, Artificial Sequence
  Synthetic oligonucleotide
atatcgggtccctcctgtagtctccccagg

SEQ ID NO: 237864 - DNA, 30 bp, Artificial Sequence
  Synthetic oligonucleotide
cttaccttggccgcctagccatcgcccagg

SEQ ID NO: 237865 - DNA, 30 bp, Artificial Sequence
  Synthetic oligonucleotide
tttgttatcaaacttcgtcgattgcccagg

SEQ ID NO: 237866 - DNA, 30 bp, Artificial Sequence
  Synthetic oligonucleotide
gtgttcctttctgatcttggagatcccagg

SEQ ID NO: 237867 - DNA, 30 bp, Artificial Sequence
  Synthetic oligonucleotide
gtgactacgggagacaacggcgctcccagg

SEQ ID NO: 237868 - DNA, 30 bp, Artificial Sequence
  Synthetic oligonucleotide
ctcctgagtagaaaaaacactgctcccagg

SEQ ID NO: 237869 - DNA, 30 bp, Artificial Sequence
  Synthetic oligonucleotide
actcgacgtgcaagagcttgggtagccagg

SEQ ID NO: 237870 - DNA, 30 bp, Artificial Sequence
  Synthetic oligonucleotide
actcaatgggttccaaagcgtcccgccagg

SEQ ID NO: 237871 - DNA, 30 bp, Artificial Sequence
  Synthetic oligonucleotide
gggtcacacggggccgccggggaggccagg

SEQ ID NO: 237872 - DNA, 30 bp, Artificial Sequence
  Synthetic oligonucleotide
cgtgtggacgcagatgccatgtaggccagg

SEQ ID NO: 237873 - DNA, 30 bp, Artificial Sequence
  Synthetic oligonucleotide
gctagaagcaaatggacaacgttggccagg

SEQ ID NO: 237874 - DNA, 30 bp, Artificial Sequence
  Synthetic oligonucleotide
cgagggcccatcacctgtacgcgtgccagg

SEQ ID NO: 237875 - DNA, 30 bp, Artificial Sequence
  Synthetic oligonucleotide
tacactagtgatgttcataaaacatccagg

SEQ ID NO: 237876 - DNA, 35 bp, Artificial Sequence
  Synthetic oligonucleotide
tcccctaatcttgcgtccatgcccggccatccagg

SEQ ID NO: 237877 - DNA, 30 bp, Artificial Sequence
  Synthetic oligonucleotide
taagcgttagggccattttatacctccagg

SEQ ID NO: 237878 - DNA, 30 bp, Artificial Sequence
  Synthetic oligonucleotide
tcctaggacattcagtcgcagacgtccagg

SEQ ID NO: 237879 - DNA, 30 bp, Artificial Sequence
  Synthetic oligonucleotide
tctgggcttttgatgtgcagtttgtccagg

SEQ ID NO: 237880 - DNA, 31 bp, Artificial Sequence
  Synthetic oligonucleotide
tttgacacgcaacagcaatagctgttccagg

SEQ ID NO: 237881 - DNA, 30 bp, Artificial Sequence
  Synthetic oligonucleotide
gttggggccccaagggtccatctaagcagg

SEQ ID NO: 237882 - DNA, 30 bp, Artificial Sequence
  Synthetic oligonucleotide
tggcctacgtgtcggtcgctagacagcagg

SEQ ID NO: 237883 - DNA, 30 bp, Artificial Sequence
  Synthetic oligonucleotide
cctcctgaggagtattgcatgacgagcagg

SEQ ID NO: 237884 - DNA, 30 bp, Artificial Sequence
  Synthetic oligonucleotide
gtacctcaacttccttcagagaggagcagg

SEQ ID NO: 237885 - DNA, 30 bp, Artificial Sequence
  Synthetic oligonucleotide
gttgaccttcgcattagttctctgagcagg

SEQ ID NO: 237886 - DNA, 30 bp, Artificial Sequence
  Synthetic oligonucleotide
aggccaaacccacgacagatattccgcagg

SEQ ID NO: 237887 - DNA, 30 bp, Artificial Sequence
  Synthetic oligonucleotide
tccgaaatatagtgtgggtctaagcgcagg

SEQ ID NO: 237888 - DNA, 30 bp, Artificial Sequence
  Synthetic oligonucleotide
aagtccgactctaggcgtgggtgaggcagg

SEQ ID NO: 237889 - DNA, 30 bp, Artificial Sequence
  Synthetic oligonucleotide
ataggaagcgacacggcccggtaatgcagg

SEQ ID NO: 237890 - DNA, 30 bp, Artificial Sequence
  Synthetic oligonucleotide
caaaagtaccgccatcaagacagatgcagg

SEQ ID NO: 237891 - DNA, 30 bp, Artificial Sequence
  Synthetic oligonucleotide
gaataggatacaggatagaacgagtgcagg

SEQ ID NO: 237892 - DNA, 30 bp, Artificial Sequence
  Synthetic oligonucleotide
taggtgacataccgactggacgagtgcagg

SEQ ID NO: 237893 - DNA, 30 bp, Artificial Sequence
  Synthetic oligonucleotide
ctaggcggtgcgaaacattaccggtgcagg

SEQ ID NO: 237894 - DNA, 30 bp, Artificial Sequence
  Synthetic oligonucleotide
caggactcgcacgtgacggtgaacatcagg

SEQ ID NO: 237895 - DNA, 30 bp, Artificial Sequence
  Synthetic oligonucleotide
taagtttgaaatcgcaaagtatagatcagg

SEQ ID NO: 237896 - DNA, 30 bp, Artificial Sequence
  Synthetic oligonucleotide
ctcccgaacttttgtctgggagcgatcagg

SEQ ID NO: 237897 - DNA, 30 bp, Artificial Sequence
  Synthetic oligonucleotide
aacattaagactgggtgagtagcgatcagg

SEQ ID NO: 237898 - DNA, 30 bp, Artificial Sequence
  Synthetic oligonucleotide
aaagacgttcttctgtcaccaggcctcagg

SEQ ID NO: 237899 - DNA, 30 bp, Artificial Sequence
  Synthetic oligonucleotide
cggggcaagtcttgtggtctatggctcagg

SEQ ID NO: 237900 - DNA, 30 bp, Artificial Sequence
  Synthetic oligonucleotide
acaatgtgggccggtataatataagtcagg

SEQ ID NO: 237901 - DNA, 30 bp, Artificial Sequence
  Synthetic oligonucleotide
tgtaagtatcaagggggcttagtagtcagg

SEQ ID NO: 237902 - DNA, 30 bp, Artificial Sequence
  Synthetic oligonucleotide
gataggatttaacagcactaacacgtcagg

SEQ ID NO: 237903 - DNA, 30 bp, Artificial Sequence
  Synthetic oligonucleotide
taataaactagatggattatcgacgtcagg

SEQ ID NO: 237904 - DNA, 30 bp, Artificial Sequence
  Synthetic oligonucleotide
gtagcagtccactataaattgaaggtcagg

SEQ ID NO: 237905 - DNA, 30 bp, Artificial Sequence
  Synthetic oligonucleotide
cgacatatcattcttcgagaagtggtcagg

SEQ ID NO: 237906 - DNA, 30 bp, Artificial Sequence
  Synthetic oligonucleotide
tcggtgacggcgcgttgtggcacattcagg

SEQ ID NO: 237907 - DNA, 30 bp, Artificial Sequence
  Synthetic oligonucleotide
tttctctcattgggccgctcggtgttcagg

SEQ ID NO: 237908 - DNA, 30 bp, Artificial Sequence
  Synthetic oligonucleotide
cctgtagggataatacactccttgttcagg

SEQ ID NO: 237909 - DNA, 30 bp, Artificial Sequence
  Synthetic oligonucleotide
aaacactgtttaacatcccgtaatttcagg

SEQ ID NO: 237910 - DNA, 30 bp, Artificial Sequence
  Synthetic oligonucleotide
cgcacgtggtttcttgtacgatatttcagg

SEQ ID NO: 237911 - DNA, 30 bp, Artificial Sequence
  Synthetic oligonucleotide
acggtcttactggcttaatcgggaaagagg

SEQ ID NO: 237912 - DNA, 30 bp, Artificial Sequence
  Synthetic oligonucleotide
ggtactctttccagttgggtcttaaagagg

SEQ ID NO: 237913 - DNA, 30 bp, Artificial Sequence
  Synthetic oligonucleotide
cctggtcgacccgctcggatgatcaagagg

SEQ ID NO: 237914 - DNA, 30 bp, Artificial Sequence
  Synthetic oligonucleotide
ggtgggtgcctctatatacgggtcaagagg

SEQ ID NO: 237915 - DNA, 30 bp, Artificial Sequence
  Synthetic oligonucleotide
cgaaattatggtgtcggcatattgaagagg

SEQ ID NO: 237916 - DNA, 30 bp, Artificial Sequence
  Synthetic oligonucleotide
aatgaatcggggcaaacaggtgctaagagg

SEQ ID NO: 237917 - DNA, 30 bp, Artificial Sequence
  Synthetic oligonucleotide
ataatttgggttaacagtttgagtaagagg

SEQ ID NO: 237918 - DNA, 30 bp, Artificial Sequence
  Synthetic oligonucleotide
agcagtgttgattaggattctcttaagagg

SEQ ID NO: 237919 - DNA, 30 bp, Artificial Sequence
  Synthetic oligonucleotide
gagggattgttcagtggacattttaagagg

SEQ ID NO: 237920 - DNA, 30 bp, Artificial Sequence
  Synthetic oligonucleotide
attaaggggttgcagccgcgttgccagagg

SEQ ID NO: 237921 - DNA, 30 bp, Artificial Sequence
  Synthetic oligonucleotide
acgtttggcgccttggtacaagtccagagg

SEQ ID NO: 237922 - DNA, 30 bp, Artificial Sequence
  Synthetic oligonucleotide
ctgaactttggtgtgtatatcccgcagagg

SEQ ID NO: 237923 - DNA, 30 bp, Artificial Sequence
  Synthetic oligonucleotide
ccttactcgttgggatactgatctcagagg

SEQ ID NO: 237924 - DNA, 30 bp, Artificial Sequence
  Synthetic oligonucleotide
tacattagccccgccaccctccgtcagagg

SEQ ID NO: 237925 - DNA, 30 bp, Artificial Sequence
  Synthetic oligonucleotide
ggcaccccatttatttgtctcatcgagagg

SEQ ID NO: 237926 - DNA, 30 bp, Artificial Sequence
  Synthetic oligonucleotide
tggcaggcctgtctccgtatgtactagagg

SEQ ID NO: 237927 - DNA, 30 bp, Artificial Sequence
  Synthetic oligonucleotide
aaaggctggttcccctccccaatgtagagg

SEQ ID NO: 237928 - DNA, 30 bp, Artificial Sequence
  Synthetic oligonucleotide
tgtgcgagtgtaaataaatctgcttagagg

SEQ ID NO: 237929 - DNA, 30 bp, Artificial Sequence
  Synthetic oligonucleotide
aggttaggcattgcggtctaagccacgagg

SEQ ID NO: 237930 - DNA, 30 bp, Artificial Sequence
  Synthetic oligonucleotide
tcttggttgcatatccagaatgccacgagg

SEQ ID NO: 237931 - DNA, 29 bp, Artificial Sequence
  Synthetic oligonucleotide
ttagagaagatccacgtcgaccgacgagg

SEQ ID NO: 237932 - DNA, 30 bp, Artificial Sequence
  Synthetic oligonucleotide
gcttagtcccaacgctaaacacgaccgagg

SEQ ID NO: 237933 - DNA, 30 bp, Artificial Sequence
  Synthetic oligonucleotide
gctcatattattaacgagctcgtaccgagg

SEQ ID NO: 237934 - DNA, 30 bp, Artificial Sequence
  Synthetic oligonucleotide
atatgcttactacatcctgaggagccgagg

SEQ ID NO: 237935 - DNA, 30 bp, Artificial Sequence
  Synthetic oligonucleotide
cttgcgactagcttcgcataagggccgagg

SEQ ID NO: 237936 - DNA, 30 bp, Artificial Sequence
  Synthetic oligonucleotide
gctcagatcaagacagacgcgatgccgagg

SEQ ID NO: 237937 - DNA, 30 bp, Artificial Sequence
  Synthetic oligonucleotide
tggcagtgatatcctccagtattagcgagg

SEQ ID NO: 237938 - DNA, 30 bp, Artificial Sequence
  Synthetic oligonucleotide
gcttgtatttaaagaacttgatccgcgagg

SEQ ID NO: 237939 - DNA, 30 bp, Artificial Sequence
  Synthetic oligonucleotide
agacctctttatatcatagggagcgcgagg

SEQ ID NO: 237940 - DNA, 30 bp, Artificial Sequence
  Synthetic oligonucleotide
tataataggtaaaaaaacgttagtgcgagg

SEQ ID NO: 237941 - DNA, 30 bp, Artificial Sequence
  Synthetic oligonucleotide
ctgatggcgaccggcactgcccgtgcgagg

SEQ ID NO: 237942 - DNA, 30 bp, Artificial Sequence
  Synthetic oligonucleotide
tgcacgcagacgaatgcactcgtatcgagg

SEQ ID NO: 237943 - DNA, 30 bp, Artificial Sequence
  Synthetic oligonucleotide
aaaccagggagcggcacttaacgctcgagg

SEQ ID NO: 237944 - DNA, 30 bp, Artificial Sequence
  Synthetic oligonucleotide
gtctaagaatgtacggctggtaagtcgagg

SEQ ID NO: 237945 - DNA, 30 bp, Artificial Sequence
  Synthetic oligonucleotide
cacgtttgcagaaatacctgttagtcgagg

SEQ ID NO: 237946 - DNA, 30 bp, Artificial Sequence
  Synthetic oligonucleotide
gctccctggctacgcacaatacggtcgagg

SEQ ID NO: 237947 - DNA, 30 bp, Artificial Sequence
  Synthetic oligonucleotide
ggtactgatacaggtacagtggattcgagg

SEQ ID NO: 237948 - DNA, 30 bp, Artificial Sequence
  Synthetic oligonucleotide
tactgtcgcttaagagggtagtattcgagg

SEQ ID NO: 237949 - DNA, 30 bp, Artificial Sequence
  Synthetic oligonucleotide
cgggcgaaatcttggcttgagatttcgagg

SEQ ID NO: 237950 - DNA, 30 bp, Artificial Sequence
  Synthetic oligonucleotide
gcgggatctcgcataagacggcccaggagg

SEQ ID NO: 237951 - DNA, 30 bp, Artificial Sequence
  Synthetic oligonucleotide
atacaaataatgggtgactctcgcaggagg

SEQ ID NO: 237952 - DNA, 30 bp, Artificial Sequence
  Synthetic oligonucleotide
gcacgggcgaaacttacgctaggcaggagg

SEQ ID NO: 237953 - DNA, 30 bp, Artificial Sequence
  Synthetic oligonucleotide
cgaaggaccgacgtccattagccgaggagg

SEQ ID NO: 237954 - DNA, 30 bp, Artificial Sequence
  Synthetic oligonucleotide
caggtacggctcaacagtgcccgtaggagg

SEQ ID NO: 237955 - DNA, 30 bp, Artificial Sequence
  Synthetic oligonucleotide
ggtggagtgaggttccctgctagacggagg

SEQ ID NO: 237956 - DNA, 30 bp, Artificial Sequence
  Synthetic oligonucleotide
taacggagagcttctttttgtaagcggagg

SEQ ID NO: 237957 - DNA, 30 bp, Artificial Sequence
  Synthetic oligonucleotide
gacaaggatttagttccgaactttcggagg

SEQ ID NO: 237958 - DNA, 30 bp, Artificial Sequence
  Synthetic oligonucleotide
gattccggaaaagactcatattaagggagg

SEQ ID NO: 237959 - DNA, 30 bp, Artificial Sequence
  Synthetic oligonucleotide
gaacacgtgctataggcaccgcgcgggagg

SEQ ID NO: 237960 - DNA, 30 bp, Artificial Sequence
  Synthetic oligonucleotide
gtcttctccctcacgaggatcagggggagg

SEQ ID NO: 237961 - DNA, 30 bp, Artificial Sequence
  Synthetic oligonucleotide
gaggaggcagttgacagttggaaatggagg

SEQ ID NO: 237962 - DNA, 30 bp, Artificial Sequence
  Synthetic oligonucleotide
ttggacttgatctttaggatgatctggagg

SEQ ID NO: 237963 - DNA, 30 bp, Artificial Sequence
  Synthetic oligonucleotide
acgtttagctggcagtgccgcgcaatgagg

SEQ ID NO: 237964 - DNA, 30 bp, Artificial Sequence
  Synthetic oligonucleotide
tggaatagtatctaagtatagttcatgagg

SEQ ID NO: 237965 - DNA, 30 bp, Artificial Sequence
  Synthetic oligonucleotide
tcaatcggcttgattatactcggactgagg

SEQ ID NO: 237966 - DNA, 30 bp, Artificial Sequence
  Synthetic oligonucleotide
aaccctgatcagtatggagaggcgctgagg

SEQ ID NO: 237967 - DNA, 30 bp, Artificial Sequence
  Synthetic oligonucleotide
taattggaaactttacatcaatttctgagg

SEQ ID NO: 237968 - DNA, 30 bp, Artificial Sequence
  Synthetic oligonucleotide
ggtccgattgtaggaatcctgacagtgagg

SEQ ID NO: 237969 - DNA, 30 bp, Artificial Sequence
  Synthetic oligonucleotide
agctacgggtaactgagcttatcggtgagg

SEQ ID NO: 237970 - DNA, 30 bp, Artificial Sequence
  Synthetic oligonucleotide
tgaggctaagtatgtggttaagtggtgagg

SEQ ID NO: 237971 - DNA, 30 bp, Artificial Sequence
  Synthetic oligonucleotide
ccgaactaggtagccggagttcatgtgagg

SEQ ID NO: 237972 - DNA, 30 bp, Artificial Sequence
  Synthetic oligonucleotide
gccctggttgacctttaatagtatgtgagg

SEQ ID NO: 237973 - DNA, 30 bp, Artificial Sequence
  Synthetic oligonucleotide
cttccccgcgtcccggtcgcaaggttgagg

SEQ ID NO: 237974 - DNA, 30 bp, Artificial Sequence
  Synthetic oligonucleotide
atccataccacccttatgcgaatgttgagg

SEQ ID NO: 237975 - DNA, 30 bp, Artificial Sequence
  Synthetic oligonucleotide
gggtgcaaagacgaactttaacatttgagg

SEQ ID NO: 237976 - DNA, 30 bp, Artificial Sequence
  Synthetic oligonucleotide
agaacactcgtcacccagtaccgtttgagg

SEQ ID NO: 237977 - DNA, 30 bp, Artificial Sequence
  Synthetic oligonucleotide
aagaaagttacatatcgaatgcccaatagg

SEQ ID NO: 237978 - DNA, 30 bp, Artificial Sequence
  Synthetic oligonucleotide
acggttcaaccgatttccgaagggaatagg

SEQ ID NO: 237979 - DNA, 30 bp, Artificial Sequence
  Synthetic oligonucleotide
ttagtcggtaactcagtaatagcacatagg

SEQ ID NO: 237980 - DNA, 30 bp, Artificial Sequence
  Synthetic oligonucleotide
tactgggtttaaaaggatgaggcacatagg

SEQ ID NO: 237981 - DNA, 30 bp, Artificial Sequence
  Synthetic oligonucleotide
tgggggaaaataagaggagcgacgcatagg

SEQ ID NO: 237982 - DNA, 30 bp, Artificial Sequence
  Synthetic oligonucleotide
tgccttggacccgcttagctcccgcatagg

SEQ ID NO: 237983 - DNA, 30 bp, Artificial Sequence
  Synthetic oligonucleotide
ttttggcatagaccattaccaaggcatagg

SEQ ID NO: 237984 - DNA, 30 bp, Artificial Sequence
  Synthetic oligonucleotide
ggcatgggcctggtcagtatggggcatagg

SEQ ID NO: 237985 - DNA, 30 bp, Artificial Sequence
  Synthetic oligonucleotide
agtccatacactgccagtcgccttcatagg

SEQ ID NO: 237986 - DNA, 30 bp, Artificial Sequence
  Synthetic oligonucleotide
agcacacatagcagatcagatgtagatagg

SEQ ID NO: 237987 - DNA, 30 bp, Artificial Sequence
  Synthetic oligonucleotide
gagcagagtaagcttctctgactggatagg

SEQ ID NO: 237988 - DNA, 30 bp, Artificial Sequence
  Synthetic oligonucleotide
ccgaactaacatggctgtacgctggatagg

SEQ ID NO: 237989 - DNA, 30 bp, Artificial Sequence
  Synthetic oligonucleotide
ataaagcacgttgtatctacctctgatagg

SEQ ID NO: 237990 - DNA, 30 bp, Artificial Sequence
  Synthetic oligonucleotide
tactcgcgcgtggtattttgtcgtgatagg

SEQ ID NO: 237991 - DNA, 30 bp, Artificial Sequence
  Synthetic oligonucleotide
agttatagcgtctacggctggtttgatagg

SEQ ID NO: 237992 - DNA, 30 bp, Artificial Sequence
  Synthetic oligonucleotide
acacttaacatagcacagtttacatatagg

SEQ ID NO: 237993 - DNA, 30 bp, Artificial Sequence
  Synthetic oligonucleotide
tcagcctcaacggttgtgcggtactatagg

SEQ ID NO: 237994 - DNA, 30 bp, Artificial Sequence
  Synthetic oligonucleotide
ccccagcgaccctcaggaacggtgtatagg

SEQ ID NO: 237995 - DNA, 30 bp, Artificial Sequence
  Synthetic oligonucleotide
acagcggagttgctgagcggtggttatagg

SEQ ID NO: 237996 - DNA, 30 bp, Artificial Sequence
  Synthetic oligonucleotide
ggcgtaccaccgtacattttaatttatagg

SEQ ID NO: 237997 - DNA, 30 bp, Artificial Sequence
  Synthetic oligonucleotide
gccatggtgcgatgccgggatttaactagg

SEQ ID NO: 237998 - DNA, 30 bp, Artificial Sequence
  Synthetic oligonucleotide
acggcgggatagatgacggttgacactagg

SEQ ID NO: 237999 - DNA, 30 bp, Artificial Sequence
  Synthetic oligonucleotide
atgttgtggagtgcccggacaaagactagg

SEQ ID NO: 238000 - DNA, 30 bp, Artificial Sequence
  Synthetic oligonucleotide
ctatgtaagcggtggtctcctaaacctagg

SEQ ID NO: 238001 - DNA, 30 bp, Artificial Sequence
  Synthetic oligonucleotide
gtgatacggaaaatggtgaaaggacctagg

SEQ ID NO: 238002 - DNA, 30 bp, Artificial Sequence
  Synthetic oligonucleotide
gcgtcgaggtagctcacgagcatacctagg

SEQ ID NO: 238003 - DNA, 30 bp, Artificial Sequence
  Synthetic oligonucleotide
gcgtgccatttagggcaggatgtccctagg

SEQ ID NO: 238004 - DNA, 30 bp, Artificial Sequence
  Synthetic oligonucleotide
ttgtacacagtgtggaactgttctcctagg

SEQ ID NO: 238005 - DNA, 30 bp, Artificial Sequence
  Synthetic oligonucleotide
tatctgcctaggtacataggaacagctagg

SEQ ID NO: 238006 - DNA, 30 bp, Artificial Sequence
  Synthetic oligonucleotide
gtgtgagaagcctcggcatcggccgctagg

SEQ ID NO: 238007 - DNA, 30 bp, Artificial Sequence
  Synthetic oligonucleotide
acacgaagcgttcccatggttctcgctagg

SEQ ID NO: 238008 - DNA, 30 bp, Artificial Sequence
  Synthetic oligonucleotide
tacttgatggagggacagtcttcggctagg

SEQ ID NO: 238009 - DNA, 30 bp, Artificial Sequence
  Synthetic oligonucleotide
gcactatgtagtcgacgcggattggctagg

SEQ ID NO: 238010 - DNA, 30 bp, Artificial Sequence
  Synthetic oligonucleotide
tgttcacaccatgctcattcttaatctagg

SEQ ID NO: 238011 - DNA, 30 bp, Artificial Sequence
  Synthetic oligonucleotide
atggcgcggcgattaacacaggtatctagg

SEQ ID NO: 238012 - DNA, 30 bp, Artificial Sequence
  Synthetic oligonucleotide
atggcaacagttttataggagtattctagg

SEQ ID NO: 238013 - DNA, 30 bp, Artificial Sequence
  Synthetic oligonucleotide
tgctatggcaagaatacgcaagctagtagg

SEQ ID NO: 238014 - DNA, 30 bp, Artificial Sequence
  Synthetic oligonucleotide
cagtatgatacatcgtcatgttaacgtagg

SEQ ID NO: 238015 - DNA, 30 bp, Artificial Sequence
  Synthetic oligonucleotide
ccgggggaccatcctcggtattagcgtagg

SEQ ID NO: 238016 - DNA, 30 bp, Artificial Sequence
  Synthetic oligonucleotide
atggtacagtcgccctttactgatcgtagg

SEQ ID NO: 238017 - DNA, 30 bp, Artificial Sequence
  Synthetic oligonucleotide
ttacagtttatcaactcaaaaggtcgtagg

SEQ ID NO: 238018 - DNA, 30 bp, Artificial Sequence
  Synthetic oligonucleotide
ggcaagcattgattagttcagtttcgtagg

SEQ ID NO: 238019 - DNA, 30 bp, Artificial Sequence
  Synthetic oligonucleotide
atccgaataatcaataatgcggcaggtagg

SEQ ID NO: 238020 - DNA, 30 bp, Artificial Sequence
  Synthetic oligonucleotide
tttttgcattatgaggaacactcaggtagg

SEQ ID NO: 238021 - DNA, 30 bp, Artificial Sequence
  Synthetic oligonucleotide
tgaggtaaacttaccggtcttataggtagg

SEQ ID NO: 238022 - DNA, 30 bp, Artificial Sequence
  Synthetic oligonucleotide
tcggtagatgaagggtctggtgtaggtagg

SEQ ID NO: 238023 - DNA, 30 bp, Artificial Sequence
  Synthetic oligonucleotide
acatggggtatctagtggtcaggcggtagg

SEQ ID NO: 238024 - DNA, 30 bp, Artificial Sequence
  Synthetic oligonucleotide
tgactcctacagtgttatttgactggtagg

SEQ ID NO: 238025 - DNA, 30 bp, Artificial Sequence
  Synthetic oligonucleotide
gcacattcaaatatgaaatgataatgtagg

SEQ ID NO: 238026 - DNA, 30 bp, Artificial Sequence
  Synthetic oligonucleotide
cggaaccccactatcgaggatacatgtagg

SEQ ID NO: 238027 - DNA, 30 bp, Artificial Sequence
  Synthetic oligonucleotide
atgtgttatgaggtacccaaaagctgtagg

SEQ ID NO: 238028 - DNA, 30 bp, Artificial Sequence
  Synthetic oligonucleotide
gccatcggcaaatattataacagctgtagg

SEQ ID NO: 238029 - DNA, 30 bp, Artificial Sequence
  Synthetic oligonucleotide
cgggattgtatacggttgccttgctgtagg

SEQ ID NO: 238030 - DNA, 30 bp, Artificial Sequence
  Synthetic oligonucleotide
agcaatagataaggagagcctctctgtagg

SEQ ID NO: 238031 - DNA, 30 bp, Artificial Sequence
  Synthetic oligonucleotide
cctactagtcttcgaggcccgttctgtagg

SEQ ID NO: 238032 - DNA, 30 bp, Artificial Sequence
  Synthetic oligonucleotide
ggtatgcgccggcaacgggttaattgtagg

SEQ ID NO: 238033 - DNA, 30 bp, Artificial Sequence
  Synthetic oligonucleotide
ataaggggcgtctttggacactcttgtagg

SEQ ID NO: 238034 - DNA, 30 bp, Artificial Sequence
  Synthetic oligonucleotide
gaagcaaaggtcgctcaccgctaaattagg

SEQ ID NO: 238035 - DNA, 30 bp, Artificial Sequence
  Synthetic oligonucleotide
aaaggctagaagcggggacaagcaattagg

SEQ ID NO: 238036 - DNA, 30 bp, Artificial Sequence
  Synthetic oligonucleotide
ggatggtgctgacctggccgtataattagg

SEQ ID NO: 238037 - DNA, 30 bp, Artificial Sequence
  Synthetic oligonucleotide
tgggattccgtgtacccttgcttaattagg

SEQ ID NO: 238038 - DNA, 30 bp, Artificial Sequence
  Synthetic oligonucleotide
gatatcctgtctggttgtctgtgcattagg

SEQ ID NO: 238039 - DNA, 30 bp, Artificial Sequence
  Synthetic oligonucleotide
ttcatcaatagatgatgtaaaatcattagg

SEQ ID NO: 238040 - DNA, 30 bp, Artificial Sequence
  Synthetic oligonucleotide
ccctattgacaacatatcccactgattagg

SEQ ID NO: 238041 - DNA, 30 bp, Artificial Sequence
  Synthetic oligonucleotide
gctcaagccgtctcggatgcgttgattagg

SEQ ID NO: 238042 - DNA, 30 bp, Artificial Sequence
  Synthetic oligonucleotide
atccaataaagggtaaaatcgggtattagg

SEQ ID NO: 238043 - DNA, 30 bp, Artificial Sequence
  Synthetic oligonucleotide
cccgtgcagtatgctactcggtcacttagg

SEQ ID NO: 238044 - DNA, 30 bp, Artificial Sequence
  Synthetic oligonucleotide
gcctaaacgagtagtgactaccgccttagg

SEQ ID NO: 238045 - DNA, 30 bp, Artificial Sequence
  Synthetic oligonucleotide
gcggtgtgctccgcatgcctagtccttagg

SEQ ID NO: 238046 - DNA, 30 bp, Artificial Sequence
  Synthetic oligonucleotide
acagttcgtgtacccgcattttcgcttagg

SEQ ID NO: 238047 - DNA, 30 bp, Artificial Sequence
  Synthetic oligonucleotide
tctagtaagttatgaacgcgtttgcttagg

SEQ ID NO: 238048 - DNA, 30 bp, Artificial Sequence
  Synthetic oligonucleotide
ctaacacagccccgagcggcaacagttagg

SEQ ID NO: 238049 - DNA, 30 bp, Artificial Sequence
  Synthetic oligonucleotide
ccgagcgtccccaccagccaaatagttagg

SEQ ID NO: 238050 - DNA, 30 bp, Artificial Sequence
  Synthetic oligonucleotide
aagtcgggcttagccgttacgcacgttagg

SEQ ID NO: 238051 - DNA, 30 bp, Artificial Sequence
  Synthetic oligonucleotide
gaaaagagagaatagttctgggatgttagg

SEQ ID NO: 238052 - DNA, 30 bp, Artificial Sequence
  Synthetic oligonucleotide
acttcaggatgggggaaatattatgttagg

SEQ ID NO: 238053 - DNA, 30 bp, Artificial Sequence
  Synthetic oligonucleotide
cgcgtccgcgacatctagtataactttagg

SEQ ID NO: 238054 - DNA, 30 bp, Artificial Sequence
  Synthetic oligonucleotide
agagctacagttgacgtacacgcgtttagg

SEQ ID NO: 238055 - DNA, 30 bp, Artificial Sequence
  Synthetic oligonucleotide
cgaaccagcaggcccgtccccatttttagg

SEQ ID NO: 238056 - DNA, 30 bp, Artificial Sequence
  Synthetic oligonucleotide
gacaagctgccattaccatggcaaaaacgg

SEQ ID NO: 238057 - DNA, 30 bp, Artificial Sequence
  Synthetic oligonucleotide
catgcactacacgtataagtaggaaaacgg

SEQ ID NO: 238058 - DNA, 30 bp, Artificial Sequence
  Synthetic oligonucleotide
attgcctgctactgttatgacataaaacgg

SEQ ID NO: 238059 - DNA, 30 bp, Artificial Sequence
  Synthetic oligonucleotide
accttaatagaaaagatcaatctaaaacgg

SEQ ID NO: 238060 - DNA, 30 bp, Artificial Sequence
  Synthetic oligonucleotide
agaagcccgtatggagtccatggcaaacgg

SEQ ID NO: 238061 - DNA, 30 bp, Artificial Sequence
  Synthetic oligonucleotide
gttgatgtcaacattgccttgcggaaacgg

SEQ ID NO: 238062 - DNA, 30 bp, Artificial Sequence
  Synthetic oligonucleotide
ttgcaccaatcgaacttaataatgaaacgg

SEQ ID NO: 238063 - DNA, 30 bp, Artificial Sequence
  Synthetic oligonucleotide
atgacaacctctttcaccgtcattaaacgg

SEQ ID NO: 238064 - DNA, 30 bp, Artificial Sequence
  Synthetic oligonucleotide
acatagagttaattgtaggccctacaacgg

SEQ ID NO: 238065 - DNA, 30 bp, Artificial Sequence
  Synthetic oligonucleotide
gcactggaagctggctacgcaagccaacgg

SEQ ID NO: 238066 - DNA, 30 bp, Artificial Sequence
  Synthetic oligonucleotide
agtgaatcaatttgggcgatggaagaacgg

SEQ ID NO: 238067 - DNA, 30 bp, Artificial Sequence
  Synthetic oligonucleotide
aagctagaactttgcattaccagcgaacgg

SEQ ID NO: 238068 - DNA, 30 bp, Artificial Sequence
  Synthetic oligonucleotide
ggacagatctcgagcagtcatctcgaacgg

SEQ ID NO: 238069 - DNA, 30 bp, Artificial Sequence
  Synthetic oligonucleotide
gggtgtcatgtgtctggctatttcgaacgg

SEQ ID NO: 238070 - DNA, 30 bp, Artificial Sequence
  Synthetic oligonucleotide
tccggacacgattaattagatagggaacgg

SEQ ID NO: 238071 - DNA, 30 bp, Artificial Sequence
  Synthetic oligonucleotide
ttcaaaggatggatgacaagggtggaacgg

SEQ ID NO: 238072 - DNA, 30 bp, Artificial Sequence
  Synthetic oligonucleotide
agggcgcttacgggccgttgagtataacgg

SEQ ID NO: 238073 - DNA, 30 bp, Artificial Sequence
  Synthetic oligonucleotide
ttgttgcggagtcgattgcagtactaacgg

SEQ ID NO: 238074 - DNA, 30 bp, Artificial Sequence
  Synthetic oligonucleotide
aagcgatcgtgaacaatcgccacttaacgg

SEQ ID NO: 238075 - DNA, 30 bp, Artificial Sequence
  Synthetic oligonucleotide
caatatagtcgtgctagctccacttaacgg

SEQ ID NO: 238076 - DNA, 30 bp, Artificial Sequence
  Synthetic oligonucleotide
tcgatatgtcagccaccggtgggttaacgg

SEQ ID NO: 238077 - DNA, 30 bp, Artificial Sequence
  Synthetic oligonucleotide
accgaattactttcctgtatcaaaacacgg

SEQ ID NO: 238078 - DNA, 30 bp, Artificial Sequence
  Synthetic oligonucleotide
agttcttattcggactactaagccacacgg

SEQ ID NO: 238079 - DNA, 30 bp, Artificial Sequence
  Synthetic oligonucleotide
tgtcaaatggtgccagtagaagagacacgg

SEQ ID NO: 238080 - DNA, 30 bp, Artificial Sequence
  Synthetic oligonucleotide
ctaatagacggtacatgcgaagctacacgg

SEQ ID NO: 238081 - DNA, 30 bp, Artificial Sequence
  Synthetic oligonucleotide
agcggtagcttacacaccttccatccacgg

SEQ ID NO: 238082 - DNA, 30 bp, Artificial Sequence
  Synthetic oligonucleotide
tagttgctgggatagcaaaatcgagcacgg

SEQ ID NO: 238083 - DNA, 31 bp, Artificial Sequence
  Synthetic oligonucleotide
ccagtcgtgtccacaagttcgaggagcacgg

SEQ ID NO: 238084 - DNA, 30 bp, Artificial Sequence
  Synthetic oligonucleotide
tcacgcttgacccctactacattagcacgg

SEQ ID NO: 238085 - DNA, 30 bp, Artificial Sequence
  Synthetic oligonucleotide
actaaacgcggacggtctaagctatcacgg

SEQ ID NO: 238086 - DNA, 30 bp, Artificial Sequence
  Synthetic oligonucleotide
agcaagagatatacgaaatcggcctcacgg

SEQ ID NO: 238087 - DNA, 30 bp, Artificial Sequence
  Synthetic oligonucleotide
agcggggtgagtaccatcaatgggtcacgg

SEQ ID NO: 238088 - DNA, 30 bp, Artificial Sequence
  Synthetic oligonucleotide
cgaatattaattgagggtacaataagacgg

SEQ ID NO: 238089 - DNA, 30 bp, Artificial Sequence
  Synthetic oligonucleotide
cgtctaggtcctgtgttttcaatcagacgg

SEQ ID NO: 238090 - DNA, 30 bp, Artificial Sequence
  Synthetic oligonucleotide
tttggggattctttgtgcccgaagagacgg

SEQ ID NO: 238091 - DNA, 30 bp, Artificial Sequence
  Synthetic oligonucleotide
gtatctgtaacaggcgtattccagagacgg

SEQ ID NO: 238092 - DNA, 30 bp, Artificial Sequence
  Synthetic oligonucleotide
cccgagccgctacagtgggtcaggagacgg

SEQ ID NO: 238093 - DNA, 30 bp, Artificial Sequence
  Synthetic oligonucleotide
tcaattatggtccgaatactctggagacgg

SEQ ID NO: 238094 - DNA, 30 bp, Artificial Sequence
  Synthetic oligonucleotide
tggcagaatttcaacacagggactagacgg

SEQ ID NO: 238095 - DNA, 30 bp, Artificial Sequence
  Synthetic oligonucleotide
ccatgtccactatagatattcgaacgacgg

SEQ ID NO: 238096 - DNA, 30 bp, Artificial Sequence
  Synthetic oligonucleotide
tgaggtcgtcgcggcgggaaccaccgacgg

SEQ ID NO: 238097 - DNA, 30 bp, Artificial Sequence
  Synthetic oligonucleotide
aatgagcgaaagaacgataactcaggacgg

SEQ ID NO: 238098 - DNA, 30 bp, Artificial Sequence
  Synthetic oligonucleotide
cctcgagcactttatacgttcataggacgg

SEQ ID NO: 238099 - DNA, 30 bp, Artificial Sequence
  Synthetic oligonucleotide
tgcaaacttggcctaggataccgcggacgg

SEQ ID NO: 238100 - DNA, 30 bp, Artificial Sequence
  Synthetic oligonucleotide
gaacttcctatccttcaagtctgcggacgg

SEQ ID NO: 238101 - DNA, 30 bp, Artificial Sequence
  Synthetic oligonucleotide
ggtatgattaatgttaattttcagggacgg

SEQ ID NO: 238102 - DNA, 30 bp, Artificial Sequence
  Synthetic oligonucleotide
gaggcttgatgggaccgatactcgggacgg

SEQ ID NO: 238103 - DNA, 30 bp, Artificial Sequence
  Synthetic oligonucleotide
tcacgccaacaaggggggccgtggggacgg

SEQ ID NO: 238104 - DNA, 30 bp, Artificial Sequence
  Synthetic oligonucleotide
cggcagattgaccctacgatagcctgacgg

SEQ ID NO: 238105 - DNA, 30 bp, Artificial Sequence
  Synthetic oligonucleotide
caacggttcattcgattagcaacgtgacgg

SEQ ID NO: 238106 - DNA, 30 bp, Artificial Sequence
  Synthetic oligonucleotide
aaacagtcatgtcccggtaagggaatacgg

SEQ ID NO: 238107 - DNA, 30 bp, Artificial Sequence
  Synthetic oligonucleotide
cgaatccttcgcacatatggctggatacgg

SEQ ID NO: 238108 - DNA, 30 bp, Artificial Sequence
  Synthetic oligonucleotide
tggggggaaccgggtgattgctttatacgg

SEQ ID NO: 238109 - DNA, 30 bp, Artificial Sequence
  Synthetic oligonucleotide
aaactccgtatagatgaggaacgactacgg

SEQ ID NO: 238110 - DNA, 30 bp, Artificial Sequence
  Synthetic oligonucleotide
ggttgtgatcttatagcgccacgactacgg

SEQ ID NO: 238111 - DNA, 31 bp, Artificial Sequence
  Synthetic oligonucleotide
acttattggacgcgactagacggagctacgg

SEQ ID NO: 238112 - DNA, 30 bp, Artificial Sequence
  Synthetic oligonucleotide
aagatcggcccgggccatgaacggctacgg

SEQ ID NO: 238113 - DNA, 30 bp, Artificial Sequence
  Synthetic oligonucleotide
aaacgcggcccccggccacaatctctacgg

SEQ ID NO: 238114 - DNA, 30 bp, Artificial Sequence
  Synthetic oligonucleotide
tgtgtctgtccatcatatgggccggtacgg

SEQ ID NO: 238115 - DNA, 30 bp, Artificial Sequence
  Synthetic oligonucleotide
acgatgacccgcccaaggacactggtacgg

SEQ ID NO: 238116 - DNA, 30 bp, Artificial Sequence
  Synthetic oligonucleotide
tcattcgtcggcaaacgaacgttattacgg

SEQ ID NO: 238117 - DNA, 30 bp, Artificial Sequence
  Synthetic oligonucleotide
taacagatcacgtggttgtattggttacgg

SEQ ID NO: 238118 - DNA, 30 bp, Artificial Sequence
  Synthetic oligonucleotide
gtccatataaggacaagcctaggtttacgg

SEQ ID NO: 238119 - DNA, 30 bp, Artificial Sequence
  Synthetic oligonucleotide
acatttatagacggcctataagtaaaccgg

SEQ ID NO: 238120 - DNA, 30 bp, Artificial Sequence
  Synthetic oligonucleotide
tgcaattttttgaaagttggaaggaaccgg

SEQ ID NO: 238121 - DNA, 30 bp, Artificial Sequence
  Synthetic oligonucleotide
cgaacatctatatcgacacgctggaaccgg

SEQ ID NO: 238122 - DNA, 30 bp, Artificial Sequence
  Synthetic oligonucleotide
taggtggattgtctcgagagcttgaaccgg

SEQ ID NO: 238123 - DNA, 30 bp, Artificial Sequence
  Synthetic oligonucleotide
ggtgggtacaccgattatagagttaaccgg

SEQ ID NO: 238124 - DNA, 30 bp, Artificial Sequence
  Synthetic oligonucleotide
gattaccagggccaggcacgtccacaccgg

SEQ ID NO: 238125 - DNA, 30 bp, Artificial Sequence
  Synthetic oligonucleotide
gagggagcgactgccaggaggagacaccgg

SEQ ID NO: 238126 - DNA, 30 bp, Artificial Sequence
  Synthetic oligonucleotide
aggtttaggttatgtgactcgcgccaccgg

SEQ ID NO: 238127 - DNA, 30 bp, Artificial Sequence
  Synthetic oligonucleotide
caccaggtagaataggaatctacgcaccgg

SEQ ID NO: 238128 - DNA, 30 bp, Artificial Sequence
  Synthetic oligonucleotide
gtaacaagcgacttacgtattgcgcaccgg

SEQ ID NO: 238129 - DNA, 30 bp, Artificial Sequence
  Synthetic oligonucleotide
tcgtacttaagccttaatccactagaccgg

SEQ ID NO: 238130 - DNA, 30 bp, Artificial Sequence
  Synthetic oligonucleotide
tagtcgcaaaaaaccaaatattcggaccgg

SEQ ID NO: 238131 - DNA, 30 bp, Artificial Sequence
  Synthetic oligonucleotide
caaacgacttggaggattcggggggaccgg

SEQ ID NO: 238132 - DNA, 30 bp, Artificial Sequence
  Synthetic oligonucleotide
gtaaagcttaaacaggtagtctgggaccgg

SEQ ID NO: 238133 - DNA, 30 bp, Artificial Sequence
  Synthetic oligonucleotide
caaccgacaatgccaaacctctatgaccgg

SEQ ID NO: 238134 - DNA, 30 bp, Artificial Sequence
  Synthetic oligonucleotide
cgggatcattatccaaaacatattgaccgg

SEQ ID NO: 238135 - DNA, 30 bp, Artificial Sequence
  Synthetic oligonucleotide
ctcgaaccacaatattctcttattgaccgg

SEQ ID NO: 238136 - DNA, 30 bp, Artificial Sequence
  Synthetic oligonucleotide
cccaaacgtagcggatcgagcgttgaccgg

SEQ ID NO: 238137 - DNA, 30 bp, Artificial Sequence
  Synthetic oligonucleotide
ccagttcaattcgtggagggaaagtaccgg

SEQ ID NO: 238138 - DNA, 30 bp, Artificial Sequence
  Synthetic oligonucleotide
acggccacaatcccgtgcctataaacccgg

SEQ ID NO: 238139 - DNA, 30 bp, Artificial Sequence
  Synthetic oligonucleotide
tgaggggacatcttttgttgaggaacccgg

SEQ ID NO: 238140 - DNA, 30 bp, Artificial Sequence
  Synthetic oligonucleotide
gcttataacaattatactaagccgacccgg

SEQ ID NO: 238141 - DNA, 30 bp, Artificial Sequence
  Synthetic oligonucleotide
acagttacaggccatacaaaggggacccgg

SEQ ID NO: 238142 - DNA, 30 bp, Artificial Sequence
  Synthetic oligonucleotide
tgtataagtggacgatcgattggcccccgg

SEQ ID NO: 238143 - DNA, 30 bp, Artificial Sequence
  Synthetic oligonucleotide
ctgcgagtacgtgaagggaccgtgccccgg

SEQ ID NO: 238144 - DNA, 30 bp, Artificial Sequence
  Synthetic oligonucleotide
ctgactgccgtttcttgtatatatccccgg

SEQ ID NO: 238145 - DNA, 30 bp, Artificial Sequence
  Synthetic oligonucleotide
atgacaagcaagtgactggttactccccgg

SEQ ID NO: 238146 - DNA, 30 bp, Artificial Sequence
  Synthetic oligonucleotide
taaaagggacgttcgtggggctgtccccgg

SEQ ID NO: 238147 - DNA, 30 bp, Artificial Sequence
  Synthetic oligonucleotide
cggcaaatgtagcctctgtctagagcccgg

SEQ ID NO: 238148 - DNA, 30 bp, Artificial Sequence
  Synthetic oligonucleotide
ccttccaggcacgcccgcgtttaggcccgg

SEQ ID NO: 238149 - DNA, 30 bp, Artificial Sequence
  Synthetic oligonucleotide
ctgttattgaaaaaaatcgtagagtcccgg

SEQ ID NO: 238150 - DNA, 30 bp, Artificial Sequence
  Synthetic oligonucleotide
ggcatgcgtcgacgacccggctagtcccgg

SEQ ID NO: 238151 - DNA, 30 bp, Artificial Sequence
  Synthetic oligonucleotide
catacacaagtccgactctatgcttcccgg

SEQ ID NO: 238152 - DNA, 30 bp, Artificial Sequence
  Synthetic oligonucleotide
tcccgtctcaacgtataaggtaagagccgg

SEQ ID NO: 238153 - DNA, 30 bp, Artificial Sequence
  Synthetic oligonucleotide
tttatggattaatatcagcttcagagccgg

SEQ ID NO: 238154 - DNA, 31 bp, Artificial Sequence
  Synthetic oligonucleotide
gcgtagggcagtgtagcttagttagagccgg

SEQ ID NO: 238155 - DNA, 30 bp, Artificial Sequence
  Synthetic oligonucleotide
agggttgagacggtgtcttactcacgccgg

SEQ ID NO: 238156 - DNA, 30 bp, Artificial Sequence
  Synthetic oligonucleotide
gacccttaaaaggtcggggtaacaggccgg

SEQ ID NO: 238157 - DNA, 30 bp, Artificial Sequence
  Synthetic oligonucleotide
agggtaactattgtacccgtgtcaggccgg

SEQ ID NO: 238158 - DNA, 30 bp, Artificial Sequence
  Synthetic oligonucleotide
caagtactgtggaggggaaggataggccgg

SEQ ID NO: 238159 - DNA, 30 bp, Artificial Sequence
  Synthetic oligonucleotide
agtcggactaaacgtcgtgttatcggccgg

SEQ ID NO: 238160 - DNA, 30 bp, Artificial Sequence
  Synthetic oligonucleotide
gcttaagtacagacctcctggtagggccgg

SEQ ID NO: 238161 - DNA, 30 bp, Artificial Sequence
  Synthetic oligonucleotide
ggtcatctagcacgtgcgagcccgggccgg

SEQ ID NO: 238162 - DNA, 30 bp, Artificial Sequence
  Synthetic oligonucleotide
tttgataaaaacaggcgggagctcatccgg

SEQ ID NO: 238163 - DNA, 30 bp, Artificial Sequence
  Synthetic oligonucleotide
atcactgtcacttgtttacgtctgatccgg

SEQ ID NO: 238164 - DNA, 30 bp, Artificial Sequence
  Synthetic oligonucleotide
ctaattttagcgggtagtcactatatccgg

SEQ ID NO: 238165 - DNA, 30 bp, Artificial Sequence
  Synthetic oligonucleotide
aatcggcgctccaaagcggcccttatccgg

SEQ ID NO: 238166 - DNA, 31 bp, Artificial Sequence
  Synthetic oligonucleotide
ttcatgccgtgggagatccgatgcactccgg

SEQ ID NO: 238167 - DNA, 30 bp, Artificial Sequence
  Synthetic oligonucleotide
caatagcatgggttggccgggtcactccgg

SEQ ID NO: 238168 - DNA, 30 bp, Artificial Sequence
  Synthetic oligonucleotide
gtagcgaacagtaagatagggcccctccgg

SEQ ID NO: 238169 - DNA, 30 bp, Artificial Sequence
  Synthetic oligonucleotide
atatataacgatcattagccacaggtccgg

SEQ ID NO: 238170 - DNA, 30 bp, Artificial Sequence
  Synthetic oligonucleotide
aatacttaacgacaggttagtcgggtccgg

SEQ ID NO: 238171 - DNA, 30 bp, Artificial Sequence
  Synthetic oligonucleotide
aaaagagaaatgccccctcaatgggtccgg

SEQ ID NO: 238172 - DNA, 30 bp, Artificial Sequence
  Synthetic oligonucleotide
ccgaaacaggttcagtccagtcctgtccgg

SEQ ID NO: 238173 - DNA, 30 bp, Artificial Sequence
  Synthetic oligonucleotide
ggagtgggaatgtcggttgccatgttccgg

SEQ ID NO: 238174 - DNA, 30 bp, Artificial Sequence
  Synthetic oligonucleotide
atgtagacatctcatgatataacaaagcgg

SEQ ID NO: 238175 - DNA, 30 bp, Artificial Sequence
  Synthetic oligonucleotide
gacacacgccgacaggtggttgtcaagcgg

SEQ ID NO: 238176 - DNA, 30 bp, Artificial Sequence
  Synthetic oligonucleotide
caggggttgatattgaatggacagaagcgg

SEQ ID NO: 238177 - DNA, 30 bp, Artificial Sequence
  Synthetic oligonucleotide
gtgacatgactatttagtgcacggaagcgg

SEQ ID NO: 238178 - DNA, 31 bp, Artificial Sequence
  Synthetic oligonucleotide
ggacatacgctagctcgaaaatatacagcgg

SEQ ID NO: 238179 - DNA, 30 bp, Artificial Sequence
  Synthetic oligonucleotide
ttagcatagaagcaccaataggtacagcgg

SEQ ID NO: 238180 - DNA, 30 bp, Artificial Sequence
  Synthetic oligonucleotide
acaaccgttccctagcgcgatagccagcgg

SEQ ID NO: 238181 - DNA, 30 bp, Artificial Sequence
  Synthetic oligonucleotide
agcaaattctattgggctgcttctcagcgg

SEQ ID NO: 238182 - DNA, 30 bp, Artificial Sequence
  Synthetic oligonucleotide
tagttaataggttgatattaaggtcagcgg

SEQ ID NO: 238183 - DNA, 30 bp, Artificial Sequence
  Synthetic oligonucleotide
aaatctgcaataacaactccctgagagcgg

SEQ ID NO: 238184 - DNA, 30 bp, Artificial Sequence
  Synthetic oligonucleotide
acaacgatggtagtaaatttgttagagcgg

SEQ ID NO: 238185 - DNA, 30 bp, Artificial Sequence
  Synthetic oligonucleotide
aatttagcgtaaacactgcgcaaggagcgg

SEQ ID NO: 238186 - DNA, 30 bp, Artificial Sequence
  Synthetic oligonucleotide
cagtgatggtttcaggggtgcacatagcgg

SEQ ID NO: 238187 - DNA, 30 bp, Artificial Sequence
  Synthetic oligonucleotide
acatacatcagtattctatgcctatagcgg

SEQ ID NO: 238188 - DNA, 30 bp, Artificial Sequence
  Synthetic oligonucleotide
agggcactccggacgttcgccgagtagcgg

SEQ ID NO: 238189 - DNA, 30 bp, Artificial Sequence
  Synthetic oligonucleotide
ctaatggaccatgcatctagcccgtagcgg

SEQ ID NO: 238190 - DNA, 30 bp, Artificial Sequence
  Synthetic oligonucleotide
accgtgggctaaagaccttgcgcgtagcgg

SEQ ID NO: 238191 - DNA, 30 bp, Artificial Sequence
  Synthetic oligonucleotide
ggttattatttgtcctctggggcgtagcgg

SEQ ID NO: 238192 - DNA, 30 bp, Artificial Sequence
  Synthetic oligonucleotide
agcgcctgtacccttaaaagagattagcgg

SEQ ID NO: 238193 - DNA, 30 bp, Artificial Sequence
  Synthetic oligonucleotide
caatacataggataagattagacttagcgg

SEQ ID NO: 238194 - DNA, 30 bp, Artificial Sequence
  Synthetic oligonucleotide
gaagaacgaaagcgttgatagcatacgcgg

SEQ ID NO: 238195 - DNA, 30 bp, Artificial Sequence
  Synthetic oligonucleotide
aacatatatacacgcagtttaagtacgcgg

SEQ ID NO: 238196 - DNA, 30 bp, Artificial Sequence
  Synthetic oligonucleotide
tttgtaataatggcagggtgtattacgcgg

SEQ ID NO: 238197 - DNA, 30 bp, Artificial Sequence
  Synthetic oligonucleotide
gggtaagtgtacatcacaaggttgccgcgg

SEQ ID NO: 238198 - DNA, 30 bp, Artificial Sequence
  Synthetic oligonucleotide
caactggaagtcgactgtggcattccgcgg

SEQ ID NO: 238199 - DNA, 30 bp, Artificial Sequence
  Synthetic oligonucleotide
aaccattctcacaactagctacttccgcgg

SEQ ID NO: 238200 - DNA, 30 bp, Artificial Sequence
  Synthetic oligonucleotide
atgcacaggcccagcatggctgttccgcgg

SEQ ID NO: 238201 - DNA, 30 bp, Artificial Sequence
  Synthetic oligonucleotide
gaaagcggttacggagtatgatacgcgcgg

SEQ ID NO: 238202 - DNA, 30 bp, Artificial Sequence
  Synthetic oligonucleotide
gatgcgacccagactaggggttgggcgcgg

SEQ ID NO: 238203 - DNA, 30 bp, Artificial Sequence
  Synthetic oligonucleotide
agtttccgtagatcttgtgtccgtgcgcgg

SEQ ID NO: 238204 - DNA, 30 bp, Artificial Sequence
  Synthetic oligonucleotide
gggcatctcttctgaggggatgaatcgcgg

SEQ ID NO: 238205 - DNA, 30 bp, Artificial Sequence
  Synthetic oligonucleotide
gttggagtaatacgggacaaattctcgcgg

SEQ ID NO: 238206 - DNA, 30 bp, Artificial Sequence
  Synthetic oligonucleotide
cccacgcatttgtccgtcatatagtcgcgg

SEQ ID NO: 238207 - DNA, 30 bp, Artificial Sequence
  Synthetic oligonucleotide
atcgtgggattatggttggacaggtcgcgg

SEQ ID NO: 238208 - DNA, 30 bp, Artificial Sequence
  Synthetic oligonucleotide
aagatgggagggtgcgtatcagtgtcgcgg

SEQ ID NO: 238209 - DNA, 30 bp, Artificial Sequence
  Synthetic oligonucleotide
aattaagccaaattcaggactctttcgcgg

SEQ ID NO: 238210 - DNA, 30 bp, Artificial Sequence
  Synthetic oligonucleotide
aaacatgtgtaactccccatggtttcgcgg

SEQ ID NO: 238211 - DNA, 30 bp, Artificial Sequence
  Synthetic oligonucleotide
tccagatcgattctatgaagtcccaggcgg

SEQ ID NO: 238212 - DNA, 30 bp, Artificial Sequence
  Synthetic oligonucleotide
ccgggatcacgactacgggtcgccaggcgg

SEQ ID NO: 238213 - DNA, 30 bp, Artificial Sequence
  Synthetic oligonucleotide
cggccgagagcaatcgtcagcggccggcgg

SEQ ID NO: 238214 - DNA, 30 bp, Artificial Sequence
  Synthetic oligonucleotide
cggaatttccaaggaaaccctctccggcgg

SEQ ID NO: 238215 - DNA, 29 bp, Artificial Sequence
  Synthetic oligonucleotide
gctccatgggacaaagcagacaagggcgg

SEQ ID NO: 238216 - DNA, 30 bp, Artificial Sequence
  Synthetic oligonucleotide
cggacatggcattcagcccggcaagggcgg

SEQ ID NO: 238217 - DNA, 30 bp, Artificial Sequence
  Synthetic oligonucleotide
ttacacctaatgtggcatcggagagggcgg

SEQ ID NO: 238218 - DNA, 30 bp, Artificial Sequence
  Synthetic oligonucleotide
ttctgcagctcgctgacaggtttggggcgg

SEQ ID NO: 238219 - DNA, 30 bp, Artificial Sequence
  Synthetic oligonucleotide
gatggtgggtgcaaataaaaacctgggcgg

SEQ ID NO: 238220 - DNA, 30 bp, Artificial Sequence
  Synthetic oligonucleotide
tttagcgaccccatatgggaacttgggcgg

SEQ ID NO: 238221 - DNA, 30 bp, Artificial Sequence
  Synthetic oligonucleotide
gctgcagttaacagagaacccgtctggcgg

SEQ ID NO: 238222 - DNA, 30 bp, Artificial Sequence
  Synthetic oligonucleotide
gagcaggagtgtgatattggtgagtggcgg

SEQ ID NO: 238223 - DNA, 30 bp, Artificial Sequence
  Synthetic oligonucleotide
tcaccgcccattagcctaaggaaaatgcgg

SEQ ID NO: 238224 - DNA, 30 bp, Artificial Sequence
  Synthetic oligonucleotide
gcatggtcgcatcttcttgtatcactgcgg

SEQ ID NO: 238225 - DNA, 30 bp, Artificial Sequence
  Synthetic oligonucleotide
atgtgtgatgagagggcgaacgccctgcgg

SEQ ID NO: 238226 - DNA, 30 bp, Artificial Sequence
  Synthetic oligonucleotide
ggcgaacgttgattagtggtcttagtgcgg

SEQ ID NO: 238227 - DNA, 30 bp, Artificial Sequence
  Synthetic oligonucleotide
gcatcacgacatttagcttgagaggtgcgg

SEQ ID NO: 238228 - DNA, 30 bp, Artificial Sequence
  Synthetic oligonucleotide
aagaaagaatcgcataagacgtaggtgcgg

SEQ ID NO: 238229 - DNA, 30 bp, Artificial Sequence
  Synthetic oligonucleotide
cgcggaacgggcatggaacgtagggtgcgg

SEQ ID NO: 238230 - DNA, 30 bp, Artificial Sequence
  Synthetic oligonucleotide
cgtttattgcaattagtgttgcgtgtgcgg

SEQ ID NO: 238231 - DNA, 30 bp, Artificial Sequence
  Synthetic oligonucleotide
cgtcttgctacctgtagctgtattgtgcgg

SEQ ID NO: 238232 - DNA, 30 bp, Artificial Sequence
  Synthetic oligonucleotide
atctactgctctcacttctaggttgtgcgg

SEQ ID NO: 238233 - DNA, 30 bp, Artificial Sequence
  Synthetic oligonucleotide
taatgcttgaaccgacgtttgtttgtgcgg

SEQ ID NO: 238234 - DNA, 30 bp, Artificial Sequence
  Synthetic oligonucleotide
atgttatgctgatactgcccatcattgcgg

SEQ ID NO: 238235 - DNA, 30 bp, Artificial Sequence
  Synthetic oligonucleotide
gacgagatgtatccgaaatcagtcttgcgg

SEQ ID NO: 238236 - DNA, 30 bp, Artificial Sequence
  Synthetic oligonucleotide
tcagtcgaggtctcgacatttgggttgcgg

SEQ ID NO: 238237 - DNA, 30 bp, Artificial Sequence
  Synthetic oligonucleotide
ttacgtaggatgacaaaaaaacatttgcgg

SEQ ID NO: 238238 - DNA, 30 bp, Artificial Sequence
  Synthetic oligonucleotide
ggggaatgtgtcgttgttaaccgtttgcgg

SEQ ID NO: 238239 - DNA, 30 bp, Artificial Sequence
  Synthetic oligonucleotide
atgtataggaatcggtcggggggtttgcgg

SEQ ID NO: 238240 - DNA, 30 bp, Artificial Sequence
  Synthetic oligonucleotide
gatccagagtaagtaaacgcctttttgcgg

SEQ ID NO: 238241 - DNA, 30 bp, Artificial Sequence
  Synthetic oligonucleotide
aatttgccttatgcaaaggacctaaatcgg

SEQ ID NO: 238242 - DNA, 30 bp, Artificial Sequence
  Synthetic oligonucleotide
ctgaatatcgtaggttgcggcgacaatcgg

SEQ ID NO: 238243 - DNA, 30 bp, Artificial Sequence
  Synthetic oligonucleotide
ctcccaaaccacggtgcttacctcaatcgg

SEQ ID NO: 238244 - DNA, 30 bp, Artificial Sequence
  Synthetic oligonucleotide
tgattgtccaaatgaatgaaccagaatcgg

SEQ ID NO: 238245 - DNA, 30 bp, Artificial Sequence
  Synthetic oligonucleotide
atgcaattcgtcgtggtcttttagaatcgg

SEQ ID NO: 238246 - DNA, 30 bp, Artificial Sequence
  Synthetic oligonucleotide
ccatgagaccgttctgttccgtggaatcgg

SEQ ID NO: 238247 - DNA, 30 bp, Artificial Sequence
  Synthetic oligonucleotide
gccaaacagaaagctggatacgctaatcgg

SEQ ID NO: 238248 - DNA, 30 bp, Artificial Sequence
  Synthetic oligonucleotide
ggtcgtaagttgtacattatctgtaatcgg

SEQ ID NO: 238249 - DNA, 30 bp, Artificial Sequence
  Synthetic oligonucleotide
caacagtgtcgcgcccgaaatcaacatcgg

SEQ ID NO: 238250 - DNA, 30 bp, Artificial Sequence
  Synthetic oligonucleotide
cgtctttaggtctgggtgctggaacatcgg

SEQ ID NO: 238251 - DNA, 30 bp, Artificial Sequence
  Synthetic oligonucleotide
tagtgtaaagacaatgagctactacatcgg

SEQ ID NO: 238252 - DNA, 30 bp, Artificial Sequence
  Synthetic oligonucleotide
atatgcagtgttttacagccaacgcatcgg

SEQ ID NO: 238253 - DNA, 30 bp, Artificial Sequence
  Synthetic oligonucleotide
accagcgtaacggggagcccggcgcatcgg

SEQ ID NO: 238254 - DNA, 30 bp, Artificial Sequence
  Synthetic oligonucleotide
ggtccgtagactttgcgatgcctcgatcgg

SEQ ID NO: 238255 - DNA, 30 bp, Artificial Sequence
  Synthetic oligonucleotide
tggatttgcaacttgagtagattggatcgg

SEQ ID NO: 238256 - DNA, 30 bp, Artificial Sequence
  Synthetic oligonucleotide
tggaatttcacgagggcaccaagtgatcgg

SEQ ID NO: 238257 - DNA, 30 bp, Artificial Sequence
  Synthetic oligonucleotide
tcggatgctgggcaaccgggtatctatcgg

SEQ ID NO: 238258 - DNA, 30 bp, Artificial Sequence
  Synthetic oligonucleotide
ccagggcattcagttattatgtattatcgg

SEQ ID NO: 238259 - DNA, 30 bp, Artificial Sequence
  Synthetic oligonucleotide
gcgattatcttaaggatggccaaaactcgg

SEQ ID NO: 238260 - DNA, 30 bp, Artificial Sequence
  Synthetic oligonucleotide
ttggtattgaaaaataacacataaactcgg

SEQ ID NO: 238261 - DNA, 30 bp, Artificial Sequence
  Synthetic oligonucleotide
gtatggcctgtggtaaaagctaggactcgg

SEQ ID NO: 238262 - DNA, 30 bp, Artificial Sequence
  Synthetic oligonucleotide
cgctcattacagtcgttatgtgggactcgg

SEQ ID NO: 238263 - DNA, 30 bp, Artificial Sequence
  Synthetic oligonucleotide
tgttgagagttagttcgaaagagacctcgg

SEQ ID NO: 238264 - DNA, 30 bp, Artificial Sequence
  Synthetic oligonucleotide
gagtccactgagcatgcgtatcatcctcgg

SEQ ID NO: 238265 - DNA, 30 bp, Artificial Sequence
  Synthetic oligonucleotide
catatgtttgagggtatcttcatcgctcgg

SEQ ID NO: 238266 - DNA, 30 bp, Artificial Sequence
  Synthetic oligonucleotide
aagcccccggcgggacgttacgatgctcgg

SEQ ID NO: 238267 - DNA, 30 bp, Artificial Sequence
  Synthetic oligonucleotide
gacactagtttaagccgttgttaatctcgg

SEQ ID NO: 238268 - DNA, 30 bp, Artificial Sequence
  Synthetic oligonucleotide
gcagcggcaggatttaattagcagtctcgg

SEQ ID NO: 238269 - DNA, 30 bp, Artificial Sequence
  Synthetic oligonucleotide
accatatacgaggacgtgggttcgtctcgg

SEQ ID NO: 238270 - DNA, 30 bp, Artificial Sequence
  Synthetic oligonucleotide
gagcagacaccagttcagtataattctcgg

SEQ ID NO: 238271 - DNA, 30 bp, Artificial Sequence
  Synthetic oligonucleotide
gtaaacggcttggcttgggttgtaagtcgg

SEQ ID NO: 238272 - DNA, 30 bp, Artificial Sequence
  Synthetic oligonucleotide
aaccagtcttctttgacagtgttaagtcgg

SEQ ID NO: 238273 - DNA, 30 bp, Artificial Sequence
  Synthetic oligonucleotide
taggtaactcagcatgacacattcagtcgg

SEQ ID NO: 238274 - DNA, 30 bp, Artificial Sequence
  Synthetic oligonucleotide
ttaagtagttgtgattatgtcaagagtcgg

SEQ ID NO: 238275 - DNA, 30 bp, Artificial Sequence
  Synthetic oligonucleotide
gctgtcaagggagtttctttggcgagtcgg

SEQ ID NO: 238276 - DNA, 30 bp, Artificial Sequence
  Synthetic oligonucleotide
gaagctaagtcgcatttgcaaagtagtcgg

SEQ ID NO: 238277 - DNA, 30 bp, Artificial Sequence
  Synthetic oligonucleotide
aagtaaccaatactccgatgtcgacgtcgg

SEQ ID NO: 238278 - DNA, 30 bp, Artificial Sequence
  Synthetic oligonucleotide
tccttagactactcatagtcgtaaggtcgg

SEQ ID NO: 238279 - DNA, 30 bp, Artificial Sequence
  Synthetic oligonucleotide
agattggtttggaatgtcttttacggtcgg

SEQ ID NO: 238280 - DNA, 30 bp, Artificial Sequence
  Synthetic oligonucleotide
cacggggctggatgtgcagacttgggtcgg

SEQ ID NO: 238281 - DNA, 30 bp, Artificial Sequence
  Synthetic oligonucleotide
gcctagagcaagagctgtctaaaatgtcgg

SEQ ID NO: 238282 - DNA, 30 bp, Artificial Sequence
  Synthetic oligonucleotide
acctatatactcccttcgaggtcatgtcgg

SEQ ID NO: 238283 - DNA, 30 bp, Artificial Sequence
  Synthetic oligonucleotide
acaaacactattcttgaagggtgatgtcgg

SEQ ID NO: 238284 - DNA, 30 bp, Artificial Sequence
  Synthetic oligonucleotide
acaaagagtctctcaggaaacacaattcgg

SEQ ID NO: 238285 - DNA, 30 bp, Artificial Sequence
  Synthetic oligonucleotide
cacatacatggacgctaagtgggaattcgg

SEQ ID NO: 238286 - DNA, 30 bp, Artificial Sequence
  Synthetic oligonucleotide
gcaaatgaacgtccgttccagcagattcgg

SEQ ID NO: 238287 - DNA, 30 bp, Artificial Sequence
  Synthetic oligonucleotide
gctaagattatctgtctcccagcacttcgg

SEQ ID NO: 238288 - DNA, 30 bp, Artificial Sequence
  Synthetic oligonucleotide
aattaaggatatagattgtatgtccttcgg

SEQ ID NO: 238289 - DNA, 30 bp, Artificial Sequence
  Synthetic oligonucleotide
ggtcaggttaacgggggcgggagtcttcgg

SEQ ID NO: 238290 - DNA, 30 bp, Artificial Sequence
  Synthetic oligonucleotide
ctggtttgtgcctatcgcgacgtcgttcgg

SEQ ID NO: 238291 - DNA, 30 bp, Artificial Sequence
  Synthetic oligonucleotide
atacaactgtctgctctttatttcgttcgg

SEQ ID NO: 238292 - DNA, 30 bp, Artificial Sequence
  Synthetic oligonucleotide
ttcacactcttgcaaaataggagatttcgg

SEQ ID NO: 238293 - DNA, 30 bp, Artificial Sequence
  Synthetic oligonucleotide
ctaacttaatctggccaccgagcctttcgg

SEQ ID NO: 238294 - DNA, 30 bp, Artificial Sequence
  Synthetic oligonucleotide
gttccactactatgttatcaggagtttcgg

SEQ ID NO: 238295 - DNA, 30 bp, Artificial Sequence
  Synthetic oligonucleotide
tgagaaaaacatgcttattacccgtttcgg

SEQ ID NO: 238296 - DNA, 30 bp, Artificial Sequence
  Synthetic oligonucleotide
ctttagtgattccataaatacaggtttcgg

SEQ ID NO: 238297 - DNA, 30 bp, Artificial Sequence
  Synthetic oligonucleotide
cattaggttgggaccgaaggcaggtttcgg

SEQ ID NO: 238298 - DNA, 30 bp, Artificial Sequence
  Synthetic oligonucleotide
tgccgtctacgtcggtcttgagcttttcgg

SEQ ID NO: 238299 - DNA, 30 bp, Artificial Sequence
  Synthetic oligonucleotide
gcgaattgaaccgtagtgcttttttttcgg

SEQ ID NO: 238300 - DNA, 30 bp, Artificial Sequence
  Synthetic oligonucleotide
ttgtgtagcgtttttctatatgcaaaaggg

SEQ ID NO: 238301 - DNA, 30 bp, Artificial Sequence
  Synthetic oligonucleotide
cttggtcataccgtcggtgtctcaaaaggg

SEQ ID NO: 238302 - DNA, 30 bp, Artificial Sequence
  Synthetic oligonucleotide
cgggtccgtcttgagggacaaggcaaaggg

SEQ ID NO: 238303 - DNA, 30 bp, Artificial Sequence
  Synthetic oligonucleotide
ttattatggatcaggttgtaagcacaaggg

SEQ ID NO: 238304 - DNA, 30 bp, Artificial Sequence
  Synthetic oligonucleotide
ggggcaggcattgggtcggcggcacaaggg

SEQ ID NO: 238305 - DNA, 30 bp, Artificial Sequence
  Synthetic oligonucleotide
ccaattattgccgtgggcccgttccaaggg

SEQ ID NO: 238306 - DNA, 30 bp, Artificial Sequence
  Synthetic oligonucleotide
agggtctcttgacttgaatcagatcaaggg

SEQ ID NO: 238307 - DNA, 30 bp, Artificial Sequence
  Synthetic oligonucleotide
gtgcgctctgccctgatccgatctcaaggg

SEQ ID NO: 238308 - DNA, 30 bp, Artificial Sequence
  Synthetic oligonucleotide
accaacactattaatgagatactagaaggg

SEQ ID NO: 238309 - DNA, 30 bp, Artificial Sequence
  Synthetic oligonucleotide
tagttttggtaaaaatgcgaggccgaaggg

SEQ ID NO: 238310 - DNA, 30 bp, Artificial Sequence
  Synthetic oligonucleotide
aagagaaaagctaaagcatcaccggaaggg

SEQ ID NO: 238311 - DNA, 30 bp, Artificial Sequence
  Synthetic oligonucleotide
ttgaagtgctgtacgagacccgtataaggg

SEQ ID NO: 238312 - DNA, 30 bp, Artificial Sequence
  Synthetic oligonucleotide
gtatgtgccatcggattttgcgtataaggg

SEQ ID NO: 238313 - DNA, 30 bp, Artificial Sequence
  Synthetic oligonucleotide
tggatacaatcgattaaagttaactaaggg

SEQ ID NO: 238314 - DNA, 30 bp, Artificial Sequence
  Synthetic oligonucleotide
atcgatggaacaacgagcgggagctaaggg

SEQ ID NO: 238315 - DNA, 30 bp, Artificial Sequence
  Synthetic oligonucleotide
tcaaacgctagttatttgatatagtaaggg

SEQ ID NO: 238316 - DNA, 30 bp, Artificial Sequence
  Synthetic oligonucleotide
cgggtatagcgtcgtgcgtacacgtaaggg

SEQ ID NO: 238317 - DNA, 30 bp, Artificial Sequence
  Synthetic oligonucleotide
tgcttcactagacacggaaaagcgtaaggg

SEQ ID NO: 238318 - DNA, 30 bp, Artificial Sequence
  Synthetic oligonucleotide
ggtttttcaataaagatgtttacttaaggg

SEQ ID NO: 238319 - DNA, 30 bp, Artificial Sequence
  Synthetic oligonucleotide
tctgaccagtccccaggcagttcttaaggg

SEQ ID NO: 238320 - DNA, 30 bp, Artificial Sequence
  Synthetic oligonucleotide
gattagtgaaagtgataccagccaacaggg

SEQ ID NO: 238321 - DNA, 30 bp, Artificial Sequence
  Synthetic oligonucleotide
aaaggagccagtaagggttatataacaggg

SEQ ID NO: 238322 - DNA, 30 bp, Artificial Sequence
  Synthetic oligonucleotide
cgcgagcgtgtacggttagccgtcacaggg

SEQ ID NO: 238323 - DNA, 30 bp, Artificial Sequence
  Synthetic oligonucleotide
cataataatgagggacgggccgggacaggg

SEQ ID NO: 238324 - DNA, 30 bp, Artificial Sequence
  Synthetic oligonucleotide
gcaggtcaccccttcacatgcgctacaggg

SEQ ID NO: 238325 - DNA, 30 bp, Artificial Sequence
  Synthetic oligonucleotide
gcatataaaggggacgggaccgttacaggg

SEQ ID NO: 238326 - DNA, 30 bp, Artificial Sequence
  Synthetic oligonucleotide
agtatgcaaactaatcatgatgttacaggg

SEQ ID NO: 238327 - DNA, 30 bp, Artificial Sequence
  Synthetic oligonucleotide
ggtctgtttgagagagaatcggtgccaggg

SEQ ID NO: 238328 - DNA, 30 bp, Artificial Sequence
  Synthetic oligonucleotide
acccatacagaatgatgtatctatccaggg

SEQ ID NO: 238329 - DNA, 30 bp, Artificial Sequence
  Synthetic oligonucleotide
atgagtgtgctaggattatctaaagcaggg

SEQ ID NO: 238330 - DNA, 31 bp, Artificial Sequence
  Synthetic oligonucleotide
gattaggtgcgcggggtgagacctagcaggg

SEQ ID NO: 238331 - DNA, 30 bp, Artificial Sequence
  Synthetic oligonucleotide
gcgccccggtaaggggtatgagtagcaggg

SEQ ID NO: 238332 - DNA, 30 bp, Artificial Sequence
  Synthetic oligonucleotide
atgactataggtaaagggttggtagcaggg

SEQ ID NO: 238333 - DNA, 30 bp, Artificial Sequence
  Synthetic oligonucleotide
catataggagtcaagtagcgtaacgcaggg

SEQ ID NO: 238334 - DNA, 30 bp, Artificial Sequence
  Synthetic oligonucleotide
tagcctgcccgacacagggtacaggcaggg

SEQ ID NO: 238335 - DNA, 30 bp, Artificial Sequence
  Synthetic oligonucleotide
cacaaagggccatccccttacagggcaggg

SEQ ID NO: 238336 - DNA, 30 bp, Artificial Sequence
  Synthetic oligonucleotide
aaaagtgaccagggaagtgagaatgcaggg

SEQ ID NO: 238337 - DNA, 30 bp, Artificial Sequence
  Synthetic oligonucleotide
gattccggcgtacatcgcagaactgcaggg

SEQ ID NO: 238338 - DNA, 30 bp, Artificial Sequence
  Synthetic oligonucleotide
gatcgtgctgtaattagcaggtaatcaggg

SEQ ID NO: 238339 - DNA, 30 bp, Artificial Sequence
  Synthetic oligonucleotide
ttagggaagaaagggctcacggcatcaggg

SEQ ID NO: 238340 - DNA, 30 bp, Artificial Sequence
  Synthetic oligonucleotide
tacaaacgggtgtgattattatcatcaggg

SEQ ID NO: 238341 - DNA, 30 bp, Artificial Sequence
  Synthetic oligonucleotide
ggtttccagttagggagagttcggtcaggg

SEQ ID NO: 238342 - DNA, 30 bp, Artificial Sequence
  Synthetic oligonucleotide
taagaagattcccagcctggcgcttcaggg

SEQ ID NO: 238343 - DNA, 30 bp, Artificial Sequence
  Synthetic oligonucleotide
gatccggaatggtcgtggacgggaagaggg

SEQ ID NO: 238344 - DNA, 30 bp, Artificial Sequence
  Synthetic oligonucleotide
tctataacctcgccgagcctagccagaggg

SEQ ID NO: 238345 - DNA, 30 bp, Artificial Sequence
  Synthetic oligonucleotide
ggaccctgcgtagataaactcctcagaggg

SEQ ID NO: 238346 - DNA, 30 bp, Artificial Sequence
  Synthetic oligonucleotide
attaaaatgacaattgttctatgtagaggg

SEQ ID NO: 238347 - DNA, 30 bp, Artificial Sequence
  Synthetic oligonucleotide
gcctaatcgctgctaccatcgattagaggg

SEQ ID NO: 238348 - DNA, 30 bp, Artificial Sequence
  Synthetic oligonucleotide
aaagagaattcaggaaagtttcttagaggg

SEQ ID NO: 238349 - DNA, 30 bp, Artificial Sequence
  Synthetic oligonucleotide
caagctaggttaagagttccgttacgaggg

SEQ ID NO: 238350 - DNA, 30 bp, Artificial Sequence
  Synthetic oligonucleotide
gaacctgttacgatacggaaaccgcgaggg

SEQ ID NO: 238351 - DNA, 30 bp, Artificial Sequence
  Synthetic oligonucleotide
ggtgccccgggccaagtcagggggcgaggg

SEQ ID NO: 238352 - DNA, 30 bp, Artificial Sequence
  Synthetic oligonucleotide
ttctgttcagacgttttgttggtgcgaggg

SEQ ID NO: 238353 - DNA, 30 bp, Artificial Sequence
  Synthetic oligonucleotide
tattttacgcgagattgactgaaaggaggg

SEQ ID NO: 238354 - DNA, 30 bp, Artificial Sequence
  Synthetic oligonucleotide
attgcatgacaaatgtgcatatcaggaggg

SEQ ID NO: 238355 - DNA, 30 bp, Artificial Sequence
  Synthetic oligonucleotide
gtactagttcttgagttgcctagcggaggg

SEQ ID NO: 238356 - DNA, 30 bp, Artificial Sequence
  Synthetic oligonucleotide
ctacttatgagtgtaagggtagtgggaggg

SEQ ID NO: 238357 - DNA, 30 bp, Artificial Sequence
  Synthetic oligonucleotide
aaccctataattcacatctggaatggaggg

SEQ ID NO: 238358 - DNA, 30 bp, Artificial Sequence
  Synthetic oligonucleotide
cacgtgaacgaggctggactctatggaggg

SEQ ID NO: 238359 - DNA, 30 bp, Artificial Sequence
  Synthetic oligonucleotide
attgagatgtccccatccgaccgtggaggg

SEQ ID NO: 238360 - DNA, 30 bp, Artificial Sequence
  Synthetic oligonucleotide
ggcactgaagtgagtcagttggaatgaggg

SEQ ID NO: 238361 - DNA, 30 bp, Artificial Sequence
  Synthetic oligonucleotide
gggcccgactgtctatatgtcgcatgaggg

SEQ ID NO: 238362 - DNA, 30 bp, Artificial Sequence
  Synthetic oligonucleotide
agcatcctggtccagaactggatatgaggg

SEQ ID NO: 238363 - DNA, 30 bp, Artificial Sequence
  Synthetic oligonucleotide
cggcaattccgccgtgcccccccctgaggg

SEQ ID NO: 238364 - DNA, 30 bp, Artificial Sequence
  Synthetic oligonucleotide
atcaacaagtatttgggactgtcgtgaggg

SEQ ID NO: 238365 - DNA, 30 bp, Artificial Sequence
  Synthetic oligonucleotide
caagtacccccatggttgggtatgtgaggg

SEQ ID NO: 238366 - DNA, 30 bp, Artificial Sequence
  Synthetic oligonucleotide
aaagggtggggtgcagtcaaagattgaggg

SEQ ID NO: 238367 - DNA, 30 bp, Artificial Sequence
  Synthetic oligonucleotide
cgcggtttctgctttaattggttttgaggg

SEQ ID NO: 238368 - DNA, 30 bp, Artificial Sequence
  Synthetic oligonucleotide
acgtaatatatgggtcaagaagtcataggg

SEQ ID NO: 238369 - DNA, 30 bp, Artificial Sequence
  Synthetic oligonucleotide
caatccggtgttatgctgctaatgataggg

SEQ ID NO: 238370 - DNA, 30 bp, Artificial Sequence
  Synthetic oligonucleotide
tggcgcgtgcgctatgactctatgataggg

SEQ ID NO: 238371 - DNA, 30 bp, Artificial Sequence
  Synthetic oligonucleotide
tggatggccgttatgggtagctatataggg

SEQ ID NO: 238372 - DNA, 29 bp, Artificial Sequence
  Synthetic oligonucleotide
gccgagctttgtttgattaggttataggg

SEQ ID NO: 238373 - DNA, 30 bp, Artificial Sequence
  Synthetic oligonucleotide
cccgggccgaagttcacaatcgaactaggg

SEQ ID NO: 238374 - DNA, 30 bp, Artificial Sequence
  Synthetic oligonucleotide
ctgtacaacgccaatagtaattgactaggg

SEQ ID NO: 238375 - DNA, 30 bp, Artificial Sequence
  Synthetic oligonucleotide
gtcctacacaatcgggacaacttactaggg

SEQ ID NO: 238376 - DNA, 30 bp, Artificial Sequence
  Synthetic oligonucleotide
agttagattggaagcgttaagtcgctaggg

SEQ ID NO: 238377 - DNA, 30 bp, Artificial Sequence
  Synthetic oligonucleotide
gaaaagtaaccattctaagaacaagtaggg

SEQ ID NO: 238378 - DNA, 30 bp, Artificial Sequence
  Synthetic oligonucleotide
tcacgagactaacggtttcgtgaagtaggg

SEQ ID NO: 238379 - DNA, 30 bp, Artificial Sequence
  Synthetic oligonucleotide
agactcgcatattaaacatactcagtaggg

SEQ ID NO: 238380 - DNA, 30 bp, Artificial Sequence
  Synthetic oligonucleotide
ttggtgttttacgcacttgaagtagtaggg

SEQ ID NO: 238381 - DNA, 30 bp, Artificial Sequence
  Synthetic oligonucleotide
aacactcacgaccggccgttggtagtaggg

SEQ ID NO: 238382 - DNA, 30 bp, Artificial Sequence
  Synthetic oligonucleotide
tagtatctcgaacaatcaacgagcgtaggg

SEQ ID NO: 238383 - DNA, 30 bp, Artificial Sequence
  Synthetic oligonucleotide
ccaatccgtaactagaaatatcctgtaggg

SEQ ID NO: 238384 - DNA, 30 bp, Artificial Sequence
  Synthetic oligonucleotide
taacgtttcggcggtgatggtggtgtaggg

SEQ ID NO: 238385 - DNA, 30 bp, Artificial Sequence
  Synthetic oligonucleotide
gtcgtgtttcgggatgcacaacaattaggg

SEQ ID NO: 238386 - DNA, 30 bp, Artificial Sequence
  Synthetic oligonucleotide
ggacaactatgatgtgtggatgcattaggg

SEQ ID NO: 238387 - DNA, 30 bp, Artificial Sequence
  Synthetic oligonucleotide
catatctgagttgttataatacagttaggg

SEQ ID NO: 238388 - DNA, 30 bp, Artificial Sequence
  Synthetic oligonucleotide
ccaggcgacccatatcttaagaggttaggg

SEQ ID NO: 238389 - DNA, 30 bp, Artificial Sequence
  Synthetic oligonucleotide
acatatgagcagtaatttattcggttaggg

SEQ ID NO: 238390 - DNA, 30 bp, Artificial Sequence
  Synthetic oligonucleotide
ggtcggacgggtaaagtaattttgttaggg

SEQ ID NO: 238391 - DNA, 30 bp, Artificial Sequence
  Synthetic oligonucleotide
gtaactgggactgatcgagtctgtttaggg

SEQ ID NO: 238392 - DNA, 30 bp, Artificial Sequence
  Synthetic oligonucleotide
gaatgtgacgagagttagttttaaaacggg

SEQ ID NO: 238393 - DNA, 30 bp, Artificial Sequence
  Synthetic oligonucleotide
aaattcccatcaatagtctgtggaaacggg

SEQ ID NO: 238394 - DNA, 30 bp, Artificial Sequence
  Synthetic oligonucleotide
ccctgcatcatttaagtgagtctcaacggg

SEQ ID NO: 238395 - DNA, 30 bp, Artificial Sequence
  Synthetic oligonucleotide
ctcatgcgtagtcctcggagagcgaacggg

SEQ ID NO: 238396 - DNA, 30 bp, Artificial Sequence
  Synthetic oligonucleotide
tggatccgatagaaaccgaaaaggaacggg

SEQ ID NO: 238397 - DNA, 30 bp, Artificial Sequence
  Synthetic oligonucleotide
cgctagccaacgattgggtttcggaacggg

SEQ ID NO: 238398 - DNA, 30 bp, Artificial Sequence
  Synthetic oligonucleotide
caacgaacgaagacacccatgcctaacggg

SEQ ID NO: 238399 - DNA, 30 bp, Artificial Sequence
  Synthetic oligonucleotide
ctgtacctgtcgttttcgatttcacacggg

SEQ ID NO: 238400 - DNA, 30 bp, Artificial Sequence
  Synthetic oligonucleotide
tgagatccgatgttggtgccgccgcacggg

SEQ ID NO: 238401 - DNA, 30 bp, Artificial Sequence
  Synthetic oligonucleotide
aaggcaggtaagtacggaggaggtcacggg

SEQ ID NO: 238402 - DNA, 30 bp, Artificial Sequence
  Synthetic oligonucleotide
atcaggcccagttttgtatttggtcacggg

SEQ ID NO: 238403 - DNA, 31 bp, Artificial Sequence
  Synthetic oligonucleotide
tcgatggtatttcacggatacttgagacggg

SEQ ID NO: 238404 - DNA, 30 bp, Artificial Sequence
  Synthetic oligonucleotide
gtcctcagctataaggtttactgggacggg

SEQ ID NO: 238405 - DNA, 30 bp, Artificial Sequence
  Synthetic oligonucleotide
taagagctggtttatccgatgaatgacggg

SEQ ID NO: 238406 - DNA, 30 bp, Artificial Sequence
  Synthetic oligonucleotide
aaaggaccttactattgctccggatacggg

SEQ ID NO: 238407 - DNA, 30 bp, Artificial Sequence
  Synthetic oligonucleotide
tggagttgccgtgctgtggcaaactacggg

SEQ ID NO: 238408 - DNA, 30 bp, Artificial Sequence
  Synthetic oligonucleotide
tgaaaggacgagcgatattgaagctacggg

SEQ ID NO: 238409 - DNA, 30 bp, Artificial Sequence
  Synthetic oligonucleotide
tgggacctaattcgaactcttgtctacggg

SEQ ID NO: 238410 - DNA, 30 bp, Artificial Sequence
  Synthetic oligonucleotide
cattactcttttatcccggtgcggtacggg

SEQ ID NO: 238411 - DNA, 30 bp, Artificial Sequence
  Synthetic oligonucleotide
ttcaccgaaccgcgaggataggggtacggg

SEQ ID NO: 238412 - DNA, 30 bp, Artificial Sequence
  Synthetic oligonucleotide
cgtcgaccagtccctgactgcgattacggg

SEQ ID NO: 238413 - DNA, 30 bp, Artificial Sequence
  Synthetic oligonucleotide
tgggggatcctgggtgcataaaaaaccggg

SEQ ID NO: 238414 - DNA, 30 bp, Artificial Sequence
  Synthetic oligonucleotide
tcaaaattatgagtcgcggactaaaccggg

SEQ ID NO: 238415 - DNA, 30 bp, Artificial Sequence
  Synthetic oligonucleotide
ggcagacaggattgtttgaaactaaccggg

SEQ ID NO: 238416 - DNA, 30 bp, Artificial Sequence
  Synthetic oligonucleotide
tacttcgggttcaccaggtgacataccggg

SEQ ID NO: 238417 - DNA, 30 bp, Artificial Sequence
  Synthetic oligonucleotide
ttcaacagattacttcgacacggtaccggg

SEQ ID NO: 238418 - DNA, 30 bp, Artificial Sequence
  Synthetic oligonucleotide
aagccgtcctcgatgaactcttgacccggg

SEQ ID NO: 238419 - DNA, 30 bp, Artificial Sequence
  Synthetic oligonucleotide
tctcatattctatggctaagtaggcccggg

SEQ ID NO: 238420 - DNA, 30 bp, Artificial Sequence
  Synthetic oligonucleotide
aactcccttatcaggaagagggggcccggg

SEQ ID NO: 238421 - DNA, 30 bp, Artificial Sequence
  Synthetic oligonucleotide
gcaatcggtctggattaaagatctcccggg

SEQ ID NO: 238422 - DNA, 30 bp, Artificial Sequence
  Synthetic oligonucleotide
gcggtcgggccgtcccacctccaagccggg

SEQ ID NO: 238423 - DNA, 30 bp, Artificial Sequence
  Synthetic oligonucleotide
ccgagcggcggcaagcaaaaaggcgccggg

SEQ ID NO: 238424 - DNA, 30 bp, Artificial Sequence
  Synthetic oligonucleotide
gggagtcgcgaggtcaacgaatgtgccggg

SEQ ID NO: 238425 - DNA, 30 bp, Artificial Sequence
  Synthetic oligonucleotide
tgttcgtaccagcgcaattctgcctccggg

SEQ ID NO: 238426 - DNA, 30 bp, Artificial Sequence
  Synthetic oligonucleotide
ttgcagcaggaagcaggctttatttccggg

SEQ ID NO: 238427 - DNA, 30 bp, Artificial Sequence
  Synthetic oligonucleotide
ggacaatagtatcgtaatttaggaagcggg

SEQ ID NO: 238428 - DNA, 30 bp, Artificial Sequence
  Synthetic oligonucleotide
agacacttgggttaggtggtccagagcggg

SEQ ID NO: 238429 - DNA, 30 bp, Artificial Sequence
  Synthetic oligonucleotide
gatttccaggggtacagagtagcgagcggg

SEQ ID NO: 238430 - DNA, 30 bp, Artificial Sequence
  Synthetic oligonucleotide
gtctgcttccactgtgtggctaaacgcggg

SEQ ID NO: 238431 - DNA, 30 bp, Artificial Sequence
  Synthetic oligonucleotide
ctaaaacttaagcgttagctggaacgcggg

SEQ ID NO: 238432 - DNA, 30 bp, Artificial Sequence
  Synthetic oligonucleotide
tccaatagtaaccatccggaataacgcggg

SEQ ID NO: 238433 - DNA, 30 bp, Artificial Sequence
  Synthetic oligonucleotide
cacagtcgcttataaggaaatctacgcggg

SEQ ID NO: 238434 - DNA, 30 bp, Artificial Sequence
  Synthetic oligonucleotide
tctcgttgatctggcgttgattgccgcggg

SEQ ID NO: 238435 - DNA, 30 bp, Artificial Sequence
  Synthetic oligonucleotide
tgggtactggggttcaagcataggcgcggg

SEQ ID NO: 238436 - DNA, 30 bp, Artificial Sequence
  Synthetic oligonucleotide
gttaaccgacggacaaagtccatgcgcggg

SEQ ID NO: 238437 - DNA, 30 bp, Artificial Sequence
  Synthetic oligonucleotide
tatacgtgagctggttctggcacaggcggg

SEQ ID NO: 238438 - DNA, 30 bp, Artificial Sequence
  Synthetic oligonucleotide
gaccgatcctggtcggcactctgaggcggg

SEQ ID NO: 238439 - DNA, 30 bp, Artificial Sequence
  Synthetic oligonucleotide
gtagtaagcgacaccgttactttaggcggg

SEQ ID NO: 238440 - DNA, 30 bp, Artificial Sequence
  Synthetic oligonucleotide
tacgaagctggactcaggcggaagggcggg

SEQ ID NO: 238441 - DNA, 30 bp, Artificial Sequence
  Synthetic oligonucleotide
ctctttccagcttacactgggatgggcggg

SEQ ID NO: 238442 - DNA, 30 bp, Artificial Sequence
  Synthetic oligonucleotide
aaccgtcacatttcgtccacgtatggcggg

SEQ ID NO: 238443 - DNA, 30 bp, Artificial Sequence
  Synthetic oligonucleotide
acacctttgcgtcgtggtcatacatgcggg

SEQ ID NO: 238444 - DNA, 30 bp, Artificial Sequence
  Synthetic oligonucleotide
atgcgaagtattcgatcgccgggctgcggg

SEQ ID NO: 238445 - DNA, 30 bp, Artificial Sequence
  Synthetic oligonucleotide
gttgttggtacatagaagcgctagtgcggg

SEQ ID NO: 238446 - DNA, 30 bp, Artificial Sequence
  Synthetic oligonucleotide
cgtcccgcgttccaccacatatggtgcggg

SEQ ID NO: 238447 - DNA, 30 bp, Artificial Sequence
  Synthetic oligonucleotide
caacgtatatctgagatgatttcaatcggg

SEQ ID NO: 238448 - DNA, 30 bp, Artificial Sequence
  Synthetic oligonucleotide
agctcagcttaattaacggaccacatcggg

SEQ ID NO: 238449 - DNA, 30 bp, Artificial Sequence
  Synthetic oligonucleotide
gaatcgctccgcaaagggtttagcatcggg

SEQ ID NO: 238450 - DNA, 30 bp, Artificial Sequence
  Synthetic oligonucleotide
ccagctcttatatatataagaggcatcggg

SEQ ID NO: 238451 - DNA, 30 bp, Artificial Sequence
  Synthetic oligonucleotide
tgtcataagagtagggtggtagtgatcggg

SEQ ID NO: 238452 - DNA, 30 bp, Artificial Sequence
  Synthetic oligonucleotide
gatagggatacttacagcgggggtatcggg

SEQ ID NO: 238453 - DNA, 30 bp, Artificial Sequence
  Synthetic oligonucleotide
gggtcttggttacaagcacaaaacctcggg

SEQ ID NO: 238454 - DNA, 30 bp, Artificial Sequence
  Synthetic oligonucleotide
ctgggataggaaggaaatgggactctcggg

SEQ ID NO: 238455 - DNA, 30 bp, Artificial Sequence
  Synthetic oligonucleotide
atccatcaactttagagacttagtctcggg

SEQ ID NO: 238456 - DNA, 30 bp, Artificial Sequence
  Synthetic oligonucleotide
agttcgtgaattggtattcgctcagtcggg

SEQ ID NO: 238457 - DNA, 30 bp, Artificial Sequence
  Synthetic oligonucleotide
aacctgggaaagcacacaagtcgagtcggg

SEQ ID NO: 238458 - DNA, 30 bp, Artificial Sequence
  Synthetic oligonucleotide
cgtattagaagcaattgccaactagtcggg

SEQ ID NO: 238459 - DNA, 30 bp, Artificial Sequence
  Synthetic oligonucleotide
ctgtcagcatatattgcggggtcggtcggg

SEQ ID NO: 238460 - DNA, 30 bp, Artificial Sequence
  Synthetic oligonucleotide
cggtgctatagccagggatacttggtcggg

SEQ ID NO: 238461 - DNA, 30 bp, Artificial Sequence
  Synthetic oligonucleotide
aagagaactcacacaacactagctgtcggg

SEQ ID NO: 238462 - DNA, 30 bp, Artificial Sequence
  Synthetic oligonucleotide
gcctaacagattacgcgtcggcaattcggg

SEQ ID NO: 238463 - DNA, 30 bp, Artificial Sequence
  Synthetic oligonucleotide
gtttgttggaaaccaagtttgtaattcggg

SEQ ID NO: 238464 - DNA, 30 bp, Artificial Sequence
  Synthetic oligonucleotide
atccggaatctaatcagaccgctattcggg

SEQ ID NO: 238465 - DNA, 30 bp, Artificial Sequence
  Synthetic oligonucleotide
tacatcgattccgtaccacataccttcggg

SEQ ID NO: 238466 - DNA, 30 bp, Artificial Sequence
  Synthetic oligonucleotide
accgaagtgtatattcaggattccttcggg

SEQ ID NO: 238467 - DNA, 30 bp, Artificial Sequence
  Synthetic oligonucleotide
cctcgaattgaaatgggagctgtcttcggg

SEQ ID NO: 238468 - DNA, 30 bp, Artificial Sequence
  Synthetic oligonucleotide
taggtgtagactcgcctccgaaggttcggg

SEQ ID NO: 238469 - DNA, 30 bp, Artificial Sequence
  Synthetic oligonucleotide
gaaaggggatttctttgtggataaaagggg

SEQ ID NO: 238470 - DNA, 30 bp, Artificial Sequence
  Synthetic oligonucleotide
tactctgcttggagcgggacaaggaagggg

SEQ ID NO: 238471 - DNA, 30 bp, Artificial Sequence
  Synthetic oligonucleotide
ttcagctgttttgatatgccggggaagggg

SEQ ID NO: 238472 - DNA, 30 bp, Artificial Sequence
  Synthetic oligonucleotide
aatcatggccgtacaggcctgctgaagggg

SEQ ID NO: 238473 - DNA, 30 bp, Artificial Sequence
  Synthetic oligonucleotide
aggccaataacttcaagtaaacataagggg

SEQ ID NO: 238474 - DNA, 30 bp, Artificial Sequence
  Synthetic oligonucleotide
ttctagcaaggccgaatgccacataagggg

SEQ ID NO: 238475 - DNA, 30 bp, Artificial Sequence
  Synthetic oligonucleotide
cgaaaatcaatgacaggaacctgtaagggg

SEQ ID NO: 238476 - DNA, 30 bp, Artificial Sequence
  Synthetic oligonucleotide
accgtatattgcctgcgtcacgaacagggg

SEQ ID NO: 238477 - DNA, 30 bp, Artificial Sequence
  Synthetic oligonucleotide
ggcatggcgccactgctttcctgacagggg

SEQ ID NO: 238478 - DNA, 30 bp, Artificial Sequence
  Synthetic oligonucleotide
tgtctgcgatacgctcctttcaagcagggg

SEQ ID NO: 238479 - DNA, 30 bp, Artificial Sequence
  Synthetic oligonucleotide
gaggggtataagtgggctggagatcagggg

SEQ ID NO: 238480 - DNA, 30 bp, Artificial Sequence
  Synthetic oligonucleotide
cagtgtctactagactaaatgtttcagggg

SEQ ID NO: 238481 - DNA, 29 bp, Artificial Sequence
  Synthetic oligonucleotide
ttatgctattaacgagagaggcagagggg

SEQ ID NO: 238482 - DNA, 30 bp, Artificial Sequence
  Synthetic oligonucleotide
cgtcttgcgacccaagactagcgagagggg

SEQ ID NO: 238483 - DNA, 30 bp, Artificial Sequence
  Synthetic oligonucleotide
aaaggcgccgtattgaatgatggagagggg

SEQ ID NO: 238484 - DNA, 30 bp, Artificial Sequence
  Synthetic oligonucleotide
taccggcccgcgtatttacgcctagagggg

SEQ ID NO: 238485 - DNA, 30 bp, Artificial Sequence
  Synthetic oligonucleotide
ggcagaattcgcgcacagggattcgagggg

SEQ ID NO: 238486 - DNA, 30 bp, Artificial Sequence
  Synthetic oligonucleotide
tactggtgaaggaaattaatgtaggagggg

SEQ ID NO: 238487 - DNA, 30 bp, Artificial Sequence
  Synthetic oligonucleotide
gatctgcgtaccgcgtaattgcgatagggg

SEQ ID NO: 238488 - DNA, 30 bp, Artificial Sequence
  Synthetic oligonucleotide
tatcgccaatgctatgcctctatatagggg

SEQ ID NO: 238489 - DNA, 30 bp, Artificial Sequence
  Synthetic oligonucleotide
cagagttagccatcaaggcgcgtatagggg

SEQ ID NO: 238490 - DNA, 30 bp, Artificial Sequence
  Synthetic oligonucleotide
ggcaacgttgtttatcggcccagctagggg

SEQ ID NO: 238491 - DNA, 30 bp, Artificial Sequence
  Synthetic oligonucleotide
tctctggggagccggcggtctgggtagggg

SEQ ID NO: 238492 - DNA, 30 bp, Artificial Sequence
  Synthetic oligonucleotide
tgagcgacggggttggggggttggtagggg

SEQ ID NO: 238493 - DNA, 30 bp, Artificial Sequence
  Synthetic oligonucleotide
tgtgtccagaataggtgttcacgttagggg

SEQ ID NO: 238494 - DNA, 30 bp, Artificial Sequence
  Synthetic oligonucleotide
ggtgtgtagcaaattacacctccaacgggg

SEQ ID NO: 238495 - DNA, 30 bp, Artificial Sequence
  Synthetic oligonucleotide
agcgaccccaggatttgtggtatcacgggg

SEQ ID NO: 238496 - DNA, 30 bp, Artificial Sequence
  Synthetic oligonucleotide
attcgattagatattcaaaacctgacgggg

SEQ ID NO: 238497 - DNA, 30 bp, Artificial Sequence
  Synthetic oligonucleotide
gcattaacctacgtgtaagccggtacgggg

SEQ ID NO: 238498 - DNA, 30 bp, Artificial Sequence
  Synthetic oligonucleotide
tcataagagttggtatatggagtaccgggg

SEQ ID NO: 238499 - DNA, 30 bp, Artificial Sequence
  Synthetic oligonucleotide
cagtggttaccaacgtgagcggacccgggg

SEQ ID NO: 238500 - DNA, 30 bp, Artificial Sequence
  Synthetic oligonucleotide
aggcttctattcactgcgctggacccgggg

SEQ ID NO: 238501 - DNA, 30 bp, Artificial Sequence
  Synthetic oligonucleotide
taagtgagtgctgttgaagttagcccgggg

SEQ ID NO: 238502 - DNA, 30 bp, Artificial Sequence
  Synthetic oligonucleotide
ttgctcacctgccgtagaaaatcgccgggg

SEQ ID NO: 238503 - DNA, 30 bp, Artificial Sequence
  Synthetic oligonucleotide
tccacgcgaagatcccaccacttgccgggg

SEQ ID NO: 238504 - DNA, 30 bp, Artificial Sequence
  Synthetic oligonucleotide
cgtttcacgtaacgagcgcgaatagcgggg

SEQ ID NO: 238505 - DNA, 30 bp, Artificial Sequence
  Synthetic oligonucleotide
taagcgtccattccgtctttcagggcgggg

SEQ ID NO: 238506 - DNA, 30 bp, Artificial Sequence
  Synthetic oligonucleotide
gatgtccctgaaggggtgatcgttgcgggg

SEQ ID NO: 238507 - DNA, 30 bp, Artificial Sequence
  Synthetic oligonucleotide
ataggtgcagttgttttacgaaaatcgggg

SEQ ID NO: 238508 - DNA, 29 bp, Artificial Sequence
  Synthetic oligonucleotide
gaaggagttgattcactcgatactcgggg

SEQ ID NO: 238509 - DNA, 30 bp, Artificial Sequence
  Synthetic oligonucleotide
aaactcaggttattactataagaaaggggg

SEQ ID NO: 238510 - DNA, 30 bp, Artificial Sequence
  Synthetic oligonucleotide
gtgtcattggtttatccgtcgtataggggg

SEQ ID NO: 238511 - DNA, 30 bp, Artificial Sequence
  Synthetic oligonucleotide
tgatcgatagagtctcgaaatatccggggg

SEQ ID NO: 238512 - DNA, 30 bp, Artificial Sequence
  Synthetic oligonucleotide
agctagctgcacttaacatgccagcggggg

SEQ ID NO: 238513 - DNA, 30 bp, Artificial Sequence
  Synthetic oligonucleotide
cattggaggggctgtctgggggagcggggg

SEQ ID NO: 238514 - DNA, 30 bp, Artificial Sequence
  Synthetic oligonucleotide
cgggagggagggcttcggaggtggcggggg

SEQ ID NO: 238515 - DNA, 30 bp, Artificial Sequence
  Synthetic oligonucleotide
aacgactttgtgcccacatgatgtcggggg

SEQ ID NO: 238516 - DNA, 30 bp, Artificial Sequence
  Synthetic oligonucleotide
gggataccagtaaccgcaacagcagggggg

SEQ ID NO: 238517 - DNA, 30 bp, Artificial Sequence
  Synthetic oligonucleotide
gaacgcgcttaggtgcagtcatgagggggg

SEQ ID NO: 238518 - DNA, 30 bp, Artificial Sequence
  Synthetic oligonucleotide
gtgtaacgagcaggacagtcgatagggggg

SEQ ID NO: 238519 - DNA, 31 bp, Artificial Sequence
  Synthetic oligonucleotide
gagtatccgataggcggtgtgtcgcgggggg

SEQ ID NO: 238520 - DNA, 30 bp, Artificial Sequence
  Synthetic oligonucleotide
tagcgaggttagtacccgcccagtgggggg

SEQ ID NO: 238521 - DNA, 30 bp, Artificial Sequence
  Synthetic oligonucleotide
tgggttggggtggtttggttacttgggggg

SEQ ID NO: 238522 - DNA, 30 bp, Artificial Sequence
  Synthetic oligonucleotide
gaaggccattctgcaacgaccgaatggggg

SEQ ID NO: 238523 - DNA, 30 bp, Artificial Sequence
  Synthetic oligonucleotide
ttaccgtaatagatctaacctgaatggggg

SEQ ID NO: 238524 - DNA, 30 bp, Artificial Sequence
  Synthetic oligonucleotide
tggggttctctggagtgattatcctggggg

SEQ ID NO: 238525 - DNA, 30 bp, Artificial Sequence
  Synthetic oligonucleotide
cgcatcaacactcaggtatacggttggggg

SEQ ID NO: 238526 - DNA, 30 bp, Artificial Sequence
  Synthetic oligonucleotide
tgaaacaggtcactctagccaaaaatgggg

SEQ ID NO: 238527 - DNA, 30 bp, Artificial Sequence
  Synthetic oligonucleotide
gtatcaattacagcgatgatgataatgggg

SEQ ID NO: 238528 - DNA, 30 bp, Artificial Sequence
  Synthetic oligonucleotide
gaaggtacgctgatatctagcgccatgggg

SEQ ID NO: 238529 - DNA, 30 bp, Artificial Sequence
  Synthetic oligonucleotide
acaaggatagcacgttgttcgtgcatgggg

SEQ ID NO: 238530 - DNA, 30 bp, Artificial Sequence
  Synthetic oligonucleotide
aggggcgactcgaccaaggtactcatgggg

SEQ ID NO: 238531 - DNA, 30 bp, Artificial Sequence
  Synthetic oligonucleotide
ctctcaactttacaaggagcgacgatgggg

SEQ ID NO: 238532 - DNA, 30 bp, Artificial Sequence
  Synthetic oligonucleotide
ttctcaggacccttagcacgcgcgatgggg

SEQ ID NO: 238533 - DNA, 30 bp, Artificial Sequence
  Synthetic oligonucleotide
cgaacgtcgtggcccattagtcgactgggg

SEQ ID NO: 238534 - DNA, 30 bp, Artificial Sequence
  Synthetic oligonucleotide
atcagggataaaaaggtccagttcctgggg

SEQ ID NO: 238535 - DNA, 30 bp, Artificial Sequence
  Synthetic oligonucleotide
gatacccggagatggcgagtaaggctgggg

SEQ ID NO: 238536 - DNA, 30 bp, Artificial Sequence
  Synthetic oligonucleotide
gcgaaagggttcattaataagggtctgggg

SEQ ID NO: 238537 - DNA, 30 bp, Artificial Sequence
  Synthetic oligonucleotide
tcccaaatatccgcaaaccggccagtgggg

SEQ ID NO: 238538 - DNA, 30 bp, Artificial Sequence
  Synthetic oligonucleotide
agggcgactttacgcgcacaacgcgtgggg

SEQ ID NO: 238539 - DNA, 30 bp, Artificial Sequence
  Synthetic oligonucleotide
tcgaggagtcacgatcgcgcccgcgtgggg

SEQ ID NO: 238540 - DNA, 30 bp, Artificial Sequence
  Synthetic oligonucleotide
tgcgtgttgtcgcgaatcacgttcgtgggg

SEQ ID NO: 238541 - DNA, 30 bp, Artificial Sequence
  Synthetic oligonucleotide
aacattgtccgaacaactacccgtgtgggg

SEQ ID NO: 238542 - DNA, 30 bp, Artificial Sequence
  Synthetic oligonucleotide
cttacgcaaggcatgtgacatgaattgggg

SEQ ID NO: 238543 - DNA, 30 bp, Artificial Sequence
  Synthetic oligonucleotide
tggatttgccctaagggagtgtgcttgggg

SEQ ID NO: 238544 - DNA, 30 bp, Artificial Sequence
  Synthetic oligonucleotide
ggatgatttgaaactaagtttatcttgggg

SEQ ID NO: 238545 - DNA, 30 bp, Artificial Sequence
  Synthetic oligonucleotide
tctggccttgacacaaaggcaatgttgggg

SEQ ID NO: 238546 - DNA, 30 bp, Artificial Sequence
  Synthetic oligonucleotide
atcgacgcaaggcctcgcaatgtgttgggg

SEQ ID NO: 238547 - DNA, 30 bp, Artificial Sequence
  Synthetic oligonucleotide
acaccgtgcgtacctccccatcatttgggg

SEQ ID NO: 238548 - DNA, 30 bp, Artificial Sequence
  Synthetic oligonucleotide
cagagcataatcaattatccgtatttgggg

SEQ ID NO: 238549 - DNA, 30 bp, Artificial Sequence
  Synthetic oligonucleotide
tatacccggtttgccttccagactttgggg

SEQ ID NO: 238550 - DNA, 30 bp, Artificial Sequence
  Synthetic oligonucleotide
tgacgaggtgcctcggaaatggccaatggg

SEQ ID NO: 238551 - DNA, 30 bp, Artificial Sequence
  Synthetic oligonucleotide
accgacagagagtcagttctgtccaatggg

SEQ ID NO: 238552 - DNA, 30 bp, Artificial Sequence
  Synthetic oligonucleotide
ctaatgaaaacaagccaccctcgcaatggg

SEQ ID NO: 238553 - DNA, 30 bp, Artificial Sequence
  Synthetic oligonucleotide
gaccggctagtcgcggacaggaaacatggg

SEQ ID NO: 238554 - DNA, 30 bp, Artificial Sequence
  Synthetic oligonucleotide
gctctcgtcatttgcgacccaaagcatggg

SEQ ID NO: 238555 - DNA, 30 bp, Artificial Sequence
  Synthetic oligonucleotide
taaagtcgtggaaggaagactgcgcatggg

SEQ ID NO: 238556 - DNA, 30 bp, Artificial Sequence
  Synthetic oligonucleotide
tgaatgcagaataactgaacatcgcatggg

SEQ ID NO: 238557 - DNA, 30 bp, Artificial Sequence
  Synthetic oligonucleotide
attaacagtcgggggtatttatcgcatggg

SEQ ID NO: 238558 - DNA, 30 bp, Artificial Sequence
  Synthetic oligonucleotide
tcgggggaattctatacggagtggcatggg

SEQ ID NO: 238559 - DNA, 30 bp, Artificial Sequence
  Synthetic oligonucleotide
agctctgattatgtgtcaaacacagatggg

SEQ ID NO: 238560 - DNA, 30 bp, Artificial Sequence
  Synthetic oligonucleotide
ctgttttccaccccagtgaatccagatggg

SEQ ID NO: 238561 - DNA, 30 bp, Artificial Sequence
  Synthetic oligonucleotide
gtgaacaacagcttggcgataagagatggg

SEQ ID NO: 238562 - DNA, 30 bp, Artificial Sequence
  Synthetic oligonucleotide
ggaccctcggacgaatactctctcgatggg

SEQ ID NO: 238563 - DNA, 30 bp, Artificial Sequence
  Synthetic oligonucleotide
tggaaatccggatatgagccttaggatggg

SEQ ID NO: 238564 - DNA, 30 bp, Artificial Sequence
  Synthetic oligonucleotide
gctgggtccagccgcatcgcaattgatggg

SEQ ID NO: 238565 - DNA, 30 bp, Artificial Sequence
  Synthetic oligonucleotide
taagccagtgagcgactgggatttgatggg

SEQ ID NO: 238566 - DNA, 30 bp, Artificial Sequence
  Synthetic oligonucleotide
tctagagatatgtccttaagtatatatggg

SEQ ID NO: 238567 - DNA, 30 bp, Artificial Sequence
  Synthetic oligonucleotide
ggagatgctgcggacggttgtatatatggg

SEQ ID NO: 238568 - DNA, 30 bp, Artificial Sequence
  Synthetic oligonucleotide
catctgaccgtggatacgcatagctatggg

SEQ ID NO: 238569 - DNA, 30 bp, Artificial Sequence
  Synthetic oligonucleotide
tgggggaccagcccgatgcgccgctatggg

SEQ ID NO: 238570 - DNA, 30 bp, Artificial Sequence
  Synthetic oligonucleotide
agcaatcctgtacgtggctatatctatggg

SEQ ID NO: 238571 - DNA, 30 bp, Artificial Sequence
  Synthetic oligonucleotide
ggtggtggcacgcgacggaaggtctatggg

SEQ ID NO: 238572 - DNA, 30 bp, Artificial Sequence
  Synthetic oligonucleotide
cttgaaccgaaacattcttgaaagtatggg

SEQ ID NO: 238573 - DNA, 30 bp, Artificial Sequence
  Synthetic oligonucleotide
ccagatcaaaggccgtaccccaggtatggg

SEQ ID NO: 238574 - DNA, 30 bp, Artificial Sequence
  Synthetic oligonucleotide
tttcgaaagtggattatgcataattatggg

SEQ ID NO: 238575 - DNA, 30 bp, Artificial Sequence
  Synthetic oligonucleotide
agaatgaaacctcggggtcacatttatggg

SEQ ID NO: 238576 - DNA, 30 bp, Artificial Sequence
  Synthetic oligonucleotide
gagaatcgaaaccccgcggtctcaactggg

SEQ ID NO: 238577 - DNA, 30 bp, Artificial Sequence
  Synthetic oligonucleotide
gtggtgagtggtgcgggaaggcacactggg

SEQ ID NO: 238578 - DNA, 30 bp, Artificial Sequence
  Synthetic oligonucleotide
acgatgttagttatgaagggcgcacctggg

SEQ ID NO: 238579 - DNA, 30 bp, Artificial Sequence
  Synthetic oligonucleotide
tgccttagtggtgtttggtttgaccctggg

SEQ ID NO: 238580 - DNA, 30 bp, Artificial Sequence
  Synthetic oligonucleotide
ccgtagcgaccgaggcgtaggggccctggg

SEQ ID NO: 238581 - DNA, 30 bp, Artificial Sequence
  Synthetic oligonucleotide
taatgacagatattgggaatcacagctggg

SEQ ID NO: 238582 - DNA, 30 bp, Artificial Sequence
  Synthetic oligonucleotide
gagtcacgtgtgtgggagtgaaacgctggg

SEQ ID NO: 238583 - DNA, 30 bp, Artificial Sequence
  Synthetic oligonucleotide
ggcgtcctcagttttcgtaggaaatctggg

SEQ ID NO: 238584 - DNA, 30 bp, Artificial Sequence
  Synthetic oligonucleotide
cacgacccgaccaagacgtttcgatctggg

SEQ ID NO: 238585 - DNA, 30 bp, Artificial Sequence
  Synthetic oligonucleotide
atagcttataggtgagggctgggctctggg

SEQ ID NO: 238586 - DNA, 30 bp, Artificial Sequence
  Synthetic oligonucleotide
cacggttcgttagagatgccgctctctggg

SEQ ID NO: 238587 - DNA, 30 bp, Artificial Sequence
  Synthetic oligonucleotide
tgatcacgcaagtcgtttaggtcgtctggg

SEQ ID NO: 238588 - DNA, 30 bp, Artificial Sequence
  Synthetic oligonucleotide
gctggaaactatctggagctcgggtctggg

SEQ ID NO: 238589 - DNA, 30 bp, Artificial Sequence
  Synthetic oligonucleotide
aggtagggttacctcacgtcggggtctggg

SEQ ID NO: 238590 - DNA, 30 bp, Artificial Sequence
  Synthetic oligonucleotide
acatataccctcccaattgacgattctggg

SEQ ID NO: 238591 - DNA, 30 bp, Artificial Sequence
  Synthetic oligonucleotide
cattgcgtctactacacgccacgttctggg

SEQ ID NO: 238592 - DNA, 30 bp, Artificial Sequence
  Synthetic oligonucleotide
ggtttccgaaaaagattgctaacaagtggg

SEQ ID NO: 238593 - DNA, 30 bp, Artificial Sequence
  Synthetic oligonucleotide
tacccagcgaattgtctaactccaagtggg

SEQ ID NO: 238594 - DNA, 30 bp, Artificial Sequence
  Synthetic oligonucleotide
atggggctttcgtcaccggaaataagtggg

SEQ ID NO: 238595 - DNA, 30 bp, Artificial Sequence
  Synthetic oligonucleotide
aaggttaatccttttaaaattaggagtggg

SEQ ID NO: 238596 - DNA, 30 bp, Artificial Sequence
  Synthetic oligonucleotide
agatcaaagagcatcctaggtcggagtggg

SEQ ID NO: 238597 - DNA, 30 bp, Artificial Sequence
  Synthetic oligonucleotide
cggcacgaacggtctcgagtctctagtggg

SEQ ID NO: 238598 - DNA, 30 bp, Artificial Sequence
  Synthetic oligonucleotide
ggtcatgtgtgaacagcatggcgtagtggg

SEQ ID NO: 238599 - DNA, 30 bp, Artificial Sequence
  Synthetic oligonucleotide
ccagaggtacggtgccgcaacattagtggg

SEQ ID NO: 238600 - DNA, 30 bp, Artificial Sequence
  Synthetic oligonucleotide
tagcatggccttggttcagaagtccgtggg

SEQ ID NO: 238601 - DNA, 28 bp, Artificial Sequence
  Synthetic oligonucleotide
ttgcttgaatcgtaggtcatctcgtggg

SEQ ID NO: 238602 - DNA, 30 bp, Artificial Sequence
  Synthetic oligonucleotide
tgccacaaatactcactcaatgaaggtggg

SEQ ID NO: 238603 - DNA, 30 bp, Artificial Sequence
  Synthetic oligonucleotide
cggcggggtgggcacattggtgaaggtggg

SEQ ID NO: 238604 - DNA, 30 bp, Artificial Sequence
  Synthetic oligonucleotide
tccttaaggccggccctgaccataggtggg

SEQ ID NO: 238605 - DNA, 30 bp, Artificial Sequence
  Synthetic oligonucleotide
acgtgggggatactgtctgttcttggtggg

SEQ ID NO: 238606 - DNA, 30 bp, Artificial Sequence
  Synthetic oligonucleotide
atgacacctaaatgggccgtaagctgtggg

SEQ ID NO: 238607 - DNA, 30 bp, Artificial Sequence
  Synthetic oligonucleotide
agatcgggtccagagcgggaactctgtggg

SEQ ID NO: 238608 - DNA, 30 bp, Artificial Sequence
  Synthetic oligonucleotide
aatgtaaaatgggagcaacggatgtgtggg

SEQ ID NO: 238609 - DNA, 30 bp, Artificial Sequence
  Synthetic oligonucleotide
tgcgccgggactggagatctggattgtggg

SEQ ID NO: 238610 - DNA, 30 bp, Artificial Sequence
  Synthetic oligonucleotide
ccgttacacaatgaggaaacgttttgtggg

SEQ ID NO: 238611 - DNA, 30 bp, Artificial Sequence
  Synthetic oligonucleotide
actatgctaaagcgcgttacatcaattggg

SEQ ID NO: 238612 - DNA, 30 bp, Artificial Sequence
  Synthetic oligonucleotide
cccctgagacaatgacacgttataattggg

SEQ ID NO: 238613 - DNA, 30 bp, Artificial Sequence
  Synthetic oligonucleotide
agtgtttaatgaggtgcaattcagattggg

SEQ ID NO: 238614 - DNA, 30 bp, Artificial Sequence
  Synthetic oligonucleotide
gtgcgttcccccggtatcctcgagattggg

SEQ ID NO: 238615 - DNA, 30 bp, Artificial Sequence
  Synthetic oligonucleotide
ctacttaaccgcgaagtcccaaatattggg

SEQ ID NO: 238616 - DNA, 30 bp, Artificial Sequence
  Synthetic oligonucleotide
tccaccatgcacctccggttagctcttggg

SEQ ID NO: 238617 - DNA, 30 bp, Artificial Sequence
  Synthetic oligonucleotide
agtggaggcctggagctccagtcagttggg

SEQ ID NO: 238618 - DNA, 30 bp, Artificial Sequence
  Synthetic oligonucleotide
cataggcatgctattagccaattcgttggg

SEQ ID NO: 238619 - DNA, 30 bp, Artificial Sequence
  Synthetic oligonucleotide
ctgcaatatcacctaatcaagtaggttggg

SEQ ID NO: 238620 - DNA, 30 bp, Artificial Sequence
  Synthetic oligonucleotide
ctggatggctgataggtactgcgggttggg

SEQ ID NO: 238621 - DNA, 30 bp, Artificial Sequence
  Synthetic oligonucleotide
ctaggttgcatttatgtggcccagtttggg

SEQ ID NO: 238622 - DNA, 30 bp, Artificial Sequence
  Synthetic oligonucleotide
taagatatgtatgcacgatgaaattttggg

SEQ ID NO: 238623 - DNA, 30 bp, Artificial Sequence
  Synthetic oligonucleotide
ataaggcgggactgataactatgttttggg

SEQ ID NO: 238624 - DNA, 30 bp, Artificial Sequence
  Synthetic oligonucleotide
ttaaagtaactagtggaaaaagaaaaatgg

SEQ ID NO: 238625 - DNA, 30 bp, Artificial Sequence
  Synthetic oligonucleotide
ctctataccatccgtacggtggcaaaatgg

SEQ ID NO: 238626 - DNA, 30 bp, Artificial Sequence
  Synthetic oligonucleotide
tcttcgtagatatttattatatgaaaatgg

SEQ ID NO: 238627 - DNA, 30 bp, Artificial Sequence
  Synthetic oligonucleotide
gaattccggattagtagcaaagggaaatgg

SEQ ID NO: 238628 - DNA, 30 bp, Artificial Sequence
  Synthetic oligonucleotide
tacagcataaagatgtgtttggggaaatgg

SEQ ID NO: 238629 - DNA, 30 bp, Artificial Sequence
  Synthetic oligonucleotide
tttccgtctgccctagcgacattgaaatgg

SEQ ID NO: 238630 - DNA, 30 bp, Artificial Sequence
  Synthetic oligonucleotide
tagaagacaggcctttttccctctaaatgg

SEQ ID NO: 238631 - DNA, 30 bp, Artificial Sequence
  Synthetic oligonucleotide
aagacgtcaggggcctacgtagcacaatgg

SEQ ID NO: 238632 - DNA, 30 bp, Artificial Sequence
  Synthetic oligonucleotide
gttccacttgggcgcttgtcaatacaatgg

SEQ ID NO: 238633 - DNA, 30 bp, Artificial Sequence
  Synthetic oligonucleotide
ttacatgctcggcggaaatcattacaatgg

SEQ ID NO: 238634 - DNA, 30 bp, Artificial Sequence
  Synthetic oligonucleotide
gcaagtttgttatcgtatcctagccaatgg

SEQ ID NO: 238635 - DNA, 30 bp, Artificial Sequence
  Synthetic oligonucleotide
atagccataattgttgcacctggccaatgg

SEQ ID NO: 238636 - DNA, 30 bp, Artificial Sequence
  Synthetic oligonucleotide
cggctcaggtagcagatgttactccaatgg

SEQ ID NO: 238637 - DNA, 30 bp, Artificial Sequence
  Synthetic oligonucleotide
caggagcatccgtctgcgccctcgcaatgg

SEQ ID NO: 238638 - DNA, 30 bp, Artificial Sequence
  Synthetic oligonucleotide
tttgcgggatagaaacaacggtggcaatgg

SEQ ID NO: 238639 - DNA, 30 bp, Artificial Sequence
  Synthetic oligonucleotide
gttgtcttcggacgatgggaccctcaatgg

SEQ ID NO: 238640 - DNA, 30 bp, Artificial Sequence
  Synthetic oligonucleotide
gagacagcagaggctcgattggctcaatgg

SEQ ID NO: 238641 - DNA, 30 bp, Artificial Sequence
  Synthetic oligonucleotide
tgtccgggtttatatagaccgaaagaatgg

SEQ ID NO: 238642 - DNA, 30 bp, Artificial Sequence
  Synthetic oligonucleotide
atcacttcaatacaaatggaccccgaatgg

SEQ ID NO: 238643 - DNA, 30 bp, Artificial Sequence
  Synthetic oligonucleotide
ccatccagttcagaggcatacatcgaatgg

SEQ ID NO: 238644 - DNA, 30 bp, Artificial Sequence
  Synthetic oligonucleotide
gtcggaaaaggaaaattagacgtggaatgg

SEQ ID NO: 238645 - DNA, 30 bp, Artificial Sequence
  Synthetic oligonucleotide
aaatgctacggtaggctatatttggaatgg

SEQ ID NO: 238646 - DNA, 30 bp, Artificial Sequence
  Synthetic oligonucleotide
tcatccttctcaacgtgcgcctgtgaatgg

SEQ ID NO: 238647 - DNA, 30 bp, Artificial Sequence
  Synthetic oligonucleotide
ccgtgtaatctggacaaatctagataatgg

SEQ ID NO: 238648 - DNA, 30 bp, Artificial Sequence
  Synthetic oligonucleotide
tacacgactcgcgtaagcgtacgctaatgg

SEQ ID NO: 238649 - DNA, 30 bp, Artificial Sequence
  Synthetic oligonucleotide
cgggcggtcaccatgtggagggcgtaatgg

SEQ ID NO: 238650 - DNA, 30 bp, Artificial Sequence
  Synthetic oligonucleotide
tcagcttgtgcgctattggcattttaatgg

SEQ ID NO: 238651 - DNA, 30 bp, Artificial Sequence
  Synthetic oligonucleotide
tacgttagagtattctactgacaaacatgg

SEQ ID NO: 238652 - DNA, 30 bp, Artificial Sequence
  Synthetic oligonucleotide
acagttcagatcgggcccgcccaaacatgg

SEQ ID NO: 238653 - DNA, 30 bp, Artificial Sequence
  Synthetic oligonucleotide
gttaaacctagtgaggcgaatgcaacatgg

SEQ ID NO: 238654 - DNA, 30 bp, Artificial Sequence
  Synthetic oligonucleotide
ctggtgttgtatcctaaacccgagacatgg

SEQ ID NO: 238655 - DNA, 30 bp, Artificial Sequence
  Synthetic oligonucleotide
cttcgacactgccaattggatccgacatgg

SEQ ID NO: 238656 - DNA, 30 bp, Artificial Sequence
  Synthetic oligonucleotide
ggggacataataatgacttaactgacatgg

SEQ ID NO: 238657 - DNA, 30 bp, Artificial Sequence
  Synthetic oligonucleotide
cgcgaggcgagtcacgtttgacgtacatgg

SEQ ID NO: 238658 - DNA, 30 bp, Artificial Sequence
  Synthetic oligonucleotide
tggttgggtggtcggtgcagatttacatgg

SEQ ID NO: 238659 - DNA, 30 bp, Artificial Sequence
  Synthetic oligonucleotide
atgtgacatatttaattcgtctgaccatgg

SEQ ID NO: 238660 - DNA, 30 bp, Artificial Sequence
  Synthetic oligonucleotide
tatataataacacggctttggtcgccatgg

SEQ ID NO: 238661 - DNA, 30 bp, Artificial Sequence
  Synthetic oligonucleotide
tataggcaacacatagtgtctttgccatgg

SEQ ID NO: 238662 - DNA, 30 bp, Artificial Sequence
  Synthetic oligonucleotide
aactgggcagtgggagacagagccgcatgg

SEQ ID NO: 238663 - DNA, 30 bp, Artificial Sequence
  Synthetic oligonucleotide
atagagtccgaagttcgtgtccaggcatgg

SEQ ID NO: 238664 - DNA, 30 bp, Artificial Sequence
  Synthetic oligonucleotide
ctgtaagaatactgtgtagcaatggcatgg

SEQ ID NO: 238665 - DNA, 30 bp, Artificial Sequence
  Synthetic oligonucleotide
ataaatcagaagatgtgtcacatggcatgg

SEQ ID NO: 238666 - DNA, 30 bp, Artificial Sequence
  Synthetic oligonucleotide
tttatgttccaacttatgtaatgtgcatgg

SEQ ID NO: 238667 - DNA, 30 bp, Artificial Sequence
  Synthetic oligonucleotide
aagtcataatgaccatacacaagatcatgg

SEQ ID NO: 238668 - DNA, 30 bp, Artificial Sequence
  Synthetic oligonucleotide
ttcatctccagcgtggtgaatggatcatgg

SEQ ID NO: 238669 - DNA, 30 bp, Artificial Sequence
  Synthetic oligonucleotide
gaatgagtgtatattcttaccaagtcatgg

SEQ ID NO: 238670 - DNA, 30 bp, Artificial Sequence
  Synthetic oligonucleotide
cgacgactgactatggatcatcagtcatgg

SEQ ID NO: 238671 - DNA, 30 bp, Artificial Sequence
  Synthetic oligonucleotide
ggactgttgaagaggagtagaccttcatgg

SEQ ID NO: 238672 - DNA, 30 bp, Artificial Sequence
  Synthetic oligonucleotide
tctgagagttttgtccgggcttgttcatgg

SEQ ID NO: 238673 - DNA, 30 bp, Artificial Sequence
  Synthetic oligonucleotide
ttcggagacgtctttcgcccaatttcatgg

SEQ ID NO: 238674 - DNA, 30 bp, Artificial Sequence
  Synthetic oligonucleotide
taaggtagttccataacgatagtttcatgg

SEQ ID NO: 238675 - DNA, 30 bp, Artificial Sequence
  Synthetic oligonucleotide
accccttagtgaagacgaagagccagatgg

SEQ ID NO: 238676 - DNA, 30 bp, Artificial Sequence
  Synthetic oligonucleotide
cgattttgtaagtgtgtattatccagatgg

SEQ ID NO: 238677 - DNA, 30 bp, Artificial Sequence
  Synthetic oligonucleotide
gtcggctcggttggttctcaagagagatgg

SEQ ID NO: 238678 - DNA, 30 bp, Artificial Sequence
  Synthetic oligonucleotide
tcccgtcaaatgggcatcgaaacgagatgg

SEQ ID NO: 238679 - DNA, 30 bp, Artificial Sequence
  Synthetic oligonucleotide
gatcatatatggctaattacgacgagatgg

SEQ ID NO: 238680 - DNA, 30 bp, Artificial Sequence
  Synthetic oligonucleotide
gaacggggctccatagaagccgtgagatgg

SEQ ID NO: 238681 - DNA, 30 bp, Artificial Sequence
  Synthetic oligonucleotide
attcatatgtgcaggctgccctcacgatgg

SEQ ID NO: 238682 - DNA, 30 bp, Artificial Sequence
  Synthetic oligonucleotide
ttcagcgctggatgcaatcaatgacgatgg

SEQ ID NO: 238683 - DNA, 30 bp, Artificial Sequence
  Synthetic oligonucleotide
gacgttgagtccattagttatatccgatgg

SEQ ID NO: 238684 - DNA, 30 bp, Artificial Sequence
  Synthetic oligonucleotide
ataaaggtgctcagagacatggagcgatgg

SEQ ID NO: 238685 - DNA, 30 bp, Artificial Sequence
  Synthetic oligonucleotide
gataaggggcgcgcgttagaatatcgatgg

SEQ ID NO: 238686 - DNA, 30 bp, Artificial Sequence
  Synthetic oligonucleotide
cgcattctatgaaagggctcaacaggatgg

SEQ ID NO: 238687 - DNA, 30 bp, Artificial Sequence
  Synthetic oligonucleotide
tcatgaagtaaggacacctgcacaggatgg

SEQ ID NO: 238688 - DNA, 30 bp, Artificial Sequence
  Synthetic oligonucleotide
cgatgttcttgtgggtatacagtaggatgg

SEQ ID NO: 238689 - DNA, 30 bp, Artificial Sequence
  Synthetic oligonucleotide
tagcggcagggagaataatcaccgggatgg

SEQ ID NO: 238690 - DNA, 30 bp, Artificial Sequence
  Synthetic oligonucleotide
cgatatttcaagatgggtcggccgggatgg

SEQ ID NO: 238691 - DNA, 30 bp, Artificial Sequence
  Synthetic oligonucleotide
cgtacacgtggcgataccgagaggggatgg

SEQ ID NO: 238692 - DNA, 30 bp, Artificial Sequence
  Synthetic oligonucleotide
actcgtgcttgcacactgactcggggatgg

SEQ ID NO: 238693 - DNA, 30 bp, Artificial Sequence
  Synthetic oligonucleotide
gagcttttcatgattgtgaatttgggatgg

SEQ ID NO: 238694 - DNA, 30 bp, Artificial Sequence
  Synthetic oligonucleotide
ttgctggtgcaactaacgcggaatggatgg

SEQ ID NO: 238695 - DNA, 30 bp, Artificial Sequence
  Synthetic oligonucleotide
taattcagtttaggcgttctccctggatgg

SEQ ID NO: 238696 - DNA, 30 bp, Artificial Sequence
  Synthetic oligonucleotide
tcgtacttagcgagatacacttctggatgg

SEQ ID NO: 238697 - DNA, 30 bp, Artificial Sequence
  Synthetic oligonucleotide
ataactacgagtaggttgtagagtggatgg

SEQ ID NO: 238698 - DNA, 30 bp, Artificial Sequence
  Synthetic oligonucleotide
tcactgaagtcggaattcttatgtggatgg

SEQ ID NO: 238699 - DNA, 30 bp, Artificial Sequence
  Synthetic oligonucleotide
tgcagtacgcaagatcaacatacctgatgg

SEQ ID NO: 238700 - DNA, 30 bp, Artificial Sequence
  Synthetic oligonucleotide
acagcgcaatgttccagttgtgtgtgatgg

SEQ ID NO: 238701 - DNA, 30 bp, Artificial Sequence
  Synthetic oligonucleotide
atacgctcctccagttaactaagaatatgg

SEQ ID NO: 238702 - DNA, 30 bp, Artificial Sequence
  Synthetic oligonucleotide
gcactttgatgaaggcctagatgtatatgg

SEQ ID NO: 238703 - DNA, 30 bp, Artificial Sequence
  Synthetic oligonucleotide
cggtatccttataatcacaaaccactatgg

SEQ ID NO: 238704 - DNA, 30 bp, Artificial Sequence
  Synthetic oligonucleotide
atgttaagttgcgtaatggttcgcctatgg

SEQ ID NO: 238705 - DNA, 30 bp, Artificial Sequence
  Synthetic oligonucleotide
acatcttggagtcactatacaaatctatgg

SEQ ID NO: 238706 - DNA, 30 bp, Artificial Sequence
  Synthetic oligonucleotide
ggtactaggttatatgatggcacagtatgg

SEQ ID NO: 238707 - DNA, 30 bp, Artificial Sequence
  Synthetic oligonucleotide
gggtgtcccggtaaaaatacgacagtatgg

SEQ ID NO: 238708 - DNA, 30 bp, Artificial Sequence
  Synthetic oligonucleotide
taataagagagcctacgccagaacgtatgg

SEQ ID NO: 238709 - DNA, 30 bp, Artificial Sequence
  Synthetic oligonucleotide
aaaatgaccgcgcttcgatgcactgtatgg

SEQ ID NO: 238710 - DNA, 30 bp, Artificial Sequence
  Synthetic oligonucleotide
acgcttggccccgaaccatatgctgtatgg

SEQ ID NO: 238711 - DNA, 30 bp, Artificial Sequence
  Synthetic oligonucleotide
taacagtatagaagaatcgcatttgtatgg

SEQ ID NO: 238712 - DNA, 30 bp, Artificial Sequence
  Synthetic oligonucleotide
tgaggtatctcccagacatggtttgtatgg

SEQ ID NO: 238713 - DNA, 30 bp, Artificial Sequence
  Synthetic oligonucleotide
ctggacctctacaattaggccaaattatgg

SEQ ID NO: 238714 - DNA, 30 bp, Artificial Sequence
  Synthetic oligonucleotide
agctaactcgtcatttatcattgcttatgg

SEQ ID NO: 238715 - DNA, 30 bp, Artificial Sequence
  Synthetic oligonucleotide
ctgtggatccttaagggtaacttcttatgg

SEQ ID NO: 238716 - DNA, 30 bp, Artificial Sequence
  Synthetic oligonucleotide
ggatgcgtggcgacaaaagcgaggttatgg

SEQ ID NO: 238717 - DNA, 30 bp, Artificial Sequence
  Synthetic oligonucleotide
gacacttttcctagcagggccgatttatgg

SEQ ID NO: 238718 - DNA, 30 bp, Artificial Sequence
  Synthetic oligonucleotide
aatttcaggttaggtgaggctgatttatgg

SEQ ID NO: 238719 - DNA, 30 bp, Artificial Sequence
  Synthetic oligonucleotide
aagccagaatatgtatcccgtaaaaactgg

SEQ ID NO: 238720 - DNA, 30 bp, Artificial Sequence
  Synthetic oligonucleotide
gtcagccgctgaatacaagcgctaaactgg

SEQ ID NO: 238721 - DNA, 30 bp, Artificial Sequence
  Synthetic oligonucleotide
atgcgttatacgctttttacaacgaactgg

SEQ ID NO: 238722 - DNA, 30 bp, Artificial Sequence
  Synthetic oligonucleotide
ctatccggaggcacaagcagcagtaactgg

SEQ ID NO: 238723 - DNA, 30 bp, Artificial Sequence
  Synthetic oligonucleotide
tttaggaagactcgtaagggcattaactgg

SEQ ID NO: 238724 - DNA, 30 bp, Artificial Sequence
  Synthetic oligonucleotide
ttgactagtcaaatcgtcgcgtgacactgg

SEQ ID NO: 238725 - DNA, 30 bp, Artificial Sequence
  Synthetic oligonucleotide
tcatgtaagggggatgtgtgcctgcactgg

SEQ ID NO: 238726 - DNA, 30 bp, Artificial Sequence
  Synthetic oligonucleotide
tcgtacagtctttcgtgggaagtgcactgg

SEQ ID NO: 238727 - DNA, 30 bp, Artificial Sequence
  Synthetic oligonucleotide
ggataccccgaccttattgacaatcactgg

SEQ ID NO: 238728 - DNA, 30 bp, Artificial Sequence
  Synthetic oligonucleotide
attgtcaaatgctgtagatccaaagactgg

SEQ ID NO: 238729 - DNA, 30 bp, Artificial Sequence
  Synthetic oligonucleotide
gagtaaagaatgctccccccaagagactgg

SEQ ID NO: 238730 - DNA, 30 bp, Artificial Sequence
  Synthetic oligonucleotide
cgacatgaatgccgcctttggaccgactgg

SEQ ID NO: 238731 - DNA, 30 bp, Artificial Sequence
  Synthetic oligonucleotide
tgacctgcatgttaatgcttccgggactgg

SEQ ID NO: 238732 - DNA, 30 bp, Artificial Sequence
  Synthetic oligonucleotide
ccatcgcggtgatccgtaaatgatgactgg

SEQ ID NO: 238733 - DNA, 30 bp, Artificial Sequence
  Synthetic oligonucleotide
gtcatgagatagttattcctgtttgactgg

SEQ ID NO: 238734 - DNA, 30 bp, Artificial Sequence
  Synthetic oligonucleotide
actagatcggttgtgttgcgtcgatactgg

SEQ ID NO: 238735 - DNA, 30 bp, Artificial Sequence
  Synthetic oligonucleotide
cgtgtggtgtaagttgtgagtttatactgg

SEQ ID NO: 238736 - DNA, 30 bp, Artificial Sequence
  Synthetic oligonucleotide
cgtagccaagaggtgagcgggcactactgg

SEQ ID NO: 238737 - DNA, 30 bp, Artificial Sequence
  Synthetic oligonucleotide
atagtctatcacagctttaacacgtactgg

SEQ ID NO: 238738 - DNA, 30 bp, Artificial Sequence
  Synthetic oligonucleotide
gcctgtcgactgccgggcacgtgaacctgg

SEQ ID NO: 238739 - DNA, 30 bp, Artificial Sequence
  Synthetic oligonucleotide
gggcgactatgttaaatatgggacacctgg

SEQ ID NO: 238740 - DNA, 30 bp, Artificial Sequence
  Synthetic oligonucleotide
acacggttagataatgctgaaaccacctgg

SEQ ID NO: 238741 - DNA, 30 bp, Artificial Sequence
  Synthetic oligonucleotide
aggaccggttcgatcttgcaggagacctgg

SEQ ID NO: 238742 - DNA, 30 bp, Artificial Sequence
  Synthetic oligonucleotide
aaacattgatctttaacgaagtggacctgg

SEQ ID NO: 238743 - DNA, 30 bp, Artificial Sequence
  Synthetic oligonucleotide
gaacgtgcacagaagttgacggtgacctgg

SEQ ID NO: 238744 - DNA, 30 bp, Artificial Sequence
  Synthetic oligonucleotide
taagggtgttgtagtaaacactacccctgg

SEQ ID NO: 238745 - DNA, 30 bp, Artificial Sequence
  Synthetic oligonucleotide
ccaggactagctgtagggtgtgggccctgg

SEQ ID NO: 238746 - DNA, 30 bp, Artificial Sequence
  Synthetic oligonucleotide
aaatatcggctaaggcagccgagtccctgg

SEQ ID NO: 238747 - DNA, 30 bp, Artificial Sequence
  Synthetic oligonucleotide
atcggagctaacgtaacagtcccagcctgg

SEQ ID NO: 238748 - DNA, 30 bp, Artificial Sequence
  Synthetic oligonucleotide
tggagacccctttaacattacagggcctgg

SEQ ID NO: 238749 - DNA, 30 bp, Artificial Sequence
  Synthetic oligonucleotide
agcagcgataaccaaggtgactgggcctgg

SEQ ID NO: 238750 - DNA, 30 bp, Artificial Sequence
  Synthetic oligonucleotide
ctgtctgaagcccttaatgagattgcctgg

SEQ ID NO: 238751 - DNA, 30 bp, Artificial Sequence
  Synthetic oligonucleotide
gtaacacgcccataccgcaaagcatcctgg

SEQ ID NO: 238752 - DNA, 30 bp, Artificial Sequence
  Synthetic oligonucleotide
tgaacttttaacgtcttgcatgtatcctgg

SEQ ID NO: 238753 - DNA, 30 bp, Artificial Sequence
  Synthetic oligonucleotide
agaggtatttaatacgtcccgaactcctgg

SEQ ID NO: 238754 - DNA, 30 bp, Artificial Sequence
  Synthetic oligonucleotide
gggcacaactcaccgggcacactgtcctgg

SEQ ID NO: 238755 - DNA, 30 bp, Artificial Sequence
  Synthetic oligonucleotide
cagtacgtgggagatttggccctgtcctgg

SEQ ID NO: 238756 - DNA, 30 bp, Artificial Sequence
  Synthetic oligonucleotide
cgcgtagggtcgaaaccccatcagagctgg

SEQ ID NO: 238757 - DNA, 30 bp, Artificial Sequence
  Synthetic oligonucleotide
gtctaacgttagggtccggaatggagctgg

SEQ ID NO: 238758 - DNA, 30 bp, Artificial Sequence
  Synthetic oligonucleotide
cttaaactctagcggcacagaatgagctgg

SEQ ID NO: 238759 - DNA, 30 bp, Artificial Sequence
  Synthetic oligonucleotide
tgaacactcggtatgtcgccagaacgctgg

SEQ ID NO: 238760 - DNA, 30 bp, Artificial Sequence
  Synthetic oligonucleotide
ccgggtggttgcgtgctaagagcacgctgg

SEQ ID NO: 238761 - DNA, 30 bp, Artificial Sequence
  Synthetic oligonucleotide
aagagtgtatagtgctcaacggaccgctgg

SEQ ID NO: 238762 - DNA, 30 bp, Artificial Sequence
  Synthetic oligonucleotide
cgttttatctcaattgtccacgtgcgctgg

SEQ ID NO: 238763 - DNA, 30 bp, Artificial Sequence
  Synthetic oligonucleotide
gcatattttaaaataaacgcattgcgctgg

SEQ ID NO: 238764 - DNA, 30 bp, Artificial Sequence
  Synthetic oligonucleotide
gtatatgaatcacaagagcggtgtcgctgg

SEQ ID NO: 238765 - DNA, 30 bp, Artificial Sequence
  Synthetic oligonucleotide
tgtgcccaggtcataagaaatataggctgg

SEQ ID NO: 238766 - DNA, 30 bp, Artificial Sequence
  Synthetic oligonucleotide
tgtatcaaactgagcaatgttgatggctgg

SEQ ID NO: 238767 - DNA, 30 bp, Artificial Sequence
  Synthetic oligonucleotide
cagtgtggacattaaccccgttatggctgg

SEQ ID NO: 238768 - DNA, 30 bp, Artificial Sequence
  Synthetic oligonucleotide
gctaagctatggtcccggcgatgatgctgg

SEQ ID NO: 238769 - DNA, 30 bp, Artificial Sequence
  Synthetic oligonucleotide
taaatgtcgagataaagagtcgattgctgg

SEQ ID NO: 238770 - DNA, 30 bp, Artificial Sequence
  Synthetic oligonucleotide
atctcaccaaaatggcgtaatgccatctgg

SEQ ID NO: 238771 - DNA, 30 bp, Artificial Sequence
  Synthetic oligonucleotide
acgagggtagagcaacctacgcagatctgg

SEQ ID NO: 238772 - DNA, 30 bp, Artificial Sequence
  Synthetic oligonucleotide
taagacagggcaatcctaccgtagatctgg

SEQ ID NO: 238773 - DNA, 30 bp, Artificial Sequence
  Synthetic oligonucleotide
tatgtggtcgcaagagaggaacggatctgg

SEQ ID NO: 238774 - DNA, 30 bp, Artificial Sequence
  Synthetic oligonucleotide
agttgtcgtgccggcttcagtaatatctgg

SEQ ID NO: 238775 - DNA, 30 bp, Artificial Sequence
  Synthetic oligonucleotide
ctaagtaataccaatggtgtatatatctgg

SEQ ID NO: 238776 - DNA, 30 bp, Artificial Sequence
  Synthetic oligonucleotide
taatgaagaagataatgaattgtactctgg

SEQ ID NO: 238777 - DNA, 30 bp, Artificial Sequence
  Synthetic oligonucleotide
ggtcggcatggatcacagttatgcctctgg

SEQ ID NO: 238778 - DNA, 30 bp, Artificial Sequence
  Synthetic oligonucleotide
aatgcgttcacagaaacgagtgtcctctgg

SEQ ID NO: 238779 - DNA, 30 bp, Artificial Sequence
  Synthetic oligonucleotide
tgatcgtagtagttgcgggctaagctctgg

SEQ ID NO: 238780 - DNA, 30 bp, Artificial Sequence
  Synthetic oligonucleotide
tagtggaaccaggttactctctagctctgg

SEQ ID NO: 238781 - DNA, 30 bp, Artificial Sequence
  Synthetic oligonucleotide
atgttggcatagagaataaatgggctctgg

SEQ ID NO: 238782 - DNA, 30 bp, Artificial Sequence
  Synthetic oligonucleotide
gtccggccttgctcacgtacgtctctctgg

SEQ ID NO: 238783 - DNA, 30 bp, Artificial Sequence
  Synthetic oligonucleotide
tattaggcgaacggggaaactagtctctgg

SEQ ID NO: 238784 - DNA, 30 bp, Artificial Sequence
  Synthetic oligonucleotide
acaattgccggggtagttgtaggagtctgg

SEQ ID NO: 238785 - DNA, 30 bp, Artificial Sequence
  Synthetic oligonucleotide
ctatgtaattcatcatttcaaaacgtctgg

SEQ ID NO: 238786 - DNA, 30 bp, Artificial Sequence
  Synthetic oligonucleotide
ggcgttgagctccaacgtagaaaggtctgg

SEQ ID NO: 238787 - DNA, 30 bp, Artificial Sequence
  Synthetic oligonucleotide
tatttacccgtgtgcgctcatgaggtctgg

SEQ ID NO: 238788 - DNA, 27 bp, Artificial Sequence
  Synthetic oligonucleotide
gaggaatcgaacaaaaggtcggtctgg

SEQ ID NO: 238789 - DNA, 30 bp, Artificial Sequence
  Synthetic oligonucleotide
caatgtaggttgggtaccctacgggtctgg

SEQ ID NO: 238790 - DNA, 30 bp, Artificial Sequence
  Synthetic oligonucleotide
gccagtcttgcgtacgaatctttggtctgg

SEQ ID NO: 238791 - DNA, 30 bp, Artificial Sequence
  Synthetic oligonucleotide
attcaaaagtagaacgtagttaatgtctgg

SEQ ID NO: 238792 - DNA, 30 bp, Artificial Sequence
  Synthetic oligonucleotide
ggggacgagcaggagtctgcggatgtctgg

SEQ ID NO: 238793 - DNA, 30 bp, Artificial Sequence
  Synthetic oligonucleotide
ggtcaataagagatgtaaccgcctgtctgg

SEQ ID NO: 238794 - DNA, 30 bp, Artificial Sequence
  Synthetic oligonucleotide
agaatggttcagtccacccaggttgtctgg

SEQ ID NO: 238795 - DNA, 30 bp, Artificial Sequence
  Synthetic oligonucleotide
ttaatccaattagatgtcgggaagttctgg

SEQ ID NO: 238796 - DNA, 30 bp, Artificial Sequence
  Synthetic oligonucleotide
gggcatctcacaagacatataacgttctgg

SEQ ID NO: 238797 - DNA, 30 bp, Artificial Sequence
  Synthetic oligonucleotide
tcaacgtcccacatggctcaagcaaagtgg

SEQ ID NO: 238798 - DNA, 30 bp, Artificial Sequence
  Synthetic oligonucleotide
cggtagacggttgggagggagttaaagtgg

SEQ ID NO: 238799 - DNA, 30 bp, Artificial Sequence
  Synthetic oligonucleotide
ataatcgaatctaggcaatacagcaagtgg

SEQ ID NO: 238800 - DNA, 30 bp, Artificial Sequence
  Synthetic oligonucleotide
gggtatggaatcgactcagggtttaagtgg

SEQ ID NO: 238801 - DNA, 30 bp, Artificial Sequence
  Synthetic oligonucleotide
tcgacgatatccaaagacgtattacagtgg

SEQ ID NO: 238802 - DNA, 30 bp, Artificial Sequence
  Synthetic oligonucleotide
ctcctgatcacagtatagcagccccagtgg

SEQ ID NO: 238803 - DNA, 30 bp, Artificial Sequence
  Synthetic oligonucleotide
acaggccagggaattagtttaaagcagtgg

SEQ ID NO: 238804 - DNA, 30 bp, Artificial Sequence
  Synthetic oligonucleotide
gtgtacggataacactggaccaggcagtgg

SEQ ID NO: 238805 - DNA, 30 bp, Artificial Sequence
  Synthetic oligonucleotide
cgaaggttataccgtcgttaaaacgagtgg

SEQ ID NO: 238806 - DNA, 30 bp, Artificial Sequence
  Synthetic oligonucleotide
aaaagtgtcttcgaccggtaatacgagtgg

SEQ ID NO: 238807 - DNA, 30 bp, Artificial Sequence
  Synthetic oligonucleotide
tgactagaagtaaagcgctcccccgagtgg

SEQ ID NO: 238808 - DNA, 30 bp, Artificial Sequence
  Synthetic oligonucleotide
atatgaaatcaaaacgcacttgccgagtgg

SEQ ID NO: 238809 - DNA, 30 bp, Artificial Sequence
  Synthetic oligonucleotide
ggtgacaaattgtaactaggacatgagtgg

SEQ ID NO: 238810 - DNA, 31 bp, Artificial Sequence
  Synthetic oligonucleotide
agagcatcaagttaagtcatcaacctagtgg

SEQ ID NO: 238811 - DNA, 30 bp, Artificial Sequence
  Synthetic oligonucleotide
tccttcagacatacgatgccacagtagtgg

SEQ ID NO: 238812 - DNA, 30 bp, Artificial Sequence
  Synthetic oligonucleotide
ttccgtagaccgataggaagcaggtagtgg

SEQ ID NO: 238813 - DNA, 30 bp, Artificial Sequence
  Synthetic oligonucleotide
acagggagattcactttaggaaattagtgg

SEQ ID NO: 238814 - DNA, 30 bp, Artificial Sequence
  Synthetic oligonucleotide
caggacacatgggaaacgaaacgcacgtgg

SEQ ID NO: 238815 - DNA, 30 bp, Artificial Sequence
  Synthetic oligonucleotide
atagaaggcttaggccctatattaccgtgg

SEQ ID NO: 238816 - DNA, 30 bp, Artificial Sequence
  Synthetic oligonucleotide
ttcgcttgtaactgccatagcctgccgtgg

SEQ ID NO: 238817 - DNA, 30 bp, Artificial Sequence
  Synthetic oligonucleotide
tgctctacagaccggatgctcattccgtgg

SEQ ID NO: 238818 - DNA, 30 bp, Artificial Sequence
  Synthetic oligonucleotide
gattgttcaaaattcggggctacagcgtgg

SEQ ID NO: 238819 - DNA, 30 bp, Artificial Sequence
  Synthetic oligonucleotide
ggacgtttatttgagtcaaccgtagcgtgg

SEQ ID NO: 238820 - DNA, 30 bp, Artificial Sequence
  Synthetic oligonucleotide
ttgtccaataccctaataatcacggcgtgg

SEQ ID NO: 238821 - DNA, 30 bp, Artificial Sequence
  Synthetic oligonucleotide
caaccattgcggacggagtgggatgcgtgg

SEQ ID NO: 238822 - DNA, 30 bp, Artificial Sequence
  Synthetic oligonucleotide
taagtttaggttatcaaggtcccatcgtgg

SEQ ID NO: 238823 - DNA, 30 bp, Artificial Sequence
  Synthetic oligonucleotide
ggattgccgctcggttgggcgcgctcgtgg

SEQ ID NO: 238824 - DNA, 30 bp, Artificial Sequence
  Synthetic oligonucleotide
tgttgcgtggatggctaactcctctcgtgg

SEQ ID NO: 238825 - DNA, 30 bp, Artificial Sequence
  Synthetic oligonucleotide
aagaaagccccgcggggggagataaggtgg

SEQ ID NO: 238826 - DNA, 30 bp, Artificial Sequence
  Synthetic oligonucleotide
ataaatatggttacgaaaatgtagaggtgg

SEQ ID NO: 238827 - DNA, 30 bp, Artificial Sequence
  Synthetic oligonucleotide
tgctcatagtcccaaatagcagcgaggtgg

SEQ ID NO: 238828 - DNA, 30 bp, Artificial Sequence
  Synthetic oligonucleotide
tatcgcactgatcctctcatatgtaggtgg

SEQ ID NO: 238829 - DNA, 30 bp, Artificial Sequence
  Synthetic oligonucleotide
gttgtcgcgacaataagcactcaacggtgg

SEQ ID NO: 238830 - DNA, 30 bp, Artificial Sequence
  Synthetic oligonucleotide
cagcgaggcactttaacgaacttacggtgg

SEQ ID NO: 238831 - DNA, 30 bp, Artificial Sequence
  Synthetic oligonucleotide
caggtaaggcacgttatgcacgatcggtgg

SEQ ID NO: 238832 - DNA, 30 bp, Artificial Sequence
  Synthetic oligonucleotide
accaatcggataacggattactgagggtgg

SEQ ID NO: 238833 - DNA, 30 bp, Artificial Sequence
  Synthetic oligonucleotide
acaactataggacccattccatccgggtgg

SEQ ID NO: 238834 - DNA, 30 bp, Artificial Sequence
  Synthetic oligonucleotide
tagagcacccaaagggagtgtagcgggtgg

SEQ ID NO: 238835 - DNA, 30 bp, Artificial Sequence
  Synthetic oligonucleotide
agatacgtaagttatgtggccttggggtgg

SEQ ID NO: 238836 - DNA, 30 bp, Artificial Sequence
  Synthetic oligonucleotide
caggtgcaagcagtttggtggaaatggtgg

SEQ ID NO: 238837 - DNA, 30 bp, Artificial Sequence
  Synthetic oligonucleotide
aagccaagtccgggaggtcagcattggtgg

SEQ ID NO: 238838 - DNA, 30 bp, Artificial Sequence
  Synthetic oligonucleotide
tctccggtgaatttgaatccagattggtgg

SEQ ID NO: 238839 - DNA, 30 bp, Artificial Sequence
  Synthetic oligonucleotide
ccgtcaataaacgaccgtgggacttggtgg

SEQ ID NO: 238840 - DNA, 30 bp, Artificial Sequence
  Synthetic oligonucleotide
tgtgggtaacaggtttgttggttttggtgg

SEQ ID NO: 238841 - DNA, 30 bp, Artificial Sequence
  Synthetic oligonucleotide
cacgcaatacctgcctattcgaaaatgtgg

SEQ ID NO: 238842 - DNA, 30 bp, Artificial Sequence
  Synthetic oligonucleotide
gcaagaccagcaaacaaagcttatatgtgg

SEQ ID NO: 238843 - DNA, 30 bp, Artificial Sequence
  Synthetic oligonucleotide
tacggatcttccacagtgcagcctatgtgg

SEQ ID NO: 238844 - DNA, 30 bp, Artificial Sequence
  Synthetic oligonucleotide
ggaacgtcggatagggagcttggtatgtgg

SEQ ID NO: 238845 - DNA, 30 bp, Artificial Sequence
  Synthetic oligonucleotide
cagtgtgtagggacaatatgcagactgtgg

SEQ ID NO: 238846 - DNA, 30 bp, Artificial Sequence
  Synthetic oligonucleotide
aatctgaacatccgcggcggtaagctgtgg

SEQ ID NO: 238847 - DNA, 30 bp, Artificial Sequence
  Synthetic oligonucleotide
gtaaatgatggtgataaagtgcagctgtgg

SEQ ID NO: 238848 - DNA, 30 bp, Artificial Sequence
  Synthetic oligonucleotide
cactgtagagtgttcaaaacaccgctgtgg

SEQ ID NO: 238849 - DNA, 30 bp, Artificial Sequence
  Synthetic oligonucleotide
taagattctgaaaatctaccgcatctgtgg

SEQ ID NO: 238850 - DNA, 30 bp, Artificial Sequence
  Synthetic oligonucleotide
gaggttccttaaaggtatagccgtctgtgg

SEQ ID NO: 238851 - DNA, 30 bp, Artificial Sequence
  Synthetic oligonucleotide
tgggtaccatgcctaacggctgaagtgtgg

SEQ ID NO: 238852 - DNA, 30 bp, Artificial Sequence
  Synthetic oligonucleotide
gccacttgtctcaaggcctgtgaagtgtgg

SEQ ID NO: 238853 - DNA, 30 bp, Artificial Sequence
  Synthetic oligonucleotide
cgttcgggcactgtcccggacatagtgtgg

SEQ ID NO: 238854 - DNA, 30 bp, Artificial Sequence
  Synthetic oligonucleotide
ctgatagtgctaatcgcggagtgcgtgtgg

SEQ ID NO: 238855 - DNA, 30 bp, Artificial Sequence
  Synthetic oligonucleotide
agtgccgcgcttagtctggaggcggtgtgg

SEQ ID NO: 238856 - DNA, 30 bp, Artificial Sequence
  Synthetic oligonucleotide
gcccctgcgccggaaatagtgagattgtgg

SEQ ID NO: 238857 - DNA, 30 bp, Artificial Sequence
  Synthetic oligonucleotide
tttggagtagttatgggcaaagccttgtgg

SEQ ID NO: 238858 - DNA, 30 bp, Artificial Sequence
  Synthetic oligonucleotide
ccaaggacagttgctaacgaacggttgtgg

SEQ ID NO: 238859 - DNA, 30 bp, Artificial Sequence
  Synthetic oligonucleotide
ccggacgataagcccgcagtccgtttgtgg

SEQ ID NO: 238860 - DNA, 30 bp, Artificial Sequence
  Synthetic oligonucleotide
gtgtgcagttatagacaaatgggtttgtgg

SEQ ID NO: 238861 - DNA, 30 bp, Artificial Sequence
  Synthetic oligonucleotide
tctatgttctatgtgaagccagaaaattgg

SEQ ID NO: 238862 - DNA, 30 bp, Artificial Sequence
  Synthetic oligonucleotide
atgccgtaagcttatgatgggcgaaattgg

SEQ ID NO: 238863 - DNA, 30 bp, Artificial Sequence
  Synthetic oligonucleotide
gatacgagattaaccgtctagacgaattgg

SEQ ID NO: 238864 - DNA, 30 bp, Artificial Sequence
  Synthetic oligonucleotide
aacgagtggcttaccggggttaggaattgg

SEQ ID NO: 238865 - DNA, 31 bp, Artificial Sequence
  Synthetic oligonucleotide
aagtgctggactcatttggactcataattgg

SEQ ID NO: 238866 - DNA, 30 bp, Artificial Sequence
  Synthetic oligonucleotide
acactccatctgatttgcgtccaccattgg

SEQ ID NO: 238867 - DNA, 30 bp, Artificial Sequence
  Synthetic oligonucleotide
tgatgcgaccctgattcccatttgcattgg

SEQ ID NO: 238868 - DNA, 30 bp, Artificial Sequence
  Synthetic oligonucleotide
atgtgacacgctgtgtagcgcactcattgg

SEQ ID NO: 238869 - DNA, 30 bp, Artificial Sequence
  Synthetic oligonucleotide
cctgcaggtggaaagtgcaaaattcattgg

SEQ ID NO: 238870 - DNA, 30 bp, Artificial Sequence
  Synthetic oligonucleotide
tagagtctttgtttggtaagtcgagattgg

SEQ ID NO: 238871 - DNA, 30 bp, Artificial Sequence
  Synthetic oligonucleotide
gggaggtaaagtcgcagattttacgattgg

SEQ ID NO: 238872 - DNA, 30 bp, Artificial Sequence
  Synthetic oligonucleotide
ctgcatacaaatcatagagcaaccgattgg

SEQ ID NO: 238873 - DNA, 30 bp, Artificial Sequence
  Synthetic oligonucleotide
ttgactcagaattacggcagaaatgattgg

SEQ ID NO: 238874 - DNA, 30 bp, Artificial Sequence
  Synthetic oligonucleotide
cagtcctaggattacaatgaatactattgg

SEQ ID NO: 238875 - DNA, 30 bp, Artificial Sequence
  Synthetic oligonucleotide
ctacgaagcggttttattgcatcttattgg

SEQ ID NO: 238876 - DNA, 30 bp, Artificial Sequence
  Synthetic oligonucleotide
agtttggctctatcggaaagaaaaacttgg

SEQ ID NO: 238877 - DNA, 30 bp, Artificial Sequence
  Synthetic oligonucleotide
agaagatttgacacaaggtacagcacttgg

SEQ ID NO: 238878 - DNA, 30 bp, Artificial Sequence
  Synthetic oligonucleotide
ggtgaccagcacgtgtggctgtagacttgg

SEQ ID NO: 238879 - DNA, 30 bp, Artificial Sequence
  Synthetic oligonucleotide
agaatcttccgtgtacgaattctgacttgg

SEQ ID NO: 238880 - DNA, 30 bp, Artificial Sequence
  Synthetic oligonucleotide
gcgcgaaggctccatggggtgtctacttgg

SEQ ID NO: 238881 - DNA, 30 bp, Artificial Sequence
  Synthetic oligonucleotide
gataagcgagtatatcgctcgtaaccttgg

SEQ ID NO: 238882 - DNA, 30 bp, Artificial Sequence
  Synthetic oligonucleotide
aatgcatcggccgacaatagaggcccttgg

SEQ ID NO: 238883 - DNA, 30 bp, Artificial Sequence
  Synthetic oligonucleotide
taccagcataattggggaattggtccttgg

SEQ ID NO: 238884 - DNA, 30 bp, Artificial Sequence
  Synthetic oligonucleotide
agacaatgcaggtttgggacttttccttgg

SEQ ID NO: 238885 - DNA, 30 bp, Artificial Sequence
  Synthetic oligonucleotide
atttagggcacatgtgcgcggggagcttgg

SEQ ID NO: 238886 - DNA, 30 bp, Artificial Sequence
  Synthetic oligonucleotide
ctgtatccctgtcttcattactcggcttgg

SEQ ID NO: 238887 - DNA, 30 bp, Artificial Sequence
  Synthetic oligonucleotide
cggctggtcttacgcttcctaattgcttgg

SEQ ID NO: 238888 - DNA, 30 bp, Artificial Sequence
  Synthetic oligonucleotide
cctgccaagagcgtgtctgtatgatcttgg

SEQ ID NO: 238889 - DNA, 30 bp, Artificial Sequence
  Synthetic oligonucleotide
ccagtcacttagaattatgccagctcttgg

SEQ ID NO: 238890 - DNA, 30 bp, Artificial Sequence
  Synthetic oligonucleotide
ctgcggcggtcttcatcagcgataagttgg

SEQ ID NO: 238891 - DNA, 31 bp, Artificial Sequence
  Synthetic oligonucleotide
aaaaaactgaagcggagaatataacagttgg

SEQ ID NO: 238892 - DNA, 30 bp, Artificial Sequence
  Synthetic oligonucleotide
tgatttgttgtattttgacagtacagttgg

SEQ ID NO: 238893 - DNA, 30 bp, Artificial Sequence
  Synthetic oligonucleotide
cacaggcaatgtcagagtcataggagttgg

SEQ ID NO: 238894 - DNA, 30 bp, Artificial Sequence
  Synthetic oligonucleotide
ccggcagtcagtgtaaggctggctagttgg

SEQ ID NO: 238895 - DNA, 30 bp, Artificial Sequence
  Synthetic oligonucleotide
aacacggcttacctgagaaactctagttgg

SEQ ID NO: 238896 - DNA, 30 bp, Artificial Sequence
  Synthetic oligonucleotide
ggcgactgattgcgaaaccgtaaacgttgg

SEQ ID NO: 238897 - DNA, 30 bp, Artificial Sequence
  Synthetic oligonucleotide
tgtctgttcgaataattactatcacgttgg

SEQ ID NO: 238898 - DNA, 30 bp, Artificial Sequence
  Synthetic oligonucleotide
ggttgaataaatagcatccgttcacgttgg

SEQ ID NO: 238899 - DNA, 30 bp, Artificial Sequence
  Synthetic oligonucleotide
tgcgtgaatagcctgagtctagaccgttgg

SEQ ID NO: 238900 - DNA, 38 bp, Artificial Sequence
  Synthetic oligonucleotide
caatcttaaaccaacttaaatgaaaacgtgcccgttgg

SEQ ID NO: 238901 - DNA, 30 bp, Artificial Sequence
  Synthetic oligonucleotide
ccgactccgcaatttttagctgtccgttgg

SEQ ID NO: 238902 - DNA, 30 bp, Artificial Sequence
  Synthetic oligonucleotide
tggggagcagtttcacgacccgcgcgttgg

SEQ ID NO: 238903 - DNA, 30 bp, Artificial Sequence
  Synthetic oligonucleotide
ctcattgaggaactcccctaggcgcgttgg

SEQ ID NO: 238904 - DNA, 30 bp, Artificial Sequence
  Synthetic oligonucleotide
gcgctcgtgggggtatctcctctgcgttgg

SEQ ID NO: 238905 - DNA, 30 bp, Artificial Sequence
  Synthetic oligonucleotide
aggagctggacggatcgggatactcgttgg

SEQ ID NO: 238906 - DNA, 30 bp, Artificial Sequence
  Synthetic oligonucleotide
gccaggataaccatgggacagaacggttgg

SEQ ID NO: 238907 - DNA, 30 bp, Artificial Sequence
  Synthetic oligonucleotide
atcatgccccatccaaggatgaccggttgg

SEQ ID NO: 238908 - DNA, 30 bp, Artificial Sequence
  Synthetic oligonucleotide
ctgtactctatcaatgtcttgccgggttgg

SEQ ID NO: 238909 - DNA, 30 bp, Artificial Sequence
  Synthetic oligonucleotide
ccacccagcaggacgaatatacctggttgg

SEQ ID NO: 238910 - DNA, 30 bp, Artificial Sequence
  Synthetic oligonucleotide
agttatcaagaacgaaaggtcacatgttgg

SEQ ID NO: 238911 - DNA, 30 bp, Artificial Sequence
  Synthetic oligonucleotide
ttcgtggacactattggatgggagtgttgg

SEQ ID NO: 238912 - DNA, 30 bp, Artificial Sequence
  Synthetic oligonucleotide
tcgtcagtccaggtagttataacgtgttgg

SEQ ID NO: 238913 - DNA, 30 bp, Artificial Sequence
  Synthetic oligonucleotide
caacacatagggggcggctacagttgttgg

SEQ ID NO: 238914 - DNA, 30 bp, Artificial Sequence
  Synthetic oligonucleotide
aaaaaccggataaattgctgatcaatttgg

SEQ ID NO: 238915 - DNA, 30 bp, Artificial Sequence
  Synthetic oligonucleotide
taaacttagatggtgggatagcacatttgg

SEQ ID NO: 238916 - DNA, 30 bp, Artificial Sequence
  Synthetic oligonucleotide
taaaattggcaacagcggtcggacatttgg

SEQ ID NO: 238917 - DNA, 30 bp, Artificial Sequence
  Synthetic oligonucleotide
atcatacattaggcacagatggagatttgg

SEQ ID NO: 238918 - DNA, 30 bp, Artificial Sequence
  Synthetic oligonucleotide
cgtagttactcaaggatcacggctatttgg

SEQ ID NO: 238919 - DNA, 30 bp, Artificial Sequence
  Synthetic oligonucleotide
atcttaatgataggtagcgaatctatttgg

SEQ ID NO: 238920 - DNA, 30 bp, Artificial Sequence
  Synthetic oligonucleotide
gttacctctgagtacttcacgcgtatttgg

SEQ ID NO: 238921 - DNA, 30 bp, Artificial Sequence
  Synthetic oligonucleotide
caggcgcgagtcctggaagagacgctttgg

SEQ ID NO: 238922 - DNA, 30 bp, Artificial Sequence
  Synthetic oligonucleotide
caaaacctgacgtatcaatctgcgctttgg

SEQ ID NO: 238923 - DNA, 30 bp, Artificial Sequence
  Synthetic oligonucleotide
aataagtcattgagaacctgagttctttgg

SEQ ID NO: 238924 - DNA, 30 bp, Artificial Sequence
  Synthetic oligonucleotide
aaattcacctatgatgataggcaagtttgg

SEQ ID NO: 238925 - DNA, 30 bp, Artificial Sequence
  Synthetic oligonucleotide
attatcgccaggcacacggaacgagtttgg

SEQ ID NO: 238926 - DNA, 30 bp, Artificial Sequence
  Synthetic oligonucleotide
ttaccacctaactggttctagagggtttgg

SEQ ID NO: 238927 - DNA, 30 bp, Artificial Sequence
  Synthetic oligonucleotide
aattcaggctcaatggaccacagtgtttgg

SEQ ID NO: 238928 - DNA, 30 bp, Artificial Sequence
  Synthetic oligonucleotide
ctgccagactgcaaatgtgattttgtttgg

SEQ ID NO: 238929 - DNA, 30 bp, Artificial Sequence
  Synthetic oligonucleotide
ggtccaactgactgtcaaatatcattttgg

SEQ ID NO: 238930 - DNA, 30 bp, Artificial Sequence
  Synthetic oligonucleotide
tccgggtgttcgcttaggtatggattttgg

SEQ ID NO: 238931 - DNA, 30 bp, Artificial Sequence
  Synthetic oligonucleotide
agaaattctagagcaacaaggtccttttgg

SEQ ID NO: 238932 - DNA, 30 bp, Artificial Sequence
  Synthetic oligonucleotide
ggtcgtacatgtacggacccgcgcttttgg

SEQ ID NO: 238933 - DNA, 30 bp, Artificial Sequence
  Synthetic oligonucleotide
tagatttagggtccaagaaggacgttttgg

SEQ ID NO: 238934 - DNA, 30 bp, Artificial Sequence
  Synthetic oligonucleotide
gaagaatttcgctgtttccaggggttttgg

SEQ ID NO: 238935 - DNA, 30 bp, Artificial Sequence
  Synthetic oligonucleotide
tggcgtgcaaccacgttactgctgttttgg

SEQ ID NO: 238936 - DNA, 31 bp, Artificial Sequence
  Synthetic oligonucleotide
accggcccacaaacttctgacttcaaaaatg

SEQ ID NO: 238937 - DNA, 30 bp, Artificial Sequence
  Synthetic oligonucleotide
actcgcgtctgtttgcggcctataaaaatg

SEQ ID NO: 238938 - DNA, 30 bp, Artificial Sequence
  Synthetic oligonucleotide
gccaacgcctgtagctgccatgtaaaaatg

SEQ ID NO: 238939 - DNA, 30 bp, Artificial Sequence
  Synthetic oligonucleotide
tgccactttccggtgagaattagcaaaatg

SEQ ID NO: 238940 - DNA, 30 bp, Artificial Sequence
  Synthetic oligonucleotide
cggtgatgtctagtaactagccagaaaatg

SEQ ID NO: 238941 - DNA, 30 bp, Artificial Sequence
  Synthetic oligonucleotide
cgatcaaaggacaggagtaagcagaaaatg

SEQ ID NO: 238942 - DNA, 30 bp, Artificial Sequence
  Synthetic oligonucleotide
acggttagtctttgtggaatcaggaaaatg

SEQ ID NO: 238943 - DNA, 30 bp, Artificial Sequence
  Synthetic oligonucleotide
ttcaaagtcgccgtccagcgcggtaaaatg

SEQ ID NO: 238944 - DNA, 30 bp, Artificial Sequence
  Synthetic oligonucleotide
cgaccggtagtagtgtgctcctgtaaaatg

SEQ ID NO: 238945 - DNA, 30 bp, Artificial Sequence
  Synthetic oligonucleotide
gttccggagaatgcgctggctcttaaaatg

SEQ ID NO: 238946 - DNA, 30 bp, Artificial Sequence
  Synthetic oligonucleotide
ctccaaacgtttgagagagctcaacaaatg

SEQ ID NO: 238947 - DNA, 30 bp, Artificial Sequence
  Synthetic oligonucleotide
gacgttaatgcgtagcttatgctacaaatg

SEQ ID NO: 238948 - DNA, 30 bp, Artificial Sequence
  Synthetic oligonucleotide
cagctttaggagcacgacctcgagcaaatg

SEQ ID NO: 238949 - DNA, 30 bp, Artificial Sequence
  Synthetic oligonucleotide
agctcgatcggacaccttctggcgcaaatg

SEQ ID NO: 238950 - DNA, 30 bp, Artificial Sequence
  Synthetic oligonucleotide
actggtcaatccagccgggattttcaaatg

SEQ ID NO: 238951 - DNA, 30 bp, Artificial Sequence
  Synthetic oligonucleotide
actgcctaaatgaaccaggcgccagaaatg

SEQ ID NO: 238952 - DNA, 30 bp, Artificial Sequence
  Synthetic oligonucleotide
gaagcccccaaagcaatgttggcggaaatg

SEQ ID NO: 238953 - DNA, 30 bp, Artificial Sequence
  Synthetic oligonucleotide
actgtggcccgggagacaacttgtgaaatg

SEQ ID NO: 238954 - DNA, 30 bp, Artificial Sequence
  Synthetic oligonucleotide
gtaataaagatggtttcgtatccataaatg

SEQ ID NO: 238955 - DNA, 30 bp, Artificial Sequence
  Synthetic oligonucleotide
tacacatacgtcataattagagcgtaaatg

SEQ ID NO: 238956 - DNA, 30 bp, Artificial Sequence
  Synthetic oligonucleotide
gcacgttgatcgtgaacgacgatgtaaatg

SEQ ID NO: 238957 - DNA, 30 bp, Artificial Sequence
  Synthetic oligonucleotide
caagcctgaactttacacaaaggttaaatg

SEQ ID NO: 238958 - DNA, 30 bp, Artificial Sequence
  Synthetic oligonucleotide
cgtcatatgcacaatgttataagaacaatg

SEQ ID NO: 238959 - DNA, 30 bp, Artificial Sequence
  Synthetic oligonucleotide
tcattgcggtaagactacagcttaacaatg

SEQ ID NO: 238960 - DNA, 30 bp, Artificial Sequence
  Synthetic oligonucleotide
cctacaataggtgccggggctactacaatg

SEQ ID NO: 238961 - DNA, 30 bp, Artificial Sequence
  Synthetic oligonucleotide
agaaccgccgtacatggccctctaccaatg

SEQ ID NO: 238962 - DNA, 30 bp, Artificial Sequence
  Synthetic oligonucleotide
acaggatggtggagtgtgcggggcccaatg

SEQ ID NO: 238963 - DNA, 30 bp, Artificial Sequence
  Synthetic oligonucleotide
gtaagttgggcagaatacgtattcccaatg

SEQ ID NO: 238964 - DNA, 30 bp, Artificial Sequence
  Synthetic oligonucleotide
agctcctcgactgagacggcgcggccaatg

SEQ ID NO: 238965 - DNA, 30 bp, Artificial Sequence
  Synthetic oligonucleotide
gacctgtttggggtagtagatgatccaatg

SEQ ID NO: 238966 - DNA, 30 bp, Artificial Sequence
  Synthetic oligonucleotide
agcattcgccattgtcagtattatccaatg

SEQ ID NO: 238967 - DNA, 30 bp, Artificial Sequence
  Synthetic oligonucleotide
ctcttaggcaaattaacgtgcggtccaatg

SEQ ID NO: 238968 - DNA, 30 bp, Artificial Sequence
  Synthetic oligonucleotide
attggataatctctgaatctatttccaatg

SEQ ID NO: 238969 - DNA, 30 bp, Artificial Sequence
  Synthetic oligonucleotide
ggatagagtgcttctgtagcgaaagcaatg

SEQ ID NO: 238970 - DNA, 30 bp, Artificial Sequence
  Synthetic oligonucleotide
gcgccatggtggccggagcatcaagcaatg

SEQ ID NO: 238971 - DNA, 30 bp, Artificial Sequence
  Synthetic oligonucleotide
tatgttcgctccaagatcgtggtagcaatg

SEQ ID NO: 238972 - DNA, 30 bp, Artificial Sequence
  Synthetic oligonucleotide
gcggggttattcaaataacattaggcaatg

SEQ ID NO: 238973 - DNA, 30 bp, Artificial Sequence
  Synthetic oligonucleotide
gccagaccagtaacggcaacctgtgcaatg

SEQ ID NO: 238974 - DNA, 30 bp, Artificial Sequence
  Synthetic oligonucleotide
gggatgaccgggccattacagtttgcaatg

SEQ ID NO: 238975 - DNA, 30 bp, Artificial Sequence
  Synthetic oligonucleotide
ggtgttgggggataccgcagattatcaatg

SEQ ID NO: 238976 - DNA, 30 bp, Artificial Sequence
  Synthetic oligonucleotide
ttggcacgtattctttcgtaatactcaatg

SEQ ID NO: 238977 - DNA, 30 bp, Artificial Sequence
  Synthetic oligonucleotide
gaccgcgatcaatacctctcatcctcaatg

SEQ ID NO: 238978 - DNA, 30 bp, Artificial Sequence
  Synthetic oligonucleotide
atctagtcgccggaggtacagtcctcaatg

SEQ ID NO: 238979 - DNA, 30 bp, Artificial Sequence
  Synthetic oligonucleotide
cacttcccatatcgtgctacgagctcaatg

SEQ ID NO: 238980 - DNA, 30 bp, Artificial Sequence
  Synthetic oligonucleotide
tttgctccataggcatcaaatctctcaatg

SEQ ID NO: 238981 - DNA, 30 bp, Artificial Sequence
  Synthetic oligonucleotide
agcttaagcggaatcatagcccagtcaatg

SEQ ID NO: 238982 - DNA, 30 bp, Artificial Sequence
  Synthetic oligonucleotide
agtgcccatggaatgactaaattgtcaatg

SEQ ID NO: 238983 - DNA, 30 bp, Artificial Sequence
  Synthetic oligonucleotide
cctaaactatgctgtgctccatattcaatg

SEQ ID NO: 238984 - DNA, 30 bp, Artificial Sequence
  Synthetic oligonucleotide
gtacgcaccgtgtatagtagtggttcaatg

SEQ ID NO: 238985 - DNA, 30 bp, Artificial Sequence
  Synthetic oligonucleotide
ggtgtctcaggaaagattagagaaagaatg

SEQ ID NO: 238986 - DNA, 30 bp, Artificial Sequence
  Synthetic oligonucleotide
ggaatagcagcacaaggctcggaaagaatg

SEQ ID NO: 238987 - DNA, 30 bp, Artificial Sequence
  Synthetic oligonucleotide
tcacctattccggttgcgtgcggaagaatg

SEQ ID NO: 238988 - DNA, 30 bp, Artificial Sequence
  Synthetic oligonucleotide
ttcacacctccggatagtgggaacagaatg

SEQ ID NO: 238989 - DNA, 30 bp, Artificial Sequence
  Synthetic oligonucleotide
gcagataacactctacgaagacacagaatg

SEQ ID NO: 238990 - DNA, 30 bp, Artificial Sequence
  Synthetic oligonucleotide
catcacggtgaattaatacctggcagaatg

SEQ ID NO: 238991 - DNA, 30 bp, Artificial Sequence
  Synthetic oligonucleotide
ctaataccgtaattaagcctgttgagaatg

SEQ ID NO: 238992 - DNA, 30 bp, Artificial Sequence
  Synthetic oligonucleotide
taagaaatgtggctaagaaccatccgaatg

SEQ ID NO: 238993 - DNA, 30 bp, Artificial Sequence
  Synthetic oligonucleotide
tacgagtaccagctttattagctccgaatg

SEQ ID NO: 238994 - DNA, 30 bp, Artificial Sequence
  Synthetic oligonucleotide
gcgtatagctcgcagagccgcccgcgaatg

SEQ ID NO: 238995 - DNA, 30 bp, Artificial Sequence
  Synthetic oligonucleotide
aaactatagcagggcctacgcgggcgaatg

SEQ ID NO: 238996 - DNA, 30 bp, Artificial Sequence
  Synthetic oligonucleotide
cagattggatcgatttctgtgctgcgaatg

SEQ ID NO: 238997 - DNA, 30 bp, Artificial Sequence
  Synthetic oligonucleotide
gccttccagccaccgggcatagctcgaatg

SEQ ID NO: 238998 - DNA, 30 bp, Artificial Sequence
  Synthetic oligonucleotide
tgtagactcacctcgggggggacaggaatg

SEQ ID NO: 238999 - DNA, 30 bp, Artificial Sequence
  Synthetic oligonucleotide
ttgtacttccggtagtctgggtgcggaatg

SEQ ID NO: 239000 - DNA, 30 bp, Artificial Sequence
  Synthetic oligonucleotide
aatcagggtccccactggcagaatggaatg

SEQ ID NO: 239001 - DNA, 30 bp, Artificial Sequence
  Synthetic oligonucleotide
ccttcacgacgctatacgggtgttggaatg

SEQ ID NO: 239002 - DNA, 30 bp, Artificial Sequence
  Synthetic oligonucleotide
gccttatagggctccgcccgttttggaatg

SEQ ID NO: 239003 - DNA, 30 bp, Artificial Sequence
  Synthetic oligonucleotide
aatatgggatatcagagtgagagctgaatg

SEQ ID NO: 239004 - DNA, 30 bp, Artificial Sequence
  Synthetic oligonucleotide
atacaatcaatgcggactatatcgtgaatg

SEQ ID NO: 239005 - DNA, 30 bp, Artificial Sequence
  Synthetic oligonucleotide
ggaactccggatttgggactgttgtgaatg

SEQ ID NO: 239006 - DNA, 30 bp, Artificial Sequence
  Synthetic oligonucleotide
cagttgagcgataagttggctacttgaatg

SEQ ID NO: 239007 - DNA, 30 bp, Artificial Sequence
  Synthetic oligonucleotide
ctctaagaaagtatgcggccggcttgaatg

SEQ ID NO: 239008 - DNA, 30 bp, Artificial Sequence
  Synthetic oligonucleotide
gtcgttattagccctagtatggtaataatg

SEQ ID NO: 239009 - DNA, 30 bp, Artificial Sequence
  Synthetic oligonucleotide
gcgatatggtcggacactccttacataatg

SEQ ID NO: 239010 - DNA, 30 bp, Artificial Sequence
  Synthetic oligonucleotide
atacgtggcggagcagagagcagcataatg

SEQ ID NO: 239011 - DNA, 30 bp, Artificial Sequence
  Synthetic oligonucleotide
atagtgcgaattcgttcgctgtgcataatg

SEQ ID NO: 239012 - DNA, 30 bp, Artificial Sequence
  Synthetic oligonucleotide
agaggcccattcctagtgtgtcagataatg

SEQ ID NO: 239013 - DNA, 30 bp, Artificial Sequence
  Synthetic oligonucleotide
gagagagctaggcactatctagagataatg

SEQ ID NO: 239014 - DNA, 30 bp, Artificial Sequence
  Synthetic oligonucleotide
ggttatgttgcttcggctacctgtataatg

SEQ ID NO: 239015 - DNA, 30 bp, Artificial Sequence
  Synthetic oligonucleotide
cgccccggtctagaaatcggtgttataatg

SEQ ID NO: 239016 - DNA, 30 bp, Artificial Sequence
  Synthetic oligonucleotide
atagccatttgcccaaatgcgtcactaatg

SEQ ID NO: 239017 - DNA, 30 bp, Artificial Sequence
  Synthetic oligonucleotide
ggagttcgtcacttatttcacgtcctaatg

SEQ ID NO: 239018 - DNA, 30 bp, Artificial Sequence
  Synthetic oligonucleotide
ttaattgggagaattgttgcaaagctaatg

SEQ ID NO: 239019 - DNA, 30 bp, Artificial Sequence
  Synthetic oligonucleotide
taactaaatggggagtgaacaatgctaatg

SEQ ID NO: 239020 - DNA, 30 bp, Artificial Sequence
  Synthetic oligonucleotide
tattgtctcagagcaagaggtcgcgtaatg

SEQ ID NO: 239021 - DNA, 30 bp, Artificial Sequence
  Synthetic oligonucleotide
gaaggtacggttgggggcccggcggtaatg

SEQ ID NO: 239022 - DNA, 30 bp, Artificial Sequence
  Synthetic oligonucleotide
ccaacggatccacttgcacggagggtaatg

SEQ ID NO: 239023 - DNA, 30 bp, Artificial Sequence
  Synthetic oligonucleotide
cttaagcaggtctgtaatacaggggtaatg

SEQ ID NO: 239024 - DNA, 30 bp, Artificial Sequence
  Synthetic oligonucleotide
gcgttacccgagttttcaagtgatgtaatg

SEQ ID NO: 239025 - DNA, 30 bp, Artificial Sequence
  Synthetic oligonucleotide
tacaggtaggggcttagaacaattgtaatg

SEQ ID NO: 239026 - DNA, 30 bp, Artificial Sequence
  Synthetic oligonucleotide
ggacgcccgcctaaactatcgtttgtaatg

SEQ ID NO: 239027 - DNA, 30 bp, Artificial Sequence
  Synthetic oligonucleotide
cggacgttccgtataccaatggcattaatg

SEQ ID NO: 239028 - DNA, 30 bp, Artificial Sequence
  Synthetic oligonucleotide
catcaggaacttcatgatcagcgcttaatg

SEQ ID NO: 239029 - DNA, 30 bp, Artificial Sequence
  Synthetic oligonucleotide
catcaaggtcaggtagctgtattcttaatg

SEQ ID NO: 239030 - DNA, 30 bp, Artificial Sequence
  Synthetic oligonucleotide
ctgggttaaggagaccataaaatgttaatg

SEQ ID NO: 239031 - DNA, 30 bp, Artificial Sequence
  Synthetic oligonucleotide
gactcgttagttcaaataccatttttaatg

SEQ ID NO: 239032 - DNA, 29 bp, Artificial Sequence
  Synthetic oligonucleotide
aaacggcaatcgcagccacgacaaacatg

SEQ ID NO: 239033 - DNA, 30 bp, Artificial Sequence
  Synthetic oligonucleotide
aacacgcgtgatcgtgggaatttcaacatg

SEQ ID NO: 239034 - DNA, 30 bp, Artificial Sequence
  Synthetic oligonucleotide
atctatccgagtgcaagcacagcgaacatg

SEQ ID NO: 239035 - DNA, 30 bp, Artificial Sequence
  Synthetic oligonucleotide
gtgtctatcccgtggcctcaccaacacatg

SEQ ID NO: 239036 - DNA, 30 bp, Artificial Sequence
  Synthetic oligonucleotide
tagcgaacaggccgcccttgtgaacacatg

SEQ ID NO: 239037 - DNA, 30 bp, Artificial Sequence
  Synthetic oligonucleotide
cgtgtgtttcagcagaacgtgcgacacatg

SEQ ID NO: 239038 - DNA, 30 bp, Artificial Sequence
  Synthetic oligonucleotide
gtgagcaacttgcaagaattcgtacacatg

SEQ ID NO: 239039 - DNA, 30 bp, Artificial Sequence
  Synthetic oligonucleotide
cctggttacgggctgcgatgtgtacacatg

SEQ ID NO: 239040 - DNA, 30 bp, Artificial Sequence
  Synthetic oligonucleotide
tgaacgcctatatccataggcacccacatg

SEQ ID NO: 239041 - DNA, 30 bp, Artificial Sequence
  Synthetic oligonucleotide
gacgggacggtcctaaggattccccacatg

SEQ ID NO: 239042 - DNA, 30 bp, Artificial Sequence
  Synthetic oligonucleotide
ttggatcgcgtccatctcgctaagcacatg

SEQ ID NO: 239043 - DNA, 30 bp, Artificial Sequence
  Synthetic oligonucleotide
ggtaattaatattcgaagggtaagcacatg

SEQ ID NO: 239044 - DNA, 30 bp, Artificial Sequence
  Synthetic oligonucleotide
aaggcaaataagaccttaaaggagcacatg

SEQ ID NO: 239045 - DNA, 30 bp, Artificial Sequence
  Synthetic oligonucleotide
cttaatgtgaagcactgtgagtggcacatg

SEQ ID NO: 239046 - DNA, 30 bp, Artificial Sequence
  Synthetic oligonucleotide
caatcctagggcgttaaaggtttgcacatg

SEQ ID NO: 239047 - DNA, 30 bp, Artificial Sequence
  Synthetic oligonucleotide
cggtacatttgcccgcaagtgaatcacatg

SEQ ID NO: 239048 - DNA, 30 bp, Artificial Sequence
  Synthetic oligonucleotide
ttagcaaaagtcaagaatttcagtcacatg

SEQ ID NO: 239049 - DNA, 30 bp, Artificial Sequence
  Synthetic oligonucleotide
tgtaagctagaagttcatcagggtcacatg

SEQ ID NO: 239050 - DNA, 30 bp, Artificial Sequence
  Synthetic oligonucleotide
aggtcttgatttcttgtgagcgtagacatg

SEQ ID NO: 239051 - DNA, 30 bp, Artificial Sequence
  Synthetic oligonucleotide
gatcaagtttatggtctacccaccgacatg

SEQ ID NO: 239052 - DNA, 30 bp, Artificial Sequence
  Synthetic oligonucleotide
ggtggaatcgggtagtgatgccccgacatg

SEQ ID NO: 239053 - DNA, 30 bp, Artificial Sequence
  Synthetic oligonucleotide
cacggtactgagatccggggtagcgacatg

SEQ ID NO: 239054 - DNA, 30 bp, Artificial Sequence
  Synthetic oligonucleotide
gggtggcaggaagtccatatttgcgacatg

SEQ ID NO: 239055 - DNA, 30 bp, Artificial Sequence
  Synthetic oligonucleotide
cgaatgttcaggcacacgtctagggacatg

SEQ ID NO: 239056 - DNA, 30 bp, Artificial Sequence
  Synthetic oligonucleotide
gcacggcgttggtacgtttcctgggacatg

SEQ ID NO: 239057 - DNA, 30 bp, Artificial Sequence
  Synthetic oligonucleotide
gggtatgccgcgattcgaatttctgacatg

SEQ ID NO: 239058 - DNA, 30 bp, Artificial Sequence
  Synthetic oligonucleotide
ggtagccgctcgagcgtggcataatacatg

SEQ ID NO: 239059 - DNA, 30 bp, Artificial Sequence
  Synthetic oligonucleotide
cgagcgccttattagtcaagctgatacatg

SEQ ID NO: 239060 - DNA, 30 bp, Artificial Sequence
  Synthetic oligonucleotide
attgtgtggtcgtgacctaggatatacatg

SEQ ID NO: 239061 - DNA, 30 bp, Artificial Sequence
  Synthetic oligonucleotide
aataactacgacccgtgacccagctacatg

SEQ ID NO: 239062 - DNA, 30 bp, Artificial Sequence
  Synthetic oligonucleotide
caggtaaaacgggtggagacctgctacatg

SEQ ID NO: 239063 - DNA, 30 bp, Artificial Sequence
  Synthetic oligonucleotide
gtaggtgaggagcagacggagacgtacatg

SEQ ID NO: 239064 - DNA, 30 bp, Artificial Sequence
  Synthetic oligonucleotide
gttgctctagatctaaggaccgcgtacatg

SEQ ID NO: 239065 - DNA, 30 bp, Artificial Sequence
  Synthetic oligonucleotide
catacaatggtacacccagaaccttacatg

SEQ ID NO: 239066 - DNA, 30 bp, Artificial Sequence
  Synthetic oligonucleotide
ggcctaagcgagatgcaatgcgcaaccatg

SEQ ID NO: 239067 - DNA, 30 bp, Artificial Sequence
  Synthetic oligonucleotide
ttagatacagggtgtggcttgaacaccatg

SEQ ID NO: 239068 - DNA, 30 bp, Artificial Sequence
  Synthetic oligonucleotide
atcagcgttgagaaccgggattacaccatg

SEQ ID NO: 239069 - DNA, 30 bp, Artificial Sequence
  Synthetic oligonucleotide
aaagctggtatcaggaagatattgaccatg

SEQ ID NO: 239070 - DNA, 30 bp, Artificial Sequence
  Synthetic oligonucleotide
cccacggccagcgaaaatttatgacccatg

SEQ ID NO: 239071 - DNA, 30 bp, Artificial Sequence
  Synthetic oligonucleotide
agattagactaccctgaggtctgacccatg

SEQ ID NO: 239072 - DNA, 30 bp, Artificial Sequence
  Synthetic oligonucleotide
ctcagcgatgtgaccgtataagctcccatg

SEQ ID NO: 239073 - DNA, 30 bp, Artificial Sequence
  Synthetic oligonucleotide
ctctagggttggtactctgcctctcccatg

SEQ ID NO: 239074 - DNA, 30 bp, Artificial Sequence
  Synthetic oligonucleotide
aaaggaccttcattccagtgtagcgccatg

SEQ ID NO: 239075 - DNA, 30 bp, Artificial Sequence
  Synthetic oligonucleotide
cgatcggggtggtaccgggaacgggccatg

SEQ ID NO: 239076 - DNA, 30 bp, Artificial Sequence
  Synthetic oligonucleotide
agttcggtgtatagttcgggaagtgccatg

SEQ ID NO: 239077 - DNA, 30 bp, Artificial Sequence
  Synthetic oligonucleotide
tgcgtacatataagcttccctgactccatg

SEQ ID NO: 239078 - DNA, 30 bp, Artificial Sequence
  Synthetic oligonucleotide
agcgaggctttctccatgcggtactccatg

SEQ ID NO: 239079 - DNA, 30 bp, Artificial Sequence
  Synthetic oligonucleotide
gttcctccgcgaactgttggtccaagcatg

SEQ ID NO: 239080 - DNA, 30 bp, Artificial Sequence
  Synthetic oligonucleotide
cagtggcccacgtcaggactcggaagcatg

SEQ ID NO: 239081 - DNA, 30 bp, Artificial Sequence
  Synthetic oligonucleotide
acagctgaatcagggaaaggacacagcatg

SEQ ID NO: 239082 - DNA, 30 bp, Artificial Sequence
  Synthetic oligonucleotide
agctacaggggggcgcgagtggatagcatg

SEQ ID NO: 239083 - DNA, 30 bp, Artificial Sequence
  Synthetic oligonucleotide
ctacactgctgcccgacggtatcacgcatg

SEQ ID NO: 239084 - DNA, 30 bp, Artificial Sequence
  Synthetic oligonucleotide
accgcccgtgcacataagcaccgacgcatg

SEQ ID NO: 239085 - DNA, 30 bp, Artificial Sequence
  Synthetic oligonucleotide
agcggtgcccaacagtaagccggccgcatg

SEQ ID NO: 239086 - DNA, 30 bp, Artificial Sequence
  Synthetic oligonucleotide
gggggaggacataataaattagcgcgcatg

SEQ ID NO: 239087 - DNA, 30 bp, Artificial Sequence
  Synthetic oligonucleotide
cagcagcggccacacccatttgtaggcatg

SEQ ID NO: 239088 - DNA, 30 bp, Artificial Sequence
  Synthetic oligonucleotide
aatttaatggagacgagatggaagggcatg

SEQ ID NO: 239089 - DNA, 30 bp, Artificial Sequence
  Synthetic oligonucleotide
gatagttagcccgtagtgattgagggcatg

SEQ ID NO: 239090 - DNA, 30 bp, Artificial Sequence
  Synthetic oligonucleotide
acatcccggccccggaattattcgggcatg

SEQ ID NO: 239091 - DNA, 30 bp, Artificial Sequence
  Synthetic oligonucleotide
taaagcacgtgctaactagatgatggcatg

SEQ ID NO: 239092 - DNA, 30 bp, Artificial Sequence
  Synthetic oligonucleotide
agtaagataccattagacctaggtggcatg

SEQ ID NO: 239093 - DNA, 30 bp, Artificial Sequence
  Synthetic oligonucleotide
ttccacaccgctcggactcgctgtggcatg

SEQ ID NO: 239094 - DNA, 30 bp, Artificial Sequence
  Synthetic oligonucleotide
tcgtgtgattacacgtccgctagatgcatg

SEQ ID NO: 239095 - DNA, 30 bp, Artificial Sequence
  Synthetic oligonucleotide
gtcggtcttaggaacatttaaccctgcatg

SEQ ID NO: 239096 - DNA, 30 bp, Artificial Sequence
  Synthetic oligonucleotide
caggaggttagaagagcacgcgcttgcatg

SEQ ID NO: 239097 - DNA, 30 bp, Artificial Sequence
  Synthetic oligonucleotide
actcaagagtagcgaattcgaatttgcatg

SEQ ID NO: 239098 - DNA, 30 bp, Artificial Sequence
  Synthetic oligonucleotide
aggaggggtgactatcgtccataaatcatg

SEQ ID NO: 239099 - DNA, 30 bp, Artificial Sequence
  Synthetic oligonucleotide
ttgatggtccatgaatggagtaggatcatg

SEQ ID NO: 239100 - DNA, 30 bp, Artificial Sequence
  Synthetic oligonucleotide
tcaagggagagaagcccgtgccatatcatg

SEQ ID NO: 239101 - DNA, 30 bp, Artificial Sequence
  Synthetic oligonucleotide
actactactggttggaaccaaccactcatg

SEQ ID NO: 239102 - DNA, 30 bp, Artificial Sequence
  Synthetic oligonucleotide
aatacgtaagtcctcaataaaaccctcatg

SEQ ID NO: 239103 - DNA, 30 bp, Artificial Sequence
  Synthetic oligonucleotide
agccaatttccgggggtatttccggtcatg

SEQ ID NO: 239104 - DNA, 30 bp, Artificial Sequence
  Synthetic oligonucleotide
cgcgtgcccaatcagcctaaatgtgtcatg

SEQ ID NO: 239105 - DNA, 30 bp, Artificial Sequence
  Synthetic oligonucleotide
aataagatacagactaaacgatagttcatg

SEQ ID NO: 239106 - DNA, 30 bp, Artificial Sequence
  Synthetic oligonucleotide
ctacgaatctgatcacgggtttggttcatg

SEQ ID NO: 239107 - DNA, 30 bp, Artificial Sequence
  Synthetic oligonucleotide
tccgtgagtcccgtgttccctctgttcatg

SEQ ID NO: 239108 - DNA, 30 bp, Artificial Sequence
  Synthetic oligonucleotide
agttgacatttgggtctctctgttttcatg

SEQ ID NO: 239109 - DNA, 30 bp, Artificial Sequence
  Synthetic oligonucleotide
ccgacacggatcgctcttcggacaaagatg

SEQ ID NO: 239110 - DNA, 30 bp, Artificial Sequence
  Synthetic oligonucleotide
atcagcactaatcgggtggtgggaaagatg

SEQ ID NO: 239111 - DNA, 30 bp, Artificial Sequence
  Synthetic oligonucleotide
cttatgttgcgtaaggcgatgttaaagatg

SEQ ID NO: 239112 - DNA, 30 bp, Artificial Sequence
  Synthetic oligonucleotide
ttatgagaacgatagaacgttttaaagatg

SEQ ID NO: 239113 - DNA, 31 bp, Artificial Sequence
  Synthetic oligonucleotide
tgggtcttatcaggcgggcctgaggaagatg

SEQ ID NO: 239114 - DNA, 30 bp, Artificial Sequence
  Synthetic oligonucleotide
cttcacatcagtacgttgttattgaagatg

SEQ ID NO: 239115 - DNA, 30 bp, Artificial Sequence
  Synthetic oligonucleotide
tatgttaaaagataaggtcaacgtaagatg

SEQ ID NO: 239116 - DNA, 30 bp, Artificial Sequence
  Synthetic oligonucleotide
gaaagtggcctaatagaccgccgccagatg

SEQ ID NO: 239117 - DNA, 30 bp, Artificial Sequence
  Synthetic oligonucleotide
catgtcattgtgtagtcggtttatcagatg

SEQ ID NO: 239118 - DNA, 30 bp, Artificial Sequence
  Synthetic oligonucleotide
aggcagaaacggaccgaggagcctcagatg

SEQ ID NO: 239119 - DNA, 30 bp, Artificial Sequence
  Synthetic oligonucleotide
agatggagtagacgtcgagactgtcagatg

SEQ ID NO: 239120 - DNA, 30 bp, Artificial Sequence
  Synthetic oligonucleotide
tcagtcgtcacgtggtataaaattcagatg

SEQ ID NO: 239121 - DNA, 30 bp, Artificial Sequence
  Synthetic oligonucleotide
aatggcatagaagaatgtattcaagagatg

SEQ ID NO: 239122 - DNA, 30 bp, Artificial Sequence
  Synthetic oligonucleotide
actgaaaatacggtaggctgggcagagatg

SEQ ID NO: 239123 - DNA, 30 bp, Artificial Sequence
  Synthetic oligonucleotide
tgagggcccaatggcgcgagagacgagatg

SEQ ID NO: 239124 - DNA, 30 bp, Artificial Sequence
  Synthetic oligonucleotide
cgcatctatattcgacttcttattgagatg

SEQ ID NO: 239125 - DNA, 30 bp, Artificial Sequence
  Synthetic oligonucleotide
tcggtatataaccccaatggcatctagatg

SEQ ID NO: 239126 - DNA, 30 bp, Artificial Sequence
  Synthetic oligonucleotide
ccataagtcccaggtcgatgcacgtagatg

SEQ ID NO: 239127 - DNA, 30 bp, Artificial Sequence
  Synthetic oligonucleotide
ctaccaggatgtcggcaggtccggtagatg

SEQ ID NO: 239128 - DNA, 30 bp, Artificial Sequence
  Synthetic oligonucleotide
ggaacgacaagttggattgtcgtgtagatg

SEQ ID NO: 239129 - DNA, 30 bp, Artificial Sequence
  Synthetic oligonucleotide
ctcttaacctcagggctagcgtcttagatg

SEQ ID NO: 239130 - DNA, 30 bp, Artificial Sequence
  Synthetic oligonucleotide
tggcaaacatcatcgggaaagcgttagatg

SEQ ID NO: 239131 - DNA, 30 bp, Artificial Sequence
  Synthetic oligonucleotide
ttgctgagttggaagacaggcggttagatg

SEQ ID NO: 239132 - DNA, 30 bp, Artificial Sequence
  Synthetic oligonucleotide
tctaaaatgggatacggtcccgcaacgatg

SEQ ID NO: 239133 - DNA, 30 bp, Artificial Sequence
  Synthetic oligonucleotide
actgctagacctgttatctgtatcacgatg

SEQ ID NO: 239134 - DNA, 30 bp, Artificial Sequence
  Synthetic oligonucleotide
tcaccggtcagtaacaatgctcatacgatg

SEQ ID NO: 239135 - DNA, 30 bp, Artificial Sequence
  Synthetic oligonucleotide
gcataatgatgattcgagatatctacgatg

SEQ ID NO: 239136 - DNA, 30 bp, Artificial Sequence
  Synthetic oligonucleotide
gaagactccggctttcagtggtttacgatg

SEQ ID NO: 239137 - DNA, 30 bp, Artificial Sequence
  Synthetic oligonucleotide
cactagtatgagatttagatcatcccgatg

SEQ ID NO: 239138 - DNA, 30 bp, Artificial Sequence
  Synthetic oligonucleotide
gtggaccgtactgtgagtattgctccgatg

SEQ ID NO: 239139 - DNA, 30 bp, Artificial Sequence
  Synthetic oligonucleotide
ataatgctacaaatgcatgtgcgtccgatg

SEQ ID NO: 239140 - DNA, 31 bp, Artificial Sequence
  Synthetic oligonucleotide
cttacgacagacggggtcgcagaaagcgatg

SEQ ID NO: 239141 - DNA, 30 bp, Artificial Sequence
  Synthetic oligonucleotide
agatatatacagtttgttcgggaagcgatg

SEQ ID NO: 239142 - DNA, 30 bp, Artificial Sequence
  Synthetic oligonucleotide
ggtttgtttagctcaatgagatacgcgatg

SEQ ID NO: 239143 - DNA, 30 bp, Artificial Sequence
  Synthetic oligonucleotide
ctccatcgtcgcgctgccgataccgcgatg

SEQ ID NO: 239144 - DNA, 30 bp, Artificial Sequence
  Synthetic oligonucleotide
tattatctctggagggaatgcatcgcgatg

SEQ ID NO: 239145 - DNA, 30 bp, Artificial Sequence
  Synthetic oligonucleotide
cagatgtccaacgctctgcagattgcgatg

SEQ ID NO: 239146 - DNA, 30 bp, Artificial Sequence
  Synthetic oligonucleotide
ggccggacgtggacaacaggcgttgcgatg

SEQ ID NO: 239147 - DNA, 30 bp, Artificial Sequence
  Synthetic oligonucleotide
gtccatttacagccacgtccataatcgatg

SEQ ID NO: 239148 - DNA, 30 bp, Artificial Sequence
  Synthetic oligonucleotide
ggctgcaccagcacagaagacccctcgatg

SEQ ID NO: 239149 - DNA, 30 bp, Artificial Sequence
  Synthetic oligonucleotide
caagcgatgcaaaccgcgaattgctcgatg

SEQ ID NO: 239150 - DNA, 30 bp, Artificial Sequence
  Synthetic oligonucleotide
attcaagccactaatcgacacgtctcgatg

SEQ ID NO: 239151 - DNA, 30 bp, Artificial Sequence
  Synthetic oligonucleotide
atctggcgaagattcccgtagggttcgatg

SEQ ID NO: 239152 - DNA, 30 bp, Artificial Sequence
  Synthetic oligonucleotide
ggaccccgtcgaaggtgtgggggttcgatg

SEQ ID NO: 239153 - DNA, 30 bp, Artificial Sequence
  Synthetic oligonucleotide
attgatttgtacagcgatcgaacaaggatg

SEQ ID NO: 239154 - DNA, 30 bp, Artificial Sequence
  Synthetic oligonucleotide
ctttgcgaaagtcaaatagttgcaaggatg

SEQ ID NO: 239155 - DNA, 30 bp, Artificial Sequence
  Synthetic oligonucleotide
tttatcagtctcgaggtccagctaaggatg

SEQ ID NO: 239156 - DNA, 30 bp, Artificial Sequence
  Synthetic oligonucleotide
tcacaattactagagcccttgttaaggatg

SEQ ID NO: 239157 - DNA, 30 bp, Artificial Sequence
  Synthetic oligonucleotide
tcactgtatttttaggcatagtacaggatg

SEQ ID NO: 239158 - DNA, 30 bp, Artificial Sequence
  Synthetic oligonucleotide
attggactgtaaaacggcgatcgtaggatg

SEQ ID NO: 239159 - DNA, 30 bp, Artificial Sequence
  Synthetic oligonucleotide
cgtccggacaataatttgtgggttaggatg

SEQ ID NO: 239160 - DNA, 30 bp, Artificial Sequence
  Synthetic oligonucleotide
ccagacacacatttgccccaaggacggatg

SEQ ID NO: 239161 - DNA, 30 bp, Artificial Sequence
  Synthetic oligonucleotide
tgtcctgcatgggccaccaaacggcggatg

SEQ ID NO: 239162 - DNA, 30 bp, Artificial Sequence
  Synthetic oligonucleotide
attgtaaaagcgcagacgcctgtgcggatg

SEQ ID NO: 239163 - DNA, 30 bp, Artificial Sequence
  Synthetic oligonucleotide
cagacatgcggctactgacgaacagggatg

SEQ ID NO: 239164 - DNA, 30 bp, Artificial Sequence
  Synthetic oligonucleotide
agctcgatgaaaaaaagatgctacgggatg

SEQ ID NO: 239165 - DNA, 30 bp, Artificial Sequence
  Synthetic oligonucleotide
ggcagatttgtagtccagtgtcccgggatg

SEQ ID NO: 239166 - DNA, 30 bp, Artificial Sequence
  Synthetic oligonucleotide
tcttctggtttagtaaattagtaggggatg

SEQ ID NO: 239167 - DNA, 30 bp, Artificial Sequence
  Synthetic oligonucleotide
tcagtatcatagatgtcgcgtctggggatg

SEQ ID NO: 239168 - DNA, 30 bp, Artificial Sequence
  Synthetic oligonucleotide
gtcttgatggattgtttgcaagcatggatg

SEQ ID NO: 239169 - DNA, 30 bp, Artificial Sequence
  Synthetic oligonucleotide
agggctaactattccgatgtaatatggatg

SEQ ID NO: 239170 - DNA, 30 bp, Artificial Sequence
  Synthetic oligonucleotide
gtacgtggccctttataccactgaatgatg

SEQ ID NO: 239171 - DNA, 27 bp, Artificial Sequence
  Synthetic oligonucleotide
gatgcgtgtcgatacagcaatatgatg

SEQ ID NO: 239172 - DNA, 30 bp, Artificial Sequence
  Synthetic oligonucleotide
cataaaactgccttccaaatatatatgatg

SEQ ID NO: 239173 - DNA, 30 bp, Artificial Sequence
  Synthetic oligonucleotide
gaccgccgatttacgtcagattttatgatg

SEQ ID NO: 239174 - DNA, 30 bp, Artificial Sequence
  Synthetic oligonucleotide
cgttcataggctcagccgggacttctgatg

SEQ ID NO: 239175 - DNA, 30 bp, Artificial Sequence
  Synthetic oligonucleotide
cggttcgtcccgcaaacctcaaaagtgatg

SEQ ID NO: 239176 - DNA, 30 bp, Artificial Sequence
  Synthetic oligonucleotide
ggagtacttacgcaaactcgcttagtgatg

SEQ ID NO: 239177 - DNA, 30 bp, Artificial Sequence
  Synthetic oligonucleotide
caggacataaccactgggtggtacgtgatg

SEQ ID NO: 239178 - DNA, 30 bp, Artificial Sequence
  Synthetic oligonucleotide
gtatgtacttccgcccaagtaaaattgatg

SEQ ID NO: 239179 - DNA, 30 bp, Artificial Sequence
  Synthetic oligonucleotide
aggctccgcactaaaaattactaattgatg

SEQ ID NO: 239180 - DNA, 30 bp, Artificial Sequence
  Synthetic oligonucleotide
gatacatggtacatcaggcactgattgatg

SEQ ID NO: 239181 - DNA, 30 bp, Artificial Sequence
  Synthetic oligonucleotide
tccaagtgatctgtccacaaatacttgatg

SEQ ID NO: 239182 - DNA, 30 bp, Artificial Sequence
  Synthetic oligonucleotide
aggagagctcagtatgttcaagtcttgatg

SEQ ID NO: 239183 - DNA, 30 bp, Artificial Sequence
  Synthetic oligonucleotide
gtctgggcgtgatgtccggcaaatttgatg

SEQ ID NO: 239184 - DNA, 30 bp, Artificial Sequence
  Synthetic oligonucleotide
tgcgaaacggtgctcagcgtaggtttgatg

SEQ ID NO: 239185 - DNA, 30 bp, Artificial Sequence
  Synthetic oligonucleotide
cgtatggaagagataccggcgggtttgatg

SEQ ID NO: 239186 - DNA, 30 bp, Artificial Sequence
  Synthetic oligonucleotide
aaaatagggcacctaggttggcgaaatatg

SEQ ID NO: 239187 - DNA, 30 bp, Artificial Sequence
  Synthetic oligonucleotide
ccggtaacattacaagataaaataaatatg

SEQ ID NO: 239188 - DNA, 30 bp, Artificial Sequence
  Synthetic oligonucleotide
gtaacgtttcaactttattgagacaatatg

SEQ ID NO: 239189 - DNA, 30 bp, Artificial Sequence
  Synthetic oligonucleotide
tagaatacgggactcggaaagggcaatatg

SEQ ID NO: 239190 - DNA, 30 bp, Artificial Sequence
  Synthetic oligonucleotide
ctggagtaattaacactggttcagaatatg

SEQ ID NO: 239191 - DNA, 30 bp, Artificial Sequence
  Synthetic oligonucleotide
ctattgtcaacttgtagacttgagaatatg

SEQ ID NO: 239192 - DNA, 30 bp, Artificial Sequence
  Synthetic oligonucleotide
ggatcaacgaggtgtacaagcaaacatatg

SEQ ID NO: 239193 - DNA, 30 bp, Artificial Sequence
  Synthetic oligonucleotide
ggacatacattcccgagttatcgacatatg

SEQ ID NO: 239194 - DNA, 30 bp, Artificial Sequence
  Synthetic oligonucleotide
cagtccggggtgtactattgcgtacatatg

SEQ ID NO: 239195 - DNA, 30 bp, Artificial Sequence
  Synthetic oligonucleotide
gtacagcttcctgcaaagctaggccatatg

SEQ ID NO: 239196 - DNA, 30 bp, Artificial Sequence
  Synthetic oligonucleotide
ttcgctagcgtcggaagtgctggccatatg

SEQ ID NO: 239197 - DNA, 30 bp, Artificial Sequence
  Synthetic oligonucleotide
aattcaaagtaagcgtacgaatctcatatg

SEQ ID NO: 239198 - DNA, 30 bp, Artificial Sequence
  Synthetic oligonucleotide
gatgccaggcgatcggtagccagtcatatg

SEQ ID NO: 239199 - DNA, 30 bp, Artificial Sequence
  Synthetic oligonucleotide
ctcgccggagggcgtgactataacgatatg

SEQ ID NO: 239200 - DNA, 30 bp, Artificial Sequence
  Synthetic oligonucleotide
ctaaatctcagaggcgggacgccggatatg

SEQ ID NO: 239201 - DNA, 30 bp, Artificial Sequence
  Synthetic oligonucleotide
acttccaggtgaacactgccatatgatatg

SEQ ID NO: 239202 - DNA, 30 bp, Artificial Sequence
  Synthetic oligonucleotide
cctgccctagcggagtagcacgaatatatg

SEQ ID NO: 239203 - DNA, 30 bp, Artificial Sequence
  Synthetic oligonucleotide
ttacataaggcggggtctcgtgactatatg

SEQ ID NO: 239204 - DNA, 30 bp, Artificial Sequence
  Synthetic oligonucleotide
tactcgtggtcgtaaacccgatacactatg

SEQ ID NO: 239205 - DNA, 30 bp, Artificial Sequence
  Synthetic oligonucleotide
ctttccctaaatggaaatcaaaatactatg

SEQ ID NO: 239206 - DNA, 30 bp, Artificial Sequence
  Synthetic oligonucleotide
tcgcgcaaccaggacaagttaggccctatg

SEQ ID NO: 239207 - DNA, 30 bp, Artificial Sequence
  Synthetic oligonucleotide
cgatagggttaggcggacggaaagcctatg

SEQ ID NO: 239208 - DNA, 30 bp, Artificial Sequence
  Synthetic oligonucleotide
catacctcagtaaatgattcgaaagctatg

SEQ ID NO: 239209 - DNA, 30 bp, Artificial Sequence
  Synthetic oligonucleotide
tacccgcatgggcagggagacccagctatg

SEQ ID NO: 239210 - DNA, 30 bp, Artificial Sequence
  Synthetic oligonucleotide
ctcgtggagacggactctcctcgagctatg

SEQ ID NO: 239211 - DNA, 30 bp, Artificial Sequence
  Synthetic oligonucleotide
acagaggtctccgttgccccgcccgctatg

SEQ ID NO: 239212 - DNA, 30 bp, Artificial Sequence
  Synthetic oligonucleotide
cctaatgggagtcatgccagagccgctatg

SEQ ID NO: 239213 - DNA, 30 bp, Artificial Sequence
  Synthetic oligonucleotide
catattgcccggaatagcgatacggctatg

SEQ ID NO: 239214 - DNA, 30 bp, Artificial Sequence
  Synthetic oligonucleotide
tcttagagcataatatatcggcatgctatg

SEQ ID NO: 239215 - DNA, 30 bp, Artificial Sequence
  Synthetic oligonucleotide
taacgcctgtagcattatggcggtgctatg

SEQ ID NO: 239216 - DNA, 30 bp, Artificial Sequence
  Synthetic oligonucleotide
gaacaggggacggtgagttcatttgctatg

SEQ ID NO: 239217 - DNA, 30 bp, Artificial Sequence
  Synthetic oligonucleotide
agaagtgagcattgggtatcgtttgctatg

SEQ ID NO: 239218 - DNA, 30 bp, Artificial Sequence
  Synthetic oligonucleotide
tctgaagggcgatatgaaaggtgctctatg

SEQ ID NO: 239219 - DNA, 30 bp, Artificial Sequence
  Synthetic oligonucleotide
tggcatggaactaccaaatccctctctatg

SEQ ID NO: 239220 - DNA, 30 bp, Artificial Sequence
  Synthetic oligonucleotide
ctgggaagcgattaaggccatccttctatg

SEQ ID NO: 239221 - DNA, 30 bp, Artificial Sequence
  Synthetic oligonucleotide
atcagagtacagtaaggcactcgttctatg

SEQ ID NO: 239222 - DNA, 30 bp, Artificial Sequence
  Synthetic oligonucleotide
tttagatctgccgagtaacggaacagtatg

SEQ ID NO: 239223 - DNA, 30 bp, Artificial Sequence
  Synthetic oligonucleotide
agtgataattcaacctagcactccagtatg

SEQ ID NO: 239224 - DNA, 30 bp, Artificial Sequence
  Synthetic oligonucleotide
aaggcttacccgagattgatgtctagtatg

SEQ ID NO: 239225 - DNA, 30 bp, Artificial Sequence
  Synthetic oligonucleotide
gtactcgcaaatcggtgccctccacgtatg

SEQ ID NO: 239226 - DNA, 30 bp, Artificial Sequence
  Synthetic oligonucleotide
tttgtaaaaaaacggggtcagctacgtatg

SEQ ID NO: 239227 - DNA, 30 bp, Artificial Sequence
  Synthetic oligonucleotide
cgccttaaccgacaccggatcatccgtatg

SEQ ID NO: 239228 - DNA, 30 bp, Artificial Sequence
  Synthetic oligonucleotide
tccgcacagacacccaggatccagcgtatg

SEQ ID NO: 239229 - DNA, 30 bp, Artificial Sequence
  Synthetic oligonucleotide
ggagggattcctgattgaacgactcgtatg

SEQ ID NO: 239230 - DNA, 29 bp, Artificial Sequence
  Synthetic oligonucleotide
tcttgtacgagggaattaactctcgtatg

SEQ ID NO: 239231 - DNA, 31 bp, Artificial Sequence
  Synthetic oligonucleotide
attatacgttggcgttgattctggaggtatg

SEQ ID NO: 239232 - DNA, 30 bp, Artificial Sequence
  Synthetic oligonucleotide
tgacgagtgctgatggagtctctcggtatg

SEQ ID NO: 239233 - DNA, 30 bp, Artificial Sequence
  Synthetic oligonucleotide
ccgaagacctcttagaagtgcacgggtatg

SEQ ID NO: 239234 - DNA, 30 bp, Artificial Sequence
  Synthetic oligonucleotide
aacatcccctcgttggcaagtccgggtatg

SEQ ID NO: 239235 - DNA, 30 bp, Artificial Sequence
  Synthetic oligonucleotide
ttgaaaagaatcaaggtattgcgctgtatg

SEQ ID NO: 239236 - DNA, 30 bp, Artificial Sequence
  Synthetic oligonucleotide
cggttagccatgttttgacctcgctgtatg

SEQ ID NO: 239237 - DNA, 30 bp, Artificial Sequence
  Synthetic oligonucleotide
cctcgagggaaatagaaggtttcgtgtatg

SEQ ID NO: 239238 - DNA, 30 bp, Artificial Sequence
  Synthetic oligonucleotide
gaggtcttctagcattacttcctgtgtatg

SEQ ID NO: 239239 - DNA, 30 bp, Artificial Sequence
  Synthetic oligonucleotide
accataccttgagggctgagggaaattatg

SEQ ID NO: 239240 - DNA, 30 bp, Artificial Sequence
  Synthetic oligonucleotide
gagacaaacggcgcaagttgcaacattatg

SEQ ID NO: 239241 - DNA, 30 bp, Artificial Sequence
  Synthetic oligonucleotide
gctgagcatatgacaacgagtggcattatg

SEQ ID NO: 239242 - DNA, 30 bp, Artificial Sequence
  Synthetic oligonucleotide
aattgagcggcaacggtactatatattatg

SEQ ID NO: 239243 - DNA, 30 bp, Artificial Sequence
  Synthetic oligonucleotide
taagtacaggtctgcacaattatacttatg

SEQ ID NO: 239244 - DNA, 30 bp, Artificial Sequence
  Synthetic oligonucleotide
agaatcggaggttgggcatcaggccttatg

SEQ ID NO: 239245 - DNA, 30 bp, Artificial Sequence
  Synthetic oligonucleotide
aagttaatgccgtacgtaaaagcgcttatg

SEQ ID NO: 239246 - DNA, 30 bp, Artificial Sequence
  Synthetic oligonucleotide
tcgggggttccatttcgatggcaagttatg

SEQ ID NO: 239247 - DNA, 30 bp, Artificial Sequence
  Synthetic oligonucleotide
ggtataacggtacgcgcagaataagttatg

SEQ ID NO: 239248 - DNA, 30 bp, Artificial Sequence
  Synthetic oligonucleotide
gttcgaagattcttgatgtaaatagttatg

SEQ ID NO: 239249 - DNA, 30 bp, Artificial Sequence
  Synthetic oligonucleotide
tgtaggtggtacgctgacttgcacgttatg

SEQ ID NO: 239250 - DNA, 30 bp, Artificial Sequence
  Synthetic oligonucleotide
cgtccctcggcgtttttagtcttcgttatg

SEQ ID NO: 239251 - DNA, 30 bp, Artificial Sequence
  Synthetic oligonucleotide
taggtatcgaaaataactgagattgttatg

SEQ ID NO: 239252 - DNA, 30 bp, Artificial Sequence
  Synthetic oligonucleotide
gtcatagaacagtgtccgggataatttatg

SEQ ID NO: 239253 - DNA, 30 bp, Artificial Sequence
  Synthetic oligonucleotide
gacgcagagtagtcctgagcggcatttatg

SEQ ID NO: 239254 - DNA, 30 bp, Artificial Sequence
  Synthetic oligonucleotide
gccgtagcataagcgtcactacgatttatg

SEQ ID NO: 239255 - DNA, 30 bp, Artificial Sequence
  Synthetic oligonucleotide
acacgaagtgtgcacagtcgcgtatttatg

SEQ ID NO: 239256 - DNA, 30 bp, Artificial Sequence
  Synthetic oligonucleotide
cggtagtgtggggggcaacgacagtttatg

SEQ ID NO: 239257 - DNA, 30 bp, Artificial Sequence
  Synthetic oligonucleotide
aggaccagtctacaccgtgcagggtttatg

SEQ ID NO: 239258 - DNA, 30 bp, Artificial Sequence
  Synthetic oligonucleotide
caaaaaaccagttacgggatctgttttatg

SEQ ID NO: 239259 - DNA, 30 bp, Artificial Sequence
  Synthetic oligonucleotide
actgagctggtccgcaatttgtaaaaactg

SEQ ID NO: 239260 - DNA, 31 bp, Artificial Sequence
  Synthetic oligonucleotide
ggctattagagcacttcgtggatataaactg

SEQ ID NO: 239261 - DNA, 30 bp, Artificial Sequence
  Synthetic oligonucleotide
aatgccgacgtgttggcgaggcgtaaactg

SEQ ID NO: 239262 - DNA, 30 bp, Artificial Sequence
  Synthetic oligonucleotide
aagttcttaactgacttaagattacaactg

SEQ ID NO: 239263 - DNA, 30 bp, Artificial Sequence
  Synthetic oligonucleotide
agaatcacaagaccgacctgtttgcaactg

SEQ ID NO: 239264 - DNA, 30 bp, Artificial Sequence
  Synthetic oligonucleotide
gacgcacattgttctggtagtgttcaactg

SEQ ID NO: 239265 - DNA, 30 bp, Artificial Sequence
  Synthetic oligonucleotide
gtctagtgcgaggaaccagtcgaagaactg

SEQ ID NO: 239266 - DNA, 30 bp, Artificial Sequence
  Synthetic oligonucleotide
cgggattcggataagtaccgtcgagaactg

SEQ ID NO: 239267 - DNA, 30 bp, Artificial Sequence
  Synthetic oligonucleotide
ttacacgtctttatcagcaatctcgaactg

SEQ ID NO: 239268 - DNA, 30 bp, Artificial Sequence
  Synthetic oligonucleotide
ttctgccttactatgaatcggtttgaactg

SEQ ID NO: 239269 - DNA, 30 bp, Artificial Sequence
  Synthetic oligonucleotide
ggtgtgcaattctcctattgttgctaactg

SEQ ID NO: 239270 - DNA, 30 bp, Artificial Sequence
  Synthetic oligonucleotide
tagctctgtgacaagtgtaggcattaactg

SEQ ID NO: 239271 - DNA, 30 bp, Artificial Sequence
  Synthetic oligonucleotide
gaaagtcgctactacaccgttccttaactg

SEQ ID NO: 239272 - DNA, 30 bp, Artificial Sequence
  Synthetic oligonucleotide
tacgagaatgacctcagacttgtaacactg

SEQ ID NO: 239273 - DNA, 30 bp, Artificial Sequence
  Synthetic oligonucleotide
cccacaaagtgttagtatcagcacacactg

SEQ ID NO: 239274 - DNA, 30 bp, Artificial Sequence
  Synthetic oligonucleotide
caacacggcatcgatagtgttaatacactg

SEQ ID NO: 239275 - DNA, 30 bp, Artificial Sequence
  Synthetic oligonucleotide
tactaatcaatgtgagtggcctctacactg

SEQ ID NO: 239276 - DNA, 30 bp, Artificial Sequence
  Synthetic oligonucleotide
gacagtagcgtgtgcttattaggtacactg

SEQ ID NO: 239277 - DNA, 30 bp, Artificial Sequence
  Synthetic oligonucleotide
tcctgcgggattgatgattcgagaccactg

SEQ ID NO: 239278 - DNA, 30 bp, Artificial Sequence
  Synthetic oligonucleotide
tagaagttatcacatgcgttcaagccactg

SEQ ID NO: 239279 - DNA, 30 bp, Artificial Sequence
  Synthetic oligonucleotide
gcagctgcgaactggagtatgatgccactg

SEQ ID NO: 239280 - DNA, 30 bp, Artificial Sequence
  Synthetic oligonucleotide
taagcgcggtaatgatccccccgagcactg

SEQ ID NO: 239281 - DNA, 30 bp, Artificial Sequence
  Synthetic oligonucleotide
ctacgctgagatagccgaagattcgcactg

SEQ ID NO: 239282 - DNA, 30 bp, Artificial Sequence
  Synthetic oligonucleotide
ttttaaagcctattaattcatgcggcactg

SEQ ID NO: 239283 - DNA, 30 bp, Artificial Sequence
  Synthetic oligonucleotide
ccatggggtaatgtaaatttccgtgcactg

SEQ ID NO: 239284 - DNA, 30 bp, Artificial Sequence
  Synthetic oligonucleotide
ggtcgagaatctagctctgatagatcactg

SEQ ID NO: 239285 - DNA, 30 bp, Artificial Sequence
  Synthetic oligonucleotide
aggtttaagaatgtccaaacccaaagactg

SEQ ID NO: 239286 - DNA, 30 bp, Artificial Sequence
  Synthetic oligonucleotide
aagaggaacagcggcttagctacgagactg

SEQ ID NO: 239287 - DNA, 30 bp, Artificial Sequence
  Synthetic oligonucleotide
ttcgccacgtgtccagaattcgcgagactg

SEQ ID NO: 239288 - DNA, 30 bp, Artificial Sequence
  Synthetic oligonucleotide
acgtgcatccctgatatcaggtttagactg

SEQ ID NO: 239289 - DNA, 30 bp, Artificial Sequence
  Synthetic oligonucleotide
cagtctaaataggtgcgatcggtacgactg

SEQ ID NO: 239290 - DNA, 30 bp, Artificial Sequence
  Synthetic oligonucleotide
agcggcgtatagcatactgatacccgactg

SEQ ID NO: 239291 - DNA, 30 bp, Artificial Sequence
  Synthetic oligonucleotide
agggggtactaggttcaacggaggcgactg

SEQ ID NO: 239292 - DNA, 30 bp, Artificial Sequence
  Synthetic oligonucleotide
caaaattctttctcattttaactgcgactg

SEQ ID NO: 239293 - DNA, 30 bp, Artificial Sequence
  Synthetic oligonucleotide
tccgactagaatcaccgctttctgcgactg

SEQ ID NO: 239294 - DNA, 30 bp, Artificial Sequence
  Synthetic oligonucleotide
cgacacgcagtggctcgcatggaaggactg

SEQ ID NO: 239295 - DNA, 30 bp, Artificial Sequence
  Synthetic oligonucleotide
tctcatcagtatcattaaaatggcggactg

SEQ ID NO: 239296 - DNA, 30 bp, Artificial Sequence
  Synthetic oligonucleotide
gcagtacaccgtgggactcaactgggactg

SEQ ID NO: 239297 - DNA, 30 bp, Artificial Sequence
  Synthetic oligonucleotide
ggtgcataggtattctaactatatggactg

SEQ ID NO: 239298 - DNA, 30 bp, Artificial Sequence
  Synthetic oligonucleotide
aagctcgggaagctccgatcgtcatgactg

SEQ ID NO: 239299 - DNA, 30 bp, Artificial Sequence
  Synthetic oligonucleotide
caggttccctgcgctgcatgagtatgactg

SEQ ID NO: 239300 - DNA, 30 bp, Artificial Sequence
  Synthetic oligonucleotide
gggaggtgccgcttgccctttgggtgactg

SEQ ID NO: 239301 - DNA, 30 bp, Artificial Sequence
  Synthetic oligonucleotide
ctctatttgcatctgtctagctggtgactg

SEQ ID NO: 239302 - DNA, 30 bp, Artificial Sequence
  Synthetic oligonucleotide
ctccttaactgccacgcgccataaatactg

SEQ ID NO: 239303 - DNA, 30 bp, Artificial Sequence
  Synthetic oligonucleotide
gaagatttctcgtacaaggcatacatactg

SEQ ID NO: 239304 - DNA, 30 bp, Artificial Sequence
  Synthetic oligonucleotide
tcgtatcgatctatcgagtaatccatactg

SEQ ID NO: 239305 - DNA, 30 bp, Artificial Sequence
  Synthetic oligonucleotide
tcagggcggtccgtatttgtcgtcatactg

SEQ ID NO: 239306 - DNA, 30 bp, Artificial Sequence
  Synthetic oligonucleotide
gcggacgtcggttgggcatggctgatactg

SEQ ID NO: 239307 - DNA, 30 bp, Artificial Sequence
  Synthetic oligonucleotide
taagtatcacagttccgcaaaagtatactg

SEQ ID NO: 239308 - DNA, 30 bp, Artificial Sequence
  Synthetic oligonucleotide
catccgcgtattcgtcctggggaactactg

SEQ ID NO: 239309 - DNA, 29 bp, Artificial Sequence
  Synthetic oligonucleotide
atacattcgtcacgaatccgaagctactg

SEQ ID NO: 239310 - DNA, 30 bp, Artificial Sequence
  Synthetic oligonucleotide
gggcttgtctacccaatagtggagctactg

SEQ ID NO: 239311 - DNA, 30 bp, Artificial Sequence
  Synthetic oligonucleotide
tgacgggttcagggcgcgaacccgctactg

SEQ ID NO: 239312 - DNA, 30 bp, Artificial Sequence
  Synthetic oligonucleotide
cattgaccccatgaaaaggtgagtctactg

SEQ ID NO: 239313 - DNA, 30 bp, Artificial Sequence
  Synthetic oligonucleotide
ctgtggtacgaaagtaaagaaggtctactg

SEQ ID NO: 239314 - DNA, 30 bp, Artificial Sequence
  Synthetic oligonucleotide
agaatgaacacgtatatccaggacgtactg

SEQ ID NO: 239315 - DNA, 30 bp, Artificial Sequence
  Synthetic oligonucleotide
atatccgttctccgtgggtcaagtgtactg

SEQ ID NO: 239316 - DNA, 30 bp, Artificial Sequence
  Synthetic oligonucleotide
aaagggatcttcctgagaaggagattactg

SEQ ID NO: 239317 - DNA, 30 bp, Artificial Sequence
  Synthetic oligonucleotide
cacagcgttgatactacgtctttattactg

SEQ ID NO: 239318 - DNA, 30 bp, Artificial Sequence
  Synthetic oligonucleotide
agtagcccctgggatcgcttagacttactg

SEQ ID NO: 239319 - DNA, 30 bp, Artificial Sequence
  Synthetic oligonucleotide
acgggggttccatctcgactaggcttactg

SEQ ID NO: 239320 - DNA, 30 bp, Artificial Sequence
  Synthetic oligonucleotide
cgtatgagtgtacaagaacctaggttactg

SEQ ID NO: 239321 - DNA, 30 bp, Artificial Sequence
  Synthetic oligonucleotide
cccaaaatcatagacaaaagttgtttactg

SEQ ID NO: 239322 - DNA, 30 bp, Artificial Sequence
  Synthetic oligonucleotide
ctgaccagctgtctgcaggatcaaaacctg

SEQ ID NO: 239323 - DNA, 30 bp, Artificial Sequence
  Synthetic oligonucleotide
gggaattcattgaggaccattcagaacctg

SEQ ID NO: 239324 - DNA, 30 bp, Artificial Sequence
  Synthetic oligonucleotide
ggaccctggtgccaattcggcaggaacctg

SEQ ID NO: 239325 - DNA, 30 bp, Artificial Sequence
  Synthetic oligonucleotide
cgacattagacggtttgtgtctttaacctg

SEQ ID NO: 239326 - DNA, 30 bp, Artificial Sequence
  Synthetic oligonucleotide
tttgggcccggcttttacaaataccacctg

SEQ ID NO: 239327 - DNA, 30 bp, Artificial Sequence
  Synthetic oligonucleotide
gtctggggaaaatttggcttaatccacctg

SEQ ID NO: 239328 - DNA, 30 bp, Artificial Sequence
  Synthetic oligonucleotide
tagcccaagcataatacacctgtggacctg

SEQ ID NO: 239329 - DNA, 30 bp, Artificial Sequence
  Synthetic oligonucleotide
gggaaaaaatgtacggtcacattggacctg

SEQ ID NO: 239330 - DNA, 30 bp, Artificial Sequence
  Synthetic oligonucleotide
ccattaagctgaggataaggtactgacctg

SEQ ID NO: 239331 - DNA, 30 bp, Artificial Sequence
  Synthetic oligonucleotide
atggcgccctgggccagagcaattgacctg

SEQ ID NO: 239332 - DNA, 30 bp, Artificial Sequence
  Synthetic oligonucleotide
ccgtatgaaggtgtgaggagtagatacctg

SEQ ID NO: 239333 - DNA, 30 bp, Artificial Sequence
  Synthetic oligonucleotide
cgtgattaggaagtgctataggactacctg

SEQ ID NO: 239334 - DNA, 30 bp, Artificial Sequence
  Synthetic oligonucleotide
acgttcctgaggcgagtcgggtactacctg

SEQ ID NO: 239335 - DNA, 30 bp, Artificial Sequence
  Synthetic oligonucleotide
ctgcgaaaaaggtctgaagacggctacctg

SEQ ID NO: 239336 - DNA, 30 bp, Artificial Sequence
  Synthetic oligonucleotide
ttaggctaaaaatagaatattttctacctg

SEQ ID NO: 239337 - DNA, 30 bp, Artificial Sequence
  Synthetic oligonucleotide
gtacatctaaatcgcgacacctggtacctg

SEQ ID NO: 239338 - DNA, 30 bp, Artificial Sequence
  Synthetic oligonucleotide
gctgagtacgtgatatattcggcttacctg

SEQ ID NO: 239339 - DNA, 30 bp, Artificial Sequence
  Synthetic oligonucleotide
tggttactttactagtctcaaatttacctg

SEQ ID NO: 239340 - DNA, 30 bp, Artificial Sequence
  Synthetic oligonucleotide
ccggatacctggaactcaacgctcaccctg

SEQ ID NO: 239341 - DNA, 30 bp, Artificial Sequence
  Synthetic oligonucleotide
cttgatgtgagatccggcgggctacccctg

SEQ ID NO: 239342 - DNA, 30 bp, Artificial Sequence
  Synthetic oligonucleotide
agaccgcgtgagccaaaccccgggcccctg

SEQ ID NO: 239343 - DNA, 30 bp, Artificial Sequence
  Synthetic oligonucleotide
aggaattcagggaatcactccaatcccctg

SEQ ID NO: 239344 - DNA, 30 bp, Artificial Sequence
  Synthetic oligonucleotide
tgtgtcgtttgagcgaatcggatagccctg

SEQ ID NO: 239345 - DNA, 30 bp, Artificial Sequence
  Synthetic oligonucleotide
agcgtatcacattatggtctacgggccctg

SEQ ID NO: 239346 - DNA, 30 bp, Artificial Sequence
  Synthetic oligonucleotide
tcagtacctatctatcgtattagtgccctg

SEQ ID NO: 239347 - DNA, 30 bp, Artificial Sequence
  Synthetic oligonucleotide
tatcattgaacggcgttcgtctgtgccctg

SEQ ID NO: 239348 - DNA, 30 bp, Artificial Sequence
  Synthetic oligonucleotide
gcgcgcggaatagtcaccagtaactccctg

SEQ ID NO: 239349 - DNA, 30 bp, Artificial Sequence
  Synthetic oligonucleotide
ctatgagatgagcccaaagcggcgtccctg

SEQ ID NO: 239350 - DNA, 30 bp, Artificial Sequence
  Synthetic oligonucleotide
ggccttgtcatgaacgttagaaggtccctg

SEQ ID NO: 239351 - DNA, 30 bp, Artificial Sequence
  Synthetic oligonucleotide
agaggcccgatgaaacgtgtgacttccctg

SEQ ID NO: 239352 - DNA, 30 bp, Artificial Sequence
  Synthetic oligonucleotide
cgaacacaagagctggtcgactgcagcctg

SEQ ID NO: 239353 - DNA, 30 bp, Artificial Sequence
  Synthetic oligonucleotide
ttcacaatgttatcgcatgatgagagcctg

SEQ ID NO: 239354 - DNA, 30 bp, Artificial Sequence
  Synthetic oligonucleotide
gggctagggtagcccgggcagtaccgcctg

SEQ ID NO: 239355 - DNA, 30 bp, Artificial Sequence
  Synthetic oligonucleotide
cccttgtacacttaagaggatccccgcctg

SEQ ID NO: 239356 - DNA, 30 bp, Artificial Sequence
  Synthetic oligonucleotide
gtaccgaactaattgagtgctctgcgcctg

SEQ ID NO: 239357 - DNA, 30 bp, Artificial Sequence
  Synthetic oligonucleotide
ttcatcaaatttgcagctgcaggtcgcctg

SEQ ID NO: 239358 - DNA, 30 bp, Artificial Sequence
  Synthetic oligonucleotide
tgggggggtccgccgtatgaccaaggcctg

SEQ ID NO: 239359 - DNA, 30 bp, Artificial Sequence
  Synthetic oligonucleotide
tttcacgcgtttagccaaacggaaggcctg

SEQ ID NO: 239360 - DNA, 30 bp, Artificial Sequence
  Synthetic oligonucleotide
aattgggcacgacaaggtaagtaaggcctg

SEQ ID NO: 239361 - DNA, 30 bp, Artificial Sequence
  Synthetic oligonucleotide
gaatgtcatataggaacccaaagcggcctg

SEQ ID NO: 239362 - DNA, 30 bp, Artificial Sequence
  Synthetic oligonucleotide
cgatctccgtcgacaggcaatcgcggcctg

SEQ ID NO: 239363 - DNA, 29 bp, Artificial Sequence
  Synthetic oligonucleotide
tcctagccgagacttcaacgtagggcctg

SEQ ID NO: 239364 - DNA, 30 bp, Artificial Sequence
  Synthetic oligonucleotide
ggaagcattaagctatgtagttatggcctg

SEQ ID NO: 239365 - DNA, 30 bp, Artificial Sequence
  Synthetic oligonucleotide
ttaagtggagggccacacaatacatgcctg

SEQ ID NO: 239366 - DNA, 30 bp, Artificial Sequence
  Synthetic oligonucleotide
atagtaatttcagcgacttgcgcatgcctg

SEQ ID NO: 239367 - DNA, 30 bp, Artificial Sequence
  Synthetic oligonucleotide
atttcacaagtcgtggattgttcatgcctg

SEQ ID NO: 239368 - DNA, 30 bp, Artificial Sequence
  Synthetic oligonucleotide
gtaggtgctgacttacgctccaactgcctg

SEQ ID NO: 239369 - DNA, 30 bp, Artificial Sequence
  Synthetic oligonucleotide
gactttaggaactgagcgctatgttgcctg

SEQ ID NO: 239370 - DNA, 30 bp, Artificial Sequence
  Synthetic oligonucleotide
ctgtgtacactcgctccgggctgttgcctg

SEQ ID NO: 239371 - DNA, 30 bp, Artificial Sequence
  Synthetic oligonucleotide
tcggccgctagggaagataattgaatcctg

SEQ ID NO: 239372 - DNA, 30 bp, Artificial Sequence
  Synthetic oligonucleotide
agtccgctctctggctgtaattccatcctg

SEQ ID NO: 239373 - DNA, 30 bp, Artificial Sequence
  Synthetic oligonucleotide
actctatggctgagcttcttgtagatcctg

SEQ ID NO: 239374 - DNA, 30 bp, Artificial Sequence
  Synthetic oligonucleotide
gtgtcggacggattatcgagtagactcctg

SEQ ID NO: 239375 - DNA, 30 bp, Artificial Sequence
  Synthetic oligonucleotide
acctgcccaacctcgatgaacatactcctg

SEQ ID NO: 239376 - DNA, 30 bp, Artificial Sequence
  Synthetic oligonucleotide
ttcgttagttcgatgctcaagctactcctg

SEQ ID NO: 239377 - DNA, 30 bp, Artificial Sequence
  Synthetic oligonucleotide
gtcagcaatgtaagtgggccgaatctcctg

SEQ ID NO: 239378 - DNA, 30 bp, Artificial Sequence
  Synthetic oligonucleotide
acaacttatgcttatagtggataagtcctg

SEQ ID NO: 239379 - DNA, 30 bp, Artificial Sequence
  Synthetic oligonucleotide
tgtaaaacgcccagcttctttcgcgtcctg

SEQ ID NO: 239380 - DNA, 30 bp, Artificial Sequence
  Synthetic oligonucleotide
acacggaacaggtgtgtggggatcgtcctg

SEQ ID NO: 239381 - DNA, 30 bp, Artificial Sequence
  Synthetic oligonucleotide
taggattgagataccgttttgatcgtcctg

SEQ ID NO: 239382 - DNA, 30 bp, Artificial Sequence
  Synthetic oligonucleotide
ctgatatagagctggtcctcatgtgtcctg

SEQ ID NO: 239383 - DNA, 30 bp, Artificial Sequence
  Synthetic oligonucleotide
agtaatctgtgaaatcaggtacatttcctg

SEQ ID NO: 239384 - DNA, 30 bp, Artificial Sequence
  Synthetic oligonucleotide
gctatcgaatacactaggcatcctttcctg

SEQ ID NO: 239385 - DNA, 30 bp, Artificial Sequence
  Synthetic oligonucleotide
cttatggatggcttatgggcgcttttcctg

SEQ ID NO: 239386 - DNA, 31 bp, Artificial Sequence
  Synthetic oligonucleotide
cacatgactagtctcggcctgcggaaagctg

SEQ ID NO: 239387 - DNA, 30 bp, Artificial Sequence
  Synthetic oligonucleotide
ctgagtagttgagaccagttgggcaagctg

SEQ ID NO: 239388 - DNA, 30 bp, Artificial Sequence
  Synthetic oligonucleotide
accggtgcgagggttatggaacataagctg

SEQ ID NO: 239389 - DNA, 30 bp, Artificial Sequence
  Synthetic oligonucleotide
ctcaagcagatgagccgatacagacagctg

SEQ ID NO: 239390 - DNA, 30 bp, Artificial Sequence
  Synthetic oligonucleotide
ggtctcgcacccctaaaataccaccagctg

SEQ ID NO: 239391 - DNA, 30 bp, Artificial Sequence
  Synthetic oligonucleotide
gcagtttcactgatcagtgcgtaccagctg

SEQ ID NO: 239392 - DNA, 30 bp, Artificial Sequence
  Synthetic oligonucleotide
accacaatcgttgggcgtcccctgcagctg

SEQ ID NO: 239393 - DNA, 30 bp, Artificial Sequence
  Synthetic oligonucleotide
gtgggggaggtggttagggaacctcagctg

SEQ ID NO: 239394 - DNA, 31 bp, Artificial Sequence
  Synthetic oligonucleotide
aagttaactgaactgcgggacactagagctg

SEQ ID NO: 239395 - DNA, 30 bp, Artificial Sequence
  Synthetic oligonucleotide
agggttcacgtctctaccccaaccgagctg

SEQ ID NO: 239396 - DNA, 30 bp, Artificial Sequence
  Synthetic oligonucleotide
gcgccgaaacaaaccacgtaccgggagctg

SEQ ID NO: 239397 - DNA, 30 bp, Artificial Sequence
  Synthetic oligonucleotide
aagtccgctagaataagcgaggctgagctg

SEQ ID NO: 239398 - DNA, 30 bp, Artificial Sequence
  Synthetic oligonucleotide
ctctcatccggtccagatcagggctagctg

SEQ ID NO: 239399 - DNA, 30 bp, Artificial Sequence
  Synthetic oligonucleotide
tccgaacgaaaagtctcgtttatttagctg

SEQ ID NO: 239400 - DNA, 30 bp, Artificial Sequence
  Synthetic oligonucleotide
cttcatcgtacaactccgtgcttttagctg

SEQ ID NO: 239401 - DNA, 30 bp, Artificial Sequence
  Synthetic oligonucleotide
cgatgggatattgtgtctagtaaaacgctg

SEQ ID NO: 239402 - DNA, 30 bp, Artificial Sequence
  Synthetic oligonucleotide
agaattggtccattcaatccagtcacgctg

SEQ ID NO: 239403 - DNA, 30 bp, Artificial Sequence
  Synthetic oligonucleotide
ttcacacatatctcggctggcagcccgctg

SEQ ID NO: 239404 - DNA, 30 bp, Artificial Sequence
  Synthetic oligonucleotide
gaaggtggtttgtacagtttgcagccgctg

SEQ ID NO: 239405 - DNA, 30 bp, Artificial Sequence
  Synthetic oligonucleotide
atgtacatagggagccaaactcggccgctg

SEQ ID NO: 239406 - DNA, 30 bp, Artificial Sequence
  Synthetic oligonucleotide
cgacctgtcatgaggtgccgcctgccgctg

SEQ ID NO: 239407 - DNA, 30 bp, Artificial Sequence
  Synthetic oligonucleotide
tcagattacatcaaaccgtgtggggcgctg

SEQ ID NO: 239408 - DNA, 30 bp, Artificial Sequence
  Synthetic oligonucleotide
ggtctcatatgaaatcgaacgctggcgctg

SEQ ID NO: 239409 - DNA, 30 bp, Artificial Sequence
  Synthetic oligonucleotide
atctgtctacaggcagagtctgcatcgctg

SEQ ID NO: 239410 - DNA, 30 bp, Artificial Sequence
  Synthetic oligonucleotide
tgcttctggttttcagtcgttcgatcgctg

SEQ ID NO: 239411 - DNA, 30 bp, Artificial Sequence
  Synthetic oligonucleotide
ccatgttcatctgtgctcctttggtcgctg

SEQ ID NO: 239412 - DNA, 30 bp, Artificial Sequence
  Synthetic oligonucleotide
tccactccgcaaccttgtgatgcaaggctg

SEQ ID NO: 239413 - DNA, 30 bp, Artificial Sequence
  Synthetic oligonucleotide
tatgatccatgcgtagtgcggataaggctg

SEQ ID NO: 239414 - DNA, 30 bp, Artificial Sequence
  Synthetic oligonucleotide
gtgtagaagtcgccgtaaaatcgcaggctg

SEQ ID NO: 239415 - DNA, 30 bp, Artificial Sequence
  Synthetic oligonucleotide
ctctgatacgaatagtcgagtgtgaggctg

SEQ ID NO: 239416 - DNA, 30 bp, Artificial Sequence
  Synthetic oligonucleotide
ccgaaagtttggcttccgttctaacggctg

SEQ ID NO: 239417 - DNA, 30 bp, Artificial Sequence
  Synthetic oligonucleotide
atcgctcagccggtcataaatgtacggctg

SEQ ID NO: 239418 - DNA, 30 bp, Artificial Sequence
  Synthetic oligonucleotide
atcgctgatgtcgaaaaatggtcgcggctg

SEQ ID NO: 239419 - DNA, 30 bp, Artificial Sequence
  Synthetic oligonucleotide
ccatcaaccgcggtaatttagacatggctg

SEQ ID NO: 239420 - DNA, 30 bp, Artificial Sequence
  Synthetic oligonucleotide
cctgggaatggcattacgctgagctggctg

SEQ ID NO: 239421 - DNA, 30 bp, Artificial Sequence
  Synthetic oligonucleotide
ggccgcacgaagtaaacaactacgtggctg

SEQ ID NO: 239422 - DNA, 30 bp, Artificial Sequence
  Synthetic oligonucleotide
gccaacgaaagaattaaaaaactgtggctg

SEQ ID NO: 239423 - DNA, 30 bp, Artificial Sequence
  Synthetic oligonucleotide
taagcagggtagtaacgatgagcaatgctg

SEQ ID NO: 239424 - DNA, 30 bp, Artificial Sequence
  Synthetic oligonucleotide
tagctcaaagtatccgcgagcataatgctg

SEQ ID NO: 239425 - DNA, 30 bp, Artificial Sequence
  Synthetic oligonucleotide
accctcacaacggtcttgcgcataatgctg

SEQ ID NO: 239426 - DNA, 30 bp, Artificial Sequence
  Synthetic oligonucleotide
gaggtcgccaaggtatatgtgtgcatgctg

SEQ ID NO: 239427 - DNA, 30 bp, Artificial Sequence
  Synthetic oligonucleotide
gctagcagtttaggctctgtcgggatgctg

SEQ ID NO: 239428 - DNA, 30 bp, Artificial Sequence
  Synthetic oligonucleotide
caatcaccacttagaactcctatcctgctg

SEQ ID NO: 239429 - DNA, 30 bp, Artificial Sequence
  Synthetic oligonucleotide
cgctccaactcgccattcacggcagtgctg

SEQ ID NO: 239430 - DNA, 30 bp, Artificial Sequence
  Synthetic oligonucleotide
ggtgcgctgaaacatcatttactagtgctg

SEQ ID NO: 239431 - DNA, 30 bp, Artificial Sequence
  Synthetic oligonucleotide
gaaagttaaatgactcccgtaaacgtgctg

SEQ ID NO: 239432 - DNA, 30 bp, Artificial Sequence
  Synthetic oligonucleotide
gcgctcctccgtagcagtttcaatgtgctg

SEQ ID NO: 239433 - DNA, 30 bp, Artificial Sequence
  Synthetic oligonucleotide
agcttcctcaatgggttctatactgtgctg

SEQ ID NO: 239434 - DNA, 30 bp, Artificial Sequence
  Synthetic oligonucleotide
ttacgcactttgctggttctaagattgctg

SEQ ID NO: 239435 - DNA, 30 bp, Artificial Sequence
  Synthetic oligonucleotide
tgacccaacccaaatctcacgatattgctg

SEQ ID NO: 239436 - DNA, 30 bp, Artificial Sequence
  Synthetic oligonucleotide
tcgcaagagtaatatccataggcgttgctg

SEQ ID NO: 239437 - DNA, 30 bp, Artificial Sequence
  Synthetic oligonucleotide
ggctccccccttacgtcacgtgcgttgctg

SEQ ID NO: 239438 - DNA, 30 bp, Artificial Sequence
  Synthetic oligonucleotide
accagcaacggaagcacaaaaagtttgctg

SEQ ID NO: 239439 - DNA, 30 bp, Artificial Sequence
  Synthetic oligonucleotide
aacttatcaaaagcagtgttatttttgctg

SEQ ID NO: 239440 - DNA, 30 bp, Artificial Sequence
  Synthetic oligonucleotide
gggggtgggaaaataggccctcacaatctg

SEQ ID NO: 239441 - DNA, 30 bp, Artificial Sequence
  Synthetic oligonucleotide
cggacgagattttaccagtcggagaatctg

SEQ ID NO: 239442 - DNA, 30 bp, Artificial Sequence
  Synthetic oligonucleotide
tatgagtaaggcaataggttgccgaatctg

SEQ ID NO: 239443 - DNA, 30 bp, Artificial Sequence
  Synthetic oligonucleotide
tgaatgatttggcatcataaggctaatctg

SEQ ID NO: 239444 - DNA, 30 bp, Artificial Sequence
  Synthetic oligonucleotide
tcacaggaatttcttgatatacgtaatctg

SEQ ID NO: 239445 - DNA, 30 bp, Artificial Sequence
  Synthetic oligonucleotide
gctaggtggtacttatataagaaacatctg

SEQ ID NO: 239446 - DNA, 30 bp, Artificial Sequence
  Synthetic oligonucleotide
taattatcatcctagaggtatcaccatctg

SEQ ID NO: 239447 - DNA, 30 bp, Artificial Sequence
  Synthetic oligonucleotide
gacagtggtagtccttagaggatccatctg

SEQ ID NO: 239448 - DNA, 30 bp, Artificial Sequence
  Synthetic oligonucleotide
gttattcaggtaggatagctgcctcatctg

SEQ ID NO: 239449 - DNA, 30 bp, Artificial Sequence
  Synthetic oligonucleotide
cgctgtacgcatcttggaaaacaggatctg

SEQ ID NO: 239450 - DNA, 30 bp, Artificial Sequence
  Synthetic oligonucleotide
tagaatccaaaaacatttgggcgtgatctg

SEQ ID NO: 239451 - DNA, 30 bp, Artificial Sequence
  Synthetic oligonucleotide
ttcgcgtatagagatgttacatgtgatctg

SEQ ID NO: 239452 - DNA, 30 bp, Artificial Sequence
  Synthetic oligonucleotide
cttaggggcctgctctgttgcaaatatctg

SEQ ID NO: 239453 - DNA, 30 bp, Artificial Sequence
  Synthetic oligonucleotide
ctcacattgctttctacttacggatatctg

SEQ ID NO: 239454 - DNA, 30 bp, Artificial Sequence
  Synthetic oligonucleotide
tggatggcgctcgaacaggcatgatatctg

SEQ ID NO: 239455 - DNA, 30 bp, Artificial Sequence
  Synthetic oligonucleotide
ggtcaactcggcccgaggaaacactatctg

SEQ ID NO: 239456 - DNA, 30 bp, Artificial Sequence
  Synthetic oligonucleotide
ttgtgggtcccctcgacttcaccctatctg

SEQ ID NO: 239457 - DNA, 30 bp, Artificial Sequence
  Synthetic oligonucleotide
aactatcgatcatctccaacatgttatctg

SEQ ID NO: 239458 - DNA, 30 bp, Artificial Sequence
  Synthetic oligonucleotide
atctgaatcactacgagcatagggcctctg

SEQ ID NO: 239459 - DNA, 28 bp, Artificial Sequence
  Synthetic oligonucleotide
cactgctcatgatggttagggggctctg

SEQ ID NO: 239460 - DNA, 30 bp, Artificial Sequence
  Synthetic oligonucleotide
gctcctggatagctcaacaggcctgctctg

SEQ ID NO: 239461 - DNA, 30 bp, Artificial Sequence
  Synthetic oligonucleotide
agaacactcatgttttgcacttaatctctg

SEQ ID NO: 239462 - DNA, 30 bp, Artificial Sequence
  Synthetic oligonucleotide
aaagtatctcaacctacgcccaaaagtctg

SEQ ID NO: 239463 - DNA, 30 bp, Artificial Sequence
  Synthetic oligonucleotide
ttcgttaagggactcggtgtggcgagtctg

SEQ ID NO: 239464 - DNA, 30 bp, Artificial Sequence
  Synthetic oligonucleotide
tccatcgcgcttatattcttagctagtctg

SEQ ID NO: 239465 - DNA, 30 bp, Artificial Sequence
  Synthetic oligonucleotide
gacctatcgctagataactacggccgtctg

SEQ ID NO: 239466 - DNA, 30 bp, Artificial Sequence
  Synthetic oligonucleotide
gttggtatcatgttgaaaatcggccgtctg

SEQ ID NO: 239467 - DNA, 30 bp, Artificial Sequence
  Synthetic oligonucleotide
gcgcagaatatctgtaacaaacagcgtctg

SEQ ID NO: 239468 - DNA, 30 bp, Artificial Sequence
  Synthetic oligonucleotide
ttgcgcgaaggctactaacgacggcgtctg

SEQ ID NO: 239469 - DNA, 30 bp, Artificial Sequence
  Synthetic oligonucleotide
cgggctaaaagagatgacgctataggtctg

SEQ ID NO: 239470 - DNA, 30 bp, Artificial Sequence
  Synthetic oligonucleotide
gcaccacagcattagagctcccccggtctg

SEQ ID NO: 239471 - DNA, 30 bp, Artificial Sequence
  Synthetic oligonucleotide
agattacctttttttcacaattgcggtctg

SEQ ID NO: 239472 - DNA, 30 bp, Artificial Sequence
  Synthetic oligonucleotide
gctccttctgcataccggttgatcggtctg

SEQ ID NO: 239473 - DNA, 30 bp, Artificial Sequence
  Synthetic oligonucleotide
gctggtgccttgctacctgttcggggtctg

SEQ ID NO: 239474 - DNA, 30 bp, Artificial Sequence
  Synthetic oligonucleotide
gacagcgtgctttttggaatccatggtctg

SEQ ID NO: 239475 - DNA, 30 bp, Artificial Sequence
  Synthetic oligonucleotide
acaggctatgcgggttttcgaggtggtctg

SEQ ID NO: 239476 - DNA, 30 bp, Artificial Sequence
  Synthetic oligonucleotide
cactacctatacagataagttgtatgtctg

SEQ ID NO: 239477 - DNA, 30 bp, Artificial Sequence
  Synthetic oligonucleotide
aatcggagagggagcgcaccgatctgtctg

SEQ ID NO: 239478 - DNA, 30 bp, Artificial Sequence
  Synthetic oligonucleotide
tgtctaatagaataaccacagatgtgtctg

SEQ ID NO: 239479 - DNA, 30 bp, Artificial Sequence
  Synthetic oligonucleotide
tggactctaatcgccgtccacccttgtctg

SEQ ID NO: 239480 - DNA, 30 bp, Artificial Sequence
  Synthetic oligonucleotide
tacaataagttcaccctataaggtattctg

SEQ ID NO: 239481 - DNA, 30 bp, Artificial Sequence
  Synthetic oligonucleotide
aggtaacgggtataggagggctttattctg

SEQ ID NO: 239482 - DNA, 30 bp, Artificial Sequence
  Synthetic oligonucleotide
cgctcgttaagtatctttgtggtacttctg

SEQ ID NO: 239483 - DNA, 30 bp, Artificial Sequence
  Synthetic oligonucleotide
atcgactgctaaatagcgcgactccttctg

SEQ ID NO: 239484 - DNA, 30 bp, Artificial Sequence
  Synthetic oligonucleotide
atagatggcgcaactcgagtatttcttctg

SEQ ID NO: 239485 - DNA, 30 bp, Artificial Sequence
  Synthetic oligonucleotide
tgcagtgattcgcgtgaacacaaagttctg

SEQ ID NO: 239486 - DNA, 29 bp, Artificial Sequence
  Synthetic oligonucleotide
cgtaaggttcgtcttcgcttccagttctg

SEQ ID NO: 239487 - DNA, 30 bp, Artificial Sequence
  Synthetic oligonucleotide
ctgggggagtgataggccgacggagttctg

SEQ ID NO: 239488 - DNA, 30 bp, Artificial Sequence
  Synthetic oligonucleotide
ttgaataacccatggcccggcgacgttctg

SEQ ID NO: 239489 - DNA, 30 bp, Artificial Sequence
  Synthetic oligonucleotide
ttcaagtttaccacgtggtgaaccgttctg

SEQ ID NO: 239490 - DNA, 30 bp, Artificial Sequence
  Synthetic oligonucleotide
tacgaaggtaaaccatacgacttcgttctg

SEQ ID NO: 239491 - DNA, 30 bp, Artificial Sequence
  Synthetic oligonucleotide
atgagggaattccgcagaaagttcgttctg

SEQ ID NO: 239492 - DNA, 30 bp, Artificial Sequence
  Synthetic oligonucleotide
ttaccatgtgtctcggattaaagggttctg

SEQ ID NO: 239493 - DNA, 30 bp, Artificial Sequence
  Synthetic oligonucleotide
ggcacctaagagattggaatcgatgttctg

SEQ ID NO: 239494 - DNA, 30 bp, Artificial Sequence
  Synthetic oligonucleotide
agggtcatttctatagggcacgcgtttctg

SEQ ID NO: 239495 - DNA, 30 bp, Artificial Sequence
  Synthetic oligonucleotide
tgacacggaataaaccgtaaaaggtttctg

SEQ ID NO: 239496 - DNA, 30 bp, Artificial Sequence
  Synthetic oligonucleotide
acctatggaagaacttttgcgctgtttctg

SEQ ID NO: 239497 - DNA, 30 bp, Artificial Sequence
  Synthetic oligonucleotide
tagtacggatgtggccagttggcttttctg

SEQ ID NO: 239498 - DNA, 30 bp, Artificial Sequence
  Synthetic oligonucleotide
agttcgatgtcccatccatcacgttttctg

SEQ ID NO: 239499 - DNA, 30 bp, Artificial Sequence
  Synthetic oligonucleotide
gctaacgttaggaagctctactcaaaagtg

SEQ ID NO: 239500 - DNA, 30 bp, Artificial Sequence
  Synthetic oligonucleotide
agcggtgggttgtggccgcgacacaaagtg

SEQ ID NO: 239501 - DNA, 30 bp, Artificial Sequence
  Synthetic oligonucleotide
tctcggggtcaatattttcttgacaaagtg

SEQ ID NO: 239502 - DNA, 30 bp, Artificial Sequence
  Synthetic oligonucleotide
acagcacagattaaattagtgaagaaagtg

SEQ ID NO: 239503 - DNA, 30 bp, Artificial Sequence
  Synthetic oligonucleotide
tagaataggccccgaatgacgtagaaagtg

SEQ ID NO: 239504 - DNA, 30 bp, Artificial Sequence
  Synthetic oligonucleotide
ctacccgagccgagcggatccgttaaagtg

SEQ ID NO: 239505 - DNA, 30 bp, Artificial Sequence
  Synthetic oligonucleotide
gagtaatacccaatctaggattcacaagtg

SEQ ID NO: 239506 - DNA, 30 bp, Artificial Sequence
  Synthetic oligonucleotide
gtaatctagcattagcctaaaatacaagtg

SEQ ID NO: 239507 - DNA, 30 bp, Artificial Sequence
  Synthetic oligonucleotide
agcgctatatcgtggcgtattgtacaagtg

SEQ ID NO: 239508 - DNA, 30 bp, Artificial Sequence
  Synthetic oligonucleotide
cagtactgcgcaagtgacacagaccaagtg

SEQ ID NO: 239509 - DNA, 30 bp, Artificial Sequence
  Synthetic oligonucleotide
ggctcacttgcgatccaaagtggccaagtg

SEQ ID NO: 239510 - DNA, 30 bp, Artificial Sequence
  Synthetic oligonucleotide
agcagttatgacgctatcaaccagcaagtg

SEQ ID NO: 239511 - DNA, 30 bp, Artificial Sequence
  Synthetic oligonucleotide
gggagagacgtccgctagaccaggcaagtg

SEQ ID NO: 239512 - DNA, 30 bp, Artificial Sequence
  Synthetic oligonucleotide
aatcgccaattcgccaacgaatggcaagtg

SEQ ID NO: 239513 - DNA, 30 bp, Artificial Sequence
  Synthetic oligonucleotide
tgggtttcggatcgctacaacctgcaagtg

SEQ ID NO: 239514 - DNA, 30 bp, Artificial Sequence
  Synthetic oligonucleotide
gcatcgcaccggttttacccctactaagtg

SEQ ID NO: 239515 - DNA, 30 bp, Artificial Sequence
  Synthetic oligonucleotide
aaatcatccacagtaaagacacgctaagtg

SEQ ID NO: 239516 - DNA, 30 bp, Artificial Sequence
  Synthetic oligonucleotide
cggggatgagacggctaacggtgctaagtg

SEQ ID NO: 239517 - DNA, 30 bp, Artificial Sequence
  Synthetic oligonucleotide
ttcgggccacattacataccgtagtaagtg

SEQ ID NO: 239518 - DNA, 30 bp, Artificial Sequence
  Synthetic oligonucleotide
ccgacgctagtgcccccaggggggtaagtg

SEQ ID NO: 239519 - DNA, 30 bp, Artificial Sequence
  Synthetic oligonucleotide
gtcgcgtgtacattaccgttgctttaagtg

SEQ ID NO: 239520 - DNA, 30 bp, Artificial Sequence
  Synthetic oligonucleotide
aagccacggcctccgtctgggaaaacagtg

SEQ ID NO: 239521 - DNA, 30 bp, Artificial Sequence
  Synthetic oligonucleotide
cgttgttctatggtgtataggaacacagtg

SEQ ID NO: 239522 - DNA, 30 bp, Artificial Sequence
  Synthetic oligonucleotide
actcgtttgctaaatatgcggttcacagtg

SEQ ID NO: 239523 - DNA, 29 bp, Artificial Sequence
  Synthetic oligonucleotide
ccaccgccgtactactgtatcgtacagtg

SEQ ID NO: 239524 - DNA, 30 bp, Artificial Sequence
  Synthetic oligonucleotide
ttcgggcctcaatgaaggattcgtacagtg

SEQ ID NO: 239525 - DNA, 30 bp, Artificial Sequence
  Synthetic oligonucleotide
cgcagaaaatgtgctatacacgccccagtg

SEQ ID NO: 239526 - DNA, 30 bp, Artificial Sequence
  Synthetic oligonucleotide
cgtagtcatgctcagcttcacagagcagtg

SEQ ID NO: 239527 - DNA, 30 bp, Artificial Sequence
  Synthetic oligonucleotide
atccgattgatctagccccgctgagcagtg

SEQ ID NO: 239528 - DNA, 30 bp, Artificial Sequence
  Synthetic oligonucleotide
atagtacgtttaaagcaggttaatgcagtg

SEQ ID NO: 239529 - DNA, 30 bp, Artificial Sequence
  Synthetic oligonucleotide
cgaatatgaagacgttaggtaggtgcagtg

SEQ ID NO: 239530 - DNA, 30 bp, Artificial Sequence
  Synthetic oligonucleotide
gagcctgatgggtgcgaacacgttgcagtg

SEQ ID NO: 239531 - DNA, 30 bp, Artificial Sequence
  Synthetic oligonucleotide
gcaagcgcgcgtgtttttgacaaatcagtg

SEQ ID NO: 239532 - DNA, 30 bp, Artificial Sequence
  Synthetic oligonucleotide
gaatcatgagagcaatattgttaatcagtg

SEQ ID NO: 239533 - DNA, 30 bp, Artificial Sequence
  Synthetic oligonucleotide
gcccacaaggagactgtctcgggatcagtg

SEQ ID NO: 239534 - DNA, 30 bp, Artificial Sequence
  Synthetic oligonucleotide
agtccggggctcatcatggctaactcagtg

SEQ ID NO: 239535 - DNA, 30 bp, Artificial Sequence
  Synthetic oligonucleotide
caaatagttgacttaaacgtggcgtcagtg

SEQ ID NO: 239536 - DNA, 30 bp, Artificial Sequence
  Synthetic oligonucleotide
taacttgcagaaatagcggcattttcagtg

SEQ ID NO: 239537 - DNA, 30 bp, Artificial Sequence
  Synthetic oligonucleotide
aagttgttcgtactagcgaacaaaagagtg

SEQ ID NO: 239538 - DNA, 30 bp, Artificial Sequence
  Synthetic oligonucleotide
tgtgggatggatgggcggcatataagagtg

SEQ ID NO: 239539 - DNA, 30 bp, Artificial Sequence
  Synthetic oligonucleotide
taaatgagtcccgatgtaaaagccagagtg

SEQ ID NO: 239540 - DNA, 30 bp, Artificial Sequence
  Synthetic oligonucleotide
tgttgtcgtaagtcatgaacgttcagagtg

SEQ ID NO: 239541 - DNA, 30 bp, Artificial Sequence
  Synthetic oligonucleotide
tgtaattcaacctgtcgtgaaggtagagtg

SEQ ID NO: 239542 - DNA, 30 bp, Artificial Sequence
  Synthetic oligonucleotide
atattcgtctagtaaactggctcccgagtg

SEQ ID NO: 239543 - DNA, 30 bp, Artificial Sequence
  Synthetic oligonucleotide
actttcgggaaccacactttccaaggagtg

SEQ ID NO: 239544 - DNA, 30 bp, Artificial Sequence
  Synthetic oligonucleotide
gtgagatggaggggcacattgtgatgagtg

SEQ ID NO: 239545 - DNA, 30 bp, Artificial Sequence
  Synthetic oligonucleotide
acatacttcagaggcggatggatatgagtg

SEQ ID NO: 239546 - DNA, 30 bp, Artificial Sequence
  Synthetic oligonucleotide
gcatggtgagcatccctctgacactgagtg

SEQ ID NO: 239547 - DNA, 30 bp, Artificial Sequence
  Synthetic oligonucleotide
gatctcaatcgaaaggtaaagatctgagtg

SEQ ID NO: 239548 - DNA, 30 bp, Artificial Sequence
  Synthetic oligonucleotide
agacccaaggtgtactgcttctagtgagtg

SEQ ID NO: 239549 - DNA, 30 bp, Artificial Sequence
  Synthetic oligonucleotide
ctctgtataaagtaacgaagacaactagtg

SEQ ID NO: 239550 - DNA, 30 bp, Artificial Sequence
  Synthetic oligonucleotide
ttctgacggtacgctttaatataactagtg

SEQ ID NO: 239551 - DNA, 30 bp, Artificial Sequence
  Synthetic oligonucleotide
ggcaatgttctatagcaatcgccactagtg

SEQ ID NO: 239552 - DNA, 30 bp, Artificial Sequence
  Synthetic oligonucleotide
aggaaatttcgcccgatggtgcacctagtg

SEQ ID NO: 239553 - DNA, 30 bp, Artificial Sequence
  Synthetic oligonucleotide
atctatgttgtaccagcttagcccctagtg

SEQ ID NO: 239554 - DNA, 30 bp, Artificial Sequence
  Synthetic oligonucleotide
cagtccggcgcttggaccgtccagctagtg

SEQ ID NO: 239555 - DNA, 30 bp, Artificial Sequence
  Synthetic oligonucleotide
aagaccacggattaacacaattggctagtg

SEQ ID NO: 239556 - DNA, 30 bp, Artificial Sequence
  Synthetic oligonucleotide
tcatgggtatccagcttgccccatctagtg

SEQ ID NO: 239557 - DNA, 30 bp, Artificial Sequence
  Synthetic oligonucleotide
cactcataagcaatctgaggttatctagtg

SEQ ID NO: 239558 - DNA, 30 bp, Artificial Sequence
  Synthetic oligonucleotide
actgtagtcgactatagaattgttctagtg

SEQ ID NO: 239559 - DNA, 30 bp, Artificial Sequence
  Synthetic oligonucleotide
aatggtataaggaagtcagactacgtagtg

SEQ ID NO: 239560 - DNA, 30 bp, Artificial Sequence
  Synthetic oligonucleotide
ttcgtccacgttgccgggaacagcgtagtg

SEQ ID NO: 239561 - DNA, 30 bp, Artificial Sequence
  Synthetic oligonucleotide
cggagactcgcggaaagtgttacattagtg

SEQ ID NO: 239562 - DNA, 30 bp, Artificial Sequence
  Synthetic oligonucleotide
gtgactgtacgatagcgttctgcattagtg

SEQ ID NO: 239563 - DNA, 30 bp, Artificial Sequence
  Synthetic oligonucleotide
cagagcggagcggcctcccacagattagtg

SEQ ID NO: 239564 - DNA, 30 bp, Artificial Sequence
  Synthetic oligonucleotide
tggtaagtgttttagcttggtatattagtg

SEQ ID NO: 239565 - DNA, 30 bp, Artificial Sequence
  Synthetic oligonucleotide
agcatcattaaaccttcaatgcacttagtg

SEQ ID NO: 239566 - DNA, 30 bp, Artificial Sequence
  Synthetic oligonucleotide
gtgccgttatcttcgccacggatgttagtg

SEQ ID NO: 239567 - DNA, 30 bp, Artificial Sequence
  Synthetic oligonucleotide
catatccgagggagtagagagactttagtg

SEQ ID NO: 239568 - DNA, 30 bp, Artificial Sequence
  Synthetic oligonucleotide
ttggagccataaattagatggcctttagtg

SEQ ID NO: 239569 - DNA, 30 bp, Artificial Sequence
  Synthetic oligonucleotide
cgttcgtctaaacgaactcagcgtttagtg

SEQ ID NO: 239570 - DNA, 30 bp, Artificial Sequence
  Synthetic oligonucleotide
agttaaatcaacggtccgtggggtttagtg

SEQ ID NO: 239571 - DNA, 30 bp, Artificial Sequence
  Synthetic oligonucleotide
tacgcatggcgagaacgctcctgtttagtg

SEQ ID NO: 239572 - DNA, 30 bp, Artificial Sequence
  Synthetic oligonucleotide
cgcataggacatggttggcagcttttagtg

SEQ ID NO: 239573 - DNA, 30 bp, Artificial Sequence
  Synthetic oligonucleotide
caagcgccttccctacgcgcagttttagtg

SEQ ID NO: 239574 - DNA, 30 bp, Artificial Sequence
  Synthetic oligonucleotide
cggttcagacatgacaaaagtttaaacgtg

SEQ ID NO: 239575 - DNA, 30 bp, Artificial Sequence
  Synthetic oligonucleotide
cttcatcgaacaaatcaacggtccaacgtg

SEQ ID NO: 239576 - DNA, 30 bp, Artificial Sequence
  Synthetic oligonucleotide
tagggggtccgcggcaaaaaaggcaacgtg

SEQ ID NO: 239577 - DNA, 30 bp, Artificial Sequence
  Synthetic oligonucleotide
tgttacagtagaaattgcttatcgaacgtg

SEQ ID NO: 239578 - DNA, 30 bp, Artificial Sequence
  Synthetic oligonucleotide
ttaatttagcacagtgtggaaaggaacgtg

SEQ ID NO: 239579 - DNA, 30 bp, Artificial Sequence
  Synthetic oligonucleotide
cactggctcaaaggagacatatgtaacgtg

SEQ ID NO: 239580 - DNA, 30 bp, Artificial Sequence
  Synthetic oligonucleotide
caagataatagggatggggaaggacacgtg

SEQ ID NO: 239581 - DNA, 30 bp, Artificial Sequence
  Synthetic oligonucleotide
tcgatcctgatagccccgaatacgcacgtg

SEQ ID NO: 239582 - DNA, 28 bp, Artificial Sequence
  Synthetic oligonucleotide
tcatgtccagacccgtactgggcacgtg

SEQ ID NO: 239583 - DNA, 30 bp, Artificial Sequence
  Synthetic oligonucleotide
tggtttgtcctcggcagacagctgcacgtg

SEQ ID NO: 239584 - DNA, 30 bp, Artificial Sequence
  Synthetic oligonucleotide
cgaatgggattgttctagtggctgcacgtg

SEQ ID NO: 239585 - DNA, 30 bp, Artificial Sequence
  Synthetic oligonucleotide
gaactacctggcgcatggctggtgcacgtg

SEQ ID NO: 239586 - DNA, 30 bp, Artificial Sequence
  Synthetic oligonucleotide
aaaagtcggctcctatactgtgttcacgtg

SEQ ID NO: 239587 - DNA, 30 bp, Artificial Sequence
  Synthetic oligonucleotide
tggaggtgaaatggtatctacaaagacgtg

SEQ ID NO: 239588 - DNA, 30 bp, Artificial Sequence
  Synthetic oligonucleotide
tagaggtgggcgcgcctccgcagagacgtg

SEQ ID NO: 239589 - DNA, 30 bp, Artificial Sequence
  Synthetic oligonucleotide
cagttgtccaataaaagagcgctagacgtg

SEQ ID NO: 239590 - DNA, 30 bp, Artificial Sequence
  Synthetic oligonucleotide
ttaaaggtctggcgatttgagttcgacgtg

SEQ ID NO: 239591 - DNA, 30 bp, Artificial Sequence
  Synthetic oligonucleotide
acgaacgctaaccgttctatatctgacgtg

SEQ ID NO: 239592 - DNA, 30 bp, Artificial Sequence
  Synthetic oligonucleotide
aaagcatacaggaccgggatcattgacgtg

SEQ ID NO: 239593 - DNA, 30 bp, Artificial Sequence
  Synthetic oligonucleotide
gaccggttagtctcgcgggtgggatacgtg

SEQ ID NO: 239594 - DNA, 30 bp, Artificial Sequence
  Synthetic oligonucleotide
ttacccaagtttccggcaactacctacgtg

SEQ ID NO: 239595 - DNA, 30 bp, Artificial Sequence
  Synthetic oligonucleotide
gtagggtcgggatacgggtcgcgctacgtg

SEQ ID NO: 239596 - DNA, 30 bp, Artificial Sequence
  Synthetic oligonucleotide
cggtgcctgctcgttcgaaccggctacgtg

SEQ ID NO: 239597 - DNA, 30 bp, Artificial Sequence
  Synthetic oligonucleotide
cgccagtgcccctcgggaacactctacgtg

SEQ ID NO: 239598 - DNA, 30 bp, Artificial Sequence
  Synthetic oligonucleotide
aaaacctcgatacgaacattggggtacgtg

SEQ ID NO: 239599 - DNA, 30 bp, Artificial Sequence
  Synthetic oligonucleotide
taccttcgcgtacctacattggccaccgtg

SEQ ID NO: 239600 - DNA, 30 bp, Artificial Sequence
  Synthetic oligonucleotide
gaggggacccccgatctcatgaagaccgtg

SEQ ID NO: 239601 - DNA, 30 bp, Artificial Sequence
  Synthetic oligonucleotide
ttgcagacggaactatgttctccgaccgtg

SEQ ID NO: 239602 - DNA, 30 bp, Artificial Sequence
  Synthetic oligonucleotide
cagtcacgaggcagtgtaagagtgaccgtg

SEQ ID NO: 239603 - DNA, 30 bp, Artificial Sequence
  Synthetic oligonucleotide
ttgatgagcttattgactgttcataccgtg

SEQ ID NO: 239604 - DNA, 30 bp, Artificial Sequence
  Synthetic oligonucleotide
ttgtgtcttaggtgaagtgtcttccccgtg

SEQ ID NO: 239605 - DNA, 30 bp, Artificial Sequence
  Synthetic oligonucleotide
gagcttacagtagtgctcgtaggtcccgtg

SEQ ID NO: 239606 - DNA, 30 bp, Artificial Sequence
  Synthetic oligonucleotide
cggggttggcaacatacgtgtgtagccgtg

SEQ ID NO: 239607 - DNA, 30 bp, Artificial Sequence
  Synthetic oligonucleotide
agggtgcgtcattcggacccactcgccgtg

SEQ ID NO: 239608 - DNA, 30 bp, Artificial Sequence
  Synthetic oligonucleotide
acccagtggtgtaccgacgtttaatccgtg

SEQ ID NO: 239609 - DNA, 30 bp, Artificial Sequence
  Synthetic oligonucleotide
tcacgggcaggctattgactggcatccgtg

SEQ ID NO: 239610 - DNA, 30 bp, Artificial Sequence
  Synthetic oligonucleotide
aaaatagttggtagattagctatgtccgtg

SEQ ID NO: 239611 - DNA, 30 bp, Artificial Sequence
  Synthetic oligonucleotide
acctaatgggcccccggaaccttgtccgtg

SEQ ID NO: 239612 - DNA, 30 bp, Artificial Sequence
  Synthetic oligonucleotide
cgagcgagaccgtacgtcactcaaagcgtg

SEQ ID NO: 239613 - DNA, 30 bp, Artificial Sequence
  Synthetic oligonucleotide
acatcactcgcacaccccaaccttagcgtg

SEQ ID NO: 239614 - DNA, 30 bp, Artificial Sequence
  Synthetic oligonucleotide
tcagccgcgctaagcgaagggacccgcgtg

SEQ ID NO: 239615 - DNA, 30 bp, Artificial Sequence
  Synthetic oligonucleotide
ttagtcccattgagctcgtttcgccgcgtg

SEQ ID NO: 239616 - DNA, 30 bp, Artificial Sequence
  Synthetic oligonucleotide
cgtgtgaagcgcttatccatcacgcgcgtg

SEQ ID NO: 239617 - DNA, 30 bp, Artificial Sequence
  Synthetic oligonucleotide
ttcgattgtggccggatcatgggaggcgtg

SEQ ID NO: 239618 - DNA, 30 bp, Artificial Sequence
  Synthetic oligonucleotide
atcggggtggagtgtatcctaggcggcgtg

SEQ ID NO: 239619 - DNA, 30 bp, Artificial Sequence
  Synthetic oligonucleotide
tccaccattgcgtaaggtatgagatgcgtg

SEQ ID NO: 239620 - DNA, 30 bp, Artificial Sequence
  Synthetic oligonucleotide
aaaaggaaggcggaaagttatctttgcgtg

SEQ ID NO: 239621 - DNA, 30 bp, Artificial Sequence
  Synthetic oligonucleotide
aagtggtatgacaagtactagaaaatcgtg

SEQ ID NO: 239622 - DNA, 30 bp, Artificial Sequence
  Synthetic oligonucleotide
gacaaatggccccacagcgtacgactcgtg

SEQ ID NO: 239623 - DNA, 30 bp, Artificial Sequence
  Synthetic oligonucleotide
agtataaacatatgcgtggtattactcgtg

SEQ ID NO: 239624 - DNA, 30 bp, Artificial Sequence
  Synthetic oligonucleotide
agggcgcccaatcaatttgtgaacctcgtg

SEQ ID NO: 239625 - DNA, 30 bp, Artificial Sequence
  Synthetic oligonucleotide
acggcaattgtccccgagcaaaggctcgtg

SEQ ID NO: 239626 - DNA, 30 bp, Artificial Sequence
  Synthetic oligonucleotide
gcgaatcaatcattccggagtattctcgtg

SEQ ID NO: 239627 - DNA, 30 bp, Artificial Sequence
  Synthetic oligonucleotide
tttccttacggtctgcggagaaaagtcgtg

SEQ ID NO: 239628 - DNA, 30 bp, Artificial Sequence
  Synthetic oligonucleotide
ttcacagtcccaacccacgcataagtcgtg

SEQ ID NO: 239629 - DNA, 30 bp, Artificial Sequence
  Synthetic oligonucleotide
ccttatttgaacggaacatttaacgtcgtg

SEQ ID NO: 239630 - DNA, 30 bp, Artificial Sequence
  Synthetic oligonucleotide
gaggcttaaacctacaaatctatcgtcgtg

SEQ ID NO: 239631 - DNA, 30 bp, Artificial Sequence
  Synthetic oligonucleotide
ttgcgggcagtaaagcccggaagggtcgtg

SEQ ID NO: 239632 - DNA, 30 bp, Artificial Sequence
  Synthetic oligonucleotide
cggctggggcactcggcttatggggtcgtg

SEQ ID NO: 239633 - DNA, 30 bp, Artificial Sequence
  Synthetic oligonucleotide
tcgtttcgtgaagctgcttaaatggtcgtg

SEQ ID NO: 239634 - DNA, 30 bp, Artificial Sequence
  Synthetic oligonucleotide
tacggtgcgagccagctcgcgcttgtcgtg

SEQ ID NO: 239635 - DNA, 30 bp, Artificial Sequence
  Synthetic oligonucleotide
gctagctaattacgatgtagaccattcgtg

SEQ ID NO: 239636 - DNA, 30 bp, Artificial Sequence
  Synthetic oligonucleotide
atcacctagggccttgtttcctgcttcgtg

SEQ ID NO: 239637 - DNA, 30 bp, Artificial Sequence
  Synthetic oligonucleotide
tgtgtgtacataagccttgacttcttcgtg

SEQ ID NO: 239638 - DNA, 30 bp, Artificial Sequence
  Synthetic oligonucleotide
ctgcgtcgggtaccaacgcattatttcgtg

SEQ ID NO: 239639 - DNA, 30 bp, Artificial Sequence
  Synthetic oligonucleotide
agattatagcgggtcaagcttcgtttcgtg

SEQ ID NO: 239640 - DNA, 30 bp, Artificial Sequence
  Synthetic oligonucleotide
gtagcaaactttgctttaacggataaggtg

SEQ ID NO: 239641 - DNA, 30 bp, Artificial Sequence
  Synthetic oligonucleotide
ctagggactctggcccagtttcaacaggtg

SEQ ID NO: 239642 - DNA, 30 bp, Artificial Sequence
  Synthetic oligonucleotide
tatagcactcaggcggagcaaggccaggtg

SEQ ID NO: 239643 - DNA, 30 bp, Artificial Sequence
  Synthetic oligonucleotide
aactaagattccgcaaaaactgggcaggtg

SEQ ID NO: 239644 - DNA, 30 bp, Artificial Sequence
  Synthetic oligonucleotide
aattcctggagagttttgtaaactcaggtg

SEQ ID NO: 239645 - DNA, 30 bp, Artificial Sequence
  Synthetic oligonucleotide
ctttatcccaaatacactctcagtcaggtg

SEQ ID NO: 239646 - DNA, 30 bp, Artificial Sequence
  Synthetic oligonucleotide
ggggtccaaggagatgtcatgtgtcaggtg

SEQ ID NO: 239647 - DNA, 30 bp, Artificial Sequence
  Synthetic oligonucleotide
gtgcggcgattgccctttacgtaagaggtg

SEQ ID NO: 239648 - DNA, 30 bp, Artificial Sequence
  Synthetic oligonucleotide
taacttgccggcaggacgggtgtagaggtg

SEQ ID NO: 239649 - DNA, 31 bp, Artificial Sequence
  Synthetic oligonucleotide
tcggctccatgccggcgcaggcatcgaggtg

SEQ ID NO: 239650 - DNA, 30 bp, Artificial Sequence
  Synthetic oligonucleotide
gtcttatgcgctttcaacaatgtggaggtg

SEQ ID NO: 239651 - DNA, 30 bp, Artificial Sequence
  Synthetic oligonucleotide
cttaacttgtggatctcgaagcttgaggtg

SEQ ID NO: 239652 - DNA, 30 bp, Artificial Sequence
  Synthetic oligonucleotide
ccgcggcggcccatatggcttgttgaggtg

SEQ ID NO: 239653 - DNA, 30 bp, Artificial Sequence
  Synthetic oligonucleotide
tactagcaagctagtatgcagacataggtg

SEQ ID NO: 239654 - DNA, 30 bp, Artificial Sequence
  Synthetic oligonucleotide
aatccatagttttgcagaggtagataggtg

SEQ ID NO: 239655 - DNA, 30 bp, Artificial Sequence
  Synthetic oligonucleotide
acatgcatccgggttctatggggataggtg

SEQ ID NO: 239656 - DNA, 30 bp, Artificial Sequence
  Synthetic oligonucleotide
tggtctcttcagaacatttgtaagtaggtg

SEQ ID NO: 239657 - DNA, 30 bp, Artificial Sequence
  Synthetic oligonucleotide
gcgtagactagtctcagtagaacgtaggtg

SEQ ID NO: 239658 - DNA, 30 bp, Artificial Sequence
  Synthetic oligonucleotide
gtgtgaaagtctcctcgcaggctgtaggtg

SEQ ID NO: 239659 - DNA, 30 bp, Artificial Sequence
  Synthetic oligonucleotide
cgggtaaggcaatcttaaaaaccttaggtg

SEQ ID NO: 239660 - DNA, 30 bp, Artificial Sequence
  Synthetic oligonucleotide
acgatgcgagtttcgatactcatttaggtg

SEQ ID NO: 239661 - DNA, 30 bp, Artificial Sequence
  Synthetic oligonucleotide
ggcctcgacggtaaaggtgcaacaacggtg

SEQ ID NO: 239662 - DNA, 30 bp, Artificial Sequence
  Synthetic oligonucleotide
attctgggcgagcggaaaaggttaacggtg

SEQ ID NO: 239663 - DNA, 30 bp, Artificial Sequence
  Synthetic oligonucleotide
aactaatctaatgaggacagatttacggtg

SEQ ID NO: 239664 - DNA, 30 bp, Artificial Sequence
  Synthetic oligonucleotide
taaccacaggaaccacattaaataccggtg

SEQ ID NO: 239665 - DNA, 30 bp, Artificial Sequence
  Synthetic oligonucleotide
gttgtgctactaaacgtacggtagccggtg

SEQ ID NO: 239666 - DNA, 30 bp, Artificial Sequence
  Synthetic oligonucleotide
tggagacacaataatgccataactccggtg

SEQ ID NO: 239667 - DNA, 30 bp, Artificial Sequence
  Synthetic oligonucleotide
cccgacgggtcgtaggcgctcactccggtg

SEQ ID NO: 239668 - DNA, 30 bp, Artificial Sequence
  Synthetic oligonucleotide
cgatgcaatttatcttacaggtcagcggtg

SEQ ID NO: 239669 - DNA, 30 bp, Artificial Sequence
  Synthetic oligonucleotide
aaacgccgtatcaaggaaggtaccgcggtg

SEQ ID NO: 239670 - DNA, 30 bp, Artificial Sequence
  Synthetic oligonucleotide
gctagcttgggctcaatatcagaggcggtg

SEQ ID NO: 239671 - DNA, 30 bp, Artificial Sequence
  Synthetic oligonucleotide
ttcggactgcaccccgtaatgtaggcggtg

SEQ ID NO: 239672 - DNA, 30 bp, Artificial Sequence
  Synthetic oligonucleotide
agcctcgacctttggttccggtgatcggtg

SEQ ID NO: 239673 - DNA, 30 bp, Artificial Sequence
  Synthetic oligonucleotide
gagctcgcacacatggtagtgtgatcggtg

SEQ ID NO: 239674 - DNA, 30 bp, Artificial Sequence
  Synthetic oligonucleotide
acgcatgggtatcctgaccagcagtcggtg

SEQ ID NO: 239675 - DNA, 30 bp, Artificial Sequence
  Synthetic oligonucleotide
ttagggacgccgcgagagccccaaagggtg

SEQ ID NO: 239676 - DNA, 30 bp, Artificial Sequence
  Synthetic oligonucleotide
cactcgatttatgttagttacatcagggtg

SEQ ID NO: 239677 - DNA, 30 bp, Artificial Sequence
  Synthetic oligonucleotide
tacttacgatttatcatcgacaggagggtg

SEQ ID NO: 239678 - DNA, 30 bp, Artificial Sequence
  Synthetic oligonucleotide
ccatcggctccggatagaataggtagggtg

SEQ ID NO: 239679 - DNA, 30 bp, Artificial Sequence
  Synthetic oligonucleotide
aaactgcgatcttttcactcagttagggtg

SEQ ID NO: 239680 - DNA, 30 bp, Artificial Sequence
  Synthetic oligonucleotide
ctaacttcagagggcatgcgaacacgggtg

SEQ ID NO: 239681 - DNA, 30 bp, Artificial Sequence
  Synthetic oligonucleotide
ctccagatatcacaatttagggtacgggtg

SEQ ID NO: 239682 - DNA, 30 bp, Artificial Sequence
  Synthetic oligonucleotide
gttgaatatggggcaggaggcttacgggtg

SEQ ID NO: 239683 - DNA, 30 bp, Artificial Sequence
  Synthetic oligonucleotide
taagtactaagggctaccgcttaccgggtg

SEQ ID NO: 239684 - DNA, 30 bp, Artificial Sequence
  Synthetic oligonucleotide
ggaggtttcactccgaggagctagcgggtg

SEQ ID NO: 239685 - DNA, 30 bp, Artificial Sequence
  Synthetic oligonucleotide
acgtgattgagtatgataccgggtcgggtg

SEQ ID NO: 239686 - DNA, 30 bp, Artificial Sequence
  Synthetic oligonucleotide
gtgaccgaacgagtccagcggcacggggtg

SEQ ID NO: 239687 - DNA, 30 bp, Artificial Sequence
  Synthetic oligonucleotide
atggactgcagataacgtatggcgggggtg

SEQ ID NO: 239688 - DNA, 30 bp, Artificial Sequence
  Synthetic oligonucleotide
acttagattttctactcgtaatcgtgggtg

SEQ ID NO: 239689 - DNA, 30 bp, Artificial Sequence
  Synthetic oligonucleotide
aaacttcgtgttataacaaaggattgggtg

SEQ ID NO: 239690 - DNA, 30 bp, Artificial Sequence
  Synthetic oligonucleotide
tgggacaaatatcgcattcggtaaatggtg

SEQ ID NO: 239691 - DNA, 30 bp, Artificial Sequence
  Synthetic oligonucleotide
gacagacgtcgcgactatcggtgaatggtg

SEQ ID NO: 239692 - DNA, 30 bp, Artificial Sequence
  Synthetic oligonucleotide
tagtgtcatttcaaactcggagtcatggtg

SEQ ID NO: 239693 - DNA, 30 bp, Artificial Sequence
  Synthetic oligonucleotide
agcgaacctgcaggtcggcgggagatggtg

SEQ ID NO: 239694 - DNA, 30 bp, Artificial Sequence
  Synthetic oligonucleotide
cgttatcgatagtcatgaaatctgatggtg

SEQ ID NO: 239695 - DNA, 30 bp, Artificial Sequence
  Synthetic oligonucleotide
agatgctggctttggaaggattatatggtg

SEQ ID NO: 239696 - DNA, 30 bp, Artificial Sequence
  Synthetic oligonucleotide
aaatccaggaaccgaagcgcgcctatggtg

SEQ ID NO: 239697 - DNA, 30 bp, Artificial Sequence
  Synthetic oligonucleotide
ggacagtggttgagagtcaaccttatggtg

SEQ ID NO: 239698 - DNA, 30 bp, Artificial Sequence
  Synthetic oligonucleotide
gcgacatggacattggcgaggcaactggtg

SEQ ID NO: 239699 - DNA, 30 bp, Artificial Sequence
  Synthetic oligonucleotide
tacttttcataccacgttgtgctgctggtg

SEQ ID NO: 239700 - DNA, 31 bp, Artificial Sequence
  Synthetic oligonucleotide
cgagtactagataacagtgagtcctctggtg

SEQ ID NO: 239701 - DNA, 30 bp, Artificial Sequence
  Synthetic oligonucleotide
cttaacatttcgcataattcgctcgtggtg

SEQ ID NO: 239702 - DNA, 30 bp, Artificial Sequence
  Synthetic oligonucleotide
atgggtgattgggagcgaggttgggtggtg

SEQ ID NO: 239703 - DNA, 30 bp, Artificial Sequence
  Synthetic oligonucleotide
aaccgggttactgaatcttaatgtgtggtg

SEQ ID NO: 239704 - DNA, 30 bp, Artificial Sequence
  Synthetic oligonucleotide
gtgccaccaccaatatgatggttgttggtg

SEQ ID NO: 239705 - DNA, 30 bp, Artificial Sequence
  Synthetic oligonucleotide
tttcgttaatatcaagtagacgatttggtg

SEQ ID NO: 239706 - DNA, 30 bp, Artificial Sequence
  Synthetic oligonucleotide
cgtttgacatgccatttacccgatttggtg

SEQ ID NO: 239707 - DNA, 30 bp, Artificial Sequence
  Synthetic oligonucleotide
gcaagcgaatccagccgcccggaaaatgtg

SEQ ID NO: 239708 - DNA, 30 bp, Artificial Sequence
  Synthetic oligonucleotide
tagacttcggtaccgtgcctcgcaaatgtg

SEQ ID NO: 239709 - DNA, 30 bp, Artificial Sequence
  Synthetic oligonucleotide
gggactaaccccgccggcacgttcaatgtg

SEQ ID NO: 239710 - DNA, 30 bp, Artificial Sequence
  Synthetic oligonucleotide
aacaccgtgtgggtcaaacccgctaatgtg

SEQ ID NO: 239711 - DNA, 30 bp, Artificial Sequence
  Synthetic oligonucleotide
tacgaacgtcaattggagttcagtaatgtg

SEQ ID NO: 239712 - DNA, 30 bp, Artificial Sequence
  Synthetic oligonucleotide
gtccacttctcgttgcggacctgtaatgtg

SEQ ID NO: 239713 - DNA, 30 bp, Artificial Sequence
  Synthetic oligonucleotide
cttcgatgggtccgttgggacgtacatgtg

SEQ ID NO: 239714 - DNA, 30 bp, Artificial Sequence
  Synthetic oligonucleotide
gagttccaaaccgggggacaaagccatgtg

SEQ ID NO: 239715 - DNA, 30 bp, Artificial Sequence
  Synthetic oligonucleotide
acacttggaccgaattataagtgagatgtg

SEQ ID NO: 239716 - DNA, 29 bp, Artificial Sequence
  Synthetic oligonucleotide
acagtcgctggcaggcacagcaggatgtg

SEQ ID NO: 239717 - DNA, 30 bp, Artificial Sequence
  Synthetic oligonucleotide
ttgtctgtgtaccggtaagtctgggatgtg

SEQ ID NO: 239718 - DNA, 30 bp, Artificial Sequence
  Synthetic oligonucleotide
ttggggggatccaaaacgatgttggatgtg

SEQ ID NO: 239719 - DNA, 30 bp, Artificial Sequence
  Synthetic oligonucleotide
tgcacgagatgtctagatgggctatatgtg

SEQ ID NO: 239720 - DNA, 30 bp, Artificial Sequence
  Synthetic oligonucleotide
gtaccggagcgaagaggcatctgttatgtg

SEQ ID NO: 239721 - DNA, 30 bp, Artificial Sequence
  Synthetic oligonucleotide
cctaagattgcagtcagttagggaactgtg

SEQ ID NO: 239722 - DNA, 30 bp, Artificial Sequence
  Synthetic oligonucleotide
cggtgcgcgaggatgaccgcactcactgtg

SEQ ID NO: 239723 - DNA, 30 bp, Artificial Sequence
  Synthetic oligonucleotide
caaacagtaagactgtaaacgtggactgtg

SEQ ID NO: 239724 - DNA, 30 bp, Artificial Sequence
  Synthetic oligonucleotide
gtcctgaaaaggtttttaattcagcctgtg

SEQ ID NO: 239725 - DNA, 30 bp, Artificial Sequence
  Synthetic oligonucleotide
gtgtaaattggatacaagtcagtgcctgtg

SEQ ID NO: 239726 - DNA, 30 bp, Artificial Sequence
  Synthetic oligonucleotide
gatgtattatcgggcatggtacgagctgtg

SEQ ID NO: 239727 - DNA, 30 bp, Artificial Sequence
  Synthetic oligonucleotide
tagacttctggcgagttgcgccgagctgtg

SEQ ID NO: 239728 - DNA, 30 bp, Artificial Sequence
  Synthetic oligonucleotide
actgaagttattaccaatgacatcgctgtg

SEQ ID NO: 239729 - DNA, 29 bp, Artificial Sequence
  Synthetic oligonucleotide
tccagtaagattagagtgatgatgctgtg

SEQ ID NO: 239730 - DNA, 30 bp, Artificial Sequence
  Synthetic oligonucleotide
acatattttaagcgctacgtctcgagtgtg

SEQ ID NO: 239731 - DNA, 30 bp, Artificial Sequence
  Synthetic oligonucleotide
ctgaattcgattttttgggtcaggagtgtg

SEQ ID NO: 239732 - DNA, 30 bp, Artificial Sequence
  Synthetic oligonucleotide
gtctgtgagtgtgaccccgatgggagtgtg

SEQ ID NO: 239733 - DNA, 30 bp, Artificial Sequence
  Synthetic oligonucleotide
cgtatagtcgcgttacatgcactgagtgtg

SEQ ID NO: 239734 - DNA, 30 bp, Artificial Sequence
  Synthetic oligonucleotide
ggggcctgtaataatgaccagaaacgtgtg

SEQ ID NO: 239735 - DNA, 30 bp, Artificial Sequence
  Synthetic oligonucleotide
attgtgccgggatgtgaattgtagcgtgtg

SEQ ID NO: 239736 - DNA, 30 bp, Artificial Sequence
  Synthetic oligonucleotide
aagcgtactatttagatgcggacgcgtgtg

SEQ ID NO: 239737 - DNA, 30 bp, Artificial Sequence
  Synthetic oligonucleotide
cgaggtacttgccaatgatcccatcgtgtg

SEQ ID NO: 239738 - DNA, 30 bp, Artificial Sequence
  Synthetic oligonucleotide
tgttgcgaccgtatgcagacctgtcgtgtg

SEQ ID NO: 239739 - DNA, 30 bp, Artificial Sequence
  Synthetic oligonucleotide
taattgtctggacgaaaacagccaggtgtg

SEQ ID NO: 239740 - DNA, 30 bp, Artificial Sequence
  Synthetic oligonucleotide
aaaacatacccatgagattgctgaggtgtg

SEQ ID NO: 239741 - DNA, 30 bp, Artificial Sequence
  Synthetic oligonucleotide
gctccgtgttgcgacagcatactcggtgtg

SEQ ID NO: 239742 - DNA, 30 bp, Artificial Sequence
  Synthetic oligonucleotide
gtacttttaacccgattctctgagggtgtg

SEQ ID NO: 239743 - DNA, 30 bp, Artificial Sequence
  Synthetic oligonucleotide
acctttgacttcgcattgggggatggtgtg

SEQ ID NO: 239744 - DNA, 30 bp, Artificial Sequence
  Synthetic oligonucleotide
gtagatcttctatcacattcagctggtgtg

SEQ ID NO: 239745 - DNA, 30 bp, Artificial Sequence
  Synthetic oligonucleotide
gcagaggacaaaaggttcggggttggtgtg

SEQ ID NO: 239746 - DNA, 30 bp, Artificial Sequence
  Synthetic oligonucleotide
ctggaatggcaagccctggtgaaatgtgtg

SEQ ID NO: 239747 - DNA, 30 bp, Artificial Sequence
  Synthetic oligonucleotide
gggaggtttagggagagggttgtatgtgtg

SEQ ID NO: 239748 - DNA, 30 bp, Artificial Sequence
  Synthetic oligonucleotide
ggagacaagggggcgggtagtttatgtgtg

SEQ ID NO: 239749 - DNA, 30 bp, Artificial Sequence
  Synthetic oligonucleotide
taacgtttcgaataagtttttgcgtgtgtg

SEQ ID NO: 239750 - DNA, 30 bp, Artificial Sequence
  Synthetic oligonucleotide
taacgtcggcatcaagagcgcggttgtgtg

SEQ ID NO: 239751 - DNA, 30 bp, Artificial Sequence
  Synthetic oligonucleotide
ggtttagaagcgaaatacaacggcattgtg

SEQ ID NO: 239752 - DNA, 30 bp, Artificial Sequence
  Synthetic oligonucleotide
tcgcacgtatcctaatggttattcattgtg

SEQ ID NO: 239753 - DNA, 30 bp, Artificial Sequence
  Synthetic oligonucleotide
taactatcggacgcacggatagagattgtg

SEQ ID NO: 239754 - DNA, 30 bp, Artificial Sequence
  Synthetic oligonucleotide
cgataagtctactaggtatgagaccttgtg

SEQ ID NO: 239755 - DNA, 30 bp, Artificial Sequence
  Synthetic oligonucleotide
tggagtagggaagccgatggagagcttgtg

SEQ ID NO: 239756 - DNA, 30 bp, Artificial Sequence
  Synthetic oligonucleotide
cccagtgggactaagagtgtccaagttgtg

SEQ ID NO: 239757 - DNA, 30 bp, Artificial Sequence
  Synthetic oligonucleotide
ggcgtttcctatggctgttctgaagttgtg

SEQ ID NO: 239758 - DNA, 30 bp, Artificial Sequence
  Synthetic oligonucleotide
tcaagaattttggaccagcctcacgttgtg

SEQ ID NO: 239759 - DNA, 30 bp, Artificial Sequence
  Synthetic oligonucleotide
gaagtcttggtttaccccaactacgttgtg

SEQ ID NO: 239760 - DNA, 30 bp, Artificial Sequence
  Synthetic oligonucleotide
taatttatggtacaaccctcaggcgttgtg

SEQ ID NO: 239761 - DNA, 30 bp, Artificial Sequence
  Synthetic oligonucleotide
gtatcggcataaatttgatgaacggttgtg

SEQ ID NO: 239762 - DNA, 30 bp, Artificial Sequence
  Synthetic oligonucleotide
ccgattcagtctgatcttcagacggttgtg

SEQ ID NO: 239763 - DNA, 30 bp, Artificial Sequence
  Synthetic oligonucleotide
gaatataggatcacaccggttcgggttgtg

SEQ ID NO: 239764 - DNA, 30 bp, Artificial Sequence
  Synthetic oligonucleotide
gaccaagctcacgagtgctacgatgttgtg

SEQ ID NO: 239765 - DNA, 30 bp, Artificial Sequence
  Synthetic oligonucleotide
aatatcaaggttcaatctacatctgttgtg

SEQ ID NO: 239766 - DNA, 30 bp, Artificial Sequence
  Synthetic oligonucleotide
tacggtataatgtaaccggtatgtgttgtg

SEQ ID NO: 239767 - DNA, 30 bp, Artificial Sequence
  Synthetic oligonucleotide
tgaggcaaatgtatcaataaagcctttgtg

SEQ ID NO: 239768 - DNA, 30 bp, Artificial Sequence
  Synthetic oligonucleotide
tctaggtggccggtacactcaatctttgtg

SEQ ID NO: 239769 - DNA, 30 bp, Artificial Sequence
  Synthetic oligonucleotide
tgaggtaaatcgtaggggtgagtctttgtg

SEQ ID NO: 239770 - DNA, 30 bp, Artificial Sequence
  Synthetic oligonucleotide
aaggtcgtaaggtacagttccgcaaaattg

SEQ ID NO: 239771 - DNA, 30 bp, Artificial Sequence
  Synthetic oligonucleotide
gaaccgatagcatttgcatcctgaaaattg

SEQ ID NO: 239772 - DNA, 30 bp, Artificial Sequence
  Synthetic oligonucleotide
ctattctacgacagtaatactaacaaattg

SEQ ID NO: 239773 - DNA, 30 bp, Artificial Sequence
  Synthetic oligonucleotide
tgtggttattgtgatcgtccagacaaattg

SEQ ID NO: 239774 - DNA, 30 bp, Artificial Sequence
  Synthetic oligonucleotide
gggtggccgtaacttcaggtgtagaaattg

SEQ ID NO: 239775 - DNA, 30 bp, Artificial Sequence
  Synthetic oligonucleotide
gtatgaacaggtttggtcatcaggaaattg

SEQ ID NO: 239776 - DNA, 30 bp, Artificial Sequence
  Synthetic oligonucleotide
cacaagggacagtgctgaccgcggaaattg

SEQ ID NO: 239777 - DNA, 30 bp, Artificial Sequence
  Synthetic oligonucleotide
gacgacagtacagcacaagctctgaaattg

SEQ ID NO: 239778 - DNA, 30 bp, Artificial Sequence
  Synthetic oligonucleotide
ctcatcgtgaattgtgcggtatgtaaattg

SEQ ID NO: 239779 - DNA, 30 bp, Artificial Sequence
  Synthetic oligonucleotide
tacgtcttgtcaaagtatcgaatacaattg

SEQ ID NO: 239780 - DNA, 30 bp, Artificial Sequence
  Synthetic oligonucleotide
ggagcttcgagccctcgctgcctacaattg

SEQ ID NO: 239781 - DNA, 30 bp, Artificial Sequence
  Synthetic oligonucleotide
atcctagggcgacttagtcgcgtacaattg

SEQ ID NO: 239782 - DNA, 30 bp, Artificial Sequence
  Synthetic oligonucleotide
aaccgagtaagcacacagccaacccaattg

SEQ ID NO: 239783 - DNA, 30 bp, Artificial Sequence
  Synthetic oligonucleotide
catcaagacgagtagatggtaagccaattg

SEQ ID NO: 239784 - DNA, 30 bp, Artificial Sequence
  Synthetic oligonucleotide
gtacagattgtgcaagaccccaatcaattg

SEQ ID NO: 239785 - DNA, 30 bp, Artificial Sequence
  Synthetic oligonucleotide
attggcagtatagaacgactggctcaattg

SEQ ID NO: 239786 - DNA, 30 bp, Artificial Sequence
  Synthetic oligonucleotide
ataccgggtgatttaaaagttgttcaattg

SEQ ID NO: 239787 - DNA, 30 bp, Artificial Sequence
  Synthetic oligonucleotide
gtctccatgtagagcatcgactgagaattg

SEQ ID NO: 239788 - DNA, 30 bp, Artificial Sequence
  Synthetic oligonucleotide
ggtcgaaatttcatatttcgtcatgaattg

SEQ ID NO: 239789 - DNA, 30 bp, Artificial Sequence
  Synthetic oligonucleotide
tgcacgccagccctcctatggggataattg

SEQ ID NO: 239790 - DNA, 30 bp, Artificial Sequence
  Synthetic oligonucleotide
tttcaaaaaccccggctacagtgataattg

SEQ ID NO: 239791 - DNA, 30 bp, Artificial Sequence
  Synthetic oligonucleotide
tcgttcttttccagctttgacgtgtaattg

SEQ ID NO: 239792 - DNA, 30 bp, Artificial Sequence
  Synthetic oligonucleotide
acagactgggcttattagtttcgttaattg

SEQ ID NO: 239793 - DNA, 30 bp, Artificial Sequence
  Synthetic oligonucleotide
tatatagctagagtgctccaagtttaattg

SEQ ID NO: 239794 - DNA, 30 bp, Artificial Sequence
  Synthetic oligonucleotide
ggtaggcagacaattaagaaactaacattg

SEQ ID NO: 239795 - DNA, 30 bp, Artificial Sequence
  Synthetic oligonucleotide
gaatttcagatagggggccaaaccacattg

SEQ ID NO: 239796 - DNA, 30 bp, Artificial Sequence
  Synthetic oligonucleotide
aaaagcagaatgtctgatacggagacattg

SEQ ID NO: 239797 - DNA, 30 bp, Artificial Sequence
  Synthetic oligonucleotide
ttgcttactgcacgtgccagtgttacattg

SEQ ID NO: 239798 - DNA, 30 bp, Artificial Sequence
  Synthetic oligonucleotide
acagtcgctgttgcgattcgcaaaccattg

SEQ ID NO: 239799 - DNA, 30 bp, Artificial Sequence
  Synthetic oligonucleotide
ccattaatacactcaaattttcgaccattg

SEQ ID NO: 239800 - DNA, 30 bp, Artificial Sequence
  Synthetic oligonucleotide
ccgatgtcacaaacgcgttgcgctccattg

SEQ ID NO: 239801 - DNA, 30 bp, Artificial Sequence
  Synthetic oligonucleotide
aacgtcactccacatgcgtgtctagcattg

SEQ ID NO: 239802 - DNA, 30 bp, Artificial Sequence
  Synthetic oligonucleotide
ccgtattcaggcgctccgcgtagcgcattg

SEQ ID NO: 239803 - DNA, 30 bp, Artificial Sequence
  Synthetic oligonucleotide
ccgcataaagttgtcataatcatcgcattg

SEQ ID NO: 239804 - DNA, 30 bp, Artificial Sequence
  Synthetic oligonucleotide
tgatattacggcgttcatgatcaggcattg

SEQ ID NO: 239805 - DNA, 30 bp, Artificial Sequence
  Synthetic oligonucleotide
gtggaaagaccaggcggggatggggcattg

SEQ ID NO: 239806 - DNA, 30 bp, Artificial Sequence
  Synthetic oligonucleotide
gcgttgctcaatctgtaaatatatgcattg

SEQ ID NO: 239807 - DNA, 30 bp, Artificial Sequence
  Synthetic oligonucleotide
ggcccgtctagtcacggtgttattgcattg

SEQ ID NO: 239808 - DNA, 30 bp, Artificial Sequence
  Synthetic oligonucleotide
cttggggatagcaaagtatggagatcattg

SEQ ID NO: 239809 - DNA, 30 bp, Artificial Sequence
  Synthetic oligonucleotide
atacatattgacatggttagcttatcattg

SEQ ID NO: 239810 - DNA, 30 bp, Artificial Sequence
  Synthetic oligonucleotide
tgtaacgttcgagtggaacgtccctcattg

SEQ ID NO: 239811 - DNA, 31 bp, Artificial Sequence
  Synthetic oligonucleotide
taataagcgccacgtagggatgaggtcattg

SEQ ID NO: 239812 - DNA, 30 bp, Artificial Sequence
  Synthetic oligonucleotide
cacacaagctcgcaattcaaagggtcattg

SEQ ID NO: 239813 - DNA, 30 bp, Artificial Sequence
  Synthetic oligonucleotide
gtgcaacgcgctagcgggagctgcagattg

SEQ ID NO: 239814 - DNA, 30 bp, Artificial Sequence
  Synthetic oligonucleotide
ccctacgtcagaccatgagagaatagattg

SEQ ID NO: 239815 - DNA, 30 bp, Artificial Sequence
  Synthetic oligonucleotide
atctttacatgtatgctaacttatagattg

SEQ ID NO: 239816 - DNA, 30 bp, Artificial Sequence
  Synthetic oligonucleotide
gttgatacactggtacgatggtgtagattg

SEQ ID NO: 239817 - DNA, 30 bp, Artificial Sequence
  Synthetic oligonucleotide
acatcgcgcaaattatgactaggccgattg

SEQ ID NO: 239818 - DNA, 31 bp, Artificial Sequence
  Synthetic oligonucleotide
tgtcatctggagtgttctgatcacgcgattg

SEQ ID NO: 239819 - DNA, 30 bp, Artificial Sequence
  Synthetic oligonucleotide
tgtggctccccaccccccctcacgcgattg

SEQ ID NO: 239820 - DNA, 30 bp, Artificial Sequence
  Synthetic oligonucleotide
cccgatcgccttagagagggggcgcgattg

SEQ ID NO: 239821 - DNA, 30 bp, Artificial Sequence
  Synthetic oligonucleotide
aacctatagaatatctcagcctggcgattg

SEQ ID NO: 239822 - DNA, 30 bp, Artificial Sequence
  Synthetic oligonucleotide
aagagccgcccgacggtttcgtggcgattg

SEQ ID NO: 239823 - DNA, 30 bp, Artificial Sequence
  Synthetic oligonucleotide
ggggtacttcatttactttggcccggattg

SEQ ID NO: 239824 - DNA, 30 bp, Artificial Sequence
  Synthetic oligonucleotide
cgaagccattgcagtgattggtcgggattg

SEQ ID NO: 239825 - DNA, 30 bp, Artificial Sequence
  Synthetic oligonucleotide
cccctccatctacctcaagattcgggattg

SEQ ID NO: 239826 - DNA, 30 bp, Artificial Sequence
  Synthetic oligonucleotide
agacgctaattactggaggcccggggattg

SEQ ID NO: 239827 - DNA, 30 bp, Artificial Sequence
  Synthetic oligonucleotide
ggataacttaccaaaagatatttgggattg

SEQ ID NO: 239828 - DNA, 30 bp, Artificial Sequence
  Synthetic oligonucleotide
cttcaatagtcacacactaacaatggattg

SEQ ID NO: 239829 - DNA, 30 bp, Artificial Sequence
  Synthetic oligonucleotide
gaggaactatgcatcaagctacctggattg

SEQ ID NO: 239830 - DNA, 30 bp, Artificial Sequence
  Synthetic oligonucleotide
gtctgcaatgagattacaaaccaatgattg

SEQ ID NO: 239831 - DNA, 30 bp, Artificial Sequence
  Synthetic oligonucleotide
gttataaacgaggctacagtatactgattg

SEQ ID NO: 239832 - DNA, 31 bp, Artificial Sequence
  Synthetic oligonucleotide
agtgccggcggtcccggttggtgggtgattg

SEQ ID NO: 239833 - DNA, 30 bp, Artificial Sequence
  Synthetic oligonucleotide
aggattgaacatagtctcgtcgctatattg

SEQ ID NO: 239834 - DNA, 30 bp, Artificial Sequence
  Synthetic oligonucleotide
tgccggagtgggtgctagttccttatattg

SEQ ID NO: 239835 - DNA, 30 bp, Artificial Sequence
  Synthetic oligonucleotide
attgcgtcattgacaatagtcggactattg

SEQ ID NO: 239836 - DNA, 30 bp, Artificial Sequence
  Synthetic oligonucleotide
ccaggagaaccggccttacaagtcctattg

SEQ ID NO: 239837 - DNA, 30 bp, Artificial Sequence
  Synthetic oligonucleotide
tgaagcagccgagacgtagtaaggctattg

SEQ ID NO: 239838 - DNA, 30 bp, Artificial Sequence
  Synthetic oligonucleotide
agtagaccccacgtgttcgttttgctattg

SEQ ID NO: 239839 - DNA, 30 bp, Artificial Sequence
  Synthetic oligonucleotide
acgaaggctttatggatattaactctattg

SEQ ID NO: 239840 - DNA, 31 bp, Artificial Sequence
  Synthetic oligonucleotide
cctggcctgttgtaaccgatccagagtattg

SEQ ID NO: 239841 - DNA, 30 bp, Artificial Sequence
  Synthetic oligonucleotide
aaaccccattttgtaggctaccgcgtattg

SEQ ID NO: 239842 - DNA, 30 bp, Artificial Sequence
  Synthetic oligonucleotide
tccagaattcttggagtcgatggcgtattg

SEQ ID NO: 239843 - DNA, 30 bp, Artificial Sequence
  Synthetic oligonucleotide
cagggatagtatgaccctccggaggtattg

SEQ ID NO: 239844 - DNA, 30 bp, Artificial Sequence
  Synthetic oligonucleotide
caactttgtctacccttcgtttaggtattg

SEQ ID NO: 239845 - DNA, 30 bp, Artificial Sequence
  Synthetic oligonucleotide
tccgagtcaaggcaacaggtatctgtattg

SEQ ID NO: 239846 - DNA, 30 bp, Artificial Sequence
  Synthetic oligonucleotide
caagcgacctgttcgtactgccgtgtattg

SEQ ID NO: 239847 - DNA, 30 bp, Artificial Sequence
  Synthetic oligonucleotide
atcgaaacattgattcttagagttgtattg

SEQ ID NO: 239848 - DNA, 30 bp, Artificial Sequence
  Synthetic oligonucleotide
cattgcgagagttttctaaacatattattg

SEQ ID NO: 239849 - DNA, 30 bp, Artificial Sequence
  Synthetic oligonucleotide
cgccaaaagcaagcaaaaatttagttattg

SEQ ID NO: 239850 - DNA, 30 bp, Artificial Sequence
  Synthetic oligonucleotide
ttagcaaccaaacgctcaacgattttattg

SEQ ID NO: 239851 - DNA, 30 bp, Artificial Sequence
  Synthetic oligonucleotide
gcacaggcctggtcgtatgcccttttattg

SEQ ID NO: 239852 - DNA, 30 bp, Artificial Sequence
  Synthetic oligonucleotide
gcacgcgatcttgggttcctaccacacttg

SEQ ID NO: 239853 - DNA, 30 bp, Artificial Sequence
  Synthetic oligonucleotide
caagaagggttcatatagccattacacttg

SEQ ID NO: 239854 - DNA, 30 bp, Artificial Sequence
  Synthetic oligonucleotide
cgtaaagctcgataggcttgcaggcacttg

SEQ ID NO: 239855 - DNA, 30 bp, Artificial Sequence
  Synthetic oligonucleotide
tgaaactagacaaagttctttttagacttg

SEQ ID NO: 239856 - DNA, 30 bp, Artificial Sequence
  Synthetic oligonucleotide
caaactgcgattctcgcaaatccggacttg

SEQ ID NO: 239857 - DNA, 30 bp, Artificial Sequence
  Synthetic oligonucleotide
ttagtgggctactcacattagactgacttg

SEQ ID NO: 239858 - DNA, 30 bp, Artificial Sequence
  Synthetic oligonucleotide
ggcaccagcataagtagctaacgtgacttg

SEQ ID NO: 239859 - DNA, 30 bp, Artificial Sequence
  Synthetic oligonucleotide
aaacgtgattatgtgccgaattgtgacttg

SEQ ID NO: 239860 - DNA, 30 bp, Artificial Sequence
  Synthetic oligonucleotide
atcggccatgcgtgcaacgccaaatacttg

SEQ ID NO: 239861 - DNA, 30 bp, Artificial Sequence
  Synthetic oligonucleotide
acaacatcaattcgtctgttataatacttg

SEQ ID NO: 239862 - DNA, 30 bp, Artificial Sequence
  Synthetic oligonucleotide
gcccactcactgcctccgtccgtgtacttg

SEQ ID NO: 239863 - DNA, 30 bp, Artificial Sequence
  Synthetic oligonucleotide
tcgtctccggctgcaaccatgcacaccttg

SEQ ID NO: 239864 - DNA, 30 bp, Artificial Sequence
  Synthetic oligonucleotide
gattcatggacccgacgacaacctaccttg

SEQ ID NO: 239865 - DNA, 30 bp, Artificial Sequence
  Synthetic oligonucleotide
taggagcggtcttgatcatggagtaccttg

SEQ ID NO: 239866 - DNA, 30 bp, Artificial Sequence
  Synthetic oligonucleotide
tatgaaacgtcaacgatgactagtaccttg

SEQ ID NO: 239867 - DNA, 30 bp, Artificial Sequence
  Synthetic oligonucleotide
caccattgccactgccagtacaaacccttg

SEQ ID NO: 239868 - DNA, 30 bp, Artificial Sequence
  Synthetic oligonucleotide
gtggcaattagtgcacgcagtaggcccttg

SEQ ID NO: 239869 - DNA, 30 bp, Artificial Sequence
  Synthetic oligonucleotide
gactacgaggtttggtatgcctggcccttg

SEQ ID NO: 239870 - DNA, 30 bp, Artificial Sequence
  Synthetic oligonucleotide
acctgttacggctagggtcgcctagccttg

SEQ ID NO: 239871 - DNA, 30 bp, Artificial Sequence
  Synthetic oligonucleotide
aacaacttagtcgctcatgatcgggccttg

SEQ ID NO: 239872 - DNA, 30 bp, Artificial Sequence
  Synthetic oligonucleotide
ggggatgggaaatatgtataaatatccttg

SEQ ID NO: 239873 - DNA, 30 bp, Artificial Sequence
  Synthetic oligonucleotide
actgagaaaccaagaggctcgggctccttg

SEQ ID NO: 239874 - DNA, 30 bp, Artificial Sequence
  Synthetic oligonucleotide
acccatgctcgatatcctagcgagtccttg

SEQ ID NO: 239875 - DNA, 30 bp, Artificial Sequence
  Synthetic oligonucleotide
aggcaaatatgcgcgtctgttcggtccttg

SEQ ID NO: 239876 - DNA, 30 bp, Artificial Sequence
  Synthetic oligonucleotide
gattatacaggaagataatgttaaagcttg

SEQ ID NO: 239877 - DNA, 30 bp, Artificial Sequence
  Synthetic oligonucleotide
acgtaatgttttatcgggacaccaagcttg

SEQ ID NO: 239878 - DNA, 30 bp, Artificial Sequence
  Synthetic oligonucleotide
aaatgaaatatgaagtgtaagctcagcttg

SEQ ID NO: 239879 - DNA, 30 bp, Artificial Sequence
  Synthetic oligonucleotide
cagaattgataactgtaaactttcagcttg

SEQ ID NO: 239880 - DNA, 30 bp, Artificial Sequence
  Synthetic oligonucleotide
gcaacacagtacgactggcggatgagcttg

SEQ ID NO: 239881 - DNA, 30 bp, Artificial Sequence
  Synthetic oligonucleotide
cctgtcgcgttgctatatcggaaccgcttg

SEQ ID NO: 239882 - DNA, 30 bp, Artificial Sequence
  Synthetic oligonucleotide
cgggaccgttgcgtccggtttgcgcgcttg

SEQ ID NO: 239883 - DNA, 30 bp, Artificial Sequence
  Synthetic oligonucleotide
cctctcgggtgtttaatatgtatgcgcttg

SEQ ID NO: 239884 - DNA, 30 bp, Artificial Sequence
  Synthetic oligonucleotide
cttcgctgagtgaccccacagtttcgcttg

SEQ ID NO: 239885 - DNA, 30 bp, Artificial Sequence
  Synthetic oligonucleotide
ccgtaggtactggtacgtgtgtatggcttg

SEQ ID NO: 239886 - DNA, 30 bp, Artificial Sequence
  Synthetic oligonucleotide
gacgatttaacaaggcgtacctctggcttg

SEQ ID NO: 239887 - DNA, 30 bp, Artificial Sequence
  Synthetic oligonucleotide
caggttttttaggattaaaggcgatgcttg

SEQ ID NO: 239888 - DNA, 30 bp, Artificial Sequence
  Synthetic oligonucleotide
cacagagcgtgaatttacaggaactgcttg

SEQ ID NO: 239889 - DNA, 30 bp, Artificial Sequence
  Synthetic oligonucleotide
ctcatgcggatgtagtggacgtcctgcttg

SEQ ID NO: 239890 - DNA, 30 bp, Artificial Sequence
  Synthetic oligonucleotide
tttcggggttcgaagtggggttagtgcttg

SEQ ID NO: 239891 - DNA, 30 bp, Artificial Sequence
  Synthetic oligonucleotide
tggagtacgggcccgctagggagaatcttg

SEQ ID NO: 239892 - DNA, 30 bp, Artificial Sequence
  Synthetic oligonucleotide
tttcccgacaactgagccacgcgaatcttg

SEQ ID NO: 239893 - DNA, 30 bp, Artificial Sequence
  Synthetic oligonucleotide
cgtgatattaatctagagactatactcttg

SEQ ID NO: 239894 - DNA, 30 bp, Artificial Sequence
  Synthetic oligonucleotide
ggggattcaatattactctaaggcctcttg

SEQ ID NO: 239895 - DNA, 30 bp, Artificial Sequence
  Synthetic oligonucleotide
cccaactaaaggtcccccctagctctcttg

SEQ ID NO: 239896 - DNA, 30 bp, Artificial Sequence
  Synthetic oligonucleotide
caacagaagtagagtaaggcacgtctcttg

SEQ ID NO: 239897 - DNA, 30 bp, Artificial Sequence
  Synthetic oligonucleotide
gtagctgaacaacatttagcttccgtcttg

SEQ ID NO: 239898 - DNA, 30 bp, Artificial Sequence
  Synthetic oligonucleotide
ggcagccaattaaaagtttaaggcgtcttg

SEQ ID NO: 239899 - DNA, 30 bp, Artificial Sequence
  Synthetic oligonucleotide
tgatgaaaagccaggccgttgcaggtcttg

SEQ ID NO: 239900 - DNA, 30 bp, Artificial Sequence
  Synthetic oligonucleotide
atgtgtaaagtgcgcgtgtctgatgtcttg

SEQ ID NO: 239901 - DNA, 30 bp, Artificial Sequence
  Synthetic oligonucleotide
gatactcaatagggacataagccattcttg

SEQ ID NO: 239902 - DNA, 30 bp, Artificial Sequence
  Synthetic oligonucleotide
taagacatagagtcgtatatgaagttcttg

SEQ ID NO: 239903 - DNA, 30 bp, Artificial Sequence
  Synthetic oligonucleotide
aggaactttgactggaaatcggagttcttg

SEQ ID NO: 239904 - DNA, 30 bp, Artificial Sequence
  Synthetic oligonucleotide
gttcgaatagactaggaatgaaggttcttg

SEQ ID NO: 239905 - DNA, 30 bp, Artificial Sequence
  Synthetic oligonucleotide
tgtagggccgaggtcgagagacgtttcttg

SEQ ID NO: 239906 - DNA, 30 bp, Artificial Sequence
  Synthetic oligonucleotide
atccggatcccactatgtttcataaagttg

SEQ ID NO: 239907 - DNA, 30 bp, Artificial Sequence
  Synthetic oligonucleotide
tgatttgagtgaaaagtattggtaaagttg

SEQ ID NO: 239908 - DNA, 30 bp, Artificial Sequence
  Synthetic oligonucleotide
aatttgcagggtgtaagataacacaagttg

SEQ ID NO: 239909 - DNA, 30 bp, Artificial Sequence
  Synthetic oligonucleotide
aattagctcaatggagagttagccaagttg

SEQ ID NO: 239910 - DNA, 30 bp, Artificial Sequence
  Synthetic oligonucleotide
actggctcactgtctcgtccacataagttg

SEQ ID NO: 239911 - DNA, 30 bp, Artificial Sequence
  Synthetic oligonucleotide
gtattcaagaccgttgtgggtcaacagttg

SEQ ID NO: 239912 - DNA, 30 bp, Artificial Sequence
  Synthetic oligonucleotide
caaaacaacacagctatctacggacagttg

SEQ ID NO: 239913 - DNA, 30 bp, Artificial Sequence
  Synthetic oligonucleotide
ttcctataacggagagcgaggggacagttg

SEQ ID NO: 239914 - DNA, 30 bp, Artificial Sequence
  Synthetic oligonucleotide
caggggtgcggggcctaacgtggacagttg

SEQ ID NO: 239915 - DNA, 30 bp, Artificial Sequence
  Synthetic oligonucleotide
catcatcacgagttgccgacgcgccagttg

SEQ ID NO: 239916 - DNA, 30 bp, Artificial Sequence
  Synthetic oligonucleotide
aacacggacattggcgacaatttccagttg

SEQ ID NO: 239917 - DNA, 30 bp, Artificial Sequence
  Synthetic oligonucleotide
ccaggacacgagcgtcttttgaagcagttg

SEQ ID NO: 239918 - DNA, 30 bp, Artificial Sequence
  Synthetic oligonucleotide
gcaacggggcgtataccgtcttcgcagttg

SEQ ID NO: 239919 - DNA, 30 bp, Artificial Sequence
  Synthetic oligonucleotide
tcaggtcttcattcttgcttcctgcagttg

SEQ ID NO: 239920 - DNA, 30 bp, Artificial Sequence
  Synthetic oligonucleotide
tccctcagcaagaaagctgagaatcagttg

SEQ ID NO: 239921 - DNA, 30 bp, Artificial Sequence
  Synthetic oligonucleotide
gtatgaggcacccgagctgcgtatcagttg

SEQ ID NO: 239922 - DNA, 30 bp, Artificial Sequence
  Synthetic oligonucleotide
tatcaacgtcttatctggaggtacgagttg

SEQ ID NO: 239923 - DNA, 30 bp, Artificial Sequence
  Synthetic oligonucleotide
aacacatatactaccgactattcggagttg

SEQ ID NO: 239924 - DNA, 30 bp, Artificial Sequence
  Synthetic oligonucleotide
gaagtgcttatgacgacaagtaatgagttg

SEQ ID NO: 239925 - DNA, 30 bp, Artificial Sequence
  Synthetic oligonucleotide
gatttggggccggtgcatatcgatgagttg

SEQ ID NO: 239926 - DNA, 30 bp, Artificial Sequence
  Synthetic oligonucleotide
tctgtcagtgcggcaaggagttttgagttg

SEQ ID NO: 239927 - DNA, 30 bp, Artificial Sequence
  Synthetic oligonucleotide
agaagcctagctcatttattggaatagttg

SEQ ID NO: 239928 - DNA, 30 bp, Artificial Sequence
  Synthetic oligonucleotide
ccgacttctggataagatgatacctagttg

SEQ ID NO: 239929 - DNA, 30 bp, Artificial Sequence
  Synthetic oligonucleotide
gccagtttacccgaatgccaaacgtagttg

SEQ ID NO: 239930 - DNA, 30 bp, Artificial Sequence
  Synthetic oligonucleotide
cgttcgaaaaaagaacgaggtacgtagttg

SEQ ID NO: 239931 - DNA, 30 bp, Artificial Sequence
  Synthetic oligonucleotide
ataacccctcgttacgtggacgggtagttg

SEQ ID NO: 239932 - DNA, 30 bp, Artificial Sequence
  Synthetic oligonucleotide
ccagtagcccggcaatcgacactttagttg

SEQ ID NO: 239933 - DNA, 30 bp, Artificial Sequence
  Synthetic oligonucleotide
aaaaaatgcaaaacgatgaatctttagttg

SEQ ID NO: 239934 - DNA, 30 bp, Artificial Sequence
  Synthetic oligonucleotide
cctacaccgatataactgatggtttagttg

SEQ ID NO: 239935 - DNA, 30 bp, Artificial Sequence
  Synthetic oligonucleotide
catttcgtgtcgtgcttcccaacaacgttg

SEQ ID NO: 239936 - DNA, 30 bp, Artificial Sequence
  Synthetic oligonucleotide
tatgacattcggctcggcggcgacacgttg

SEQ ID NO: 239937 - DNA, 30 bp, Artificial Sequence
  Synthetic oligonucleotide
acactgtgaggatcctagtacacgacgttg

SEQ ID NO: 239938 - DNA, 30 bp, Artificial Sequence
  Synthetic oligonucleotide
gaagtattggatagtgcgttaccgacgttg

SEQ ID NO: 239939 - DNA, 30 bp, Artificial Sequence
  Synthetic oligonucleotide
gttatggaatggcttgaccttactacgttg

SEQ ID NO: 239940 - DNA, 30 bp, Artificial Sequence
  Synthetic oligonucleotide
gaaacgcctcggttgaacgttactacgttg

SEQ ID NO: 239941 - DNA, 30 bp, Artificial Sequence
  Synthetic oligonucleotide
ggcgagatctttccagttattgaaccgttg

SEQ ID NO: 239942 - DNA, 30 bp, Artificial Sequence
  Synthetic oligonucleotide
tggccagcgagtacctgtaatataccgttg

SEQ ID NO: 239943 - DNA, 30 bp, Artificial Sequence
  Synthetic oligonucleotide
gaaacgacccgaggatatcgtataccgttg

SEQ ID NO: 239944 - DNA, 30 bp, Artificial Sequence
  Synthetic oligonucleotide
tgtgagggacagagcagaggcctgccgttg

SEQ ID NO: 239945 - DNA, 30 bp, Artificial Sequence
  Synthetic oligonucleotide
ataagtttattagtacccgcaaatccgttg

SEQ ID NO: 239946 - DNA, 30 bp, Artificial Sequence
  Synthetic oligonucleotide
cttcggtcgccagcgagtagtggtccgttg

SEQ ID NO: 239947 - DNA, 30 bp, Artificial Sequence
  Synthetic oligonucleotide
gcactagttgtagaagatctacttccgttg

SEQ ID NO: 239948 - DNA, 30 bp, Artificial Sequence
  Synthetic oligonucleotide
acccattgcgtttttcacttcgttccgttg

SEQ ID NO: 239949 - DNA, 30 bp, Artificial Sequence
  Synthetic oligonucleotide
tcgggaacgtttaagtgttctagtgcgttg

SEQ ID NO: 239950 - DNA, 30 bp, Artificial Sequence
  Synthetic oligonucleotide
tgagccacagctcgacgtgggacatcgttg

SEQ ID NO: 239951 - DNA, 30 bp, Artificial Sequence
  Synthetic oligonucleotide
ctaatacacgatcaacggggctactcgttg

SEQ ID NO: 239952 - DNA, 30 bp, Artificial Sequence
  Synthetic oligonucleotide
tgaaaaccggcgatgggactctaaaggttg

SEQ ID NO: 239953 - DNA, 30 bp, Artificial Sequence
  Synthetic oligonucleotide
tacaattgcccatctcgggcagtgaggttg

SEQ ID NO: 239954 - DNA, 30 bp, Artificial Sequence
  Synthetic oligonucleotide
cgtttattggatacacatatgaataggttg

SEQ ID NO: 239955 - DNA, 30 bp, Artificial Sequence
  Synthetic oligonucleotide
ttgtacttggcagtggcggcccagcggttg

SEQ ID NO: 239956 - DNA, 30 bp, Artificial Sequence
  Synthetic oligonucleotide
tatttgggcacaggcataactcagcggttg

SEQ ID NO: 239957 - DNA, 30 bp, Artificial Sequence
  Synthetic oligonucleotide
catagaatggtggacccgtaactgcggttg

SEQ ID NO: 239958 - DNA, 30 bp, Artificial Sequence
  Synthetic oligonucleotide
gtatgagggctaccgaggggagctcggttg

SEQ ID NO: 239959 - DNA, 30 bp, Artificial Sequence
  Synthetic oligonucleotide
gggcgaccgtgcgtactaagaacagggttg

SEQ ID NO: 239960 - DNA, 30 bp, Artificial Sequence
  Synthetic oligonucleotide
aatcgacaggaatgacccaccgcagggttg

SEQ ID NO: 239961 - DNA, 30 bp, Artificial Sequence
  Synthetic oligonucleotide
tcgcttatttagatgaacgtaaacgggttg

SEQ ID NO: 239962 - DNA, 30 bp, Artificial Sequence
  Synthetic oligonucleotide
ctggcccgggaagtagaacccgtggggttg

SEQ ID NO: 239963 - DNA, 30 bp, Artificial Sequence
  Synthetic oligonucleotide
tcggttgtaaaggggctctcggctgggttg

SEQ ID NO: 239964 - DNA, 30 bp, Artificial Sequence
  Synthetic oligonucleotide
ttcaagcactgtctcgtcgaaggtgggttg

SEQ ID NO: 239965 - DNA, 30 bp, Artificial Sequence
  Synthetic oligonucleotide
catatagtaacacaaattggggtttggttg

SEQ ID NO: 239966 - DNA, 30 bp, Artificial Sequence
  Synthetic oligonucleotide
cttctatttgagggtcgaggacacatgttg

SEQ ID NO: 239967 - DNA, 30 bp, Artificial Sequence
  Synthetic oligonucleotide
atttagtgtgttggggggctctgcatgttg

SEQ ID NO: 239968 - DNA, 30 bp, Artificial Sequence
  Synthetic oligonucleotide
cttatgccctctggatccgctaaactgttg

SEQ ID NO: 239969 - DNA, 30 bp, Artificial Sequence
  Synthetic oligonucleotide
gtaaagtggatataactcttccagctgttg

SEQ ID NO: 239970 - DNA, 30 bp, Artificial Sequence
  Synthetic oligonucleotide
aaggtatgcccgcgaactgctgcgctgttg

SEQ ID NO: 239971 - DNA, 30 bp, Artificial Sequence
  Synthetic oligonucleotide
taatcaaagggtgtaggatagatgctgttg

SEQ ID NO: 239972 - DNA, 30 bp, Artificial Sequence
  Synthetic oligonucleotide
tctttgatttgaacgaatggccgtctgttg

SEQ ID NO: 239973 - DNA, 30 bp, Artificial Sequence
  Synthetic oligonucleotide
gctataatccggcagacccctgcagtgttg

SEQ ID NO: 239974 - DNA, 30 bp, Artificial Sequence
  Synthetic oligonucleotide
ggtcgttctcaaacgagcgtacaggtgttg

SEQ ID NO: 239975 - DNA, 30 bp, Artificial Sequence
  Synthetic oligonucleotide
acagacggactccctgctcgtcaggtgttg

SEQ ID NO: 239976 - DNA, 30 bp, Artificial Sequence
  Synthetic oligonucleotide
ggaggctgtcgcccgcgggcagcattgttg

SEQ ID NO: 239977 - DNA, 30 bp, Artificial Sequence
  Synthetic oligonucleotide
ggcacctggcctggagccttgcgcttgttg

SEQ ID NO: 239978 - DNA, 30 bp, Artificial Sequence
  Synthetic oligonucleotide
aatgacacaccgagccttaaaacgttgttg

SEQ ID NO: 239979 - DNA, 30 bp, Artificial Sequence
  Synthetic oligonucleotide
cggtagagagtggcgcttttgtcgttgttg

SEQ ID NO: 239980 - DNA, 30 bp, Artificial Sequence
  Synthetic oligonucleotide
ctgaggcaacgccgctttgtaatgttgttg

SEQ ID NO: 239981 - DNA, 30 bp, Artificial Sequence
  Synthetic oligonucleotide
tatagtcgaccgttagagaagtctttgttg

SEQ ID NO: 239982 - DNA, 30 bp, Artificial Sequence
  Synthetic oligonucleotide
cagcgccaatcgcgtaccctagaaaatttg

SEQ ID NO: 239983 - DNA, 30 bp, Artificial Sequence
  Synthetic oligonucleotide
aggcagcaatctcggtagtacctaaatttg

SEQ ID NO: 239984 - DNA, 30 bp, Artificial Sequence
  Synthetic oligonucleotide
ttgcggtgcctcgactgggggtccaatttg

SEQ ID NO: 239985 - DNA, 30 bp, Artificial Sequence
  Synthetic oligonucleotide
taactcatactccctggacttgcgaatttg

SEQ ID NO: 239986 - DNA, 30 bp, Artificial Sequence
  Synthetic oligonucleotide
ccctcgcggggctcgtgaatcgagcatttg

SEQ ID NO: 239987 - DNA, 30 bp, Artificial Sequence
  Synthetic oligonucleotide
acttaacgaaaaatgattgatgagcatttg

SEQ ID NO: 239988 - DNA, 30 bp, Artificial Sequence
  Synthetic oligonucleotide
tgcaatacgcgtttcaacgatcggcatttg

SEQ ID NO: 239989 - DNA, 30 bp, Artificial Sequence
  Synthetic oligonucleotide
tcacagcgccatctcttattgcgcgatttg

SEQ ID NO: 239990 - DNA, 30 bp, Artificial Sequence
  Synthetic oligonucleotide
gaaataaaaacctgggtgagtcgcgatttg

SEQ ID NO: 239991 - DNA, 30 bp, Artificial Sequence
  Synthetic oligonucleotide
cgggtacaggcaaagcctacccgggatttg

SEQ ID NO: 239992 - DNA, 30 bp, Artificial Sequence
  Synthetic oligonucleotide
tcatgccccgttaaggttgaaaatgatttg

SEQ ID NO: 239993 - DNA, 30 bp, Artificial Sequence
  Synthetic oligonucleotide
gctaatctgatcgtaaaataaagtgatttg

SEQ ID NO: 239994 - DNA, 30 bp, Artificial Sequence
  Synthetic oligonucleotide
gagacaaaaacgagaacctggaaatatttg

SEQ ID NO: 239995 - DNA, 30 bp, Artificial Sequence
  Synthetic oligonucleotide
cataagatacggggggggcttaaatatttg

SEQ ID NO: 239996 - DNA, 30 bp, Artificial Sequence
  Synthetic oligonucleotide
accgtcgctcacctggatattacctatttg

SEQ ID NO: 239997 - DNA, 30 bp, Artificial Sequence
  Synthetic oligonucleotide
ccacacgtccatacggctatctcctatttg

SEQ ID NO: 239998 - DNA, 30 bp, Artificial Sequence
  Synthetic oligonucleotide
cgttacctcctacacacgattgtctatttg

SEQ ID NO: 239999 - DNA, 30 bp, Artificial Sequence
  Synthetic oligonucleotide
cggctaacttgaatataggcacggtatttg

SEQ ID NO: 240000 - DNA, 30 bp, Artificial Sequence
  Synthetic oligonucleotide
aggccttcagagcgacacttggattatttg

SEQ ID NO: 240001 - DNA, 30 bp, Artificial Sequence
  Synthetic oligonucleotide
cgaattcggcttatgtacggaacttatttg

SEQ ID NO: 240002 - DNA, 30 bp, Artificial Sequence
  Synthetic oligonucleotide
ggttgaacgtttatttatgccggttatttg

SEQ ID NO: 240003 - DNA, 30 bp, Artificial Sequence
  Synthetic oligonucleotide
tataatgctgtcttcagaacggaaactttg

SEQ ID NO: 240004 - DNA, 30 bp, Artificial Sequence
  Synthetic oligonucleotide
agatgtttggccgtattccacgcaactttg

SEQ ID NO: 240005 - DNA, 30 bp, Artificial Sequence
  Synthetic oligonucleotide
ctcgcgtggaccgatattggccagactttg

SEQ ID NO: 240006 - DNA, 30 bp, Artificial Sequence
  Synthetic oligonucleotide
agggggtaaggtggtactcgtcatactttg

SEQ ID NO: 240007 - DNA, 30 bp, Artificial Sequence
  Synthetic oligonucleotide
tgggcgacatattgctaaaacagacctttg

SEQ ID NO: 240008 - DNA, 30 bp, Artificial Sequence
  Synthetic oligonucleotide
attgcctgacgaagcatctcccagcctttg

SEQ ID NO: 240009 - DNA, 30 bp, Artificial Sequence
  Synthetic oligonucleotide
gaagtcgcgcatcataaaccatcgcctttg

SEQ ID NO: 240010 - DNA, 30 bp, Artificial Sequence
  Synthetic oligonucleotide
ctcgtgctctatagctaggtgtatcctttg

SEQ ID NO: 240011 - DNA, 30 bp, Artificial Sequence
  Synthetic oligonucleotide
cttgtcagaatacgtatatatgctcctttg

SEQ ID NO: 240012 - DNA, 30 bp, Artificial Sequence
  Synthetic oligonucleotide
cgaggtcgtaaaacaatgggaagtcctttg

SEQ ID NO: 240013 - DNA, 30 bp, Artificial Sequence
  Synthetic oligonucleotide
atcagcctctcattggaaagccgggctttg

SEQ ID NO: 240014 - DNA, 30 bp, Artificial Sequence
  Synthetic oligonucleotide
ggttgttgccgggtcagtcattatgctttg

SEQ ID NO: 240015 - DNA, 30 bp, Artificial Sequence
  Synthetic oligonucleotide
atgatgccccgggctttcgagtctgctttg

SEQ ID NO: 240016 - DNA, 30 bp, Artificial Sequence
  Synthetic oligonucleotide
taattgttgaccagtcaggtgtgctctttg

SEQ ID NO: 240017 - DNA, 30 bp, Artificial Sequence
  Synthetic oligonucleotide
cgagctattctggaagagtgaatctctttg

SEQ ID NO: 240018 - DNA, 30 bp, Artificial Sequence
  Synthetic oligonucleotide
tagtaccgtatgtaaattatcgtctctttg

SEQ ID NO: 240019 - DNA, 30 bp, Artificial Sequence
  Synthetic oligonucleotide
acggactccgagggggactctataagtttg

SEQ ID NO: 240020 - DNA, 30 bp, Artificial Sequence
  Synthetic oligonucleotide
aagtattcctattgaaacatgttaagtttg

SEQ ID NO: 240021 - DNA, 30 bp, Artificial Sequence
  Synthetic oligonucleotide
gagttaagcatagcaatacgtaacagtttg

SEQ ID NO: 240022 - DNA, 30 bp, Artificial Sequence
  Synthetic oligonucleotide
agaggtagggtctgagccttatacagtttg

SEQ ID NO: 240023 - DNA, 30 bp, Artificial Sequence
  Synthetic oligonucleotide
gacactctaagttagtcatcagcgagtttg

SEQ ID NO: 240024 - DNA, 30 bp, Artificial Sequence
  Synthetic oligonucleotide
gggcgagactcaggattgaaggtgagtttg

SEQ ID NO: 240025 - DNA, 30 bp, Artificial Sequence
  Synthetic oligonucleotide
gtatggaattgttcggctcaacatagtttg

SEQ ID NO: 240026 - DNA, 30 bp, Artificial Sequence
  Synthetic oligonucleotide
gcgtgtccaacgccagtagcaccacgtttg

SEQ ID NO: 240027 - DNA, 30 bp, Artificial Sequence
  Synthetic oligonucleotide
actcagggaaagatacgttccgcccgtttg

SEQ ID NO: 240028 - DNA, 30 bp, Artificial Sequence
  Synthetic oligonucleotide
ggtgtaccgtccctactacccattcgtttg

SEQ ID NO: 240029 - DNA, 30 bp, Artificial Sequence
  Synthetic oligonucleotide
gactccgtatgcctctgtgtggaaggtttg

SEQ ID NO: 240030 - DNA, 30 bp, Artificial Sequence
  Synthetic oligonucleotide
ggagggaaacggggaagggcgcgcggtttg

SEQ ID NO: 240031 - DNA, 30 bp, Artificial Sequence
  Synthetic oligonucleotide
gacttctgctggtagatatgtccgggtttg

SEQ ID NO: 240032 - DNA, 30 bp, Artificial Sequence
  Synthetic oligonucleotide
tctactgtgttaactgagcagaggggtttg

SEQ ID NO: 240033 - DNA, 30 bp, Artificial Sequence
  Synthetic oligonucleotide
aggattctcataccagggctccgatgtttg

SEQ ID NO: 240034 - DNA, 30 bp, Artificial Sequence
  Synthetic oligonucleotide
actgtatagcacgcgtgctaaatctgtttg

SEQ ID NO: 240035 - DNA, 30 bp, Artificial Sequence
  Synthetic oligonucleotide
gtgcacgggaacgtactctatcagtgtttg

SEQ ID NO: 240036 - DNA, 30 bp, Artificial Sequence
  Synthetic oligonucleotide
attctaaggcaaccggagacgttgtgtttg

SEQ ID NO: 240037 - DNA, 30 bp, Artificial Sequence
  Synthetic oligonucleotide
ccctagggcaagacatacgagtattgtttg

SEQ ID NO: 240038 - DNA, 30 bp, Artificial Sequence
  Synthetic oligonucleotide
tgttaataagtaattgtgttcgcttgtttg

SEQ ID NO: 240039 - DNA, 30 bp, Artificial Sequence
  Synthetic oligonucleotide
attggactacaaaaggaccgactgattttg

SEQ ID NO: 240040 - DNA, 30 bp, Artificial Sequence
  Synthetic oligonucleotide
caagcggttctagcgtgaccatagcttttg

SEQ ID NO: 240041 - DNA, 30 bp, Artificial Sequence
  Synthetic oligonucleotide
catttaacatataccaaaggaaatcttttg

SEQ ID NO: 240042 - DNA, 30 bp, Artificial Sequence
  Synthetic oligonucleotide
ttgcaggcaaaggttaagtgcaatcttttg

SEQ ID NO: 240043 - DNA, 30 bp, Artificial Sequence
  Synthetic oligonucleotide
agaactccgtggacgtgtaagggagttttg

SEQ ID NO: 240044 - DNA, 30 bp, Artificial Sequence
  Synthetic oligonucleotide
gcaggattagtaccaatagacgtggttttg

SEQ ID NO: 240045 - DNA, 30 bp, Artificial Sequence
  Synthetic oligonucleotide
gagagggccgtatacgcggatggtgttttg

SEQ ID NO: 240046 - DNA, 30 bp, Artificial Sequence
  Synthetic oligonucleotide
cggcgcgacaccagtaccgttgactttttg

SEQ ID NO: 240047 - DNA, 30 bp, Artificial Sequence
  Synthetic oligonucleotide
gatatgatgaagatggaagggtaaaaaaat

SEQ ID NO: 240048 - DNA, 30 bp, Artificial Sequence
  Synthetic oligonucleotide
ggacaagtttaacggtagtaggcaaaaaat

SEQ ID NO: 240049 - DNA, 30 bp, Artificial Sequence
  Synthetic oligonucleotide
cttcaggatcttgggtggcgtgacaaaaat

SEQ ID NO: 240050 - DNA, 30 bp, Artificial Sequence
  Synthetic oligonucleotide
aaagtcaactgacatgacgttggcaaaaat

SEQ ID NO: 240051 - DNA, 30 bp, Artificial Sequence
  Synthetic oligonucleotide
aatatcccgcgactcttttcactcaaaaat

SEQ ID NO: 240052 - DNA, 30 bp, Artificial Sequence
  Synthetic oligonucleotide
aaatcgtgacaaggatcattgacgaaaaat

SEQ ID NO: 240053 - DNA, 30 bp, Artificial Sequence
  Synthetic oligonucleotide
agttgtagggagatctgacgcgggaaaaat

SEQ ID NO: 240054 - DNA, 30 bp, Artificial Sequence
  Synthetic oligonucleotide
tgtaagaagagctacagcacttggaaaaat

SEQ ID NO: 240055 - DNA, 30 bp, Artificial Sequence
  Synthetic oligonucleotide
acgactgtccggcggccacctctgaaaaat

SEQ ID NO: 240056 - DNA, 30 bp, Artificial Sequence
  Synthetic oligonucleotide
taaacaaggcgcgatagcgtggtgaaaaat

SEQ ID NO: 240057 - DNA, 30 bp, Artificial Sequence
  Synthetic oligonucleotide
gtacgatttcgctagacacctggtaaaaat

SEQ ID NO: 240058 - DNA, 30 bp, Artificial Sequence
  Synthetic oligonucleotide
aggcttccaacgggttgcataattaaaaat

SEQ ID NO: 240059 - DNA, 30 bp, Artificial Sequence
  Synthetic oligonucleotide
ctacgaaacagatcagaagacgttaaaaat

SEQ ID NO: 240060 - DNA, 30 bp, Artificial Sequence
  Synthetic oligonucleotide
cgtgtaatagttcgcatgttttaacaaaat

SEQ ID NO: 240061 - DNA, 30 bp, Artificial Sequence
  Synthetic oligonucleotide
cacttaagtagtagtcatcaaagacaaaat

SEQ ID NO: 240062 - DNA, 30 bp, Artificial Sequence
  Synthetic oligonucleotide
ggagaagacacgctgagcccaagacaaaat

SEQ ID NO: 240063 - DNA, 30 bp, Artificial Sequence
  Synthetic oligonucleotide
gataattaaattgcaaggactatccaaaat

SEQ ID NO: 240064 - DNA, 30 bp, Artificial Sequence
  Synthetic oligonucleotide
tggcagccaccgaaagcgtgtttccaaaat

SEQ ID NO: 240065 - DNA, 30 bp, Artificial Sequence
  Synthetic oligonucleotide
tacagattcgacacggacctgtggcaaaat

SEQ ID NO: 240066 - DNA, 30 bp, Artificial Sequence
  Synthetic oligonucleotide
acgggaccatagagtcgaacacatcaaaat

SEQ ID NO: 240067 - DNA, 30 bp, Artificial Sequence
  Synthetic oligonucleotide
accctgaccataatgggacttcctcaaaat

SEQ ID NO: 240068 - DNA, 30 bp, Artificial Sequence
  Synthetic oligonucleotide
cactgtatcgatcgggtacagtctcaaaat

SEQ ID NO: 240069 - DNA, 30 bp, Artificial Sequence
  Synthetic oligonucleotide
tgattcctggtaaaataaagaacagaaaat

SEQ ID NO: 240070 - DNA, 30 bp, Artificial Sequence
  Synthetic oligonucleotide
taatgctcagctgtgaggatgagcgaaaat

SEQ ID NO: 240071 - DNA, 30 bp, Artificial Sequence
  Synthetic oligonucleotide
cgaatgaacttaactgacagcaaggaaaat

SEQ ID NO: 240072 - DNA, 30 bp, Artificial Sequence
  Synthetic oligonucleotide
gtctgaacgctaccggcaatccatgaaaat

SEQ ID NO: 240073 - DNA, 30 bp, Artificial Sequence
  Synthetic oligonucleotide
gtaagagagagtgctagttcagaataaaat

SEQ ID NO: 240074 - DNA, 30 bp, Artificial Sequence
  Synthetic oligonucleotide
accaaagcaagttccgaagcactataaaat

SEQ ID NO: 240075 - DNA, 30 bp, Artificial Sequence
  Synthetic oligonucleotide
tttgcgaccggaacttcctggttataaaat

SEQ ID NO: 240076 - DNA, 30 bp, Artificial Sequence
  Synthetic oligonucleotide
gctgtcccatagagtgtatcatattaaaat

SEQ ID NO: 240077 - DNA, 30 bp, Artificial Sequence
  Synthetic oligonucleotide
agcgtctatggtctttgaagatgttaaaat

SEQ ID NO: 240078 - DNA, 30 bp, Artificial Sequence
  Synthetic oligonucleotide
attcggggcaccaaacgcatagtttaaaat

SEQ ID NO: 240079 - DNA, 30 bp, Artificial Sequence
  Synthetic oligonucleotide
tctttgcgccaacactggaaagtcacaaat

SEQ ID NO: 240080 - DNA, 30 bp, Artificial Sequence
  Synthetic oligonucleotide
atggttgcgttatgtggacttccgacaaat

SEQ ID NO: 240081 - DNA, 30 bp, Artificial Sequence
  Synthetic oligonucleotide
aaatgaatggagacagtggtggcaccaaat

SEQ ID NO: 240082 - DNA, 30 bp, Artificial Sequence
  Synthetic oligonucleotide
agagaactcggatccctggtcaccccaaat

SEQ ID NO: 240083 - DNA, 30 bp, Artificial Sequence
  Synthetic oligonucleotide
tcgagacacgacgggggtttaccagcaaat

SEQ ID NO: 240084 - DNA, 30 bp, Artificial Sequence
  Synthetic oligonucleotide
ccaaggaatctgtgtgtccgggcagcaaat

SEQ ID NO: 240085 - DNA, 30 bp, Artificial Sequence
  Synthetic oligonucleotide
ggcgaaatcatctgatgcttaagagcaaat

SEQ ID NO: 240086 - DNA, 30 bp, Artificial Sequence
  Synthetic oligonucleotide
ttgctacatcgtcgcacaaggggcgcaaat

SEQ ID NO: 240087 - DNA, 30 bp, Artificial Sequence
  Synthetic oligonucleotide
tggtataagtaccaccataggagctcaaat

SEQ ID NO: 240088 - DNA, 30 bp, Artificial Sequence
  Synthetic oligonucleotide
gatcgtaatctgactatacatagctcaaat

SEQ ID NO: 240089 - DNA, 30 bp, Artificial Sequence
  Synthetic oligonucleotide
tcccatagaggctcaacacccatctcaaat

SEQ ID NO: 240090 - DNA, 30 bp, Artificial Sequence
  Synthetic oligonucleotide
taaacgggtttcatgggcttagggtcaaat

SEQ ID NO: 240091 - DNA, 30 bp, Artificial Sequence
  Synthetic oligonucleotide
ttgaccgctgtacgaatctctgcttcaaat

SEQ ID NO: 240092 - DNA, 30 bp, Artificial Sequence
  Synthetic oligonucleotide
aggataatcattggacatctgaaaagaaat

SEQ ID NO: 240093 - DNA, 30 bp, Artificial Sequence
  Synthetic oligonucleotide
ggagatctacactgtccctagtgaagaaat

SEQ ID NO: 240094 - DNA, 30 bp, Artificial Sequence
  Synthetic oligonucleotide
cactggagtggaggcgcgtatataagaaat

SEQ ID NO: 240095 - DNA, 30 bp, Artificial Sequence
  Synthetic oligonucleotide
actggctcactgacaaagtacgtaagaaat

SEQ ID NO: 240096 - DNA, 30 bp, Artificial Sequence
  Synthetic oligonucleotide
taaagtagcatgataggatcatacagaaat

SEQ ID NO: 240097 - DNA, 30 bp, Artificial Sequence
  Synthetic oligonucleotide
aagaaagatacatgagaagaccatagaaat

SEQ ID NO: 240098 - DNA, 30 bp, Artificial Sequence
  Synthetic oligonucleotide
ccatcatccggtcccggagtgtatagaaat

SEQ ID NO: 240099 - DNA, 30 bp, Artificial Sequence
  Synthetic oligonucleotide
aatgtaatttgatatataaagactagaaat

SEQ ID NO: 240100 - DNA, 30 bp, Artificial Sequence
  Synthetic oligonucleotide
aaacattccgtaggttaagcatctagaaat

SEQ ID NO: 240101 - DNA, 30 bp, Artificial Sequence
  Synthetic oligonucleotide
cttctaataatgtccacagtgcttagaaat

SEQ ID NO: 240102 - DNA, 30 bp, Artificial Sequence
  Synthetic oligonucleotide
ttgacagcgccattgcacgaagtacgaaat

SEQ ID NO: 240103 - DNA, 30 bp, Artificial Sequence
  Synthetic oligonucleotide
cgagcaagctatgttcttgttgtgcgaaat

SEQ ID NO: 240104 - DNA, 30 bp, Artificial Sequence
  Synthetic oligonucleotide
acatactaggtctcaatctagtttcgaaat

SEQ ID NO: 240105 - DNA, 30 bp, Artificial Sequence
  Synthetic oligonucleotide
cataaaatgataacgtaattttcaggaaat

SEQ ID NO: 240106 - DNA, 31 bp, Artificial Sequence
  Synthetic oligonucleotide
cgagcagaatttattacacttatgaggaaat

SEQ ID NO: 240107 - DNA, 30 bp, Artificial Sequence
  Synthetic oligonucleotide
gacggtttacgagcatgtgagataggaaat

SEQ ID NO: 240108 - DNA, 30 bp, Artificial Sequence
  Synthetic oligonucleotide
tcccaatcatgtggccaaccgctaggaaat

SEQ ID NO: 240109 - DNA, 30 bp, Artificial Sequence
  Synthetic oligonucleotide
atgggcgcctccgggactccgttaggaaat

SEQ ID NO: 240110 - DNA, 30 bp, Artificial Sequence
  Synthetic oligonucleotide
tagatacgtgtgctaaagtcgcccggaaat

SEQ ID NO: 240111 - DNA, 30 bp, Artificial Sequence
  Synthetic oligonucleotide
ttgcgattacagaagtaaaattgcggaaat

SEQ ID NO: 240112 - DNA, 30 bp, Artificial Sequence
  Synthetic oligonucleotide
gttgccgatcagcgggatcaagagggaaat

SEQ ID NO: 240113 - DNA, 30 bp, Artificial Sequence
  Synthetic oligonucleotide
gtttagtcggtcagaagaccttagggaaat

SEQ ID NO: 240114 - DNA, 30 bp, Artificial Sequence
  Synthetic oligonucleotide
acagcggtagtcacggaatacactggaaat

SEQ ID NO: 240115 - DNA, 30 bp, Artificial Sequence
  Synthetic oligonucleotide
ggttacaagtctgtttacgatttatgaaat

SEQ ID NO: 240116 - DNA, 30 bp, Artificial Sequence
  Synthetic oligonucleotide
aggtgtctgaacataccgtcaaactgaaat

SEQ ID NO: 240117 - DNA, 30 bp, Artificial Sequence
  Synthetic oligonucleotide
ctagcgaatgataccggattctcctgaaat

SEQ ID NO: 240118 - DNA, 30 bp, Artificial Sequence
  Synthetic oligonucleotide
aaggagacaacacgcagtcaccccataaat

SEQ ID NO: 240119 - DNA, 30 bp, Artificial Sequence
  Synthetic oligonucleotide
gatcatcaatagcagttcagtagcataaat

SEQ ID NO: 240120 - DNA, 30 bp, Artificial Sequence
  Synthetic oligonucleotide
ctcaaggtttaacggcgcgacgtcataaat

SEQ ID NO: 240121 - DNA, 30 bp, Artificial Sequence
  Synthetic oligonucleotide
aagtatgcaaggccgacactacggataaat

SEQ ID NO: 240122 - DNA, 30 bp, Artificial Sequence
  Synthetic oligonucleotide
gagacgtttcacactgctttgtaactaaat

SEQ ID NO: 240123 - DNA, 30 bp, Artificial Sequence
  Synthetic oligonucleotide
gttgctacagatgaaattctttgactaaat

SEQ ID NO: 240124 - DNA, 30 bp, Artificial Sequence
  Synthetic oligonucleotide
agttgtcgaagcacacatgtatacctaaat

SEQ ID NO: 240125 - DNA, 30 bp, Artificial Sequence
  Synthetic oligonucleotide
ttgtcgtattcaaacttagtggcgctaaat

SEQ ID NO: 240126 - DNA, 30 bp, Artificial Sequence
  Synthetic oligonucleotide
cacgcaaaattaggtgcggagagtctaaat

SEQ ID NO: 240127 - DNA, 30 bp, Artificial Sequence
  Synthetic oligonucleotide
gttcctaatctagataaagagcaggtaaat

SEQ ID NO: 240128 - DNA, 30 bp, Artificial Sequence
  Synthetic oligonucleotide
tggacgtacacaacctccgaagcggtaaat

SEQ ID NO: 240129 - DNA, 30 bp, Artificial Sequence
  Synthetic oligonucleotide
tccgtggaccaagtgggattgggggtaaat

SEQ ID NO: 240130 - DNA, 30 bp, Artificial Sequence
  Synthetic oligonucleotide
agattaaaacaatggacaaaatgggtaaat

SEQ ID NO: 240131 - DNA, 30 bp, Artificial Sequence
  Synthetic oligonucleotide
actcagaacgcggtagcagtcagtgtaaat

SEQ ID NO: 240132 - DNA, 31 bp, Artificial Sequence
  Synthetic oligonucleotide
gaggatacccatgggagcaaattttgtaaat

SEQ ID NO: 240133 - DNA, 30 bp, Artificial Sequence
  Synthetic oligonucleotide
tcgccgcgggagggtccttgtcacttaaat

SEQ ID NO: 240134 - DNA, 30 bp, Artificial Sequence
  Synthetic oligonucleotide
gtaccccagaagcctactgggcagttaaat

SEQ ID NO: 240135 - DNA, 30 bp, Artificial Sequence
  Synthetic oligonucleotide
ccactaatgtattacggctacccgttaaat

SEQ ID NO: 240136 - DNA, 30 bp, Artificial Sequence
  Synthetic oligonucleotide
ggtaggatagttcctccggcattgttaaat

SEQ ID NO: 240137 - DNA, 30 bp, Artificial Sequence
  Synthetic oligonucleotide
gccaaggttttgaacataccggcgaacaat

SEQ ID NO: 240138 - DNA, 30 bp, Artificial Sequence
  Synthetic oligonucleotide
tcgaccggtatgtgctcttctaggaacaat

SEQ ID NO: 240139 - DNA, 30 bp, Artificial Sequence
  Synthetic oligonucleotide
tctcgtgaaacgtattaggaagtgaacaat

SEQ ID NO: 240140 - DNA, 30 bp, Artificial Sequence
  Synthetic oligonucleotide
ttaactgccgggtatcctgatttgaacaat

SEQ ID NO: 240141 - DNA, 30 bp, Artificial Sequence
  Synthetic oligonucleotide
attagttcacgctttcgtaggttacacaat

SEQ ID NO: 240142 - DNA, 30 bp, Artificial Sequence
  Synthetic oligonucleotide
taacacgcgtcgagtaaacacacccacaat

SEQ ID NO: 240143 - DNA, 30 bp, Artificial Sequence
  Synthetic oligonucleotide
gaggggttgaaagtcagttgaatccacaat

SEQ ID NO: 240144 - DNA, 30 bp, Artificial Sequence
  Synthetic oligonucleotide
ggacccgcgcgtacaggctttatccacaat

SEQ ID NO: 240145 - DNA, 30 bp, Artificial Sequence
  Synthetic oligonucleotide
ctgtcttcaaacactggtaggtatcacaat

SEQ ID NO: 240146 - DNA, 30 bp, Artificial Sequence
  Synthetic oligonucleotide
aattgaaccaggctcgcagtacaggacaat

SEQ ID NO: 240147 - DNA, 30 bp, Artificial Sequence
  Synthetic oligonucleotide
gcggtaactgcccactctgcacatgacaat

SEQ ID NO: 240148 - DNA, 30 bp, Artificial Sequence
  Synthetic oligonucleotide
caatccctgtcacatggtctattgtacaat

SEQ ID NO: 240149 - DNA, 30 bp, Artificial Sequence
  Synthetic oligonucleotide
aactaaagcgttcatcgtccgttaaccaat

SEQ ID NO: 240150 - DNA, 30 bp, Artificial Sequence
  Synthetic oligonucleotide
cacgatacttgacccgcgttcatgaccaat

SEQ ID NO: 240151 - DNA, 30 bp, Artificial Sequence
  Synthetic oligonucleotide
ctaatggtaagcaagccgtagaataccaat

SEQ ID NO: 240152 - DNA, 30 bp, Artificial Sequence
  Synthetic oligonucleotide
ggcaactgaagggcaatggcagataccaat

SEQ ID NO: 240153 - DNA, 30 bp, Artificial Sequence
  Synthetic oligonucleotide
gtcgttatctgcaagtaaaccgaacccaat

SEQ ID NO: 240154 - DNA, 30 bp, Artificial Sequence
  Synthetic oligonucleotide
ggtactcctgcaggaaacccgagacccaat

SEQ ID NO: 240155 - DNA, 30 bp, Artificial Sequence
  Synthetic oligonucleotide
ggcatcaagggagtcaagccgtgacccaat

SEQ ID NO: 240156 - DNA, 30 bp, Artificial Sequence
  Synthetic oligonucleotide
agtatgacgtgatcaacaaggtgccccaat

SEQ ID NO: 240157 - DNA, 30 bp, Artificial Sequence
  Synthetic oligonucleotide
tgcgtgattcgccgtagtgcatctcccaat

SEQ ID NO: 240158 - DNA, 30 bp, Artificial Sequence
  Synthetic oligonucleotide
gtattcgaatgggcgtctcgtacagccaat

SEQ ID NO: 240159 - DNA, 30 bp, Artificial Sequence
  Synthetic oligonucleotide
aatctactcgaaggcccgactatagccaat

SEQ ID NO: 240160 - DNA, 30 bp, Artificial Sequence
  Synthetic oligonucleotide
atcacagtgtaggaaagacacttagccaat

SEQ ID NO: 240161 - DNA, 30 bp, Artificial Sequence
  Synthetic oligonucleotide
aggaggcagggccaaggtggttaggccaat

SEQ ID NO: 240162 - DNA, 30 bp, Artificial Sequence
  Synthetic oligonucleotide
gcattgcccggagagtgataggcggccaat

SEQ ID NO: 240163 - DNA, 30 bp, Artificial Sequence
  Synthetic oligonucleotide
gccggagttgaacgcgattgaggatccaat

SEQ ID NO: 240164 - DNA, 30 bp, Artificial Sequence
  Synthetic oligonucleotide
agttccgacggagggggatgtaagtccaat

SEQ ID NO: 240165 - DNA, 30 bp, Artificial Sequence
  Synthetic oligonucleotide
ggaaacgtgaatggggccaacgcgtccaat

SEQ ID NO: 240166 - DNA, 30 bp, Artificial Sequence
  Synthetic oligonucleotide
ccgccgaaaaagggaggaatactcagcaat

SEQ ID NO: 240167 - DNA, 30 bp, Artificial Sequence
  Synthetic oligonucleotide
catgcggcttgcgtaatatccactagcaat

SEQ ID NO: 240168 - DNA, 30 bp, Artificial Sequence
  Synthetic oligonucleotide
caatataggtcatatgaggggcttagcaat

SEQ ID NO: 240169 - DNA, 30 bp, Artificial Sequence
  Synthetic oligonucleotide
cggacgtgcagagcagaccagggtcgcaat

SEQ ID NO: 240170 - DNA, 30 bp, Artificial Sequence
  Synthetic oligonucleotide
tgatgtggtggtaattgaacataaggcaat

SEQ ID NO: 240171 - DNA, 30 bp, Artificial Sequence
  Synthetic oligonucleotide
cgagattttggttggttaatctaaggcaat

SEQ ID NO: 240172 - DNA, 30 bp, Artificial Sequence
  Synthetic oligonucleotide
gggttgtgtgtatgtccggaatctggcaat

SEQ ID NO: 240173 - DNA, 30 bp, Artificial Sequence
  Synthetic oligonucleotide
tcgaagggtcctttttatgtgagtggcaat

SEQ ID NO: 240174 - DNA, 30 bp, Artificial Sequence
  Synthetic oligonucleotide
ggctgcgcatgactcaagaaaagatgcaat

SEQ ID NO: 240175 - DNA, 30 bp, Artificial Sequence
  Synthetic oligonucleotide
gctgagtgtccagggtcttgcggatgcaat

SEQ ID NO: 240176 - DNA, 30 bp, Artificial Sequence
  Synthetic oligonucleotide
catccacacccgctaaataggtagtgcaat

SEQ ID NO: 240177 - DNA, 30 bp, Artificial Sequence
  Synthetic oligonucleotide
ccgttcaagagttatacatatttgtgcaat

SEQ ID NO: 240178 - DNA, 30 bp, Artificial Sequence
  Synthetic oligonucleotide
ccaggactattaaatggtgggcattgcaat

SEQ ID NO: 240179 - DNA, 30 bp, Artificial Sequence
  Synthetic oligonucleotide
gttatcagcgccatgtgaaatagaatcaat

SEQ ID NO: 240180 - DNA, 30 bp, Artificial Sequence
  Synthetic oligonucleotide
ttcggttgcagatctatcatcctaatcaat

SEQ ID NO: 240181 - DNA, 30 bp, Artificial Sequence
  Synthetic oligonucleotide
tacagccgggtattttatctcagcatcaat

SEQ ID NO: 240182 - DNA, 30 bp, Artificial Sequence
  Synthetic oligonucleotide
cataacaattgattgtaaacttcgatcaat

SEQ ID NO: 240183 - DNA, 30 bp, Artificial Sequence
  Synthetic oligonucleotide
ataagagggaacacaagcttccatatcaat

SEQ ID NO: 240184 - DNA, 30 bp, Artificial Sequence
  Synthetic oligonucleotide
ggaggacttatggctgttcgcgctatcaat

SEQ ID NO: 240185 - DNA, 30 bp, Artificial Sequence
  Synthetic oligonucleotide
gtacaagctaggaactttgcatttatcaat

SEQ ID NO: 240186 - DNA, 30 bp, Artificial Sequence
  Synthetic oligonucleotide
aggagttcgttgaagtctatcctgctcaat

SEQ ID NO: 240187 - DNA, 30 bp, Artificial Sequence
  Synthetic oligonucleotide
tacaactgcgtgtgcgtcggcattctcaat

SEQ ID NO: 240188 - DNA, 28 bp, Artificial Sequence
  Synthetic oligonucleotide
acgtgagccctctggagtcctcgtcaat

SEQ ID NO: 240189 - DNA, 30 bp, Artificial Sequence
  Synthetic oligonucleotide
aaaacagcgcgacactggtagttcgtcaat

SEQ ID NO: 240190 - DNA, 30 bp, Artificial Sequence
  Synthetic oligonucleotide
atggtatttggattagaaatgttggtcaat

SEQ ID NO: 240191 - DNA, 30 bp, Artificial Sequence
  Synthetic oligonucleotide
caaagcccacgctacttaaaatatgtcaat

SEQ ID NO: 240192 - DNA, 30 bp, Artificial Sequence
  Synthetic oligonucleotide
gaatatgtcatacgactagacgacttcaat

SEQ ID NO: 240193 - DNA, 30 bp, Artificial Sequence
  Synthetic oligonucleotide
cctgaaaagctatcggtgcatgcgttcaat

SEQ ID NO: 240194 - DNA, 30 bp, Artificial Sequence
  Synthetic oligonucleotide
ctaacatcaaggaatgtgaagagtttcaat

SEQ ID NO: 240195 - DNA, 30 bp, Artificial Sequence
  Synthetic oligonucleotide
attatagggcgccgaaaagtcaacaagaat

SEQ ID NO: 240196 - DNA, 30 bp, Artificial Sequence
  Synthetic oligonucleotide
tgttgaattacgacactcagtaacaagaat

SEQ ID NO: 240197 - DNA, 30 bp, Artificial Sequence
  Synthetic oligonucleotide
taaagcaagttgtgtcagccatgcaagaat

SEQ ID NO: 240198 - DNA, 30 bp, Artificial Sequence
  Synthetic oligonucleotide
gtaaaacattacatatttagcctcaagaat

SEQ ID NO: 240199 - DNA, 30 bp, Artificial Sequence
  Synthetic oligonucleotide
gagataacactgtgaaaaatttggaagaat

SEQ ID NO: 240200 - DNA, 30 bp, Artificial Sequence
  Synthetic oligonucleotide
atgattgtacgtcacaaactcctgaagaat

SEQ ID NO: 240201 - DNA, 30 bp, Artificial Sequence
  Synthetic oligonucleotide
aacctcggtaaacgatttatagtgaagaat

SEQ ID NO: 240202 - DNA, 30 bp, Artificial Sequence
  Synthetic oligonucleotide
cacggagtggtttgcaggagcacccagaat

SEQ ID NO: 240203 - DNA, 30 bp, Artificial Sequence
  Synthetic oligonucleotide
aagcaagggcggtaaaatttatgccagaat

SEQ ID NO: 240204 - DNA, 30 bp, Artificial Sequence
  Synthetic oligonucleotide
tggagaaaaacggtatgacgcttccagaat

SEQ ID NO: 240205 - DNA, 30 bp, Artificial Sequence
  Synthetic oligonucleotide
gaaaaagtgtgatccgctcaccaagagaat

SEQ ID NO: 240206 - DNA, 30 bp, Artificial Sequence
  Synthetic oligonucleotide
caaatcgactgcggccttaatccagagaat

SEQ ID NO: 240207 - DNA, 30 bp, Artificial Sequence
  Synthetic oligonucleotide
aaactcgatttacagaaggactcagagaat

SEQ ID NO: 240208 - DNA, 30 bp, Artificial Sequence
  Synthetic oligonucleotide
ccggcagtgggacttctggcttcagagaat

SEQ ID NO: 240209 - DNA, 30 bp, Artificial Sequence
  Synthetic oligonucleotide
cactactaggagtaacgagcatctgagaat

SEQ ID NO: 240210 - DNA, 30 bp, Artificial Sequence
  Synthetic oligonucleotide
ggtccggtccatcagggcccaggtgagaat

SEQ ID NO: 240211 - DNA, 30 bp, Artificial Sequence
  Synthetic oligonucleotide
ctaggcagagtaccgaactgcctatagaat

SEQ ID NO: 240212 - DNA, 30 bp, Artificial Sequence
  Synthetic oligonucleotide
gcgtcaggcgaagactatgcttcgtagaat

SEQ ID NO: 240213 - DNA, 30 bp, Artificial Sequence
  Synthetic oligonucleotide
ataacggttagtgcgcctcgttcgtagaat

SEQ ID NO: 240214 - DNA, 30 bp, Artificial Sequence
  Synthetic oligonucleotide
taagatgcgttagtctaggaatggtagaat

SEQ ID NO: 240215 - DNA, 30 bp, Artificial Sequence
  Synthetic oligonucleotide
aatactaaacactagctcctggattagaat

SEQ ID NO: 240216 - DNA, 30 bp, Artificial Sequence
  Synthetic oligonucleotide
ccaggctcatggagaaaacgcttttagaat

SEQ ID NO: 240217 - DNA, 30 bp, Artificial Sequence
  Synthetic oligonucleotide
ggttgtcgagattaatgcatttaaacgaat

SEQ ID NO: 240218 - DNA, 30 bp, Artificial Sequence
  Synthetic oligonucleotide
tcgagttggagcacgagtctgttcacgaat

SEQ ID NO: 240219 - DNA, 30 bp, Artificial Sequence
  Synthetic oligonucleotide
tctcccccatcgcgtggagtccaaccgaat

SEQ ID NO: 240220 - DNA, 30 bp, Artificial Sequence
  Synthetic oligonucleotide
tcctcggtcggaggctatatcgacccgaat

SEQ ID NO: 240221 - DNA, 30 bp, Artificial Sequence
  Synthetic oligonucleotide
ttggtaggtcgcctcttgcacggtccgaat

SEQ ID NO: 240222 - DNA, 30 bp, Artificial Sequence
  Synthetic oligonucleotide
cacacgtgtgaggtgggactggaagcgaat

SEQ ID NO: 240223 - DNA, 30 bp, Artificial Sequence
  Synthetic oligonucleotide
ggcgggtctaaatatgaaattcgcgcgaat

SEQ ID NO: 240224 - DNA, 30 bp, Artificial Sequence
  Synthetic oligonucleotide
actctgatctcggtgggtgcagtcgcgaat

SEQ ID NO: 240225 - DNA, 30 bp, Artificial Sequence
  Synthetic oligonucleotide
tgtttgctttgcatcctcggccaggcgaat

SEQ ID NO: 240226 - DNA, 30 bp, Artificial Sequence
  Synthetic oligonucleotide
agtattacggaaattatacaggaggcgaat

SEQ ID NO: 240227 - DNA, 30 bp, Artificial Sequence
  Synthetic oligonucleotide
gctaaaggagagagttgtatggaggcgaat

SEQ ID NO: 240228 - DNA, 30 bp, Artificial Sequence
  Synthetic oligonucleotide
ggaaacatgggttgtcgcaagtaggcgaat

SEQ ID NO: 240229 - DNA, 30 bp, Artificial Sequence
  Synthetic oligonucleotide
ggatctcgatctggcgggggagcggcgaat

SEQ ID NO: 240230 - DNA, 30 bp, Artificial Sequence
  Synthetic oligonucleotide
aattagaggtgggtgtcgcaccgggcgaat

SEQ ID NO: 240231 - DNA, 30 bp, Artificial Sequence
  Synthetic oligonucleotide
gaaaggtagtgtaacgttaggcgggcgaat

SEQ ID NO: 240232 - DNA, 30 bp, Artificial Sequence
  Synthetic oligonucleotide
gtatgcccgtcacggggtcatagctcgaat

SEQ ID NO: 240233 - DNA, 30 bp, Artificial Sequence
  Synthetic oligonucleotide
ctgaacatccagctgtcagagacaaggaat

SEQ ID NO: 240234 - DNA, 30 bp, Artificial Sequence
  Synthetic oligonucleotide
gctcggcgggtgcgccagtgggtaaggaat

SEQ ID NO: 240235 - DNA, 30 bp, Artificial Sequence
  Synthetic oligonucleotide
cacgattcgggagtcgccggatacaggaat

SEQ ID NO: 240236 - DNA, 30 bp, Artificial Sequence
  Synthetic oligonucleotide
cggcctaaggcgggcttcaataccaggaat

SEQ ID NO: 240237 - DNA, 30 bp, Artificial Sequence
  Synthetic oligonucleotide
aaaagcggttagaattgcaagagcaggaat

SEQ ID NO: 240238 - DNA, 30 bp, Artificial Sequence
  Synthetic oligonucleotide
tcgtggttcgcatcgcaaagttgcaggaat

SEQ ID NO: 240239 - DNA, 30 bp, Artificial Sequence
  Synthetic oligonucleotide
tggattgacattggtagcgtcatcaggaat

SEQ ID NO: 240240 - DNA, 30 bp, Artificial Sequence
  Synthetic oligonucleotide
cctgttctgctggagggatgtaagaggaat

SEQ ID NO: 240241 - DNA, 30 bp, Artificial Sequence
  Synthetic oligonucleotide
tagccatggaaagatacctttctgaggaat

SEQ ID NO: 240242 - DNA, 30 bp, Artificial Sequence
  Synthetic oligonucleotide
catattgaggagtaatagatattgaggaat

SEQ ID NO: 240243 - DNA, 30 bp, Artificial Sequence
  Synthetic oligonucleotide
cggccgcgtatggtttccaatagtaggaat

SEQ ID NO: 240244 - DNA, 30 bp, Artificial Sequence
  Synthetic oligonucleotide
gtacataggcttcaccgtcgttcacggaat

SEQ ID NO: 240245 - DNA, 30 bp, Artificial Sequence
  Synthetic oligonucleotide
tgaatactaaatgcattaatgggccggaat

SEQ ID NO: 240246 - DNA, 31 bp, Artificial Sequence
  Synthetic oligonucleotide
aacaaagaaaaactaagatttttagcggaat

SEQ ID NO: 240247 - DNA, 30 bp, Artificial Sequence
  Synthetic oligonucleotide
atttctgtcacaggggaagatcggcggaat

SEQ ID NO: 240248 - DNA, 30 bp, Artificial Sequence
  Synthetic oligonucleotide
aaccggacgcttataggtagccatcggaat

SEQ ID NO: 240249 - DNA, 30 bp, Artificial Sequence
  Synthetic oligonucleotide
ggttaagtacgtccaaaaacgtatcggaat

SEQ ID NO: 240250 - DNA, 30 bp, Artificial Sequence
  Synthetic oligonucleotide
aattaccggcttttactccaatctcggaat

SEQ ID NO: 240251 - DNA, 30 bp, Artificial Sequence
  Synthetic oligonucleotide
atggcactccgggcgcgtctgtaagggaat

SEQ ID NO: 240252 - DNA, 30 bp, Artificial Sequence
  Synthetic oligonucleotide
atggctaaccgaaaccgtacgagagggaat

SEQ ID NO: 240253 - DNA, 30 bp, Artificial Sequence
  Synthetic oligonucleotide
actggccgcccatgcgtcactagagggaat

SEQ ID NO: 240254 - DNA, 30 bp, Artificial Sequence
  Synthetic oligonucleotide
tgtgttgacatcctcagcgtaggagggaat

SEQ ID NO: 240255 - DNA, 30 bp, Artificial Sequence
  Synthetic oligonucleotide
gcgagagccaaccctttgtgcctagggaat

SEQ ID NO: 240256 - DNA, 30 bp, Artificial Sequence
  Synthetic oligonucleotide
atatagaccctctgatataaaaacgggaat

SEQ ID NO: 240257 - DNA, 30 bp, Artificial Sequence
  Synthetic oligonucleotide
gaggtccacaacatttactgtaaggggaat

SEQ ID NO: 240258 - DNA, 30 bp, Artificial Sequence
  Synthetic oligonucleotide
cgatacatcgcggcattacgaatggggaat

SEQ ID NO: 240259 - DNA, 30 bp, Artificial Sequence
  Synthetic oligonucleotide
ctccaacatccatagtagcccttggggaat

SEQ ID NO: 240260 - DNA, 30 bp, Artificial Sequence
  Synthetic oligonucleotide
gcgaacggctgcgctcgtgaaaatgggaat

SEQ ID NO: 240261 - DNA, 30 bp, Artificial Sequence
  Synthetic oligonucleotide
tctgcgtgcgcgtctaagtacattgggaat

SEQ ID NO: 240262 - DNA, 30 bp, Artificial Sequence
  Synthetic oligonucleotide
aggacaaaggccaaagggccgattgggaat

SEQ ID NO: 240263 - DNA, 30 bp, Artificial Sequence
  Synthetic oligonucleotide
aaggttcttaggtcaaccggggcatggaat

SEQ ID NO: 240264 - DNA, 30 bp, Artificial Sequence
  Synthetic oligonucleotide
agtatctggaacttgtgcgcgcactggaat

SEQ ID NO: 240265 - DNA, 30 bp, Artificial Sequence
  Synthetic oligonucleotide
cgagcaggtgaaactttctgtgcctggaat

SEQ ID NO: 240266 - DNA, 30 bp, Artificial Sequence
  Synthetic oligonucleotide
gactaaggttgactagggctggattggaat

SEQ ID NO: 240267 - DNA, 30 bp, Artificial Sequence
  Synthetic oligonucleotide
aggtggccgccgacaacgggcaaaatgaat

SEQ ID NO: 240268 - DNA, 30 bp, Artificial Sequence
  Synthetic oligonucleotide
gtagttcggcagaagctcccgcaaatgaat

SEQ ID NO: 240269 - DNA, 30 bp, Artificial Sequence
  Synthetic oligonucleotide
aaggatgtatggtggcgcctggagatgaat

SEQ ID NO: 240270 - DNA, 30 bp, Artificial Sequence
  Synthetic oligonucleotide
gacctaggagcttaaggaaatgcgatgaat

SEQ ID NO: 240271 - DNA, 30 bp, Artificial Sequence
  Synthetic oligonucleotide
ggtagtcgtttctaacctgaaaggatgaat

SEQ ID NO: 240272 - DNA, 30 bp, Artificial Sequence
  Synthetic oligonucleotide
aattgaagtcagccggtcggtgctatgaat

SEQ ID NO: 240273 - DNA, 30 bp, Artificial Sequence
  Synthetic oligonucleotide
actcgtagcgtatgtaagataacactgaat

SEQ ID NO: 240274 - DNA, 30 bp, Artificial Sequence
  Synthetic oligonucleotide
gtcaggaccaacagtcggacttcactgaat

SEQ ID NO: 240275 - DNA, 30 bp, Artificial Sequence
  Synthetic oligonucleotide
aggttctgggaatcacgtcgaggactgaat

SEQ ID NO: 240276 - DNA, 30 bp, Artificial Sequence
  Synthetic oligonucleotide
actcggggcggctgtgtaaatgccctgaat

SEQ ID NO: 240277 - DNA, 30 bp, Artificial Sequence
  Synthetic oligonucleotide
gggaaattcggatgacggctaaggctgaat

SEQ ID NO: 240278 - DNA, 30 bp, Artificial Sequence
  Synthetic oligonucleotide
acctgctttacgtaatactgtggtctgaat

SEQ ID NO: 240279 - DNA, 30 bp, Artificial Sequence
  Synthetic oligonucleotide
agttagtaggtggctgggccgcgagtgaat

SEQ ID NO: 240280 - DNA, 30 bp, Artificial Sequence
  Synthetic oligonucleotide
ggcaggtctatgctagtgtcgggagtgaat

SEQ ID NO: 240281 - DNA, 30 bp, Artificial Sequence
  Synthetic oligonucleotide
cgaaatctgatttcaggtaccatcgtgaat

SEQ ID NO: 240282 - DNA, 30 bp, Artificial Sequence
  Synthetic oligonucleotide
atgggcccggtctggatgttaaaggtgaat

SEQ ID NO: 240283 - DNA, 30 bp, Artificial Sequence
  Synthetic oligonucleotide
tgttaagcgagttgacgggcttgggtgaat

SEQ ID NO: 240284 - DNA, 30 bp, Artificial Sequence
  Synthetic oligonucleotide
aggttccatgatcaaggtcacgtggtgaat

SEQ ID NO: 240285 - DNA, 30 bp, Artificial Sequence
  Synthetic oligonucleotide
ggcagcgcaggtcttgatctccctgtgaat

SEQ ID NO: 240286 - DNA, 30 bp, Artificial Sequence
  Synthetic oligonucleotide
aggcgcgtaggaacctgtagaacattgaat

SEQ ID NO: 240287 - DNA, 30 bp, Artificial Sequence
  Synthetic oligonucleotide
caaaggaagtagaacgtagcgtgattgaat

SEQ ID NO: 240288 - DNA, 30 bp, Artificial Sequence
  Synthetic oligonucleotide
tttgaaccatcggcccccgacttattgaat

SEQ ID NO: 240289 - DNA, 30 bp, Artificial Sequence
  Synthetic oligonucleotide
ccaatggctcagaaactcgtgcacttgaat

SEQ ID NO: 240290 - DNA, 30 bp, Artificial Sequence
  Synthetic oligonucleotide
accgcaatgccatacatatcgaggttgaat

SEQ ID NO: 240291 - DNA, 30 bp, Artificial Sequence
  Synthetic oligonucleotide
gacggccatcaaccgagctatttgttgaat

SEQ ID NO: 240292 - DNA, 30 bp, Artificial Sequence
  Synthetic oligonucleotide
tcactctcaacggtagtcagtcctttgaat

SEQ ID NO: 240293 - DNA, 30 bp, Artificial Sequence
  Synthetic oligonucleotide
cgcgagttggatccaacgtacgttttgaat

SEQ ID NO: 240294 - DNA, 30 bp, Artificial Sequence
  Synthetic oligonucleotide
tatcctcaagggagggactcaccaaataat

SEQ ID NO: 240295 - DNA, 30 bp, Artificial Sequence
  Synthetic oligonucleotide
gtgggcagtgtcaacatggagcccaataat

SEQ ID NO: 240296 - DNA, 30 bp, Artificial Sequence
  Synthetic oligonucleotide
ggatagggggtattccatacggccaataat

SEQ ID NO: 240297 - DNA, 30 bp, Artificial Sequence
  Synthetic oligonucleotide
tggatggaactgaacccgggggccaataat

SEQ ID NO: 240298 - DNA, 30 bp, Artificial Sequence
  Synthetic oligonucleotide
gtaagcgcgcaggtagatgcggtgaataat

SEQ ID NO: 240299 - DNA, 30 bp, Artificial Sequence
  Synthetic oligonucleotide
acaaaataagacccctggatatgacataat

SEQ ID NO: 240300 - DNA, 30 bp, Artificial Sequence
  Synthetic oligonucleotide
gcagacttcctgggctatgcgtcgcataat

SEQ ID NO: 240301 - DNA, 30 bp, Artificial Sequence
  Synthetic oligonucleotide
aatgtcggaacgtagcggtgtctgcataat

SEQ ID NO: 240302 - DNA, 30 bp, Artificial Sequence
  Synthetic oligonucleotide
agtcatgcgtgttttatttgattgcataat

SEQ ID NO: 240303 - DNA, 30 bp, Artificial Sequence
  Synthetic oligonucleotide
gtgagggattatcgtttgcgccttcataat

SEQ ID NO: 240304 - DNA, 30 bp, Artificial Sequence
  Synthetic oligonucleotide
ttgaatcagattttaggccccgaagataat

SEQ ID NO: 240305 - DNA, 30 bp, Artificial Sequence
  Synthetic oligonucleotide
ccctcctgacttgtggaccatagagataat

SEQ ID NO: 240306 - DNA, 30 bp, Artificial Sequence
  Synthetic oligonucleotide
cctctgcattacttaatgtatcccgataat

SEQ ID NO: 240307 - DNA, 30 bp, Artificial Sequence
  Synthetic oligonucleotide
cgttctatagaggaattgttcgaggataat

SEQ ID NO: 240308 - DNA, 30 bp, Artificial Sequence
  Synthetic oligonucleotide
taggaagtcgaccaatcggggctggataat

SEQ ID NO: 240309 - DNA, 30 bp, Artificial Sequence
  Synthetic oligonucleotide
ttatgcacagcactagcactggtggataat

SEQ ID NO: 240310 - DNA, 30 bp, Artificial Sequence
  Synthetic oligonucleotide
gacaacgccaatttacagggtactgataat

SEQ ID NO: 240311 - DNA, 30 bp, Artificial Sequence
  Synthetic oligonucleotide
ataaacagtatgtctatgttctttgataat

SEQ ID NO: 240312 - DNA, 30 bp, Artificial Sequence
  Synthetic oligonucleotide
acattcttgcccagacaagcgagatataat

SEQ ID NO: 240313 - DNA, 30 bp, Artificial Sequence
  Synthetic oligonucleotide
gggatcaatatggggtttcatggttataat

SEQ ID NO: 240314 - DNA, 30 bp, Artificial Sequence
  Synthetic oligonucleotide
cagaaaagtatgatacgtattggttataat

SEQ ID NO: 240315 - DNA, 30 bp, Artificial Sequence
  Synthetic oligonucleotide
ggtaaaaacgtagtattatagtgttataat

SEQ ID NO: 240316 - DNA, 30 bp, Artificial Sequence
  Synthetic oligonucleotide
taaactggctgcatctctgatataactaat

SEQ ID NO: 240317 - DNA, 30 bp, Artificial Sequence
  Synthetic oligonucleotide
agaacgtgttagaccaaggcacccactaat

SEQ ID NO: 240318 - DNA, 30 bp, Artificial Sequence
  Synthetic oligonucleotide
tctggtcatgcggccaagttggagactaat

SEQ ID NO: 240319 - DNA, 30 bp, Artificial Sequence
  Synthetic oligonucleotide
tctttgtgcacacagtatgaagcgactaat

SEQ ID NO: 240320 - DNA, 30 bp, Artificial Sequence
  Synthetic oligonucleotide
gaacagaatccgcggtgcaccggtactaat

SEQ ID NO: 240321 - DNA, 30 bp, Artificial Sequence
  Synthetic oligonucleotide
tcggcatagcggggtgtgatccaacctaat

SEQ ID NO: 240322 - DNA, 30 bp, Artificial Sequence
  Synthetic oligonucleotide
gactccaaacaaacacatgtgagccctaat

SEQ ID NO: 240323 - DNA, 30 bp, Artificial Sequence
  Synthetic oligonucleotide
acaattcaattaaagcgaaaagagcctaat

SEQ ID NO: 240324 - DNA, 30 bp, Artificial Sequence
  Synthetic oligonucleotide
taatgcaaggagtacgaccgactgcctaat

SEQ ID NO: 240325 - DNA, 31 bp, Artificial Sequence
  Synthetic oligonucleotide
atgccggccaacgcgccggtatagagctaat

SEQ ID NO: 240326 - DNA, 30 bp, Artificial Sequence
  Synthetic oligonucleotide
ccgtgattcggtcacacagataaggctaat

SEQ ID NO: 240327 - DNA, 30 bp, Artificial Sequence
  Synthetic oligonucleotide
gttagagccgataatagcacatgggctaat

SEQ ID NO: 240328 - DNA, 30 bp, Artificial Sequence
  Synthetic oligonucleotide
caagttcgggtgccatcacgtatggctaat

SEQ ID NO: 240329 - DNA, 30 bp, Artificial Sequence
  Synthetic oligonucleotide
ccggcgtcaagataggtccggacatctaat

SEQ ID NO: 240330 - DNA, 30 bp, Artificial Sequence
  Synthetic oligonucleotide
acacgggaggcctgctgcttgcactctaat

SEQ ID NO: 240331 - DNA, 30 bp, Artificial Sequence
  Synthetic oligonucleotide
tagtaccacatggccttatagacctctaat

SEQ ID NO: 240332 - DNA, 30 bp, Artificial Sequence
  Synthetic oligonucleotide
acaacaccagctagcacccgttcctctaat

SEQ ID NO: 240333 - DNA, 30 bp, Artificial Sequence
  Synthetic oligonucleotide
gcggtcgattttacggcctagagctctaat

SEQ ID NO: 240334 - DNA, 30 bp, Artificial Sequence
  Synthetic oligonucleotide
ggatggaaagacgcctcgaactgctctaat

SEQ ID NO: 240335 - DNA, 30 bp, Artificial Sequence
  Synthetic oligonucleotide
agcctcaacggcaataccgagccaagtaat

SEQ ID NO: 240336 - DNA, 30 bp, Artificial Sequence
  Synthetic oligonucleotide
ttccaatactgccccaacgacgtaagtaat

SEQ ID NO: 240337 - DNA, 30 bp, Artificial Sequence
  Synthetic oligonucleotide
cttatacttagcgcctagctcaacagtaat

SEQ ID NO: 240338 - DNA, 30 bp, Artificial Sequence
  Synthetic oligonucleotide
tgcaacctgttatatacgagccagagtaat

SEQ ID NO: 240339 - DNA, 30 bp, Artificial Sequence
  Synthetic oligonucleotide
gtcggcacgactccaaccatgtagagtaat

SEQ ID NO: 240340 - DNA, 30 bp, Artificial Sequence
  Synthetic oligonucleotide
aggtatgctacatgcagtagggggagtaat

SEQ ID NO: 240341 - DNA, 30 bp, Artificial Sequence
  Synthetic oligonucleotide
ctttggcaagatgaagaggatgggagtaat

SEQ ID NO: 240342 - DNA, 30 bp, Artificial Sequence
  Synthetic oligonucleotide
agtaagttactttcagggggaatgagtaat

SEQ ID NO: 240343 - DNA, 30 bp, Artificial Sequence
  Synthetic oligonucleotide
gcgaccgataactgtttctctgtgagtaat

SEQ ID NO: 240344 - DNA, 30 bp, Artificial Sequence
  Synthetic oligonucleotide
gtaagaagaccgatatcgtcccaccgtaat

SEQ ID NO: 240345 - DNA, 30 bp, Artificial Sequence
  Synthetic oligonucleotide
ggcttatcttgttggcatagagttcgtaat

SEQ ID NO: 240346 - DNA, 30 bp, Artificial Sequence
  Synthetic oligonucleotide
gtgagaagatgcctagctagctcaggtaat

SEQ ID NO: 240347 - DNA, 30 bp, Artificial Sequence
  Synthetic oligonucleotide
gccgatccgctcatgcgtccgggaggtaat

SEQ ID NO: 240348 - DNA, 30 bp, Artificial Sequence
  Synthetic oligonucleotide
ctatgactaagagcgatgagctacggtaat

SEQ ID NO: 240349 - DNA, 30 bp, Artificial Sequence
  Synthetic oligonucleotide
gagaggctctcaaatctcgagcccggtaat

SEQ ID NO: 240350 - DNA, 30 bp, Artificial Sequence
  Synthetic oligonucleotide
ggtaactgttcggtattagcgaggggtaat

SEQ ID NO: 240351 - DNA, 30 bp, Artificial Sequence
  Synthetic oligonucleotide
gtgttcggactattgtaacgtcatggtaat

SEQ ID NO: 240352 - DNA, 30 bp, Artificial Sequence
  Synthetic oligonucleotide
gccaactcacgttgagcattcggtggtaat

SEQ ID NO: 240353 - DNA, 30 bp, Artificial Sequence
  Synthetic oligonucleotide
gcatgcaacagatcaccaattcggtgtaat

SEQ ID NO: 240354 - DNA, 30 bp, Artificial Sequence
  Synthetic oligonucleotide
ccttccatcggacccgcaaagtattgtaat

SEQ ID NO: 240355 - DNA, 30 bp, Artificial Sequence
  Synthetic oligonucleotide
agatggcagtgtcggctggtacaaattaat

SEQ ID NO: 240356 - DNA, 30 bp, Artificial Sequence
  Synthetic oligonucleotide
tggaaatcagtgagattcaacgtaattaat

SEQ ID NO: 240357 - DNA, 30 bp, Artificial Sequence
  Synthetic oligonucleotide
gttgaataccgaacgccggcgggcattaat

SEQ ID NO: 240358 - DNA, 30 bp, Artificial Sequence
  Synthetic oligonucleotide
accgtacaacgtctagacagactcattaat

SEQ ID NO: 240359 - DNA, 30 bp, Artificial Sequence
  Synthetic oligonucleotide
atcgtggtacaagtgtggtgggagattaat

SEQ ID NO: 240360 - DNA, 30 bp, Artificial Sequence
  Synthetic oligonucleotide
tttcataaaggggcaaatcgatcgattaat

SEQ ID NO: 240361 - DNA, 30 bp, Artificial Sequence
  Synthetic oligonucleotide
gacagtgaaaggtacctccgccggattaat

SEQ ID NO: 240362 - DNA, 30 bp, Artificial Sequence
  Synthetic oligonucleotide
tgagtatgatcttgcgcatcagaacttaat

SEQ ID NO: 240363 - DNA, 30 bp, Artificial Sequence
  Synthetic oligonucleotide
tgtagagaaactgcaggggggatacttaat

SEQ ID NO: 240364 - DNA, 30 bp, Artificial Sequence
  Synthetic oligonucleotide
gcgggccgacaaaacggacccaaagttaat

SEQ ID NO: 240365 - DNA, 30 bp, Artificial Sequence
  Synthetic oligonucleotide
agactaaacagcacgactagcaccgttaat

SEQ ID NO: 240366 - DNA, 30 bp, Artificial Sequence
  Synthetic oligonucleotide
gatacggttgggcggtctgtcctcgttaat

SEQ ID NO: 240367 - DNA, 30 bp, Artificial Sequence
  Synthetic oligonucleotide
ttggcaccgtattctctcctcgtcgttaat

SEQ ID NO: 240368 - DNA, 30 bp, Artificial Sequence
  Synthetic oligonucleotide
atcataaaagacacgtaagggtaggttaat

SEQ ID NO: 240369 - DNA, 30 bp, Artificial Sequence
  Synthetic oligonucleotide
tggtaaagcgtcctgcgtgggtatgttaat

SEQ ID NO: 240370 - DNA, 30 bp, Artificial Sequence
  Synthetic oligonucleotide
attagccatcagtcaagctcacctgttaat

SEQ ID NO: 240371 - DNA, 30 bp, Artificial Sequence
  Synthetic oligonucleotide
acacacgttgagcgaggagtataatttaat

SEQ ID NO: 240372 - DNA, 30 bp, Artificial Sequence
  Synthetic oligonucleotide
gagacgcaagacactacgtcaccatttaat

SEQ ID NO: 240373 - DNA, 30 bp, Artificial Sequence
  Synthetic oligonucleotide
gctcataacgggcgtgggtgtttatttaat

SEQ ID NO: 240374 - DNA, 30 bp, Artificial Sequence
  Synthetic oligonucleotide
catggacacaatatcagcgccaactttaat

SEQ ID NO: 240375 - DNA, 30 bp, Artificial Sequence
  Synthetic oligonucleotide
agtcataagcgctgaatactcccctttaat

SEQ ID NO: 240376 - DNA, 30 bp, Artificial Sequence
  Synthetic oligonucleotide
atcggggaaagaaatggtcagaggtttaat

SEQ ID NO: 240377 - DNA, 30 bp, Artificial Sequence
  Synthetic oligonucleotide
gtaacttagggcagactcaaattttttaat

SEQ ID NO: 240378 - DNA, 30 bp, Artificial Sequence
  Synthetic oligonucleotide
aagttcgtaaggaaaagatacttaaaacat

SEQ ID NO: 240379 - DNA, 30 bp, Artificial Sequence
  Synthetic oligonucleotide
ctagtagtgtgcgctagagtgtacaaacat

SEQ ID NO: 240380 - DNA, 30 bp, Artificial Sequence
  Synthetic oligonucleotide
ctttcaaaagacgtactgagtaccaaacat

SEQ ID NO: 240381 - DNA, 30 bp, Artificial Sequence
  Synthetic oligonucleotide
cctagcttatatgaccctcctgccaaacat

SEQ ID NO: 240382 - DNA, 30 bp, Artificial Sequence
  Synthetic oligonucleotide
gatatttcacagttcctctccaggaaacat

SEQ ID NO: 240383 - DNA, 30 bp, Artificial Sequence
  Synthetic oligonucleotide
aagaggatgtatgacagctggcaacaacat

SEQ ID NO: 240384 - DNA, 30 bp, Artificial Sequence
  Synthetic oligonucleotide
atactggggaactaacgtggtgctcaacat

SEQ ID NO: 240385 - DNA, 30 bp, Artificial Sequence
  Synthetic oligonucleotide
tccacggacgttcaagtgtgcaccgaacat

SEQ ID NO: 240386 - DNA, 30 bp, Artificial Sequence
  Synthetic oligonucleotide
cttaatgtaataaaattaacgctcgaacat

SEQ ID NO: 240387 - DNA, 30 bp, Artificial Sequence
  Synthetic oligonucleotide
agacaagtagggagacttacgttcgaacat

SEQ ID NO: 240388 - DNA, 30 bp, Artificial Sequence
  Synthetic oligonucleotide
atcgtagcggtccacgtagtataggaacat

SEQ ID NO: 240389 - DNA, 30 bp, Artificial Sequence
  Synthetic oligonucleotide
ggtgtgactaactacaacaggccggaacat

SEQ ID NO: 240390 - DNA, 30 bp, Artificial Sequence
  Synthetic oligonucleotide
cggatggggtgtaattgtgactcggaacat

SEQ ID NO: 240391 - DNA, 30 bp, Artificial Sequence
  Synthetic oligonucleotide
ggctcaaactccctttatgttaatgaacat

SEQ ID NO: 240392 - DNA, 30 bp, Artificial Sequence
  Synthetic oligonucleotide
gacggttggcggactaactgaattgaacat

SEQ ID NO: 240393 - DNA, 30 bp, Artificial Sequence
  Synthetic oligonucleotide
cagtcgggaggagaggtagacatataacat

SEQ ID NO: 240394 - DNA, 30 bp, Artificial Sequence
  Synthetic oligonucleotide
gaaggtgactctttggttgacaactaacat

SEQ ID NO: 240395 - DNA, 30 bp, Artificial Sequence
  Synthetic oligonucleotide
cgaccaccgtcgaagcttaaggtctaacat

SEQ ID NO: 240396 - DNA, 30 bp, Artificial Sequence
  Synthetic oligonucleotide
atttgaacaaaaaaaatgaatttctaacat

SEQ ID NO: 240397 - DNA, 30 bp, Artificial Sequence
  Synthetic oligonucleotide
atcctggatatgacagattataattaacat

SEQ ID NO: 240398 - DNA, 30 bp, Artificial Sequence
  Synthetic oligonucleotide
gcaagatgtcccgcctgtcagataacacat

SEQ ID NO: 240399 - DNA, 30 bp, Artificial Sequence
  Synthetic oligonucleotide
agtaggcgccgaagctgcgcacagacacat

SEQ ID NO: 240400 - DNA, 30 bp, Artificial Sequence
  Synthetic oligonucleotide
gggacttcgagttccagtgaaactacacat

SEQ ID NO: 240401 - DNA, 30 bp, Artificial Sequence
  Synthetic oligonucleotide
aacaaacaatgattggattagcgtacacat

SEQ ID NO: 240402 - DNA, 30 bp, Artificial Sequence
  Synthetic oligonucleotide
taacggcccggaagcgcgcgtgaaccacat

SEQ ID NO: 240403 - DNA, 30 bp, Artificial Sequence
  Synthetic oligonucleotide
aataatgcacacgttagcatatcgccacat

SEQ ID NO: 240404 - DNA, 30 bp, Artificial Sequence
  Synthetic oligonucleotide
tcgtgagtgtggtgtgctttagtgccacat

SEQ ID NO: 240405 - DNA, 30 bp, Artificial Sequence
  Synthetic oligonucleotide
caataacctagacctccaagattcgcacat

SEQ ID NO: 240406 - DNA, 30 bp, Artificial Sequence
  Synthetic oligonucleotide
ggcagttctggaaagccaatattcgcacat

SEQ ID NO: 240407 - DNA, 30 bp, Artificial Sequence
  Synthetic oligonucleotide
cgcttggacatcaataatgaattggcacat

SEQ ID NO: 240408 - DNA, 30 bp, Artificial Sequence
  Synthetic oligonucleotide
gcgcaaagagggttgtacctatgtgcacat

SEQ ID NO: 240409 - DNA, 30 bp, Artificial Sequence
  Synthetic oligonucleotide
ggtatgctccttaaccttaactgtgcacat

SEQ ID NO: 240410 - DNA, 30 bp, Artificial Sequence
  Synthetic oligonucleotide
aatcggcggctgcaaatctgtccatcacat

SEQ ID NO: 240411 - DNA, 30 bp, Artificial Sequence
  Synthetic oligonucleotide
gttgaaacggcagtcgccctaatatcacat

SEQ ID NO: 240412 - DNA, 30 bp, Artificial Sequence
  Synthetic oligonucleotide
gcaccaagtataactatggacaggtcacat

SEQ ID NO: 240413 - DNA, 30 bp, Artificial Sequence
  Synthetic oligonucleotide
ttatgcatccttcgaggttcgaattcacat

SEQ ID NO: 240414 - DNA, 30 bp, Artificial Sequence
  Synthetic oligonucleotide
aggagtcagcggtcaccctgattaagacat

SEQ ID NO: 240415 - DNA, 30 bp, Artificial Sequence
  Synthetic oligonucleotide
tcgtgtttgcggtccgaaaaacccagacat

SEQ ID NO: 240416 - DNA, 30 bp, Artificial Sequence
  Synthetic oligonucleotide
gtttgtgcgcgtggcccggggcgcagacat

SEQ ID NO: 240417 - DNA, 30 bp, Artificial Sequence
  Synthetic oligonucleotide
gggagaggagcgggactgatgtggagacat

SEQ ID NO: 240418 - DNA, 30 bp, Artificial Sequence
  Synthetic oligonucleotide
agcgcgatgtatgcgcacgaggtgagacat

SEQ ID NO: 240419 - DNA, 30 bp, Artificial Sequence
  Synthetic oligonucleotide
tccgatgaaaccaagctcttcactcgacat

SEQ ID NO: 240420 - DNA, 30 bp, Artificial Sequence
  Synthetic oligonucleotide
atttagatggctatagaggatcaaggacat

SEQ ID NO: 240421 - DNA, 30 bp, Artificial Sequence
  Synthetic oligonucleotide
gggttggcatgatctggggattagggacat

SEQ ID NO: 240422 - DNA, 30 bp, Artificial Sequence
  Synthetic oligonucleotide
cagaaaaagcggttgacttcgtggggacat

SEQ ID NO: 240423 - DNA, 31 bp, Artificial Sequence
  Synthetic oligonucleotide
gcggttggttaagcggtcaagactgggacat

SEQ ID NO: 240424 - DNA, 30 bp, Artificial Sequence
  Synthetic oligonucleotide
caggattggaattcgagtcaatatggacat

SEQ ID NO: 240425 - DNA, 30 bp, Artificial Sequence
  Synthetic oligonucleotide
caccatgtattgttctcccagtagtgacat

SEQ ID NO: 240426 - DNA, 30 bp, Artificial Sequence
  Synthetic oligonucleotide
ccgggttgtattctcaatgttaggtgacat

SEQ ID NO: 240427 - DNA, 30 bp, Artificial Sequence
  Synthetic oligonucleotide
attgccaaaacagtacgtgctttgtgacat

SEQ ID NO: 240428 - DNA, 30 bp, Artificial Sequence
  Synthetic oligonucleotide
tggagggcaagttctatgcgatcttgacat

SEQ ID NO: 240429 - DNA, 30 bp, Artificial Sequence
  Synthetic oligonucleotide
gatgtattcggagcgtaaaaggggatacat

SEQ ID NO: 240430 - DNA, 30 bp, Artificial Sequence
  Synthetic oligonucleotide
tccaaggggttctatcgacaccatatacat

SEQ ID NO: 240431 - DNA, 30 bp, Artificial Sequence
  Synthetic oligonucleotide
ctgaatatacaaacgagcaatgatatacat

SEQ ID NO: 240432 - DNA, 30 bp, Artificial Sequence
  Synthetic oligonucleotide
tatcccgggcttccgtcctcattactacat

SEQ ID NO: 240433 - DNA, 30 bp, Artificial Sequence
  Synthetic oligonucleotide
tagtcaggttgactactcgcgtgcctacat

SEQ ID NO: 240434 - DNA, 30 bp, Artificial Sequence
  Synthetic oligonucleotide
aggtgttctcaggttgtcatttagctacat

SEQ ID NO: 240435 - DNA, 30 bp, Artificial Sequence
  Synthetic oligonucleotide
caggtcagactgcattcgtaatatctacat

SEQ ID NO: 240436 - DNA, 30 bp, Artificial Sequence
  Synthetic oligonucleotide
gaaagagttgcttgtaccgcgcgagtacat

SEQ ID NO: 240437 - DNA, 30 bp, Artificial Sequence
  Synthetic oligonucleotide
tgcaatcaatcttagacttaacaggtacat

SEQ ID NO: 240438 - DNA, 30 bp, Artificial Sequence
  Synthetic oligonucleotide
atgtacttctgggactcaggtcaggtacat

SEQ ID NO: 240439 - DNA, 30 bp, Artificial Sequence
  Synthetic oligonucleotide
gcactttcgtaggttctgcacgaattacat

SEQ ID NO: 240440 - DNA, 30 bp, Artificial Sequence
  Synthetic oligonucleotide
gcggacgattaggaagtattaatattacat

SEQ ID NO: 240441 - DNA, 30 bp, Artificial Sequence
  Synthetic oligonucleotide
agctggcttacaatgtagagtatattacat

SEQ ID NO: 240442 - DNA, 30 bp, Artificial Sequence
  Synthetic oligonucleotide
ggagtatatgacaaacagtcgcccttacat

SEQ ID NO: 240443 - DNA, 30 bp, Artificial Sequence
  Synthetic oligonucleotide
cgcgcacccaggccatgaggagggttacat

SEQ ID NO: 240444 - DNA, 30 bp, Artificial Sequence
  Synthetic oligonucleotide
taggcagtactcatgagtcgttctttacat

SEQ ID NO: 240445 - DNA, 30 bp, Artificial Sequence
  Synthetic oligonucleotide
gggcggtacgtcaaccttgcgtaaaaccat

SEQ ID NO: 240446 - DNA, 30 bp, Artificial Sequence
  Synthetic oligonucleotide
gctgatctgaatagctcagtttccaaccat

SEQ ID NO: 240447 - DNA, 30 bp, Artificial Sequence
  Synthetic oligonucleotide
gtcggggtagtgatgcccgtttccaaccat

SEQ ID NO: 240448 - DNA, 30 bp, Artificial Sequence
  Synthetic oligonucleotide
cattctaggccactaggtttttggaaccat

SEQ ID NO: 240449 - DNA, 30 bp, Artificial Sequence
  Synthetic oligonucleotide
catttagcggagatcagatataaacaccat

SEQ ID NO: 240450 - DNA, 30 bp, Artificial Sequence
  Synthetic oligonucleotide
tggacggatgtatacacgcagactcaccat

SEQ ID NO: 240451 - DNA, 30 bp, Artificial Sequence
  Synthetic oligonucleotide
ggtgcacaatcgggccgcgtgtcagaccat

SEQ ID NO: 240452 - DNA, 30 bp, Artificial Sequence
  Synthetic oligonucleotide
ttattcactgtagagcacagaagagaccat

SEQ ID NO: 240453 - DNA, 30 bp, Artificial Sequence
  Synthetic oligonucleotide
taagacctgtctgcgggggacggggaccat

SEQ ID NO: 240454 - DNA, 30 bp, Artificial Sequence
  Synthetic oligonucleotide
cagttcccctagcttagctctctggaccat

SEQ ID NO: 240455 - DNA, 30 bp, Artificial Sequence
  Synthetic oligonucleotide
tggttaagacgagttcctggcggctaccat

SEQ ID NO: 240456 - DNA, 30 bp, Artificial Sequence
  Synthetic oligonucleotide
atgaatatagataaacttttcggttaccat

SEQ ID NO: 240457 - DNA, 30 bp, Artificial Sequence
  Synthetic oligonucleotide
tgtgaaagcaacaatcaaattggttaccat

SEQ ID NO: 240458 - DNA, 30 bp, Artificial Sequence
  Synthetic oligonucleotide
ggaacaaaggatcagagctagttttaccat

SEQ ID NO: 240459 - DNA, 30 bp, Artificial Sequence
  Synthetic oligonucleotide
agctaaccccgtatcctggaaggcacccat

SEQ ID NO: 240460 - DNA, 30 bp, Artificial Sequence
  Synthetic oligonucleotide
aagcgagcgctcagccgcaagtggacccat

SEQ ID NO: 240461 - DNA, 30 bp, Artificial Sequence
  Synthetic oligonucleotide
ctatcagcgcggtccggtcggaatacccat

SEQ ID NO: 240462 - DNA, 30 bp, Artificial Sequence
  Synthetic oligonucleotide
agtgtatgtcaccagttatctgttacccat

SEQ ID NO: 240463 - DNA, 30 bp, Artificial Sequence
  Synthetic oligonucleotide
taatggacaattttttcgtagtttacccat

SEQ ID NO: 240464 - DNA, 30 bp, Artificial Sequence
  Synthetic oligonucleotide
ggtaagtaacacgctgtctgcaacccccat

SEQ ID NO: 240465 - DNA, 30 bp, Artificial Sequence
  Synthetic oligonucleotide
tgcatcaagacggtcacggaaaaagcccat

SEQ ID NO: 240466 - DNA, 30 bp, Artificial Sequence
  Synthetic oligonucleotide
gaaacggaaaaggggcggtgaaaagcccat

SEQ ID NO: 240467 - DNA, 30 bp, Artificial Sequence
  Synthetic oligonucleotide
caacatcactatcgttgtgaagacgcccat

SEQ ID NO: 240468 - DNA, 30 bp, Artificial Sequence
  Synthetic oligonucleotide
ccctgcgcggggagagtacacaccgcccat

SEQ ID NO: 240469 - DNA, 30 bp, Artificial Sequence
  Synthetic oligonucleotide
cagcaggctgtagagacctactgggcccat

SEQ ID NO: 240470 - DNA, 30 bp, Artificial Sequence
  Synthetic oligonucleotide
atcccattgtaaaagtgctcgttggcccat

SEQ ID NO: 240471 - DNA, 30 bp, Artificial Sequence
  Synthetic oligonucleotide
ccttgaaaggcacttccgatgaattcccat

SEQ ID NO: 240472 - DNA, 30 bp, Artificial Sequence
  Synthetic oligonucleotide
tagtgcggttgaaatactataccaagccat

SEQ ID NO: 240473 - DNA, 30 bp, Artificial Sequence
  Synthetic oligonucleotide
aagatttaacaggggaaactctgtagccat

SEQ ID NO: 240474 - DNA, 30 bp, Artificial Sequence
  Synthetic oligonucleotide
cttttttcaaacaccgacctcatacgccat

SEQ ID NO: 240475 - DNA, 30 bp, Artificial Sequence
  Synthetic oligonucleotide
gatgcactggacgcccgacatgtacgccat

SEQ ID NO: 240476 - DNA, 30 bp, Artificial Sequence
  Synthetic oligonucleotide
tccactttgaatcaacagggagcccgccat

SEQ ID NO: 240477 - DNA, 30 bp, Artificial Sequence
  Synthetic oligonucleotide
tggcagccgggagtgaaggaattccgccat

SEQ ID NO: 240478 - DNA, 30 bp, Artificial Sequence
  Synthetic oligonucleotide
tgtgatgattatttgtattgtacaggccat

SEQ ID NO: 240479 - DNA, 30 bp, Artificial Sequence
  Synthetic oligonucleotide
cgcggagccgtcctagcccccatgggccat

SEQ ID NO: 240480 - DNA, 30 bp, Artificial Sequence
  Synthetic oligonucleotide
ctcgagtggtaccaagtatccaatggccat

SEQ ID NO: 240481 - DNA, 30 bp, Artificial Sequence
  Synthetic oligonucleotide
gggctggcagctagcgattataggtgccat

SEQ ID NO: 240482 - DNA, 30 bp, Artificial Sequence
  Synthetic oligonucleotide
tcgaacacaattggtagcctcatgtgccat

SEQ ID NO: 240483 - DNA, 30 bp, Artificial Sequence
  Synthetic oligonucleotide
accgataagccactagatttggaaatccat

SEQ ID NO: 240484 - DNA, 30 bp, Artificial Sequence
  Synthetic oligonucleotide
caagtagattaaaccagtctggtaatccat

SEQ ID NO: 240485 - DNA, 30 bp, Artificial Sequence
  Synthetic oligonucleotide
agccgaatttttgaaaaagctgacatccat

SEQ ID NO: 240486 - DNA, 30 bp, Artificial Sequence
  Synthetic oligonucleotide
tcaaggtcgtgcattggggactcactccat

SEQ ID NO: 240487 - DNA, 30 bp, Artificial Sequence
  Synthetic oligonucleotide
agggtatacatccacgttgtaggcctccat

SEQ ID NO: 240488 - DNA, 30 bp, Artificial Sequence
  Synthetic oligonucleotide
tgacaataagagacgactcgctgcctccat

SEQ ID NO: 240489 - DNA, 30 bp, Artificial Sequence
  Synthetic oligonucleotide
caggtcgtacctttaagtcaatagctccat

SEQ ID NO: 240490 - DNA, 30 bp, Artificial Sequence
  Synthetic oligonucleotide
aaacaaataaccggaaacgtgtggctccat

SEQ ID NO: 240491 - DNA, 30 bp, Artificial Sequence
  Synthetic oligonucleotide
gagctttgatcatatcgacgagtgctccat

SEQ ID NO: 240492 - DNA, 31 bp, Artificial Sequence
  Synthetic oligonucleotide
cgtagtggtgtattgtatggtccaagtccat

SEQ ID NO: 240493 - DNA, 29 bp, Artificial Sequence
  Synthetic oligonucleotide
agaagttagtagcatgatggggagtccat

SEQ ID NO: 240494 - DNA, 30 bp, Artificial Sequence
  Synthetic oligonucleotide
ccaaggcgcttcggcagtattcacgtccat

SEQ ID NO: 240495 - DNA, 30 bp, Artificial Sequence
  Synthetic oligonucleotide
ccatttcaaccgccataatttcacgtccat

SEQ ID NO: 240496 - DNA, 30 bp, Artificial Sequence
  Synthetic oligonucleotide
cgcgaagcactgaggaacgtgtacgtccat

SEQ ID NO: 240497 - DNA, 30 bp, Artificial Sequence
  Synthetic oligonucleotide
ataggttaatagcccagataacgggtccat

SEQ ID NO: 240498 - DNA, 30 bp, Artificial Sequence
  Synthetic oligonucleotide
aatagtcgtgatcatcgacctggggtccat

SEQ ID NO: 240499 - DNA, 30 bp, Artificial Sequence
  Synthetic oligonucleotide
gaggtgagtataggttttacaactgtccat

SEQ ID NO: 240500 - DNA, 30 bp, Artificial Sequence
  Synthetic oligonucleotide
ccgtgagcatcctagcatagaggtgtccat

SEQ ID NO: 240501 - DNA, 30 bp, Artificial Sequence
  Synthetic oligonucleotide
ggcagttcctatacgtccatgcttgtccat

SEQ ID NO: 240502 - DNA, 30 bp, Artificial Sequence
  Synthetic oligonucleotide
cattgtcgtgaccacggacgggttgtccat

SEQ ID NO: 240503 - DNA, 30 bp, Artificial Sequence
  Synthetic oligonucleotide
gaacaacagggcaccggggtgcgattccat

SEQ ID NO: 240504 - DNA, 30 bp, Artificial Sequence
  Synthetic oligonucleotide
gatgcatagctccagaatagggctttccat

SEQ ID NO: 240505 - DNA, 30 bp, Artificial Sequence
  Synthetic oligonucleotide
agtactcgatttggatgacttattttccat

SEQ ID NO: 240506 - DNA, 30 bp, Artificial Sequence
  Synthetic oligonucleotide
taaaactccggatgcggtacgcttttccat

SEQ ID NO: 240507 - DNA, 30 bp, Artificial Sequence
  Synthetic oligonucleotide
cgtatgaagctagccgttccccaaaagcat

SEQ ID NO: 240508 - DNA, 30 bp, Artificial Sequence
  Synthetic oligonucleotide
ctgctggtggcctatcccctcgtaaagcat

SEQ ID NO: 240509 - DNA, 30 bp, Artificial Sequence
  Synthetic oligonucleotide
tagggctggggcgtctcttaagccaagcat

SEQ ID NO: 240510 - DNA, 30 bp, Artificial Sequence
  Synthetic oligonucleotide
aactgggccttgatggggtagcttaagcat

SEQ ID NO: 240511 - DNA, 30 bp, Artificial Sequence
  Synthetic oligonucleotide
gttggaggcttgacaagaaaaccgcagcat

SEQ ID NO: 240512 - DNA, 30 bp, Artificial Sequence
  Synthetic oligonucleotide
cggtctttacaatagattattggtcagcat

SEQ ID NO: 240513 - DNA, 30 bp, Artificial Sequence
  Synthetic oligonucleotide
gctgatataaaaagctgtagtgttcagcat

SEQ ID NO: 240514 - DNA, 30 bp, Artificial Sequence
  Synthetic oligonucleotide
caacaagggacctgtttacccctagagcat

SEQ ID NO: 240515 - DNA, 30 bp, Artificial Sequence
  Synthetic oligonucleotide
ccgcgtgtggaagttttatccggatagcat

SEQ ID NO: 240516 - DNA, 30 bp, Artificial Sequence
  Synthetic oligonucleotide
atccggaggtcttgagaccagtggtagcat

SEQ ID NO: 240517 - DNA, 30 bp, Artificial Sequence
  Synthetic oligonucleotide
gtaattgttgggcacaattggtggtagcat

SEQ ID NO: 240518 - DNA, 30 bp, Artificial Sequence
  Synthetic oligonucleotide
acttggcgaaaagtcttcatggtgtagcat

SEQ ID NO: 240519 - DNA, 30 bp, Artificial Sequence
  Synthetic oligonucleotide
tctacggccgcacgactcattttgtagcat

SEQ ID NO: 240520 - DNA, 30 bp, Artificial Sequence
  Synthetic oligonucleotide
ctttaatggaaaggtactcactattagcat

SEQ ID NO: 240521 - DNA, 30 bp, Artificial Sequence
  Synthetic oligonucleotide
aagccgctcgaatcccacgcaaaaacgcat

SEQ ID NO: 240522 - DNA, 30 bp, Artificial Sequence
  Synthetic oligonucleotide
atacttctcaaatgcaaggaccgaacgcat

SEQ ID NO: 240523 - DNA, 30 bp, Artificial Sequence
  Synthetic oligonucleotide
tcccacatagtaaaatgtaggtgcacgcat

SEQ ID NO: 240524 - DNA, 30 bp, Artificial Sequence
  Synthetic oligonucleotide
atcggcgcgaaactgtccagacggacgcat

SEQ ID NO: 240525 - DNA, 30 bp, Artificial Sequence
  Synthetic oligonucleotide
agctatgagaaggcatcagcgaatacgcat

SEQ ID NO: 240526 - DNA, 30 bp, Artificial Sequence
  Synthetic oligonucleotide
gcaatcgggtgaggatcctggtgtacgcat

SEQ ID NO: 240527 - DNA, 30 bp, Artificial Sequence
  Synthetic oligonucleotide
tattgacacctataatagaatttcccgcat

SEQ ID NO: 240528 - DNA, 30 bp, Artificial Sequence
  Synthetic oligonucleotide
acgaaaagggatagaaaaagactgccgcat

SEQ ID NO: 240529 - DNA, 30 bp, Artificial Sequence
  Synthetic oligonucleotide
cgttatactgcaagtaaagcaactccgcat

SEQ ID NO: 240530 - DNA, 30 bp, Artificial Sequence
  Synthetic oligonucleotide
cttcccgacccctggcgagaagaagcgcat

SEQ ID NO: 240531 - DNA, 30 bp, Artificial Sequence
  Synthetic oligonucleotide
gctaaactagtacggttaccattagcgcat

SEQ ID NO: 240532 - DNA, 30 bp, Artificial Sequence
  Synthetic oligonucleotide
ctgtcaacaaactttcaatcatacgcgcat

SEQ ID NO: 240533 - DNA, 31 bp, Artificial Sequence
  Synthetic oligonucleotide
aaagatcaaggtgctgtcataactcgcgcat

SEQ ID NO: 240534 - DNA, 30 bp, Artificial Sequence
  Synthetic oligonucleotide
tgccacgattgttctcggttatcggcgcat

SEQ ID NO: 240535 - DNA, 30 bp, Artificial Sequence
  Synthetic oligonucleotide
ccctagtctgctaatgtcatttctgcgcat

SEQ ID NO: 240536 - DNA, 30 bp, Artificial Sequence
  Synthetic oligonucleotide
tgaattgttttgtgtatactcgactcgcat

SEQ ID NO: 240537 - DNA, 30 bp, Artificial Sequence
  Synthetic oligonucleotide
ccagcagatgaagtatctgtgtgctcgcat

SEQ ID NO: 240538 - DNA, 30 bp, Artificial Sequence
  Synthetic oligonucleotide
ttccgtgctaacgcgtaagcacattcgcat

SEQ ID NO: 240539 - DNA, 30 bp, Artificial Sequence
  Synthetic oligonucleotide
cattagtgggatttaaagacatcaaggcat

SEQ ID NO: 240540 - DNA, 30 bp, Artificial Sequence
  Synthetic oligonucleotide
tgggggggtaggctgaacacaggaaggcat

SEQ ID NO: 240541 - DNA, 30 bp, Artificial Sequence
  Synthetic oligonucleotide
caacaacacaggatcgcagtactaaggcat

SEQ ID NO: 240542 - DNA, 30 bp, Artificial Sequence
  Synthetic oligonucleotide
atatgaaaataggcacgagctcataggcat

SEQ ID NO: 240543 - DNA, 30 bp, Artificial Sequence
  Synthetic oligonucleotide
cgctcagctaacatcgtcgctccacggcat

SEQ ID NO: 240544 - DNA, 30 bp, Artificial Sequence
  Synthetic oligonucleotide
tataatccgcaaacaaccaggccccggcat

SEQ ID NO: 240545 - DNA, 30 bp, Artificial Sequence
  Synthetic oligonucleotide
ccaacccatatggacactcagcagcggcat

SEQ ID NO: 240546 - DNA, 30 bp, Artificial Sequence
  Synthetic oligonucleotide
tatacctctctcacagcactagagcggcat

SEQ ID NO: 240547 - DNA, 30 bp, Artificial Sequence
  Synthetic oligonucleotide
ctaacgttacaaatatattcatagcggcat

SEQ ID NO: 240548 - DNA, 30 bp, Artificial Sequence
  Synthetic oligonucleotide
tgtgaggaggcttgcggcgggtatcggcat

SEQ ID NO: 240549 - DNA, 30 bp, Artificial Sequence
  Synthetic oligonucleotide
tcaatcatccacaagaacaactttcggcat

SEQ ID NO: 240550 - DNA, 30 bp, Artificial Sequence
  Synthetic oligonucleotide
ttggagactcgacgaattcattgcgggcat

SEQ ID NO: 240551 - DNA, 30 bp, Artificial Sequence
  Synthetic oligonucleotide
ccgggccatcttctacccgtctatgggcat

SEQ ID NO: 240552 - DNA, 30 bp, Artificial Sequence
  Synthetic oligonucleotide
ggaagggtccgtctctaaattcgatggcat

SEQ ID NO: 240553 - DNA, 30 bp, Artificial Sequence
  Synthetic oligonucleotide
cataaagtaaaagaggttgctatatggcat

SEQ ID NO: 240554 - DNA, 30 bp, Artificial Sequence
  Synthetic oligonucleotide
ccttcaaccacgttgacagggccgtggcat

SEQ ID NO: 240555 - DNA, 30 bp, Artificial Sequence
  Synthetic oligonucleotide
tcagtgcgaaaggacgtatggaggtggcat

SEQ ID NO: 240556 - DNA, 30 bp, Artificial Sequence
  Synthetic oligonucleotide
cagacaaacacatcataaagggattggcat

SEQ ID NO: 240557 - DNA, 30 bp, Artificial Sequence
  Synthetic oligonucleotide
gccacgaattgttgaaggtagtcttggcat

SEQ ID NO: 240558 - DNA, 30 bp, Artificial Sequence
  Synthetic oligonucleotide
gggtagttctgatttatccaataaatgcat

SEQ ID NO: 240559 - DNA, 30 bp, Artificial Sequence
  Synthetic oligonucleotide
gggtggaatgaactgtaatattctatgcat

SEQ ID NO: 240560 - DNA, 30 bp, Artificial Sequence
  Synthetic oligonucleotide
cccattaggaacgatggggtatcactgcat

SEQ ID NO: 240561 - DNA, 30 bp, Artificial Sequence
  Synthetic oligonucleotide
ccaattacgggaacaagcaccaacctgcat

SEQ ID NO: 240562 - DNA, 30 bp, Artificial Sequence
  Synthetic oligonucleotide
gtgaatagagtctttgagagctccctgcat

SEQ ID NO: 240563 - DNA, 30 bp, Artificial Sequence
  Synthetic oligonucleotide
gcctgtgcgggctgagggaactcgctgcat

SEQ ID NO: 240564 - DNA, 30 bp, Artificial Sequence
  Synthetic oligonucleotide
acgttcggtggcattaacgactaagtgcat

SEQ ID NO: 240565 - DNA, 30 bp, Artificial Sequence
  Synthetic oligonucleotide
cgtggacctcctacaggataactagtgcat

SEQ ID NO: 240566 - DNA, 30 bp, Artificial Sequence
  Synthetic oligonucleotide
catgacgtgggtattagcctagtcgtgcat

SEQ ID NO: 240567 - DNA, 30 bp, Artificial Sequence
  Synthetic oligonucleotide
ttactaaacaagtacacggcggtcgtgcat

SEQ ID NO: 240568 - DNA, 30 bp, Artificial Sequence
  Synthetic oligonucleotide
acctgagaggtaccgtcgctttctgtgcat

SEQ ID NO: 240569 - DNA, 30 bp, Artificial Sequence
  Synthetic oligonucleotide
cggggcatttcatgtgtttgtagtgtgcat

SEQ ID NO: 240570 - DNA, 30 bp, Artificial Sequence
  Synthetic oligonucleotide
acagtgcgcaatttgcagtgggcattgcat

SEQ ID NO: 240571 - DNA, 30 bp, Artificial Sequence
  Synthetic oligonucleotide
cactctttataaacagaagacttattgcat

SEQ ID NO: 240572 - DNA, 30 bp, Artificial Sequence
  Synthetic oligonucleotide
accgtcacggtaagcgcgattatcttgcat

SEQ ID NO: 240573 - DNA, 30 bp, Artificial Sequence
  Synthetic oligonucleotide
ggccataacgcttataatacagtgttgcat

SEQ ID NO: 240574 - DNA, 30 bp, Artificial Sequence
  Synthetic oligonucleotide
ctatgccttggtcagggttaggttttgcat

SEQ ID NO: 240575 - DNA, 30 bp, Artificial Sequence
  Synthetic oligonucleotide
cgcgaccagatcgcgccggagcccaatcat

SEQ ID NO: 240576 - DNA, 30 bp, Artificial Sequence
  Synthetic oligonucleotide
actcgaagattagcgacagcaatcaatcat

SEQ ID NO: 240577 - DNA, 30 bp, Artificial Sequence
  Synthetic oligonucleotide
tgcaattatcaattttaatgtgagaatcat

SEQ ID NO: 240578 - DNA, 30 bp, Artificial Sequence
  Synthetic oligonucleotide
ctactccgatcctatgttcgtcataatcat

SEQ ID NO: 240579 - DNA, 30 bp, Artificial Sequence
  Synthetic oligonucleotide
agaatacgaagaccattttgtcataatcat

SEQ ID NO: 240580 - DNA, 30 bp, Artificial Sequence
  Synthetic oligonucleotide
agtacatcgtcggggcagggccttaatcat

SEQ ID NO: 240581 - DNA, 30 bp, Artificial Sequence
  Synthetic oligonucleotide
gggggccttaagatggcatggctacatcat

SEQ ID NO: 240582 - DNA, 30 bp, Artificial Sequence
  Synthetic oligonucleotide
aatgcagtcgtgcgcttgtgatcccatcat

SEQ ID NO: 240583 - DNA, 30 bp, Artificial Sequence
  Synthetic oligonucleotide
acaacaaatcgttgctaataacagcatcat

SEQ ID NO: 240584 - DNA, 30 bp, Artificial Sequence
  Synthetic oligonucleotide
tgcatcatgttatggctagtcctgcatcat

SEQ ID NO: 240585 - DNA, 30 bp, Artificial Sequence
  Synthetic oligonucleotide
cggacaagtaccggagacgccactcatcat

SEQ ID NO: 240586 - DNA, 30 bp, Artificial Sequence
  Synthetic oligonucleotide
aatacatctgaccccgatacacctcatcat

SEQ ID NO: 240587 - DNA, 30 bp, Artificial Sequence
  Synthetic oligonucleotide
tgaagaagcgtgaatcatttccctcatcat

SEQ ID NO: 240588 - DNA, 30 bp, Artificial Sequence
  Synthetic oligonucleotide
ctgtaacactccaacctgtgctacgatcat

SEQ ID NO: 240589 - DNA, 30 bp, Artificial Sequence
  Synthetic oligonucleotide
tagaatacgcggggaattgggaccgatcat

SEQ ID NO: 240590 - DNA, 30 bp, Artificial Sequence
  Synthetic oligonucleotide
atcgttggatactcccacggggaggatcat

SEQ ID NO: 240591 - DNA, 30 bp, Artificial Sequence
  Synthetic oligonucleotide
aagccctctatccgttaaaactgatatcat

SEQ ID NO: 240592 - DNA, 30 bp, Artificial Sequence
  Synthetic oligonucleotide
cggaactaagttttgaggacgatatatcat

SEQ ID NO: 240593 - DNA, 30 bp, Artificial Sequence
  Synthetic oligonucleotide
tgttgaattataaatcgattcccctatcat

SEQ ID NO: 240594 - DNA, 30 bp, Artificial Sequence
  Synthetic oligonucleotide
gttatcgcgcttcgaaagacgaggtatcat

SEQ ID NO: 240595 - DNA, 30 bp, Artificial Sequence
  Synthetic oligonucleotide
gcaacagtaatccaacagacctaaactcat

SEQ ID NO: 240596 - DNA, 30 bp, Artificial Sequence
  Synthetic oligonucleotide
cggttatgcgccagtcaatggggaactcat

SEQ ID NO: 240597 - DNA, 30 bp, Artificial Sequence
  Synthetic oligonucleotide
aaaccgacgtgacagcagaaactaactcat

SEQ ID NO: 240598 - DNA, 30 bp, Artificial Sequence
  Synthetic oligonucleotide
caggaagcggccgaagtttacgcacctcat

SEQ ID NO: 240599 - DNA, 30 bp, Artificial Sequence
  Synthetic oligonucleotide
agggcccacacaggtagtaatacccctcat

SEQ ID NO: 240600 - DNA, 30 bp, Artificial Sequence
  Synthetic oligonucleotide
cataagtgaatgacaagaggtcgtcctcat

SEQ ID NO: 240601 - DNA, 30 bp, Artificial Sequence
  Synthetic oligonucleotide
caacctaagattcgggtgggattagctcat

SEQ ID NO: 240602 - DNA, 30 bp, Artificial Sequence
  Synthetic oligonucleotide
ctgatgtcgtactaaacttttagggctcat

SEQ ID NO: 240603 - DNA, 30 bp, Artificial Sequence
  Synthetic oligonucleotide
tctagaaatagtatggttgatgcatctcat

SEQ ID NO: 240604 - DNA, 30 bp, Artificial Sequence
  Synthetic oligonucleotide
ctacctatttctcgagtccctttatctcat

SEQ ID NO: 240605 - DNA, 30 bp, Artificial Sequence
  Synthetic oligonucleotide
tcatggtgtccttcgagaatactgtctcat

SEQ ID NO: 240606 - DNA, 30 bp, Artificial Sequence
  Synthetic oligonucleotide
atcgaatccttactgagcaggtcttctcat

SEQ ID NO: 240607 - DNA, 30 bp, Artificial Sequence
  Synthetic oligonucleotide
ataacgtggtgcaggtgcttcatttctcat

SEQ ID NO: 240608 - DNA, 30 bp, Artificial Sequence
  Synthetic oligonucleotide
tcggggaatcagtgttcagtcgaaagtcat

SEQ ID NO: 240609 - DNA, 30 bp, Artificial Sequence
  Synthetic oligonucleotide
cgatgcatttgtctcaaccagtaaagtcat

SEQ ID NO: 240610 - DNA, 30 bp, Artificial Sequence
  Synthetic oligonucleotide
agtaggcgtcgaaatcaggtgtctagtcat

SEQ ID NO: 240611 - DNA, 30 bp, Artificial Sequence
  Synthetic oligonucleotide
cacgggtggttccgaatttctgaacgtcat

SEQ ID NO: 240612 - DNA, 30 bp, Artificial Sequence
  Synthetic oligonucleotide
accgtacctaggttagatgggtcacgtcat

SEQ ID NO: 240613 - DNA, 30 bp, Artificial Sequence
  Synthetic oligonucleotide
gattgctataatgggcaggtgagacgtcat

SEQ ID NO: 240614 - DNA, 30 bp, Artificial Sequence
  Synthetic oligonucleotide
ctgagcgtgcgggccgcccaatgacgtcat

SEQ ID NO: 240615 - DNA, 30 bp, Artificial Sequence
  Synthetic oligonucleotide
gggagagcggtggcctgatcctgacgtcat

SEQ ID NO: 240616 - DNA, 30 bp, Artificial Sequence
  Synthetic oligonucleotide
ccaggtagcctgagcgggactgcgcgtcat

SEQ ID NO: 240617 - DNA, 30 bp, Artificial Sequence
  Synthetic oligonucleotide
gggccacaccggccgccaaagaggcgtcat

SEQ ID NO: 240618 - DNA, 30 bp, Artificial Sequence
  Synthetic oligonucleotide
caggtagggctgtgatatacgtctcgtcat

SEQ ID NO: 240619 - DNA, 30 bp, Artificial Sequence
  Synthetic oligonucleotide
gtcctgattagtccaaacagcctaggtcat

SEQ ID NO: 240620 - DNA, 30 bp, Artificial Sequence
  Synthetic oligonucleotide
gttgggttactgtcttgcaagagcggtcat

SEQ ID NO: 240621 - DNA, 30 bp, Artificial Sequence
  Synthetic oligonucleotide
catcacaggaatggcttggtgcgcggtcat

SEQ ID NO: 240622 - DNA, 30 bp, Artificial Sequence
  Synthetic oligonucleotide
taggaatgactgcccggaaacacgggtcat

SEQ ID NO: 240623 - DNA, 30 bp, Artificial Sequence
  Synthetic oligonucleotide
ataaccttgacgacaggcaccaggggtcat

SEQ ID NO: 240624 - DNA, 31 bp, Artificial Sequence
  Synthetic oligonucleotide
agtcagggggcatatgggaattctgggtcat

SEQ ID NO: 240625 - DNA, 30 bp, Artificial Sequence
  Synthetic oligonucleotide
ttcactcaattcctcgtaatggaatgtcat

SEQ ID NO: 240626 - DNA, 30 bp, Artificial Sequence
  Synthetic oligonucleotide
atggattttctacttgcatcttcatgtcat

SEQ ID NO: 240627 - DNA, 30 bp, Artificial Sequence
  Synthetic oligonucleotide
cagccgtacgcgtacagcagggggtgtcat

SEQ ID NO: 240628 - DNA, 30 bp, Artificial Sequence
  Synthetic oligonucleotide
ataccgtgttaggtgccaacataaattcat

SEQ ID NO: 240629 - DNA, 30 bp, Artificial Sequence
  Synthetic oligonucleotide
cagacaccgagatcggcatgcttaattcat

SEQ ID NO: 240630 - DNA, 30 bp, Artificial Sequence
  Synthetic oligonucleotide
ggcgatatgtaggcaactgccaagattcat

SEQ ID NO: 240631 - DNA, 30 bp, Artificial Sequence
  Synthetic oligonucleotide
tcgcatgatatgattggcgtctagattcat

SEQ ID NO: 240632 - DNA, 30 bp, Artificial Sequence
  Synthetic oligonucleotide
cgtgatttttaccaatttgcatggattcat

SEQ ID NO: 240633 - DNA, 30 bp, Artificial Sequence
  Synthetic oligonucleotide
acggttggttatatacgcgcaatgattcat

SEQ ID NO: 240634 - DNA, 30 bp, Artificial Sequence
  Synthetic oligonucleotide
gccggttgtctgaaagactcaaatattcat

SEQ ID NO: 240635 - DNA, 30 bp, Artificial Sequence
  Synthetic oligonucleotide
gtcgacgtgttacgtatccggtttattcat

SEQ ID NO: 240636 - DNA, 30 bp, Artificial Sequence
  Synthetic oligonucleotide
cctgacgatcgcgaagttagtacacttcat

SEQ ID NO: 240637 - DNA, 30 bp, Artificial Sequence
  Synthetic oligonucleotide
cgtgtaactcctcaaaacgggttgcttcat

SEQ ID NO: 240638 - DNA, 30 bp, Artificial Sequence
  Synthetic oligonucleotide
catgacgcaaggagacgggctcaagttcat

SEQ ID NO: 240639 - DNA, 30 bp, Artificial Sequence
  Synthetic oligonucleotide
catcactggacgaaggtccagaaggttcat

SEQ ID NO: 240640 - DNA, 30 bp, Artificial Sequence
  Synthetic oligonucleotide
aatgtggttatattgtgaccaagggttcat

SEQ ID NO: 240641 - DNA, 30 bp, Artificial Sequence
  Synthetic oligonucleotide
aatacacaataccctcattagttggttcat

SEQ ID NO: 240642 - DNA, 30 bp, Artificial Sequence
  Synthetic oligonucleotide
ggcctatcaactggatagtcagatgttcat

SEQ ID NO: 240643 - DNA, 30 bp, Artificial Sequence
  Synthetic oligonucleotide
tggtctatgcctatttctatcgctgttcat

SEQ ID NO: 240644 - DNA, 30 bp, Artificial Sequence
  Synthetic oligonucleotide
ttcaggtgagcgtgagaaagctgtgttcat

SEQ ID NO: 240645 - DNA, 30 bp, Artificial Sequence
  Synthetic oligonucleotide
ctgacgtaagatagcattgagttatttcat

SEQ ID NO: 240646 - DNA, 30 bp, Artificial Sequence
  Synthetic oligonucleotide
gttaggcaattgagtccagcaaagtttcat

SEQ ID NO: 240647 - DNA, 30 bp, Artificial Sequence
  Synthetic oligonucleotide
cgccgtgtaacatgaatggggctgtttcat

SEQ ID NO: 240648 - DNA, 30 bp, Artificial Sequence
  Synthetic oligonucleotide
ggtgtcgtgcgaatccgtaacaattttcat

SEQ ID NO: 240649 - DNA, 30 bp, Artificial Sequence
  Synthetic oligonucleotide
cgctgtagagtctggccgcggagttttcat

SEQ ID NO: 240650 - DNA, 30 bp, Artificial Sequence
  Synthetic oligonucleotide
gatacgatcggccctactgggcaaaaagat

SEQ ID NO: 240651 - DNA, 30 bp, Artificial Sequence
  Synthetic oligonucleotide
agcgtccagagcgaagctcgttaaaaagat

SEQ ID NO: 240652 - DNA, 30 bp, Artificial Sequence
  Synthetic oligonucleotide
aactgatttcatcaaatgatcagcaaagat

SEQ ID NO: 240653 - DNA, 30 bp, Artificial Sequence
  Synthetic oligonucleotide
gcgtgcctgatttttcaggcagtgaaagat

SEQ ID NO: 240654 - DNA, 30 bp, Artificial Sequence
  Synthetic oligonucleotide
ttccgaataacatggctaccgtataaagat

SEQ ID NO: 240655 - DNA, 30 bp, Artificial Sequence
  Synthetic oligonucleotide
cccaggaacatgcgttgcatactccaagat

SEQ ID NO: 240656 - DNA, 30 bp, Artificial Sequence
  Synthetic oligonucleotide
tacacccgtggccgtaaatcctagcaagat

SEQ ID NO: 240657 - DNA, 30 bp, Artificial Sequence
  Synthetic oligonucleotide
atccaccgctatgcatttggagcgcaagat

SEQ ID NO: 240658 - DNA, 30 bp, Artificial Sequence
  Synthetic oligonucleotide
ctccagtgaggcacatcacagaggcaagat

SEQ ID NO: 240659 - DNA, 30 bp, Artificial Sequence
  Synthetic oligonucleotide
gtacatgaaagaccgccccccgggcaagat

SEQ ID NO: 240660 - DNA, 30 bp, Artificial Sequence
  Synthetic oligonucleotide
gtcgtacgaacaatgcagcccgggcaagat

SEQ ID NO: 240661 - DNA, 30 bp, Artificial Sequence
  Synthetic oligonucleotide
gagtccgggcggtttagtagttggcaagat

SEQ ID NO: 240662 - DNA, 30 bp, Artificial Sequence
  Synthetic oligonucleotide
ctagaatcactacgaacacgttttcaagat

SEQ ID NO: 240663 - DNA, 30 bp, Artificial Sequence
  Synthetic oligonucleotide
cctctaaagatggatttcaaggaagaagat

SEQ ID NO: 240664 - DNA, 30 bp, Artificial Sequence
  Synthetic oligonucleotide
gggactgggaatgttaggtccggagaagat

SEQ ID NO: 240665 - DNA, 30 bp, Artificial Sequence
  Synthetic oligonucleotide
aatcagccaggtgtgcagaattgcgaagat

SEQ ID NO: 240666 - DNA, 30 bp, Artificial Sequence
  Synthetic oligonucleotide
cacgttagtcactctggggttaaggaagat

SEQ ID NO: 240667 - DNA, 30 bp, Artificial Sequence
  Synthetic oligonucleotide
aaggacggcgaagctctggcttaggaagat

SEQ ID NO: 240668 - DNA, 30 bp, Artificial Sequence
  Synthetic oligonucleotide
cattgtgcgctgaccggcgaaatggaagat

SEQ ID NO: 240669 - DNA, 30 bp, Artificial Sequence
  Synthetic oligonucleotide
atggctataaagtggcaattgagtgaagat

SEQ ID NO: 240670 - DNA, 30 bp, Artificial Sequence
  Synthetic oligonucleotide
gccgtaatcgcggcatcgaaaaaataagat

SEQ ID NO: 240671 - DNA, 30 bp, Artificial Sequence
  Synthetic oligonucleotide
aagaccttagcgtgcgaatctcaataagat

SEQ ID NO: 240672 - DNA, 30 bp, Artificial Sequence
  Synthetic oligonucleotide
gccaagacgaggaaagtatctgtataagat

SEQ ID NO: 240673 - DNA, 30 bp, Artificial Sequence
  Synthetic oligonucleotide
cttcgggcctgagggatatatacgtaagat

SEQ ID NO: 240674 - DNA, 30 bp, Artificial Sequence
  Synthetic oligonucleotide
aggcggtctatgttggtagtaagttaagat

SEQ ID NO: 240675 - DNA, 30 bp, Artificial Sequence
  Synthetic oligonucleotide
atgctcatcggacagctcgcatcaacagat

SEQ ID NO: 240676 - DNA, 30 bp, Artificial Sequence
  Synthetic oligonucleotide
gtacccaaatcgggggggtgttgaacagat

SEQ ID NO: 240677 - DNA, 30 bp, Artificial Sequence
  Synthetic oligonucleotide
ttgggtgataccgagtcatgtcacacagat

SEQ ID NO: 240678 - DNA, 30 bp, Artificial Sequence
  Synthetic oligonucleotide
gcgtagtcttaacgttgtgatcccacagat

SEQ ID NO: 240679 - DNA, 30 bp, Artificial Sequence
  Synthetic oligonucleotide
atcctatagttacgctgcatcacgacagat

SEQ ID NO: 240680 - DNA, 30 bp, Artificial Sequence
  Synthetic oligonucleotide
ggtccggcaatcgtagtgccgttgacagat

SEQ ID NO: 240681 - DNA, 30 bp, Artificial Sequence
  Synthetic oligonucleotide
ggtaacagttaagacgacgaacatacagat

SEQ ID NO: 240682 - DNA, 30 bp, Artificial Sequence
  Synthetic oligonucleotide
catagttgacaggctgcaacaagaccagat

SEQ ID NO: 240683 - DNA, 30 bp, Artificial Sequence
  Synthetic oligonucleotide
gacattcggattttcagttaggtcccagat

SEQ ID NO: 240684 - DNA, 30 bp, Artificial Sequence
  Synthetic oligonucleotide
gccgggcgcaacctaggctttacgccagat

SEQ ID NO: 240685 - DNA, 31 bp, Artificial Sequence
  Synthetic oligonucleotide
gggttctagcgataactttgcgggtccagat

SEQ ID NO: 240686 - DNA, 30 bp, Artificial Sequence
  Synthetic oligonucleotide
ccgaagggggatttccactaataagcagat

SEQ ID NO: 240687 - DNA, 30 bp, Artificial Sequence
  Synthetic oligonucleotide
gcggaaccgtagctgctaataaccgcagat

SEQ ID NO: 240688 - DNA, 30 bp, Artificial Sequence
  Synthetic oligonucleotide
tctaataccggagttcatacatcggcagat

SEQ ID NO: 240689 - DNA, 30 bp, Artificial Sequence
  Synthetic oligonucleotide
gacctatagttctgggacaatagatcagat

SEQ ID NO: 240690 - DNA, 30 bp, Artificial Sequence
  Synthetic oligonucleotide
aataaggtccagtggaccagtggatcagat

SEQ ID NO: 240691 - DNA, 30 bp, Artificial Sequence
  Synthetic oligonucleotide
tggtcgacctacatatacgcgagctcagat

SEQ ID NO: 240692 - DNA, 30 bp, Artificial Sequence
  Synthetic oligonucleotide
ctgggtgagcaattcaatcttgtctcagat

SEQ ID NO: 240693 - DNA, 30 bp, Artificial Sequence
  Synthetic oligonucleotide
caaagggttcgggcaaccccattctcagat

SEQ ID NO: 240694 - DNA, 30 bp, Artificial Sequence
  Synthetic oligonucleotide
gtgtttgcagttagaccgggcgaaagagat

SEQ ID NO: 240695 - DNA, 30 bp, Artificial Sequence
  Synthetic oligonucleotide
aggactggagaataagatcttgtaagagat

SEQ ID NO: 240696 - DNA, 30 bp, Artificial Sequence
  Synthetic oligonucleotide
aggtatggtcttacataggcttacagagat

SEQ ID NO: 240697 - DNA, 30 bp, Artificial Sequence
  Synthetic oligonucleotide
actcggttttcctggggatggtccagagat

SEQ ID NO: 240698 - DNA, 30 bp, Artificial Sequence
  Synthetic oligonucleotide
tgccttttgcatgcgtaccagcgcagagat

SEQ ID NO: 240699 - DNA, 30 bp, Artificial Sequence
  Synthetic oligonucleotide
gttaaaaccgacattatgatttcgagagat

SEQ ID NO: 240700 - DNA, 30 bp, Artificial Sequence
  Synthetic oligonucleotide
tatgtggccggctgtgcgtgcgggagagat

SEQ ID NO: 240701 - DNA, 30 bp, Artificial Sequence
  Synthetic oligonucleotide
caatgcaacaaagcgcaggttcctagagat

SEQ ID NO: 240702 - DNA, 30 bp, Artificial Sequence
  Synthetic oligonucleotide
ccaagatgtccagaattattggtacgagat

SEQ ID NO: 240703 - DNA, 30 bp, Artificial Sequence
  Synthetic oligonucleotide
gttaaaaagcatcgtgctgtttggcgagat

SEQ ID NO: 240704 - DNA, 30 bp, Artificial Sequence
  Synthetic oligonucleotide
accggtatagctcttgttgctatgcgagat

SEQ ID NO: 240705 - DNA, 30 bp, Artificial Sequence
  Synthetic oligonucleotide
ttaaaagacaataaagcggatggtcgagat

SEQ ID NO: 240706 - DNA, 30 bp, Artificial Sequence
  Synthetic oligonucleotide
tctcaacacgaaagagtctatcacggagat

SEQ ID NO: 240707 - DNA, 30 bp, Artificial Sequence
  Synthetic oligonucleotide
aagggttcaaaggaagtgcgcgacggagat

SEQ ID NO: 240708 - DNA, 30 bp, Artificial Sequence
  Synthetic oligonucleotide
gccgcttacctattcgaagcttggggagat

SEQ ID NO: 240709 - DNA, 30 bp, Artificial Sequence
  Synthetic oligonucleotide
gcatgaatcctcaccatccctactggagat

SEQ ID NO: 240710 - DNA, 30 bp, Artificial Sequence
  Synthetic oligonucleotide
agtagagtcgaacagtatctgggtggagat

SEQ ID NO: 240711 - DNA, 31 bp, Artificial Sequence
  Synthetic oligonucleotide
cacctgaactacgtctcaccgcgttggagat

SEQ ID NO: 240712 - DNA, 30 bp, Artificial Sequence
  Synthetic oligonucleotide
tataagcgtactgggaggttcgttggagat

SEQ ID NO: 240713 - DNA, 30 bp, Artificial Sequence
  Synthetic oligonucleotide
atcagaacagggtggcgctataaatgagat

SEQ ID NO: 240714 - DNA, 30 bp, Artificial Sequence
  Synthetic oligonucleotide
agtgaataagcgttatatcgtaaatgagat

SEQ ID NO: 240715 - DNA, 30 bp, Artificial Sequence
  Synthetic oligonucleotide
acgggcatccctgtgaagtagagctgagat

SEQ ID NO: 240716 - DNA, 30 bp, Artificial Sequence
  Synthetic oligonucleotide
gcggccagcttgtaacattttagctgagat

SEQ ID NO: 240717 - DNA, 30 bp, Artificial Sequence
  Synthetic oligonucleotide
ggccgcttactagaacggatgatgtgagat

SEQ ID NO: 240718 - DNA, 30 bp, Artificial Sequence
  Synthetic oligonucleotide
ccgtactaaatcagatcgagggtaatagat

SEQ ID NO: 240719 - DNA, 30 bp, Artificial Sequence
  Synthetic oligonucleotide
ctagcccgtcgacgattagactgtatagat

SEQ ID NO: 240720 - DNA, 30 bp, Artificial Sequence
  Synthetic oligonucleotide
actcggatttaagattaggttaaactagat

SEQ ID NO: 240721 - DNA, 30 bp, Artificial Sequence
  Synthetic oligonucleotide
tagaccttgtaagtcaggattgaagtagat

SEQ ID NO: 240722 - DNA, 30 bp, Artificial Sequence
  Synthetic oligonucleotide
ctatggttggacgtttaacagttggtagat

SEQ ID NO: 240723 - DNA, 30 bp, Artificial Sequence
  Synthetic oligonucleotide
agtaaacaccgttttacgccgagtgtagat

SEQ ID NO: 240724 - DNA, 30 bp, Artificial Sequence
  Synthetic oligonucleotide
gcgctaatgaagatccctagtggtgtagat

SEQ ID NO: 240725 - DNA, 30 bp, Artificial Sequence
  Synthetic oligonucleotide
catgataataggtgatcattgtgtgtagat

SEQ ID NO: 240726 - DNA, 30 bp, Artificial Sequence
  Synthetic oligonucleotide
gcgggtaaatgtagttcgtgtcaattagat

SEQ ID NO: 240727 - DNA, 30 bp, Artificial Sequence
  Synthetic oligonucleotide
gtaaatcgagcgatgtctcgacgattagat

SEQ ID NO: 240728 - DNA, 30 bp, Artificial Sequence
  Synthetic oligonucleotide
gtacaagtgttcgttcgaatgattttagat

SEQ ID NO: 240729 - DNA, 30 bp, Artificial Sequence
  Synthetic oligonucleotide
ctggtctagacgaaaaaggggttcaacgat

SEQ ID NO: 240730 - DNA, 30 bp, Artificial Sequence
  Synthetic oligonucleotide
gtatatctggtcggtaggttgacacacgat

SEQ ID NO: 240731 - DNA, 30 bp, Artificial Sequence
  Synthetic oligonucleotide
taaagttgtagagcaggaagactccacgat

SEQ ID NO: 240732 - DNA, 30 bp, Artificial Sequence
  Synthetic oligonucleotide
gggcttagtcgatattgaactgctcacgat

SEQ ID NO: 240733 - DNA, 30 bp, Artificial Sequence
  Synthetic oligonucleotide
tcatcaccttggtagttaggtgaagacgat

SEQ ID NO: 240734 - DNA, 30 bp, Artificial Sequence
  Synthetic oligonucleotide
tgcaatcatttaggtaagcaagcagacgat

SEQ ID NO: 240735 - DNA, 30 bp, Artificial Sequence
  Synthetic oligonucleotide
tcacactagtcctcgcatctggacgacgat

SEQ ID NO: 240736 - DNA, 30 bp, Artificial Sequence
  Synthetic oligonucleotide
agaccatttcaagcacagactgatgacgat

SEQ ID NO: 240737 - DNA, 30 bp, Artificial Sequence
  Synthetic oligonucleotide
ttacgtcttagttggtgggattctgacgat

SEQ ID NO: 240738 - DNA, 30 bp, Artificial Sequence
  Synthetic oligonucleotide
gacgggtctcctaaaacccatcgatacgat

SEQ ID NO: 240739 - DNA, 30 bp, Artificial Sequence
  Synthetic oligonucleotide
taaggcactccagcataatcgggctacgat

SEQ ID NO: 240740 - DNA, 30 bp, Artificial Sequence
  Synthetic oligonucleotide
acacgatctcatgactgtttttattacgat

SEQ ID NO: 240741 - DNA, 30 bp, Artificial Sequence
  Synthetic oligonucleotide
agctatttcgatgttccccaagacaccgat

SEQ ID NO: 240742 - DNA, 30 bp, Artificial Sequence
  Synthetic oligonucleotide
cctgcgttaaggtcaagtgtacgtaccgat

SEQ ID NO: 240743 - DNA, 30 bp, Artificial Sequence
  Synthetic oligonucleotide
tgtcagacgaagagtcccccagaacccgat

SEQ ID NO: 240744 - DNA, 30 bp, Artificial Sequence
  Synthetic oligonucleotide
tattaccaccacattaccttttaacccgat

SEQ ID NO: 240745 - DNA, 30 bp, Artificial Sequence
  Synthetic oligonucleotide
gttggcgcgcacgcgcctcgccatcccgat

SEQ ID NO: 240746 - DNA, 30 bp, Artificial Sequence
  Synthetic oligonucleotide
tctagctacgcgcatttacgacttcccgat

SEQ ID NO: 240747 - DNA, 30 bp, Artificial Sequence
  Synthetic oligonucleotide
aaagggattaacgacgtcagcagcgccgat

SEQ ID NO: 240748 - DNA, 30 bp, Artificial Sequence
  Synthetic oligonucleotide
tcgagttagcagcaaccttcaacctccgat

SEQ ID NO: 240749 - DNA, 30 bp, Artificial Sequence
  Synthetic oligonucleotide
ggtagggtatgacagattctttagtccgat

SEQ ID NO: 240750 - DNA, 30 bp, Artificial Sequence
  Synthetic oligonucleotide
tttacagccattcaatacatctaaagcgat

SEQ ID NO: 240751 - DNA, 30 bp, Artificial Sequence
  Synthetic oligonucleotide
cgaccatcccactcaatccacaatagcgat

SEQ ID NO: 240752 - DNA, 30 bp, Artificial Sequence
  Synthetic oligonucleotide
gggactcaaatccaattttcacaacgcgat

SEQ ID NO: 240753 - DNA, 30 bp, Artificial Sequence
  Synthetic oligonucleotide
gcacgctacctaagtcccgggggccgcgat

SEQ ID NO: 240754 - DNA, 30 bp, Artificial Sequence
  Synthetic oligonucleotide
ccggagcaataagcaaacatgatccgcgat

SEQ ID NO: 240755 - DNA, 30 bp, Artificial Sequence
  Synthetic oligonucleotide
actttacacgggtttagtgatgagcgcgat

SEQ ID NO: 240756 - DNA, 30 bp, Artificial Sequence
  Synthetic oligonucleotide
cctaacaaggatgttagacaactgcgcgat

SEQ ID NO: 240757 - DNA, 30 bp, Artificial Sequence
  Synthetic oligonucleotide
tttgggtgtgagcgattgccatctcgcgat

SEQ ID NO: 240758 - DNA, 30 bp, Artificial Sequence
  Synthetic oligonucleotide
atctctgaggctattgtattgagaggcgat

SEQ ID NO: 240759 - DNA, 30 bp, Artificial Sequence
  Synthetic oligonucleotide
tagtcagaatccgattacgtgggcggcgat

SEQ ID NO: 240760 - DNA, 30 bp, Artificial Sequence
  Synthetic oligonucleotide
ccaatagcacgtgccgtgccatcgggcgat

SEQ ID NO: 240761 - DNA, 30 bp, Artificial Sequence
  Synthetic oligonucleotide
aggcgggtgggggtccgataggctggcgat

SEQ ID NO: 240762 - DNA, 30 bp, Artificial Sequence
  Synthetic oligonucleotide
atgcaatatactatgcaagtttactgcgat

SEQ ID NO: 240763 - DNA, 30 bp, Artificial Sequence
  Synthetic oligonucleotide
tgaccgaaatttgttccacagcattgcgat

SEQ ID NO: 240764 - DNA, 30 bp, Artificial Sequence
  Synthetic oligonucleotide
tcccatacatactggttaccgccttgcgat

SEQ ID NO: 240765 - DNA, 30 bp, Artificial Sequence
  Synthetic oligonucleotide
tagtagatgtcgtcccacgtggaaatcgat

SEQ ID NO: 240766 - DNA, 30 bp, Artificial Sequence
  Synthetic oligonucleotide
tatacagtgcagtgagatacttaaatcgat

SEQ ID NO: 240767 - DNA, 30 bp, Artificial Sequence
  Synthetic oligonucleotide
tgacaaaggacctcgcctgtctgcatcgat

SEQ ID NO: 240768 - DNA, 30 bp, Artificial Sequence
  Synthetic oligonucleotide
ctaataatatatccagctatcaagatcgat

SEQ ID NO: 240769 - DNA, 30 bp, Artificial Sequence
  Synthetic oligonucleotide
tgatagatcggggccgaaaaaacgatcgat

SEQ ID NO: 240770 - DNA, 30 bp, Artificial Sequence
  Synthetic oligonucleotide
tttgacggacatgaatcggacacgatcgat

SEQ ID NO: 240771 - DNA, 30 bp, Artificial Sequence
  Synthetic oligonucleotide
gagagtagctgacgatgccggcggatcgat

SEQ ID NO: 240772 - DNA, 30 bp, Artificial Sequence
  Synthetic oligonucleotide
tgagtatggacccgccaaaacatgatcgat

SEQ ID NO: 240773 - DNA, 30 bp, Artificial Sequence
  Synthetic oligonucleotide
atttcggtctaccgcctgtctcctatcgat

SEQ ID NO: 240774 - DNA, 31 bp, Artificial Sequence
  Synthetic oligonucleotide
aaaggcctcaactaggttaatactactcgat

SEQ ID NO: 240775 - DNA, 30 bp, Artificial Sequence
  Synthetic oligonucleotide
cgcgtcggccgtttataggtagtgctcgat

SEQ ID NO: 240776 - DNA, 30 bp, Artificial Sequence
  Synthetic oligonucleotide
gggatggagattaatctcgcccctctcgat

SEQ ID NO: 240777 - DNA, 30 bp, Artificial Sequence
  Synthetic oligonucleotide
caagactacgagagggactcttgagtcgat

SEQ ID NO: 240778 - DNA, 30 bp, Artificial Sequence
  Synthetic oligonucleotide
tataagctagtctgcaacataagcgtcgat

SEQ ID NO: 240779 - DNA, 30 bp, Artificial Sequence
  Synthetic oligonucleotide
ccaaccttgttgcagattgtacgcgtcgat

SEQ ID NO: 240780 - DNA, 30 bp, Artificial Sequence
  Synthetic oligonucleotide
agaggttttatcgatgtcctacaggtcgat

SEQ ID NO: 240781 - DNA, 30 bp, Artificial Sequence
  Synthetic oligonucleotide
acaatacatgtgtaaatgcgtgtggtcgat

SEQ ID NO: 240782 - DNA, 30 bp, Artificial Sequence
  Synthetic oligonucleotide
cacggcggtgccagatcgacgactgtcgat

SEQ ID NO: 240783 - DNA, 30 bp, Artificial Sequence
  Synthetic oligonucleotide
ctcaatcacagtaatatcccgtaattcgat

SEQ ID NO: 240784 - DNA, 30 bp, Artificial Sequence
  Synthetic oligonucleotide
atgattacacatatgtaaaattagttcgat

SEQ ID NO: 240785 - DNA, 30 bp, Artificial Sequence
  Synthetic oligonucleotide
atattgcggtggatcattttaaggttcgat

SEQ ID NO: 240786 - DNA, 30 bp, Artificial Sequence
  Synthetic oligonucleotide
aatgcttgcagatgagatggggggttcgat

SEQ ID NO: 240787 - DNA, 30 bp, Artificial Sequence
  Synthetic oligonucleotide
ccgaagcgcatgatgtaaacattgttcgat

SEQ ID NO: 240788 - DNA, 30 bp, Artificial Sequence
  Synthetic oligonucleotide
ttgaaatagcttagcacgaaaccaaaggat

SEQ ID NO: 240789 - DNA, 30 bp, Artificial Sequence
  Synthetic oligonucleotide
ttaagcatctaatcgtaaatcgcaaaggat

SEQ ID NO: 240790 - DNA, 30 bp, Artificial Sequence
  Synthetic oligonucleotide
gctgcacggtcttggacctgtagaaaggat

SEQ ID NO: 240791 - DNA, 30 bp, Artificial Sequence
  Synthetic oligonucleotide
tctatgaccgtaggcgagccctgaaaggat

SEQ ID NO: 240792 - DNA, 30 bp, Artificial Sequence
  Synthetic oligonucleotide
ctactccggcttgtaaccgtaaccaaggat

SEQ ID NO: 240793 - DNA, 30 bp, Artificial Sequence
  Synthetic oligonucleotide
agttgtaggtcaccacatgtcctgaaggat

SEQ ID NO: 240794 - DNA, 30 bp, Artificial Sequence
  Synthetic oligonucleotide
ggagttcaatgtactagcggtctgaaggat

SEQ ID NO: 240795 - DNA, 30 bp, Artificial Sequence
  Synthetic oligonucleotide
gtaggaaacagcgacttttttcataaggat

SEQ ID NO: 240796 - DNA, 30 bp, Artificial Sequence
  Synthetic oligonucleotide
taacagaccggggtcacaggtctacaggat

SEQ ID NO: 240797 - DNA, 30 bp, Artificial Sequence
  Synthetic oligonucleotide
atatttaagattactttgacagaccaggat

SEQ ID NO: 240798 - DNA, 30 bp, Artificial Sequence
  Synthetic oligonucleotide
ggagtgagtactaaaaccaaaccccaggat

SEQ ID NO: 240799 - DNA, 30 bp, Artificial Sequence
  Synthetic oligonucleotide
gggctcgccacaatagacatctatcaggat

SEQ ID NO: 240800 - DNA, 30 bp, Artificial Sequence
  Synthetic oligonucleotide
atcggcgcgggagttacgaaacttcaggat

SEQ ID NO: 240801 - DNA, 30 bp, Artificial Sequence
  Synthetic oligonucleotide
cgggaaaagtctcacgctcacggagaggat

SEQ ID NO: 240802 - DNA, 30 bp, Artificial Sequence
  Synthetic oligonucleotide
gatggtaacgggatactcggtggggaggat

SEQ ID NO: 240803 - DNA, 30 bp, Artificial Sequence
  Synthetic oligonucleotide
tcccacgagtcattgataccaattgaggat

SEQ ID NO: 240804 - DNA, 30 bp, Artificial Sequence
  Synthetic oligonucleotide
atctatctcctgaaaggaccggttgaggat

SEQ ID NO: 240805 - DNA, 30 bp, Artificial Sequence
  Synthetic oligonucleotide
gagatcatattaaggtagttacaataggat

SEQ ID NO: 240806 - DNA, 30 bp, Artificial Sequence
  Synthetic oligonucleotide
acgtctcgcctcacgataggcgattaggat

SEQ ID NO: 240807 - DNA, 30 bp, Artificial Sequence
  Synthetic oligonucleotide
gcggagccaacttattggtgcgaaacggat

SEQ ID NO: 240808 - DNA, 30 bp, Artificial Sequence
  Synthetic oligonucleotide
cgttccacgggacgttctcgttacacggat

SEQ ID NO: 240809 - DNA, 30 bp, Artificial Sequence
  Synthetic oligonucleotide
caaatcgagacggacctgccgaccacggat

SEQ ID NO: 240810 - DNA, 30 bp, Artificial Sequence
  Synthetic oligonucleotide
taatgaagctaccccttccgggtgacggat

SEQ ID NO: 240811 - DNA, 30 bp, Artificial Sequence
  Synthetic oligonucleotide
ttagcactgtgtactgcatgattaccggat

SEQ ID NO: 240812 - DNA, 30 bp, Artificial Sequence
  Synthetic oligonucleotide
ggacgtccggagtcataactaaggccggat

SEQ ID NO: 240813 - DNA, 30 bp, Artificial Sequence
  Synthetic oligonucleotide
atatcgtttggcccgaagatcaatccggat

SEQ ID NO: 240814 - DNA, 30 bp, Artificial Sequence
  Synthetic oligonucleotide
gcttacagttgacaaggccggcatccggat

SEQ ID NO: 240815 - DNA, 30 bp, Artificial Sequence
  Synthetic oligonucleotide
tctgatgagagggtacatggtggtccggat

SEQ ID NO: 240816 - DNA, 30 bp, Artificial Sequence
  Synthetic oligonucleotide
caaggctttggctaggaatgaggcgcggat

SEQ ID NO: 240817 - DNA, 30 bp, Artificial Sequence
  Synthetic oligonucleotide
cgcgattgtaaacacgcacatcaggcggat

SEQ ID NO: 240818 - DNA, 30 bp, Artificial Sequence
  Synthetic oligonucleotide
aacaatgtcaaaataaaatcaatggcggat

SEQ ID NO: 240819 - DNA, 30 bp, Artificial Sequence
  Synthetic oligonucleotide
aggatggtcttcccgtggggaaattcggat

SEQ ID NO: 240820 - DNA, 30 bp, Artificial Sequence
  Synthetic oligonucleotide
tcatgtactttaaagcgattagcaagggat

SEQ ID NO: 240821 - DNA, 30 bp, Artificial Sequence
  Synthetic oligonucleotide
agtagcccgtggccctaaataggaagggat

SEQ ID NO: 240822 - DNA, 30 bp, Artificial Sequence
  Synthetic oligonucleotide
ggaagagtttgtctctagacactaagggat

SEQ ID NO: 240823 - DNA, 30 bp, Artificial Sequence
  Synthetic oligonucleotide
cctttgctatatatcatcattagcagggat

SEQ ID NO: 240824 - DNA, 30 bp, Artificial Sequence
  Synthetic oligonucleotide
tagaaggcgcacccacgtcttctcagggat

SEQ ID NO: 240825 - DNA, 30 bp, Artificial Sequence
  Synthetic oligonucleotide
gcatcaacatttctgcgtaccatgagggat

SEQ ID NO: 240826 - DNA, 30 bp, Artificial Sequence
  Synthetic oligonucleotide
catattcaaacagccgcgcgagctagggat

SEQ ID NO: 240827 - DNA, 30 bp, Artificial Sequence
  Synthetic oligonucleotide
acgtaccccggtagaccgcgaggtagggat

SEQ ID NO: 240828 - DNA, 30 bp, Artificial Sequence
  Synthetic oligonucleotide
ggagtccttgacggtggcggtattagggat

SEQ ID NO: 240829 - DNA, 30 bp, Artificial Sequence
  Synthetic oligonucleotide
agggaaacccaccaaccgcggtaacgggat

SEQ ID NO: 240830 - DNA, 30 bp, Artificial Sequence
  Synthetic oligonucleotide
aattgctgtggggaagcgaccgtgcgggat

SEQ ID NO: 240831 - DNA, 30 bp, Artificial Sequence
  Synthetic oligonucleotide
aagaacattgagatctgttaaagtcgggat

SEQ ID NO: 240832 - DNA, 30 bp, Artificial Sequence
  Synthetic oligonucleotide
gttaagatacgtttggcgaaagaaggggat

SEQ ID NO: 240833 - DNA, 30 bp, Artificial Sequence
  Synthetic oligonucleotide
agtatatttacgtgggggtgttaaggggat

SEQ ID NO: 240834 - DNA, 30 bp, Artificial Sequence
  Synthetic oligonucleotide
gtgtcatcccgacacttactaacaggggat

SEQ ID NO: 240835 - DNA, 30 bp, Artificial Sequence
  Synthetic oligonucleotide
tcttctttttgccatttgcgagccggggat

SEQ ID NO: 240836 - DNA, 30 bp, Artificial Sequence
  Synthetic oligonucleotide
gcgagtaactgtggaccaacactcggggat

SEQ ID NO: 240837 - DNA, 30 bp, Artificial Sequence
  Synthetic oligonucleotide
cacatgcaaagcacaaactgtttgggggat

SEQ ID NO: 240838 - DNA, 30 bp, Artificial Sequence
  Synthetic oligonucleotide
gaggtcgttcataaaaagtctactggggat

SEQ ID NO: 240839 - DNA, 30 bp, Artificial Sequence
  Synthetic oligonucleotide
aaccggctcaggttgcgtgctcgtggggat

SEQ ID NO: 240840 - DNA, 30 bp, Artificial Sequence
  Synthetic oligonucleotide
gcggactcttatccattctcccaatgggat

SEQ ID NO: 240841 - DNA, 30 bp, Artificial Sequence
  Synthetic oligonucleotide
cattattactacccgcgctcgtaatgggat

SEQ ID NO: 240842 - DNA, 30 bp, Artificial Sequence
  Synthetic oligonucleotide
ggcgggactgtccagcgcatgccatgggat

SEQ ID NO: 240843 - DNA, 30 bp, Artificial Sequence
  Synthetic oligonucleotide
aaccttaggctagcttacagtgtatgggat

SEQ ID NO: 240844 - DNA, 30 bp, Artificial Sequence
  Synthetic oligonucleotide
ttaagtcgcaatcagttcactgactgggat

SEQ ID NO: 240845 - DNA, 31 bp, Artificial Sequence
  Synthetic oligonucleotide
tgctggcagaacgatactactggcctgggat

SEQ ID NO: 240846 - DNA, 30 bp, Artificial Sequence
  Synthetic oligonucleotide
gtattgctagtaaaaagaaccctctgggat

SEQ ID NO: 240847 - DNA, 30 bp, Artificial Sequence
  Synthetic oligonucleotide
cagccacatttcagcgacggcatgtgggat

SEQ ID NO: 240848 - DNA, 30 bp, Artificial Sequence
  Synthetic oligonucleotide
gcgatgggccgaagggataaactgtgggat

SEQ ID NO: 240849 - DNA, 30 bp, Artificial Sequence
  Synthetic oligonucleotide
gcatccgaagtctttcgtacaacttgggat

SEQ ID NO: 240850 - DNA, 30 bp, Artificial Sequence
  Synthetic oligonucleotide
attttcgtctccacggacgagtcttgggat

SEQ ID NO: 240851 - DNA, 30 bp, Artificial Sequence
  Synthetic oligonucleotide
acactagagtggccattgggcctcatggat

SEQ ID NO: 240852 - DNA, 30 bp, Artificial Sequence
  Synthetic oligonucleotide
tataaaatctgacggaaatgcggtatggat

SEQ ID NO: 240853 - DNA, 30 bp, Artificial Sequence
  Synthetic oligonucleotide
ccggggcaatttgtaatgagggtgctggat

SEQ ID NO: 240854 - DNA, 30 bp, Artificial Sequence
  Synthetic oligonucleotide
gagcccaggggtcacaggaaaaatctggat

SEQ ID NO: 240855 - DNA, 30 bp, Artificial Sequence
  Synthetic oligonucleotide
atcgagggttttcaggattgaattctggat

SEQ ID NO: 240856 - DNA, 30 bp, Artificial Sequence
  Synthetic oligonucleotide
atgaatccaataaaagtagaaagagtggat

SEQ ID NO: 240857 - DNA, 30 bp, Artificial Sequence
  Synthetic oligonucleotide
cgcatcaatgtcataacggtggacgtggat

SEQ ID NO: 240858 - DNA, 30 bp, Artificial Sequence
  Synthetic oligonucleotide
attgtgacatttaaggtgggtagggtggat

SEQ ID NO: 240859 - DNA, 30 bp, Artificial Sequence
  Synthetic oligonucleotide
gtgtgaaaagatcgttgggtaatattggat

SEQ ID NO: 240860 - DNA, 30 bp, Artificial Sequence
  Synthetic oligonucleotide
accaaccgaaggtcgtgtaagctcttggat

SEQ ID NO: 240861 - DNA, 30 bp, Artificial Sequence
  Synthetic oligonucleotide
gagcagccctttgcgtgacgagatttggat

SEQ ID NO: 240862 - DNA, 30 bp, Artificial Sequence
  Synthetic oligonucleotide
ttgggattaaaaaaggaatggataaatgat

SEQ ID NO: 240863 - DNA, 30 bp, Artificial Sequence
  Synthetic oligonucleotide
acagtggaactcggggtttcgttaaatgat

SEQ ID NO: 240864 - DNA, 30 bp, Artificial Sequence
  Synthetic oligonucleotide
tctactcaaagcgcagatatattcaatgat

SEQ ID NO: 240865 - DNA, 30 bp, Artificial Sequence
  Synthetic oligonucleotide
gaagacatggagccctctgattataatgat

SEQ ID NO: 240866 - DNA, 30 bp, Artificial Sequence
  Synthetic oligonucleotide
agtgtcggggagttctttggaattaatgat

SEQ ID NO: 240867 - DNA, 30 bp, Artificial Sequence
  Synthetic oligonucleotide
gacactgagcattcccataagacacatgat

SEQ ID NO: 240868 - DNA, 30 bp, Artificial Sequence
  Synthetic oligonucleotide
tcctccataggatacttcttctgacatgat

SEQ ID NO: 240869 - DNA, 30 bp, Artificial Sequence
  Synthetic oligonucleotide
cgtaactgtatgctgctaggtcatcatgat

SEQ ID NO: 240870 - DNA, 30 bp, Artificial Sequence
  Synthetic oligonucleotide
tagtactgcggttatgatttcgatcatgat

SEQ ID NO: 240871 - DNA, 30 bp, Artificial Sequence
  Synthetic oligonucleotide
aacttggcccggtcatacttgtatcatgat

SEQ ID NO: 240872 - DNA, 30 bp, Artificial Sequence
  Synthetic oligonucleotide
gaggtagtcggcataaaccagttcgatgat

SEQ ID NO: 240873 - DNA, 30 bp, Artificial Sequence
  Synthetic oligonucleotide
tattgtgtctcatggggaaggaaggatgat

SEQ ID NO: 240874 - DNA, 30 bp, Artificial Sequence
  Synthetic oligonucleotide
ggcggtctaagagctttttatagggatgat

SEQ ID NO: 240875 - DNA, 30 bp, Artificial Sequence
  Synthetic oligonucleotide
ggccaataggctttgatatgatgggatgat

SEQ ID NO: 240876 - DNA, 30 bp, Artificial Sequence
  Synthetic oligonucleotide
gctcgcgggcattccgcaccatatgatgat

SEQ ID NO: 240877 - DNA, 30 bp, Artificial Sequence
  Synthetic oligonucleotide
agactataaatggcaggagttagctatgat

SEQ ID NO: 240878 - DNA, 30 bp, Artificial Sequence
  Synthetic oligonucleotide
aatgaagtgtctgataagctccgctatgat

SEQ ID NO: 240879 - DNA, 30 bp, Artificial Sequence
  Synthetic oligonucleotide
gggatgcatgttagcacagtaaagtatgat

SEQ ID NO: 240880 - DNA, 30 bp, Artificial Sequence
  Synthetic oligonucleotide
gtccagcgagtagggtattgaatgtatgat

SEQ ID NO: 240881 - DNA, 30 bp, Artificial Sequence
  Synthetic oligonucleotide
ccaagaacaactggataatccccttatgat

SEQ ID NO: 240882 - DNA, 30 bp, Artificial Sequence
  Synthetic oligonucleotide
aggggatgggtagcctcggacgcttatgat

SEQ ID NO: 240883 - DNA, 30 bp, Artificial Sequence
  Synthetic oligonucleotide
ctcatggtatcggatcaaacctgttatgat

SEQ ID NO: 240884 - DNA, 30 bp, Artificial Sequence
  Synthetic oligonucleotide
taacgttttacgggggtcgctatgactgat

SEQ ID NO: 240885 - DNA, 30 bp, Artificial Sequence
  Synthetic oligonucleotide
gcaggaacagcattctgtttgttgactgat

SEQ ID NO: 240886 - DNA, 30 bp, Artificial Sequence
  Synthetic oligonucleotide
acagcggtccactgtgggagccagcctgat

SEQ ID NO: 240887 - DNA, 30 bp, Artificial Sequence
  Synthetic oligonucleotide
ctaattgattctgaatcctgtgagcctgat

SEQ ID NO: 240888 - DNA, 30 bp, Artificial Sequence
  Synthetic oligonucleotide
cgacacggtattttcgaaacaattcctgat

SEQ ID NO: 240889 - DNA, 30 bp, Artificial Sequence
  Synthetic oligonucleotide
ctaaggcggcggaacactgttgacgctgat

SEQ ID NO: 240890 - DNA, 30 bp, Artificial Sequence
  Synthetic oligonucleotide
tatcggtcaatcttaagctgggtcgctgat

SEQ ID NO: 240891 - DNA, 30 bp, Artificial Sequence
  Synthetic oligonucleotide
gcagtgtgcacattgtaagatgactctgat

SEQ ID NO: 240892 - DNA, 30 bp, Artificial Sequence
  Synthetic oligonucleotide
gatcctccaggcgacatgcggtactctgat

SEQ ID NO: 240893 - DNA, 30 bp, Artificial Sequence
  Synthetic oligonucleotide
ggagccctgttaggattctatcgctctgat

SEQ ID NO: 240894 - DNA, 30 bp, Artificial Sequence
  Synthetic oligonucleotide
gaagcggtaggagcgtcaattttgtctgat

SEQ ID NO: 240895 - DNA, 30 bp, Artificial Sequence
  Synthetic oligonucleotide
cagatgatgcgtagtggttacctttctgat

SEQ ID NO: 240896 - DNA, 30 bp, Artificial Sequence
  Synthetic oligonucleotide
actataacggaacggttaaaaatcagtgat

SEQ ID NO: 240897 - DNA, 30 bp, Artificial Sequence
  Synthetic oligonucleotide
ccaactggttaaccgttcaaattcagtgat

SEQ ID NO: 240898 - DNA, 30 bp, Artificial Sequence
  Synthetic oligonucleotide
gacccccgtcgcccaacggcaccgagtgat

SEQ ID NO: 240899 - DNA, 30 bp, Artificial Sequence
  Synthetic oligonucleotide
gggaagttgcgccctagttcgttgagtgat

SEQ ID NO: 240900 - DNA, 30 bp, Artificial Sequence
  Synthetic oligonucleotide
ctgaagcatttgaaatgggtcaatagtgat

SEQ ID NO: 240901 - DNA, 30 bp, Artificial Sequence
  Synthetic oligonucleotide
gaatagaatgtactctatagatctagtgat

SEQ ID NO: 240902 - DNA, 30 bp, Artificial Sequence
  Synthetic oligonucleotide
ccaggcgccaaacagccttctggtagtgat

SEQ ID NO: 240903 - DNA, 30 bp, Artificial Sequence
  Synthetic oligonucleotide
ggtcacgaataaacaactggctcacgtgat

SEQ ID NO: 240904 - DNA, 30 bp, Artificial Sequence
  Synthetic oligonucleotide
tgtgctactcaaggagacgcctgacgtgat

SEQ ID NO: 240905 - DNA, 30 bp, Artificial Sequence
  Synthetic oligonucleotide
ggtcaatgagaaatcttttgtgcgcgtgat

SEQ ID NO: 240906 - DNA, 30 bp, Artificial Sequence
  Synthetic oligonucleotide
gggttgcttggatctttatttttgcgtgat

SEQ ID NO: 240907 - DNA, 30 bp, Artificial Sequence
  Synthetic oligonucleotide
aacgtcccgtagatatgcatgtaaggtgat

SEQ ID NO: 240908 - DNA, 30 bp, Artificial Sequence
  Synthetic oligonucleotide
tataccgtagttctatcggtgcgcggtgat

SEQ ID NO: 240909 - DNA, 30 bp, Artificial Sequence
  Synthetic oligonucleotide
ggatcgtcagactgtatgcgattcggtgat

SEQ ID NO: 240910 - DNA, 30 bp, Artificial Sequence
  Synthetic oligonucleotide
gatacgctggctgatgatttttggggtgat

SEQ ID NO: 240911 - DNA, 30 bp, Artificial Sequence
  Synthetic oligonucleotide
gctatcacatggatgggtaatcttggtgat

SEQ ID NO: 240912 - DNA, 30 bp, Artificial Sequence
  Synthetic oligonucleotide
ccacccgtgctagacttagattgatgtgat

SEQ ID NO: 240913 - DNA, 30 bp, Artificial Sequence
  Synthetic oligonucleotide
agattgggcgtacctcctacgacctgtgat

SEQ ID NO: 240914 - DNA, 30 bp, Artificial Sequence
  Synthetic oligonucleotide
attacccaagcacggatggaaaagtgtgat

SEQ ID NO: 240915 - DNA, 30 bp, Artificial Sequence
  Synthetic oligonucleotide
gtaacgtgtagatctggtagggagtgtgat

SEQ ID NO: 240916 - DNA, 30 bp, Artificial Sequence
  Synthetic oligonucleotide
caaggtcactcacaggtgagatattgtgat

SEQ ID NO: 240917 - DNA, 30 bp, Artificial Sequence
  Synthetic oligonucleotide
cacaccaatatagggtcacattaaattgat

SEQ ID NO: 240918 - DNA, 30 bp, Artificial Sequence
  Synthetic oligonucleotide
tcctgacttagggtgtactgattaattgat

SEQ ID NO: 240919 - DNA, 30 bp, Artificial Sequence
  Synthetic oligonucleotide
actaacagggttgtgaactgcaacattgat

SEQ ID NO: 240920 - DNA, 30 bp, Artificial Sequence
  Synthetic oligonucleotide
accagtgagatgcgcatagagtgcattgat

SEQ ID NO: 240921 - DNA, 30 bp, Artificial Sequence
  Synthetic oligonucleotide
aagacacagtaaaaaactagtgggattgat

SEQ ID NO: 240922 - DNA, 30 bp, Artificial Sequence
  Synthetic oligonucleotide
aataatgtccggggttagaacacacttgat

SEQ ID NO: 240923 - DNA, 30 bp, Artificial Sequence
  Synthetic oligonucleotide
agcttacactagacgtttgtaacccttgat

SEQ ID NO: 240924 - DNA, 30 bp, Artificial Sequence
  Synthetic oligonucleotide
tacgcaactggagagtgaccgttccttgat

SEQ ID NO: 240925 - DNA, 30 bp, Artificial Sequence
  Synthetic oligonucleotide
aaggtagatgaacgtctgatcaaagttgat

SEQ ID NO: 240926 - DNA, 30 bp, Artificial Sequence
  Synthetic oligonucleotide
aacgtaaaaatgcatgtccccccagttgat

SEQ ID NO: 240927 - DNA, 30 bp, Artificial Sequence
  Synthetic oligonucleotide
ttttcgcgtagattccgtaacagagttgat

SEQ ID NO: 240928 - DNA, 30 bp, Artificial Sequence
  Synthetic oligonucleotide
tagagcggcccggaagtttcttaggttgat

SEQ ID NO: 240929 - DNA, 30 bp, Artificial Sequence
  Synthetic oligonucleotide
tatgaacggtgagctgtcacactggttgat

SEQ ID NO: 240930 - DNA, 30 bp, Artificial Sequence
  Synthetic oligonucleotide
tcagggacacgcaagaggcggattgttgat

SEQ ID NO: 240931 - DNA, 30 bp, Artificial Sequence
  Synthetic oligonucleotide
cgccgtaactagctatacgatcttgttgat

SEQ ID NO: 240932 - DNA, 30 bp, Artificial Sequence
  Synthetic oligonucleotide
ggtcagcgagaacaaaggacaccatttgat

SEQ ID NO: 240933 - DNA, 30 bp, Artificial Sequence
  Synthetic oligonucleotide
aaaggcgacggagcggtggtactatttgat

SEQ ID NO: 240934 - DNA, 30 bp, Artificial Sequence
  Synthetic oligonucleotide
gttcgctcgtgtgaagagagatattttgat

SEQ ID NO: 240935 - DNA, 30 bp, Artificial Sequence
  Synthetic oligonucleotide
ggactctaaattacatcattatgaaaatat

SEQ ID NO: 240936 - DNA, 30 bp, Artificial Sequence
  Synthetic oligonucleotide
gaaacggtgacaacgcaagccataaaatat

SEQ ID NO: 240937 - DNA, 30 bp, Artificial Sequence
  Synthetic oligonucleotide
gggtcatgcatgaagcaaacggataaatat

SEQ ID NO: 240938 - DNA, 30 bp, Artificial Sequence
  Synthetic oligonucleotide
gcttcaagggtgttcaattcgtcacaatat

SEQ ID NO: 240939 - DNA, 30 bp, Artificial Sequence
  Synthetic oligonucleotide
tgaactcatataggtgttttgctacaatat

SEQ ID NO: 240940 - DNA, 30 bp, Artificial Sequence
  Synthetic oligonucleotide
taattgcagggactacgaatagagcaatat

SEQ ID NO: 240941 - DNA, 30 bp, Artificial Sequence
  Synthetic oligonucleotide
gagattcgactggttaagttaaggcaatat

SEQ ID NO: 240942 - DNA, 30 bp, Artificial Sequence
  Synthetic oligonucleotide
taggtgtaatgatccgatatagggcaatat

SEQ ID NO: 240943 - DNA, 30 bp, Artificial Sequence
  Synthetic oligonucleotide
tcgtccccagttatcaatatgcgtcaatat

SEQ ID NO: 240944 - DNA, 30 bp, Artificial Sequence
  Synthetic oligonucleotide
gtgagttacagattcgaacgcggtcaatat

SEQ ID NO: 240945 - DNA, 31 bp, Artificial Sequence
  Synthetic oligonucleotide
cggtcgtattcatgtgaagaatacggaatat

SEQ ID NO: 240946 - DNA, 30 bp, Artificial Sequence
  Synthetic oligonucleotide
acatttttgcccaactgtatctcggaatat

SEQ ID NO: 240947 - DNA, 30 bp, Artificial Sequence
  Synthetic oligonucleotide
agtgtctattttggacgggggagggaatat

SEQ ID NO: 240948 - DNA, 30 bp, Artificial Sequence
  Synthetic oligonucleotide
tctgagacggtctaggtattatgggaatat

SEQ ID NO: 240949 - DNA, 30 bp, Artificial Sequence
  Synthetic oligonucleotide
attatgggaaagtaatgggggagataatat

SEQ ID NO: 240950 - DNA, 30 bp, Artificial Sequence
  Synthetic oligonucleotide
tacctcgatctctaaagcattgcctaatat

SEQ ID NO: 240951 - DNA, 30 bp, Artificial Sequence
  Synthetic oligonucleotide
ttcgacggagagaagaaggtggggtaatat

SEQ ID NO: 240952 - DNA, 30 bp, Artificial Sequence
  Synthetic oligonucleotide
aggacgcatgctcgaagattagattaatat

SEQ ID NO: 240953 - DNA, 30 bp, Artificial Sequence
  Synthetic oligonucleotide
ctattatcaacctcgattcatggttaatat

SEQ ID NO: 240954 - DNA, 30 bp, Artificial Sequence
  Synthetic oligonucleotide
acgtgtcacggtacgtgtgtggcaacatat

SEQ ID NO: 240955 - DNA, 30 bp, Artificial Sequence
  Synthetic oligonucleotide
tcccgagtgagagcctcatgaggaacatat

SEQ ID NO: 240956 - DNA, 30 bp, Artificial Sequence
  Synthetic oligonucleotide
ttcgcatagtcaggtgatcgaataacatat

SEQ ID NO: 240957 - DNA, 30 bp, Artificial Sequence
  Synthetic oligonucleotide
tctaaaacgacctcaaacgttataacatat

SEQ ID NO: 240958 - DNA, 30 bp, Artificial Sequence
  Synthetic oligonucleotide
gttaggagcagtgaccgattagtaacatat

SEQ ID NO: 240959 - DNA, 30 bp, Artificial Sequence
  Synthetic oligonucleotide
acgtcagaacaagggcgctccgtaacatat

SEQ ID NO: 240960 - DNA, 30 bp, Artificial Sequence
  Synthetic oligonucleotide
accaagtccaaccggagggcagacacatat

SEQ ID NO: 240961 - DNA, 30 bp, Artificial Sequence
  Synthetic oligonucleotide
aaatcagcaggtacttgcagctggacatat

SEQ ID NO: 240962 - DNA, 30 bp, Artificial Sequence
  Synthetic oligonucleotide
gtgcaaaggcgtcgattgctcgtgacatat

SEQ ID NO: 240963 - DNA, 30 bp, Artificial Sequence
  Synthetic oligonucleotide
acactgtgatatgcaaggacccatacatat

SEQ ID NO: 240964 - DNA, 30 bp, Artificial Sequence
  Synthetic oligonucleotide
agagaggctctatggaagccatgcccatat

SEQ ID NO: 240965 - DNA, 30 bp, Artificial Sequence
  Synthetic oligonucleotide
gactcgtatataaaaggggtccagccatat

SEQ ID NO: 240966 - DNA, 30 bp, Artificial Sequence
  Synthetic oligonucleotide
tggggaacgaaggttgcaggccttccatat

SEQ ID NO: 240967 - DNA, 30 bp, Artificial Sequence
  Synthetic oligonucleotide
aggaatgacagcgtgtggtgataggcatat

SEQ ID NO: 240968 - DNA, 30 bp, Artificial Sequence
  Synthetic oligonucleotide
tatcggtggtggaccgcatgaagggcatat

SEQ ID NO: 240969 - DNA, 30 bp, Artificial Sequence
  Synthetic oligonucleotide
cattgtgccgtctagcagcgtgtggcatat

SEQ ID NO: 240970 - DNA, 30 bp, Artificial Sequence
  Synthetic oligonucleotide
atggcagtgtttgaaataatctgatcatat

SEQ ID NO: 240971 - DNA, 30 bp, Artificial Sequence
  Synthetic oligonucleotide
agatatatatagcaaccagctcggtcatat

SEQ ID NO: 240972 - DNA, 30 bp, Artificial Sequence
  Synthetic oligonucleotide
cacccgatatgccatccataccattcatat

SEQ ID NO: 240973 - DNA, 30 bp, Artificial Sequence
  Synthetic oligonucleotide
gtgagggtaaagatagacatagcttcatat

SEQ ID NO: 240974 - DNA, 30 bp, Artificial Sequence
  Synthetic oligonucleotide
ctgtgcgaaagccgttgggaattttcatat

SEQ ID NO: 240975 - DNA, 30 bp, Artificial Sequence
  Synthetic oligonucleotide
cagctcacgctttgtaaacaggggagatat

SEQ ID NO: 240976 - DNA, 30 bp, Artificial Sequence
  Synthetic oligonucleotide
aagcaagatattctgtgcggcaaacgatat

SEQ ID NO: 240977 - DNA, 30 bp, Artificial Sequence
  Synthetic oligonucleotide
atacgttaaaaattaggggtgaaacgatat

SEQ ID NO: 240978 - DNA, 30 bp, Artificial Sequence
  Synthetic oligonucleotide
agtaaaatggatttgagatcttcccgatat

SEQ ID NO: 240979 - DNA, 30 bp, Artificial Sequence
  Synthetic oligonucleotide
cctacccgttgacctcacgttgtccgatat

SEQ ID NO: 240980 - DNA, 30 bp, Artificial Sequence
  Synthetic oligonucleotide
cgtgagcacttaggtttgcgcgctcgatat

SEQ ID NO: 240981 - DNA, 30 bp, Artificial Sequence
  Synthetic oligonucleotide
ccttgggactttagataatccgccggatat

SEQ ID NO: 240982 - DNA, 30 bp, Artificial Sequence
  Synthetic oligonucleotide
cgacccacgggctaggtgcacgagggatat

SEQ ID NO: 240983 - DNA, 30 bp, Artificial Sequence
  Synthetic oligonucleotide
gtcgaatctgaaatttcggggacgggatat

SEQ ID NO: 240984 - DNA, 30 bp, Artificial Sequence
  Synthetic oligonucleotide
cctccatttgtggaacgatcacggggatat

SEQ ID NO: 240985 - DNA, 30 bp, Artificial Sequence
  Synthetic oligonucleotide
gtagaaagcggaaaagcatgttggggatat

SEQ ID NO: 240986 - DNA, 30 bp, Artificial Sequence
  Synthetic oligonucleotide
taaggaatacgtcactggggagtctgatat

SEQ ID NO: 240987 - DNA, 30 bp, Artificial Sequence
  Synthetic oligonucleotide
tctatggggggaagaacgtactggtgatat

SEQ ID NO: 240988 - DNA, 30 bp, Artificial Sequence
  Synthetic oligonucleotide
tgttcacgaccagccctgggatattgatat

SEQ ID NO: 240989 - DNA, 30 bp, Artificial Sequence
  Synthetic oligonucleotide
gcgtgcgtcgtcgatactggcaaaatatat

SEQ ID NO: 240990 - DNA, 30 bp, Artificial Sequence
  Synthetic oligonucleotide
ctgcggtagtaacaaaaacatctcatatat

SEQ ID NO: 240991 - DNA, 30 bp, Artificial Sequence
  Synthetic oligonucleotide
atcgtatactttcatacgcgtaagatatat

SEQ ID NO: 240992 - DNA, 30 bp, Artificial Sequence
  Synthetic oligonucleotide
cttcggctaacatttcttgaagagatatat

SEQ ID NO: 240993 - DNA, 30 bp, Artificial Sequence
  Synthetic oligonucleotide
aggctacaaaccctgtggcacactatatat

SEQ ID NO: 240994 - DNA, 30 bp, Artificial Sequence
  Synthetic oligonucleotide
attatgatagccatcgggagcggtatatat

SEQ ID NO: 240995 - DNA, 30 bp, Artificial Sequence
  Synthetic oligonucleotide
gactgtaggcatcggtatgtaggactatat

SEQ ID NO: 240996 - DNA, 30 bp, Artificial Sequence
  Synthetic oligonucleotide
gtgacgaggtatccatgaacgggcctatat

SEQ ID NO: 240997 - DNA, 30 bp, Artificial Sequence
  Synthetic oligonucleotide
actcagaggactaggaagaattgcctatat

SEQ ID NO: 240998 - DNA, 30 bp, Artificial Sequence
  Synthetic oligonucleotide
gctttataaaatagtcgaagagagctatat

SEQ ID NO: 240999 - DNA, 30 bp, Artificial Sequence
  Synthetic oligonucleotide
gggctctgaattatccgacaccggctatat

SEQ ID NO: 241000 - DNA, 30 bp, Artificial Sequence
  Synthetic oligonucleotide
gttcaaatccccatcagaataattctatat

SEQ ID NO: 241001 - DNA, 30 bp, Artificial Sequence
  Synthetic oligonucleotide
gctaaaggcaccatctgaaatgttctatat

SEQ ID NO: 241002 - DNA, 30 bp, Artificial Sequence
  Synthetic oligonucleotide
tggaacacgtttccagttgagtttctatat

SEQ ID NO: 241003 - DNA, 30 bp, Artificial Sequence
  Synthetic oligonucleotide
tttcgaacaaaccccagtagtaaagtatat

SEQ ID NO: 241004 - DNA, 30 bp, Artificial Sequence
  Synthetic oligonucleotide
agagggggaggcgtggacaacttggtatat

SEQ ID NO: 241005 - DNA, 30 bp, Artificial Sequence
  Synthetic oligonucleotide
ctagacacgggccgtaactggtatgtatat

SEQ ID NO: 241006 - DNA, 30 bp, Artificial Sequence
  Synthetic oligonucleotide
gcgcgcttaacaatgtattcgcaattatat

SEQ ID NO: 241007 - DNA, 30 bp, Artificial Sequence
  Synthetic oligonucleotide
ctaattttcggtccagtacgacgattatat

SEQ ID NO: 241008 - DNA, 30 bp, Artificial Sequence
  Synthetic oligonucleotide
acactctacacctaggcaaccttattatat

SEQ ID NO: 241009 - DNA, 30 bp, Artificial Sequence
  Synthetic oligonucleotide
catgtgggagtcacgacgtaatacttatat

SEQ ID NO: 241010 - DNA, 30 bp, Artificial Sequence
  Synthetic oligonucleotide
aatggcggctaatgaggtatcgtcttatat

SEQ ID NO: 241011 - DNA, 30 bp, Artificial Sequence
  Synthetic oligonucleotide
aaggtatcactacatagacgtatgttatat

SEQ ID NO: 241012 - DNA, 30 bp, Artificial Sequence
  Synthetic oligonucleotide
tactgcgacgacggaacgtccgatttatat

SEQ ID NO: 241013 - DNA, 30 bp, Artificial Sequence
  Synthetic oligonucleotide
cgaaactgaccgagaatctgagttttatat

SEQ ID NO: 241014 - DNA, 30 bp, Artificial Sequence
  Synthetic oligonucleotide
aggtcgtagtcctccgacaccgttttatat

SEQ ID NO: 241015 - DNA, 30 bp, Artificial Sequence
  Synthetic oligonucleotide
acctgaagtatgaattaaaacttcaactat

SEQ ID NO: 241016 - DNA, 30 bp, Artificial Sequence
  Synthetic oligonucleotide
tctagcaagggaacgcagaccaataactat

SEQ ID NO: 241017 - DNA, 30 bp, Artificial Sequence
  Synthetic oligonucleotide
cacggtgcaagctaccaaaggactaactat

SEQ ID NO: 241018 - DNA, 30 bp, Artificial Sequence
  Synthetic oligonucleotide
atccaatgatagtaaaagaggccgcactat

SEQ ID NO: 241019 - DNA, 30 bp, Artificial Sequence
  Synthetic oligonucleotide
gggagtgattttccctgttcgtacgactat

SEQ ID NO: 241020 - DNA, 30 bp, Artificial Sequence
  Synthetic oligonucleotide
gaggtgcgagagcatttgatatgcgactat

SEQ ID NO: 241021 - DNA, 30 bp, Artificial Sequence
  Synthetic oligonucleotide
tgtcaaaatcgaacaattaatattgactat

SEQ ID NO: 241022 - DNA, 30 bp, Artificial Sequence
  Synthetic oligonucleotide
gaaacgatgtagtcgctccggtcatactat

SEQ ID NO: 241023 - DNA, 30 bp, Artificial Sequence
  Synthetic oligonucleotide
ttgcacaccgtaaggcaggccaagtactat

SEQ ID NO: 241024 - DNA, 30 bp, Artificial Sequence
  Synthetic oligonucleotide
actagtgtccggatgtggggtgagtactat

SEQ ID NO: 241025 - DNA, 30 bp, Artificial Sequence
  Synthetic oligonucleotide
tcactgtggagtgctgtgaggaaaacctat

SEQ ID NO: 241026 - DNA, 30 bp, Artificial Sequence
  Synthetic oligonucleotide
taaagcgcagggattctccatcaaacctat

SEQ ID NO: 241027 - DNA, 30 bp, Artificial Sequence
  Synthetic oligonucleotide
gatccgtgccgggctactaccgaaacctat

SEQ ID NO: 241028 - DNA, 30 bp, Artificial Sequence
  Synthetic oligonucleotide
cttagaggcatacgttgcgcgtagacctat

SEQ ID NO: 241029 - DNA, 30 bp, Artificial Sequence
  Synthetic oligonucleotide
ggataagtaaagatgaatctgaatacctat

SEQ ID NO: 241030 - DNA, 30 bp, Artificial Sequence
  Synthetic oligonucleotide
cgagatgagctccgccgtgacggaccctat

SEQ ID NO: 241031 - DNA, 30 bp, Artificial Sequence
  Synthetic oligonucleotide
atcgaggggggacttaagtttatcccctat

SEQ ID NO: 241032 - DNA, 30 bp, Artificial Sequence
  Synthetic oligonucleotide
tcaacaccacgtggcaagggagtcccctat

SEQ ID NO: 241033 - DNA, 30 bp, Artificial Sequence
  Synthetic oligonucleotide
tcgacctttccctctcggagatctccctat

SEQ ID NO: 241034 - DNA, 30 bp, Artificial Sequence
  Synthetic oligonucleotide
tcgtaaggatcgtaatagtgttaagcctat

SEQ ID NO: 241035 - DNA, 30 bp, Artificial Sequence
  Synthetic oligonucleotide
cccgcagttaccgattcatccctagcctat

SEQ ID NO: 241036 - DNA, 30 bp, Artificial Sequence
  Synthetic oligonucleotide
ggtcccaaccggtccaaaactgaggcctat

SEQ ID NO: 241037 - DNA, 30 bp, Artificial Sequence
  Synthetic oligonucleotide
aactaggagggcctgtacgtgccggcctat

SEQ ID NO: 241038 - DNA, 30 bp, Artificial Sequence
  Synthetic oligonucleotide
ttgttgtgttctctttttgtgttatcctat

SEQ ID NO: 241039 - DNA, 30 bp, Artificial Sequence
  Synthetic oligonucleotide
atggcaggtctgccgggcatccggtcctat

SEQ ID NO: 241040 - DNA, 30 bp, Artificial Sequence
  Synthetic oligonucleotide
gtctggtgttcaaatgctgactattcctat

SEQ ID NO: 241041 - DNA, 30 bp, Artificial Sequence
  Synthetic oligonucleotide
gcacgggcagattcgctagagtattcctat

SEQ ID NO: 241042 - DNA, 30 bp, Artificial Sequence
  Synthetic oligonucleotide
ttgttagagtagcctgtggtgtcttcctat

SEQ ID NO: 241043 - DNA, 30 bp, Artificial Sequence
  Synthetic oligonucleotide
aggagtaatatttgtaggggaggttcctat

SEQ ID NO: 241044 - DNA, 30 bp, Artificial Sequence
  Synthetic oligonucleotide
ttgttgtgttctatttttgtgttttcctat

SEQ ID NO: 241045 - DNA, 30 bp, Artificial Sequence
  Synthetic oligonucleotide
ttgtggtgttctctttttgtgttttcctat

SEQ ID NO: 241046 - DNA, 30 bp, Artificial Sequence
  Synthetic oligonucleotide
gagaccgaagggtagttcactccgagctat

SEQ ID NO: 241047 - DNA, 30 bp, Artificial Sequence
  Synthetic oligonucleotide
tgaagtccatggcacagcgatttgagctat

SEQ ID NO: 241048 - DNA, 30 bp, Artificial Sequence
  Synthetic oligonucleotide
tatggagctcgggagtgattttcgcgctat

SEQ ID NO: 241049 - DNA, 30 bp, Artificial Sequence
  Synthetic oligonucleotide
ttagcataaagagtcctgagcatgcgctat

SEQ ID NO: 241050 - DNA, 30 bp, Artificial Sequence
  Synthetic oligonucleotide
actcgcaatcatgttgacaccattcgctat

SEQ ID NO: 241051 - DNA, 30 bp, Artificial Sequence
  Synthetic oligonucleotide
acacagaaaccctcgacaagaggctgctat

SEQ ID NO: 241052 - DNA, 30 bp, Artificial Sequence
  Synthetic oligonucleotide
ccggggagtaatgattaggacatgtgctat

SEQ ID NO: 241053 - DNA, 30 bp, Artificial Sequence
  Synthetic oligonucleotide
ctacataatacgaggcatgtatattgctat

SEQ ID NO: 241054 - DNA, 30 bp, Artificial Sequence
  Synthetic oligonucleotide
gcgcttctgtacaaacttgatcacatctat

SEQ ID NO: 241055 - DNA, 30 bp, Artificial Sequence
  Synthetic oligonucleotide
acataactattaagtaggcgctacatctat

SEQ ID NO: 241056 - DNA, 30 bp, Artificial Sequence
  Synthetic oligonucleotide
ggctgtagatcgcgtgaggcgggcatctat

SEQ ID NO: 241057 - DNA, 30 bp, Artificial Sequence
  Synthetic oligonucleotide
gatcaggacccttgctggtgtgagatctat

SEQ ID NO: 241058 - DNA, 30 bp, Artificial Sequence
  Synthetic oligonucleotide
aggcttccagcctgggaattgcggatctat

SEQ ID NO: 241059 - DNA, 30 bp, Artificial Sequence
  Synthetic oligonucleotide
ggtcatgcggtcaagcattcaagtatctat

SEQ ID NO: 241060 - DNA, 30 bp, Artificial Sequence
  Synthetic oligonucleotide
atacgatggcgaaaattgaaggacctctat

SEQ ID NO: 241061 - DNA, 30 bp, Artificial Sequence
  Synthetic oligonucleotide
acttttcacgatcagatgccctagctctat

SEQ ID NO: 241062 - DNA, 30 bp, Artificial Sequence
  Synthetic oligonucleotide
tgatcacatcttgtgctgtaacatctctat

SEQ ID NO: 241063 - DNA, 30 bp, Artificial Sequence
  Synthetic oligonucleotide
ctcggcaaacttggcattggccttgtctat

SEQ ID NO: 241064 - DNA, 30 bp, Artificial Sequence
  Synthetic oligonucleotide
ggcaatcagcaatagatccgcaaattctat

SEQ ID NO: 241065 - DNA, 30 bp, Artificial Sequence
  Synthetic oligonucleotide
ataatctgtatggaacaaaaggcaaagtat

SEQ ID NO: 241066 - DNA, 30 bp, Artificial Sequence
  Synthetic oligonucleotide
tgtgagtgttgggtcaaggcggtaaagtat

SEQ ID NO: 241067 - DNA, 30 bp, Artificial Sequence
  Synthetic oligonucleotide
aaaacataaatggcgaaagaacccaagtat

SEQ ID NO: 241068 - DNA, 30 bp, Artificial Sequence
  Synthetic oligonucleotide
agaaaccattcttactactgacagaagtat

SEQ ID NO: 241069 - DNA, 30 bp, Artificial Sequence
  Synthetic oligonucleotide
acacatcacatgagtgatattgataagtat

SEQ ID NO: 241070 - DNA, 30 bp, Artificial Sequence
  Synthetic oligonucleotide
aaggagattcacaggggatgtagtaagtat

SEQ ID NO: 241071 - DNA, 30 bp, Artificial Sequence
  Synthetic oligonucleotide
ggcggcttgcagaaactaaaggcacagtat

SEQ ID NO: 241072 - DNA, 30 bp, Artificial Sequence
  Synthetic oligonucleotide
tattcggaagactggccctgtacccagtat

SEQ ID NO: 241073 - DNA, 30 bp, Artificial Sequence
  Synthetic oligonucleotide
ccgtgcatggatccgtgactgcgccagtat

SEQ ID NO: 241074 - DNA, 30 bp, Artificial Sequence
  Synthetic oligonucleotide
cagggaaacactgattcattcacgcagtat

SEQ ID NO: 241075 - DNA, 30 bp, Artificial Sequence
  Synthetic oligonucleotide
gaagaagcggacctcagacaggggcagtat

SEQ ID NO: 241076 - DNA, 30 bp, Artificial Sequence
  Synthetic oligonucleotide
tggatcggacggatgtccaacaatcagtat

SEQ ID NO: 241077 - DNA, 30 bp, Artificial Sequence
  Synthetic oligonucleotide
ttcaaactcggtgcgggaatagttcagtat

SEQ ID NO: 241078 - DNA, 30 bp, Artificial Sequence
  Synthetic oligonucleotide
aatggattgttcgaatctatgtaagagtat

SEQ ID NO: 241079 - DNA, 30 bp, Artificial Sequence
  Synthetic oligonucleotide
cgtcggagagcgttggcgacgccggagtat

SEQ ID NO: 241080 - DNA, 30 bp, Artificial Sequence
  Synthetic oligonucleotide
cagatcatccgcaattaacacagtgagtat

SEQ ID NO: 241081 - DNA, 30 bp, Artificial Sequence
  Synthetic oligonucleotide
ttggggaggatatgaaatgaataatagtat

SEQ ID NO: 241082 - DNA, 30 bp, Artificial Sequence
  Synthetic oligonucleotide
ctcgtgataaggatcgggcgcaagtagtat

SEQ ID NO: 241083 - DNA, 30 bp, Artificial Sequence
  Synthetic oligonucleotide
ggtccgataatgcactcccactcaacgtat

SEQ ID NO: 241084 - DNA, 30 bp, Artificial Sequence
  Synthetic oligonucleotide
attcaacccatctcgagatattcaacgtat

SEQ ID NO: 241085 - DNA, 30 bp, Artificial Sequence
  Synthetic oligonucleotide
acacttaatctgtagaagagaaccacgtat

SEQ ID NO: 241086 - DNA, 30 bp, Artificial Sequence
  Synthetic oligonucleotide
caaccagtggaaggttcgacatagacgtat

SEQ ID NO: 241087 - DNA, 30 bp, Artificial Sequence
  Synthetic oligonucleotide
accttactcggacagtcaagtcggacgtat

SEQ ID NO: 241088 - DNA, 30 bp, Artificial Sequence
  Synthetic oligonucleotide
caggtaagggagttcattgaatggacgtat

SEQ ID NO: 241089 - DNA, 30 bp, Artificial Sequence
  Synthetic oligonucleotide
tcatcacaaacccacccagcccttacgtat

SEQ ID NO: 241090 - DNA, 30 bp, Artificial Sequence
  Synthetic oligonucleotide
ttccgattgtgggcacacgacataccgtat

SEQ ID NO: 241091 - DNA, 30 bp, Artificial Sequence
  Synthetic oligonucleotide
ctaaatgttagtgccaatacctacccgtat

SEQ ID NO: 241092 - DNA, 30 bp, Artificial Sequence
  Synthetic oligonucleotide
aaacttagccggaaggttgataagccgtat

SEQ ID NO: 241093 - DNA, 30 bp, Artificial Sequence
  Synthetic oligonucleotide
tccgctctacacaaatcagcatcagcgtat

SEQ ID NO: 241094 - DNA, 31 bp, Artificial Sequence
  Synthetic oligonucleotide
gatgactgccatctgacaacattcagcgtat

SEQ ID NO: 241095 - DNA, 30 bp, Artificial Sequence
  Synthetic oligonucleotide
gtcgtatcgatcctaactagggacgcgtat

SEQ ID NO: 241096 - DNA, 30 bp, Artificial Sequence
  Synthetic oligonucleotide
aggctatctctctttgctaggctggcgtat

SEQ ID NO: 241097 - DNA, 30 bp, Artificial Sequence
  Synthetic oligonucleotide
taattctagagttgaaaggggtatgcgtat

SEQ ID NO: 241098 - DNA, 30 bp, Artificial Sequence
  Synthetic oligonucleotide
tgcgtaagtcgctcagatccggaatcgtat

SEQ ID NO: 241099 - DNA, 30 bp, Artificial Sequence
  Synthetic oligonucleotide
attagcgtgcaatctagggatgtatcgtat

SEQ ID NO: 241100 - DNA, 30 bp, Artificial Sequence
  Synthetic oligonucleotide
tcgaacagatctaccgagaattcgtcgtat

SEQ ID NO: 241101 - DNA, 30 bp, Artificial Sequence
  Synthetic oligonucleotide
atatgtaacgttgtgcgtccgatttcgtat

SEQ ID NO: 241102 - DNA, 30 bp, Artificial Sequence
  Synthetic oligonucleotide
gtagccaatggcagtcagcagatcaggtat

SEQ ID NO: 241103 - DNA, 30 bp, Artificial Sequence
  Synthetic oligonucleotide
tgttcgtaggccgaccgacctttcaggtat

SEQ ID NO: 241104 - DNA, 30 bp, Artificial Sequence
  Synthetic oligonucleotide
gaggaggattgtcttggacgcgggaggtat

SEQ ID NO: 241105 - DNA, 30 bp, Artificial Sequence
  Synthetic oligonucleotide
gggtttttcaaactagcagtgcgacggtat

SEQ ID NO: 241106 - DNA, 30 bp, Artificial Sequence
  Synthetic oligonucleotide
ttaagttgtatttcggtttcatgccggtat

SEQ ID NO: 241107 - DNA, 30 bp, Artificial Sequence
  Synthetic oligonucleotide
aagacactcttaaaattaaatgtgcggtat

SEQ ID NO: 241108 - DNA, 30 bp, Artificial Sequence
  Synthetic oligonucleotide
cagaccatctcgaaagtgctctatcggtat

SEQ ID NO: 241109 - DNA, 30 bp, Artificial Sequence
  Synthetic oligonucleotide
gtacctatccttacaccacgacgtcggtat

SEQ ID NO: 241110 - DNA, 30 bp, Artificial Sequence
  Synthetic oligonucleotide
tcaaagcaacgtcggtagatataagggtat

SEQ ID NO: 241111 - DNA, 30 bp, Artificial Sequence
  Synthetic oligonucleotide
accccggtgatcggctggcgaagagggtat

SEQ ID NO: 241112 - DNA, 30 bp, Artificial Sequence
  Synthetic oligonucleotide
agcgggagtacttacattacagacgggtat

SEQ ID NO: 241113 - DNA, 30 bp, Artificial Sequence
  Synthetic oligonucleotide
tgcgccaatgaaggcggatagagcgggtat

SEQ ID NO: 241114 - DNA, 30 bp, Artificial Sequence
  Synthetic oligonucleotide
gaccaaggtagtagctcgtgttcggggtat

SEQ ID NO: 241115 - DNA, 30 bp, Artificial Sequence
  Synthetic oligonucleotide
gcctacgttttggtgggtgcaacatggtat

SEQ ID NO: 241116 - DNA, 30 bp, Artificial Sequence
  Synthetic oligonucleotide
gtaattatcgacgcaaaactcggatggtat

SEQ ID NO: 241117 - DNA, 30 bp, Artificial Sequence
  Synthetic oligonucleotide
ggctgtcgttgtaatatatgaacctggtat

SEQ ID NO: 241118 - DNA, 30 bp, Artificial Sequence
  Synthetic oligonucleotide
ctgacatgattggaatgtccaacgtggtat

SEQ ID NO: 241119 - DNA, 31 bp, Artificial Sequence
  Synthetic oligonucleotide
cctccgggaatggttaccacagaaaatgtat

SEQ ID NO: 241120 - DNA, 30 bp, Artificial Sequence
  Synthetic oligonucleotide
aagttactaggtggacttaattcaatgtat

SEQ ID NO: 241121 - DNA, 30 bp, Artificial Sequence
  Synthetic oligonucleotide
tactagcccaataactgaattagaatgtat

SEQ ID NO: 241122 - DNA, 30 bp, Artificial Sequence
  Synthetic oligonucleotide
gccctatatcataaaataaactacatgtat

SEQ ID NO: 241123 - DNA, 30 bp, Artificial Sequence
  Synthetic oligonucleotide
aagaaggttggccgactggggcgcatgtat

SEQ ID NO: 241124 - DNA, 30 bp, Artificial Sequence
  Synthetic oligonucleotide
ccagttaaatcaaacttccctggcatgtat

SEQ ID NO: 241125 - DNA, 30 bp, Artificial Sequence
  Synthetic oligonucleotide
aacaaggctaactgtaatgttcggatgtat

SEQ ID NO: 241126 - DNA, 30 bp, Artificial Sequence
  Synthetic oligonucleotide
cgtcattttattcccccatttaatatgtat

SEQ ID NO: 241127 - DNA, 30 bp, Artificial Sequence
  Synthetic oligonucleotide
gggccgtcatgataaagaaatgttatgtat

SEQ ID NO: 241128 - DNA, 30 bp, Artificial Sequence
  Synthetic oligonucleotide
gggagagacggccttggccctgaactgtat

SEQ ID NO: 241129 - DNA, 30 bp, Artificial Sequence
  Synthetic oligonucleotide
aagctactacccctggtgtcgagactgtat

SEQ ID NO: 241130 - DNA, 30 bp, Artificial Sequence
  Synthetic oligonucleotide
cttgttctccagggtacatatgtactgtat

SEQ ID NO: 241131 - DNA, 30 bp, Artificial Sequence
  Synthetic oligonucleotide
attgcctgagcaaatggaaaaaaagtgtat

SEQ ID NO: 241132 - DNA, 30 bp, Artificial Sequence
  Synthetic oligonucleotide
ggtaggggatggagcagaacaagagtgtat

SEQ ID NO: 241133 - DNA, 30 bp, Artificial Sequence
  Synthetic oligonucleotide
agataaaccacaaaagtacggagagtgtat

SEQ ID NO: 241134 - DNA, 30 bp, Artificial Sequence
  Synthetic oligonucleotide
ggataatcccttgaaaaaaggaaggtgtat

SEQ ID NO: 241135 - DNA, 30 bp, Artificial Sequence
  Synthetic oligonucleotide
acatggccacatctcttcgcgcttgtgtat

SEQ ID NO: 241136 - DNA, 30 bp, Artificial Sequence
  Synthetic oligonucleotide
tattatctgttgtgttttcctcttgtgtat

SEQ ID NO: 241137 - DNA, 30 bp, Artificial Sequence
  Synthetic oligonucleotide
tatcatcggcaagagctcgcgaaattgtat

SEQ ID NO: 241138 - DNA, 30 bp, Artificial Sequence
  Synthetic oligonucleotide
cgtgcgcgtctaaagacagtgtcattgtat

SEQ ID NO: 241139 - DNA, 30 bp, Artificial Sequence
  Synthetic oligonucleotide
acaaataaggtgggtgtcaaaagattgtat

SEQ ID NO: 241140 - DNA, 30 bp, Artificial Sequence
  Synthetic oligonucleotide
cacgttagttgagaggaaggtggacattat

SEQ ID NO: 241141 - DNA, 30 bp, Artificial Sequence
  Synthetic oligonucleotide
caaataatccacacgagcccgaaccattat

SEQ ID NO: 241142 - DNA, 30 bp, Artificial Sequence
  Synthetic oligonucleotide
ccctgctttgcatgggatattcgccattat

SEQ ID NO: 241143 - DNA, 30 bp, Artificial Sequence
  Synthetic oligonucleotide
tacaccctcccagattgtgtgcagcattat

SEQ ID NO: 241144 - DNA, 30 bp, Artificial Sequence
  Synthetic oligonucleotide
gatcaatcgccaaagtaaagggcgcattat

SEQ ID NO: 241145 - DNA, 30 bp, Artificial Sequence
  Synthetic oligonucleotide
agggccagccgaccgcttacgactcattat

SEQ ID NO: 241146 - DNA, 30 bp, Artificial Sequence
  Synthetic oligonucleotide
cgcgcgcagacatctcaatgagttcattat

SEQ ID NO: 241147 - DNA, 30 bp, Artificial Sequence
  Synthetic oligonucleotide
gcgattgggatgaacgtagaatgagattat

SEQ ID NO: 241148 - DNA, 30 bp, Artificial Sequence
  Synthetic oligonucleotide
gaaagagaagcgggtacagagatagattat

SEQ ID NO: 241149 - DNA, 30 bp, Artificial Sequence
  Synthetic oligonucleotide
cctaattcgggaacgccacgtggcgattat

SEQ ID NO: 241150 - DNA, 30 bp, Artificial Sequence
  Synthetic oligonucleotide
cctacggcacctgtgaaatttctggattat

SEQ ID NO: 241151 - DNA, 30 bp, Artificial Sequence
  Synthetic oligonucleotide
tgtgactagaatgggtcaggttatgattat

SEQ ID NO: 241152 - DNA, 30 bp, Artificial Sequence
  Synthetic oligonucleotide
tatagggtcgggtgtgtcgcacctgattat

SEQ ID NO: 241153 - DNA, 30 bp, Artificial Sequence
  Synthetic oligonucleotide
tcaattatggttcaacgtattcttgattat

SEQ ID NO: 241154 - DNA, 30 bp, Artificial Sequence
  Synthetic oligonucleotide
atgcacaaggaagaactacagggctattat

SEQ ID NO: 241155 - DNA, 30 bp, Artificial Sequence
  Synthetic oligonucleotide
gcatttacaatataacacgatgtttattat

SEQ ID NO: 241156 - DNA, 30 bp, Artificial Sequence
  Synthetic oligonucleotide
ggttggacagagaggggatttgtttattat

SEQ ID NO: 241157 - DNA, 30 bp, Artificial Sequence
  Synthetic oligonucleotide
atgaccacgggtccaacccatttaacttat

SEQ ID NO: 241158 - DNA, 30 bp, Artificial Sequence
  Synthetic oligonucleotide
ctgtgcaggtgtaaaaggaaaagtacttat

SEQ ID NO: 241159 - DNA, 30 bp, Artificial Sequence
  Synthetic oligonucleotide
attaacgcaggttccgtaatgcgaccttat

SEQ ID NO: 241160 - DNA, 30 bp, Artificial Sequence
  Synthetic oligonucleotide
gaacaatggagggtccataaatgaccttat

SEQ ID NO: 241161 - DNA, 30 bp, Artificial Sequence
  Synthetic oligonucleotide
agatgctatgtgctagtcgggtaagcttat

SEQ ID NO: 241162 - DNA, 30 bp, Artificial Sequence
  Synthetic oligonucleotide
ataggatgacaggtcacgcaagcagcttat

SEQ ID NO: 241163 - DNA, 30 bp, Artificial Sequence
  Synthetic oligonucleotide
tcgaattggctccttctcccggcggcttat

SEQ ID NO: 241164 - DNA, 30 bp, Artificial Sequence
  Synthetic oligonucleotide
tcggggattagataaaccgttgaatcttat

SEQ ID NO: 241165 - DNA, 30 bp, Artificial Sequence
  Synthetic oligonucleotide
gcaggaagacggggaccgtattaatcttat

SEQ ID NO: 241166 - DNA, 30 bp, Artificial Sequence
  Synthetic oligonucleotide
atgaggacgcatattatattatcatcttat

SEQ ID NO: 241167 - DNA, 30 bp, Artificial Sequence
  Synthetic oligonucleotide
ggaattagattcgtaagcagagtgtcttat

SEQ ID NO: 241168 - DNA, 30 bp, Artificial Sequence
  Synthetic oligonucleotide
atgcaatcacatgacgaatgtcaaagttat

SEQ ID NO: 241169 - DNA, 30 bp, Artificial Sequence
  Synthetic oligonucleotide
ctgagtgctcgaggtctttggacgagttat

SEQ ID NO: 241170 - DNA, 30 bp, Artificial Sequence
  Synthetic oligonucleotide
cagttgcctctacataagggggcacgttat

SEQ ID NO: 241171 - DNA, 30 bp, Artificial Sequence
  Synthetic oligonucleotide
ctaggtgtcggccttcagctcttacgttat

SEQ ID NO: 241172 - DNA, 30 bp, Artificial Sequence
  Synthetic oligonucleotide
agccgataggtaggtagccgggaccgttat

SEQ ID NO: 241173 - DNA, 30 bp, Artificial Sequence
  Synthetic oligonucleotide
gtgctgctctggactcacgtgtagggttat

SEQ ID NO: 241174 - DNA, 30 bp, Artificial Sequence
  Synthetic oligonucleotide
gcatttccaatagagcagtgtacctgttat

SEQ ID NO: 241175 - DNA, 30 bp, Artificial Sequence
  Synthetic oligonucleotide
tatgacgttctgtaagttctttgctgttat

SEQ ID NO: 241176 - DNA, 30 bp, Artificial Sequence
  Synthetic oligonucleotide
ggtctcatcacactagtagtactctgttat

SEQ ID NO: 241177 - DNA, 30 bp, Artificial Sequence
  Synthetic oligonucleotide
agaaatttcgagctcaacttagtgtgttat

SEQ ID NO: 241178 - DNA, 30 bp, Artificial Sequence
  Synthetic oligonucleotide
gtgcattccaggaatggagcgggttgttat

SEQ ID NO: 241179 - DNA, 30 bp, Artificial Sequence
  Synthetic oligonucleotide
tatgtagaatggtgggtgtgagagatttat

SEQ ID NO: 241180 - DNA, 30 bp, Artificial Sequence
  Synthetic oligonucleotide
ctaaacataagcgtaatgtatacgatttat

SEQ ID NO: 241181 - DNA, 30 bp, Artificial Sequence
  Synthetic oligonucleotide
caaaggtttcatcttttaggggcgatttat

SEQ ID NO: 241182 - DNA, 30 bp, Artificial Sequence
  Synthetic oligonucleotide
ggaagcgtctaagcgggagcggcactttat

SEQ ID NO: 241183 - DNA, 30 bp, Artificial Sequence
  Synthetic oligonucleotide
acgggaacgcggactggacctcacctttat

SEQ ID NO: 241184 - DNA, 30 bp, Artificial Sequence
  Synthetic oligonucleotide
tgggcctgatccggcgtgctaaggctttat

SEQ ID NO: 241185 - DNA, 30 bp, Artificial Sequence
  Synthetic oligonucleotide
gccgagcagttggggggatgctggctttat

SEQ ID NO: 241186 - DNA, 30 bp, Artificial Sequence
  Synthetic oligonucleotide
cccaaaaaaatatggctctgtatgctttat

SEQ ID NO: 241187 - DNA, 30 bp, Artificial Sequence
  Synthetic oligonucleotide
ggagaacgttttcggtctactagtctttat

SEQ ID NO: 241188 - DNA, 30 bp, Artificial Sequence
  Synthetic oligonucleotide
gctcaggaagttgtattgactgaagtttat

SEQ ID NO: 241189 - DNA, 30 bp, Artificial Sequence
  Synthetic oligonucleotide
acagggacgacagtacgcctgaacgtttat

SEQ ID NO: 241190 - DNA, 30 bp, Artificial Sequence
  Synthetic oligonucleotide
aacatgcgcaatgagccttacatggtttat

SEQ ID NO: 241191 - DNA, 30 bp, Artificial Sequence
  Synthetic oligonucleotide
acgtcggtcatggtgcgctctatattttat

SEQ ID NO: 241192 - DNA, 30 bp, Artificial Sequence
  Synthetic oligonucleotide
gtgagacgttattcggtatgttcgttttat

SEQ ID NO: 241193 - DNA, 30 bp, Artificial Sequence
  Synthetic oligonucleotide
taagcggcgggccatccacgatggttttat

SEQ ID NO: 241194 - DNA, 30 bp, Artificial Sequence
  Synthetic oligonucleotide
aagggccggcctatcccgcgtccaaaaact

SEQ ID NO: 241195 - DNA, 30 bp, Artificial Sequence
  Synthetic oligonucleotide
agccatatgggtggtctttgtagaaaaact

SEQ ID NO: 241196 - DNA, 30 bp, Artificial Sequence
  Synthetic oligonucleotide
gagaagaaaggcgcatcaaccagcaaaact

SEQ ID NO: 241197 - DNA, 30 bp, Artificial Sequence
  Synthetic oligonucleotide
ctcaagagttatccaggcaccaagaaaact

SEQ ID NO: 241198 - DNA, 30 bp, Artificial Sequence
  Synthetic oligonucleotide
ttgagacacctcttatgctaaacgaaaact

SEQ ID NO: 241199 - DNA, 30 bp, Artificial Sequence
  Synthetic oligonucleotide
catcacagccagcaacgattagcgaaaact

SEQ ID NO: 241200 - DNA, 30 bp, Artificial Sequence
  Synthetic oligonucleotide
aatctcaggccccaacacagttcgaaaact

SEQ ID NO: 241201 - DNA, 30 bp, Artificial Sequence
  Synthetic oligonucleotide
ggggttactcaaacgcgggcccgtaaaact

SEQ ID NO: 241202 - DNA, 30 bp, Artificial Sequence
  Synthetic oligonucleotide
ggaggcagtttggcggaaaagcgacaaact

SEQ ID NO: 241203 - DNA, 30 bp, Artificial Sequence
  Synthetic oligonucleotide
tatagagaaagtgacgggactcgccaaact

SEQ ID NO: 241204 - DNA, 30 bp, Artificial Sequence
  Synthetic oligonucleotide
ccaccagtaagggcccggcgacggcaaact

SEQ ID NO: 241205 - DNA, 30 bp, Artificial Sequence
  Synthetic oligonucleotide
ttgtgcgatgcagggcgacggcttcaaact

SEQ ID NO: 241206 - DNA, 30 bp, Artificial Sequence
  Synthetic oligonucleotide
gacatggcaccgtaatcacagggagaaact

SEQ ID NO: 241207 - DNA, 30 bp, Artificial Sequence
  Synthetic oligonucleotide
cagttgggactaacgatcctgtccgaaact

SEQ ID NO: 241208 - DNA, 30 bp, Artificial Sequence
  Synthetic oligonucleotide
gtgctctcagtggatggtctgagcgaaact

SEQ ID NO: 241209 - DNA, 30 bp, Artificial Sequence
  Synthetic oligonucleotide
ctcgcaagcgcgaatctggcgcaggaaact

SEQ ID NO: 241210 - DNA, 30 bp, Artificial Sequence
  Synthetic oligonucleotide
gaacgtggatttaacgttcgtcctgaaact

SEQ ID NO: 241211 - DNA, 30 bp, Artificial Sequence
  Synthetic oligonucleotide
cgtgcctggttcggacagccagttgaaact

SEQ ID NO: 241212 - DNA, 30 bp, Artificial Sequence
  Synthetic oligonucleotide
gaaaggtcaaatatcgtgcaagtataaact

SEQ ID NO: 241213 - DNA, 30 bp, Artificial Sequence
  Synthetic oligonucleotide
acacttgtctggctcgaggtaggctaaact

SEQ ID NO: 241214 - DNA, 30 bp, Artificial Sequence
  Synthetic oligonucleotide
actggatagcgcggcgcccatatctaaact

SEQ ID NO: 241215 - DNA, 30 bp, Artificial Sequence
  Synthetic oligonucleotide
gtagcatgcgatttcgatgttccgtaaact

SEQ ID NO: 241216 - DNA, 30 bp, Artificial Sequence
  Synthetic oligonucleotide
tggtggctcatataatcacactcttaaact

SEQ ID NO: 241217 - DNA, 30 bp, Artificial Sequence
  Synthetic oligonucleotide
aaaggttgttgcactgatggtaccacaact

SEQ ID NO: 241218 - DNA, 30 bp, Artificial Sequence
  Synthetic oligonucleotide
ttctactaatccttccagtggtgcacaact

SEQ ID NO: 241219 - DNA, 30 bp, Artificial Sequence
  Synthetic oligonucleotide
acaacagggggttacgatgaataaccaact

SEQ ID NO: 241220 - DNA, 30 bp, Artificial Sequence
  Synthetic oligonucleotide
tttaacaccaaacttgaatcatcagcaact

SEQ ID NO: 241221 - DNA, 30 bp, Artificial Sequence
  Synthetic oligonucleotide
actggcttatacatgctccacaccgcaact

SEQ ID NO: 241222 - DNA, 29 bp, Artificial Sequence
  Synthetic oligonucleotide
gcttcgctcaatatagtgaggtcgcaact

SEQ ID NO: 241223 - DNA, 30 bp, Artificial Sequence
  Synthetic oligonucleotide
cagttgtgcgtgtgacggctcttcgcaact

SEQ ID NO: 241224 - DNA, 30 bp, Artificial Sequence
  Synthetic oligonucleotide
acagcaactcatgggctgtcgaaggcaact

SEQ ID NO: 241225 - DNA, 30 bp, Artificial Sequence
  Synthetic oligonucleotide
caactaccatctggtatccatccctcaact

SEQ ID NO: 241226 - DNA, 30 bp, Artificial Sequence
  Synthetic oligonucleotide
gcaggcggtgacgccatataccgctcaact

SEQ ID NO: 241227 - DNA, 30 bp, Artificial Sequence
  Synthetic oligonucleotide
gttgtaaagcaagggactccccgttcaact

SEQ ID NO: 241228 - DNA, 30 bp, Artificial Sequence
  Synthetic oligonucleotide
ggtacggtgacttaaacatggcaaagaact

SEQ ID NO: 241229 - DNA, 30 bp, Artificial Sequence
  Synthetic oligonucleotide
gcggggttgtagggtgcctattcgagaact

SEQ ID NO: 241230 - DNA, 30 bp, Artificial Sequence
  Synthetic oligonucleotide
gcttatccaattattcagttgtgtagaact

SEQ ID NO: 241231 - DNA, 30 bp, Artificial Sequence
  Synthetic oligonucleotide
tactgatgcggagagtatgttgtacgaact

SEQ ID NO: 241232 - DNA, 30 bp, Artificial Sequence
  Synthetic oligonucleotide
gcgcgacggctatcaacagtgctccgaact

SEQ ID NO: 241233 - DNA, 30 bp, Artificial Sequence
  Synthetic oligonucleotide
ttaagtatgcgacaccgaacacatcgaact

SEQ ID NO: 241234 - DNA, 30 bp, Artificial Sequence
  Synthetic oligonucleotide
gggttaagcatgcttgaagtagatcgaact

SEQ ID NO: 241235 - DNA, 30 bp, Artificial Sequence
  Synthetic oligonucleotide
ctagtcttgatgattctggtttcaggaact

SEQ ID NO: 241236 - DNA, 30 bp, Artificial Sequence
  Synthetic oligonucleotide
ctcatgggttccccgagtgaaaacggaact

SEQ ID NO: 241237 - DNA, 30 bp, Artificial Sequence
  Synthetic oligonucleotide
aatatgaccaaatggctaacagggggaact

SEQ ID NO: 241238 - DNA, 30 bp, Artificial Sequence
  Synthetic oligonucleotide
gcagaccggttacctagtactgggggaact

SEQ ID NO: 241239 - DNA, 30 bp, Artificial Sequence
  Synthetic oligonucleotide
ttggtagaggtattattggcgatgggaact

SEQ ID NO: 241240 - DNA, 30 bp, Artificial Sequence
  Synthetic oligonucleotide
cgactacaggcgggtacacgttgtggaact

SEQ ID NO: 241241 - DNA, 30 bp, Artificial Sequence
  Synthetic oligonucleotide
cgaggcgtcatcggagcgcaagcatgaact

SEQ ID NO: 241242 - DNA, 30 bp, Artificial Sequence
  Synthetic oligonucleotide
cttgaaggagcgtcatcgagacgatgaact

SEQ ID NO: 241243 - DNA, 30 bp, Artificial Sequence
  Synthetic oligonucleotide
tggggcgaacgtagccgattaccgtgaact

SEQ ID NO: 241244 - DNA, 30 bp, Artificial Sequence
  Synthetic oligonucleotide
atgtaagccgtgttaacttactcgtgaact

SEQ ID NO: 241245 - DNA, 30 bp, Artificial Sequence
  Synthetic oligonucleotide
ctgtgagggactcactcaagtggttgaact

SEQ ID NO: 241246 - DNA, 30 bp, Artificial Sequence
  Synthetic oligonucleotide
gcgtatggagtaactagaaagccaataact

SEQ ID NO: 241247 - DNA, 30 bp, Artificial Sequence
  Synthetic oligonucleotide
cgatcaggacctggctagtccgggataact

SEQ ID NO: 241248 - DNA, 31 bp, Artificial Sequence
  Synthetic oligonucleotide
aaaacttcgggcgacagggggatatataact

SEQ ID NO: 241249 - DNA, 30 bp, Artificial Sequence
  Synthetic oligonucleotide
atggattatcccgccagtaaaccactaact

SEQ ID NO: 241250 - DNA, 30 bp, Artificial Sequence
  Synthetic oligonucleotide
cgatcaaattttggaagacggcgactaact

SEQ ID NO: 241251 - DNA, 30 bp, Artificial Sequence
  Synthetic oligonucleotide
tcagtcgacgaatgaaacgagcccctaact

SEQ ID NO: 241252 - DNA, 30 bp, Artificial Sequence
  Synthetic oligonucleotide
tcatcaaatacgtgggccacgggcctaact

SEQ ID NO: 241253 - DNA, 30 bp, Artificial Sequence
  Synthetic oligonucleotide
gcaggaaccagagaaaaatatttcctaact

SEQ ID NO: 241254 - DNA, 30 bp, Artificial Sequence
  Synthetic oligonucleotide
gtagtgtaactacggcacactcgtctaact

SEQ ID NO: 241255 - DNA, 30 bp, Artificial Sequence
  Synthetic oligonucleotide
ctcgcaaaggcgcttgatatccgggtaact

SEQ ID NO: 241256 - DNA, 30 bp, Artificial Sequence
  Synthetic oligonucleotide
catgggaagacctcagggctgacattaact

SEQ ID NO: 241257 - DNA, 30 bp, Artificial Sequence
  Synthetic oligonucleotide
ttcgactaatcggtgggacagatattaact

SEQ ID NO: 241258 - DNA, 30 bp, Artificial Sequence
  Synthetic oligonucleotide
aagctgcgcgtccgaggacatagcttaact

SEQ ID NO: 241259 - DNA, 30 bp, Artificial Sequence
  Synthetic oligonucleotide
gcaatacaccagggaccggtaatcttaact

SEQ ID NO: 241260 - DNA, 30 bp, Artificial Sequence
  Synthetic oligonucleotide
gggatccggattcgagtaagaggtttaact

SEQ ID NO: 241261 - DNA, 30 bp, Artificial Sequence
  Synthetic oligonucleotide
ccactcagaagggtacaaagccaaaacact

SEQ ID NO: 241262 - DNA, 30 bp, Artificial Sequence
  Synthetic oligonucleotide
gcgtgttgcaaggaaaactttgcaaacact

SEQ ID NO: 241263 - DNA, 30 bp, Artificial Sequence
  Synthetic oligonucleotide
ttgagcgaggagcagaaactgagtaacact

SEQ ID NO: 241264 - DNA, 30 bp, Artificial Sequence
  Synthetic oligonucleotide
ttgctttcaagcgaaggtccgggtaacact

SEQ ID NO: 241265 - DNA, 30 bp, Artificial Sequence
  Synthetic oligonucleotide
atgattcaaccggtatcaaatggtaacact

SEQ ID NO: 241266 - DNA, 30 bp, Artificial Sequence
  Synthetic oligonucleotide
ccaagtacataggataaatcgttacacact

SEQ ID NO: 241267 - DNA, 29 bp, Artificial Sequence
  Synthetic oligonucleotide
tgactattggattgcaatatttacacact

SEQ ID NO: 241268 - DNA, 30 bp, Artificial Sequence
  Synthetic oligonucleotide
ggagagaggttcgcggattcgaaccacact

SEQ ID NO: 241269 - DNA, 30 bp, Artificial Sequence
  Synthetic oligonucleotide
cctattgtaaaaaatacacctagccacact

SEQ ID NO: 241270 - DNA, 30 bp, Artificial Sequence
  Synthetic oligonucleotide
gaccagtatgtaaccgaagaagagcacact

SEQ ID NO: 241271 - DNA, 30 bp, Artificial Sequence
  Synthetic oligonucleotide
tttagaggtaattcacaaaggtagcacact

SEQ ID NO: 241272 - DNA, 30 bp, Artificial Sequence
  Synthetic oligonucleotide
ggacattgattgccaaagtgttcgcacact

SEQ ID NO: 241273 - DNA, 30 bp, Artificial Sequence
  Synthetic oligonucleotide
atggacggctaaggaagatgcgtgcacact

SEQ ID NO: 241274 - DNA, 30 bp, Artificial Sequence
  Synthetic oligonucleotide
tcagcatagaacgacgtgtaacatcacact

SEQ ID NO: 241275 - DNA, 30 bp, Artificial Sequence
  Synthetic oligonucleotide
aatcaggggttaaagctgatcccagacact

SEQ ID NO: 241276 - DNA, 30 bp, Artificial Sequence
  Synthetic oligonucleotide
tttagtggtggcacggcgtgaagagacact

SEQ ID NO: 241277 - DNA, 30 bp, Artificial Sequence
  Synthetic oligonucleotide
taaccatatgcgacggtttaaggagacact

SEQ ID NO: 241278 - DNA, 30 bp, Artificial Sequence
  Synthetic oligonucleotide
gttgcctttcacacctaaataatagacact

SEQ ID NO: 241279 - DNA, 29 bp, Artificial Sequence
  Synthetic oligonucleotide
ccctgggctcattcggccactccgacact

SEQ ID NO: 241280 - DNA, 30 bp, Artificial Sequence
  Synthetic oligonucleotide
ctaatatgatggggatacagcttcgacact

SEQ ID NO: 241281 - DNA, 30 bp, Artificial Sequence
  Synthetic oligonucleotide
aggggctagattaagcccgcccaggacact

SEQ ID NO: 241282 - DNA, 30 bp, Artificial Sequence
  Synthetic oligonucleotide
acgatggggggcttcttccctgcggacact

SEQ ID NO: 241283 - DNA, 30 bp, Artificial Sequence
  Synthetic oligonucleotide
aatgactagcatatattttgagaatacact

SEQ ID NO: 241284 - DNA, 30 bp, Artificial Sequence
  Synthetic oligonucleotide
agagggtaatgggtctaccccccatacact

SEQ ID NO: 241285 - DNA, 30 bp, Artificial Sequence
  Synthetic oligonucleotide
tttacagttccgacacctgagtgctacact

SEQ ID NO: 241286 - DNA, 30 bp, Artificial Sequence
  Synthetic oligonucleotide
ctaggcagtgatgtgtaggtcgggaccact

SEQ ID NO: 241287 - DNA, 30 bp, Artificial Sequence
  Synthetic oligonucleotide
actaacatgtgctttccggtaatgaccact

SEQ ID NO: 241288 - DNA, 30 bp, Artificial Sequence
  Synthetic oligonucleotide
gcaatacgatgtctcgggtgccataccact

SEQ ID NO: 241289 - DNA, 30 bp, Artificial Sequence
  Synthetic oligonucleotide
cagatattggatgtatattgtagccccact

SEQ ID NO: 241290 - DNA, 30 bp, Artificial Sequence
  Synthetic oligonucleotide
tggtcgagactcgaatgaggggttcccact

SEQ ID NO: 241291 - DNA, 30 bp, Artificial Sequence
  Synthetic oligonucleotide
tgcgcgcctgacggtcatctacaagccact

SEQ ID NO: 241292 - DNA, 30 bp, Artificial Sequence
  Synthetic oligonucleotide
cagaaccagttttaggaggtgatatccact

SEQ ID NO: 241293 - DNA, 30 bp, Artificial Sequence
  Synthetic oligonucleotide
agagggttctcaggaactgtaagctccact

SEQ ID NO: 241294 - DNA, 30 bp, Artificial Sequence
  Synthetic oligonucleotide
cttacatcgtacgcacaggacagctccact

SEQ ID NO: 241295 - DNA, 28 bp, Artificial Sequence
  Synthetic oligonucleotide
tgggtgcttggatatagttatctccact

SEQ ID NO: 241296 - DNA, 30 bp, Artificial Sequence
  Synthetic oligonucleotide
cgtaggcaagcttgagtgtgcacttccact

SEQ ID NO: 241297 - DNA, 30 bp, Artificial Sequence
  Synthetic oligonucleotide
tgattgcgttgactctaagaaccaagcact

SEQ ID NO: 241298 - DNA, 30 bp, Artificial Sequence
  Synthetic oligonucleotide
ccgtaaaactgcctgtcgatgttcagcact

SEQ ID NO: 241299 - DNA, 30 bp, Artificial Sequence
  Synthetic oligonucleotide
gggggtcgaggcaggcggcccgagagcact

SEQ ID NO: 241300 - DNA, 30 bp, Artificial Sequence
  Synthetic oligonucleotide
aattaaatggtaaagacgatctagagcact

SEQ ID NO: 241301 - DNA, 30 bp, Artificial Sequence
  Synthetic oligonucleotide
gttgacagaaaagcagcctgtttgagcact

SEQ ID NO: 241302 - DNA, 30 bp, Artificial Sequence
  Synthetic oligonucleotide
taccctcactagaagataatcacacgcact

SEQ ID NO: 241303 - DNA, 30 bp, Artificial Sequence
  Synthetic oligonucleotide
cattgaatcggaggatcgtaatggcgcact

SEQ ID NO: 241304 - DNA, 30 bp, Artificial Sequence
  Synthetic oligonucleotide
gaagaacgaagatatgcgccctttcgcact

SEQ ID NO: 241305 - DNA, 30 bp, Artificial Sequence
  Synthetic oligonucleotide
agtgatgcgccggtaactgactcaggcact

SEQ ID NO: 241306 - DNA, 30 bp, Artificial Sequence
  Synthetic oligonucleotide
caggcccgaacggtgtgggtaaggggcact

SEQ ID NO: 241307 - DNA, 30 bp, Artificial Sequence
  Synthetic oligonucleotide
gctgtcgtgacaagttctttggggggcact

SEQ ID NO: 241308 - DNA, 30 bp, Artificial Sequence
  Synthetic oligonucleotide
taaatcaacaacaaaggaagggtgggcact

SEQ ID NO: 241309 - DNA, 30 bp, Artificial Sequence
  Synthetic oligonucleotide
gcaaggttataaaaacgatcccgtggcact

SEQ ID NO: 241310 - DNA, 30 bp, Artificial Sequence
  Synthetic oligonucleotide
ggaactataggtactttgtgctttggcact

SEQ ID NO: 241311 - DNA, 30 bp, Artificial Sequence
  Synthetic oligonucleotide
tcctccattgggaagcgtgcatggtgcact

SEQ ID NO: 241312 - DNA, 30 bp, Artificial Sequence
  Synthetic oligonucleotide
caagtgcataatgggtggccagcttgcact

SEQ ID NO: 241313 - DNA, 30 bp, Artificial Sequence
  Synthetic oligonucleotide
cggaggaggggccgagaagcgctttgcact

SEQ ID NO: 241314 - DNA, 30 bp, Artificial Sequence
  Synthetic oligonucleotide
tggaggtatatacaagcgtagaaaatcact

SEQ ID NO: 241315 - DNA, 30 bp, Artificial Sequence
  Synthetic oligonucleotide
cattagagccgtgtaggcacattaatcact

SEQ ID NO: 241316 - DNA, 30 bp, Artificial Sequence
  Synthetic oligonucleotide
gtacagacaatgcaatggcgaaggatcact

SEQ ID NO: 241317 - DNA, 30 bp, Artificial Sequence
  Synthetic oligonucleotide
atggcaagtgcaaaaaggggaatgatcact

SEQ ID NO: 241318 - DNA, 30 bp, Artificial Sequence
  Synthetic oligonucleotide
tacgtgttcgcaaatggcgtacatatcact

SEQ ID NO: 241319 - DNA, 30 bp, Artificial Sequence
  Synthetic oligonucleotide
tgaagaaggtaagaaaaatctgctatcact

SEQ ID NO: 241320 - DNA, 30 bp, Artificial Sequence
  Synthetic oligonucleotide
aagtaagtggaatcagttgccacgctcact

SEQ ID NO: 241321 - DNA, 30 bp, Artificial Sequence
  Synthetic oligonucleotide
gttgcccgaacctatgaagcgcatctcact

SEQ ID NO: 241322 - DNA, 30 bp, Artificial Sequence
  Synthetic oligonucleotide
tatcgacagatagaaagacccgaggtcact

SEQ ID NO: 241323 - DNA, 30 bp, Artificial Sequence
  Synthetic oligonucleotide
gcggggagggtgaaagcagtgcgtgtcact

SEQ ID NO: 241324 - DNA, 30 bp, Artificial Sequence
  Synthetic oligonucleotide
gctgtggaacgttcataaaaagttgtcact

SEQ ID NO: 241325 - DNA, 30 bp, Artificial Sequence
  Synthetic oligonucleotide
tcacgacatatcaagcctacggagttcact

SEQ ID NO: 241326 - DNA, 30 bp, Artificial Sequence
  Synthetic oligonucleotide
catgtagacaactcctttggggggttcact

SEQ ID NO: 241327 - DNA, 30 bp, Artificial Sequence
  Synthetic oligonucleotide
cgcgtcagttggtcacactgattgttcact

SEQ ID NO: 241328 - DNA, 30 bp, Artificial Sequence
  Synthetic oligonucleotide
aataaaggaccgcatatgccacgtttcact

SEQ ID NO: 241329 - DNA, 30 bp, Artificial Sequence
  Synthetic oligonucleotide
tacatcatagttaaatgcatactcaagact

SEQ ID NO: 241330 - DNA, 30 bp, Artificial Sequence
  Synthetic oligonucleotide
gcagataatactcgtcgattcttcaagact

SEQ ID NO: 241331 - DNA, 30 bp, Artificial Sequence
  Synthetic oligonucleotide
taacacttgagggacatgggggcgaagact

SEQ ID NO: 241332 - DNA, 30 bp, Artificial Sequence
  Synthetic oligonucleotide
ccggttactgcgatataagataggaagact

SEQ ID NO: 241333 - DNA, 30 bp, Artificial Sequence
  Synthetic oligonucleotide
gcatagcaggacccgtacgatcgtaagact

SEQ ID NO: 241334 - DNA, 30 bp, Artificial Sequence
  Synthetic oligonucleotide
ttaaggcctgggttaccggatcatcagact

SEQ ID NO: 241335 - DNA, 30 bp, Artificial Sequence
  Synthetic oligonucleotide
accaccgttcaaaattcgcagtcagagact

SEQ ID NO: 241336 - DNA, 30 bp, Artificial Sequence
  Synthetic oligonucleotide
tgatacccgtcgtcgagcagagtagagact

SEQ ID NO: 241337 - DNA, 30 bp, Artificial Sequence
  Synthetic oligonucleotide
aaggaggcttggctgtgatcacatgagact

SEQ ID NO: 241338 - DNA, 30 bp, Artificial Sequence
  Synthetic oligonucleotide
gcagtcaaacgacttcaacttgctgagact

SEQ ID NO: 241339 - DNA, 30 bp, Artificial Sequence
  Synthetic oligonucleotide
ggggctataaccctatagaggtgtgagact

SEQ ID NO: 241340 - DNA, 30 bp, Artificial Sequence
  Synthetic oligonucleotide
cggacccactagggtttgagcaagtagact

SEQ ID NO: 241341 - DNA, 30 bp, Artificial Sequence
  Synthetic oligonucleotide
agtacaaagtctagtggatatgggtagact

SEQ ID NO: 241342 - DNA, 30 bp, Artificial Sequence
  Synthetic oligonucleotide
aagtcgtatccagaatatcgaatgtagact

SEQ ID NO: 241343 - DNA, 30 bp, Artificial Sequence
  Synthetic oligonucleotide
tattagcacccttcggctctgctttagact

SEQ ID NO: 241344 - DNA, 30 bp, Artificial Sequence
  Synthetic oligonucleotide
acgaagcccgtctgtgggcggaaaacgact

SEQ ID NO: 241345 - DNA, 30 bp, Artificial Sequence
  Synthetic oligonucleotide
ccacatccgcagtttccaagtgtaacgact

SEQ ID NO: 241346 - DNA, 30 bp, Artificial Sequence
  Synthetic oligonucleotide
aaatagtccagtgacctgtgcagcacgact

SEQ ID NO: 241347 - DNA, 30 bp, Artificial Sequence
  Synthetic oligonucleotide
caacgccgctggaatagggcaaggacgact

SEQ ID NO: 241348 - DNA, 30 bp, Artificial Sequence
  Synthetic oligonucleotide
taaaagctcgtcaaggctaatgggacgact

SEQ ID NO: 241349 - DNA, 30 bp, Artificial Sequence
  Synthetic oligonucleotide
agcgtattgcagaatcttgcgatgacgact

SEQ ID NO: 241350 - DNA, 30 bp, Artificial Sequence
  Synthetic oligonucleotide
aaccataagcggcggtatggtcatacgact

SEQ ID NO: 241351 - DNA, 30 bp, Artificial Sequence
  Synthetic oligonucleotide
tacctcatcagtactcatctacgtacgact

SEQ ID NO: 241352 - DNA, 30 bp, Artificial Sequence
  Synthetic oligonucleotide
cgtatcgggttagtaacacggcgtacgact

SEQ ID NO: 241353 - DNA, 30 bp, Artificial Sequence
  Synthetic oligonucleotide
taccagtgccgcgaggctcgcggtacgact

SEQ ID NO: 241354 - DNA, 30 bp, Artificial Sequence
  Synthetic oligonucleotide
gggcctagtctcgcaccgtatcaaccgact

SEQ ID NO: 241355 - DNA, 30 bp, Artificial Sequence
  Synthetic oligonucleotide
tgggaccagttcacggaggtcacaccgact

SEQ ID NO: 241356 - DNA, 30 bp, Artificial Sequence
  Synthetic oligonucleotide
cgagcgatagcggacgaacattcgccgact

SEQ ID NO: 241357 - DNA, 30 bp, Artificial Sequence
  Synthetic oligonucleotide
aacctgaggatagctcacctaaggccgact

SEQ ID NO: 241358 - DNA, 30 bp, Artificial Sequence
  Synthetic oligonucleotide
ttgcgaaaccgccaccgagtccaagcgact

SEQ ID NO: 241359 - DNA, 30 bp, Artificial Sequence
  Synthetic oligonucleotide
ccgcgcggtccaccggatttagcagcgact

SEQ ID NO: 241360 - DNA, 30 bp, Artificial Sequence
  Synthetic oligonucleotide
tctgcggatggcccccagtatatagcgact

SEQ ID NO: 241361 - DNA, 30 bp, Artificial Sequence
  Synthetic oligonucleotide
gaggtgtacattaaatgttggggcgcgact

SEQ ID NO: 241362 - DNA, 30 bp, Artificial Sequence
  Synthetic oligonucleotide
gtcgaccacactagcgattatattgcgact

SEQ ID NO: 241363 - DNA, 30 bp, Artificial Sequence
  Synthetic oligonucleotide
gcgaactatgtgagcattggggtatcgact

SEQ ID NO: 241364 - DNA, 30 bp, Artificial Sequence
  Synthetic oligonucleotide
agaatataataccacaagagagactcgact

SEQ ID NO: 241365 - DNA, 30 bp, Artificial Sequence
  Synthetic oligonucleotide
tcgagggggtcagacgcgcttatctcgact

SEQ ID NO: 241366 - DNA, 30 bp, Artificial Sequence
  Synthetic oligonucleotide
gccatcgcggacggccagaatgtctcgact

SEQ ID NO: 241367 - DNA, 30 bp, Artificial Sequence
  Synthetic oligonucleotide
tccgagagcttcgtgatgccaatgtcgact

SEQ ID NO: 241368 - DNA, 30 bp, Artificial Sequence
  Synthetic oligonucleotide
gcatgactacagtctatactcgcttcgact

SEQ ID NO: 241369 - DNA, 30 bp, Artificial Sequence
  Synthetic oligonucleotide
actcgcacgggaagctttgtgataaggact

SEQ ID NO: 241370 - DNA, 30 bp, Artificial Sequence
  Synthetic oligonucleotide
cgtcgcttgaaagtttataaggtcaggact

SEQ ID NO: 241371 - DNA, 30 bp, Artificial Sequence
  Synthetic oligonucleotide
aggcttcatatgtaacaagagggtaggact

SEQ ID NO: 241372 - DNA, 30 bp, Artificial Sequence
  Synthetic oligonucleotide
cattaaaccgcgtcaacaaatgttcggact

SEQ ID NO: 241373 - DNA, 30 bp, Artificial Sequence
  Synthetic oligonucleotide
aaacatgcgagaagaagtcgaaccgggact

SEQ ID NO: 241374 - DNA, 30 bp, Artificial Sequence
  Synthetic oligonucleotide
ctcgctcattgccgcttctggtgcgggact

SEQ ID NO: 241375 - DNA, 30 bp, Artificial Sequence
  Synthetic oligonucleotide
gtggtttatgccgtataatatatcgggact

SEQ ID NO: 241376 - DNA, 30 bp, Artificial Sequence
  Synthetic oligonucleotide
aattagggcgcaagtgtaccggtcgggact

SEQ ID NO: 241377 - DNA, 30 bp, Artificial Sequence
  Synthetic oligonucleotide
tgcgagaatctgtcaagatggttcgggact

SEQ ID NO: 241378 - DNA, 30 bp, Artificial Sequence
  Synthetic oligonucleotide
tagggatctgaaccgtatgaaaaggggact

SEQ ID NO: 241379 - DNA, 30 bp, Artificial Sequence
  Synthetic oligonucleotide
caaattaactaatactgggtagatgggact

SEQ ID NO: 241380 - DNA, 30 bp, Artificial Sequence
  Synthetic oligonucleotide
tcagctaagatactaacaaaatatgggact

SEQ ID NO: 241381 - DNA, 30 bp, Artificial Sequence
  Synthetic oligonucleotide
gtctggtacgaatccgtcgaatatgggact

SEQ ID NO: 241382 - DNA, 30 bp, Artificial Sequence
  Synthetic oligonucleotide
cgctaaagatatatacttagcgttgggact

SEQ ID NO: 241383 - DNA, 30 bp, Artificial Sequence
  Synthetic oligonucleotide
aatggcccaatagactaaagccaatggact

SEQ ID NO: 241384 - DNA, 30 bp, Artificial Sequence
  Synthetic oligonucleotide
cgctcccgtagaagctagagagattggact

SEQ ID NO: 241385 - DNA, 30 bp, Artificial Sequence
  Synthetic oligonucleotide
gccaaaagttctagtttaacgggttggact

SEQ ID NO: 241386 - DNA, 30 bp, Artificial Sequence
  Synthetic oligonucleotide
tacctatttcactacgacaactaaatgact

SEQ ID NO: 241387 - DNA, 30 bp, Artificial Sequence
  Synthetic oligonucleotide
atcctagaaaggatgcccggacccatgact

SEQ ID NO: 241388 - DNA, 31 bp, Artificial Sequence
  Synthetic oligonucleotide
gcacaggtatgaccgggcatgcctcatgact

SEQ ID NO: 241389 - DNA, 30 bp, Artificial Sequence
  Synthetic oligonucleotide
cattagcgcaaatagatggatctgatgact

SEQ ID NO: 241390 - DNA, 30 bp, Artificial Sequence
  Synthetic oligonucleotide
tcttatttgagccctgataacccactgact

SEQ ID NO: 241391 - DNA, 30 bp, Artificial Sequence
  Synthetic oligonucleotide
tgcacagggtcctaattggaaatactgact

SEQ ID NO: 241392 - DNA, 30 bp, Artificial Sequence
  Synthetic oligonucleotide
tcgtagaatattcgctagagtgtactgact

SEQ ID NO: 241393 - DNA, 30 bp, Artificial Sequence
  Synthetic oligonucleotide
tcaggcatcgttttgacttgtgtactgact

SEQ ID NO: 241394 - DNA, 30 bp, Artificial Sequence
  Synthetic oligonucleotide
tgtaatctccgcatagagtactgcctgact

SEQ ID NO: 241395 - DNA, 30 bp, Artificial Sequence
  Synthetic oligonucleotide
ttctgacaaaacggtggtcagcagctgact

SEQ ID NO: 241396 - DNA, 30 bp, Artificial Sequence
  Synthetic oligonucleotide
gcgcaactgacgtcaaaggcgtttctgact

SEQ ID NO: 241397 - DNA, 30 bp, Artificial Sequence
  Synthetic oligonucleotide
cttcggagttggtacgtgcgtctagtgact

SEQ ID NO: 241398 - DNA, 30 bp, Artificial Sequence
  Synthetic oligonucleotide
gtttgtcgctatccaatgtcaaacgtgact

SEQ ID NO: 241399 - DNA, 30 bp, Artificial Sequence
  Synthetic oligonucleotide
gtaatctgtggtaaacgtaaagaggtgact

SEQ ID NO: 241400 - DNA, 30 bp, Artificial Sequence
  Synthetic oligonucleotide
gaaatgtggtccaaatgcaattaggtgact

SEQ ID NO: 241401 - DNA, 30 bp, Artificial Sequence
  Synthetic oligonucleotide
aaagtagaagagcaagagaccttggtgact

SEQ ID NO: 241402 - DNA, 30 bp, Artificial Sequence
  Synthetic oligonucleotide
attgagtgcgccaaggagtcgtaattgact

SEQ ID NO: 241403 - DNA, 30 bp, Artificial Sequence
  Synthetic oligonucleotide
ggagaactgaggtaccagaggccattgact

SEQ ID NO: 241404 - DNA, 30 bp, Artificial Sequence
  Synthetic oligonucleotide
cggatgatacaatgttataatcgcttgact

SEQ ID NO: 241405 - DNA, 30 bp, Artificial Sequence
  Synthetic oligonucleotide
aaaaggcaggggtaccctagacttttgact

SEQ ID NO: 241406 - DNA, 30 bp, Artificial Sequence
  Synthetic oligonucleotide
ctaaatcaatgtattgtagcatacaatact

SEQ ID NO: 241407 - DNA, 30 bp, Artificial Sequence
  Synthetic oligonucleotide
ttggttcgcgtactatcatcggccaatact

SEQ ID NO: 241408 - DNA, 30 bp, Artificial Sequence
  Synthetic oligonucleotide
acgtgtcagtatttaacacaaatgaatact

SEQ ID NO: 241409 - DNA, 30 bp, Artificial Sequence
  Synthetic oligonucleotide
cggttacgataaaacgaaattgtgaatact

SEQ ID NO: 241410 - DNA, 30 bp, Artificial Sequence
  Synthetic oligonucleotide
agttcaggacgagtttaaattgtgaatact

SEQ ID NO: 241411 - DNA, 30 bp, Artificial Sequence
  Synthetic oligonucleotide
ccaagggggtaggttgcttttaataatact

SEQ ID NO: 241412 - DNA, 30 bp, Artificial Sequence
  Synthetic oligonucleotide
gtggtggcgttacagattgcgtataatact

SEQ ID NO: 241413 - DNA, 30 bp, Artificial Sequence
  Synthetic oligonucleotide
ggtcgttgcaagtccaacgggtataatact

SEQ ID NO: 241414 - DNA, 30 bp, Artificial Sequence
  Synthetic oligonucleotide
atgttcgtagcgtactctcaagctaatact

SEQ ID NO: 241415 - DNA, 30 bp, Artificial Sequence
  Synthetic oligonucleotide
acgctcccgtataggctagtatgtaatact

SEQ ID NO: 241416 - DNA, 30 bp, Artificial Sequence
  Synthetic oligonucleotide
ttggaatcaagacactgatcccagcatact

SEQ ID NO: 241417 - DNA, 30 bp, Artificial Sequence
  Synthetic oligonucleotide
gacggatcagtcactaatgcatctcatact

SEQ ID NO: 241418 - DNA, 30 bp, Artificial Sequence
  Synthetic oligonucleotide
aagtccatagcaccggcgatagtagatact

SEQ ID NO: 241419 - DNA, 30 bp, Artificial Sequence
  Synthetic oligonucleotide
ttacacggagtcacgtcgaccagggatact

SEQ ID NO: 241420 - DNA, 30 bp, Artificial Sequence
  Synthetic oligonucleotide
ggggataccggaaaagcagagtatgatact

SEQ ID NO: 241421 - DNA, 30 bp, Artificial Sequence
  Synthetic oligonucleotide
ggaccaggaatactgagccctagatatact

SEQ ID NO: 241422 - DNA, 30 bp, Artificial Sequence
  Synthetic oligonucleotide
acgcgaaaaaggtataccgtgacgtatact

SEQ ID NO: 241423 - DNA, 30 bp, Artificial Sequence
  Synthetic oligonucleotide
caagtaaagtggagcgtcgccctttatact

SEQ ID NO: 241424 - DNA, 30 bp, Artificial Sequence
  Synthetic oligonucleotide
gagctcgttagtcgtcgtgtcaaaactact

SEQ ID NO: 241425 - DNA, 30 bp, Artificial Sequence
  Synthetic oligonucleotide
gcccataaggctttaagaagggacactact

SEQ ID NO: 241426 - DNA, 30 bp, Artificial Sequence
  Synthetic oligonucleotide
attggcaaaactcctactagggtcactact

SEQ ID NO: 241427 - DNA, 30 bp, Artificial Sequence
  Synthetic oligonucleotide
agttcacagtgccggtaagatgtcactact

SEQ ID NO: 241428 - DNA, 30 bp, Artificial Sequence
  Synthetic oligonucleotide
ttcgcgtaacgtcccggaaacacacctact

SEQ ID NO: 241429 - DNA, 30 bp, Artificial Sequence
  Synthetic oligonucleotide
atcgtgtagcgttcagaaccagcccctact

SEQ ID NO: 241430 - DNA, 30 bp, Artificial Sequence
  Synthetic oligonucleotide
ctaagtcttccgagttccgacaggcctact

SEQ ID NO: 241431 - DNA, 30 bp, Artificial Sequence
  Synthetic oligonucleotide
agtgcgttcccattagagtgcgaggctact

SEQ ID NO: 241432 - DNA, 30 bp, Artificial Sequence
  Synthetic oligonucleotide
ctgtgagcctcggtgactgtcagtgctact

SEQ ID NO: 241433 - DNA, 30 bp, Artificial Sequence
  Synthetic oligonucleotide
agacgatggtggtgtcagacgcggtctact

SEQ ID NO: 241434 - DNA, 30 bp, Artificial Sequence
  Synthetic oligonucleotide
cgcctattgatggaaaagccctcttctact

SEQ ID NO: 241435 - DNA, 30 bp, Artificial Sequence
  Synthetic oligonucleotide
ccaaagcaaagctatgtatccttaagtact

SEQ ID NO: 241436 - DNA, 30 bp, Artificial Sequence
  Synthetic oligonucleotide
aatgtatggccgcagattcgaagcagtact

SEQ ID NO: 241437 - DNA, 30 bp, Artificial Sequence
  Synthetic oligonucleotide
gtacggttttgaggtattgcgaggagtact

SEQ ID NO: 241438 - DNA, 30 bp, Artificial Sequence
  Synthetic oligonucleotide
gtcagatcgtcccaagccttaactagtact

SEQ ID NO: 241439 - DNA, 30 bp, Artificial Sequence
  Synthetic oligonucleotide
caaaaaaagctgtggcacgattttagtact

SEQ ID NO: 241440 - DNA, 30 bp, Artificial Sequence
  Synthetic oligonucleotide
gtaaaaccacgtggagcatgaaaccgtact

SEQ ID NO: 241441 - DNA, 30 bp, Artificial Sequence
  Synthetic oligonucleotide
aagacagagttacgaatagacggccgtact

SEQ ID NO: 241442 - DNA, 30 bp, Artificial Sequence
  Synthetic oligonucleotide
cgtggagatggttcatgttcggagcgtact

SEQ ID NO: 241443 - DNA, 30 bp, Artificial Sequence
  Synthetic oligonucleotide
ctcgcttagtcccacggctaaccgcgtact

SEQ ID NO: 241444 - DNA, 30 bp, Artificial Sequence
  Synthetic oligonucleotide
gacttgaagtgacgtgttagcaatcgtact

SEQ ID NO: 241445 - DNA, 30 bp, Artificial Sequence
  Synthetic oligonucleotide
tgtaaatggaagaggtgcaattctcgtact

SEQ ID NO: 241446 - DNA, 30 bp, Artificial Sequence
  Synthetic oligonucleotide
ggtctagagagggatgcgtagataggtact

SEQ ID NO: 241447 - DNA, 30 bp, Artificial Sequence
  Synthetic oligonucleotide
tattatggcagaggatgcactctaggtact

SEQ ID NO: 241448 - DNA, 30 bp, Artificial Sequence
  Synthetic oligonucleotide
ggtatgtatagtgcgtggcctctaggtact

SEQ ID NO: 241449 - DNA, 30 bp, Artificial Sequence
  Synthetic oligonucleotide
cctagctggaatcaagatcattcgggtact

SEQ ID NO: 241450 - DNA, 30 bp, Artificial Sequence
  Synthetic oligonucleotide
gtcaggctgttagcaggggaccactgtact

SEQ ID NO: 241451 - DNA, 30 bp, Artificial Sequence
  Synthetic oligonucleotide
cgacagttagttcgaaagtatcactgtact

SEQ ID NO: 241452 - DNA, 30 bp, Artificial Sequence
  Synthetic oligonucleotide
atggacttagtactaaggaacctgtgtact

SEQ ID NO: 241453 - DNA, 30 bp, Artificial Sequence
  Synthetic oligonucleotide
taaaaataggccaggtcggtgcgttgtact

SEQ ID NO: 241454 - DNA, 30 bp, Artificial Sequence
  Synthetic oligonucleotide
tttaagagggagcagaaagggtgttgtact

SEQ ID NO: 241455 - DNA, 30 bp, Artificial Sequence
  Synthetic oligonucleotide
cgactgcgaataaggaattgttcaattact

SEQ ID NO: 241456 - DNA, 31 bp, Artificial Sequence
  Synthetic oligonucleotide
tgacctgacaggcacggaaacaataattact

SEQ ID NO: 241457 - DNA, 30 bp, Artificial Sequence
  Synthetic oligonucleotide
cgacgaagttaggcatcagttgccattact

SEQ ID NO: 241458 - DNA, 30 bp, Artificial Sequence
  Synthetic oligonucleotide
cagcttggcattaggtcaacgaatattact

SEQ ID NO: 241459 - DNA, 30 bp, Artificial Sequence
  Synthetic oligonucleotide
ttgtctgagggctgttcatcaactattact

SEQ ID NO: 241460 - DNA, 30 bp, Artificial Sequence
  Synthetic oligonucleotide
cggaatcaatcagttgtgatcggacttact

SEQ ID NO: 241461 - DNA, 30 bp, Artificial Sequence
  Synthetic oligonucleotide
cagggatacactgcccaaaccaatcttact

SEQ ID NO: 241462 - DNA, 30 bp, Artificial Sequence
  Synthetic oligonucleotide
aactggcatcaagtagtaaggcaagttact

SEQ ID NO: 241463 - DNA, 31 bp, Artificial Sequence
  Synthetic oligonucleotide
aggctacgtaccccacatgttgtcggttact

SEQ ID NO: 241464 - DNA, 30 bp, Artificial Sequence
  Synthetic oligonucleotide
cctgccgtgcgctccgacaattcggttact

SEQ ID NO: 241465 - DNA, 30 bp, Artificial Sequence
  Synthetic oligonucleotide
caagggtacgggttcccttaaaatgttact

SEQ ID NO: 241466 - DNA, 30 bp, Artificial Sequence
  Synthetic oligonucleotide
agtcacaccaacgttggcagtcgtgttact

SEQ ID NO: 241467 - DNA, 30 bp, Artificial Sequence
  Synthetic oligonucleotide
cgcaagctcgtctgtcacgtgaattttact

SEQ ID NO: 241468 - DNA, 30 bp, Artificial Sequence
  Synthetic oligonucleotide
tctaacgaattccagtagggcgaaaaacct

SEQ ID NO: 241469 - DNA, 30 bp, Artificial Sequence
  Synthetic oligonucleotide
taagacttaaaggtagggacttaaaaacct

SEQ ID NO: 241470 - DNA, 30 bp, Artificial Sequence
  Synthetic oligonucleotide
aagcgctggcaaccatgatctagaaaacct

SEQ ID NO: 241471 - DNA, 30 bp, Artificial Sequence
  Synthetic oligonucleotide
ccgcggacacaggctgtaatggccaaacct

SEQ ID NO: 241472 - DNA, 30 bp, Artificial Sequence
  Synthetic oligonucleotide
tcaactcgccaagggactctcttcaaacct

SEQ ID NO: 241473 - DNA, 30 bp, Artificial Sequence
  Synthetic oligonucleotide
cactacagcacacgtgctctgccgaaacct

SEQ ID NO: 241474 - DNA, 30 bp, Artificial Sequence
  Synthetic oligonucleotide
cgctgagtacttggtaattttttacaacct

SEQ ID NO: 241475 - DNA, 30 bp, Artificial Sequence
  Synthetic oligonucleotide
gcacatgttcctagagctcagacccaacct

SEQ ID NO: 241476 - DNA, 30 bp, Artificial Sequence
  Synthetic oligonucleotide
gatacttaaaaattgggctcacgccaacct

SEQ ID NO: 241477 - DNA, 30 bp, Artificial Sequence
  Synthetic oligonucleotide
tacggaggctaaagacgaccagatcaacct

SEQ ID NO: 241478 - DNA, 30 bp, Artificial Sequence
  Synthetic oligonucleotide
taaaggcagggcggcaatagtccagaacct

SEQ ID NO: 241479 - DNA, 30 bp, Artificial Sequence
  Synthetic oligonucleotide
aaccggcgatttgaacctgctagagaacct

SEQ ID NO: 241480 - DNA, 30 bp, Artificial Sequence
  Synthetic oligonucleotide
cgagattccgatagtccacacgcggaacct

SEQ ID NO: 241481 - DNA, 30 bp, Artificial Sequence
  Synthetic oligonucleotide
gtccggtggttttgcccagtctgtgaacct

SEQ ID NO: 241482 - DNA, 30 bp, Artificial Sequence
  Synthetic oligonucleotide
tgaggacgcgattctggaacccaataacct

SEQ ID NO: 241483 - DNA, 30 bp, Artificial Sequence
  Synthetic oligonucleotide
taagcctcccatccaagtgttacataacct

SEQ ID NO: 241484 - DNA, 30 bp, Artificial Sequence
  Synthetic oligonucleotide
cggatatccgctccacataggcagtaacct

SEQ ID NO: 241485 - DNA, 30 bp, Artificial Sequence
  Synthetic oligonucleotide
tggttggtccgagtaggtctgaccacacct

SEQ ID NO: 241486 - DNA, 29 bp, Artificial Sequence
  Synthetic oligonucleotide
tgttccgaacagcgagaaagatcacacct

SEQ ID NO: 241487 - DNA, 30 bp, Artificial Sequence
  Synthetic oligonucleotide
tggtgaaaattatagcgataagggacacct

SEQ ID NO: 241488 - DNA, 30 bp, Artificial Sequence
  Synthetic oligonucleotide
cagagctggtcctgaaacgccggtacacct

SEQ ID NO: 241489 - DNA, 30 bp, Artificial Sequence
  Synthetic oligonucleotide
gtgggatatcctatttcctgctgaccacct

SEQ ID NO: 241490 - DNA, 30 bp, Artificial Sequence
  Synthetic oligonucleotide
gccgtacgcgccaagtcactacagccacct

SEQ ID NO: 241491 - DNA, 30 bp, Artificial Sequence
  Synthetic oligonucleotide
cgcgtatggccgatctctggagggccacct

SEQ ID NO: 241492 - DNA, 30 bp, Artificial Sequence
  Synthetic oligonucleotide
tataggagagcattggaatggaatccacct

SEQ ID NO: 241493 - DNA, 30 bp, Artificial Sequence
  Synthetic oligonucleotide
gcggtctattatttacctgcacaagcacct

SEQ ID NO: 241494 - DNA, 30 bp, Artificial Sequence
  Synthetic oligonucleotide
gttaccgtcctcaacggcaaagtagcacct

SEQ ID NO: 241495 - DNA, 30 bp, Artificial Sequence
  Synthetic oligonucleotide
aactgggagagatcgttatacaacgcacct

SEQ ID NO: 241496 - DNA, 30 bp, Artificial Sequence
  Synthetic oligonucleotide
gtggcagaatggaatcttgatggcgcacct

SEQ ID NO: 241497 - DNA, 30 bp, Artificial Sequence
  Synthetic oligonucleotide
aataactggtctcaaaattggaacagacct

SEQ ID NO: 241498 - DNA, 30 bp, Artificial Sequence
  Synthetic oligonucleotide
gcaatgtagcgaagctaactgcgaggacct

SEQ ID NO: 241499 - DNA, 30 bp, Artificial Sequence
  Synthetic oligonucleotide
tctttaagaagggttatcaatttaggacct

SEQ ID NO: 241500 - DNA, 30 bp, Artificial Sequence
  Synthetic oligonucleotide
aggaaatttctcaattgtctgagcggacct

SEQ ID NO: 241501 - DNA, 30 bp, Artificial Sequence
  Synthetic oligonucleotide
gagcaatcatgccgtccaggtccgggacct

SEQ ID NO: 241502 - DNA, 30 bp, Artificial Sequence
  Synthetic oligonucleotide
tgtgcaatagaattatcaaggctgggacct

SEQ ID NO: 241503 - DNA, 30 bp, Artificial Sequence
  Synthetic oligonucleotide
atgggcgatataaataggcgccgtggacct

SEQ ID NO: 241504 - DNA, 30 bp, Artificial Sequence
  Synthetic oligonucleotide
aattaagcgacaaccgataccgttggacct

SEQ ID NO: 241505 - DNA, 30 bp, Artificial Sequence
  Synthetic oligonucleotide
cgatggagactatttgctgtttgctgacct

SEQ ID NO: 241506 - DNA, 29 bp, Artificial Sequence
  Synthetic oligonucleotide
ttaggaactaagcgatgcattagtgacct

SEQ ID NO: 241507 - DNA, 30 bp, Artificial Sequence
  Synthetic oligonucleotide
cgaaccggtatataatttcggtaaatacct

SEQ ID NO: 241508 - DNA, 30 bp, Artificial Sequence
  Synthetic oligonucleotide
tcagattaggccggatagaatttaatacct

SEQ ID NO: 241509 - DNA, 30 bp, Artificial Sequence
  Synthetic oligonucleotide
ctatctatcacgccgatctgcaacatacct

SEQ ID NO: 241510 - DNA, 30 bp, Artificial Sequence
  Synthetic oligonucleotide
taatctcgttgtcggtcttcagtcatacct

SEQ ID NO: 241511 - DNA, 30 bp, Artificial Sequence
  Synthetic oligonucleotide
gtccgaccgctacacttcatcaagatacct

SEQ ID NO: 241512 - DNA, 30 bp, Artificial Sequence
  Synthetic oligonucleotide
ggaaaatataaagattgaatacggatacct

SEQ ID NO: 241513 - DNA, 30 bp, Artificial Sequence
  Synthetic oligonucleotide
tcaagggaaactgcgcaaggcaagctacct

SEQ ID NO: 241514 - DNA, 30 bp, Artificial Sequence
  Synthetic oligonucleotide
ccgttcgggttacaagagagaaaagtacct

SEQ ID NO: 241515 - DNA, 30 bp, Artificial Sequence
  Synthetic oligonucleotide
acccgagcgtatcacagaccattcgtacct

SEQ ID NO: 241516 - DNA, 30 bp, Artificial Sequence
  Synthetic oligonucleotide
gtcaattcgaggtatggaggcaaattacct

SEQ ID NO: 241517 - DNA, 30 bp, Artificial Sequence
  Synthetic oligonucleotide
cgtccggggtgctttgtcgccacaaaccct

SEQ ID NO: 241518 - DNA, 30 bp, Artificial Sequence
  Synthetic oligonucleotide
cacgtcttcacgggacctacttgcaaccct

SEQ ID NO: 241519 - DNA, 30 bp, Artificial Sequence
  Synthetic oligonucleotide
ctcagtgaccggtagcagttattgaaccct

SEQ ID NO: 241520 - DNA, 30 bp, Artificial Sequence
  Synthetic oligonucleotide
gacgtgcgtctctagctgtactataaccct

SEQ ID NO: 241521 - DNA, 30 bp, Artificial Sequence
  Synthetic oligonucleotide
acacccgtacgttctaaagcatgacaccct

SEQ ID NO: 241522 - DNA, 30 bp, Artificial Sequence
  Synthetic oligonucleotide
ggaccttaatggtgctcccctcagcaccct

SEQ ID NO: 241523 - DNA, 30 bp, Artificial Sequence
  Synthetic oligonucleotide
ggagccgcttatcaagaactgtcgcaccct

SEQ ID NO: 241524 - DNA, 30 bp, Artificial Sequence
  Synthetic oligonucleotide
taattcaccaagccgtcactccatcaccct

SEQ ID NO: 241525 - DNA, 30 bp, Artificial Sequence
  Synthetic oligonucleotide
actctatcgatgatacagatcacagaccct

SEQ ID NO: 241526 - DNA, 30 bp, Artificial Sequence
  Synthetic oligonucleotide
gggtgttgaatggccgtgggcccagaccct

SEQ ID NO: 241527 - DNA, 31 bp, Artificial Sequence
  Synthetic oligonucleotide
cggtaccggatgttaagatgaagccgaccct

SEQ ID NO: 241528 - DNA, 30 bp, Artificial Sequence
  Synthetic oligonucleotide
tgcaaggactgaaagaggataatcgaccct

SEQ ID NO: 241529 - DNA, 30 bp, Artificial Sequence
  Synthetic oligonucleotide
tcccttgtggtcctgcatcgtgatgaccct

SEQ ID NO: 241530 - DNA, 30 bp, Artificial Sequence
  Synthetic oligonucleotide
acgatctgtccttcagagcatcttgaccct

SEQ ID NO: 241531 - DNA, 30 bp, Artificial Sequence
  Synthetic oligonucleotide
gtggcgtagttgaatcggaacaaataccct

SEQ ID NO: 241532 - DNA, 30 bp, Artificial Sequence
  Synthetic oligonucleotide
cgtttgagattatatcttcggcactaccct

SEQ ID NO: 241533 - DNA, 30 bp, Artificial Sequence
  Synthetic oligonucleotide
gcatcggtgccgcaacgtaccatgtaccct

SEQ ID NO: 241534 - DNA, 30 bp, Artificial Sequence
  Synthetic oligonucleotide
ggtcaggattacaagaatgttacttaccct

SEQ ID NO: 241535 - DNA, 30 bp, Artificial Sequence
  Synthetic oligonucleotide
gattgacaacacgaataggtcggcacccct

SEQ ID NO: 241536 - DNA, 30 bp, Artificial Sequence
  Synthetic oligonucleotide
atcagcggtaaagcaatgggcttcacccct

SEQ ID NO: 241537 - DNA, 30 bp, Artificial Sequence
  Synthetic oligonucleotide
taccctaggaagcaagccgagtggccccct

SEQ ID NO: 241538 - DNA, 30 bp, Artificial Sequence
  Synthetic oligonucleotide
aacatgatcaggacggttgaacgtccccct

SEQ ID NO: 241539 - DNA, 30 bp, Artificial Sequence
  Synthetic oligonucleotide
aggttcaaagagaaagtgaattacgcccct

SEQ ID NO: 241540 - DNA, 30 bp, Artificial Sequence
  Synthetic oligonucleotide
gattacacatagtcgggcatccaggcccct

SEQ ID NO: 241541 - DNA, 30 bp, Artificial Sequence
  Synthetic oligonucleotide
gaagagctgtgagctgttttgggggcccct

SEQ ID NO: 241542 - DNA, 30 bp, Artificial Sequence
  Synthetic oligonucleotide
tacatagtgctgcttgacccgagatcccct

SEQ ID NO: 241543 - DNA, 30 bp, Artificial Sequence
  Synthetic oligonucleotide
actatgatatgaccttcgcctacctcccct

SEQ ID NO: 241544 - DNA, 30 bp, Artificial Sequence
  Synthetic oligonucleotide
atgcaggtcaagcatcaccaatcctcccct

SEQ ID NO: 241545 - DNA, 30 bp, Artificial Sequence
  Synthetic oligonucleotide
agagacaattggggagggagttgcagccct

SEQ ID NO: 241546 - DNA, 30 bp, Artificial Sequence
  Synthetic oligonucleotide
cctggagagcctgcactgtgtgggagccct

SEQ ID NO: 241547 - DNA, 30 bp, Artificial Sequence
  Synthetic oligonucleotide
ttgtgaacagcactgaggatcgcgcgccct

SEQ ID NO: 241548 - DNA, 30 bp, Artificial Sequence
  Synthetic oligonucleotide
agaaaagattacattgtccattatcgccct

SEQ ID NO: 241549 - DNA, 30 bp, Artificial Sequence
  Synthetic oligonucleotide
atggcgtatgtttaggtgagtgttcgccct

SEQ ID NO: 241550 - DNA, 30 bp, Artificial Sequence
  Synthetic oligonucleotide
agaaataccgtccaatagttcgcgggccct

SEQ ID NO: 241551 - DNA, 30 bp, Artificial Sequence
  Synthetic oligonucleotide
tgccaggtagcgaccataaaccggggccct

SEQ ID NO: 241552 - DNA, 30 bp, Artificial Sequence
  Synthetic oligonucleotide
ttggcccggtcatcatcggagctgggccct

SEQ ID NO: 241553 - DNA, 30 bp, Artificial Sequence
  Synthetic oligonucleotide
gtaattaacccttttaaccggtctggccct

SEQ ID NO: 241554 - DNA, 30 bp, Artificial Sequence
  Synthetic oligonucleotide
ggaagcgcactttagaaaacgcgtggccct

SEQ ID NO: 241555 - DNA, 30 bp, Artificial Sequence
  Synthetic oligonucleotide
gactcctccactcgcaaatagctatgccct

SEQ ID NO: 241556 - DNA, 30 bp, Artificial Sequence
  Synthetic oligonucleotide
cccctctcgctttctattcctttatgccct

SEQ ID NO: 241557 - DNA, 30 bp, Artificial Sequence
  Synthetic oligonucleotide
caataaattagctaattgcttccctgccct

SEQ ID NO: 241558 - DNA, 30 bp, Artificial Sequence
  Synthetic oligonucleotide
tagtgaacttccttttcatatccgtgccct

SEQ ID NO: 241559 - DNA, 30 bp, Artificial Sequence
  Synthetic oligonucleotide
gatgtttcgagcggggtgcgtatgtgccct

SEQ ID NO: 241560 - DNA, 30 bp, Artificial Sequence
  Synthetic oligonucleotide
ccgaataaccgctggtctacactgtgccct

SEQ ID NO: 241561 - DNA, 30 bp, Artificial Sequence
  Synthetic oligonucleotide
gagaaagtacgtctaagttgaccttgccct

SEQ ID NO: 241562 - DNA, 30 bp, Artificial Sequence
  Synthetic oligonucleotide
ttatggcgccacagggacaacggttgccct

SEQ ID NO: 241563 - DNA, 30 bp, Artificial Sequence
  Synthetic oligonucleotide
tgccaacttggcacccttctatgaatccct

SEQ ID NO: 241564 - DNA, 30 bp, Artificial Sequence
  Synthetic oligonucleotide
gggagcggtttgcataacacacacatccct

SEQ ID NO: 241565 - DNA, 30 bp, Artificial Sequence
  Synthetic oligonucleotide
taaatactcaaagcaggcgctcacatccct

SEQ ID NO: 241566 - DNA, 30 bp, Artificial Sequence
  Synthetic oligonucleotide
ctacgtgtgcataatgggtgctccatccct

SEQ ID NO: 241567 - DNA, 30 bp, Artificial Sequence
  Synthetic oligonucleotide
gagatgtattaatcgattttggcgatccct

SEQ ID NO: 241568 - DNA, 30 bp, Artificial Sequence
  Synthetic oligonucleotide
cgggaaccatgaaaggcaacttaactccct

SEQ ID NO: 241569 - DNA, 30 bp, Artificial Sequence
  Synthetic oligonucleotide
ggccgtccaggagtaacgtctacggtccct

SEQ ID NO: 241570 - DNA, 30 bp, Artificial Sequence
  Synthetic oligonucleotide
tgtgtcaaagatgtactgagggcggtccct

SEQ ID NO: 241571 - DNA, 30 bp, Artificial Sequence
  Synthetic oligonucleotide
gcaggtttagggctaataggtagggtccct

SEQ ID NO: 241572 - DNA, 30 bp, Artificial Sequence
  Synthetic oligonucleotide
gataaggccaaataatctgcatggttccct

SEQ ID NO: 241573 - DNA, 30 bp, Artificial Sequence
  Synthetic oligonucleotide
ctcaatcccagccatgcagagaaaaagcct

SEQ ID NO: 241574 - DNA, 30 bp, Artificial Sequence
  Synthetic oligonucleotide
agggagtaagaattcccctaacgaaagcct

SEQ ID NO: 241575 - DNA, 30 bp, Artificial Sequence
  Synthetic oligonucleotide
gtcataagtgagagatacgcgcggaagcct

SEQ ID NO: 241576 - DNA, 30 bp, Artificial Sequence
  Synthetic oligonucleotide
aaactaagattcaccaactttacacagcct

SEQ ID NO: 241577 - DNA, 30 bp, Artificial Sequence
  Synthetic oligonucleotide
cccttgtacgagccaatgtaccgacagcct

SEQ ID NO: 241578 - DNA, 30 bp, Artificial Sequence
  Synthetic oligonucleotide
gtgtaggagaccttttgtcatggacagcct

SEQ ID NO: 241579 - DNA, 30 bp, Artificial Sequence
  Synthetic oligonucleotide
ccgactcacgttgatcgagccgaccagcct

SEQ ID NO: 241580 - DNA, 30 bp, Artificial Sequence
  Synthetic oligonucleotide
tacgagacgcggagcaacgtgccccagcct

SEQ ID NO: 241581 - DNA, 30 bp, Artificial Sequence
  Synthetic oligonucleotide
cttgaggtaattgccaatgttcctcagcct

SEQ ID NO: 241582 - DNA, 30 bp, Artificial Sequence
  Synthetic oligonucleotide
tgatatggattccagtggtaggtcgagcct

SEQ ID NO: 241583 - DNA, 30 bp, Artificial Sequence
  Synthetic oligonucleotide
acaataatattgctagacggacgtgagcct

SEQ ID NO: 241584 - DNA, 30 bp, Artificial Sequence
  Synthetic oligonucleotide
tcataacctggggagccaacggtatagcct

SEQ ID NO: 241585 - DNA, 30 bp, Artificial Sequence
  Synthetic oligonucleotide
ggtgcgggtagctgcgcctggcacacgcct

SEQ ID NO: 241586 - DNA, 30 bp, Artificial Sequence
  Synthetic oligonucleotide
gtggtatataggggacagcatagcacgcct

SEQ ID NO: 241587 - DNA, 30 bp, Artificial Sequence
  Synthetic oligonucleotide
cctggggtagctgctccaagcaatacgcct

SEQ ID NO: 241588 - DNA, 29 bp, Artificial Sequence
  Synthetic oligonucleotide
ctcttgacacctcgagaattcgtacgcct

SEQ ID NO: 241589 - DNA, 30 bp, Artificial Sequence
  Synthetic oligonucleotide
cttgtaaggtcgtaccgaggtgttacgcct

SEQ ID NO: 241590 - DNA, 30 bp, Artificial Sequence
  Synthetic oligonucleotide
atccaggtgaatgcctcccgacaaccgcct

SEQ ID NO: 241591 - DNA, 30 bp, Artificial Sequence
  Synthetic oligonucleotide
tatcgcgatgcccgaaaaaattgaccgcct

SEQ ID NO: 241592 - DNA, 30 bp, Artificial Sequence
  Synthetic oligonucleotide
tcagtgctcggtttagcgtcagagccgcct

SEQ ID NO: 241593 - DNA, 30 bp, Artificial Sequence
  Synthetic oligonucleotide
ggaagaactcaagccattgtaggtccgcct

SEQ ID NO: 241594 - DNA, 30 bp, Artificial Sequence
  Synthetic oligonucleotide
ctagagtgtgcgtaaattcgtatatcgcct

SEQ ID NO: 241595 - DNA, 30 bp, Artificial Sequence
  Synthetic oligonucleotide
taagagaatgcacaacacgggcagtcgcct

SEQ ID NO: 241596 - DNA, 30 bp, Artificial Sequence
  Synthetic oligonucleotide
tctcgggagatgacatatattaggtcgcct

SEQ ID NO: 241597 - DNA, 30 bp, Artificial Sequence
  Synthetic oligonucleotide
tttcattcgcgatcacttagtgtaaggcct

SEQ ID NO: 241598 - DNA, 30 bp, Artificial Sequence
  Synthetic oligonucleotide
gctttcactcatcaccgtgggctgcggcct

SEQ ID NO: 241599 - DNA, 30 bp, Artificial Sequence
  Synthetic oligonucleotide
attgcaaaaaaatgctaagatactcggcct

SEQ ID NO: 241600 - DNA, 30 bp, Artificial Sequence
  Synthetic oligonucleotide
aggacttgaaccccaaaggtaccagggcct

SEQ ID NO: 241601 - DNA, 30 bp, Artificial Sequence
  Synthetic oligonucleotide
tgggccacagcacgccttataaacgggcct

SEQ ID NO: 241602 - DNA, 30 bp, Artificial Sequence
  Synthetic oligonucleotide
tggaggcccaatctaacgaggtgcgggcct

SEQ ID NO: 241603 - DNA, 30 bp, Artificial Sequence
  Synthetic oligonucleotide
cgaatgtgtccggcatcccaagcggggcct

SEQ ID NO: 241604 - DNA, 30 bp, Artificial Sequence
  Synthetic oligonucleotide
cgggtatgcgcacagtgtaggaatgggcct

SEQ ID NO: 241605 - DNA, 30 bp, Artificial Sequence
  Synthetic oligonucleotide
caaaagttaaaaatggtctctattgggcct

SEQ ID NO: 241606 - DNA, 30 bp, Artificial Sequence
  Synthetic oligonucleotide
gtgagttaattaagtggaacaacatggcct

SEQ ID NO: 241607 - DNA, 30 bp, Artificial Sequence
  Synthetic oligonucleotide
aacagtctaagcaatgctgctacatggcct

SEQ ID NO: 241608 - DNA, 30 bp, Artificial Sequence
  Synthetic oligonucleotide
cataaagcaggctcacgcctctactggcct

SEQ ID NO: 241609 - DNA, 30 bp, Artificial Sequence
  Synthetic oligonucleotide
ccgtgcggaattctccacaagggctggcct

SEQ ID NO: 241610 - DNA, 30 bp, Artificial Sequence
  Synthetic oligonucleotide
tggtagagtgatcaccagcattgctggcct

SEQ ID NO: 241611 - DNA, 30 bp, Artificial Sequence
  Synthetic oligonucleotide
tacgttgggggtattagttttgggtggcct

SEQ ID NO: 241612 - DNA, 30 bp, Artificial Sequence
  Synthetic oligonucleotide
ccgaaccccgataacccgctaaattggcct

SEQ ID NO: 241613 - DNA, 30 bp, Artificial Sequence
  Synthetic oligonucleotide
gtggtaacgtcccccggacgagacatgcct

SEQ ID NO: 241614 - DNA, 30 bp, Artificial Sequence
  Synthetic oligonucleotide
cccaatggaatcatcgtaattaccatgcct

SEQ ID NO: 241615 - DNA, 30 bp, Artificial Sequence
  Synthetic oligonucleotide
aacgcggttggagtgtcatgggcgatgcct

SEQ ID NO: 241616 - DNA, 30 bp, Artificial Sequence
  Synthetic oligonucleotide
ccgcttcaataagaaacagttagcctgcct

SEQ ID NO: 241617 - DNA, 30 bp, Artificial Sequence
  Synthetic oligonucleotide
cctcaaggctagagttaggtatagctgcct

SEQ ID NO: 241618 - DNA, 30 bp, Artificial Sequence
  Synthetic oligonucleotide
gtttcgaaatgtcaagtattacgtctgcct

SEQ ID NO: 241619 - DNA, 30 bp, Artificial Sequence
  Synthetic oligonucleotide
ctagcgagtggtaagtactcgttagtgcct

SEQ ID NO: 241620 - DNA, 30 bp, Artificial Sequence
  Synthetic oligonucleotide
aggaggggcaggtctacacagagggtgcct

SEQ ID NO: 241621 - DNA, 30 bp, Artificial Sequence
  Synthetic oligonucleotide
cgggagcgtgaccggatgttgaatgtgcct

SEQ ID NO: 241622 - DNA, 30 bp, Artificial Sequence
  Synthetic oligonucleotide
atgtgtcttaatttaactcgctaattgcct

SEQ ID NO: 241623 - DNA, 30 bp, Artificial Sequence
  Synthetic oligonucleotide
actcgtgatataggactaggtatattgcct

SEQ ID NO: 241624 - DNA, 30 bp, Artificial Sequence
  Synthetic oligonucleotide
ttcataggaaaacaagaaaaaggcttgcct

SEQ ID NO: 241625 - DNA, 30 bp, Artificial Sequence
  Synthetic oligonucleotide
agcatgtcgattggcgtcgaagttttgcct

SEQ ID NO: 241626 - DNA, 30 bp, Artificial Sequence
  Synthetic oligonucleotide
gggaccgttgtagataaaatgtagaatcct

SEQ ID NO: 241627 - DNA, 30 bp, Artificial Sequence
  Synthetic oligonucleotide
gtatggtctagctccgagaccgcgaatcct

SEQ ID NO: 241628 - DNA, 30 bp, Artificial Sequence
  Synthetic oligonucleotide
cggtcgagggcactttgaagacggaatcct

SEQ ID NO: 241629 - DNA, 30 bp, Artificial Sequence
  Synthetic oligonucleotide
gcgaaataagagtttcggttgtttaatcct

SEQ ID NO: 241630 - DNA, 30 bp, Artificial Sequence
  Synthetic oligonucleotide
gcgcgaacatcattaaatgttacacatcct

SEQ ID NO: 241631 - DNA, 30 bp, Artificial Sequence
  Synthetic oligonucleotide
tacactacgtcctccgcgtaggcccatcct

SEQ ID NO: 241632 - DNA, 30 bp, Artificial Sequence
  Synthetic oligonucleotide
taaagtttagttagtaggctagtgcatcct

SEQ ID NO: 241633 - DNA, 30 bp, Artificial Sequence
  Synthetic oligonucleotide
attaaccaccttcttattggatctcatcct

SEQ ID NO: 241634 - DNA, 30 bp, Artificial Sequence
  Synthetic oligonucleotide
gcgatgtgtcagagcacagagaaagatcct

SEQ ID NO: 241635 - DNA, 30 bp, Artificial Sequence
  Synthetic oligonucleotide
gcacgttgcgcaagcggggttccggatcct

SEQ ID NO: 241636 - DNA, 30 bp, Artificial Sequence
  Synthetic oligonucleotide
ctttagcatcggaaacaggggcgggatcct

SEQ ID NO: 241637 - DNA, 31 bp, Artificial Sequence
  Synthetic oligonucleotide
gaggtcttttcttcgatggggtatggatcct

SEQ ID NO: 241638 - DNA, 30 bp, Artificial Sequence
  Synthetic oligonucleotide
aggtcgacgtccatcgaaagaatatatcct

SEQ ID NO: 241639 - DNA, 30 bp, Artificial Sequence
  Synthetic oligonucleotide
ggcgtttttgtctacagagtggtctatcct

SEQ ID NO: 241640 - DNA, 30 bp, Artificial Sequence
  Synthetic oligonucleotide
aacatgtgattttctaccaccttctatcct

SEQ ID NO: 241641 - DNA, 31 bp, Artificial Sequence
  Synthetic oligonucleotide
agaacgttcatgatttcgaatcaagtatcct

SEQ ID NO: 241642 - DNA, 30 bp, Artificial Sequence
  Synthetic oligonucleotide
gtcctggatgggcacagacgcacgtatcct

SEQ ID NO: 241643 - DNA, 30 bp, Artificial Sequence
  Synthetic oligonucleotide
ctcgtggggcgcaaacacaaactgtatcct

SEQ ID NO: 241644 - DNA, 30 bp, Artificial Sequence
  Synthetic oligonucleotide
atgcgttttccaattgatatggtttatcct

SEQ ID NO: 241645 - DNA, 30 bp, Artificial Sequence
  Synthetic oligonucleotide
catagcacaacatccatgactaagactcct

SEQ ID NO: 241646 - DNA, 30 bp, Artificial Sequence
  Synthetic oligonucleotide
ctcgcaatgtgaccctgcccgacacctcct

SEQ ID NO: 241647 - DNA, 30 bp, Artificial Sequence
  Synthetic oligonucleotide
gtcgcagacccaggtcgtaagccccctcct

SEQ ID NO: 241648 - DNA, 31 bp, Artificial Sequence
  Synthetic oligonucleotide
tagcaaagataatcctaggaaacgtcctcct

SEQ ID NO: 241649 - DNA, 30 bp, Artificial Sequence
  Synthetic oligonucleotide
tataaatcgttggtcattctgcttcctcct

SEQ ID NO: 241650 - DNA, 30 bp, Artificial Sequence
  Synthetic oligonucleotide
cgtaatagatggaccgatgacacagctcct

SEQ ID NO: 241651 - DNA, 30 bp, Artificial Sequence
  Synthetic oligonucleotide
gcacatcatttgcatcgtcaaggcgctcct

SEQ ID NO: 241652 - DNA, 30 bp, Artificial Sequence
  Synthetic oligonucleotide
ttcgaaaagagcttgcggagttaggctcct

SEQ ID NO: 241653 - DNA, 30 bp, Artificial Sequence
  Synthetic oligonucleotide
caatttgtgccctacatatgtgtctctcct

SEQ ID NO: 241654 - DNA, 30 bp, Artificial Sequence
  Synthetic oligonucleotide
aggcacgggggcggagggttgagttctcct

SEQ ID NO: 241655 - DNA, 30 bp, Artificial Sequence
  Synthetic oligonucleotide
tgcaattggagtacatatccggccagtcct

SEQ ID NO: 241656 - DNA, 30 bp, Artificial Sequence
  Synthetic oligonucleotide
gttccgctctaagatttaacagtcagtcct

SEQ ID NO: 241657 - DNA, 37 bp, Artificial Sequence
  Synthetic oligonucleotide
accgtatcttcagttccataataaccattttagtcct

SEQ ID NO: 241658 - DNA, 30 bp, Artificial Sequence
  Synthetic oligonucleotide
ggcctgaggattacttctaactagcgtcct

SEQ ID NO: 241659 - DNA, 30 bp, Artificial Sequence
  Synthetic oligonucleotide
ctcacgtaagaagtacgtatggatcgtcct

SEQ ID NO: 241660 - DNA, 30 bp, Artificial Sequence
  Synthetic oligonucleotide
ttgggacgtaccggtcagcgacagggtcct

SEQ ID NO: 241661 - DNA, 30 bp, Artificial Sequence
  Synthetic oligonucleotide
cgatatattagataacatagagctggtcct

SEQ ID NO: 241662 - DNA, 30 bp, Artificial Sequence
  Synthetic oligonucleotide
tatcacgaagcctgttaccgtctatgtcct

SEQ ID NO: 241663 - DNA, 30 bp, Artificial Sequence
  Synthetic oligonucleotide
cgttcgttgggctgccgtaatgtatgtcct

SEQ ID NO: 241664 - DNA, 30 bp, Artificial Sequence
  Synthetic oligonucleotide
gtatggcgggcggtcacaacgacctgtcct

SEQ ID NO: 241665 - DNA, 30 bp, Artificial Sequence
  Synthetic oligonucleotide
aagctctgcgaaaggaccagctgttgtcct

SEQ ID NO: 241666 - DNA, 30 bp, Artificial Sequence
  Synthetic oligonucleotide
acgcacggtactagcttccgtgtttgtcct

SEQ ID NO: 241667 - DNA, 30 bp, Artificial Sequence
  Synthetic oligonucleotide
ggcaggggcatgtcgggagcagagattcct

SEQ ID NO: 241668 - DNA, 30 bp, Artificial Sequence
  Synthetic oligonucleotide
cgggtctaaaggaggctcgtgatgattcct

SEQ ID NO: 241669 - DNA, 30 bp, Artificial Sequence
  Synthetic oligonucleotide
tccttaagattcaggatctttttgattcct

SEQ ID NO: 241670 - DNA, 30 bp, Artificial Sequence
  Synthetic oligonucleotide
caacatgctaattttttgcttattattcct

SEQ ID NO: 241671 - DNA, 30 bp, Artificial Sequence
  Synthetic oligonucleotide
gtcgcacagaagatacctgacaaccttcct

SEQ ID NO: 241672 - DNA, 30 bp, Artificial Sequence
  Synthetic oligonucleotide
aatcatcacaactctacaagtaaccttcct

SEQ ID NO: 241673 - DNA, 30 bp, Artificial Sequence
  Synthetic oligonucleotide
aaagggtatcgtagcggcgtggcccttcct

SEQ ID NO: 241674 - DNA, 30 bp, Artificial Sequence
  Synthetic oligonucleotide
cagaggtaagatcttaacgaagctcttcct

SEQ ID NO: 241675 - DNA, 30 bp, Artificial Sequence
  Synthetic oligonucleotide
ctgctctccagaggacatggggaagttcct

SEQ ID NO: 241676 - DNA, 30 bp, Artificial Sequence
  Synthetic oligonucleotide
tgaggaatactcagtcaaattgtggttcct

SEQ ID NO: 241677 - DNA, 30 bp, Artificial Sequence
  Synthetic oligonucleotide
aggggcctctaagtttaaggatctgttcct

SEQ ID NO: 241678 - DNA, 30 bp, Artificial Sequence
  Synthetic oligonucleotide
cgtttagtctcgaaatgcacaaagtttcct

SEQ ID NO: 241679 - DNA, 30 bp, Artificial Sequence
  Synthetic oligonucleotide
tcagagtggaaatcctagactggcaaagct

SEQ ID NO: 241680 - DNA, 30 bp, Artificial Sequence
  Synthetic oligonucleotide
acgagtggctccgttgacatgccgaaagct

SEQ ID NO: 241681 - DNA, 30 bp, Artificial Sequence
  Synthetic oligonucleotide
tatgaatacggtcgttgtgcacggaaagct

SEQ ID NO: 241682 - DNA, 30 bp, Artificial Sequence
  Synthetic oligonucleotide
catgtggaccattaagaggtcagtaaagct

SEQ ID NO: 241683 - DNA, 30 bp, Artificial Sequence
  Synthetic oligonucleotide
agaaccagtgataagttcatcatacaagct

SEQ ID NO: 241684 - DNA, 30 bp, Artificial Sequence
  Synthetic oligonucleotide
caacaggagaggagctactccacgcaagct

SEQ ID NO: 241685 - DNA, 30 bp, Artificial Sequence
  Synthetic oligonucleotide
gacgccgtcgtgctgatagggtttcaagct

SEQ ID NO: 241686 - DNA, 30 bp, Artificial Sequence
  Synthetic oligonucleotide
agggatgccaaggctagacgcaaagaagct

SEQ ID NO: 241687 - DNA, 30 bp, Artificial Sequence
  Synthetic oligonucleotide
taaacaggacccaaataaagactcgaagct

SEQ ID NO: 241688 - DNA, 30 bp, Artificial Sequence
  Synthetic oligonucleotide
aattggatgggtaattaggcaagggaagct

SEQ ID NO: 241689 - DNA, 31 bp, Artificial Sequence
  Synthetic oligonucleotide
cgtgtgggtccattagctgttgctggaagct

SEQ ID NO: 241690 - DNA, 30 bp, Artificial Sequence
  Synthetic oligonucleotide
tgggggctcaatagataacatcttgaagct

SEQ ID NO: 241691 - DNA, 30 bp, Artificial Sequence
  Synthetic oligonucleotide
cagaaagtgtaacggggtgacgttgaagct

SEQ ID NO: 241692 - DNA, 30 bp, Artificial Sequence
  Synthetic oligonucleotide
gtaagcggtacattcttcatggaataagct

SEQ ID NO: 241693 - DNA, 30 bp, Artificial Sequence
  Synthetic oligonucleotide
aagtatagccgtaacttagtcggataagct

SEQ ID NO: 241694 - DNA, 30 bp, Artificial Sequence
  Synthetic oligonucleotide
accattgtgtcgcgcctcaagcgcacagct

SEQ ID NO: 241695 - DNA, 30 bp, Artificial Sequence
  Synthetic oligonucleotide
ggctgttcagcacaacctttaatcacagct

SEQ ID NO: 241696 - DNA, 31 bp, Artificial Sequence
  Synthetic oligonucleotide
gtatggacttacttagttaagggggacagct

SEQ ID NO: 241697 - DNA, 30 bp, Artificial Sequence
  Synthetic oligonucleotide
ggtaggattcagacaggcgttgatacagct

SEQ ID NO: 241698 - DNA, 30 bp, Artificial Sequence
  Synthetic oligonucleotide
ttctggtggggttagtctatatttacagct

SEQ ID NO: 241699 - DNA, 30 bp, Artificial Sequence
  Synthetic oligonucleotide
ctttcctcgtggttaaggtaggaaccagct

SEQ ID NO: 241700 - DNA, 30 bp, Artificial Sequence
  Synthetic oligonucleotide
ggcttctcgccaacagcacctgcgccagct

SEQ ID NO: 241701 - DNA, 30 bp, Artificial Sequence
  Synthetic oligonucleotide
gggttgctcagaattaggggtcatccagct

SEQ ID NO: 241702 - DNA, 30 bp, Artificial Sequence
  Synthetic oligonucleotide
aaggtgcaggttggtcagattcaagcagct

SEQ ID NO: 241703 - DNA, 30 bp, Artificial Sequence
  Synthetic oligonucleotide
attatataagactggcactcaacagcagct

SEQ ID NO: 241704 - DNA, 30 bp, Artificial Sequence
  Synthetic oligonucleotide
gagcatatcaaaaagcgcaatagagcagct

SEQ ID NO: 241705 - DNA, 30 bp, Artificial Sequence
  Synthetic oligonucleotide
ttcggtagtcgcctgcatcatccggcagct

SEQ ID NO: 241706 - DNA, 30 bp, Artificial Sequence
  Synthetic oligonucleotide
agcttcaatggaccacatccctttgcagct

SEQ ID NO: 241707 - DNA, 30 bp, Artificial Sequence
  Synthetic oligonucleotide
acgccgccaatctacctacgttcatcagct

SEQ ID NO: 241708 - DNA, 30 bp, Artificial Sequence
  Synthetic oligonucleotide
aagcgttccgtgccacggagggactcagct

SEQ ID NO: 241709 - DNA, 30 bp, Artificial Sequence
  Synthetic oligonucleotide
gagggctcgggagtgctaaaattctcagct

SEQ ID NO: 241710 - DNA, 30 bp, Artificial Sequence
  Synthetic oligonucleotide
aataacgactcacagggttccgcgtcagct

SEQ ID NO: 241711 - DNA, 30 bp, Artificial Sequence
  Synthetic oligonucleotide
gacggggaatttcagtatttatcaagagct

SEQ ID NO: 241712 - DNA, 30 bp, Artificial Sequence
  Synthetic oligonucleotide
gaggaatggacggatccatacggaagagct

SEQ ID NO: 241713 - DNA, 30 bp, Artificial Sequence
  Synthetic oligonucleotide
aaatggttgcttgggcattcttacagagct

SEQ ID NO: 241714 - DNA, 30 bp, Artificial Sequence
  Synthetic oligonucleotide
ggtgcagtaaatgtagaggtcagcagagct

SEQ ID NO: 241715 - DNA, 30 bp, Artificial Sequence
  Synthetic oligonucleotide
tcgtcaaaacggggttcataacgcagagct

SEQ ID NO: 241716 - DNA, 30 bp, Artificial Sequence
  Synthetic oligonucleotide
cagagtcggaaccccgaattccagagagct

SEQ ID NO: 241717 - DNA, 30 bp, Artificial Sequence
  Synthetic oligonucleotide
actgtaatttgaggggtacattagagagct

SEQ ID NO: 241718 - DNA, 30 bp, Artificial Sequence
  Synthetic oligonucleotide
cccagacagaattgtaatgcccttagagct

SEQ ID NO: 241719 - DNA, 30 bp, Artificial Sequence
  Synthetic oligonucleotide
agctgatgaccgacaatgagattacgagct

SEQ ID NO: 241720 - DNA, 30 bp, Artificial Sequence
  Synthetic oligonucleotide
atctcgggagcgcgatatagtggccgagct

SEQ ID NO: 241721 - DNA, 30 bp, Artificial Sequence
  Synthetic oligonucleotide
tgggtctgcggggcatgtttgagaggagct

SEQ ID NO: 241722 - DNA, 30 bp, Artificial Sequence
  Synthetic oligonucleotide
ggcctcgttgcgaaattaattagaggagct

SEQ ID NO: 241723 - DNA, 30 bp, Artificial Sequence
  Synthetic oligonucleotide
tcctgactagggcggttgataggaggagct

SEQ ID NO: 241724 - DNA, 30 bp, Artificial Sequence
  Synthetic oligonucleotide
aacgaatcttgggcggtcgcgtacggagct

SEQ ID NO: 241725 - DNA, 30 bp, Artificial Sequence
  Synthetic oligonucleotide
cactaacctagatgtgagcaggccggagct

SEQ ID NO: 241726 - DNA, 30 bp, Artificial Sequence
  Synthetic oligonucleotide
taaagttaacctgagggcacagtgggagct

SEQ ID NO: 241727 - DNA, 30 bp, Artificial Sequence
  Synthetic oligonucleotide
gttgacgcctccattcgccagttgggagct

SEQ ID NO: 241728 - DNA, 30 bp, Artificial Sequence
  Synthetic oligonucleotide
gaagagtaagctaagaaactgcgtggagct

SEQ ID NO: 241729 - DNA, 30 bp, Artificial Sequence
  Synthetic oligonucleotide
caatagttacgtcgtcgtctatcatgagct

SEQ ID NO: 241730 - DNA, 30 bp, Artificial Sequence
  Synthetic oligonucleotide
caaggtagcgtgatggatgaacgctgagct

SEQ ID NO: 241731 - DNA, 29 bp, Artificial Sequence
  Synthetic oligonucleotide
gaaacggagcaaccgttaggggaatagct

SEQ ID NO: 241732 - DNA, 31 bp, Artificial Sequence
  Synthetic oligonucleotide
ttgatctgatcctgatggccatggaatagct

SEQ ID NO: 241733 - DNA, 30 bp, Artificial Sequence
  Synthetic oligonucleotide
aacagttgggtgaacactaagcacatagct

SEQ ID NO: 241734 - DNA, 30 bp, Artificial Sequence
  Synthetic oligonucleotide
ccctagaagggttgacagaagctcatagct

SEQ ID NO: 241735 - DNA, 30 bp, Artificial Sequence
  Synthetic oligonucleotide
cctgagttattacctcaacgtagtatagct

SEQ ID NO: 241736 - DNA, 30 bp, Artificial Sequence
  Synthetic oligonucleotide
catagatttcgcaatgaaacaagggtagct

SEQ ID NO: 241737 - DNA, 30 bp, Artificial Sequence
  Synthetic oligonucleotide
tttctcggggaggcggtggagcgggtagct

SEQ ID NO: 241738 - DNA, 31 bp, Artificial Sequence
  Synthetic oligonucleotide
gttaagcctgtaacacagtgagagtgtagct

SEQ ID NO: 241739 - DNA, 30 bp, Artificial Sequence
  Synthetic oligonucleotide
aaagggatcgcgaggtatttgagtgtagct

SEQ ID NO: 241740 - DNA, 30 bp, Artificial Sequence
  Synthetic oligonucleotide
gctatctggaggcccaaattgcgtgtagct

SEQ ID NO: 241741 - DNA, 30 bp, Artificial Sequence
  Synthetic oligonucleotide
tgacctaaaatttgtgcagccaacttagct

SEQ ID NO: 241742 - DNA, 30 bp, Artificial Sequence
  Synthetic oligonucleotide
cgggtatatttagttagaataaatttagct

SEQ ID NO: 241743 - DNA, 30 bp, Artificial Sequence
  Synthetic oligonucleotide
atctcgagtaacatcagactgggcaacgct

SEQ ID NO: 241744 - DNA, 30 bp, Artificial Sequence
  Synthetic oligonucleotide
catcatatgtggttacacaggatcaacgct

SEQ ID NO: 241745 - DNA, 30 bp, Artificial Sequence
  Synthetic oligonucleotide
ctcgtaacgtctggaatatatcgacacgct

SEQ ID NO: 241746 - DNA, 30 bp, Artificial Sequence
  Synthetic oligonucleotide
ctatagatgagtgaatcataaacgcacgct

SEQ ID NO: 241747 - DNA, 30 bp, Artificial Sequence
  Synthetic oligonucleotide
tgggtaacgtggtgctccgaatcgcacgct

SEQ ID NO: 241748 - DNA, 30 bp, Artificial Sequence
  Synthetic oligonucleotide
gaagggaaggctcggatgaataatcacgct

SEQ ID NO: 241749 - DNA, 30 bp, Artificial Sequence
  Synthetic oligonucleotide
cgctcctgtgggttagtgattatagacgct

SEQ ID NO: 241750 - DNA, 30 bp, Artificial Sequence
  Synthetic oligonucleotide
cagagaagtacaaaccgcgcgcgggacgct

SEQ ID NO: 241751 - DNA, 30 bp, Artificial Sequence
  Synthetic oligonucleotide
cacagggtttcgtggataggtctctacgct

SEQ ID NO: 241752 - DNA, 30 bp, Artificial Sequence
  Synthetic oligonucleotide
acgtgctcactagagctacaggtctacgct

SEQ ID NO: 241753 - DNA, 30 bp, Artificial Sequence
  Synthetic oligonucleotide
tgatgagccgtaccaatatgtagttacgct

SEQ ID NO: 241754 - DNA, 30 bp, Artificial Sequence
  Synthetic oligonucleotide
gcctaacttcgactgttgccaggttacgct

SEQ ID NO: 241755 - DNA, 30 bp, Artificial Sequence
  Synthetic oligonucleotide
aattgctttatcgagaggatattcaccgct

SEQ ID NO: 241756 - DNA, 30 bp, Artificial Sequence
  Synthetic oligonucleotide
aacagagattactttcgatcgagtaccgct

SEQ ID NO: 241757 - DNA, 30 bp, Artificial Sequence
  Synthetic oligonucleotide
actttctcgcgagcgggggctagtaccgct

SEQ ID NO: 241758 - DNA, 30 bp, Artificial Sequence
  Synthetic oligonucleotide
agaggcatcttattggaatttagccccgct

SEQ ID NO: 241759 - DNA, 30 bp, Artificial Sequence
  Synthetic oligonucleotide
cgtccaacctcatgaagactaaagcccgct

SEQ ID NO: 241760 - DNA, 30 bp, Artificial Sequence
  Synthetic oligonucleotide
gatgtgtaactagtagttcctgtgcccgct

SEQ ID NO: 241761 - DNA, 30 bp, Artificial Sequence
  Synthetic oligonucleotide
aaagaaccacttccagtatagtaatccgct

SEQ ID NO: 241762 - DNA, 30 bp, Artificial Sequence
  Synthetic oligonucleotide
agtcgcaatgtctattgcagtttatccgct

SEQ ID NO: 241763 - DNA, 30 bp, Artificial Sequence
  Synthetic oligonucleotide
cgaacaagcagtttacgtattaactccgct

SEQ ID NO: 241764 - DNA, 30 bp, Artificial Sequence
  Synthetic oligonucleotide
actatattaacgatcttgcgggactccgct

SEQ ID NO: 241765 - DNA, 30 bp, Artificial Sequence
  Synthetic oligonucleotide
ggtttaaaatataaagtccatcggtccgct

SEQ ID NO: 241766 - DNA, 30 bp, Artificial Sequence
  Synthetic oligonucleotide
tatgagaacggcagatttcaatcttccgct

SEQ ID NO: 241767 - DNA, 30 bp, Artificial Sequence
  Synthetic oligonucleotide
ctgtgacacggagcgggtctaagaagcgct

SEQ ID NO: 241768 - DNA, 30 bp, Artificial Sequence
  Synthetic oligonucleotide
atgtggtcgctaacggggctaataagcgct

SEQ ID NO: 241769 - DNA, 30 bp, Artificial Sequence
  Synthetic oligonucleotide
atgcagggtgaaccgttcgaggtaagcgct

SEQ ID NO: 241770 - DNA, 30 bp, Artificial Sequence
  Synthetic oligonucleotide
ccgcaggcggaacgtattaggaacagcgct

SEQ ID NO: 241771 - DNA, 30 bp, Artificial Sequence
  Synthetic oligonucleotide
ggaccgagttccacatgtaagctcagcgct

SEQ ID NO: 241772 - DNA, 30 bp, Artificial Sequence
  Synthetic oligonucleotide
tgccacaaaggcaatacgatccgtagcgct

SEQ ID NO: 241773 - DNA, 30 bp, Artificial Sequence
  Synthetic oligonucleotide
tgcgacaccggatgaagtacgcaacgcgct

SEQ ID NO: 241774 - DNA, 30 bp, Artificial Sequence
  Synthetic oligonucleotide
gaaagtgacatcacaatcccctcacgcgct

SEQ ID NO: 241775 - DNA, 30 bp, Artificial Sequence
  Synthetic oligonucleotide
ggggtaacctcccaggtacctccgcgcgct

SEQ ID NO: 241776 - DNA, 30 bp, Artificial Sequence
  Synthetic oligonucleotide
gtagcaatgggaaactagtctaggcgcgct

SEQ ID NO: 241777 - DNA, 31 bp, Artificial Sequence
  Synthetic oligonucleotide
cttatttggagccggaactccatgaggcgct

SEQ ID NO: 241778 - DNA, 30 bp, Artificial Sequence
  Synthetic oligonucleotide
cgtatttaacggaacactaccgccggcgct

SEQ ID NO: 241779 - DNA, 30 bp, Artificial Sequence
  Synthetic oligonucleotide
cttctaggggcgtagttcagttgcggcgct

SEQ ID NO: 241780 - DNA, 30 bp, Artificial Sequence
  Synthetic oligonucleotide
gaaagtatgtatcatgtcaggacatgcgct

SEQ ID NO: 241781 - DNA, 30 bp, Artificial Sequence
  Synthetic oligonucleotide
cagcacagaggtaaggggggcttctgcgct

SEQ ID NO: 241782 - DNA, 30 bp, Artificial Sequence
  Synthetic oligonucleotide
agcaatgcaatcagacctccgatcatcgct

SEQ ID NO: 241783 - DNA, 30 bp, Artificial Sequence
  Synthetic oligonucleotide
tgtcttctatgcataaataaagctatcgct

SEQ ID NO: 241784 - DNA, 30 bp, Artificial Sequence
  Synthetic oligonucleotide
atagccccgatgtgggaaatgggactcgct

SEQ ID NO: 241785 - DNA, 30 bp, Artificial Sequence
  Synthetic oligonucleotide
catgaagaatcactcaagcaactggtcgct

SEQ ID NO: 241786 - DNA, 30 bp, Artificial Sequence
  Synthetic oligonucleotide
gtaaggtttgtctaagaacgtcctgtcgct

SEQ ID NO: 241787 - DNA, 30 bp, Artificial Sequence
  Synthetic oligonucleotide
cgatagtggattgtccccaacctgttcgct

SEQ ID NO: 241788 - DNA, 30 bp, Artificial Sequence
  Synthetic oligonucleotide
tcattgatcatgacaccttatgaaaaggct

SEQ ID NO: 241789 - DNA, 30 bp, Artificial Sequence
  Synthetic oligonucleotide
aatgatgtagccggcgtcattgacaaggct

SEQ ID NO: 241790 - DNA, 30 bp, Artificial Sequence
  Synthetic oligonucleotide
gaatatagagcgtgttcggccctgaaggct

SEQ ID NO: 241791 - DNA, 30 bp, Artificial Sequence
  Synthetic oligonucleotide
tgaatccgcgtcaagtgatcaggacaggct

SEQ ID NO: 241792 - DNA, 30 bp, Artificial Sequence
  Synthetic oligonucleotide
gtgcgtacatataacgttataagtcaggct

SEQ ID NO: 241793 - DNA, 30 bp, Artificial Sequence
  Synthetic oligonucleotide
cgagagctaattaaaaagcctggagaggct

SEQ ID NO: 241794 - DNA, 30 bp, Artificial Sequence
  Synthetic oligonucleotide
taaaccaacccgctagcacacttagaggct

SEQ ID NO: 241795 - DNA, 30 bp, Artificial Sequence
  Synthetic oligonucleotide
ggacctccagggttgagggacgatgaggct

SEQ ID NO: 241796 - DNA, 30 bp, Artificial Sequence
  Synthetic oligonucleotide
tgaaatatggacatcgttgtgtgtgaggct

SEQ ID NO: 241797 - DNA, 28 bp, Artificial Sequence
  Synthetic oligonucleotide
agtttacccaatgtttccgaaataggct

SEQ ID NO: 241798 - DNA, 30 bp, Artificial Sequence
  Synthetic oligonucleotide
ttgagctgaggcgacacgggttgaacggct

SEQ ID NO: 241799 - DNA, 30 bp, Artificial Sequence
  Synthetic oligonucleotide
gtaccgggtaccactccttagtacacggct

SEQ ID NO: 241800 - DNA, 30 bp, Artificial Sequence
  Synthetic oligonucleotide
cgttgcgtaagagcatgcatggtgacggct

SEQ ID NO: 241801 - DNA, 30 bp, Artificial Sequence
  Synthetic oligonucleotide
tcccccccacccaagagacatttcccggct

SEQ ID NO: 241802 - DNA, 30 bp, Artificial Sequence
  Synthetic oligonucleotide
agacaatgggggataactttggagccggct

SEQ ID NO: 241803 - DNA, 30 bp, Artificial Sequence
  Synthetic oligonucleotide
ggctataacgggggcatacttacgccggct

SEQ ID NO: 241804 - DNA, 30 bp, Artificial Sequence
  Synthetic oligonucleotide
aacggagcgggcaaactcgctccgccggct

SEQ ID NO: 241805 - DNA, 30 bp, Artificial Sequence
  Synthetic oligonucleotide
cggtaatccttaaggataggaccagcggct

SEQ ID NO: 241806 - DNA, 30 bp, Artificial Sequence
  Synthetic oligonucleotide
atttaggacccggctatttcttgggcggct

SEQ ID NO: 241807 - DNA, 30 bp, Artificial Sequence
  Synthetic oligonucleotide
agcacccccatgcgggagactgaatcggct

SEQ ID NO: 241808 - DNA, 30 bp, Artificial Sequence
  Synthetic oligonucleotide
ttgtggttcaccctcacatgcggctcggct

SEQ ID NO: 241809 - DNA, 30 bp, Artificial Sequence
  Synthetic oligonucleotide
gcttatcatcacgaacgaggtgagtcggct

SEQ ID NO: 241810 - DNA, 30 bp, Artificial Sequence
  Synthetic oligonucleotide
ctgagatacgggcgtgaaaagttgtcggct

SEQ ID NO: 241811 - DNA, 30 bp, Artificial Sequence
  Synthetic oligonucleotide
agtcctcggttggaacaattattacgggct

SEQ ID NO: 241812 - DNA, 30 bp, Artificial Sequence
  Synthetic oligonucleotide
ggaccttggaaacaagagagactccgggct

SEQ ID NO: 241813 - DNA, 30 bp, Artificial Sequence
  Synthetic oligonucleotide
cggtaagactcgctgggcacagagcgggct

SEQ ID NO: 241814 - DNA, 30 bp, Artificial Sequence
  Synthetic oligonucleotide
cctttcatagtcgctcggaaaacgcgggct

SEQ ID NO: 241815 - DNA, 30 bp, Artificial Sequence
  Synthetic oligonucleotide
ccacaaaaatgtaaccgtgtccaaggggct

SEQ ID NO: 241816 - DNA, 30 bp, Artificial Sequence
  Synthetic oligonucleotide
gcccgtgagcagtcggcaggtgacggggct

SEQ ID NO: 241817 - DNA, 30 bp, Artificial Sequence
  Synthetic oligonucleotide
tcagggcttatgtgttctttttacggggct

SEQ ID NO: 241818 - DNA, 30 bp, Artificial Sequence
  Synthetic oligonucleotide
cgttggactgtcataagggattagggggct

SEQ ID NO: 241819 - DNA, 30 bp, Artificial Sequence
  Synthetic oligonucleotide
ccatttagggagcgttacgcttagggggct

SEQ ID NO: 241820 - DNA, 30 bp, Artificial Sequence
  Synthetic oligonucleotide
gtagacaagggctccccgccgctgggggct

SEQ ID NO: 241821 - DNA, 30 bp, Artificial Sequence
  Synthetic oligonucleotide
atttcgtctgcattcttaaacaatggggct

SEQ ID NO: 241822 - DNA, 30 bp, Artificial Sequence
  Synthetic oligonucleotide
ttaagcggtaaatattttctcgttggggct

SEQ ID NO: 241823 - DNA, 30 bp, Artificial Sequence
  Synthetic oligonucleotide
aatatgcttagtaagggtgagctatgggct

SEQ ID NO: 241824 - DNA, 30 bp, Artificial Sequence
  Synthetic oligonucleotide
tggttcggtccactactcggttaaatggct

SEQ ID NO: 241825 - DNA, 30 bp, Artificial Sequence
  Synthetic oligonucleotide
ctagatagcatgaggtccgctctaatggct

SEQ ID NO: 241826 - DNA, 30 bp, Artificial Sequence
  Synthetic oligonucleotide
ataccgcgggtcctctgtcaggtgatggct

SEQ ID NO: 241827 - DNA, 30 bp, Artificial Sequence
  Synthetic oligonucleotide
aagatcccgggaccacatgtggaactggct

SEQ ID NO: 241828 - DNA, 30 bp, Artificial Sequence
  Synthetic oligonucleotide
catagaccgtattttaagtttcggctggct

SEQ ID NO: 241829 - DNA, 30 bp, Artificial Sequence
  Synthetic oligonucleotide
tgggcgctcttggtgatggctatgctggct

SEQ ID NO: 241830 - DNA, 30 bp, Artificial Sequence
  Synthetic oligonucleotide
gggaagggacgagcgcctgatggagtggct

SEQ ID NO: 241831 - DNA, 30 bp, Artificial Sequence
  Synthetic oligonucleotide
catgtgtgtcgctgccaaattctcgtggct

SEQ ID NO: 241832 - DNA, 30 bp, Artificial Sequence
  Synthetic oligonucleotide
ttctaaaatagtggcttaccagtcgtggct

SEQ ID NO: 241833 - DNA, 30 bp, Artificial Sequence
  Synthetic oligonucleotide
agacggacccaaggttccatgcaggtggct

SEQ ID NO: 241834 - DNA, 30 bp, Artificial Sequence
  Synthetic oligonucleotide
aagtttgcacaatggatagtgcgggtggct

SEQ ID NO: 241835 - DNA, 30 bp, Artificial Sequence
  Synthetic oligonucleotide
tacaaaatggattcactttagcgtgtggct

SEQ ID NO: 241836 - DNA, 30 bp, Artificial Sequence
  Synthetic oligonucleotide
tttctgtcaagattaaagaattcattggct

SEQ ID NO: 241837 - DNA, 30 bp, Artificial Sequence
  Synthetic oligonucleotide
cgtatccctgtgaccgctaccttattggct

SEQ ID NO: 241838 - DNA, 30 bp, Artificial Sequence
  Synthetic oligonucleotide
tcgtactttcgactaccaatcttattggct

SEQ ID NO: 241839 - DNA, 30 bp, Artificial Sequence
  Synthetic oligonucleotide
atactggtgttatgatgatgatctttggct

SEQ ID NO: 241840 - DNA, 30 bp, Artificial Sequence
  Synthetic oligonucleotide
gtgtctatgttttaatgagacggaaatgct

SEQ ID NO: 241841 - DNA, 30 bp, Artificial Sequence
  Synthetic oligonucleotide
gggactagtgcatccgctagatagaatgct

SEQ ID NO: 241842 - DNA, 30 bp, Artificial Sequence
  Synthetic oligonucleotide
agactctaatcccgctccaccatgaatgct

SEQ ID NO: 241843 - DNA, 30 bp, Artificial Sequence
  Synthetic oligonucleotide
acatgagctctcgtctatttgccacatgct

SEQ ID NO: 241844 - DNA, 30 bp, Artificial Sequence
  Synthetic oligonucleotide
aagggactcgacgcaacctagccccatgct

SEQ ID NO: 241845 - DNA, 30 bp, Artificial Sequence
  Synthetic oligonucleotide
atggattatcatcatcgcaggaaagatgct

SEQ ID NO: 241846 - DNA, 30 bp, Artificial Sequence
  Synthetic oligonucleotide
atgctactaaggtaaacttaataagatgct

SEQ ID NO: 241847 - DNA, 30 bp, Artificial Sequence
  Synthetic oligonucleotide
cacgcgagggaaacaaggataccagatgct

SEQ ID NO: 241848 - DNA, 30 bp, Artificial Sequence
  Synthetic oligonucleotide
ttctcagcagtgcgaagtggagcagatgct

SEQ ID NO: 241849 - DNA, 30 bp, Artificial Sequence
  Synthetic oligonucleotide
cagggaaaggctgactgaggcggagatgct

SEQ ID NO: 241850 - DNA, 30 bp, Artificial Sequence
  Synthetic oligonucleotide
ccggacgtggaaaaggtgtgcctcgatgct

SEQ ID NO: 241851 - DNA, 30 bp, Artificial Sequence
  Synthetic oligonucleotide
cattacaggaatacatgggtcgaggatgct

SEQ ID NO: 241852 - DNA, 30 bp, Artificial Sequence
  Synthetic oligonucleotide
tcgcctcagtattattgtggataatatgct

SEQ ID NO: 241853 - DNA, 30 bp, Artificial Sequence
  Synthetic oligonucleotide
aggagtttcaacagcatcacaccatatgct

SEQ ID NO: 241854 - DNA, 30 bp, Artificial Sequence
  Synthetic oligonucleotide
atcaagtaggaagggcatcactcatatgct

SEQ ID NO: 241855 - DNA, 30 bp, Artificial Sequence
  Synthetic oligonucleotide
ggattgggcattatacgttgcggatatgct

SEQ ID NO: 241856 - DNA, 30 bp, Artificial Sequence
  Synthetic oligonucleotide
attcgaggatgaagcaggcctcactatgct

SEQ ID NO: 241857 - DNA, 30 bp, Artificial Sequence
  Synthetic oligonucleotide
ccgaaggcgcaacaatccaagcagtatgct

SEQ ID NO: 241858 - DNA, 30 bp, Artificial Sequence
  Synthetic oligonucleotide
ttagttggtacatggttgcattcgtatgct

SEQ ID NO: 241859 - DNA, 30 bp, Artificial Sequence
  Synthetic oligonucleotide
tatccgtgtccgggatatccggggtatgct

SEQ ID NO: 241860 - DNA, 30 bp, Artificial Sequence
  Synthetic oligonucleotide
aaactagaccctgtcacggcaatgtatgct

SEQ ID NO: 241861 - DNA, 30 bp, Artificial Sequence
  Synthetic oligonucleotide
ccagaggagcactgactctgtctttatgct

SEQ ID NO: 241862 - DNA, 30 bp, Artificial Sequence
  Synthetic oligonucleotide
ggtagctgaagcataaacgagttcactgct

SEQ ID NO: 241863 - DNA, 30 bp, Artificial Sequence
  Synthetic oligonucleotide
tcagtatggggtgatatcccattgactgct

SEQ ID NO: 241864 - DNA, 30 bp, Artificial Sequence
  Synthetic oligonucleotide
attggagaatgcattaaactgtctcctgct

SEQ ID NO: 241865 - DNA, 30 bp, Artificial Sequence
  Synthetic oligonucleotide
gtcccctcagtataagtccatgttcctgct

SEQ ID NO: 241866 - DNA, 30 bp, Artificial Sequence
  Synthetic oligonucleotide
ctcccgtacgcgtagaacgagtgagctgct

SEQ ID NO: 241867 - DNA, 30 bp, Artificial Sequence
  Synthetic oligonucleotide
caacacgggcatcgtgtgttatatgctgct

SEQ ID NO: 241868 - DNA, 30 bp, Artificial Sequence
  Synthetic oligonucleotide
tggttatcccagatacagggtattgctgct

SEQ ID NO: 241869 - DNA, 30 bp, Artificial Sequence
  Synthetic oligonucleotide
acttaccttaaaatgaagcgtgtatctgct

SEQ ID NO: 241870 - DNA, 30 bp, Artificial Sequence
  Synthetic oligonucleotide
ccctcaagaacccatcggaggcaaagtgct

SEQ ID NO: 241871 - DNA, 30 bp, Artificial Sequence
  Synthetic oligonucleotide
aaccatcaagggaggacagatacgagtgct

SEQ ID NO: 241872 - DNA, 30 bp, Artificial Sequence
  Synthetic oligonucleotide
cgtctctggaaggatagaggatcgagtgct

SEQ ID NO: 241873 - DNA, 30 bp, Artificial Sequence
  Synthetic oligonucleotide
gtaggcactgataatggcgtcatgagtgct

SEQ ID NO: 241874 - DNA, 30 bp, Artificial Sequence
  Synthetic oligonucleotide
ggctttaggaccgtggatacgattagtgct

SEQ ID NO: 241875 - DNA, 30 bp, Artificial Sequence
  Synthetic oligonucleotide
agaaggtacgttggtcccttgattagtgct

SEQ ID NO: 241876 - DNA, 30 bp, Artificial Sequence
  Synthetic oligonucleotide
gcgagaacgcgtcaatagctattacgtgct

SEQ ID NO: 241877 - DNA, 30 bp, Artificial Sequence
  Synthetic oligonucleotide
cacagaccccagcgatcattataccgtgct

SEQ ID NO: 241878 - DNA, 30 bp, Artificial Sequence
  Synthetic oligonucleotide
gccgacgcgtcgaccgcacctcagcgtgct

SEQ ID NO: 241879 - DNA, 30 bp, Artificial Sequence
  Synthetic oligonucleotide
tgggcacgtgtcagagcctcatgaggtgct

SEQ ID NO: 241880 - DNA, 30 bp, Artificial Sequence
  Synthetic oligonucleotide
gactatgcaacgacattgttaacgggtgct

SEQ ID NO: 241881 - DNA, 30 bp, Artificial Sequence
  Synthetic oligonucleotide
ggcaacacgttctctcgcacaagtggtgct

SEQ ID NO: 241882 - DNA, 30 bp, Artificial Sequence
  Synthetic oligonucleotide
tactgaagtaagactgactttacatgtgct

SEQ ID NO: 241883 - DNA, 31 bp, Artificial Sequence
  Synthetic oligonucleotide
aaaatggcgctcagacaccgagctgtgtgct

SEQ ID NO: 241884 - DNA, 30 bp, Artificial Sequence
  Synthetic oligonucleotide
attagaacaaccatcaactaaaattgtgct

SEQ ID NO: 241885 - DNA, 30 bp, Artificial Sequence
  Synthetic oligonucleotide
atcatgtgagccgtccagttaatttgtgct

SEQ ID NO: 241886 - DNA, 30 bp, Artificial Sequence
  Synthetic oligonucleotide
cgtccttattagtggtgctaggaaattgct

SEQ ID NO: 241887 - DNA, 30 bp, Artificial Sequence
  Synthetic oligonucleotide
gcgtaacgtgaattcgacacagttattgct

SEQ ID NO: 241888 - DNA, 30 bp, Artificial Sequence
  Synthetic oligonucleotide
atgaggaaatggctgggacaccgtcttgct

SEQ ID NO: 241889 - DNA, 30 bp, Artificial Sequence
  Synthetic oligonucleotide
ggacaaaggtttttgtcagctattcttgct

SEQ ID NO: 241890 - DNA, 30 bp, Artificial Sequence
  Synthetic oligonucleotide
gtgctccagacgctctttcggagagttgct

SEQ ID NO: 241891 - DNA, 30 bp, Artificial Sequence
  Synthetic oligonucleotide
catcctccgaacgggtgtgtttccgttgct

SEQ ID NO: 241892 - DNA, 30 bp, Artificial Sequence
  Synthetic oligonucleotide
aacgtctaggccgctcatacagtcgttgct

SEQ ID NO: 241893 - DNA, 30 bp, Artificial Sequence
  Synthetic oligonucleotide
atgtgacaaacgttaccgcaggaggttgct

SEQ ID NO: 241894 - DNA, 30 bp, Artificial Sequence
  Synthetic oligonucleotide
ttactgtggtaagagcgcatggaggttgct

SEQ ID NO: 241895 - DNA, 30 bp, Artificial Sequence
  Synthetic oligonucleotide
cacagctcattcccgggaacttaatttgct

SEQ ID NO: 241896 - DNA, 30 bp, Artificial Sequence
  Synthetic oligonucleotide
gggtgggagcagaaggttcggagatttgct

SEQ ID NO: 241897 - DNA, 30 bp, Artificial Sequence
  Synthetic oligonucleotide
tgctatcgaagcagcggtgattgatttgct

SEQ ID NO: 241898 - DNA, 30 bp, Artificial Sequence
  Synthetic oligonucleotide
gaagaaatacacacccgtaaggcctttgct

SEQ ID NO: 241899 - DNA, 30 bp, Artificial Sequence
  Synthetic oligonucleotide
aatcgttatcgaagtggactcctgtttgct

SEQ ID NO: 241900 - DNA, 30 bp, Artificial Sequence
  Synthetic oligonucleotide
ccaacaaaaggaggcggggatgattttgct

SEQ ID NO: 241901 - DNA, 30 bp, Artificial Sequence
  Synthetic oligonucleotide
tacagcatcgcgaaaaattgaacttttgct

SEQ ID NO: 241902 - DNA, 30 bp, Artificial Sequence
  Synthetic oligonucleotide
catagctctgtggaccatagcgggcaatct

SEQ ID NO: 241903 - DNA, 30 bp, Artificial Sequence
  Synthetic oligonucleotide
gcacggacgacttccaccttcttgcaatct

SEQ ID NO: 241904 - DNA, 30 bp, Artificial Sequence
  Synthetic oligonucleotide
aagcgaggctgtgaaatctatgtagaatct

SEQ ID NO: 241905 - DNA, 30 bp, Artificial Sequence
  Synthetic oligonucleotide
atgttagtcttggaataataaatggaatct

SEQ ID NO: 241906 - DNA, 30 bp, Artificial Sequence
  Synthetic oligonucleotide
tccagtgctacagaattcttgcatgaatct

SEQ ID NO: 241907 - DNA, 30 bp, Artificial Sequence
  Synthetic oligonucleotide
gcataaccttggggagagtgggcataatct

SEQ ID NO: 241908 - DNA, 30 bp, Artificial Sequence
  Synthetic oligonucleotide
acttgatattcaaggatatcaagctaatct

SEQ ID NO: 241909 - DNA, 30 bp, Artificial Sequence
  Synthetic oligonucleotide
gggtaacccagatctcgggttcgctaatct

SEQ ID NO: 241910 - DNA, 30 bp, Artificial Sequence
  Synthetic oligonucleotide
tacgacgatcaggagaagaagggctaatct

SEQ ID NO: 241911 - DNA, 29 bp, Artificial Sequence
  Synthetic oligonucleotide
ccgtattgggtcctcgattggggtaatct

SEQ ID NO: 241912 - DNA, 30 bp, Artificial Sequence
  Synthetic oligonucleotide
cctgagaaggaagagacttcctcttaatct

SEQ ID NO: 241913 - DNA, 30 bp, Artificial Sequence
  Synthetic oligonucleotide
ggctctcacgtatacaaataattttaatct

SEQ ID NO: 241914 - DNA, 30 bp, Artificial Sequence
  Synthetic oligonucleotide
actgagcaacggaccgtggtgcaaacatct

SEQ ID NO: 241915 - DNA, 30 bp, Artificial Sequence
  Synthetic oligonucleotide
ttagtagtttcaaattgggtacgaacatct

SEQ ID NO: 241916 - DNA, 30 bp, Artificial Sequence
  Synthetic oligonucleotide
agctcgggtcaatacctgattgagacatct

SEQ ID NO: 241917 - DNA, 30 bp, Artificial Sequence
  Synthetic oligonucleotide
tcgggatcgcctataacgactcatacatct

SEQ ID NO: 241918 - DNA, 30 bp, Artificial Sequence
  Synthetic oligonucleotide
cgtaaatgttgaatctctcatcttacatct

SEQ ID NO: 241919 - DNA, 30 bp, Artificial Sequence
  Synthetic oligonucleotide
gagacgtcgtatgtcaccagaatcccatct

SEQ ID NO: 241920 - DNA, 30 bp, Artificial Sequence
  Synthetic oligonucleotide
atcgctatggtgagtaaaactctcccatct

SEQ ID NO: 241921 - DNA, 30 bp, Artificial Sequence
  Synthetic oligonucleotide
tccagcgactgaaggttttcccatccatct

SEQ ID NO: 241922 - DNA, 30 bp, Artificial Sequence
  Synthetic oligonucleotide
cgcccttaaccctactctgactttccatct

SEQ ID NO: 241923 - DNA, 30 bp, Artificial Sequence
  Synthetic oligonucleotide
ggtgtgtcaaggtccagccccgcagcatct

SEQ ID NO: 241924 - DNA, 30 bp, Artificial Sequence
  Synthetic oligonucleotide
aggacaacccaatgctgcacgaacgcatct

SEQ ID NO: 241925 - DNA, 30 bp, Artificial Sequence
  Synthetic oligonucleotide
ctagcgacattcaggtcaataagcgcatct

SEQ ID NO: 241926 - DNA, 30 bp, Artificial Sequence
  Synthetic oligonucleotide
gagcatcaggtagcaagcttacaggcatct

SEQ ID NO: 241927 - DNA, 30 bp, Artificial Sequence
  Synthetic oligonucleotide
tgcaaggaaacagtggcttgctcggcatct

SEQ ID NO: 241928 - DNA, 30 bp, Artificial Sequence
  Synthetic oligonucleotide
gtaaccgaaatccagaggcaaagatcatct

SEQ ID NO: 241929 - DNA, 30 bp, Artificial Sequence
  Synthetic oligonucleotide
ccatctttctcgtcgccgagtgagtcatct

SEQ ID NO: 241930 - DNA, 30 bp, Artificial Sequence
  Synthetic oligonucleotide
ggctatccattttcgaataagcggtcatct

SEQ ID NO: 241931 - DNA, 30 bp, Artificial Sequence
  Synthetic oligonucleotide
aggtgtctaataacggtaattcaaagatct

SEQ ID NO: 241932 - DNA, 30 bp, Artificial Sequence
  Synthetic oligonucleotide
gcgccacagcctgggggactgccaagatct

SEQ ID NO: 241933 - DNA, 30 bp, Artificial Sequence
  Synthetic oligonucleotide
agggttaacatagcctagctatacagatct

SEQ ID NO: 241934 - DNA, 30 bp, Artificial Sequence
  Synthetic oligonucleotide
gtgcacgctctaggcagtacgttcagatct

SEQ ID NO: 241935 - DNA, 30 bp, Artificial Sequence
  Synthetic oligonucleotide
aagaaacgtgctggttgcagtttgagatct

SEQ ID NO: 241936 - DNA, 30 bp, Artificial Sequence
  Synthetic oligonucleotide
ctgggtgaggggcagccgtatcatagatct

SEQ ID NO: 241937 - DNA, 30 bp, Artificial Sequence
  Synthetic oligonucleotide
cacggaatacaacaccggcctatgcgatct

SEQ ID NO: 241938 - DNA, 30 bp, Artificial Sequence
  Synthetic oligonucleotide
attcggactggatcatcgcctcatcgatct

SEQ ID NO: 241939 - DNA, 30 bp, Artificial Sequence
  Synthetic oligonucleotide
catctacgacgcctgggccttcgtcgatct

SEQ ID NO: 241940 - DNA, 30 bp, Artificial Sequence
  Synthetic oligonucleotide
cggatgttcggacttcaaaatccaggatct

SEQ ID NO: 241941 - DNA, 30 bp, Artificial Sequence
  Synthetic oligonucleotide
ttcaggctttggaagaacgtgaacggatct

SEQ ID NO: 241942 - DNA, 30 bp, Artificial Sequence
  Synthetic oligonucleotide
tgagcgggaacctgctggcgggacggatct

SEQ ID NO: 241943 - DNA, 30 bp, Artificial Sequence
  Synthetic oligonucleotide
ctgactctcggcgtaatgacggcatgatct

SEQ ID NO: 241944 - DNA, 30 bp, Artificial Sequence
  Synthetic oligonucleotide
tgcagtacatcagtgtgggtgtcttgatct

SEQ ID NO: 241945 - DNA, 30 bp, Artificial Sequence
  Synthetic oligonucleotide
accgcacacatttttgagcctatttgatct

SEQ ID NO: 241946 - DNA, 30 bp, Artificial Sequence
  Synthetic oligonucleotide
ccacgtttgtcgtacccgaaagaaatatct

SEQ ID NO: 241947 - DNA, 30 bp, Artificial Sequence
  Synthetic oligonucleotide
ctcttgctacagggccatatcgctatatct

SEQ ID NO: 241948 - DNA, 30 bp, Artificial Sequence
  Synthetic oligonucleotide
cgacaaggatacatagacggaagcctatct

SEQ ID NO: 241949 - DNA, 30 bp, Artificial Sequence
  Synthetic oligonucleotide
agctatcgttagccagagcgttgcctatct

SEQ ID NO: 241950 - DNA, 30 bp, Artificial Sequence
  Synthetic oligonucleotide
tgttctggtatagcagacgtggagctatct

SEQ ID NO: 241951 - DNA, 30 bp, Artificial Sequence
  Synthetic oligonucleotide
gcagaagagagttctgctactgggctatct

SEQ ID NO: 241952 - DNA, 30 bp, Artificial Sequence
  Synthetic oligonucleotide
atcgatgtaatataagcttagtgtctatct

SEQ ID NO: 241953 - DNA, 30 bp, Artificial Sequence
  Synthetic oligonucleotide
ccttgcacgtaccttgactcgtaagtatct

SEQ ID NO: 241954 - DNA, 30 bp, Artificial Sequence
  Synthetic oligonucleotide
ttcagaacagaatattagagactagtatct

SEQ ID NO: 241955 - DNA, 30 bp, Artificial Sequence
  Synthetic oligonucleotide
cttcgcgcgtgcgccaggccagacgtatct

SEQ ID NO: 241956 - DNA, 30 bp, Artificial Sequence
  Synthetic oligonucleotide
actcgaacgactactctgctcccggtatct

SEQ ID NO: 241957 - DNA, 30 bp, Artificial Sequence
  Synthetic oligonucleotide
ttctgtaatgggcgaacatcgtgtgtatct

SEQ ID NO: 241958 - DNA, 30 bp, Artificial Sequence
  Synthetic oligonucleotide
atgcggagactgcatttatctaacttatct

SEQ ID NO: 241959 - DNA, 30 bp, Artificial Sequence
  Synthetic oligonucleotide
catgtacttagatatcccaagtacttatct

SEQ ID NO: 241960 - DNA, 30 bp, Artificial Sequence
  Synthetic oligonucleotide
tggtctgtggtccctatttgctccttatct

SEQ ID NO: 241961 - DNA, 30 bp, Artificial Sequence
  Synthetic oligonucleotide
tagctaatacctaagagtagcacgttatct

SEQ ID NO: 241962 - DNA, 30 bp, Artificial Sequence
  Synthetic oligonucleotide
tgctccgcgcttggtcctaatcggttatct

SEQ ID NO: 241963 - DNA, 30 bp, Artificial Sequence
  Synthetic oligonucleotide
taaacggactcactggatactgggttatct

SEQ ID NO: 241964 - DNA, 30 bp, Artificial Sequence
  Synthetic oligonucleotide
cgtgggagattggatagggtcgcaaactct

SEQ ID NO: 241965 - DNA, 30 bp, Artificial Sequence
  Synthetic oligonucleotide
caatctgcgggcgaagaccggagcaactct

SEQ ID NO: 241966 - DNA, 30 bp, Artificial Sequence
  Synthetic oligonucleotide
catggacgccaggtccatggtgagaactct

SEQ ID NO: 241967 - DNA, 30 bp, Artificial Sequence
  Synthetic oligonucleotide
tatggattactaaaaaaatcaatgaactct

SEQ ID NO: 241968 - DNA, 30 bp, Artificial Sequence
  Synthetic oligonucleotide
ctatcgcgcctcaataacgtcgcacactct

SEQ ID NO: 241969 - DNA, 30 bp, Artificial Sequence
  Synthetic oligonucleotide
atcgctactgaaagggtactttggcactct

SEQ ID NO: 241970 - DNA, 30 bp, Artificial Sequence
  Synthetic oligonucleotide
ttaaggagcaggacgctgtcagttcactct

SEQ ID NO: 241971 - DNA, 30 bp, Artificial Sequence
  Synthetic oligonucleotide
cgatgtcgcccagccagtcataaggactct

SEQ ID NO: 241972 - DNA, 30 bp, Artificial Sequence
  Synthetic oligonucleotide
caaccgccgtgtcctcgaaaactggactct

SEQ ID NO: 241973 - DNA, 30 bp, Artificial Sequence
  Synthetic oligonucleotide
tcccttgtaaaaattcttgcctaatactct

SEQ ID NO: 241974 - DNA, 30 bp, Artificial Sequence
  Synthetic oligonucleotide
acggcgacgcttgcccatttcgtctactct

SEQ ID NO: 241975 - DNA, 30 bp, Artificial Sequence
  Synthetic oligonucleotide
ggcatagcttggacatgtactctttactct

SEQ ID NO: 241976 - DNA, 30 bp, Artificial Sequence
  Synthetic oligonucleotide
gcacgccagatctgatccgcactaacctct

SEQ ID NO: 241977 - DNA, 30 bp, Artificial Sequence
  Synthetic oligonucleotide
acatcgagagtttctctagggatgacctct

SEQ ID NO: 241978 - DNA, 30 bp, Artificial Sequence
  Synthetic oligonucleotide
taaagtcgtacagtactgggggtgacctct

SEQ ID NO: 241979 - DNA, 30 bp, Artificial Sequence
  Synthetic oligonucleotide
gcgaattgaactctcacacagcatacctct

SEQ ID NO: 241980 - DNA, 30 bp, Artificial Sequence
  Synthetic oligonucleotide
gacgaccaggaggcacacatacgatcctct

SEQ ID NO: 241981 - DNA, 30 bp, Artificial Sequence
  Synthetic oligonucleotide
tgtgccgctaataaccaggtcgactcctct

SEQ ID NO: 241982 - DNA, 30 bp, Artificial Sequence
  Synthetic oligonucleotide
tcgcccagaaactagcgcatgaacagctct

SEQ ID NO: 241983 - DNA, 30 bp, Artificial Sequence
  Synthetic oligonucleotide
aaggatattatgggctaacgtttgagctct

SEQ ID NO: 241984 - DNA, 30 bp, Artificial Sequence
  Synthetic oligonucleotide
agttaagagaagaccttggcggttagctct

SEQ ID NO: 241985 - DNA, 30 bp, Artificial Sequence
  Synthetic oligonucleotide
cgcatagtccatattcgttgccaacgctct

SEQ ID NO: 241986 - DNA, 30 bp, Artificial Sequence
  Synthetic oligonucleotide
gtgcacatatccaagtttagcgtacgctct

SEQ ID NO: 241987 - DNA, 30 bp, Artificial Sequence
  Synthetic oligonucleotide
ggaagagccatttacgttgacttaggctct

SEQ ID NO: 241988 - DNA, 30 bp, Artificial Sequence
  Synthetic oligonucleotide
caaacctcaacgtgatgcccactctgctct

SEQ ID NO: 241989 - DNA, 30 bp, Artificial Sequence
  Synthetic oligonucleotide
cccggcaggcacggggcgttgaaaatctct

SEQ ID NO: 241990 - DNA, 30 bp, Artificial Sequence
  Synthetic oligonucleotide
gcgagagcatactcgtttcgccaaatctct

SEQ ID NO: 241991 - DNA, 30 bp, Artificial Sequence
  Synthetic oligonucleotide
cttgttatatgctggtaagccgacatctct

SEQ ID NO: 241992 - DNA, 30 bp, Artificial Sequence
  Synthetic oligonucleotide
atgtacgtctaagggatgtgttcgatctct

SEQ ID NO: 241993 - DNA, 30 bp, Artificial Sequence
  Synthetic oligonucleotide
gcatcagcccgttgactgtcaaggatctct

SEQ ID NO: 241994 - DNA, 30 bp, Artificial Sequence
  Synthetic oligonucleotide
ccattcaatgacgaggaatcatggatctct

SEQ ID NO: 241995 - DNA, 30 bp, Artificial Sequence
  Synthetic oligonucleotide
tgcgcgagtcagcgcgaaacgcaactctct

SEQ ID NO: 241996 - DNA, 30 bp, Artificial Sequence
  Synthetic oligonucleotide
aacggatacgctaacacatctggagtctct

SEQ ID NO: 241997 - DNA, 30 bp, Artificial Sequence
  Synthetic oligonucleotide
gacattagccgctaataaattaccgtctct

SEQ ID NO: 241998 - DNA, 30 bp, Artificial Sequence
  Synthetic oligonucleotide
gcttgtcacatctatctcgggtccgtctct

SEQ ID NO: 241999 - DNA, 30 bp, Artificial Sequence
  Synthetic oligonucleotide
catagtccaattcgacacgtagtggtctct

SEQ ID NO: 242000 - DNA, 30 bp, Artificial Sequence
  Synthetic oligonucleotide
gttgcttatactttttgatatatcttctct

SEQ ID NO: 242001 - DNA, 30 bp, Artificial Sequence
  Synthetic oligonucleotide
tcgtagaaccagaaaacagcaactttctct

SEQ ID NO: 242002 - DNA, 30 bp, Artificial Sequence
  Synthetic oligonucleotide
atatggggatctacactgtctctcaagtct

SEQ ID NO: 242003 - DNA, 30 bp, Artificial Sequence
  Synthetic oligonucleotide
ctggtatactagtgaggttgctataagtct

SEQ ID NO: 242004 - DNA, 30 bp, Artificial Sequence
  Synthetic oligonucleotide
gtgcgtggtagaagaaatgtctataagtct

SEQ ID NO: 242005 - DNA, 30 bp, Artificial Sequence
  Synthetic oligonucleotide
gagggatcattgtacctgccatctaagtct

SEQ ID NO: 242006 - DNA, 30 bp, Artificial Sequence
  Synthetic oligonucleotide
gtgagagttcaatcgcacagagaacagtct

SEQ ID NO: 242007 - DNA, 30 bp, Artificial Sequence
  Synthetic oligonucleotide
cgttattcgcataccaatctcttccagtct

SEQ ID NO: 242008 - DNA, 30 bp, Artificial Sequence
  Synthetic oligonucleotide
ctcaagaaggaaaaaatctatactcagtct

SEQ ID NO: 242009 - DNA, 30 bp, Artificial Sequence
  Synthetic oligonucleotide
accgcacagtaagcaactaggccagagtct

SEQ ID NO: 242010 - DNA, 30 bp, Artificial Sequence
  Synthetic oligonucleotide
gagggtagttaaggcatcaggagggagtct

SEQ ID NO: 242011 - DNA, 30 bp, Artificial Sequence
  Synthetic oligonucleotide
gtcttcgtccgacatatccgtattgagtct

SEQ ID NO: 242012 - DNA, 30 bp, Artificial Sequence
  Synthetic oligonucleotide
cgggaatctaactatcgaatctttgagtct

SEQ ID NO: 242013 - DNA, 30 bp, Artificial Sequence
  Synthetic oligonucleotide
tctgaacgatccaggcctagtcgctagtct

SEQ ID NO: 242014 - DNA, 30 bp, Artificial Sequence
  Synthetic oligonucleotide
tatctcgtaacccaggtatttaggtagtct

SEQ ID NO: 242015 - DNA, 31 bp, Artificial Sequence
  Synthetic oligonucleotide
accatggcaatctcctaaaactttgtagtct

SEQ ID NO: 242016 - DNA, 30 bp, Artificial Sequence
  Synthetic oligonucleotide
ttttgatggaacattcagcgaagttagtct

SEQ ID NO: 242017 - DNA, 30 bp, Artificial Sequence
  Synthetic oligonucleotide
tcacagcaggatcgcgttaaggtcacgtct

SEQ ID NO: 242018 - DNA, 30 bp, Artificial Sequence
  Synthetic oligonucleotide
attacgattcggtgtgtctcgaatacgtct

SEQ ID NO: 242019 - DNA, 30 bp, Artificial Sequence
  Synthetic oligonucleotide
gggtggactaacgtcagatggattacgtct

SEQ ID NO: 242020 - DNA, 30 bp, Artificial Sequence
  Synthetic oligonucleotide
gtcgagagcctagaatgataggttacgtct

SEQ ID NO: 242021 - DNA, 30 bp, Artificial Sequence
  Synthetic oligonucleotide
cgacaagcgtaagataagggttcagcgtct

SEQ ID NO: 242022 - DNA, 30 bp, Artificial Sequence
  Synthetic oligonucleotide
agagagcgggacgcttctacctgagcgtct

SEQ ID NO: 242023 - DNA, 30 bp, Artificial Sequence
  Synthetic oligonucleotide
aagtcacactgtgagctgtcgacggcgtct

SEQ ID NO: 242024 - DNA, 30 bp, Artificial Sequence
  Synthetic oligonucleotide
cctggactctaggaaattagatcggcgtct

SEQ ID NO: 242025 - DNA, 30 bp, Artificial Sequence
  Synthetic oligonucleotide
acggatgacgtctgccgacataaatcgtct

SEQ ID NO: 242026 - DNA, 30 bp, Artificial Sequence
  Synthetic oligonucleotide
gaaacattaccaaagcttgaatgatcgtct

SEQ ID NO: 242027 - DNA, 30 bp, Artificial Sequence
  Synthetic oligonucleotide
tatcgcgagtaggttgactgcgtatcgtct

SEQ ID NO: 242028 - DNA, 30 bp, Artificial Sequence
  Synthetic oligonucleotide
ggactatgaaaattataataagaaaggtct

SEQ ID NO: 242029 - DNA, 30 bp, Artificial Sequence
  Synthetic oligonucleotide
tccacgcgatcgaaattggaagacaggtct

SEQ ID NO: 242030 - DNA, 30 bp, Artificial Sequence
  Synthetic oligonucleotide
ccggtagagagttttttacatcccaggtct

SEQ ID NO: 242031 - DNA, 31 bp, Artificial Sequence
  Synthetic oligonucleotide
agagtgttgcagcttagaggttggcaggtct

SEQ ID NO: 242032 - DNA, 30 bp, Artificial Sequence
  Synthetic oligonucleotide
ggcggcgtgcctgcaattaacgataggtct

SEQ ID NO: 242033 - DNA, 30 bp, Artificial Sequence
  Synthetic oligonucleotide
acaaatggatattaggttacagttaggtct

SEQ ID NO: 242034 - DNA, 30 bp, Artificial Sequence
  Synthetic oligonucleotide
acgtcccagacaacgcggcggtcacggtct

SEQ ID NO: 242035 - DNA, 30 bp, Artificial Sequence
  Synthetic oligonucleotide
tcactaagaataccgggtgcggtgcggtct

SEQ ID NO: 242036 - DNA, 30 bp, Artificial Sequence
  Synthetic oligonucleotide
aggttgagtggccgggaacatatagggtct

SEQ ID NO: 242037 - DNA, 30 bp, Artificial Sequence
  Synthetic oligonucleotide
aaggcacgtaaaatttcaatgcccgggtct

SEQ ID NO: 242038 - DNA, 30 bp, Artificial Sequence
  Synthetic oligonucleotide
aggtcctacggtgacggagtctatgggtct

SEQ ID NO: 242039 - DNA, 30 bp, Artificial Sequence
  Synthetic oligonucleotide
tgccctaggccataattcgggactgggtct

SEQ ID NO: 242040 - DNA, 30 bp, Artificial Sequence
  Synthetic oligonucleotide
aactggatggacgcggtttatactgggtct

SEQ ID NO: 242041 - DNA, 30 bp, Artificial Sequence
  Synthetic oligonucleotide
atacctcgtgtggtgggattttaatggtct

SEQ ID NO: 242042 - DNA, 30 bp, Artificial Sequence
  Synthetic oligonucleotide
ttatatataattgagagtacttcctggtct

SEQ ID NO: 242043 - DNA, 30 bp, Artificial Sequence
  Synthetic oligonucleotide
cactggttaagccagtgtatcggaatgtct

SEQ ID NO: 242044 - DNA, 30 bp, Artificial Sequence
  Synthetic oligonucleotide
agcgaacgggttgtgaacttctacatgtct

SEQ ID NO: 242045 - DNA, 30 bp, Artificial Sequence
  Synthetic oligonucleotide
tgacattgatttgcgcttaaccggatgtct

SEQ ID NO: 242046 - DNA, 30 bp, Artificial Sequence
  Synthetic oligonucleotide
gcaggaggaacgttgtacgactggatgtct

SEQ ID NO: 242047 - DNA, 30 bp, Artificial Sequence
  Synthetic oligonucleotide
caaccggtggaacgtcgggccgtgatgtct

SEQ ID NO: 242048 - DNA, 30 bp, Artificial Sequence
  Synthetic oligonucleotide
ttgaactaggttcgaagccacagactgtct

SEQ ID NO: 242049 - DNA, 30 bp, Artificial Sequence
  Synthetic oligonucleotide
ctcaaccataactacgcccgcgacctgtct

SEQ ID NO: 242050 - DNA, 30 bp, Artificial Sequence
  Synthetic oligonucleotide
gcagctttcatagtgaggatagggctgtct

SEQ ID NO: 242051 - DNA, 30 bp, Artificial Sequence
  Synthetic oligonucleotide
tcaagggactgcagagccttatggctgtct

SEQ ID NO: 242052 - DNA, 30 bp, Artificial Sequence
  Synthetic oligonucleotide
gtaaaatgagacccttgcttatatctgtct

SEQ ID NO: 242053 - DNA, 30 bp, Artificial Sequence
  Synthetic oligonucleotide
cgagggcataccgtgagtggaatggtgtct

SEQ ID NO: 242054 - DNA, 31 bp, Artificial Sequence
  Synthetic oligonucleotide
atggggtcgttgctagatttcatgtgtgtct

SEQ ID NO: 242055 - DNA, 30 bp, Artificial Sequence
  Synthetic oligonucleotide
ccgccgtggctatcgcgatagcttgtgtct

SEQ ID NO: 242056 - DNA, 30 bp, Artificial Sequence
  Synthetic oligonucleotide
cagaataatgcttttgaccccgtattgtct

SEQ ID NO: 242057 - DNA, 30 bp, Artificial Sequence
  Synthetic oligonucleotide
ccgtaagcgtcaccaagcttattattgtct

SEQ ID NO: 242058 - DNA, 30 bp, Artificial Sequence
  Synthetic oligonucleotide
aattcaaagagaagggggctttgcttgtct

SEQ ID NO: 242059 - DNA, 30 bp, Artificial Sequence
  Synthetic oligonucleotide
gatgtaatagcctgtcagtaaccaaattct

SEQ ID NO: 242060 - DNA, 30 bp, Artificial Sequence
  Synthetic oligonucleotide
gtttgtgactggcggcgatcccctaattct

SEQ ID NO: 242061 - DNA, 30 bp, Artificial Sequence
  Synthetic oligonucleotide
tcgttgtcatcgagttgctatcaccattct

SEQ ID NO: 242062 - DNA, 30 bp, Artificial Sequence
  Synthetic oligonucleotide
agtgggtaaggacggaacccagtccattct

SEQ ID NO: 242063 - DNA, 30 bp, Artificial Sequence
  Synthetic oligonucleotide
ccaaacccaatagttcttcttgtccattct

SEQ ID NO: 242064 - DNA, 30 bp, Artificial Sequence
  Synthetic oligonucleotide
gggaaggcaaagacggcttctgggcattct

SEQ ID NO: 242065 - DNA, 30 bp, Artificial Sequence
  Synthetic oligonucleotide
ccaatctatagttgaattcatatgcattct

SEQ ID NO: 242066 - DNA, 30 bp, Artificial Sequence
  Synthetic oligonucleotide
agtcctgaaaggtttctaatgaacgattct

SEQ ID NO: 242067 - DNA, 30 bp, Artificial Sequence
  Synthetic oligonucleotide
ggatgacaccctgcttataaggccgattct

SEQ ID NO: 242068 - DNA, 30 bp, Artificial Sequence
  Synthetic oligonucleotide
atggacgggttacctccatgggcctattct

SEQ ID NO: 242069 - DNA, 30 bp, Artificial Sequence
  Synthetic oligonucleotide
tacagttacaatcattatcgtctttattct

SEQ ID NO: 242070 - DNA, 30 bp, Artificial Sequence
  Synthetic oligonucleotide
tgcacatctcagtatggctgtcaaacttct

SEQ ID NO: 242071 - DNA, 30 bp, Artificial Sequence
  Synthetic oligonucleotide
atagctagagacgtggaagtgtaaacttct

SEQ ID NO: 242072 - DNA, 30 bp, Artificial Sequence
  Synthetic oligonucleotide
catgaggcttggcgagtacacgtaacttct

SEQ ID NO: 242073 - DNA, 30 bp, Artificial Sequence
  Synthetic oligonucleotide
atgtcatatcatagcgcatctaccacttct

SEQ ID NO: 242074 - DNA, 30 bp, Artificial Sequence
  Synthetic oligonucleotide
atgctgcgctattattgctgttgcacttct

SEQ ID NO: 242075 - DNA, 30 bp, Artificial Sequence
  Synthetic oligonucleotide
acagatccacttagatattgtttcacttct

SEQ ID NO: 242076 - DNA, 30 bp, Artificial Sequence
  Synthetic oligonucleotide
acgagattcaaagtgtggcccacgacttct

SEQ ID NO: 242077 - DNA, 30 bp, Artificial Sequence
  Synthetic oligonucleotide
cactatagtagcctcaagctcgatacttct

SEQ ID NO: 242078 - DNA, 30 bp, Artificial Sequence
  Synthetic oligonucleotide
atgtgggaactacctacggggactacttct

SEQ ID NO: 242079 - DNA, 30 bp, Artificial Sequence
  Synthetic oligonucleotide
ttgaaccgaggatcgtaaagtgtaccttct

SEQ ID NO: 242080 - DNA, 30 bp, Artificial Sequence
  Synthetic oligonucleotide
attcgggcgaagtgtctatcaaccccttct

SEQ ID NO: 242081 - DNA, 30 bp, Artificial Sequence
  Synthetic oligonucleotide
atgaaaaaccagtcatcagaagctccttct

SEQ ID NO: 242082 - DNA, 31 bp, Artificial Sequence
  Synthetic oligonucleotide
aacccataaaactacacaagattaagcttct

SEQ ID NO: 242083 - DNA, 30 bp, Artificial Sequence
  Synthetic oligonucleotide
ccaacccccgtggactgggataaggcttct

SEQ ID NO: 242084 - DNA, 30 bp, Artificial Sequence
  Synthetic oligonucleotide
acatcgtctcttaagcggttgcttgcttct

SEQ ID NO: 242085 - DNA, 30 bp, Artificial Sequence
  Synthetic oligonucleotide
aatagctacccagggtaaacgttatcttct

SEQ ID NO: 242086 - DNA, 30 bp, Artificial Sequence
  Synthetic oligonucleotide
atattccgtgacataaggtattagtcttct

SEQ ID NO: 242087 - DNA, 30 bp, Artificial Sequence
  Synthetic oligonucleotide
tatgttggtactgacaatcgtgcaagttct

SEQ ID NO: 242088 - DNA, 30 bp, Artificial Sequence
  Synthetic oligonucleotide
cactgtctcatcacctagtggcacagttct

SEQ ID NO: 242089 - DNA, 30 bp, Artificial Sequence
  Synthetic oligonucleotide
gagggttgctacctagggcaaagcagttct

SEQ ID NO: 242090 - DNA, 30 bp, Artificial Sequence
  Synthetic oligonucleotide
atcatgccaacgtacagagaacgcagttct

SEQ ID NO: 242091 - DNA, 30 bp, Artificial Sequence
  Synthetic oligonucleotide
aagagaaaaggattatcagtaatcagttct

SEQ ID NO: 242092 - DNA, 30 bp, Artificial Sequence
  Synthetic oligonucleotide
aagagatcatggagtacagaactcagttct

SEQ ID NO: 242093 - DNA, 30 bp, Artificial Sequence
  Synthetic oligonucleotide
aacctagaatggaaaagcaggcggagttct

SEQ ID NO: 242094 - DNA, 30 bp, Artificial Sequence
  Synthetic oligonucleotide
gcacgataaacaggcacgcatcaacgttct

SEQ ID NO: 242095 - DNA, 30 bp, Artificial Sequence
  Synthetic oligonucleotide
gggtaaggagatagacgtgaattccgttct

SEQ ID NO: 242096 - DNA, 30 bp, Artificial Sequence
  Synthetic oligonucleotide
cctagtaacgaggcatggcagacgcgttct

SEQ ID NO: 242097 - DNA, 30 bp, Artificial Sequence
  Synthetic oligonucleotide
aaaacatcgttcataccaggactgcgttct

SEQ ID NO: 242098 - DNA, 30 bp, Artificial Sequence
  Synthetic oligonucleotide
gctcccggtgcgtgctcggttagtcgttct

SEQ ID NO: 242099 - DNA, 30 bp, Artificial Sequence
  Synthetic oligonucleotide
ggatacgttcaggcagggcggtgcggttct

SEQ ID NO: 242100 - DNA, 30 bp, Artificial Sequence
  Synthetic oligonucleotide
aattggcgggacgtagttagttgcggttct

SEQ ID NO: 242101 - DNA, 30 bp, Artificial Sequence
  Synthetic oligonucleotide
ctaaatgccttgcgtatgaacggtggttct

SEQ ID NO: 242102 - DNA, 30 bp, Artificial Sequence
  Synthetic oligonucleotide
tttatcttcaggttcctccggtttggttct

SEQ ID NO: 242103 - DNA, 30 bp, Artificial Sequence
  Synthetic oligonucleotide
taggaccattttgttgatcatgcttgttct

SEQ ID NO: 242104 - DNA, 30 bp, Artificial Sequence
  Synthetic oligonucleotide
tcaacaagcattgtcgagcggtatatttct

SEQ ID NO: 242105 - DNA, 30 bp, Artificial Sequence
  Synthetic oligonucleotide
ggaaaccaccaggaggacgcccctatttct

SEQ ID NO: 242106 - DNA, 30 bp, Artificial Sequence
  Synthetic oligonucleotide
ggtgcacctgccagggcccactcactttct

SEQ ID NO: 242107 - DNA, 30 bp, Artificial Sequence
  Synthetic oligonucleotide
ccatagaaccataacctttagagactttct

SEQ ID NO: 242108 - DNA, 30 bp, Artificial Sequence
  Synthetic oligonucleotide
gagccgctgaagcgatgttggcacctttct

SEQ ID NO: 242109 - DNA, 30 bp, Artificial Sequence
  Synthetic oligonucleotide
cgaccactaatcgaacgagcaaccctttct

SEQ ID NO: 242110 - DNA, 30 bp, Artificial Sequence
  Synthetic oligonucleotide
cagaaggccgtgatcgcgtgaagcctttct

SEQ ID NO: 242111 - DNA, 30 bp, Artificial Sequence
  Synthetic oligonucleotide
cgcgatcgcttcctcgtcaactgggtttct

SEQ ID NO: 242112 - DNA, 30 bp, Artificial Sequence
  Synthetic oligonucleotide
atcgagccctgataaattgcagtggtttct

SEQ ID NO: 242113 - DNA, 30 bp, Artificial Sequence
  Synthetic oligonucleotide
gcttgtcacgtcgctacattccttgtttct

SEQ ID NO: 242114 - DNA, 30 bp, Artificial Sequence
  Synthetic oligonucleotide
tcgtcgaggaggacacagacttcattttct

SEQ ID NO: 242115 - DNA, 30 bp, Artificial Sequence
  Synthetic oligonucleotide
acaggtacacgcaagtgttaggtcttttct

SEQ ID NO: 242116 - DNA, 30 bp, Artificial Sequence
  Synthetic oligonucleotide
gtcatctacgttaaatgccccccgttttct

SEQ ID NO: 242117 - DNA, 30 bp, Artificial Sequence
  Synthetic oligonucleotide
atgccctacacggccaataactgcaaaagt

SEQ ID NO: 242118 - DNA, 30 bp, Artificial Sequence
  Synthetic oligonucleotide
ccgttaggtttctgtaccgccatgaaaagt

SEQ ID NO: 242119 - DNA, 30 bp, Artificial Sequence
  Synthetic oligonucleotide
cgccgcggctacaacggatttaataaaagt

SEQ ID NO: 242120 - DNA, 30 bp, Artificial Sequence
  Synthetic oligonucleotide
cgtgcctcattgaccggcgcgtaacaaagt

SEQ ID NO: 242121 - DNA, 30 bp, Artificial Sequence
  Synthetic oligonucleotide
gccgggatgcatgtactgcgtagacaaagt

SEQ ID NO: 242122 - DNA, 30 bp, Artificial Sequence
  Synthetic oligonucleotide
agcgaatacagccctctctttctacaaagt

SEQ ID NO: 242123 - DNA, 30 bp, Artificial Sequence
  Synthetic oligonucleotide
accaattggggaaccccctcattacaaagt

SEQ ID NO: 242124 - DNA, 30 bp, Artificial Sequence
  Synthetic oligonucleotide
gcacaggtcaacgacggagacttacaaagt

SEQ ID NO: 242125 - DNA, 30 bp, Artificial Sequence
  Synthetic oligonucleotide
ctgctaagccgcaacgggtttttacaaagt

SEQ ID NO: 242126 - DNA, 30 bp, Artificial Sequence
  Synthetic oligonucleotide
tttgtacggggggggtagataacgcaaagt

SEQ ID NO: 242127 - DNA, 30 bp, Artificial Sequence
  Synthetic oligonucleotide
ggtctggacgaacgtgtacgctggcaaagt

SEQ ID NO: 242128 - DNA, 30 bp, Artificial Sequence
  Synthetic oligonucleotide
atgcttttgatacgcttggacagtcaaagt

SEQ ID NO: 242129 - DNA, 30 bp, Artificial Sequence
  Synthetic oligonucleotide
aagaggttttggagtactcttcaagaaagt

SEQ ID NO: 242130 - DNA, 30 bp, Artificial Sequence
  Synthetic oligonucleotide
aacattgtacgggtattatgggcataaagt

SEQ ID NO: 242131 - DNA, 30 bp, Artificial Sequence
  Synthetic oligonucleotide
ttgtcccagcgaacgggaaaatgataaagt

SEQ ID NO: 242132 - DNA, 30 bp, Artificial Sequence
  Synthetic oligonucleotide
gaggttgaaatactattacttacctaaagt

SEQ ID NO: 242133 - DNA, 30 bp, Artificial Sequence
  Synthetic oligonucleotide
gaggacagtagcccgaaacggcagtaaagt

SEQ ID NO: 242134 - DNA, 30 bp, Artificial Sequence
  Synthetic oligonucleotide
ggcagccgtcgtggggcccaaaattaaagt

SEQ ID NO: 242135 - DNA, 30 bp, Artificial Sequence
  Synthetic oligonucleotide
tcgtcacttctgtctcgactccgttaaagt

SEQ ID NO: 242136 - DNA, 30 bp, Artificial Sequence
  Synthetic oligonucleotide
ttcggtctagggttgccaccgcgttaaagt

SEQ ID NO: 242137 - DNA, 30 bp, Artificial Sequence
  Synthetic oligonucleotide
cgtccttcgtgaaactttgggatttaaagt

SEQ ID NO: 242138 - DNA, 30 bp, Artificial Sequence
  Synthetic oligonucleotide
tatgcttggtgcattggatcgaaaacaagt

SEQ ID NO: 242139 - DNA, 30 bp, Artificial Sequence
  Synthetic oligonucleotide
aactagcacgaattggaaaaatgaacaagt

SEQ ID NO: 242140 - DNA, 30 bp, Artificial Sequence
  Synthetic oligonucleotide
agtagagagttaatacgccctgtaacaagt

SEQ ID NO: 242141 - DNA, 30 bp, Artificial Sequence
  Synthetic oligonucleotide
gtgaccgtcagctcggggcacactacaagt

SEQ ID NO: 242142 - DNA, 30 bp, Artificial Sequence
  Synthetic oligonucleotide
gagatcgaggataacctattgcttacaagt

SEQ ID NO: 242143 - DNA, 30 bp, Artificial Sequence
  Synthetic oligonucleotide
agaatcaagggtaacacaataacaccaagt

SEQ ID NO: 242144 - DNA, 30 bp, Artificial Sequence
  Synthetic oligonucleotide
catctctgcaacgcgcctggaggaccaagt

SEQ ID NO: 242145 - DNA, 30 bp, Artificial Sequence
  Synthetic oligonucleotide
tcccgggtccggcgcccctgttttccaagt

SEQ ID NO: 242146 - DNA, 30 bp, Artificial Sequence
  Synthetic oligonucleotide
ctggcaagttagttgccactctacgcaagt

SEQ ID NO: 242147 - DNA, 30 bp, Artificial Sequence
  Synthetic oligonucleotide
taagattagcttcaggcttgccgatcaagt

SEQ ID NO: 242148 - DNA, 30 bp, Artificial Sequence
  Synthetic oligonucleotide
gaggtctggttacaaagctggatatcaagt

SEQ ID NO: 242149 - DNA, 30 bp, Artificial Sequence
  Synthetic oligonucleotide
cttaacgtatataatggcctggattcaagt

SEQ ID NO: 242150 - DNA, 30 bp, Artificial Sequence
  Synthetic oligonucleotide
cagcttggcttggttttgctgaagagaagt

SEQ ID NO: 242151 - DNA, 30 bp, Artificial Sequence
  Synthetic oligonucleotide
actttgtactggttcggttctaggagaagt

SEQ ID NO: 242152 - DNA, 30 bp, Artificial Sequence
  Synthetic oligonucleotide
ccataaagaacggtgtttagtcatagaagt

SEQ ID NO: 242153 - DNA, 30 bp, Artificial Sequence
  Synthetic oligonucleotide
tcctctcgcactcgccagaaaacacgaagt

SEQ ID NO: 242154 - DNA, 30 bp, Artificial Sequence
  Synthetic oligonucleotide
gctatctagcatgtaaatccggctcgaagt

SEQ ID NO: 242155 - DNA, 30 bp, Artificial Sequence
  Synthetic oligonucleotide
ggatgcgtccgtcaaacgacgcttcgaagt

SEQ ID NO: 242156 - DNA, 30 bp, Artificial Sequence
  Synthetic oligonucleotide
aggtgctaacgtatgaatacgtaaggaagt

SEQ ID NO: 242157 - DNA, 30 bp, Artificial Sequence
  Synthetic oligonucleotide
gtgtcaggatgtcatcacttgtcaggaagt

SEQ ID NO: 242158 - DNA, 30 bp, Artificial Sequence
  Synthetic oligonucleotide
aactataatgtctgtggataaaccggaagt

SEQ ID NO: 242159 - DNA, 30 bp, Artificial Sequence
  Synthetic oligonucleotide
tagttgtggacaaatataatttccggaagt

SEQ ID NO: 242160 - DNA, 30 bp, Artificial Sequence
  Synthetic oligonucleotide
ggcttcgacgaccaggtactaatcggaagt

SEQ ID NO: 242161 - DNA, 30 bp, Artificial Sequence
  Synthetic oligonucleotide
agaggccgctgggtcctctccacgggaagt

SEQ ID NO: 242162 - DNA, 30 bp, Artificial Sequence
  Synthetic oligonucleotide
gacatctgcccactaagtaacgtatgaagt

SEQ ID NO: 242163 - DNA, 30 bp, Artificial Sequence
  Synthetic oligonucleotide
tcattcagatcccaatagggacactgaagt

SEQ ID NO: 242164 - DNA, 30 bp, Artificial Sequence
  Synthetic oligonucleotide
atgcgatcaaactactcagttcagtgaagt

SEQ ID NO: 242165 - DNA, 30 bp, Artificial Sequence
  Synthetic oligonucleotide
atccagtagtacaagtctgaaacgtgaagt

SEQ ID NO: 242166 - DNA, 30 bp, Artificial Sequence
  Synthetic oligonucleotide
tcagtctgctgcgaacagtgttcaataagt

SEQ ID NO: 242167 - DNA, 30 bp, Artificial Sequence
  Synthetic oligonucleotide
gtggaaaaaacgtggacctacatcataagt

SEQ ID NO: 242168 - DNA, 30 bp, Artificial Sequence
  Synthetic oligonucleotide
gtatatcaaaggatgcacgctgacctaagt

SEQ ID NO: 242169 - DNA, 30 bp, Artificial Sequence
  Synthetic oligonucleotide
ccaagggtgtgaggtgatagagtcctaagt

SEQ ID NO: 242170 - DNA, 30 bp, Artificial Sequence
  Synthetic oligonucleotide
taaatcgtggtaacctgaactgcgctaagt

SEQ ID NO: 242171 - DNA, 30 bp, Artificial Sequence
  Synthetic oligonucleotide
atgtcgcgaaagtaacaaatatatctaagt

SEQ ID NO: 242172 - DNA, 30 bp, Artificial Sequence
  Synthetic oligonucleotide
ttaaggcgagattgtatacgggttctaagt

SEQ ID NO: 242173 - DNA, 30 bp, Artificial Sequence
  Synthetic oligonucleotide
ggtgctcaccggcgactgtaggtcgtaagt

SEQ ID NO: 242174 - DNA, 30 bp, Artificial Sequence
  Synthetic oligonucleotide
tccggcctccttgcaatggacaaggtaagt

SEQ ID NO: 242175 - DNA, 30 bp, Artificial Sequence
  Synthetic oligonucleotide
gcgacacattacactggccggaatgtaagt

SEQ ID NO: 242176 - DNA, 30 bp, Artificial Sequence
  Synthetic oligonucleotide
agagcagaaaacttatcaagggctgtaagt

SEQ ID NO: 242177 - DNA, 30 bp, Artificial Sequence
  Synthetic oligonucleotide
aagtatctgactggggattatgctgtaagt

SEQ ID NO: 242178 - DNA, 30 bp, Artificial Sequence
  Synthetic oligonucleotide
aagatcgttgagggaatgcagcttgtaagt

SEQ ID NO: 242179 - DNA, 30 bp, Artificial Sequence
  Synthetic oligonucleotide
gcgagcctaatatcgtaataacaattaagt

SEQ ID NO: 242180 - DNA, 30 bp, Artificial Sequence
  Synthetic oligonucleotide
agcggccgttctgatcgagtgtctttaagt

SEQ ID NO: 242181 - DNA, 30 bp, Artificial Sequence
  Synthetic oligonucleotide
aggatgggagacgtaatctcatcaaacagt

SEQ ID NO: 242182 - DNA, 30 bp, Artificial Sequence
  Synthetic oligonucleotide
tctcagtgtgcacgacgtaatcgaaacagt

SEQ ID NO: 242183 - DNA, 30 bp, Artificial Sequence
  Synthetic oligonucleotide
gctgtacatggtcgtcggggccacaacagt

SEQ ID NO: 242184 - DNA, 30 bp, Artificial Sequence
  Synthetic oligonucleotide
gccacgggagagggtgactgctccaacagt

SEQ ID NO: 242185 - DNA, 30 bp, Artificial Sequence
  Synthetic oligonucleotide
gggggcctaatgcggcacggggggaacagt

SEQ ID NO: 242186 - DNA, 30 bp, Artificial Sequence
  Synthetic oligonucleotide
cgttatatgagttcacttacctgtaacagt

SEQ ID NO: 242187 - DNA, 30 bp, Artificial Sequence
  Synthetic oligonucleotide
agaaaggtgaccagccggcacgttaacagt

SEQ ID NO: 242188 - DNA, 30 bp, Artificial Sequence
  Synthetic oligonucleotide
cacagatgtaactgtgaggccaaacacagt

SEQ ID NO: 242189 - DNA, 30 bp, Artificial Sequence
  Synthetic oligonucleotide
gtaagaacaccaaagtgtcatggacacagt

SEQ ID NO: 242190 - DNA, 30 bp, Artificial Sequence
  Synthetic oligonucleotide
atgcggaactactgatttccattacacagt

SEQ ID NO: 242191 - DNA, 30 bp, Artificial Sequence
  Synthetic oligonucleotide
ccttgcagcccgaattcggggggccacagt

SEQ ID NO: 242192 - DNA, 30 bp, Artificial Sequence
  Synthetic oligonucleotide
gcatggcaggatgttggtccggcgcacagt

SEQ ID NO: 242193 - DNA, 30 bp, Artificial Sequence
  Synthetic oligonucleotide
agttaatgaagtgagagtggtaatcacagt

SEQ ID NO: 242194 - DNA, 30 bp, Artificial Sequence
  Synthetic oligonucleotide
tcttatacgggggttatgggagatcacagt

SEQ ID NO: 242195 - DNA, 31 bp, Artificial Sequence
  Synthetic oligonucleotide
agacaggggtgcccttggagtgagcgacagt

SEQ ID NO: 242196 - DNA, 30 bp, Artificial Sequence
  Synthetic oligonucleotide
gaatagaattgtaggaattcgggggacagt

SEQ ID NO: 242197 - DNA, 30 bp, Artificial Sequence
  Synthetic oligonucleotide
gtcaatgaccagcaggcgcccgatgacagt

SEQ ID NO: 242198 - DNA, 30 bp, Artificial Sequence
  Synthetic oligonucleotide
agtttgaaatcgtgaagaaatggtgacagt

SEQ ID NO: 242199 - DNA, 30 bp, Artificial Sequence
  Synthetic oligonucleotide
aagactgtaagtctgtctcgcacatacagt

SEQ ID NO: 242200 - DNA, 30 bp, Artificial Sequence
  Synthetic oligonucleotide
gaagctggaagagatagaagattgtacagt

SEQ ID NO: 242201 - DNA, 30 bp, Artificial Sequence
  Synthetic oligonucleotide
aaccattcaggtgcgtcagtcacttacagt

SEQ ID NO: 242202 - DNA, 30 bp, Artificial Sequence
  Synthetic oligonucleotide
ggttggtgtgaggcccgtgcattaaccagt

SEQ ID NO: 242203 - DNA, 30 bp, Artificial Sequence
  Synthetic oligonucleotide
acgaacgaaaggggtggaggtggcaccagt

SEQ ID NO: 242204 - DNA, 30 bp, Artificial Sequence
  Synthetic oligonucleotide
gtcgcttttcagatcatacctcagaccagt

SEQ ID NO: 242205 - DNA, 30 bp, Artificial Sequence
  Synthetic oligonucleotide
tgccatagtactcagatctaattgaccagt

SEQ ID NO: 242206 - DNA, 30 bp, Artificial Sequence
  Synthetic oligonucleotide
acgcgatgtgtacgtgtcatggttaccagt

SEQ ID NO: 242207 - DNA, 30 bp, Artificial Sequence
  Synthetic oligonucleotide
tcatacccccttatgaaagcggagcccagt

SEQ ID NO: 242208 - DNA, 30 bp, Artificial Sequence
  Synthetic oligonucleotide
tgaatgtacatagtctcaggagtgcccagt

SEQ ID NO: 242209 - DNA, 30 bp, Artificial Sequence
  Synthetic oligonucleotide
cccaatacccgccggccatcttaagccagt

SEQ ID NO: 242210 - DNA, 30 bp, Artificial Sequence
  Synthetic oligonucleotide
agaggactgtgctcgggtacggaggccagt

SEQ ID NO: 242211 - DNA, 30 bp, Artificial Sequence
  Synthetic oligonucleotide
gcttgattaatatgggaggtgcttgccagt

SEQ ID NO: 242212 - DNA, 30 bp, Artificial Sequence
  Synthetic oligonucleotide
aggactagaacctataacgtaatatccagt

SEQ ID NO: 242213 - DNA, 30 bp, Artificial Sequence
  Synthetic oligonucleotide
gttcgctatgccatgatctgagtctccagt

SEQ ID NO: 242214 - DNA, 30 bp, Artificial Sequence
  Synthetic oligonucleotide
cattttgctggtgcgatttgcgcgtccagt

SEQ ID NO: 242215 - DNA, 30 bp, Artificial Sequence
  Synthetic oligonucleotide
ctcgtgtggctataaaaaatatcgtccagt

SEQ ID NO: 242216 - DNA, 30 bp, Artificial Sequence
  Synthetic oligonucleotide
aatacttgcgaacgaacacgactttccagt

SEQ ID NO: 242217 - DNA, 30 bp, Artificial Sequence
  Synthetic oligonucleotide
gacttatgcaacagcgggacggtttccagt

SEQ ID NO: 242218 - DNA, 30 bp, Artificial Sequence
  Synthetic oligonucleotide
gactaccagtctaccaccacagaaagcagt

SEQ ID NO: 242219 - DNA, 30 bp, Artificial Sequence
  Synthetic oligonucleotide
atgatgaaatacgcccatcttgaaagcagt

SEQ ID NO: 242220 - DNA, 30 bp, Artificial Sequence
  Synthetic oligonucleotide
tttagtatcaactgatatgcatccagcagt

SEQ ID NO: 242221 - DNA, 30 bp, Artificial Sequence
  Synthetic oligonucleotide
agccagtcccctaaagactcgtccagcagt

SEQ ID NO: 242222 - DNA, 30 bp, Artificial Sequence
  Synthetic oligonucleotide
ggagagcgggcgatatcgggttgcagcagt

SEQ ID NO: 242223 - DNA, 30 bp, Artificial Sequence
  Synthetic oligonucleotide
attaccgctggtcgttccccattcagcagt

SEQ ID NO: 242224 - DNA, 30 bp, Artificial Sequence
  Synthetic oligonucleotide
ggagcgcagcgagtacaaccatggagcagt

SEQ ID NO: 242225 - DNA, 30 bp, Artificial Sequence
  Synthetic oligonucleotide
ttgccttgcaaattgattgaaattagcagt

SEQ ID NO: 242226 - DNA, 30 bp, Artificial Sequence
  Synthetic oligonucleotide
agcgctcaatacatacgggtattaggcagt

SEQ ID NO: 242227 - DNA, 30 bp, Artificial Sequence
  Synthetic oligonucleotide
agctacaggtcttcatggcccaacggcagt

SEQ ID NO: 242228 - DNA, 30 bp, Artificial Sequence
  Synthetic oligonucleotide
tgcgggaggtccaactcatgtttcggcagt

SEQ ID NO: 242229 - DNA, 30 bp, Artificial Sequence
  Synthetic oligonucleotide
attaagaaatagggtgcgttcgcatgcagt

SEQ ID NO: 242230 - DNA, 30 bp, Artificial Sequence
  Synthetic oligonucleotide
ggataaactggaaacacggctcactgcagt

SEQ ID NO: 242231 - DNA, 30 bp, Artificial Sequence
  Synthetic oligonucleotide
tgcgtatacatggaggagtacttttgcagt

SEQ ID NO: 242232 - DNA, 30 bp, Artificial Sequence
  Synthetic oligonucleotide
tcggttagaaacctacgcgagaaaatcagt

SEQ ID NO: 242233 - DNA, 30 bp, Artificial Sequence
  Synthetic oligonucleotide
ttaaacggtgccttgacggtgaacatcagt

SEQ ID NO: 242234 - DNA, 30 bp, Artificial Sequence
  Synthetic oligonucleotide
ttgcatggtcaacgaaccgtgatcatcagt

SEQ ID NO: 242235 - DNA, 30 bp, Artificial Sequence
  Synthetic oligonucleotide
agcttgagtggatccaagactaagatcagt

SEQ ID NO: 242236 - DNA, 30 bp, Artificial Sequence
  Synthetic oligonucleotide
tagatggcattttctagggtagagatcagt

SEQ ID NO: 242237 - DNA, 30 bp, Artificial Sequence
  Synthetic oligonucleotide
accccccctgaagacaactgggagatcagt

SEQ ID NO: 242238 - DNA, 30 bp, Artificial Sequence
  Synthetic oligonucleotide
atatcatccaggacaatgaaaatgatcagt

SEQ ID NO: 242239 - DNA, 30 bp, Artificial Sequence
  Synthetic oligonucleotide
taaagtcttggaccgtaaagattgatcagt

SEQ ID NO: 242240 - DNA, 30 bp, Artificial Sequence
  Synthetic oligonucleotide
accgtaagccttttccgacaattcctcagt

SEQ ID NO: 242241 - DNA, 30 bp, Artificial Sequence
  Synthetic oligonucleotide
tctaatcccataagttaatatcaagtcagt

SEQ ID NO: 242242 - DNA, 30 bp, Artificial Sequence
  Synthetic oligonucleotide
ggaacttctgaaatagccgtcaacgtcagt

SEQ ID NO: 242243 - DNA, 30 bp, Artificial Sequence
  Synthetic oligonucleotide
tatcgtgcgcgggaagccttgcatgtcagt

SEQ ID NO: 242244 - DNA, 30 bp, Artificial Sequence
  Synthetic oligonucleotide
aacaacacaatggctatatgggtcttcagt

SEQ ID NO: 242245 - DNA, 30 bp, Artificial Sequence
  Synthetic oligonucleotide
aggcaggataagatgaattaaaatttcagt

SEQ ID NO: 242246 - DNA, 30 bp, Artificial Sequence
  Synthetic oligonucleotide
ataggtgcaaggcagacctattgtttcagt

SEQ ID NO: 242247 - DNA, 30 bp, Artificial Sequence
  Synthetic oligonucleotide
gagtcaaatgggcagatattgtttttcagt

SEQ ID NO: 242248 - DNA, 30 bp, Artificial Sequence
  Synthetic oligonucleotide
acttctaaagttttgtgccttctcaagagt

SEQ ID NO: 242249 - DNA, 30 bp, Artificial Sequence
  Synthetic oligonucleotide
gcaacgaccgaactttacggagggaagagt

SEQ ID NO: 242250 - DNA, 30 bp, Artificial Sequence
  Synthetic oligonucleotide
taggaatccctgattactcggctgaagagt

SEQ ID NO: 242251 - DNA, 30 bp, Artificial Sequence
  Synthetic oligonucleotide
gacaggacagctactatacaagctaagagt

SEQ ID NO: 242252 - DNA, 30 bp, Artificial Sequence
  Synthetic oligonucleotide
caacctgtcattacaagtttgtgtaagagt

SEQ ID NO: 242253 - DNA, 30 bp, Artificial Sequence
  Synthetic oligonucleotide
acatttagcgtaaatttaaggctgcagagt

SEQ ID NO: 242254 - DNA, 30 bp, Artificial Sequence
  Synthetic oligonucleotide
actcataccgcgggcttcaatgaagagagt

SEQ ID NO: 242255 - DNA, 30 bp, Artificial Sequence
  Synthetic oligonucleotide
aatggatacgctgattctggattagagagt

SEQ ID NO: 242256 - DNA, 30 bp, Artificial Sequence
  Synthetic oligonucleotide
tctccggtcgtttgtccgcgtgatgagagt

SEQ ID NO: 242257 - DNA, 30 bp, Artificial Sequence
  Synthetic oligonucleotide
ctcatcgcccctcttgcattgtttgagagt

SEQ ID NO: 242258 - DNA, 30 bp, Artificial Sequence
  Synthetic oligonucleotide
tacttcatcgactatgccgtgtgatagagt

SEQ ID NO: 242259 - DNA, 30 bp, Artificial Sequence
  Synthetic oligonucleotide
gaccggtgcagctcccaataggtatagagt

SEQ ID NO: 242260 - DNA, 30 bp, Artificial Sequence
  Synthetic oligonucleotide
ttattactacaaggaggcggggtatagagt

SEQ ID NO: 242261 - DNA, 30 bp, Artificial Sequence
  Synthetic oligonucleotide
cagtatttgtggatcaactaagtaacgagt

SEQ ID NO: 242262 - DNA, 30 bp, Artificial Sequence
  Synthetic oligonucleotide
gtaatgtacatgcactagctgagcacgagt

SEQ ID NO: 242263 - DNA, 30 bp, Artificial Sequence
  Synthetic oligonucleotide
aagtgaggcccagtttggatgatgacgagt

SEQ ID NO: 242264 - DNA, 30 bp, Artificial Sequence
  Synthetic oligonucleotide
atgggtaccaaagactaggtttatacgagt

SEQ ID NO: 242265 - DNA, 30 bp, Artificial Sequence
  Synthetic oligonucleotide
tgtagagctcatacggtggaccgaccgagt

SEQ ID NO: 242266 - DNA, 30 bp, Artificial Sequence
  Synthetic oligonucleotide
caggcgactggatctaagacgtacccgagt

SEQ ID NO: 242267 - DNA, 30 bp, Artificial Sequence
  Synthetic oligonucleotide
gtcatcaggtcggataatgaatcagcgagt

SEQ ID NO: 242268 - DNA, 30 bp, Artificial Sequence
  Synthetic oligonucleotide
agcgcctgcctaagcaaatcccgagcgagt

SEQ ID NO: 242269 - DNA, 30 bp, Artificial Sequence
  Synthetic oligonucleotide
ttgatgaaaatcatcatttcgtacgcgagt

SEQ ID NO: 242270 - DNA, 30 bp, Artificial Sequence
  Synthetic oligonucleotide
gctaagcatgagtagtactggaccgcgagt

SEQ ID NO: 242271 - DNA, 30 bp, Artificial Sequence
  Synthetic oligonucleotide
ggtatacatcgctagatgtgtgaggcgagt

SEQ ID NO: 242272 - DNA, 30 bp, Artificial Sequence
  Synthetic oligonucleotide
caaagcatgacgtaagtaaatgttgcgagt

SEQ ID NO: 242273 - DNA, 30 bp, Artificial Sequence
  Synthetic oligonucleotide
ggggatcattcttttgcttagttatcgagt

SEQ ID NO: 242274 - DNA, 30 bp, Artificial Sequence
  Synthetic oligonucleotide
taattgcgcggtcgaaagcccgtgtcgagt

SEQ ID NO: 242275 - DNA, 30 bp, Artificial Sequence
  Synthetic oligonucleotide
acagtgacaaattgcggtggaaattcgagt

SEQ ID NO: 242276 - DNA, 30 bp, Artificial Sequence
  Synthetic oligonucleotide
agttccgtaacatctcaccggggttcgagt

SEQ ID NO: 242277 - DNA, 30 bp, Artificial Sequence
  Synthetic oligonucleotide
gtctaggcgagggccggagaactcaggagt

SEQ ID NO: 242278 - DNA, 30 bp, Artificial Sequence
  Synthetic oligonucleotide
tatacgtgattacggcaggaatggaggagt

SEQ ID NO: 242279 - DNA, 30 bp, Artificial Sequence
  Synthetic oligonucleotide
ggtcaacaggtacattagggggataggagt

SEQ ID NO: 242280 - DNA, 30 bp, Artificial Sequence
  Synthetic oligonucleotide
ggttgtcaggctgacacatgagttaggagt

SEQ ID NO: 242281 - DNA, 30 bp, Artificial Sequence
  Synthetic oligonucleotide
ggtcggtgtccatcaaagaaactacggagt

SEQ ID NO: 242282 - DNA, 30 bp, Artificial Sequence
  Synthetic oligonucleotide
ggttagcttgtgtgttctcatcatcggagt

SEQ ID NO: 242283 - DNA, 30 bp, Artificial Sequence
  Synthetic oligonucleotide
cagggttcaaaacaagtaacttgtcggagt

SEQ ID NO: 242284 - DNA, 30 bp, Artificial Sequence
  Synthetic oligonucleotide
ctaagacatctcccagtgcctagcgggagt

SEQ ID NO: 242285 - DNA, 30 bp, Artificial Sequence
  Synthetic oligonucleotide
tcattgggcggacgtttatgtagcgggagt

SEQ ID NO: 242286 - DNA, 31 bp, Artificial Sequence
  Synthetic oligonucleotide
agggctctctactccggcgtggttggggagt

SEQ ID NO: 242287 - DNA, 30 bp, Artificial Sequence
  Synthetic oligonucleotide
ggatgtcggccatgatgaatagaatggagt

SEQ ID NO: 242288 - DNA, 30 bp, Artificial Sequence
  Synthetic oligonucleotide
agtgcgttggtctgaatatcctaatggagt

SEQ ID NO: 242289 - DNA, 30 bp, Artificial Sequence
  Synthetic oligonucleotide
gtcggtagtaatccgaaatacggatggagt

SEQ ID NO: 242290 - DNA, 30 bp, Artificial Sequence
  Synthetic oligonucleotide
catcgctctgccgcacaggaattatggagt

SEQ ID NO: 242291 - DNA, 30 bp, Artificial Sequence
  Synthetic oligonucleotide
atatctatcccggacagggactagtggagt

SEQ ID NO: 242292 - DNA, 30 bp, Artificial Sequence
  Synthetic oligonucleotide
gggtagtccgaggaatcgatcaggtggagt

SEQ ID NO: 242293 - DNA, 30 bp, Artificial Sequence
  Synthetic oligonucleotide
gcgggcccgcctggggcgtgcgtgtggagt

SEQ ID NO: 242294 - DNA, 30 bp, Artificial Sequence
  Synthetic oligonucleotide
atctcgggcgctcaaagagaccattggagt

SEQ ID NO: 242295 - DNA, 30 bp, Artificial Sequence
  Synthetic oligonucleotide
ggcacctaaagtgtccagtggtattggagt

SEQ ID NO: 242296 - DNA, 30 bp, Artificial Sequence
  Synthetic oligonucleotide
cgtaacttcttaaaaatcaaatgttggagt

SEQ ID NO: 242297 - DNA, 30 bp, Artificial Sequence
  Synthetic oligonucleotide
attcatccccgtgtgggtttcaaaatgagt

SEQ ID NO: 242298 - DNA, 30 bp, Artificial Sequence
  Synthetic oligonucleotide
gaggggacggccttttcgggccaaatgagt

SEQ ID NO: 242299 - DNA, 30 bp, Artificial Sequence
  Synthetic oligonucleotide
acattcggagcctgggataaaataatgagt

SEQ ID NO: 242300 - DNA, 31 bp, Artificial Sequence
  Synthetic oligonucleotide
ttgtaccgggcactaaaagggtatcatgagt

SEQ ID NO: 242301 - DNA, 30 bp, Artificial Sequence
  Synthetic oligonucleotide
tgccatcggtactccaaatattagatgagt

SEQ ID NO: 242302 - DNA, 30 bp, Artificial Sequence
  Synthetic oligonucleotide
cctcacaagtctaagggggcctctatgagt

SEQ ID NO: 242303 - DNA, 30 bp, Artificial Sequence
  Synthetic oligonucleotide
gatcaggtgaagtttaacggatcactgagt

SEQ ID NO: 242304 - DNA, 30 bp, Artificial Sequence
  Synthetic oligonucleotide
ctgtcagtatcctgggataaaagactgagt

SEQ ID NO: 242305 - DNA, 30 bp, Artificial Sequence
  Synthetic oligonucleotide
cgacgcggaccataccaccggtgtctgagt

SEQ ID NO: 242306 - DNA, 30 bp, Artificial Sequence
  Synthetic oligonucleotide
attagcagggggccaagtggcatagtgagt

SEQ ID NO: 242307 - DNA, 30 bp, Artificial Sequence
  Synthetic oligonucleotide
cgaatggggcaagctggctacaaattgagt

SEQ ID NO: 242308 - DNA, 30 bp, Artificial Sequence
  Synthetic oligonucleotide
atcatatccagcttggaattgaaattgagt

SEQ ID NO: 242309 - DNA, 30 bp, Artificial Sequence
  Synthetic oligonucleotide
ggcggcccaagattcatgttagaattgagt

SEQ ID NO: 242310 - DNA, 30 bp, Artificial Sequence
  Synthetic oligonucleotide
aacgctagtaaccttcttgtataattgagt

SEQ ID NO: 242311 - DNA, 30 bp, Artificial Sequence
  Synthetic oligonucleotide
cagcgaaaatgtacatagagacgcttgagt

SEQ ID NO: 242312 - DNA, 30 bp, Artificial Sequence
  Synthetic oligonucleotide
tctacggaaagtgatcttagaaggttgagt

SEQ ID NO: 242313 - DNA, 30 bp, Artificial Sequence
  Synthetic oligonucleotide
aagtgttgatgtaaagggaagataaatagt

SEQ ID NO: 242314 - DNA, 30 bp, Artificial Sequence
  Synthetic oligonucleotide
aatatcgctttaattcgtccgcccaatagt

SEQ ID NO: 242315 - DNA, 30 bp, Artificial Sequence
  Synthetic oligonucleotide
caggttaacgaaattataaatcgtaatagt

SEQ ID NO: 242316 - DNA, 30 bp, Artificial Sequence
  Synthetic oligonucleotide
atttagggtacccgcaggggcaaacatagt

SEQ ID NO: 242317 - DNA, 30 bp, Artificial Sequence
  Synthetic oligonucleotide
ctcatcgaggaaatgttgggtctccatagt

SEQ ID NO: 242318 - DNA, 30 bp, Artificial Sequence
  Synthetic oligonucleotide
caaaagttcggcagtagtgtgactcatagt

SEQ ID NO: 242319 - DNA, 30 bp, Artificial Sequence
  Synthetic oligonucleotide
taaagtcattttggatcgaaatctcatagt

SEQ ID NO: 242320 - DNA, 30 bp, Artificial Sequence
  Synthetic oligonucleotide
accgggcgattacctatggcacgtcatagt

SEQ ID NO: 242321 - DNA, 30 bp, Artificial Sequence
  Synthetic oligonucleotide
gcatgaaattgtagccggagaccagatagt

SEQ ID NO: 242322 - DNA, 30 bp, Artificial Sequence
  Synthetic oligonucleotide
gtgggactcgagtggaaatgggccgatagt

SEQ ID NO: 242323 - DNA, 30 bp, Artificial Sequence
  Synthetic oligonucleotide
atcaggggattctaaatgggcagcgatagt

SEQ ID NO: 242324 - DNA, 30 bp, Artificial Sequence
  Synthetic oligonucleotide
cacagtggtttgaagtcaattggcgatagt

SEQ ID NO: 242325 - DNA, 30 bp, Artificial Sequence
  Synthetic oligonucleotide
aacgagtaatccgactttagggtggatagt

SEQ ID NO: 242326 - DNA, 30 bp, Artificial Sequence
  Synthetic oligonucleotide
gcgccatactatggtgattcaagtgatagt

SEQ ID NO: 242327 - DNA, 30 bp, Artificial Sequence
  Synthetic oligonucleotide
aacacgtgacttcctgtaatagttgatagt

SEQ ID NO: 242328 - DNA, 30 bp, Artificial Sequence
  Synthetic oligonucleotide
ccaatacaccctttaggcatgccatatagt

SEQ ID NO: 242329 - DNA, 30 bp, Artificial Sequence
  Synthetic oligonucleotide
ttaggacaatgttcttggcggaaaactagt

SEQ ID NO: 242330 - DNA, 30 bp, Artificial Sequence
  Synthetic oligonucleotide
taaacggcgcagtgcaggtaggaaactagt

SEQ ID NO: 242331 - DNA, 30 bp, Artificial Sequence
  Synthetic oligonucleotide
gcatgttaacaaacggagatactaactagt

SEQ ID NO: 242332 - DNA, 30 bp, Artificial Sequence
  Synthetic oligonucleotide
ataacgcttaactaactcgtgggcactagt

SEQ ID NO: 242333 - DNA, 30 bp, Artificial Sequence
  Synthetic oligonucleotide
tctgtaatgggcttttccgtcaggactagt

SEQ ID NO: 242334 - DNA, 30 bp, Artificial Sequence
  Synthetic oligonucleotide
ggtatacatgagcttcgaatttgccctagt

SEQ ID NO: 242335 - DNA, 30 bp, Artificial Sequence
  Synthetic oligonucleotide
gtgtaccgacgcggacttcctcggcctagt

SEQ ID NO: 242336 - DNA, 30 bp, Artificial Sequence
  Synthetic oligonucleotide
catgaaatgcacggacattcactgcctagt

SEQ ID NO: 242337 - DNA, 30 bp, Artificial Sequence
  Synthetic oligonucleotide
gcatggagacatgagggtacttatcctagt

SEQ ID NO: 242338 - DNA, 30 bp, Artificial Sequence
  Synthetic oligonucleotide
aactcaataatgactgggagctgtcctagt

SEQ ID NO: 242339 - DNA, 30 bp, Artificial Sequence
  Synthetic oligonucleotide
ctctgttgcgtcagtgtcagacgcgctagt

SEQ ID NO: 242340 - DNA, 30 bp, Artificial Sequence
  Synthetic oligonucleotide
cgcaacggttcgttaaaccgaacggctagt

SEQ ID NO: 242341 - DNA, 30 bp, Artificial Sequence
  Synthetic oligonucleotide
gcgtagctagcgtatttcatggatgctagt

SEQ ID NO: 242342 - DNA, 30 bp, Artificial Sequence
  Synthetic oligonucleotide
ccgtaagagggctcgcttcttgaatctagt

SEQ ID NO: 242343 - DNA, 30 bp, Artificial Sequence
  Synthetic oligonucleotide
tacgccataacgacaaaaaccatatctagt

SEQ ID NO: 242344 - DNA, 30 bp, Artificial Sequence
  Synthetic oligonucleotide
acactccaccaaacttgctacacctctagt

SEQ ID NO: 242345 - DNA, 30 bp, Artificial Sequence
  Synthetic oligonucleotide
aagctcaacctccgggctaaggggtctagt

SEQ ID NO: 242346 - DNA, 30 bp, Artificial Sequence
  Synthetic oligonucleotide
accgccacttagtcaagttgctcttctagt

SEQ ID NO: 242347 - DNA, 30 bp, Artificial Sequence
  Synthetic oligonucleotide
atgagtattaaaggtcagagggtttctagt

SEQ ID NO: 242348 - DNA, 30 bp, Artificial Sequence
  Synthetic oligonucleotide
ctgccccaccttgaaggcggggaaagtagt

SEQ ID NO: 242349 - DNA, 30 bp, Artificial Sequence
  Synthetic oligonucleotide
ccaatgaaatcaggtgatggtcgaagtagt

SEQ ID NO: 242350 - DNA, 30 bp, Artificial Sequence
  Synthetic oligonucleotide
cgcaggtagcgataaggctcatgaagtagt

SEQ ID NO: 242351 - DNA, 30 bp, Artificial Sequence
  Synthetic oligonucleotide
ggcgatgttaacccagacggtgtaagtagt

SEQ ID NO: 242352 - DNA, 30 bp, Artificial Sequence
  Synthetic oligonucleotide
ggccagcgagcggtacgttccttaagtagt

SEQ ID NO: 242353 - DNA, 30 bp, Artificial Sequence
  Synthetic oligonucleotide
tattcgggctatcacatccgaaccagtagt

SEQ ID NO: 242354 - DNA, 30 bp, Artificial Sequence
  Synthetic oligonucleotide
tccagttaacgtagaccctttagcagtagt

SEQ ID NO: 242355 - DNA, 30 bp, Artificial Sequence
  Synthetic oligonucleotide
tggtaatacgtattatgtggaaggagtagt

SEQ ID NO: 242356 - DNA, 30 bp, Artificial Sequence
  Synthetic oligonucleotide
aactgcgttagagggaatcacaatagtagt

SEQ ID NO: 242357 - DNA, 30 bp, Artificial Sequence
  Synthetic oligonucleotide
gcttaggattccatgatacagatccgtagt

SEQ ID NO: 242358 - DNA, 30 bp, Artificial Sequence
  Synthetic oligonucleotide
gcatggcgttcaaagacaacttcgcgtagt

SEQ ID NO: 242359 - DNA, 30 bp, Artificial Sequence
  Synthetic oligonucleotide
tttgcacacccagggccacgtggtcgtagt

SEQ ID NO: 242360 - DNA, 30 bp, Artificial Sequence
  Synthetic oligonucleotide
cgcagtctttaatagcagcaaatgggtagt

SEQ ID NO: 242361 - DNA, 30 bp, Artificial Sequence
  Synthetic oligonucleotide
ggtaagatcagctactcgagcgtgggtagt

SEQ ID NO: 242362 - DNA, 30 bp, Artificial Sequence
  Synthetic oligonucleotide
caatatccaacaccagtaccaagtggtagt

SEQ ID NO: 242363 - DNA, 30 bp, Artificial Sequence
  Synthetic oligonucleotide
agtgctagggaattactactttaatgtagt

SEQ ID NO: 242364 - DNA, 30 bp, Artificial Sequence
  Synthetic oligonucleotide
caaggcagaattcagagtctaagatgtagt

SEQ ID NO: 242365 - DNA, 30 bp, Artificial Sequence
  Synthetic oligonucleotide
tcataatacactgagataatcggatgtagt

SEQ ID NO: 242366 - DNA, 30 bp, Artificial Sequence
  Synthetic oligonucleotide
ggtataatcacgactaggtagaactgtagt

SEQ ID NO: 242367 - DNA, 30 bp, Artificial Sequence
  Synthetic oligonucleotide
tatgaggaaagcgaggactgtgcctgtagt

SEQ ID NO: 242368 - DNA, 30 bp, Artificial Sequence
  Synthetic oligonucleotide
cgagcttttgcgggtagatggtggtgtagt

SEQ ID NO: 242369 - DNA, 30 bp, Artificial Sequence
  Synthetic oligonucleotide
ttaggtcaatgaatatgaagcttttgtagt

SEQ ID NO: 242370 - DNA, 30 bp, Artificial Sequence
  Synthetic oligonucleotide
atgccatatcacctcaggacttgaattagt

SEQ ID NO: 242371 - DNA, 30 bp, Artificial Sequence
  Synthetic oligonucleotide
acagtgcgttagaacattaagagcattagt

SEQ ID NO: 242372 - DNA, 30 bp, Artificial Sequence
  Synthetic oligonucleotide
ggataatatgggtcaataagactcattagt

SEQ ID NO: 242373 - DNA, 30 bp, Artificial Sequence
  Synthetic oligonucleotide
catcattaccacggcacgggggtcattagt

SEQ ID NO: 242374 - DNA, 30 bp, Artificial Sequence
  Synthetic oligonucleotide
actggtggtaataacaaaagggagattagt

SEQ ID NO: 242375 - DNA, 30 bp, Artificial Sequence
  Synthetic oligonucleotide
aactaatcctgaacattttaacttattagt

SEQ ID NO: 242376 - DNA, 30 bp, Artificial Sequence
  Synthetic oligonucleotide
cctcaccgcttatgtggaaggctgcttagt

SEQ ID NO: 242377 - DNA, 30 bp, Artificial Sequence
  Synthetic oligonucleotide
agcgataagaccagcggcgcaagtcttagt

SEQ ID NO: 242378 - DNA, 30 bp, Artificial Sequence
  Synthetic oligonucleotide
catctacagatttctatagcaattgttagt

SEQ ID NO: 242379 - DNA, 30 bp, Artificial Sequence
  Synthetic oligonucleotide
gcgcaaggactaaaaccccaagttgttagt

SEQ ID NO: 242380 - DNA, 30 bp, Artificial Sequence
  Synthetic oligonucleotide
ttatcaagagctcatcaattcaaatttagt

SEQ ID NO: 242381 - DNA, 30 bp, Artificial Sequence
  Synthetic oligonucleotide
aagttcccgtgcaacatgataccatttagt

SEQ ID NO: 242382 - DNA, 30 bp, Artificial Sequence
  Synthetic oligonucleotide
caagagcagtctgactacattgtatttagt

SEQ ID NO: 242383 - DNA, 30 bp, Artificial Sequence
  Synthetic oligonucleotide
gcaaatcgaaggacacggaaacactttagt

SEQ ID NO: 242384 - DNA, 30 bp, Artificial Sequence
  Synthetic oligonucleotide
ctctcaggcctcgagcaagtcgtctttagt

SEQ ID NO: 242385 - DNA, 30 bp, Artificial Sequence
  Synthetic oligonucleotide
ggcaaaatgtatgtatgaaaaatgtttagt

SEQ ID NO: 242386 - DNA, 30 bp, Artificial Sequence
  Synthetic oligonucleotide
ttgcaatggacccgaatcacgctaaaacgt

SEQ ID NO: 242387 - DNA, 30 bp, Artificial Sequence
  Synthetic oligonucleotide
ctaggggcttaaaactgaggctataaacgt

SEQ ID NO: 242388 - DNA, 30 bp, Artificial Sequence
  Synthetic oligonucleotide
gcgatcctttgtaaggatatcggtaaacgt

SEQ ID NO: 242389 - DNA, 30 bp, Artificial Sequence
  Synthetic oligonucleotide
catagaagggtcagggggacaccccaacgt

SEQ ID NO: 242390 - DNA, 30 bp, Artificial Sequence
  Synthetic oligonucleotide
ttttaggaccagtgtaataccagccaacgt

SEQ ID NO: 242391 - DNA, 30 bp, Artificial Sequence
  Synthetic oligonucleotide
gttgggtgcaaaccctctaaggtgcaacgt

SEQ ID NO: 242392 - DNA, 30 bp, Artificial Sequence
  Synthetic oligonucleotide
tgtaataggaaaacacgttagactcaacgt

SEQ ID NO: 242393 - DNA, 30 bp, Artificial Sequence
  Synthetic oligonucleotide
gttcttggactattgcccgatgaagaacgt

SEQ ID NO: 242394 - DNA, 30 bp, Artificial Sequence
  Synthetic oligonucleotide
ggggatgcacacaataggcgggcagaacgt

SEQ ID NO: 242395 - DNA, 30 bp, Artificial Sequence
  Synthetic oligonucleotide
gagtacaacagtggcagccagaacgaacgt

SEQ ID NO: 242396 - DNA, 30 bp, Artificial Sequence
  Synthetic oligonucleotide
ccaatcacgtacgttcgtccgagggaacgt

SEQ ID NO: 242397 - DNA, 30 bp, Artificial Sequence
  Synthetic oligonucleotide
ctccgcggtagggggcctaagaaataacgt

SEQ ID NO: 242398 - DNA, 30 bp, Artificial Sequence
  Synthetic oligonucleotide
atacggcgtcatgtcgatcatccgtaacgt

SEQ ID NO: 242399 - DNA, 30 bp, Artificial Sequence
  Synthetic oligonucleotide
tttgacaattgttatggactagcgtaacgt

SEQ ID NO: 242400 - DNA, 30 bp, Artificial Sequence
  Synthetic oligonucleotide
gacggggccaatgtgttactgtggtaacgt

SEQ ID NO: 242401 - DNA, 30 bp, Artificial Sequence
  Synthetic oligonucleotide
gacattaaggaggactccccggtgtaacgt

SEQ ID NO: 242402 - DNA, 30 bp, Artificial Sequence
  Synthetic oligonucleotide
ccattccaaccaatcggagggttttaacgt

SEQ ID NO: 242403 - DNA, 30 bp, Artificial Sequence
  Synthetic oligonucleotide
agtttattatataagtagaggtgaacacgt

SEQ ID NO: 242404 - DNA, 30 bp, Artificial Sequence
  Synthetic oligonucleotide
gaggtattggggaataactaacggacacgt

SEQ ID NO: 242405 - DNA, 30 bp, Artificial Sequence
  Synthetic oligonucleotide
gattcgacataatataacgattatacacgt

SEQ ID NO: 242406 - DNA, 30 bp, Artificial Sequence
  Synthetic oligonucleotide
ggccaaacggctaagcacgtcaaaccacgt

SEQ ID NO: 242407 - DNA, 30 bp, Artificial Sequence
  Synthetic oligonucleotide
gcaacagggcacgctagctaggaaccacgt

SEQ ID NO: 242408 - DNA, 30 bp, Artificial Sequence
  Synthetic oligonucleotide
tgacgggaccatactataatccgaccacgt

SEQ ID NO: 242409 - DNA, 30 bp, Artificial Sequence
  Synthetic oligonucleotide
tgcggtgcgttgcaatgagcagacccacgt

SEQ ID NO: 242410 - DNA, 30 bp, Artificial Sequence
  Synthetic oligonucleotide
acatttatgtcactagtgtattagccacgt

SEQ ID NO: 242411 - DNA, 30 bp, Artificial Sequence
  Synthetic oligonucleotide
actatcttgtgtacacctttcagagcacgt

SEQ ID NO: 242412 - DNA, 30 bp, Artificial Sequence
  Synthetic oligonucleotide
cgggaaggccggatcgttggaaacgcacgt

SEQ ID NO: 242413 - DNA, 30 bp, Artificial Sequence
  Synthetic oligonucleotide
taaaaggtgagtggctgcgataaggcacgt

SEQ ID NO: 242414 - DNA, 30 bp, Artificial Sequence
  Synthetic oligonucleotide
tatcggtgtgttacggaaatagcggcacgt

SEQ ID NO: 242415 - DNA, 30 bp, Artificial Sequence
  Synthetic oligonucleotide
tgtatggatgggagggtcccagatgcacgt

SEQ ID NO: 242416 - DNA, 30 bp, Artificial Sequence
  Synthetic oligonucleotide
tggggggggtctatgtacttatatgcacgt

SEQ ID NO: 242417 - DNA, 30 bp, Artificial Sequence
  Synthetic oligonucleotide
ggcggcttaagagactcatcaattgcacgt

SEQ ID NO: 242418 - DNA, 30 bp, Artificial Sequence
  Synthetic oligonucleotide
atcggcagatcgctggactatcgttcacgt

SEQ ID NO: 242419 - DNA, 30 bp, Artificial Sequence
  Synthetic oligonucleotide
gatccgggcattctgcaggaggaaagacgt

SEQ ID NO: 242420 - DNA, 30 bp, Artificial Sequence
  Synthetic oligonucleotide
gaccgtctgtgatagaaggctataagacgt

SEQ ID NO: 242421 - DNA, 30 bp, Artificial Sequence
  Synthetic oligonucleotide
tcggggcaggatagggatatattaagacgt

SEQ ID NO: 242422 - DNA, 30 bp, Artificial Sequence
  Synthetic oligonucleotide
attgccgaccgtgcccagccgtctagacgt

SEQ ID NO: 242423 - DNA, 30 bp, Artificial Sequence
  Synthetic oligonucleotide
gcttaggccctgttgggcgcggaccgacgt

SEQ ID NO: 242424 - DNA, 30 bp, Artificial Sequence
  Synthetic oligonucleotide
ggagtaggtgggctagataccggccgacgt

SEQ ID NO: 242425 - DNA, 30 bp, Artificial Sequence
  Synthetic oligonucleotide
ctggatctaaacaagccgtctggccgacgt

SEQ ID NO: 242426 - DNA, 30 bp, Artificial Sequence
  Synthetic oligonucleotide
atagactagctgtctgcggcccagcgacgt

SEQ ID NO: 242427 - DNA, 30 bp, Artificial Sequence
  Synthetic oligonucleotide
gggcataccgatgagttagactatcgacgt

SEQ ID NO: 242428 - DNA, 30 bp, Artificial Sequence
  Synthetic oligonucleotide
ctaagatgtggaagtcacgcgcctcgacgt

SEQ ID NO: 242429 - DNA, 30 bp, Artificial Sequence
  Synthetic oligonucleotide
taattcacaagcaagacgccgccaggacgt

SEQ ID NO: 242430 - DNA, 30 bp, Artificial Sequence
  Synthetic oligonucleotide
accattgtcactaaaacgggagcaggacgt

SEQ ID NO: 242431 - DNA, 30 bp, Artificial Sequence
  Synthetic oligonucleotide
tgatatagagtccctctaattagaggacgt

SEQ ID NO: 242432 - DNA, 30 bp, Artificial Sequence
  Synthetic oligonucleotide
ctgcgggtctggtacttctaccacggacgt

SEQ ID NO: 242433 - DNA, 30 bp, Artificial Sequence
  Synthetic oligonucleotide
acctcgggtgcgtacccgcattccggacgt

SEQ ID NO: 242434 - DNA, 30 bp, Artificial Sequence
  Synthetic oligonucleotide
tcacatactcgtgcttcgactcagggacgt

SEQ ID NO: 242435 - DNA, 30 bp, Artificial Sequence
  Synthetic oligonucleotide
gggaggatgcgtttgggactggtgggacgt

SEQ ID NO: 242436 - DNA, 30 bp, Artificial Sequence
  Synthetic oligonucleotide
atcaaggaacgacgtcccgtgggtggacgt

SEQ ID NO: 242437 - DNA, 30 bp, Artificial Sequence
  Synthetic oligonucleotide
ggccaacaggcataccataataaactacgt

SEQ ID NO: 242438 - DNA, 30 bp, Artificial Sequence
  Synthetic oligonucleotide
ctccaacaagatcggggccgcaatctacgt

SEQ ID NO: 242439 - DNA, 30 bp, Artificial Sequence
  Synthetic oligonucleotide
acaggtcacttgtcatgtaaccaagtacgt

SEQ ID NO: 242440 - DNA, 30 bp, Artificial Sequence
  Synthetic oligonucleotide
ttgctgggcagctaggtacgaagagtacgt

SEQ ID NO: 242441 - DNA, 30 bp, Artificial Sequence
  Synthetic oligonucleotide
actcaccgtatctatcagaatttagtacgt

SEQ ID NO: 242442 - DNA, 30 bp, Artificial Sequence
  Synthetic oligonucleotide
tatactgacgaaattcacaaatacgtacgt

SEQ ID NO: 242443 - DNA, 30 bp, Artificial Sequence
  Synthetic oligonucleotide
caaacagtagctcatagggtacgggtacgt

SEQ ID NO: 242444 - DNA, 30 bp, Artificial Sequence
  Synthetic oligonucleotide
ccatataagtcaccgcgtccgcatgtacgt

SEQ ID NO: 242445 - DNA, 30 bp, Artificial Sequence
  Synthetic oligonucleotide
tgtattactacaaagaaacggaaattacgt

SEQ ID NO: 242446 - DNA, 30 bp, Artificial Sequence
  Synthetic oligonucleotide
ggccgagccaatgaaattgtagaattacgt

SEQ ID NO: 242447 - DNA, 30 bp, Artificial Sequence
  Synthetic oligonucleotide
ggactcaatagatgtatcgccatattacgt

SEQ ID NO: 242448 - DNA, 30 bp, Artificial Sequence
  Synthetic oligonucleotide
tgcgccgtgttaacttcgaggacgttacgt

SEQ ID NO: 242449 - DNA, 30 bp, Artificial Sequence
  Synthetic oligonucleotide
gcaggcagaaaatggggtgggcggttacgt

SEQ ID NO: 242450 - DNA, 30 bp, Artificial Sequence
  Synthetic oligonucleotide
aggtattggtcagtattcacttcaaaccgt

SEQ ID NO: 242451 - DNA, 30 bp, Artificial Sequence
  Synthetic oligonucleotide
agtatatattgaatacgttccctaaaccgt

SEQ ID NO: 242452 - DNA, 30 bp, Artificial Sequence
  Synthetic oligonucleotide
cgacgtaggccgcttagacagagcaaccgt

SEQ ID NO: 242453 - DNA, 30 bp, Artificial Sequence
  Synthetic oligonucleotide
tgttaacgaccctgtaatgatgtgaaccgt

SEQ ID NO: 242454 - DNA, 30 bp, Artificial Sequence
  Synthetic oligonucleotide
tgtcgcaaataaaattgctgccaacaccgt

SEQ ID NO: 242455 - DNA, 30 bp, Artificial Sequence
  Synthetic oligonucleotide
gttccagcctatgcttactgtcatcaccgt

SEQ ID NO: 242456 - DNA, 30 bp, Artificial Sequence
  Synthetic oligonucleotide
gtgagattccattcggcaccgtgggaccgt

SEQ ID NO: 242457 - DNA, 30 bp, Artificial Sequence
  Synthetic oligonucleotide
cacctgatagttgtattaagaggtgaccgt

SEQ ID NO: 242458 - DNA, 30 bp, Artificial Sequence
  Synthetic oligonucleotide
caggcgcgcgcggggttgattgttgaccgt

SEQ ID NO: 242459 - DNA, 30 bp, Artificial Sequence
  Synthetic oligonucleotide
acataggatatcgtcgaacctctataccgt

SEQ ID NO: 242460 - DNA, 30 bp, Artificial Sequence
  Synthetic oligonucleotide
tcatccaccaatacgccaagaagctaccgt

SEQ ID NO: 242461 - DNA, 30 bp, Artificial Sequence
  Synthetic oligonucleotide
aaataagtgcactttcaacatgggtaccgt

SEQ ID NO: 242462 - DNA, 30 bp, Artificial Sequence
  Synthetic oligonucleotide
gagtagtagggtgttatgtgtttgtaccgt

SEQ ID NO: 242463 - DNA, 30 bp, Artificial Sequence
  Synthetic oligonucleotide
taggtaaggacttgacagcgctaaacccgt

SEQ ID NO: 242464 - DNA, 30 bp, Artificial Sequence
  Synthetic oligonucleotide
aaggtcagcgcaatgagattcttcacccgt

SEQ ID NO: 242465 - DNA, 30 bp, Artificial Sequence
  Synthetic oligonucleotide
agcatgaggaccaacgaagggaagacccgt

SEQ ID NO: 242466 - DNA, 30 bp, Artificial Sequence
  Synthetic oligonucleotide
ccatccagggatggttccagttttacccgt

SEQ ID NO: 242467 - DNA, 30 bp, Artificial Sequence
  Synthetic oligonucleotide
gatgttcttcgtatgctatcgaaaccccgt

SEQ ID NO: 242468 - DNA, 30 bp, Artificial Sequence
  Synthetic oligonucleotide
tggcggtcgatcagtattaagggcccccgt

SEQ ID NO: 242469 - DNA, 30 bp, Artificial Sequence
  Synthetic oligonucleotide
cagaccatggcgccgctgcatcacgcccgt

SEQ ID NO: 242470 - DNA, 30 bp, Artificial Sequence
  Synthetic oligonucleotide
cttctgtatcgggataagaatacggcccgt

SEQ ID NO: 242471 - DNA, 30 bp, Artificial Sequence
  Synthetic oligonucleotide
taggatcttcaccagcgctgtcgtgcccgt

SEQ ID NO: 242472 - DNA, 30 bp, Artificial Sequence
  Synthetic oligonucleotide
cgagccaggtaacctgtgaactcgtcccgt

SEQ ID NO: 242473 - DNA, 30 bp, Artificial Sequence
  Synthetic oligonucleotide
aacgagagcacaactgggtctgcttcccgt

SEQ ID NO: 242474 - DNA, 30 bp, Artificial Sequence
  Synthetic oligonucleotide
aacagtggttcgcaaacaagcataagccgt

SEQ ID NO: 242475 - DNA, 31 bp, Artificial Sequence
  Synthetic oligonucleotide
tgtactggtgcacgagcgtgagttaagccgt

SEQ ID NO: 242476 - DNA, 30 bp, Artificial Sequence
  Synthetic oligonucleotide
cggcaaccgctaatccagccgcgcagccgt

SEQ ID NO: 242477 - DNA, 30 bp, Artificial Sequence
  Synthetic oligonucleotide
gaggtacattcttttcgccagccgagccgt

SEQ ID NO: 242478 - DNA, 30 bp, Artificial Sequence
  Synthetic oligonucleotide
cgaatcactgtctttgctagtttgagccgt

SEQ ID NO: 242479 - DNA, 30 bp, Artificial Sequence
  Synthetic oligonucleotide
gcgcgcactcgcatcgtctgtggtagccgt

SEQ ID NO: 242480 - DNA, 30 bp, Artificial Sequence
  Synthetic oligonucleotide
aggcaagcgtactatggtgccctacgccgt

SEQ ID NO: 242481 - DNA, 29 bp, Artificial Sequence
  Synthetic oligonucleotide
tgctctggctatgatctataactcgccgt

SEQ ID NO: 242482 - DNA, 30 bp, Artificial Sequence
  Synthetic oligonucleotide
gtattgtcaagtatgtgagtctaaggccgt

SEQ ID NO: 242483 - DNA, 30 bp, Artificial Sequence
  Synthetic oligonucleotide
aaattccgggaaaggatccccctaggccgt

SEQ ID NO: 242484 - DNA, 30 bp, Artificial Sequence
  Synthetic oligonucleotide
acacaggatggggaccttctagagggccgt

SEQ ID NO: 242485 - DNA, 30 bp, Artificial Sequence
  Synthetic oligonucleotide
ccaatgctcggttcagttctaaggggccgt

SEQ ID NO: 242486 - DNA, 30 bp, Artificial Sequence
  Synthetic oligonucleotide
atacggaccgtccttctccctttgggccgt

SEQ ID NO: 242487 - DNA, 30 bp, Artificial Sequence
  Synthetic oligonucleotide
gtctactattcacagaaggagattggccgt

SEQ ID NO: 242488 - DNA, 30 bp, Artificial Sequence
  Synthetic oligonucleotide
cgcggttaatccatcatttggacatgccgt

SEQ ID NO: 242489 - DNA, 30 bp, Artificial Sequence
  Synthetic oligonucleotide
cgtatggcctacatttctacttcatgccgt

SEQ ID NO: 242490 - DNA, 30 bp, Artificial Sequence
  Synthetic oligonucleotide
cgtcggtcttccctagagtaccagtgccgt

SEQ ID NO: 242491 - DNA, 30 bp, Artificial Sequence
  Synthetic oligonucleotide
ttgagagggtacccgttattgtcttgccgt

SEQ ID NO: 242492 - DNA, 30 bp, Artificial Sequence
  Synthetic oligonucleotide
tacggttccgacaatatactgccaatccgt

SEQ ID NO: 242493 - DNA, 30 bp, Artificial Sequence
  Synthetic oligonucleotide
cggacgtgacgtacaggactggtaatccgt

SEQ ID NO: 242494 - DNA, 30 bp, Artificial Sequence
  Synthetic oligonucleotide
ccgttggttgtcggaccacatgacatccgt

SEQ ID NO: 242495 - DNA, 30 bp, Artificial Sequence
  Synthetic oligonucleotide
cttaatggacaagattatggcgcgatccgt

SEQ ID NO: 242496 - DNA, 30 bp, Artificial Sequence
  Synthetic oligonucleotide
atatgacgtacacgaatgactaacctccgt

SEQ ID NO: 242497 - DNA, 30 bp, Artificial Sequence
  Synthetic oligonucleotide
gctccaattttcagccagatacccctccgt

SEQ ID NO: 242498 - DNA, 30 bp, Artificial Sequence
  Synthetic oligonucleotide
acctaagcccgacataggcgcatagtccgt

SEQ ID NO: 242499 - DNA, 30 bp, Artificial Sequence
  Synthetic oligonucleotide
taaacggagattgatggaagtaaggtccgt

SEQ ID NO: 242500 - DNA, 30 bp, Artificial Sequence
  Synthetic oligonucleotide
ggagatgtgaggcgcttctagcgggtccgt

SEQ ID NO: 242501 - DNA, 30 bp, Artificial Sequence
  Synthetic oligonucleotide
ctcaaaacataactctattagtgggtccgt

SEQ ID NO: 242502 - DNA, 30 bp, Artificial Sequence
  Synthetic oligonucleotide
ttacaaaataggggcgcccgattggtccgt

SEQ ID NO: 242503 - DNA, 30 bp, Artificial Sequence
  Synthetic oligonucleotide
gggatcttagaggggaatgcaagattccgt

SEQ ID NO: 242504 - DNA, 30 bp, Artificial Sequence
  Synthetic oligonucleotide
ttggcgcaaaagggaccctacagattccgt

SEQ ID NO: 242505 - DNA, 30 bp, Artificial Sequence
  Synthetic oligonucleotide
ggatgttgttagcaactcaaaccgttccgt

SEQ ID NO: 242506 - DNA, 30 bp, Artificial Sequence
  Synthetic oligonucleotide
gaatccatgaaacctggaacatcgttccgt

SEQ ID NO: 242507 - DNA, 30 bp, Artificial Sequence
  Synthetic oligonucleotide
tagggcaggtggcccgttatcgtgttccgt

SEQ ID NO: 242508 - DNA, 30 bp, Artificial Sequence
  Synthetic oligonucleotide
ttgcccgcgaaccataatgaaaaaaagcgt

SEQ ID NO: 242509 - DNA, 30 bp, Artificial Sequence
  Synthetic oligonucleotide
ggccccgccgatatccccgttgaaaagcgt

SEQ ID NO: 242510 - DNA, 30 bp, Artificial Sequence
  Synthetic oligonucleotide
gggagaactacaacgtgggcaccgaagcgt

SEQ ID NO: 242511 - DNA, 30 bp, Artificial Sequence
  Synthetic oligonucleotide
gacctaagctgcccacgaataccgaagcgt

SEQ ID NO: 242512 - DNA, 30 bp, Artificial Sequence
  Synthetic oligonucleotide
tccgattcaatggaacaccattataagcgt

SEQ ID NO: 242513 - DNA, 30 bp, Artificial Sequence
  Synthetic oligonucleotide
gcaaagcggcggtgatcacaatcacagcgt

SEQ ID NO: 242514 - DNA, 30 bp, Artificial Sequence
  Synthetic oligonucleotide
ttgcgggatcagcgggtaaaatgacagcgt

SEQ ID NO: 242515 - DNA, 30 bp, Artificial Sequence
  Synthetic oligonucleotide
tggcaacacgccctgaatgtatgacagcgt

SEQ ID NO: 242516 - DNA, 30 bp, Artificial Sequence
  Synthetic oligonucleotide
gggattaagtgggtcaaactaatacagcgt

SEQ ID NO: 242517 - DNA, 30 bp, Artificial Sequence
  Synthetic oligonucleotide
agcttaaggtggtagctggcgatacagcgt

SEQ ID NO: 242518 - DNA, 30 bp, Artificial Sequence
  Synthetic oligonucleotide
atatgactgtgataggttggtcccgagcgt

SEQ ID NO: 242519 - DNA, 30 bp, Artificial Sequence
  Synthetic oligonucleotide
tgatacatagcacgtagacatttggagcgt

SEQ ID NO: 242520 - DNA, 30 bp, Artificial Sequence
  Synthetic oligonucleotide
tatccaacgcttatcccccaggctgagcgt

SEQ ID NO: 242521 - DNA, 30 bp, Artificial Sequence
  Synthetic oligonucleotide
catgatttcctccactatagattctagcgt

SEQ ID NO: 242522 - DNA, 30 bp, Artificial Sequence
  Synthetic oligonucleotide
actgaattgtgacagaaacaatcgtagcgt

SEQ ID NO: 242523 - DNA, 30 bp, Artificial Sequence
  Synthetic oligonucleotide
tgatgacggcggacattcctgctgtagcgt

SEQ ID NO: 242524 - DNA, 30 bp, Artificial Sequence
  Synthetic oligonucleotide
gtcacggattgtctgcgggatttgtagcgt

SEQ ID NO: 242525 - DNA, 30 bp, Artificial Sequence
  Synthetic oligonucleotide
agtataatctgtagcgctgggacaacgcgt

SEQ ID NO: 242526 - DNA, 30 bp, Artificial Sequence
  Synthetic oligonucleotide
agggccccacggtaactcgtcccaacgcgt

SEQ ID NO: 242527 - DNA, 30 bp, Artificial Sequence
  Synthetic oligonucleotide
ggacccaactgatgctgcgccgagacgcgt

SEQ ID NO: 242528 - DNA, 30 bp, Artificial Sequence
  Synthetic oligonucleotide
aaagcgtcggtcatcggaagccatacgcgt

SEQ ID NO: 242529 - DNA, 30 bp, Artificial Sequence
  Synthetic oligonucleotide
gggttctctgacaccggttaaagtacgcgt

SEQ ID NO: 242530 - DNA, 30 bp, Artificial Sequence
  Synthetic oligonucleotide
ggatcgtgtcggaaaaaaagcttcccgcgt

SEQ ID NO: 242531 - DNA, 30 bp, Artificial Sequence
  Synthetic oligonucleotide
gatgtcattccgaacaaggtagagccgcgt

SEQ ID NO: 242532 - DNA, 30 bp, Artificial Sequence
  Synthetic oligonucleotide
tattctaagcaaagtagggccttagcgcgt

SEQ ID NO: 242533 - DNA, 30 bp, Artificial Sequence
  Synthetic oligonucleotide
caaatcccgcgtaggaagagggaggcgcgt

SEQ ID NO: 242534 - DNA, 30 bp, Artificial Sequence
  Synthetic oligonucleotide
ggaattcatgagctaatatggaaatcgcgt

SEQ ID NO: 242535 - DNA, 30 bp, Artificial Sequence
  Synthetic oligonucleotide
gcattaccgatttggcgggccacatcgcgt

SEQ ID NO: 242536 - DNA, 30 bp, Artificial Sequence
  Synthetic oligonucleotide
acggggtgtttagaggacctagcatcgcgt

SEQ ID NO: 242537 - DNA, 30 bp, Artificial Sequence
  Synthetic oligonucleotide
tcaggcccgtgcaatacaaccctatcgcgt

SEQ ID NO: 242538 - DNA, 30 bp, Artificial Sequence
  Synthetic oligonucleotide
gatagcgactttttcacagagccaaggcgt

SEQ ID NO: 242539 - DNA, 30 bp, Artificial Sequence
  Synthetic oligonucleotide
gaaagctatgacgagacatagaagaggcgt

SEQ ID NO: 242540 - DNA, 30 bp, Artificial Sequence
  Synthetic oligonucleotide
gctccggtatgtgagtcatgccagaggcgt

SEQ ID NO: 242541 - DNA, 30 bp, Artificial Sequence
  Synthetic oligonucleotide
aggcacattaaggttgtccgtctgaggcgt

SEQ ID NO: 242542 - DNA, 30 bp, Artificial Sequence
  Synthetic oligonucleotide
gacttttcagtcgtacgaacagtgaggcgt

SEQ ID NO: 242543 - DNA, 30 bp, Artificial Sequence
  Synthetic oligonucleotide
tagagacaagttagacatgctattaggcgt

SEQ ID NO: 242544 - DNA, 30 bp, Artificial Sequence
  Synthetic oligonucleotide
tgaacgaacttgtacgttagagaacggcgt

SEQ ID NO: 242545 - DNA, 30 bp, Artificial Sequence
  Synthetic oligonucleotide
ctgaatcactgggttctaaaaaaagggcgt

SEQ ID NO: 242546 - DNA, 30 bp, Artificial Sequence
  Synthetic oligonucleotide
tgggtcgggcataagagacgtaaagggcgt

SEQ ID NO: 242547 - DNA, 30 bp, Artificial Sequence
  Synthetic oligonucleotide
tcgtactcacaacttgtaccatacgggcgt

SEQ ID NO: 242548 - DNA, 30 bp, Artificial Sequence
  Synthetic oligonucleotide
aggggtttgtcgtaattctaaaccgggcgt

SEQ ID NO: 242549 - DNA, 30 bp, Artificial Sequence
  Synthetic oligonucleotide
agtctcatcagggtccacttcaccgggcgt

SEQ ID NO: 242550 - DNA, 30 bp, Artificial Sequence
  Synthetic oligonucleotide
cggaaattgctcgcattgcttatcgggcgt

SEQ ID NO: 242551 - DNA, 30 bp, Artificial Sequence
  Synthetic oligonucleotide
tctaggccccttagtatcgcacaggggcgt

SEQ ID NO: 242552 - DNA, 30 bp, Artificial Sequence
  Synthetic oligonucleotide
atgcaatggggggcatatgattaggggcgt

SEQ ID NO: 242553 - DNA, 30 bp, Artificial Sequence
  Synthetic oligonucleotide
cgtgataacctgtatccataaactgggcgt

SEQ ID NO: 242554 - DNA, 30 bp, Artificial Sequence
  Synthetic oligonucleotide
tcactgatcgagccctctggaattgggcgt

SEQ ID NO: 242555 - DNA, 30 bp, Artificial Sequence
  Synthetic oligonucleotide
gcatggtaagcgcctgaggttcaatggcgt

SEQ ID NO: 242556 - DNA, 30 bp, Artificial Sequence
  Synthetic oligonucleotide
attagtgagcttgaacaaataatatggcgt

SEQ ID NO: 242557 - DNA, 30 bp, Artificial Sequence
  Synthetic oligonucleotide
gcctgctagagtaattatcacgactggcgt

SEQ ID NO: 242558 - DNA, 30 bp, Artificial Sequence
  Synthetic oligonucleotide
agttgtaaattcatctgtgtgaggtggcgt

SEQ ID NO: 242559 - DNA, 30 bp, Artificial Sequence
  Synthetic oligonucleotide
cctgaatgacagaatgagggcacttggcgt

SEQ ID NO: 242560 - DNA, 29 bp, Artificial Sequence
  Synthetic oligonucleotide
aggaggagagattgcgcgagggttggcgt

SEQ ID NO: 242561 - DNA, 30 bp, Artificial Sequence
  Synthetic oligonucleotide
cggcagcgaaacaaggtacgtttttggcgt

SEQ ID NO: 242562 - DNA, 30 bp, Artificial Sequence
  Synthetic oligonucleotide
acgcgatttcgtggttaatccctaatgcgt

SEQ ID NO: 242563 - DNA, 30 bp, Artificial Sequence
  Synthetic oligonucleotide
ttggagtgtcctttatggcacacgatgcgt

SEQ ID NO: 242564 - DNA, 30 bp, Artificial Sequence
  Synthetic oligonucleotide
atgaaggccataggacaaaacaatatgcgt

SEQ ID NO: 242565 - DNA, 31 bp, Artificial Sequence
  Synthetic oligonucleotide
gcattgctctagggagcggtaggcagtgcgt

SEQ ID NO: 242566 - DNA, 30 bp, Artificial Sequence
  Synthetic oligonucleotide
gacttaattatgcttacacacggagtgcgt

SEQ ID NO: 242567 - DNA, 30 bp, Artificial Sequence
  Synthetic oligonucleotide
aaggagtcaacatgacccatcatagtgcgt

SEQ ID NO: 242568 - DNA, 30 bp, Artificial Sequence
  Synthetic oligonucleotide
agcatacaactattagagccctacgtgcgt

SEQ ID NO: 242569 - DNA, 30 bp, Artificial Sequence
  Synthetic oligonucleotide
tgggtcaccttacgtgccaaattcgtgcgt

SEQ ID NO: 242570 - DNA, 30 bp, Artificial Sequence
  Synthetic oligonucleotide
gacgtatgacaacaaagataaccggtgcgt

SEQ ID NO: 242571 - DNA, 27 bp, Artificial Sequence
  Synthetic oligonucleotide
atggcgttatgaggggagcgtgtgcgt

SEQ ID NO: 242572 - DNA, 30 bp, Artificial Sequence
  Synthetic oligonucleotide
gtgcctgggatatttagatagtttgtgcgt

SEQ ID NO: 242573 - DNA, 30 bp, Artificial Sequence
  Synthetic oligonucleotide
tctgtcgcgataattgaatcgtaattgcgt

SEQ ID NO: 242574 - DNA, 30 bp, Artificial Sequence
  Synthetic oligonucleotide
acggatcaaccagcagaagcagtattgcgt

SEQ ID NO: 242575 - DNA, 30 bp, Artificial Sequence
  Synthetic oligonucleotide
ctaaatatacgccatacaagagcgttgcgt

SEQ ID NO: 242576 - DNA, 30 bp, Artificial Sequence
  Synthetic oligonucleotide
gcctgatagtatgctacgccagagaatcgt

SEQ ID NO: 242577 - DNA, 30 bp, Artificial Sequence
  Synthetic oligonucleotide
gctaacaggtaaacctcgagtcaacatcgt

SEQ ID NO: 242578 - DNA, 30 bp, Artificial Sequence
  Synthetic oligonucleotide
ggcgggattgcttatgttaatgcacatcgt

SEQ ID NO: 242579 - DNA, 30 bp, Artificial Sequence
  Synthetic oligonucleotide
agaatgaggattgtacacataatacatcgt

SEQ ID NO: 242580 - DNA, 30 bp, Artificial Sequence
  Synthetic oligonucleotide
gcaggatacatagctaatttttgccatcgt

SEQ ID NO: 242581 - DNA, 30 bp, Artificial Sequence
  Synthetic oligonucleotide
ggtggctgtagcagttttagagcgcatcgt

SEQ ID NO: 242582 - DNA, 30 bp, Artificial Sequence
  Synthetic oligonucleotide
ggggaggagctgaaggtgttctttcatcgt

SEQ ID NO: 242583 - DNA, 30 bp, Artificial Sequence
  Synthetic oligonucleotide
gtttagtggaaggtaaacaggtgagatcgt

SEQ ID NO: 242584 - DNA, 30 bp, Artificial Sequence
  Synthetic oligonucleotide
gtgactctttgcttccgcccgatagatcgt

SEQ ID NO: 242585 - DNA, 30 bp, Artificial Sequence
  Synthetic oligonucleotide
atgtctagtggggcccgacggtgcgatcgt

SEQ ID NO: 242586 - DNA, 30 bp, Artificial Sequence
  Synthetic oligonucleotide
gttggcgtaaagttgctttttttcgatcgt

SEQ ID NO: 242587 - DNA, 30 bp, Artificial Sequence
  Synthetic oligonucleotide
gtctgacgaagcgctcagcttatggatcgt

SEQ ID NO: 242588 - DNA, 30 bp, Artificial Sequence
  Synthetic oligonucleotide
ggcaagctaccagatgccagggtatatcgt

SEQ ID NO: 242589 - DNA, 30 bp, Artificial Sequence
  Synthetic oligonucleotide
ctcaaagccggatccttccgggcgtatcgt

SEQ ID NO: 242590 - DNA, 30 bp, Artificial Sequence
  Synthetic oligonucleotide
gctggaacactgaaatcttacgggtatcgt

SEQ ID NO: 242591 - DNA, 30 bp, Artificial Sequence
  Synthetic oligonucleotide
cttagactcctacgtaccggctgttatcgt

SEQ ID NO: 242592 - DNA, 30 bp, Artificial Sequence
  Synthetic oligonucleotide
gattacaagaaatcgatcactttttatcgt

SEQ ID NO: 242593 - DNA, 30 bp, Artificial Sequence
  Synthetic oligonucleotide
taaaaaaggtcagtagtagttcgcactcgt

SEQ ID NO: 242594 - DNA, 30 bp, Artificial Sequence
  Synthetic oligonucleotide
ccaagaatgtaatatataaaggtacctcgt

SEQ ID NO: 242595 - DNA, 30 bp, Artificial Sequence
  Synthetic oligonucleotide
agacaaaaccaggccaacgaccggcctcgt

SEQ ID NO: 242596 - DNA, 30 bp, Artificial Sequence
  Synthetic oligonucleotide
tatgatggagctgaagttcgtcggcctcgt

SEQ ID NO: 242597 - DNA, 30 bp, Artificial Sequence
  Synthetic oligonucleotide
agcgggaggcgtgcatgtccggggcctcgt

SEQ ID NO: 242598 - DNA, 30 bp, Artificial Sequence
  Synthetic oligonucleotide
aaggactgaattttgttttaaatagctcgt

SEQ ID NO: 242599 - DNA, 30 bp, Artificial Sequence
  Synthetic oligonucleotide
gcctcgtgccaaaaaaaacccctcgctcgt

SEQ ID NO: 242600 - DNA, 30 bp, Artificial Sequence
  Synthetic oligonucleotide
ctcattgttctactctcgtatatggctcgt

SEQ ID NO: 242601 - DNA, 30 bp, Artificial Sequence
  Synthetic oligonucleotide
tgaattcccaggagagtcttattatctcgt

SEQ ID NO: 242602 - DNA, 30 bp, Artificial Sequence
  Synthetic oligonucleotide
gaaagcgtctggcttacctacccgtctcgt

SEQ ID NO: 242603 - DNA, 30 bp, Artificial Sequence
  Synthetic oligonucleotide
caccagctcaggacggacgggtattctcgt

SEQ ID NO: 242604 - DNA, 30 bp, Artificial Sequence
  Synthetic oligonucleotide
gtcaaagtctgttaccgctgataaagtcgt

SEQ ID NO: 242605 - DNA, 30 bp, Artificial Sequence
  Synthetic oligonucleotide
tgtcacattcaatttgttcgttacagtcgt

SEQ ID NO: 242606 - DNA, 30 bp, Artificial Sequence
  Synthetic oligonucleotide
cttggctctgatcaagcgctaacgagtcgt

SEQ ID NO: 242607 - DNA, 29 bp, Artificial Sequence
  Synthetic oligonucleotide
gagcggccaccgttagtaaggtgagtcgt

SEQ ID NO: 242608 - DNA, 30 bp, Artificial Sequence
  Synthetic oligonucleotide
actggtcattgaggtacgaatgtacgtcgt

SEQ ID NO: 242609 - DNA, 30 bp, Artificial Sequence
  Synthetic oligonucleotide
taagtaactgagacaatgcctcgcggtcgt

SEQ ID NO: 242610 - DNA, 30 bp, Artificial Sequence
  Synthetic oligonucleotide
ggagaaacaatgagcagcaatggcggtcgt

SEQ ID NO: 242611 - DNA, 30 bp, Artificial Sequence
  Synthetic oligonucleotide
atacactgggaattcagagaaacatgtcgt

SEQ ID NO: 242612 - DNA, 30 bp, Artificial Sequence
  Synthetic oligonucleotide
gctaggcccggttcggggaaatgatgtcgt

SEQ ID NO: 242613 - DNA, 30 bp, Artificial Sequence
  Synthetic oligonucleotide
gggggccctgcgatagctaactgatgtcgt

SEQ ID NO: 242614 - DNA, 30 bp, Artificial Sequence
  Synthetic oligonucleotide
attattccgggtgcttgaaagtgatgtcgt

SEQ ID NO: 242615 - DNA, 29 bp, Artificial Sequence
  Synthetic oligonucleotide
ttaatgagtgaatagctgctcgctgtcgt

SEQ ID NO: 242616 - DNA, 30 bp, Artificial Sequence
  Synthetic oligonucleotide
attaacagctggaccagtcacttcattcgt

SEQ ID NO: 242617 - DNA, 30 bp, Artificial Sequence
  Synthetic oligonucleotide
gaagacccacatcctatgcactcgattcgt

SEQ ID NO: 242618 - DNA, 30 bp, Artificial Sequence
  Synthetic oligonucleotide
tttcgagggtgcggggagacgtcgattcgt

SEQ ID NO: 242619 - DNA, 30 bp, Artificial Sequence
  Synthetic oligonucleotide
ttggagtgaggtgattttgagaaacttcgt

SEQ ID NO: 242620 - DNA, 30 bp, Artificial Sequence
  Synthetic oligonucleotide
tggaacgtaaatgcctagtcttaggttcgt

SEQ ID NO: 242621 - DNA, 30 bp, Artificial Sequence
  Synthetic oligonucleotide
aggaatagactgggtgggtgaccggttcgt

SEQ ID NO: 242622 - DNA, 30 bp, Artificial Sequence
  Synthetic oligonucleotide
cttgggggtctgaaatggtatccggttcgt

SEQ ID NO: 242623 - DNA, 30 bp, Artificial Sequence
  Synthetic oligonucleotide
actaattgggtctcggaacagtcggttcgt

SEQ ID NO: 242624 - DNA, 30 bp, Artificial Sequence
  Synthetic oligonucleotide
tcggggggagtatttctataccatgttcgt

SEQ ID NO: 242625 - DNA, 30 bp, Artificial Sequence
  Synthetic oligonucleotide
gccagcgcatatgcaactagagtatttcgt

SEQ ID NO: 242626 - DNA, 30 bp, Artificial Sequence
  Synthetic oligonucleotide
agtaccagtatccgttcggtagagtttcgt

SEQ ID NO: 242627 - DNA, 30 bp, Artificial Sequence
  Synthetic oligonucleotide
gcgtaatacggccctgccgaaacgtttcgt

SEQ ID NO: 242628 - DNA, 30 bp, Artificial Sequence
  Synthetic oligonucleotide
cggctgatgtggctgtgctgctgttttcgt

SEQ ID NO: 242629 - DNA, 30 bp, Artificial Sequence
  Synthetic oligonucleotide
gtaagtctttttgccagtagccgaaaaggt

SEQ ID NO: 242630 - DNA, 30 bp, Artificial Sequence
  Synthetic oligonucleotide
aggtatgcataaccgtaattcggaaaaggt

SEQ ID NO: 242631 - DNA, 30 bp, Artificial Sequence
  Synthetic oligonucleotide
tgcggaggcacattgtgcctattaaaaggt

SEQ ID NO: 242632 - DNA, 30 bp, Artificial Sequence
  Synthetic oligonucleotide
gcgagttggggcgcggcccggaataaaggt

SEQ ID NO: 242633 - DNA, 30 bp, Artificial Sequence
  Synthetic oligonucleotide
tagactggcgttcatcacgtaaaacaaggt

SEQ ID NO: 242634 - DNA, 30 bp, Artificial Sequence
  Synthetic oligonucleotide
tctaatggtgttctgcgtggtacccaaggt

SEQ ID NO: 242635 - DNA, 30 bp, Artificial Sequence
  Synthetic oligonucleotide
tgattgagtgtactggtttcaaagcaaggt

SEQ ID NO: 242636 - DNA, 30 bp, Artificial Sequence
  Synthetic oligonucleotide
gataaggctttcaccactcgaggtcaaggt

SEQ ID NO: 242637 - DNA, 30 bp, Artificial Sequence
  Synthetic oligonucleotide
tcgcaggtaacagtaggacgtcttcaaggt

SEQ ID NO: 242638 - DNA, 30 bp, Artificial Sequence
  Synthetic oligonucleotide
ggaaaaagtcctacagatgaagttcaaggt

SEQ ID NO: 242639 - DNA, 30 bp, Artificial Sequence
  Synthetic oligonucleotide
atcttgtaagagcggtaatccctagaaggt

SEQ ID NO: 242640 - DNA, 30 bp, Artificial Sequence
  Synthetic oligonucleotide
ggatgacgcatgacgacaattagcgaaggt

SEQ ID NO: 242641 - DNA, 30 bp, Artificial Sequence
  Synthetic oligonucleotide
aaactaggatcgtcatcccgaaaggaaggt

SEQ ID NO: 242642 - DNA, 30 bp, Artificial Sequence
  Synthetic oligonucleotide
accactgtatgtgtaaattaggcggaaggt

SEQ ID NO: 242643 - DNA, 30 bp, Artificial Sequence
  Synthetic oligonucleotide
gtaccccctcccgtgcgttaattggaaggt

SEQ ID NO: 242644 - DNA, 30 bp, Artificial Sequence
  Synthetic oligonucleotide
cacccgcgagccaactagcaagctgaaggt

SEQ ID NO: 242645 - DNA, 30 bp, Artificial Sequence
  Synthetic oligonucleotide
tgagtctcaaagggggtacgggttgaaggt

SEQ ID NO: 242646 - DNA, 30 bp, Artificial Sequence
  Synthetic oligonucleotide
ccggttaatcacgccagagtctaataaggt

SEQ ID NO: 242647 - DNA, 30 bp, Artificial Sequence
  Synthetic oligonucleotide
caatatgtgggttcggactttcactaaggt

SEQ ID NO: 242648 - DNA, 30 bp, Artificial Sequence
  Synthetic oligonucleotide
ttaaatggtcttcgattgtagagctaaggt

SEQ ID NO: 242649 - DNA, 30 bp, Artificial Sequence
  Synthetic oligonucleotide
tgcccggaatcataaacgcgggcgtaaggt

SEQ ID NO: 242650 - DNA, 30 bp, Artificial Sequence
  Synthetic oligonucleotide
cgtaattgtaatgttagagcgcggtaaggt

SEQ ID NO: 242651 - DNA, 30 bp, Artificial Sequence
  Synthetic oligonucleotide
tcaatgcttaggctcgggtgtcggtaaggt

SEQ ID NO: 242652 - DNA, 30 bp, Artificial Sequence
  Synthetic oligonucleotide
tcggtcggccgaaccgcggcatggtaaggt

SEQ ID NO: 242653 - DNA, 30 bp, Artificial Sequence
  Synthetic oligonucleotide
gctccgcacccagagctagggtattaaggt

SEQ ID NO: 242654 - DNA, 30 bp, Artificial Sequence
  Synthetic oligonucleotide
tgggatgatgctgagcaccggcgttaaggt

SEQ ID NO: 242655 - DNA, 30 bp, Artificial Sequence
  Synthetic oligonucleotide
cctgccaaaagtcgggaaaaacaaacaggt

SEQ ID NO: 242656 - DNA, 30 bp, Artificial Sequence
  Synthetic oligonucleotide
tcctatccagcaggagaacttacgacaggt

SEQ ID NO: 242657 - DNA, 30 bp, Artificial Sequence
  Synthetic oligonucleotide
cggtcagacatattcgggacaccgacaggt

SEQ ID NO: 242658 - DNA, 30 bp, Artificial Sequence
  Synthetic oligonucleotide
ttgaaagcaactactaattaatcgacaggt

SEQ ID NO: 242659 - DNA, 30 bp, Artificial Sequence
  Synthetic oligonucleotide
tggaaccctagaggaataccctcgacaggt

SEQ ID NO: 242660 - DNA, 30 bp, Artificial Sequence
  Synthetic oligonucleotide
ggcatatcgcaaattatctaattgacaggt

SEQ ID NO: 242661 - DNA, 30 bp, Artificial Sequence
  Synthetic oligonucleotide
gtaattcactcccacccaattggtacaggt

SEQ ID NO: 242662 - DNA, 30 bp, Artificial Sequence
  Synthetic oligonucleotide
gcagtacaatgtgcgttcacgttaccaggt

SEQ ID NO: 242663 - DNA, 30 bp, Artificial Sequence
  Synthetic oligonucleotide
ggtctggtcaaagtgtggtagagtccaggt

SEQ ID NO: 242664 - DNA, 30 bp, Artificial Sequence
  Synthetic oligonucleotide
ggcgtgggttatccttggcattacgcaggt

SEQ ID NO: 242665 - DNA, 30 bp, Artificial Sequence
  Synthetic oligonucleotide
cgattgtcattagtgatcgagaccgcaggt

SEQ ID NO: 242666 - DNA, 30 bp, Artificial Sequence
  Synthetic oligonucleotide
ttggattatctgtgggcaccgaactcaggt

SEQ ID NO: 242667 - DNA, 30 bp, Artificial Sequence
  Synthetic oligonucleotide
ggccggggggaaatatttatagcctcaggt

SEQ ID NO: 242668 - DNA, 30 bp, Artificial Sequence
  Synthetic oligonucleotide
ctcgtgcacggggatatctgcgcctcaggt

SEQ ID NO: 242669 - DNA, 30 bp, Artificial Sequence
  Synthetic oligonucleotide
tgacaagacgacattccaaggtcctcaggt

SEQ ID NO: 242670 - DNA, 30 bp, Artificial Sequence
  Synthetic oligonucleotide
gtaccatagtgcagaacgtcgagctcaggt

SEQ ID NO: 242671 - DNA, 30 bp, Artificial Sequence
  Synthetic oligonucleotide
actaggagtcataaaagcattaggtcaggt

SEQ ID NO: 242672 - DNA, 30 bp, Artificial Sequence
  Synthetic oligonucleotide
ggtggcagttatcgttgagttaggtcaggt

SEQ ID NO: 242673 - DNA, 30 bp, Artificial Sequence
  Synthetic oligonucleotide
agcatcttggcggacctctaggcaagaggt

SEQ ID NO: 242674 - DNA, 30 bp, Artificial Sequence
  Synthetic oligonucleotide
gctatcactgcgtgcccagggtagagaggt

SEQ ID NO: 242675 - DNA, 30 bp, Artificial Sequence
  Synthetic oligonucleotide
gtcggttcaccacggttgggtgtgagaggt

SEQ ID NO: 242676 - DNA, 30 bp, Artificial Sequence
  Synthetic oligonucleotide
ccgtgtaggtagatgggagtggttagaggt

SEQ ID NO: 242677 - DNA, 29 bp, Artificial Sequence
  Synthetic oligonucleotide
ccactgagcctcaagcattcaaacgaggt

SEQ ID NO: 242678 - DNA, 30 bp, Artificial Sequence
  Synthetic oligonucleotide
gaactttatagtgacaagcccccacgaggt

SEQ ID NO: 242679 - DNA, 30 bp, Artificial Sequence
  Synthetic oligonucleotide
taaacagccgtgggtggaaacctacgaggt

SEQ ID NO: 242680 - DNA, 30 bp, Artificial Sequence
  Synthetic oligonucleotide
ggcgaggcagacaactccctggcccgaggt

SEQ ID NO: 242681 - DNA, 30 bp, Artificial Sequence
  Synthetic oligonucleotide
gatgcgatagagttcaatgtattccgaggt

SEQ ID NO: 242682 - DNA, 30 bp, Artificial Sequence
  Synthetic oligonucleotide
ggaatattgggacacttcaatgggcgaggt

SEQ ID NO: 242683 - DNA, 30 bp, Artificial Sequence
  Synthetic oligonucleotide
ttcggacatttgtatacgaaattgcgaggt

SEQ ID NO: 242684 - DNA, 30 bp, Artificial Sequence
  Synthetic oligonucleotide
atgttcacagtcacttgtgcggacggaggt

SEQ ID NO: 242685 - DNA, 30 bp, Artificial Sequence
  Synthetic oligonucleotide
agaaggggctgctgttgatcacgcggaggt

SEQ ID NO: 242686 - DNA, 30 bp, Artificial Sequence
  Synthetic oligonucleotide
ttagtcaatgcagggtggtctgcgggaggt

SEQ ID NO: 242687 - DNA, 30 bp, Artificial Sequence
  Synthetic oligonucleotide
cctgattgtttaactaggtcttgtggaggt

SEQ ID NO: 242688 - DNA, 30 bp, Artificial Sequence
  Synthetic oligonucleotide
taccatcgagacaattcagcttgctgaggt

SEQ ID NO: 242689 - DNA, 30 bp, Artificial Sequence
  Synthetic oligonucleotide
atatggcttaggtttccgattgacataggt

SEQ ID NO: 242690 - DNA, 30 bp, Artificial Sequence
  Synthetic oligonucleotide
cacaagcaatttgcaatcgataagataggt

SEQ ID NO: 242691 - DNA, 30 bp, Artificial Sequence
  Synthetic oligonucleotide
cgttaccccagactgccgggatagataggt

SEQ ID NO: 242692 - DNA, 30 bp, Artificial Sequence
  Synthetic oligonucleotide
tcacacggctagagctagggtatgataggt

SEQ ID NO: 242693 - DNA, 30 bp, Artificial Sequence
  Synthetic oligonucleotide
acttatgtacagatatacccagtgataggt

SEQ ID NO: 242694 - DNA, 30 bp, Artificial Sequence
  Synthetic oligonucleotide
tttgttgaggaggaggagatgtatataggt

SEQ ID NO: 242695 - DNA, 30 bp, Artificial Sequence
  Synthetic oligonucleotide
tcgttccagacgggtagaatcactataggt

SEQ ID NO: 242696 - DNA, 30 bp, Artificial Sequence
  Synthetic oligonucleotide
cccagcataggtcggaaatctgttataggt

SEQ ID NO: 242697 - DNA, 30 bp, Artificial Sequence
  Synthetic oligonucleotide
accaagtgctagacatagtggaaactaggt

SEQ ID NO: 242698 - DNA, 30 bp, Artificial Sequence
  Synthetic oligonucleotide
cgcgattcgcttggagagacgggactaggt

SEQ ID NO: 242699 - DNA, 30 bp, Artificial Sequence
  Synthetic oligonucleotide
ctatgggcagcaggactcatgatactaggt

SEQ ID NO: 242700 - DNA, 30 bp, Artificial Sequence
  Synthetic oligonucleotide
tgtgtaccctggatctcctaatggctaggt

SEQ ID NO: 242701 - DNA, 30 bp, Artificial Sequence
  Synthetic oligonucleotide
accgagtttgggggaggattgtggctaggt

SEQ ID NO: 242702 - DNA, 30 bp, Artificial Sequence
  Synthetic oligonucleotide
aacggcttgagaaaagttggttggctaggt

SEQ ID NO: 242703 - DNA, 30 bp, Artificial Sequence
  Synthetic oligonucleotide
tggcagcgataagtccgcttagctctaggt

SEQ ID NO: 242704 - DNA, 30 bp, Artificial Sequence
  Synthetic oligonucleotide
gtttgaatccaactctaaacacgcgtaggt

SEQ ID NO: 242705 - DNA, 30 bp, Artificial Sequence
  Synthetic oligonucleotide
atggccctctcatcgagcgggtatgtaggt

SEQ ID NO: 242706 - DNA, 30 bp, Artificial Sequence
  Synthetic oligonucleotide
gacgaaaagatggtaagtgcgtgtgtaggt

SEQ ID NO: 242707 - DNA, 30 bp, Artificial Sequence
  Synthetic oligonucleotide
ttggcatcagcgggcatggagtaattaggt

SEQ ID NO: 242708 - DNA, 30 bp, Artificial Sequence
  Synthetic oligonucleotide
ggatcagagtaccgatagataagattaggt

SEQ ID NO: 242709 - DNA, 30 bp, Artificial Sequence
  Synthetic oligonucleotide
aattagggtagtaagagggaaggattaggt

SEQ ID NO: 242710 - DNA, 30 bp, Artificial Sequence
  Synthetic oligonucleotide
ggggctacattatatcacgaaatattaggt

SEQ ID NO: 242711 - DNA, 30 bp, Artificial Sequence
  Synthetic oligonucleotide
gtatcgcgctagggggccgaaatattaggt

SEQ ID NO: 242712 - DNA, 30 bp, Artificial Sequence
  Synthetic oligonucleotide
tctcttaaaactagcagaagaaggttaggt

SEQ ID NO: 242713 - DNA, 30 bp, Artificial Sequence
  Synthetic oligonucleotide
tataccggagttgaaagaggtaggttaggt

SEQ ID NO: 242714 - DNA, 30 bp, Artificial Sequence
  Synthetic oligonucleotide
gctttaaagataatgaagccatcgaacggt

SEQ ID NO: 242715 - DNA, 30 bp, Artificial Sequence
  Synthetic oligonucleotide
ggggtataaaggcatgaacagaataacggt

SEQ ID NO: 242716 - DNA, 30 bp, Artificial Sequence
  Synthetic oligonucleotide
agttcaacaaggttatatttacgtaacggt

SEQ ID NO: 242717 - DNA, 30 bp, Artificial Sequence
  Synthetic oligonucleotide
tgaccataatacgaaggtacataacacggt

SEQ ID NO: 242718 - DNA, 30 bp, Artificial Sequence
  Synthetic oligonucleotide
taaagttctaatgcgtgcgaactgcacggt

SEQ ID NO: 242719 - DNA, 30 bp, Artificial Sequence
  Synthetic oligonucleotide
gagatgagaaaaactgttatcaatcacggt

SEQ ID NO: 242720 - DNA, 31 bp, Artificial Sequence
  Synthetic oligonucleotide
ggagaaaatgattttatatttgcatcacggt

SEQ ID NO: 242721 - DNA, 30 bp, Artificial Sequence
  Synthetic oligonucleotide
ttctcatctaccctaccttgcgctcacggt

SEQ ID NO: 242722 - DNA, 30 bp, Artificial Sequence
  Synthetic oligonucleotide
cgtctttatgtcatataagaccgagacggt

SEQ ID NO: 242723 - DNA, 30 bp, Artificial Sequence
  Synthetic oligonucleotide
tgaacgtacaagtggatgattggggacggt

SEQ ID NO: 242724 - DNA, 30 bp, Artificial Sequence
  Synthetic oligonucleotide
ttctcagttcggtaaaggcatgctgacggt

SEQ ID NO: 242725 - DNA, 30 bp, Artificial Sequence
  Synthetic oligonucleotide
ctgataacacgaggacgtgcctgtgacggt

SEQ ID NO: 242726 - DNA, 30 bp, Artificial Sequence
  Synthetic oligonucleotide
gtcagcctaaatgttggtgacccatacggt

SEQ ID NO: 242727 - DNA, 30 bp, Artificial Sequence
  Synthetic oligonucleotide
agctaggtgcaatgcggaaagctctacggt

SEQ ID NO: 242728 - DNA, 30 bp, Artificial Sequence
  Synthetic oligonucleotide
taggcataactaatatttataccttacggt

SEQ ID NO: 242729 - DNA, 30 bp, Artificial Sequence
  Synthetic oligonucleotide
tgcaactttactgggctcaatagaaccggt

SEQ ID NO: 242730 - DNA, 30 bp, Artificial Sequence
  Synthetic oligonucleotide
cgttgaggaggagtgtgaccgaggaccggt

SEQ ID NO: 242731 - DNA, 30 bp, Artificial Sequence
  Synthetic oligonucleotide
agtgcaagacttggcggattgaggaccggt

SEQ ID NO: 242732 - DNA, 30 bp, Artificial Sequence
  Synthetic oligonucleotide
ccacagcaaaggttattagtcagacccggt

SEQ ID NO: 242733 - DNA, 30 bp, Artificial Sequence
  Synthetic oligonucleotide
cgctgatggagaaattttggtaggcccggt

SEQ ID NO: 242734 - DNA, 30 bp, Artificial Sequence
  Synthetic oligonucleotide
accaacaacaaaattacggtctatcccggt

SEQ ID NO: 242735 - DNA, 30 bp, Artificial Sequence
  Synthetic oligonucleotide
cgcaatgcagaggtgagaaacaccgccggt

SEQ ID NO: 242736 - DNA, 29 bp, Artificial Sequence
  Synthetic oligonucleotide
ggctcagcagccaccccagactcgccggt

SEQ ID NO: 242737 - DNA, 30 bp, Artificial Sequence
  Synthetic oligonucleotide
ggaccacatgggaatttagggcaggccggt

SEQ ID NO: 242738 - DNA, 30 bp, Artificial Sequence
  Synthetic oligonucleotide
tgagtgatgtgatgggataaccgtgccggt

SEQ ID NO: 242739 - DNA, 30 bp, Artificial Sequence
  Synthetic oligonucleotide
agtggatggatccgagtcggtgggtccggt

SEQ ID NO: 242740 - DNA, 30 bp, Artificial Sequence
  Synthetic oligonucleotide
ggggagcgctagaagttctacgcttccggt

SEQ ID NO: 242741 - DNA, 30 bp, Artificial Sequence
  Synthetic oligonucleotide
cgaaaatgacgcgcgaatttactaagcggt

SEQ ID NO: 242742 - DNA, 30 bp, Artificial Sequence
  Synthetic oligonucleotide
cgacatcccggtaaagcgggtatcagcggt

SEQ ID NO: 242743 - DNA, 30 bp, Artificial Sequence
  Synthetic oligonucleotide
acaagactgcgacgaggtaacaatagcggt

SEQ ID NO: 242744 - DNA, 30 bp, Artificial Sequence
  Synthetic oligonucleotide
ggcggaatcactctctaaagggaccgcggt

SEQ ID NO: 242745 - DNA, 30 bp, Artificial Sequence
  Synthetic oligonucleotide
tgaagacgtaagattggaaccacccgcggt

SEQ ID NO: 242746 - DNA, 30 bp, Artificial Sequence
  Synthetic oligonucleotide
acgtaaaccgaacggggagcttctcgcggt

SEQ ID NO: 242747 - DNA, 30 bp, Artificial Sequence
  Synthetic oligonucleotide
gtaaagtcgatccgtttggcaggtcgcggt

SEQ ID NO: 242748 - DNA, 30 bp, Artificial Sequence
  Synthetic oligonucleotide
cgggaaggacgggactggggtagaggcggt

SEQ ID NO: 242749 - DNA, 30 bp, Artificial Sequence
  Synthetic oligonucleotide
gctagcagaccctacaaccgaggaggcggt

SEQ ID NO: 242750 - DNA, 30 bp, Artificial Sequence
  Synthetic oligonucleotide
acaggatttgcggttatgcagataggcggt

SEQ ID NO: 242751 - DNA, 30 bp, Artificial Sequence
  Synthetic oligonucleotide
gggatgaagtaattcttagggactggcggt

SEQ ID NO: 242752 - DNA, 30 bp, Artificial Sequence
  Synthetic oligonucleotide
gacgtgcgtagaaaataggggactggcggt

SEQ ID NO: 242753 - DNA, 30 bp, Artificial Sequence
  Synthetic oligonucleotide
gacgtgggttatacagagagtattggcggt

SEQ ID NO: 242754 - DNA, 30 bp, Artificial Sequence
  Synthetic oligonucleotide
gtacaccaggatcatcataaggactgcggt

SEQ ID NO: 242755 - DNA, 30 bp, Artificial Sequence
  Synthetic oligonucleotide
caacgtggggggggtgatatgtagtgcggt

SEQ ID NO: 242756 - DNA, 30 bp, Artificial Sequence
  Synthetic oligonucleotide
ttctagatagtcttgcgtaattagtgcggt

SEQ ID NO: 242757 - DNA, 30 bp, Artificial Sequence
  Synthetic oligonucleotide
aaaggttgaaccgtttcatttgggtgcggt

SEQ ID NO: 242758 - DNA, 30 bp, Artificial Sequence
  Synthetic oligonucleotide
acaaggccgtgattggggagcggaatcggt

SEQ ID NO: 242759 - DNA, 30 bp, Artificial Sequence
  Synthetic oligonucleotide
gatcggttatctgccataggtaccatcggt

SEQ ID NO: 242760 - DNA, 30 bp, Artificial Sequence
  Synthetic oligonucleotide
tcacaactgcccagagcggctggcatcggt

SEQ ID NO: 242761 - DNA, 30 bp, Artificial Sequence
  Synthetic oligonucleotide
gtggttaagctcaattttcgctagatcggt

SEQ ID NO: 242762 - DNA, 30 bp, Artificial Sequence
  Synthetic oligonucleotide
ggagatatagaccagcactaacaactcggt

SEQ ID NO: 242763 - DNA, 30 bp, Artificial Sequence
  Synthetic oligonucleotide
gcgactgtttggctagacaagggcctcggt

SEQ ID NO: 242764 - DNA, 30 bp, Artificial Sequence
  Synthetic oligonucleotide
tcaagctggtcgatattactctgtctcggt

SEQ ID NO: 242765 - DNA, 29 bp, Artificial Sequence
  Synthetic oligonucleotide
tcaggcgtgtcgctgtattggaagtcggt

SEQ ID NO: 242766 - DNA, 30 bp, Artificial Sequence
  Synthetic oligonucleotide
taaacgcgcatttatactcgcacagtcggt

SEQ ID NO: 242767 - DNA, 30 bp, Artificial Sequence
  Synthetic oligonucleotide
agtagaacaggtgctagcagaacggtcggt

SEQ ID NO: 242768 - DNA, 30 bp, Artificial Sequence
  Synthetic oligonucleotide
agttggaacatcctaatcatggcggtcggt

SEQ ID NO: 242769 - DNA, 30 bp, Artificial Sequence
  Synthetic oligonucleotide
gacatgatacgcttgcggagcgtggtcggt

SEQ ID NO: 242770 - DNA, 30 bp, Artificial Sequence
  Synthetic oligonucleotide
cctccgaaatctggctagtcactcttcggt

SEQ ID NO: 242771 - DNA, 30 bp, Artificial Sequence
  Synthetic oligonucleotide
cccatttcatgtgacgtaacattcttcggt

SEQ ID NO: 242772 - DNA, 30 bp, Artificial Sequence
  Synthetic oligonucleotide
aaagggctaagcagtacatgtttcttcggt

SEQ ID NO: 242773 - DNA, 30 bp, Artificial Sequence
  Synthetic oligonucleotide
agggccttaggtgtaagcttcactttcggt

SEQ ID NO: 242774 - DNA, 30 bp, Artificial Sequence
  Synthetic oligonucleotide
gctacaggcaagaaagtgtacgaaaagggt

SEQ ID NO: 242775 - DNA, 30 bp, Artificial Sequence
  Synthetic oligonucleotide
tcggacggctgttgggctggagacaagggt

SEQ ID NO: 242776 - DNA, 30 bp, Artificial Sequence
  Synthetic oligonucleotide
aatactagcggtgcgggttgaggcaagggt

SEQ ID NO: 242777 - DNA, 30 bp, Artificial Sequence
  Synthetic oligonucleotide
gaacatactcgatcttaacggatcaagggt

SEQ ID NO: 242778 - DNA, 30 bp, Artificial Sequence
  Synthetic oligonucleotide
tattgtaccagtccactttggggtaagggt

SEQ ID NO: 242779 - DNA, 30 bp, Artificial Sequence
  Synthetic oligonucleotide
tagtgctacatttagtcgctgtgtaagggt

SEQ ID NO: 242780 - DNA, 30 bp, Artificial Sequence
  Synthetic oligonucleotide
atgagcattagcattatcgcctgacagggt

SEQ ID NO: 242781 - DNA, 30 bp, Artificial Sequence
  Synthetic oligonucleotide
ctggcaataggtaagtataattgacagggt

SEQ ID NO: 242782 - DNA, 30 bp, Artificial Sequence
  Synthetic oligonucleotide
gagtactgctaaatcgtaaaagtgcagggt

SEQ ID NO: 242783 - DNA, 30 bp, Artificial Sequence
  Synthetic oligonucleotide
gcagcatgcggttaaaggacgcatcagggt

SEQ ID NO: 242784 - DNA, 30 bp, Artificial Sequence
  Synthetic oligonucleotide
tacacaacattaaggtcagacggtcagggt

SEQ ID NO: 242785 - DNA, 30 bp, Artificial Sequence
  Synthetic oligonucleotide
gcggtgctaaggtaggaaccgaaagagggt

SEQ ID NO: 242786 - DNA, 30 bp, Artificial Sequence
  Synthetic oligonucleotide
atgtgattgtgttgagtccgatacgagggt

SEQ ID NO: 242787 - DNA, 30 bp, Artificial Sequence
  Synthetic oligonucleotide
ataaagtggctctcctttaggcaggagggt

SEQ ID NO: 242788 - DNA, 30 bp, Artificial Sequence
  Synthetic oligonucleotide
atgttcatatcattgaccttaatggagggt

SEQ ID NO: 242789 - DNA, 30 bp, Artificial Sequence
  Synthetic oligonucleotide
gagtgctaaggccaaaagggcaaatagggt

SEQ ID NO: 242790 - DNA, 30 bp, Artificial Sequence
  Synthetic oligonucleotide
tcgggcaaacttactcatataatatagggt

SEQ ID NO: 242791 - DNA, 30 bp, Artificial Sequence
  Synthetic oligonucleotide
aagtgtaggagacgcggtcgaaactagggt

SEQ ID NO: 242792 - DNA, 30 bp, Artificial Sequence
  Synthetic oligonucleotide
tggcgtggtctgttcagacacaactagggt

SEQ ID NO: 242793 - DNA, 30 bp, Artificial Sequence
  Synthetic oligonucleotide
gacctcctagggatttgcccccagtagggt

SEQ ID NO: 242794 - DNA, 30 bp, Artificial Sequence
  Synthetic oligonucleotide
acagagtattgcctgttcctggcgtagggt

SEQ ID NO: 242795 - DNA, 30 bp, Artificial Sequence
  Synthetic oligonucleotide
aacggggccccctgttgttgatattagggt

SEQ ID NO: 242796 - DNA, 30 bp, Artificial Sequence
  Synthetic oligonucleotide
agcctcaagagtctttctcgatcttagggt

SEQ ID NO: 242797 - DNA, 30 bp, Artificial Sequence
  Synthetic oligonucleotide
tctgttggtgctccgtctcaaaaaacgggt

SEQ ID NO: 242798 - DNA, 30 bp, Artificial Sequence
  Synthetic oligonucleotide
ctgcctatctccattgctgcggaaacgggt

SEQ ID NO: 242799 - DNA, 30 bp, Artificial Sequence
  Synthetic oligonucleotide
cgcgggctacaaagcactgctgcaacgggt

SEQ ID NO: 242800 - DNA, 30 bp, Artificial Sequence
  Synthetic oligonucleotide
aatgacgataagaagcgccggggaacgggt

SEQ ID NO: 242801 - DNA, 30 bp, Artificial Sequence
  Synthetic oligonucleotide
ttaactgagctagtgcgacagtacacgggt

SEQ ID NO: 242802 - DNA, 30 bp, Artificial Sequence
  Synthetic oligonucleotide
ggaaataaatcggcggcacattcgacgggt

SEQ ID NO: 242803 - DNA, 30 bp, Artificial Sequence
  Synthetic oligonucleotide
aggtcccctcacggtaaatgcaggacgggt

SEQ ID NO: 242804 - DNA, 30 bp, Artificial Sequence
  Synthetic oligonucleotide
ggttcgttataaggtcagaagagtacgggt

SEQ ID NO: 242805 - DNA, 30 bp, Artificial Sequence
  Synthetic oligonucleotide
atcaaggcgccagtcgttcaatgcccgggt

SEQ ID NO: 242806 - DNA, 30 bp, Artificial Sequence
  Synthetic oligonucleotide
cgccattctatcgactgcgcactgccgggt

SEQ ID NO: 242807 - DNA, 30 bp, Artificial Sequence
  Synthetic oligonucleotide
gacataggatctgtacacaagaatccgggt

SEQ ID NO: 242808 - DNA, 30 bp, Artificial Sequence
  Synthetic oligonucleotide
atttggtgacaagcacgaacaattccgggt

SEQ ID NO: 242809 - DNA, 30 bp, Artificial Sequence
  Synthetic oligonucleotide
tgggttgattcacatggttctagcgcgggt

SEQ ID NO: 242810 - DNA, 30 bp, Artificial Sequence
  Synthetic oligonucleotide
ccaagaggtgaggccgacagtctcgcgggt

SEQ ID NO: 242811 - DNA, 30 bp, Artificial Sequence
  Synthetic oligonucleotide
actcgcgggtcgcgcggcgacatggcgggt

SEQ ID NO: 242812 - DNA, 30 bp, Artificial Sequence
  Synthetic oligonucleotide
agggactacacgcggcagtgaacatcgggt

SEQ ID NO: 242813 - DNA, 30 bp, Artificial Sequence
  Synthetic oligonucleotide
taactacggggtggcccaggggtatcgggt

SEQ ID NO: 242814 - DNA, 30 bp, Artificial Sequence
  Synthetic oligonucleotide
gacgccactcctgacggcgcgaagtcgggt

SEQ ID NO: 242815 - DNA, 30 bp, Artificial Sequence
  Synthetic oligonucleotide
cgagccgcaagcatgggtcgatagtcgggt

SEQ ID NO: 242816 - DNA, 30 bp, Artificial Sequence
  Synthetic oligonucleotide
atatcagaaagcgaggcagtgcgttcgggt

SEQ ID NO: 242817 - DNA, 30 bp, Artificial Sequence
  Synthetic oligonucleotide
tccaccgaggtgtttcaacgtatttcgggt

SEQ ID NO: 242818 - DNA, 30 bp, Artificial Sequence
  Synthetic oligonucleotide
ccaggtttggacgttaagctcgcaaggggt

SEQ ID NO: 242819 - DNA, 30 bp, Artificial Sequence
  Synthetic oligonucleotide
gggttgggcccaccgctaggctgaaggggt

SEQ ID NO: 242820 - DNA, 30 bp, Artificial Sequence
  Synthetic oligonucleotide
cctctaccacggcgatgtctgcccaggggt

SEQ ID NO: 242821 - DNA, 30 bp, Artificial Sequence
  Synthetic oligonucleotide
agttcgtccgtggcctgaatatccaggggt

SEQ ID NO: 242822 - DNA, 30 bp, Artificial Sequence
  Synthetic oligonucleotide
cgccatcctgcgtacattacctctaggggt

SEQ ID NO: 242823 - DNA, 30 bp, Artificial Sequence
  Synthetic oligonucleotide
cgcttgttaggggttccggaagaagggggt

SEQ ID NO: 242824 - DNA, 30 bp, Artificial Sequence
  Synthetic oligonucleotide
caaaccactaccgatcgacttagcgggggt

SEQ ID NO: 242825 - DNA, 30 bp, Artificial Sequence
  Synthetic oligonucleotide
gtattctggaaccctccagtaattgggggt

SEQ ID NO: 242826 - DNA, 30 bp, Artificial Sequence
  Synthetic oligonucleotide
tgaaggggattgcggggcgtataatggggt

SEQ ID NO: 242827 - DNA, 30 bp, Artificial Sequence
  Synthetic oligonucleotide
gtacagggtctgggaaaccagcgatggggt

SEQ ID NO: 242828 - DNA, 30 bp, Artificial Sequence
  Synthetic oligonucleotide
agcaatccgacgggatacttacggtggggt

SEQ ID NO: 242829 - DNA, 30 bp, Artificial Sequence
  Synthetic oligonucleotide
attaccaatcctgcagcgaacgcttggggt

SEQ ID NO: 242830 - DNA, 30 bp, Artificial Sequence
  Synthetic oligonucleotide
caagcacggacgcttgcgcggaaaatgggt

SEQ ID NO: 242831 - DNA, 30 bp, Artificial Sequence
  Synthetic oligonucleotide
tgaagcaaaggcagctgtataggaatgggt

SEQ ID NO: 242832 - DNA, 30 bp, Artificial Sequence
  Synthetic oligonucleotide
ctgaagccacgaccttgacagggaatgggt

SEQ ID NO: 242833 - DNA, 30 bp, Artificial Sequence
  Synthetic oligonucleotide
ttagggcgtctaaagcccgcatacatgggt

SEQ ID NO: 242834 - DNA, 31 bp, Artificial Sequence
  Synthetic oligonucleotide
ccgtccgttcggcaggttggtctagatgggt

SEQ ID NO: 242835 - DNA, 30 bp, Artificial Sequence
  Synthetic oligonucleotide
cttacgtaagatgtagcggtcgggatgggt

SEQ ID NO: 242836 - DNA, 30 bp, Artificial Sequence
  Synthetic oligonucleotide
tgttgtagttagagagccccaactatgggt

SEQ ID NO: 242837 - DNA, 30 bp, Artificial Sequence
  Synthetic oligonucleotide
cgtagattaacggataggtgcgttatgggt

SEQ ID NO: 242838 - DNA, 30 bp, Artificial Sequence
  Synthetic oligonucleotide
cggattaactatcatataggaaacctgggt

SEQ ID NO: 242839 - DNA, 30 bp, Artificial Sequence
  Synthetic oligonucleotide
ttcatcactgttcccaacgcgaggctgggt

SEQ ID NO: 242840 - DNA, 30 bp, Artificial Sequence
  Synthetic oligonucleotide
cgctaccacgagctcgacgtatatctgggt

SEQ ID NO: 242841 - DNA, 30 bp, Artificial Sequence
  Synthetic oligonucleotide
cgatcaatcggataaagttggcctctgggt

SEQ ID NO: 242842 - DNA, 30 bp, Artificial Sequence
  Synthetic oligonucleotide
gacacttaccacggcgggacaagagtgggt

SEQ ID NO: 242843 - DNA, 30 bp, Artificial Sequence
  Synthetic oligonucleotide
agaggttttggtgtgcaacgaggggtgggt

SEQ ID NO: 242844 - DNA, 30 bp, Artificial Sequence
  Synthetic oligonucleotide
tagaccacaaagaagataaggcttgtgggt

SEQ ID NO: 242845 - DNA, 30 bp, Artificial Sequence
  Synthetic oligonucleotide
accaaggagtaccaaggccgagttgtgggt

SEQ ID NO: 242846 - DNA, 30 bp, Artificial Sequence
  Synthetic oligonucleotide
gcggtcattggattcaccgggggattgggt

SEQ ID NO: 242847 - DNA, 30 bp, Artificial Sequence
  Synthetic oligonucleotide
atcattcgtggctcggaataatcgttgggt

SEQ ID NO: 242848 - DNA, 30 bp, Artificial Sequence
  Synthetic oligonucleotide
tgtaggagtactgatccatgacggttgggt

SEQ ID NO: 242849 - DNA, 30 bp, Artificial Sequence
  Synthetic oligonucleotide
tgggagtatgccaatgcgcgtatgttgggt

SEQ ID NO: 242850 - DNA, 30 bp, Artificial Sequence
  Synthetic oligonucleotide
gaaacagatgacattcctgggtatttgggt

SEQ ID NO: 242851 - DNA, 30 bp, Artificial Sequence
  Synthetic oligonucleotide
tgtagtgacaggaggctagtttttttgggt

SEQ ID NO: 242852 - DNA, 30 bp, Artificial Sequence
  Synthetic oligonucleotide
tcccagacgaagagccaagtcagaaatggt

SEQ ID NO: 242853 - DNA, 30 bp, Artificial Sequence
  Synthetic oligonucleotide
aagaaactagtgttagtaggttgaaatggt

SEQ ID NO: 242854 - DNA, 30 bp, Artificial Sequence
  Synthetic oligonucleotide
caataattaagcaagactttaataaatggt

SEQ ID NO: 242855 - DNA, 30 bp, Artificial Sequence
  Synthetic oligonucleotide
cacagctctcgagctggaaacctaaatggt

SEQ ID NO: 242856 - DNA, 30 bp, Artificial Sequence
  Synthetic oligonucleotide
ggtgctgaggcacctatgcggctaaatggt

SEQ ID NO: 242857 - DNA, 30 bp, Artificial Sequence
  Synthetic oligonucleotide
aggcgcattggtcattacgaaatcaatggt

SEQ ID NO: 242858 - DNA, 30 bp, Artificial Sequence
  Synthetic oligonucleotide
taggatcgagctggttggcatatcaatggt

SEQ ID NO: 242859 - DNA, 30 bp, Artificial Sequence
  Synthetic oligonucleotide
agtcttccaagagcggatttagttaatggt

SEQ ID NO: 242860 - DNA, 30 bp, Artificial Sequence
  Synthetic oligonucleotide
tgggatccttgatcagctgatccacatggt

SEQ ID NO: 242861 - DNA, 30 bp, Artificial Sequence
  Synthetic oligonucleotide
ccattctaaaatggggggacagcacatggt

SEQ ID NO: 242862 - DNA, 30 bp, Artificial Sequence
  Synthetic oligonucleotide
attaccagtgtcgaacaactgagacatggt

SEQ ID NO: 242863 - DNA, 30 bp, Artificial Sequence
  Synthetic oligonucleotide
gggtcaaccttcgagatccgtggacatggt

SEQ ID NO: 242864 - DNA, 30 bp, Artificial Sequence
  Synthetic oligonucleotide
acaacgttttcaagtccgggcatccatggt

SEQ ID NO: 242865 - DNA, 30 bp, Artificial Sequence
  Synthetic oligonucleotide
ggtatatctaagggcaatctaacgcatggt

SEQ ID NO: 242866 - DNA, 30 bp, Artificial Sequence
  Synthetic oligonucleotide
tcagggctgggacaacatgcgagtcatggt

SEQ ID NO: 242867 - DNA, 30 bp, Artificial Sequence
  Synthetic oligonucleotide
taggataggcgatggcccttatgagatggt

SEQ ID NO: 242868 - DNA, 30 bp, Artificial Sequence
  Synthetic oligonucleotide
gacagtccgtcggtgtaagtgggcgatggt

SEQ ID NO: 242869 - DNA, 30 bp, Artificial Sequence
  Synthetic oligonucleotide
atgggtagcagcttataatacaatgatggt

SEQ ID NO: 242870 - DNA, 30 bp, Artificial Sequence
  Synthetic oligonucleotide
gttcaagcctgcaaggcatgaattgatggt

SEQ ID NO: 242871 - DNA, 30 bp, Artificial Sequence
  Synthetic oligonucleotide
gaagtatagtttggaaactagcgatatggt

SEQ ID NO: 242872 - DNA, 30 bp, Artificial Sequence
  Synthetic oligonucleotide
ggtaatctgtcggatcaaggtttatatggt

SEQ ID NO: 242873 - DNA, 30 bp, Artificial Sequence
  Synthetic oligonucleotide
tgcggattggacctcacgtttccgtatggt

SEQ ID NO: 242874 - DNA, 30 bp, Artificial Sequence
  Synthetic oligonucleotide
ttcaagtgatgcgccgaggcgggaactggt

SEQ ID NO: 242875 - DNA, 30 bp, Artificial Sequence
  Synthetic oligonucleotide
caaaatctggatgacacggacgagactggt

SEQ ID NO: 242876 - DNA, 30 bp, Artificial Sequence
  Synthetic oligonucleotide
aggagtacggcatatggcaatgggactggt

SEQ ID NO: 242877 - DNA, 30 bp, Artificial Sequence
  Synthetic oligonucleotide
gcttcgcgtccaaaccgtatggtgactggt

SEQ ID NO: 242878 - DNA, 30 bp, Artificial Sequence
  Synthetic oligonucleotide
agaggtagtagtatcagaggaatacctggt

SEQ ID NO: 242879 - DNA, 30 bp, Artificial Sequence
  Synthetic oligonucleotide
gcggttagtcagaaatccctatgcgctggt

SEQ ID NO: 242880 - DNA, 30 bp, Artificial Sequence
  Synthetic oligonucleotide
atgacctacttgccgagtacctcggctggt

SEQ ID NO: 242881 - DNA, 30 bp, Artificial Sequence
  Synthetic oligonucleotide
tagttaaaaggaacattcgaaagggctggt

SEQ ID NO: 242882 - DNA, 30 bp, Artificial Sequence
  Synthetic oligonucleotide
ggggctgcacagatcaagacatatgctggt

SEQ ID NO: 242883 - DNA, 30 bp, Artificial Sequence
  Synthetic oligonucleotide
acataagttaaggactcagtctatgctggt

SEQ ID NO: 242884 - DNA, 30 bp, Artificial Sequence
  Synthetic oligonucleotide
tggggggccctatcagaaagaggtgctggt

SEQ ID NO: 242885 - DNA, 30 bp, Artificial Sequence
  Synthetic oligonucleotide
ctgccagtcacgtattgaagtggatctggt

SEQ ID NO: 242886 - DNA, 30 bp, Artificial Sequence
  Synthetic oligonucleotide
gacgatccgtggcgctaatcgctatctggt

SEQ ID NO: 242887 - DNA, 30 bp, Artificial Sequence
  Synthetic oligonucleotide
ggagaaaccggcgggaacaacaactctggt

SEQ ID NO: 242888 - DNA, 30 bp, Artificial Sequence
  Synthetic oligonucleotide
aacatggtaccagtgtttagctggtctggt

SEQ ID NO: 242889 - DNA, 30 bp, Artificial Sequence
  Synthetic oligonucleotide
atgatcgagtaggatccggctgtttctggt

SEQ ID NO: 242890 - DNA, 30 bp, Artificial Sequence
  Synthetic oligonucleotide
gaacgatcccgggtaacctcataaagtggt

SEQ ID NO: 242891 - DNA, 30 bp, Artificial Sequence
  Synthetic oligonucleotide
ttaggtgatcttagctggagcccgagtggt

SEQ ID NO: 242892 - DNA, 30 bp, Artificial Sequence
  Synthetic oligonucleotide
tccgttaattgatcgggcacaattagtggt

SEQ ID NO: 242893 - DNA, 30 bp, Artificial Sequence
  Synthetic oligonucleotide
ctgaaaaaaacattactaatcttacgtggt

SEQ ID NO: 242894 - DNA, 30 bp, Artificial Sequence
  Synthetic oligonucleotide
cacagtaaaggggtattttggacccgtggt

SEQ ID NO: 242895 - DNA, 30 bp, Artificial Sequence
  Synthetic oligonucleotide
acatttgcgtagttccaatcggtccgtggt

SEQ ID NO: 242896 - DNA, 30 bp, Artificial Sequence
  Synthetic oligonucleotide
agccaaggtccgcccactttgctgcgtggt

SEQ ID NO: 242897 - DNA, 30 bp, Artificial Sequence
  Synthetic oligonucleotide
ggtccagtacgagcctaggatgatcgtggt

SEQ ID NO: 242898 - DNA, 30 bp, Artificial Sequence
  Synthetic oligonucleotide
tgctaggtgtacgccatcgatcttcgtggt

SEQ ID NO: 242899 - DNA, 30 bp, Artificial Sequence
  Synthetic oligonucleotide
gtaaagcaacataggtttacctaaggtggt

SEQ ID NO: 242900 - DNA, 30 bp, Artificial Sequence
  Synthetic oligonucleotide
taatggtagatgtttcttgcaagaggtggt

SEQ ID NO: 242901 - DNA, 30 bp, Artificial Sequence
  Synthetic oligonucleotide
tcagggtaggagcgaatctctgacggtggt

SEQ ID NO: 242902 - DNA, 30 bp, Artificial Sequence
  Synthetic oligonucleotide
gatcggagaaaattattgtggttcggtggt

SEQ ID NO: 242903 - DNA, 30 bp, Artificial Sequence
  Synthetic oligonucleotide
ctacatagcggttagaaatattagggtggt

SEQ ID NO: 242904 - DNA, 30 bp, Artificial Sequence
  Synthetic oligonucleotide
gatgtgaacgtaatgacgtcttggggtggt

SEQ ID NO: 242905 - DNA, 30 bp, Artificial Sequence
  Synthetic oligonucleotide
ataggttaaccggtaacggtgatgggtggt

SEQ ID NO: 242906 - DNA, 30 bp, Artificial Sequence
  Synthetic oligonucleotide
tagctcgcttgttccatgcctatgggtggt

SEQ ID NO: 242907 - DNA, 30 bp, Artificial Sequence
  Synthetic oligonucleotide
ctctatccggaattcgataagtatggtggt

SEQ ID NO: 242908 - DNA, 30 bp, Artificial Sequence
  Synthetic oligonucleotide
gcaagacatagcgtgcaggccgctggtggt

SEQ ID NO: 242909 - DNA, 30 bp, Artificial Sequence
  Synthetic oligonucleotide
ccggtcgcaaccgttgatacggaatgtggt

SEQ ID NO: 242910 - DNA, 30 bp, Artificial Sequence
  Synthetic oligonucleotide
cagggttttatcgggaaaaggcgaattggt

SEQ ID NO: 242911 - DNA, 30 bp, Artificial Sequence
  Synthetic oligonucleotide
cgatggtgagcatccgcgggattaattggt

SEQ ID NO: 242912 - DNA, 30 bp, Artificial Sequence
  Synthetic oligonucleotide
gaacattgcaggatagggcgaaccattggt

SEQ ID NO: 242913 - DNA, 30 bp, Artificial Sequence
  Synthetic oligonucleotide
ctaccctggggtgtttccgttgatattggt

SEQ ID NO: 242914 - DNA, 30 bp, Artificial Sequence
  Synthetic oligonucleotide
ctgggagtctggtgaagttttagtattggt

SEQ ID NO: 242915 - DNA, 30 bp, Artificial Sequence
  Synthetic oligonucleotide
agataagagacttgaggattgcgtattggt

SEQ ID NO: 242916 - DNA, 30 bp, Artificial Sequence
  Synthetic oligonucleotide
gccaaaatacatatgaagattattcttggt

SEQ ID NO: 242917 - DNA, 30 bp, Artificial Sequence
  Synthetic oligonucleotide
cgataccgtcacagggttacaatagttggt

SEQ ID NO: 242918 - DNA, 30 bp, Artificial Sequence
  Synthetic oligonucleotide
gagagtgggccgcggattaaacgcgttggt

SEQ ID NO: 242919 - DNA, 30 bp, Artificial Sequence
  Synthetic oligonucleotide
cacgatacccgtttttcagtggcggttggt

SEQ ID NO: 242920 - DNA, 30 bp, Artificial Sequence
  Synthetic oligonucleotide
gggtagatgagagacacatggttggttggt

SEQ ID NO: 242921 - DNA, 30 bp, Artificial Sequence
  Synthetic oligonucleotide
tggtagcaagtaggcgtttattttgttggt

SEQ ID NO: 242922 - DNA, 30 bp, Artificial Sequence
  Synthetic oligonucleotide
tcggccacctctggctattcccggtttggt

SEQ ID NO: 242923 - DNA, 30 bp, Artificial Sequence
  Synthetic oligonucleotide
atcccggtcagaatatagggaggttttggt

SEQ ID NO: 242924 - DNA, 30 bp, Artificial Sequence
  Synthetic oligonucleotide
ctaattacaatcggttagaactgttttggt

SEQ ID NO: 242925 - DNA, 30 bp, Artificial Sequence
  Synthetic oligonucleotide
cgtctccgggtgaatgttcacgtttttggt

SEQ ID NO: 242926 - DNA, 30 bp, Artificial Sequence
  Synthetic oligonucleotide
aaatcaatcggtcttcattaagaaaaatgt

SEQ ID NO: 242927 - DNA, 30 bp, Artificial Sequence
  Synthetic oligonucleotide
gtggggacctatgtgattctgacaaaatgt

SEQ ID NO: 242928 - DNA, 30 bp, Artificial Sequence
  Synthetic oligonucleotide
gatccgcgattgtaatctatcgcaaaatgt

SEQ ID NO: 242929 - DNA, 30 bp, Artificial Sequence
  Synthetic oligonucleotide
atagtgatactaaaagcacgtgtaaaatgt

SEQ ID NO: 242930 - DNA, 30 bp, Artificial Sequence
  Synthetic oligonucleotide
agttcagcatcacgtcgcgatgtcaaatgt

SEQ ID NO: 242931 - DNA, 30 bp, Artificial Sequence
  Synthetic oligonucleotide
gcgtgaatgtcatcagggctaaagaaatgt

SEQ ID NO: 242932 - DNA, 30 bp, Artificial Sequence
  Synthetic oligonucleotide
aatgcatggacaagtgcggcccataaatgt

SEQ ID NO: 242933 - DNA, 30 bp, Artificial Sequence
  Synthetic oligonucleotide
gggtctgtcgggtccgtgtgatctaaatgt

SEQ ID NO: 242934 - DNA, 30 bp, Artificial Sequence
  Synthetic oligonucleotide
ccgcggcacaaatgggaggagacacaatgt

SEQ ID NO: 242935 - DNA, 30 bp, Artificial Sequence
  Synthetic oligonucleotide
cgttttacatgcccttaactacatcaatgt

SEQ ID NO: 242936 - DNA, 30 bp, Artificial Sequence
  Synthetic oligonucleotide
atcagatcattcgtctcccggttggaatgt

SEQ ID NO: 242937 - DNA, 30 bp, Artificial Sequence
  Synthetic oligonucleotide
taatacgcaaactaggaacagcttgaatgt

SEQ ID NO: 242938 - DNA, 30 bp, Artificial Sequence
  Synthetic oligonucleotide
gccttgggcacgttagaggaactgtaatgt

SEQ ID NO: 242939 - DNA, 30 bp, Artificial Sequence
  Synthetic oligonucleotide
gcctcaaagaaggccatagtttcttaatgt

SEQ ID NO: 242940 - DNA, 30 bp, Artificial Sequence
  Synthetic oligonucleotide
acagtaaatcttgcactcccacaaacatgt

SEQ ID NO: 242941 - DNA, 30 bp, Artificial Sequence
  Synthetic oligonucleotide
cgacgaactgcataggtgtcggtaacatgt

SEQ ID NO: 242942 - DNA, 30 bp, Artificial Sequence
  Synthetic oligonucleotide
ttggttagtcatgtatgttatcccacatgt

SEQ ID NO: 242943 - DNA, 30 bp, Artificial Sequence
  Synthetic oligonucleotide
accacgccttgcaaactgctattcacatgt

SEQ ID NO: 242944 - DNA, 30 bp, Artificial Sequence
  Synthetic oligonucleotide
gcgcggattctcggactacttcggacatgt

SEQ ID NO: 242945 - DNA, 30 bp, Artificial Sequence
  Synthetic oligonucleotide
gtaaatcataatccctagacgtggacatgt

SEQ ID NO: 242946 - DNA, 30 bp, Artificial Sequence
  Synthetic oligonucleotide
ataaaatttaatttccccgtgcacccatgt

SEQ ID NO: 242947 - DNA, 30 bp, Artificial Sequence
  Synthetic oligonucleotide
tccaatggggtccaggagcgagccccatgt

SEQ ID NO: 242948 - DNA, 30 bp, Artificial Sequence
  Synthetic oligonucleotide
atgacgattcacgtatgtttggatccatgt

SEQ ID NO: 242949 - DNA, 30 bp, Artificial Sequence
  Synthetic oligonucleotide
gagctccgggaactcaccggtactccatgt

SEQ ID NO: 242950 - DNA, 30 bp, Artificial Sequence
  Synthetic oligonucleotide
tggcaacagtttggcttcagtgctccatgt

SEQ ID NO: 242951 - DNA, 30 bp, Artificial Sequence
  Synthetic oligonucleotide
tgcggggcaagagcctaagtgattccatgt

SEQ ID NO: 242952 - DNA, 30 bp, Artificial Sequence
  Synthetic oligonucleotide
ggacccggcgcaagaaatcgcctagcatgt

SEQ ID NO: 242953 - DNA, 30 bp, Artificial Sequence
  Synthetic oligonucleotide
atcaatcgtaggtaaacgccctaggcatgt

SEQ ID NO: 242954 - DNA, 30 bp, Artificial Sequence
  Synthetic oligonucleotide
ggctacactttattgaagagaatatcatgt

SEQ ID NO: 242955 - DNA, 30 bp, Artificial Sequence
  Synthetic oligonucleotide
aaggcgccccaagaggtcgagagctcatgt

SEQ ID NO: 242956 - DNA, 30 bp, Artificial Sequence
  Synthetic oligonucleotide
cacaatctgaagctgccccaccgctcatgt

SEQ ID NO: 242957 - DNA, 31 bp, Artificial Sequence
  Synthetic oligonucleotide
ttatataatgagcttgtaagggaagtcatgt

SEQ ID NO: 242958 - DNA, 30 bp, Artificial Sequence
  Synthetic oligonucleotide
cgccgtgctatctgggcgggggggtcatgt

SEQ ID NO: 242959 - DNA, 30 bp, Artificial Sequence
  Synthetic oligonucleotide
tactgaggcattgtggtggtaggaagatgt

SEQ ID NO: 242960 - DNA, 30 bp, Artificial Sequence
  Synthetic oligonucleotide
ggtagtcttggcaaaccccaacgcagatgt

SEQ ID NO: 242961 - DNA, 30 bp, Artificial Sequence
  Synthetic oligonucleotide
gtaaataacaatctgacatggggcagatgt

SEQ ID NO: 242962 - DNA, 30 bp, Artificial Sequence
  Synthetic oligonucleotide
ggattggtcgaaggtttaatgggtagatgt

SEQ ID NO: 242963 - DNA, 30 bp, Artificial Sequence
  Synthetic oligonucleotide
ctgatataatcgatggtgaaatgacgatgt

SEQ ID NO: 242964 - DNA, 30 bp, Artificial Sequence
  Synthetic oligonucleotide
cacccgatcgactcaatcaaatcccgatgt

SEQ ID NO: 242965 - DNA, 30 bp, Artificial Sequence
  Synthetic oligonucleotide
acacaggtctgtatatttgtcctgcgatgt

SEQ ID NO: 242966 - DNA, 30 bp, Artificial Sequence
  Synthetic oligonucleotide
caatgacaatctgatattccgactcgatgt

SEQ ID NO: 242967 - DNA, 30 bp, Artificial Sequence
  Synthetic oligonucleotide
aactatgctcagttaacaagcgaaggatgt

SEQ ID NO: 242968 - DNA, 30 bp, Artificial Sequence
  Synthetic oligonucleotide
gcactcgagtctttaataatcagaggatgt

SEQ ID NO: 242969 - DNA, 30 bp, Artificial Sequence
  Synthetic oligonucleotide
agcctgcaatgcataatttccggaggatgt

SEQ ID NO: 242970 - DNA, 30 bp, Artificial Sequence
  Synthetic oligonucleotide
taaggtctatgaccaaaccaagccggatgt

SEQ ID NO: 242971 - DNA, 30 bp, Artificial Sequence
  Synthetic oligonucleotide
ttcttacctggctccatgagctcgggatgt

SEQ ID NO: 242972 - DNA, 30 bp, Artificial Sequence
  Synthetic oligonucleotide
ggttagacttatgggaggtaactctgatgt

SEQ ID NO: 242973 - DNA, 30 bp, Artificial Sequence
  Synthetic oligonucleotide
gttgttacgctaggccatataaagtgatgt

SEQ ID NO: 242974 - DNA, 30 bp, Artificial Sequence
  Synthetic oligonucleotide
tgagggcggcttcatatcggactttgatgt

SEQ ID NO: 242975 - DNA, 30 bp, Artificial Sequence
  Synthetic oligonucleotide
ctggcgaagtaggagaatcggaaaatatgt

SEQ ID NO: 242976 - DNA, 30 bp, Artificial Sequence
  Synthetic oligonucleotide
acgccatcggagacgctgtggtaaatatgt

SEQ ID NO: 242977 - DNA, 30 bp, Artificial Sequence
  Synthetic oligonucleotide
gttagtaatcaggaaagtaaaaccatatgt

SEQ ID NO: 242978 - DNA, 30 bp, Artificial Sequence
  Synthetic oligonucleotide
cttaagcctgcctcgtcataaccgatatgt

SEQ ID NO: 242979 - DNA, 30 bp, Artificial Sequence
  Synthetic oligonucleotide
gcttatatggatccaaaaatttaactatgt

SEQ ID NO: 242980 - DNA, 30 bp, Artificial Sequence
  Synthetic oligonucleotide
aaccaaacaaaaaaactttcgctactatgt

SEQ ID NO: 242981 - DNA, 30 bp, Artificial Sequence
  Synthetic oligonucleotide
gaagctctctatgaaaaagtgagcctatgt

SEQ ID NO: 242982 - DNA, 30 bp, Artificial Sequence
  Synthetic oligonucleotide
caaagctagacaagatgaaataagctatgt

SEQ ID NO: 242983 - DNA, 30 bp, Artificial Sequence
  Synthetic oligonucleotide
agatgtaggagatcccatcacccgctatgt

SEQ ID NO: 242984 - DNA, 30 bp, Artificial Sequence
  Synthetic oligonucleotide
gtgtctaacgaaagaaaatagaggctatgt

SEQ ID NO: 242985 - DNA, 30 bp, Artificial Sequence
  Synthetic oligonucleotide
tatcatcagctcctgttggaaaaagtatgt

SEQ ID NO: 242986 - DNA, 30 bp, Artificial Sequence
  Synthetic oligonucleotide
aattgagagtgtgcttgggaaggagtatgt

SEQ ID NO: 242987 - DNA, 30 bp, Artificial Sequence
  Synthetic oligonucleotide
ccctgtaaacgcctctgcgacgacgtatgt

SEQ ID NO: 242988 - DNA, 30 bp, Artificial Sequence
  Synthetic oligonucleotide
ccggtattcaaacaagctgggtccgtatgt

SEQ ID NO: 242989 - DNA, 30 bp, Artificial Sequence
  Synthetic oligonucleotide
aggattaatcgagagcgcctgttcgtatgt

SEQ ID NO: 242990 - DNA, 30 bp, Artificial Sequence
  Synthetic oligonucleotide
ccctgtctgtagtatagtctaacggtatgt

SEQ ID NO: 242991 - DNA, 30 bp, Artificial Sequence
  Synthetic oligonucleotide
aatcatcgctcaattaaactacgggtatgt

SEQ ID NO: 242992 - DNA, 30 bp, Artificial Sequence
  Synthetic oligonucleotide
cgcataaggggtaacccgcgaatggtatgt

SEQ ID NO: 242993 - DNA, 30 bp, Artificial Sequence
  Synthetic oligonucleotide
acgtagtatagtgtatcgtgtagattatgt

SEQ ID NO: 242994 - DNA, 30 bp, Artificial Sequence
  Synthetic oligonucleotide
tcgttgaataccggcaggctgttattatgt

SEQ ID NO: 242995 - DNA, 30 bp, Artificial Sequence
  Synthetic oligonucleotide
ttgtgtcgttaatatggggaaacgttatgt

SEQ ID NO: 242996 - DNA, 30 bp, Artificial Sequence
  Synthetic oligonucleotide
acgcggttcgaatctcttccgaaaaactgt

SEQ ID NO: 242997 - DNA, 30 bp, Artificial Sequence
  Synthetic oligonucleotide
aggtaacgcgacattattcacttaaactgt

SEQ ID NO: 242998 - DNA, 30 bp, Artificial Sequence
  Synthetic oligonucleotide
caagacataggtgtctgactatagaactgt

SEQ ID NO: 242999 - DNA, 30 bp, Artificial Sequence
  Synthetic oligonucleotide
gataagaaatacttcctgatatcgaactgt

SEQ ID NO: 243000 - DNA, 30 bp, Artificial Sequence
  Synthetic oligonucleotide
gtactgagcatgcaccaatgggaccactgt

SEQ ID NO: 243001 - DNA, 30 bp, Artificial Sequence
  Synthetic oligonucleotide
gcttacatgtactaagcttttccccactgt

SEQ ID NO: 243002 - DNA, 30 bp, Artificial Sequence
  Synthetic oligonucleotide
cggcccgtagggtggcctcattggcactgt

SEQ ID NO: 243003 - DNA, 30 bp, Artificial Sequence
  Synthetic oligonucleotide
ttaatcgggggcgcgtaagaggtgcactgt

SEQ ID NO: 243004 - DNA, 30 bp, Artificial Sequence
  Synthetic oligonucleotide
gacaagtatgggaatatcgttcccgactgt

SEQ ID NO: 243005 - DNA, 30 bp, Artificial Sequence
  Synthetic oligonucleotide
caggagtcccggcataaaacgtgcgactgt

SEQ ID NO: 243006 - DNA, 30 bp, Artificial Sequence
  Synthetic oligonucleotide
tgtggccagattcaaaaagtgtgggactgt

SEQ ID NO: 243007 - DNA, 30 bp, Artificial Sequence
  Synthetic oligonucleotide
gcggtggtttggtatcatagctgtgactgt

SEQ ID NO: 243008 - DNA, 30 bp, Artificial Sequence
  Synthetic oligonucleotide
tattcgtaggctatggagggttgtgactgt

SEQ ID NO: 243009 - DNA, 30 bp, Artificial Sequence
  Synthetic oligonucleotide
taaggggttatatgggaattaatatactgt

SEQ ID NO: 243010 - DNA, 30 bp, Artificial Sequence
  Synthetic oligonucleotide
aacgacctcggctatgtcagcaactactgt

SEQ ID NO: 243011 - DNA, 30 bp, Artificial Sequence
  Synthetic oligonucleotide
tgccaggcactctttataggggtgtactgt

SEQ ID NO: 243012 - DNA, 30 bp, Artificial Sequence
  Synthetic oligonucleotide
cgacgtcgtactattcttagaacgacctgt

SEQ ID NO: 243013 - DNA, 30 bp, Artificial Sequence
  Synthetic oligonucleotide
gtcaatggcagggcaaatacagatacctgt

SEQ ID NO: 243014 - DNA, 30 bp, Artificial Sequence
  Synthetic oligonucleotide
cgaatgttttaagtaaggcgtacaccctgt

SEQ ID NO: 243015 - DNA, 30 bp, Artificial Sequence
  Synthetic oligonucleotide
tccgcgtgtaacggattgcgctcgccctgt

SEQ ID NO: 243016 - DNA, 30 bp, Artificial Sequence
  Synthetic oligonucleotide
tggtcttacgtgcgatgtatccggccctgt

SEQ ID NO: 243017 - DNA, 30 bp, Artificial Sequence
  Synthetic oligonucleotide
attaacgcaataccgaactcgactccctgt

SEQ ID NO: 243018 - DNA, 30 bp, Artificial Sequence
  Synthetic oligonucleotide
aatggcaggggacagctaaggactccctgt

SEQ ID NO: 243019 - DNA, 30 bp, Artificial Sequence
  Synthetic oligonucleotide
acggtatgccggtttactgcaaaagcctgt

SEQ ID NO: 243020 - DNA, 30 bp, Artificial Sequence
  Synthetic oligonucleotide
cggccgcttacgaaatgctttcgcgcctgt

SEQ ID NO: 243021 - DNA, 30 bp, Artificial Sequence
  Synthetic oligonucleotide
aggtacccggcacaccactgctaggcctgt

SEQ ID NO: 243022 - DNA, 30 bp, Artificial Sequence
  Synthetic oligonucleotide
caggtctacctattgataagcattgcctgt

SEQ ID NO: 243023 - DNA, 30 bp, Artificial Sequence
  Synthetic oligonucleotide
agcctatgacggcgactagcaaactcctgt

SEQ ID NO: 243024 - DNA, 30 bp, Artificial Sequence
  Synthetic oligonucleotide
gtgggctgggacttttgtgtgccttcctgt

SEQ ID NO: 243025 - DNA, 30 bp, Artificial Sequence
  Synthetic oligonucleotide
acgcagtgcggtgaaaatgcgtaaagctgt

SEQ ID NO: 243026 - DNA, 30 bp, Artificial Sequence
  Synthetic oligonucleotide
tgttgatcttgtatcggccatgcgagctgt

SEQ ID NO: 243027 - DNA, 30 bp, Artificial Sequence
  Synthetic oligonucleotide
gttgccagcgcgccgaaagtcggtagctgt

SEQ ID NO: 243028 - DNA, 30 bp, Artificial Sequence
  Synthetic oligonucleotide
agttgacggtgccactgagcaaaccgctgt

SEQ ID NO: 243029 - DNA, 30 bp, Artificial Sequence
  Synthetic oligonucleotide
agttgatgtatagctgtgagcttgcgctgt

SEQ ID NO: 243030 - DNA, 30 bp, Artificial Sequence
  Synthetic oligonucleotide
ttaagtgcgagttgaagaactgatcgctgt

SEQ ID NO: 243031 - DNA, 30 bp, Artificial Sequence
  Synthetic oligonucleotide
actccaattccttcagcttgagctcgctgt

SEQ ID NO: 243032 - DNA, 30 bp, Artificial Sequence
  Synthetic oligonucleotide
gggcgttactgcgcgtgaccacttcgctgt

SEQ ID NO: 243033 - DNA, 30 bp, Artificial Sequence
  Synthetic oligonucleotide
catccaactacaggggaattcgttcgctgt

SEQ ID NO: 243034 - DNA, 30 bp, Artificial Sequence
  Synthetic oligonucleotide
acagcgggttgagcggcccctaaaggctgt

SEQ ID NO: 243035 - DNA, 30 bp, Artificial Sequence
  Synthetic oligonucleotide
agatctgccccaggggcaagttcaggctgt

SEQ ID NO: 243036 - DNA, 30 bp, Artificial Sequence
  Synthetic oligonucleotide
taaattcaaacactagttgttctaggctgt

SEQ ID NO: 243037 - DNA, 30 bp, Artificial Sequence
  Synthetic oligonucleotide
agattgagccataagcgcgtacccggctgt

SEQ ID NO: 243038 - DNA, 30 bp, Artificial Sequence
  Synthetic oligonucleotide
tcattgaaaacctatcgtagaatatgctgt

SEQ ID NO: 243039 - DNA, 30 bp, Artificial Sequence
  Synthetic oligonucleotide
atggtactggaattcggcatggtatgctgt

SEQ ID NO: 243040 - DNA, 30 bp, Artificial Sequence
  Synthetic oligonucleotide
tgctcctctccttttctgttcctctgctgt

SEQ ID NO: 243041 - DNA, 30 bp, Artificial Sequence
  Synthetic oligonucleotide
tccgcatccaacctcacacactcgtgctgt

SEQ ID NO: 243042 - DNA, 30 bp, Artificial Sequence
  Synthetic oligonucleotide
cgaggctaaaagaaagtcaaggcttgctgt

SEQ ID NO: 243043 - DNA, 30 bp, Artificial Sequence
  Synthetic oligonucleotide
aagagcagcagccttttcgtgtgttgctgt

SEQ ID NO: 243044 - DNA, 30 bp, Artificial Sequence
  Synthetic oligonucleotide
agtgcctgaatgagcggacagaccatctgt

SEQ ID NO: 243045 - DNA, 30 bp, Artificial Sequence
  Synthetic oligonucleotide
gcgagcaaaactgacagtgttatcatctgt

SEQ ID NO: 243046 - DNA, 30 bp, Artificial Sequence
  Synthetic oligonucleotide
tatcgtgtggaataatacagtactatctgt

SEQ ID NO: 243047 - DNA, 30 bp, Artificial Sequence
  Synthetic oligonucleotide
tatggtgaaacggacattagctaagtctgt

SEQ ID NO: 243048 - DNA, 30 bp, Artificial Sequence
  Synthetic oligonucleotide
accatactttttatttctgctgccgtctgt

SEQ ID NO: 243049 - DNA, 30 bp, Artificial Sequence
  Synthetic oligonucleotide
tggtccacaaaccgtttagttgcggtctgt

SEQ ID NO: 243050 - DNA, 30 bp, Artificial Sequence
  Synthetic oligonucleotide
ggggtcaagtagcttaggtgttctgtctgt

SEQ ID NO: 243051 - DNA, 30 bp, Artificial Sequence
  Synthetic oligonucleotide
ggctatcatacagtctgatggctattctgt

SEQ ID NO: 243052 - DNA, 30 bp, Artificial Sequence
  Synthetic oligonucleotide
atcgaaaagagaggggcaagtttattctgt

SEQ ID NO: 243053 - DNA, 30 bp, Artificial Sequence
  Synthetic oligonucleotide
gcgtatgcttatttatcaatatgcttctgt

SEQ ID NO: 243054 - DNA, 30 bp, Artificial Sequence
  Synthetic oligonucleotide
tgtacgtgacagggagagaagattttctgt

SEQ ID NO: 243055 - DNA, 30 bp, Artificial Sequence
  Synthetic oligonucleotide
gctaccggagggtagcgtatgtgaaagtgt

SEQ ID NO: 243056 - DNA, 30 bp, Artificial Sequence
  Synthetic oligonucleotide
cggcatggcatgcattgtccgcccaagtgt

SEQ ID NO: 243057 - DNA, 30 bp, Artificial Sequence
  Synthetic oligonucleotide
ggtcatagggcagtatgtcattccaagtgt

SEQ ID NO: 243058 - DNA, 30 bp, Artificial Sequence
  Synthetic oligonucleotide
tgtattgacaaaataggtcacgtgaagtgt

SEQ ID NO: 243059 - DNA, 30 bp, Artificial Sequence
  Synthetic oligonucleotide
taatggaaaagaaagtaatgtgctaagtgt

SEQ ID NO: 243060 - DNA, 30 bp, Artificial Sequence
  Synthetic oligonucleotide
ggcgtagagttagcaacaaggttacagtgt

SEQ ID NO: 243061 - DNA, 30 bp, Artificial Sequence
  Synthetic oligonucleotide
atattcagcgttcaacgttgttaccagtgt

SEQ ID NO: 243062 - DNA, 30 bp, Artificial Sequence
  Synthetic oligonucleotide
tgatgtctcaagcgcaaaagaatccagtgt

SEQ ID NO: 243063 - DNA, 30 bp, Artificial Sequence
  Synthetic oligonucleotide
gcatccgatcgcaacggaaaccatcagtgt

SEQ ID NO: 243064 - DNA, 30 bp, Artificial Sequence
  Synthetic oligonucleotide
tgcaacataaggtatgctcgcgatcagtgt

SEQ ID NO: 243065 - DNA, 30 bp, Artificial Sequence
  Synthetic oligonucleotide
cgatttttaagtgcggtccggagtcagtgt

SEQ ID NO: 243066 - DNA, 30 bp, Artificial Sequence
  Synthetic oligonucleotide
atatagtacattagcggcaatgtagagtgt

SEQ ID NO: 243067 - DNA, 30 bp, Artificial Sequence
  Synthetic oligonucleotide
tgtcccgatttgatatcgtggatcgagtgt

SEQ ID NO: 243068 - DNA, 30 bp, Artificial Sequence
  Synthetic oligonucleotide
gaggggtctgagcgcgcgatgctcgagtgt

SEQ ID NO: 243069 - DNA, 30 bp, Artificial Sequence
  Synthetic oligonucleotide
ttccacaaagggtgacgttgaacggagtgt

SEQ ID NO: 243070 - DNA, 30 bp, Artificial Sequence
  Synthetic oligonucleotide
gtggctatgctctacatacccctctagtgt

SEQ ID NO: 243071 - DNA, 30 bp, Artificial Sequence
  Synthetic oligonucleotide
cactactaaaacgctaagaacacttagtgt

SEQ ID NO: 243072 - DNA, 30 bp, Artificial Sequence
  Synthetic oligonucleotide
ttccgcgtcctaataccaggattttagtgt

SEQ ID NO: 243073 - DNA, 30 bp, Artificial Sequence
  Synthetic oligonucleotide
gcagaactcctcgcattgcgataaacgtgt

SEQ ID NO: 243074 - DNA, 30 bp, Artificial Sequence
  Synthetic oligonucleotide
gtttggacgccggacaaatggggaacgtgt

SEQ ID NO: 243075 - DNA, 30 bp, Artificial Sequence
  Synthetic oligonucleotide
gtgaagtctcgacagtattgaaccacgtgt

SEQ ID NO: 243076 - DNA, 30 bp, Artificial Sequence
  Synthetic oligonucleotide
ggatatatgcagtatgtctttggcacgtgt

SEQ ID NO: 243077 - DNA, 30 bp, Artificial Sequence
  Synthetic oligonucleotide
cccgtagcaagccacaagggtaagacgtgt

SEQ ID NO: 243078 - DNA, 30 bp, Artificial Sequence
  Synthetic oligonucleotide
agggtacgattgatttcatcgacgacgtgt

SEQ ID NO: 243079 - DNA, 30 bp, Artificial Sequence
  Synthetic oligonucleotide
ctagtcagaacctcgaggatgcgaccgtgt

SEQ ID NO: 243080 - DNA, 30 bp, Artificial Sequence
  Synthetic oligonucleotide
ctgatgcgtacggaacctaaatgaccgtgt

SEQ ID NO: 243081 - DNA, 30 bp, Artificial Sequence
  Synthetic oligonucleotide
gcatagtgtgtgttaagatgaaacccgtgt

SEQ ID NO: 243082 - DNA, 30 bp, Artificial Sequence
  Synthetic oligonucleotide
agcgaccgaccagttgtaaaaggcccgtgt

SEQ ID NO: 243083 - DNA, 30 bp, Artificial Sequence
  Synthetic oligonucleotide
tgatctgtacttctccggcacttcccgtgt

SEQ ID NO: 243084 - DNA, 31 bp, Artificial Sequence
  Synthetic oligonucleotide
caggaacttaaggtggatcacacttccgtgt

SEQ ID NO: 243085 - DNA, 30 bp, Artificial Sequence
  Synthetic oligonucleotide
ccgaaccgtacaagactcacagacgcgtgt

SEQ ID NO: 243086 - DNA, 30 bp, Artificial Sequence
  Synthetic oligonucleotide
ttgggtttgcgttagcgtctatgggcgtgt

SEQ ID NO: 243087 - DNA, 30 bp, Artificial Sequence
  Synthetic oligonucleotide
gcggctctcgactatcggtctatggcgtgt

SEQ ID NO: 243088 - DNA, 30 bp, Artificial Sequence
  Synthetic oligonucleotide
acctggtaggatagggtgctcattgcgtgt

SEQ ID NO: 243089 - DNA, 30 bp, Artificial Sequence
  Synthetic oligonucleotide
ttcgttgtggagcagcgtttaaaatcgtgt

SEQ ID NO: 243090 - DNA, 30 bp, Artificial Sequence
  Synthetic oligonucleotide
acgctaacgtccagattatgtagatcgtgt

SEQ ID NO: 243091 - DNA, 30 bp, Artificial Sequence
  Synthetic oligonucleotide
tcaagctctcacaatctagcactatcgtgt

SEQ ID NO: 243092 - DNA, 30 bp, Artificial Sequence
  Synthetic oligonucleotide
tgatgcaggcttaacgaaggatgctcgtgt

SEQ ID NO: 243093 - DNA, 30 bp, Artificial Sequence
  Synthetic oligonucleotide
cgcgaccgtactcttacttcacagtcgtgt

SEQ ID NO: 243094 - DNA, 30 bp, Artificial Sequence
  Synthetic oligonucleotide
gatgactcctgtagcggtgtagtgtcgtgt

SEQ ID NO: 243095 - DNA, 30 bp, Artificial Sequence
  Synthetic oligonucleotide
gcctacaaccttgtggaggtaacttcgtgt

SEQ ID NO: 243096 - DNA, 30 bp, Artificial Sequence
  Synthetic oligonucleotide
gagttgatttagctaagtccgtcttcgtgt

SEQ ID NO: 243097 - DNA, 30 bp, Artificial Sequence
  Synthetic oligonucleotide
gcctcgaagacagtttcgtattcttcgtgt

SEQ ID NO: 243098 - DNA, 30 bp, Artificial Sequence
  Synthetic oligonucleotide
gtgtgcgcagaattagagggtcgttcgtgt

SEQ ID NO: 243099 - DNA, 30 bp, Artificial Sequence
  Synthetic oligonucleotide
gaattcacgatattgtcagagagaaggtgt

SEQ ID NO: 243100 - DNA, 30 bp, Artificial Sequence
  Synthetic oligonucleotide
gctcaatacggctcgtcttgctgaaggtgt

SEQ ID NO: 243101 - DNA, 30 bp, Artificial Sequence
  Synthetic oligonucleotide
ccatccatcggtgaaacctgccagaggtgt

SEQ ID NO: 243102 - DNA, 30 bp, Artificial Sequence
  Synthetic oligonucleotide
tagatggattatgggcttcgtgcgaggtgt

SEQ ID NO: 243103 - DNA, 30 bp, Artificial Sequence
  Synthetic oligonucleotide
gctgttgacaaaacagacgataggaggtgt

SEQ ID NO: 243104 - DNA, 30 bp, Artificial Sequence
  Synthetic oligonucleotide
ggggattacccggcttccacaagtaggtgt

SEQ ID NO: 243105 - DNA, 30 bp, Artificial Sequence
  Synthetic oligonucleotide
atgggaaatcgtagaggtctagtacggtgt

SEQ ID NO: 243106 - DNA, 30 bp, Artificial Sequence
  Synthetic oligonucleotide
taaggacagcgaccgtaatgctaccggtgt

SEQ ID NO: 243107 - DNA, 30 bp, Artificial Sequence
  Synthetic oligonucleotide
cggaatgtgtggttaaagttaaatcggtgt

SEQ ID NO: 243108 - DNA, 30 bp, Artificial Sequence
  Synthetic oligonucleotide
ccatcattacgcttttgaaagtatcggtgt

SEQ ID NO: 243109 - DNA, 30 bp, Artificial Sequence
  Synthetic oligonucleotide
cgagaggacagcacgtggttgtgtcggtgt

SEQ ID NO: 243110 - DNA, 30 bp, Artificial Sequence
  Synthetic oligonucleotide
gaacaacctgttcgatacgattgtcggtgt

SEQ ID NO: 243111 - DNA, 30 bp, Artificial Sequence
  Synthetic oligonucleotide
gtcattgtcttcgtaagaaactgcgggtgt

SEQ ID NO: 243112 - DNA, 30 bp, Artificial Sequence
  Synthetic oligonucleotide
ttcatttagcaaggttggagcgtcgggtgt

SEQ ID NO: 243113 - DNA, 30 bp, Artificial Sequence
  Synthetic oligonucleotide
tgtcgatgtagagcgcaagatccggggtgt

SEQ ID NO: 243114 - DNA, 30 bp, Artificial Sequence
  Synthetic oligonucleotide
tctcattcttgttaacggcaaagatggtgt

SEQ ID NO: 243115 - DNA, 30 bp, Artificial Sequence
  Synthetic oligonucleotide
aacagggacgggagatataaatactggtgt

SEQ ID NO: 243116 - DNA, 30 bp, Artificial Sequence
  Synthetic oligonucleotide
cgtgcttttgttgggacagtcagctggtgt

SEQ ID NO: 243117 - DNA, 30 bp, Artificial Sequence
  Synthetic oligonucleotide
aacctaacgcacgacatgtttagctggtgt

SEQ ID NO: 243118 - DNA, 30 bp, Artificial Sequence
  Synthetic oligonucleotide
ccaatttgcgtactaagtgggctctggtgt

SEQ ID NO: 243119 - DNA, 30 bp, Artificial Sequence
  Synthetic oligonucleotide
ctaacacggcgcagtcaaaatccgtggtgt

SEQ ID NO: 243120 - DNA, 30 bp, Artificial Sequence
  Synthetic oligonucleotide
acggttattgattctggcatagggtggtgt

SEQ ID NO: 243121 - DNA, 30 bp, Artificial Sequence
  Synthetic oligonucleotide
ctgttcggaaacttggcgctaataatgtgt

SEQ ID NO: 243122 - DNA, 30 bp, Artificial Sequence
  Synthetic oligonucleotide
gtgctattaagtcacgacagaggcatgtgt

SEQ ID NO: 243123 - DNA, 30 bp, Artificial Sequence
  Synthetic oligonucleotide
gcggagtattatcataagaaagatatgtgt

SEQ ID NO: 243124 - DNA, 31 bp, Artificial Sequence
  Synthetic oligonucleotide
agaggtgtctgagtaacgactggttatgtgt

SEQ ID NO: 243125 - DNA, 30 bp, Artificial Sequence
  Synthetic oligonucleotide
tttaatcctgggatatggtgggaactgtgt

SEQ ID NO: 243126 - DNA, 30 bp, Artificial Sequence
  Synthetic oligonucleotide
cgtccgtatagtcctgtaagctaactgtgt

SEQ ID NO: 243127 - DNA, 30 bp, Artificial Sequence
  Synthetic oligonucleotide
gaggaaccgtcgttataggaaagactgtgt

SEQ ID NO: 243128 - DNA, 30 bp, Artificial Sequence
  Synthetic oligonucleotide
acctagccgtgtgagtacagggccctgtgt

SEQ ID NO: 243129 - DNA, 30 bp, Artificial Sequence
  Synthetic oligonucleotide
tgcacattacttagaaggggtctgctgtgt

SEQ ID NO: 243130 - DNA, 30 bp, Artificial Sequence
  Synthetic oligonucleotide
agagttggggatactgaaaacacagtgtgt

SEQ ID NO: 243131 - DNA, 30 bp, Artificial Sequence
  Synthetic oligonucleotide
gcatggctatggcctccgtaccacgtgtgt

SEQ ID NO: 243132 - DNA, 30 bp, Artificial Sequence
  Synthetic oligonucleotide
tcatgttcattgtggacaggagccgtgtgt

SEQ ID NO: 243133 - DNA, 30 bp, Artificial Sequence
  Synthetic oligonucleotide
cactgaagacctggaacttagggcgtgtgt

SEQ ID NO: 243134 - DNA, 30 bp, Artificial Sequence
  Synthetic oligonucleotide
aacacgggatggtttaccccatgggtgtgt

SEQ ID NO: 243135 - DNA, 30 bp, Artificial Sequence
  Synthetic oligonucleotide
agtgaatggacatctttagaaatggtgtgt

SEQ ID NO: 243136 - DNA, 30 bp, Artificial Sequence
  Synthetic oligonucleotide
tcgctcgctacgtcgtaaatcatggtgtgt

SEQ ID NO: 243137 - DNA, 30 bp, Artificial Sequence
  Synthetic oligonucleotide
gtcctctaggatttcaattgagtggtgtgt

SEQ ID NO: 243138 - DNA, 30 bp, Artificial Sequence
  Synthetic oligonucleotide
cgtgttgccgtcctattcgcacatgtgtgt

SEQ ID NO: 243139 - DNA, 30 bp, Artificial Sequence
  Synthetic oligonucleotide
tcgggacctagaaagttcgtaaaattgtgt

SEQ ID NO: 243140 - DNA, 30 bp, Artificial Sequence
  Synthetic oligonucleotide
agtagtgtatcatactggggaacattgtgt

SEQ ID NO: 243141 - DNA, 30 bp, Artificial Sequence
  Synthetic oligonucleotide
gaagttacttcggtaacaaatagattgtgt

SEQ ID NO: 243142 - DNA, 30 bp, Artificial Sequence
  Synthetic oligonucleotide
agccatcaaactagtgggccccgattgtgt

SEQ ID NO: 243143 - DNA, 30 bp, Artificial Sequence
  Synthetic oligonucleotide
aggtgcattcatgatcgggagatcttgtgt

SEQ ID NO: 243144 - DNA, 30 bp, Artificial Sequence
  Synthetic oligonucleotide
cgcgagccttagcatgagcttcctttgtgt

SEQ ID NO: 243145 - DNA, 30 bp, Artificial Sequence
  Synthetic oligonucleotide
agtgtgaggtccggttcccacagtttgtgt

SEQ ID NO: 243146 - DNA, 30 bp, Artificial Sequence
  Synthetic oligonucleotide
acgccgggggctccgtcagagggaaattgt

SEQ ID NO: 243147 - DNA, 30 bp, Artificial Sequence
  Synthetic oligonucleotide
tgaggtcggaatctgagttaacagaattgt

SEQ ID NO: 243148 - DNA, 30 bp, Artificial Sequence
  Synthetic oligonucleotide
ttcgattcacgactggttagtcgtaattgt

SEQ ID NO: 243149 - DNA, 30 bp, Artificial Sequence
  Synthetic oligonucleotide
cggcgcgtaaagctaggtagagaccattgt

SEQ ID NO: 243150 - DNA, 30 bp, Artificial Sequence
  Synthetic oligonucleotide
gtctgtagcgtgataacgatcgttcattgt

SEQ ID NO: 243151 - DNA, 30 bp, Artificial Sequence
  Synthetic oligonucleotide
caggcctcccttaccgaagataacgattgt

SEQ ID NO: 243152 - DNA, 30 bp, Artificial Sequence
  Synthetic oligonucleotide
ttgggaatctagggtagcaacgccgattgt

SEQ ID NO: 243153 - DNA, 30 bp, Artificial Sequence
  Synthetic oligonucleotide
cactagactggttgacaacagtgggattgt

SEQ ID NO: 243154 - DNA, 30 bp, Artificial Sequence
  Synthetic oligonucleotide
cacactgagttaaaggagacgttggattgt

SEQ ID NO: 243155 - DNA, 30 bp, Artificial Sequence
  Synthetic oligonucleotide
cgtaggaagatcgcagagtaggtatattgt

SEQ ID NO: 243156 - DNA, 30 bp, Artificial Sequence
  Synthetic oligonucleotide
acgaagcatgcagaagacatgaagtattgt

SEQ ID NO: 243157 - DNA, 30 bp, Artificial Sequence
  Synthetic oligonucleotide
ggcgggttgaacagcatttacaggtattgt

SEQ ID NO: 243158 - DNA, 30 bp, Artificial Sequence
  Synthetic oligonucleotide
tgaagcctagtagggcagcccgattattgt

SEQ ID NO: 243159 - DNA, 30 bp, Artificial Sequence
  Synthetic oligonucleotide
acacgccaacccgtaaaccatcacacttgt

SEQ ID NO: 243160 - DNA, 29 bp, Artificial Sequence
  Synthetic oligonucleotide
tctggaaatcccagcaacccggcacttgt

SEQ ID NO: 243161 - DNA, 30 bp, Artificial Sequence
  Synthetic oligonucleotide
gtaggattcggtgattgatctacgacttgt

SEQ ID NO: 243162 - DNA, 30 bp, Artificial Sequence
  Synthetic oligonucleotide
gcaaggccaccatggtaaccctttacttgt

SEQ ID NO: 243163 - DNA, 30 bp, Artificial Sequence
  Synthetic oligonucleotide
cggggcgggggttgtaaaaccacgccttgt

SEQ ID NO: 243164 - DNA, 30 bp, Artificial Sequence
  Synthetic oligonucleotide
gtgatcatcagatcttgataagaggcttgt

SEQ ID NO: 243165 - DNA, 30 bp, Artificial Sequence
  Synthetic oligonucleotide
tttgctgcaggtccccaatgaactgcttgt

SEQ ID NO: 243166 - DNA, 30 bp, Artificial Sequence
  Synthetic oligonucleotide
gtccaacaaagaataggtcatcttgcttgt

SEQ ID NO: 243167 - DNA, 30 bp, Artificial Sequence
  Synthetic oligonucleotide
tcgatcggcagccggtttgttgtatcttgt

SEQ ID NO: 243168 - DNA, 30 bp, Artificial Sequence
  Synthetic oligonucleotide
agacggttgaaagcctttacctgctcttgt

SEQ ID NO: 243169 - DNA, 30 bp, Artificial Sequence
  Synthetic oligonucleotide
gcataatagcataccgcggaacaaagttgt

SEQ ID NO: 243170 - DNA, 30 bp, Artificial Sequence
  Synthetic oligonucleotide
ccattagagacggttggattcgaaagttgt

SEQ ID NO: 243171 - DNA, 30 bp, Artificial Sequence
  Synthetic oligonucleotide
tcagggagattgccagctgttcacagttgt

SEQ ID NO: 243172 - DNA, 30 bp, Artificial Sequence
  Synthetic oligonucleotide
tgggttgccctcacaatactaattagttgt

SEQ ID NO: 243173 - DNA, 30 bp, Artificial Sequence
  Synthetic oligonucleotide
agtcattgttattcagttcgaggacgttgt

SEQ ID NO: 243174 - DNA, 30 bp, Artificial Sequence
  Synthetic oligonucleotide
aaaaatcctgccccagtaggttaccgttgt

SEQ ID NO: 243175 - DNA, 30 bp, Artificial Sequence
  Synthetic oligonucleotide
tgttcctaatatggtcgccaagttcgttgt

SEQ ID NO: 243176 - DNA, 30 bp, Artificial Sequence
  Synthetic oligonucleotide
gccttgtgactgtaagaataacaaggttgt

SEQ ID NO: 243177 - DNA, 30 bp, Artificial Sequence
  Synthetic oligonucleotide
ccgttcatggggtttcgaacggagggttgt

SEQ ID NO: 243178 - DNA, 30 bp, Artificial Sequence
  Synthetic oligonucleotide
tgcagacagatgaaatatccgagtggttgt

SEQ ID NO: 243179 - DNA, 30 bp, Artificial Sequence
  Synthetic oligonucleotide
ctgacgttgtgactcgtgacatttggttgt

SEQ ID NO: 243180 - DNA, 30 bp, Artificial Sequence
  Synthetic oligonucleotide
ctcgctagtccacctggctatgcatgttgt

SEQ ID NO: 243181 - DNA, 30 bp, Artificial Sequence
  Synthetic oligonucleotide
aatataaaatgatgacaatagggctgttgt

SEQ ID NO: 243182 - DNA, 30 bp, Artificial Sequence
  Synthetic oligonucleotide
atcccgatagaatgaagcacggcgtgttgt

SEQ ID NO: 243183 - DNA, 30 bp, Artificial Sequence
  Synthetic oligonucleotide
aaagatacagtccttaaattagtgtgttgt

SEQ ID NO: 243184 - DNA, 30 bp, Artificial Sequence
  Synthetic oligonucleotide
caacgtgtcacgtattgactacgaatttgt

SEQ ID NO: 243185 - DNA, 30 bp, Artificial Sequence
  Synthetic oligonucleotide
tttggtagttaaggtacgattctaatttgt

SEQ ID NO: 243186 - DNA, 30 bp, Artificial Sequence
  Synthetic oligonucleotide
gtggaagctcgacagtagcacgtaatttgt

SEQ ID NO: 243187 - DNA, 30 bp, Artificial Sequence
  Synthetic oligonucleotide
caatattcaatctctgaatggttaatttgt

SEQ ID NO: 243188 - DNA, 30 bp, Artificial Sequence
  Synthetic oligonucleotide
cggggacaatctaaagtgtggggcatttgt

SEQ ID NO: 243189 - DNA, 30 bp, Artificial Sequence
  Synthetic oligonucleotide
ccgaagggtcttaggggactcggactttgt

SEQ ID NO: 243190 - DNA, 30 bp, Artificial Sequence
  Synthetic oligonucleotide
cgttcgtagtaggcgactgacagcctttgt

SEQ ID NO: 243191 - DNA, 30 bp, Artificial Sequence
  Synthetic oligonucleotide
ttgtcgtgaatcagcggcttatgcctttgt

SEQ ID NO: 243192 - DNA, 30 bp, Artificial Sequence
  Synthetic oligonucleotide
tcatatgggcacattgatcgacttctttgt

SEQ ID NO: 243193 - DNA, 30 bp, Artificial Sequence
  Synthetic oligonucleotide
aaatatgaaacatatcgccttttcgtttgt

SEQ ID NO: 243194 - DNA, 30 bp, Artificial Sequence
  Synthetic oligonucleotide
gtcgattggtgcctagcccagcgggtttgt

SEQ ID NO: 243195 - DNA, 30 bp, Artificial Sequence
  Synthetic oligonucleotide
ctcggacaattgtcatcgctcgatgtttgt

SEQ ID NO: 243196 - DNA, 30 bp, Artificial Sequence
  Synthetic oligonucleotide
cctactccgtcactttgtctgaggttttgt

SEQ ID NO: 243197 - DNA, 30 bp, Artificial Sequence
  Synthetic oligonucleotide
catacaatcttccaatcggaccgtttttgt

SEQ ID NO: 243198 - DNA, 30 bp, Artificial Sequence
  Synthetic oligonucleotide
gttccgttggagtgcgaaacaccaaaaatt

SEQ ID NO: 243199 - DNA, 30 bp, Artificial Sequence
  Synthetic oligonucleotide
catgcaactactgcacctgtcgccaaaatt

SEQ ID NO: 243200 - DNA, 30 bp, Artificial Sequence
  Synthetic oligonucleotide
gtgtaatgccaagaggacaggcataaaatt

SEQ ID NO: 243201 - DNA, 30 bp, Artificial Sequence
  Synthetic oligonucleotide
gtgggggcagatgtgacagtgactaaaatt

SEQ ID NO: 243202 - DNA, 30 bp, Artificial Sequence
  Synthetic oligonucleotide
agtaaacaacattgaccagtattacaaatt

SEQ ID NO: 243203 - DNA, 30 bp, Artificial Sequence
  Synthetic oligonucleotide
tgatatagtagcgtgtttcggggccaaatt

SEQ ID NO: 243204 - DNA, 30 bp, Artificial Sequence
  Synthetic oligonucleotide
cacggcgtagggccttaggtaatccaaatt

SEQ ID NO: 243205 - DNA, 30 bp, Artificial Sequence
  Synthetic oligonucleotide
tttcaaactatcgttacaaatgggcaaatt

SEQ ID NO: 243206 - DNA, 30 bp, Artificial Sequence
  Synthetic oligonucleotide
ccgagagctccccaagattcagatcaaatt

SEQ ID NO: 243207 - DNA, 30 bp, Artificial Sequence
  Synthetic oligonucleotide
aggatgtgaggcaactgctattatcaaatt

SEQ ID NO: 243208 - DNA, 30 bp, Artificial Sequence
  Synthetic oligonucleotide
tgtcagcctgcttcgcttcgacctcaaatt

SEQ ID NO: 243209 - DNA, 30 bp, Artificial Sequence
  Synthetic oligonucleotide
attagtgaagtagtttcttgagttcaaatt

SEQ ID NO: 243210 - DNA, 30 bp, Artificial Sequence
  Synthetic oligonucleotide
cctttatagcctacaacataatacgaaatt

SEQ ID NO: 243211 - DNA, 30 bp, Artificial Sequence
  Synthetic oligonucleotide
gcaatcgccgagtatgctcgggaggaaatt

SEQ ID NO: 243212 - DNA, 30 bp, Artificial Sequence
  Synthetic oligonucleotide
aaaaggcttgcaccaggacacagggaaatt

SEQ ID NO: 243213 - DNA, 30 bp, Artificial Sequence
  Synthetic oligonucleotide
cgtaagcgaggttggagttgctctgaaatt

SEQ ID NO: 243214 - DNA, 30 bp, Artificial Sequence
  Synthetic oligonucleotide
ccacatcgaccatgaaacgcaagtgaaatt

SEQ ID NO: 243215 - DNA, 30 bp, Artificial Sequence
  Synthetic oligonucleotide
atgaacgccacccacaatctgacataaatt

SEQ ID NO: 243216 - DNA, 30 bp, Artificial Sequence
  Synthetic oligonucleotide
acactcagtcgctaactattgagctaaatt

SEQ ID NO: 243217 - DNA, 30 bp, Artificial Sequence
  Synthetic oligonucleotide
gacaaacctgccagttacatagcaacaatt

SEQ ID NO: 243218 - DNA, 30 bp, Artificial Sequence
  Synthetic oligonucleotide
ggcgaaaagtttcgatcgcctgacacaatt

SEQ ID NO: 243219 - DNA, 30 bp, Artificial Sequence
  Synthetic oligonucleotide
cgatagaatcggaggtatatgttcacaatt

SEQ ID NO: 243220 - DNA, 30 bp, Artificial Sequence
  Synthetic oligonucleotide
accaagcggcgactaaaaacgggcccaatt

SEQ ID NO: 243221 - DNA, 30 bp, Artificial Sequence
  Synthetic oligonucleotide
gtacgtagtgcgtgtacaagaacgccaatt

SEQ ID NO: 243222 - DNA, 30 bp, Artificial Sequence
  Synthetic oligonucleotide
aggctgagcgtttaatacgtccatccaatt

SEQ ID NO: 243223 - DNA, 30 bp, Artificial Sequence
  Synthetic oligonucleotide
tagtagacgggcacacctcacaaatcaatt

SEQ ID NO: 243224 - DNA, 30 bp, Artificial Sequence
  Synthetic oligonucleotide
atgtaaatcaacaatggcacttactcaatt

SEQ ID NO: 243225 - DNA, 30 bp, Artificial Sequence
  Synthetic oligonucleotide
gaacaccacctcgctatcccggggtcaatt

SEQ ID NO: 243226 - DNA, 30 bp, Artificial Sequence
  Synthetic oligonucleotide
actagaagtcacatcgtgagtgattcaatt

SEQ ID NO: 243227 - DNA, 30 bp, Artificial Sequence
  Synthetic oligonucleotide
ccgtgggtcctcggcgttattgagagaatt

SEQ ID NO: 243228 - DNA, 31 bp, Artificial Sequence
  Synthetic oligonucleotide
gcctagttagcgatacgggaagcctagaatt

SEQ ID NO: 243229 - DNA, 30 bp, Artificial Sequence
  Synthetic oligonucleotide
ggactagggtgaggtgattccgttagaatt

SEQ ID NO: 243230 - DNA, 30 bp, Artificial Sequence
  Synthetic oligonucleotide
gaatgagtatttctacctcaggaacgaatt

SEQ ID NO: 243231 - DNA, 30 bp, Artificial Sequence
  Synthetic oligonucleotide
atgaacatgggtctcgggccggaacgaatt

SEQ ID NO: 243232 - DNA, 30 bp, Artificial Sequence
  Synthetic oligonucleotide
gcaataagaaatattatcaggccccgaatt

SEQ ID NO: 243233 - DNA, 30 bp, Artificial Sequence
  Synthetic oligonucleotide
cgggggattgaaggatacgtgggaggaatt

SEQ ID NO: 243234 - DNA, 30 bp, Artificial Sequence
  Synthetic oligonucleotide
taagagggatttagactacacataggaatt

SEQ ID NO: 243235 - DNA, 30 bp, Artificial Sequence
  Synthetic oligonucleotide
acatagtcagccccaccttaattcggaatt

SEQ ID NO: 243236 - DNA, 30 bp, Artificial Sequence
  Synthetic oligonucleotide
atagattaagttaattagcagcactgaatt

SEQ ID NO: 243237 - DNA, 30 bp, Artificial Sequence
  Synthetic oligonucleotide
cggtttatgcgtgatacccaagattgaatt

SEQ ID NO: 243238 - DNA, 30 bp, Artificial Sequence
  Synthetic oligonucleotide
ttgggcagattattgatgatttccataatt

SEQ ID NO: 243239 - DNA, 30 bp, Artificial Sequence
  Synthetic oligonucleotide
ctaagacaaatcatcgtgagggagataatt

SEQ ID NO: 243240 - DNA, 30 bp, Artificial Sequence
  Synthetic oligonucleotide
gacgggggggatctctccaattagataatt

SEQ ID NO: 243241 - DNA, 30 bp, Artificial Sequence
  Synthetic oligonucleotide
aattaagtagaacgccgtagtgcgataatt

SEQ ID NO: 243242 - DNA, 30 bp, Artificial Sequence
  Synthetic oligonucleotide
tcgcgtcccaaatgactcgattcgataatt

SEQ ID NO: 243243 - DNA, 30 bp, Artificial Sequence
  Synthetic oligonucleotide
tctggacgggtagacataccgaggataatt

SEQ ID NO: 243244 - DNA, 30 bp, Artificial Sequence
  Synthetic oligonucleotide
caacgatgcgacatacgtttgggtataatt

SEQ ID NO: 243245 - DNA, 30 bp, Artificial Sequence
  Synthetic oligonucleotide
cttaacggggtttgtttgtctcttataatt

SEQ ID NO: 243246 - DNA, 30 bp, Artificial Sequence
  Synthetic oligonucleotide
ggaaaaatagagtgcattcacgcactaatt

SEQ ID NO: 243247 - DNA, 30 bp, Artificial Sequence
  Synthetic oligonucleotide
tttggctgctggccgagtccgtaagtaatt

SEQ ID NO: 243248 - DNA, 30 bp, Artificial Sequence
  Synthetic oligonucleotide
taaactgctacctcaagactaacagtaatt

SEQ ID NO: 243249 - DNA, 30 bp, Artificial Sequence
  Synthetic oligonucleotide
aaggaagcgcggaaagtgcttttagtaatt

SEQ ID NO: 243250 - DNA, 30 bp, Artificial Sequence
  Synthetic oligonucleotide
ttctggatcgagcctcacaccacggtaatt

SEQ ID NO: 243251 - DNA, 30 bp, Artificial Sequence
  Synthetic oligonucleotide
gggacatctttaagtgagcggacggtaatt

SEQ ID NO: 243252 - DNA, 30 bp, Artificial Sequence
  Synthetic oligonucleotide
gcatttaacgaaacgaaactctgggtaatt

SEQ ID NO: 243253 - DNA, 30 bp, Artificial Sequence
  Synthetic oligonucleotide
ccgagccggaagcaaggtgtcgtggtaatt

SEQ ID NO: 243254 - DNA, 30 bp, Artificial Sequence
  Synthetic oligonucleotide
cgcaatttgaagtgtataggatgattaatt

SEQ ID NO: 243255 - DNA, 30 bp, Artificial Sequence
  Synthetic oligonucleotide
cgcctcgataccgacccaccactattaatt

SEQ ID NO: 243256 - DNA, 30 bp, Artificial Sequence
  Synthetic oligonucleotide
cacgcactatccaaggatgctgtattaatt

SEQ ID NO: 243257 - DNA, 30 bp, Artificial Sequence
  Synthetic oligonucleotide
cggttaactcaggtaaagttgttcttaatt

SEQ ID NO: 243258 - DNA, 30 bp, Artificial Sequence
  Synthetic oligonucleotide
acttaggataaaagtcgctataggttaatt

SEQ ID NO: 243259 - DNA, 30 bp, Artificial Sequence
  Synthetic oligonucleotide
ggggaagcaatcaataggagtactttaatt

SEQ ID NO: 243260 - DNA, 30 bp, Artificial Sequence
  Synthetic oligonucleotide
ttcttgtccgaaagtacccaatgtttaatt

SEQ ID NO: 243261 - DNA, 30 bp, Artificial Sequence
  Synthetic oligonucleotide
ccatcccctaactgtccaatgtgtttaatt

SEQ ID NO: 243262 - DNA, 30 bp, Artificial Sequence
  Synthetic oligonucleotide
attctggcaatccagacccaaagaaacatt

SEQ ID NO: 243263 - DNA, 30 bp, Artificial Sequence
  Synthetic oligonucleotide
tctgggaaaagcggacacacctccaacatt

SEQ ID NO: 243264 - DNA, 30 bp, Artificial Sequence
  Synthetic oligonucleotide
ttgatagtgtagtaagttttgtccaacatt

SEQ ID NO: 243265 - DNA, 30 bp, Artificial Sequence
  Synthetic oligonucleotide
ggaaacagtcttgcaccacaggggaacatt

SEQ ID NO: 243266 - DNA, 30 bp, Artificial Sequence
  Synthetic oligonucleotide
aagatctagtgcgattgaaagtataacatt

SEQ ID NO: 243267 - DNA, 30 bp, Artificial Sequence
  Synthetic oligonucleotide
ggggcgagcagggataattacgctaacatt

SEQ ID NO: 243268 - DNA, 30 bp, Artificial Sequence
  Synthetic oligonucleotide
aaggtcataccgttcccccggtaacacatt

SEQ ID NO: 243269 - DNA, 30 bp, Artificial Sequence
  Synthetic oligonucleotide
atgtatagggcataactctggaaccacatt

SEQ ID NO: 243270 - DNA, 30 bp, Artificial Sequence
  Synthetic oligonucleotide
ccgggaccgatgggggaagggggccacatt

SEQ ID NO: 243271 - DNA, 30 bp, Artificial Sequence
  Synthetic oligonucleotide
acttgttgggcgtgtgctaatctgcacatt

SEQ ID NO: 243272 - DNA, 30 bp, Artificial Sequence
  Synthetic oligonucleotide
ggctcattactagagtaatccatagacatt

SEQ ID NO: 243273 - DNA, 30 bp, Artificial Sequence
  Synthetic oligonucleotide
tgcaatgcaggagcggaatttcccgacatt

SEQ ID NO: 243274 - DNA, 30 bp, Artificial Sequence
  Synthetic oligonucleotide
aacaactcggacagcgcatcgaaatacatt

SEQ ID NO: 243275 - DNA, 30 bp, Artificial Sequence
  Synthetic oligonucleotide
gtcttaaagtacagatggcataaatacatt

SEQ ID NO: 243276 - DNA, 30 bp, Artificial Sequence
  Synthetic oligonucleotide
ccgagatggagagttgcacccatatacatt

SEQ ID NO: 243277 - DNA, 30 bp, Artificial Sequence
  Synthetic oligonucleotide
accgaagacgcatcacaatctcagtacatt

SEQ ID NO: 243278 - DNA, 30 bp, Artificial Sequence
  Synthetic oligonucleotide
cgtgccactcaaatagggaacgtgtacatt

SEQ ID NO: 243279 - DNA, 30 bp, Artificial Sequence
  Synthetic oligonucleotide
ccgagggagttcgataattccgcttacatt

SEQ ID NO: 243280 - DNA, 30 bp, Artificial Sequence
  Synthetic oligonucleotide
tactgtagtctcagggttatcctaaccatt

SEQ ID NO: 243281 - DNA, 30 bp, Artificial Sequence
  Synthetic oligonucleotide
attcggatggattaagcatcatgcaccatt

SEQ ID NO: 243282 - DNA, 30 bp, Artificial Sequence
  Synthetic oligonucleotide
aagttacaccttggctatcactgcaccatt

SEQ ID NO: 243283 - DNA, 30 bp, Artificial Sequence
  Synthetic oligonucleotide
gtggaaatgaagtcattggatatcaccatt

SEQ ID NO: 243284 - DNA, 30 bp, Artificial Sequence
  Synthetic oligonucleotide
ccggacacgatcttcgtcgttgggaccatt

SEQ ID NO: 243285 - DNA, 30 bp, Artificial Sequence
  Synthetic oligonucleotide
acgttcattgattagagcatactgaccatt

SEQ ID NO: 243286 - DNA, 30 bp, Artificial Sequence
  Synthetic oligonucleotide
ttatggataataacgaggatgggtaccatt

SEQ ID NO: 243287 - DNA, 30 bp, Artificial Sequence
  Synthetic oligonucleotide
atctgtggatgatccgagtgcgttaccatt

SEQ ID NO: 243288 - DNA, 30 bp, Artificial Sequence
  Synthetic oligonucleotide
gtcggtggtatcaagaagcgataacccatt

SEQ ID NO: 243289 - DNA, 30 bp, Artificial Sequence
  Synthetic oligonucleotide
agagtcgggcggatgtagagctaacccatt

SEQ ID NO: 243290 - DNA, 30 bp, Artificial Sequence
  Synthetic oligonucleotide
cgatggtcgatgccgcttgattgacccatt

SEQ ID NO: 243291 - DNA, 30 bp, Artificial Sequence
  Synthetic oligonucleotide
ggttgtctgccgttactgacaatccccatt

SEQ ID NO: 243292 - DNA, 30 bp, Artificial Sequence
  Synthetic oligonucleotide
ctaacattcgattcaaactgagtccccatt

SEQ ID NO: 243293 - DNA, 30 bp, Artificial Sequence
  Synthetic oligonucleotide
taataacacgacagcctcttattccccatt

SEQ ID NO: 243294 - DNA, 30 bp, Artificial Sequence
  Synthetic oligonucleotide
acttcggagtgaccgttgcacgagcccatt

SEQ ID NO: 243295 - DNA, 30 bp, Artificial Sequence
  Synthetic oligonucleotide
cgaggtggaacaggactcacgccagccatt

SEQ ID NO: 243296 - DNA, 30 bp, Artificial Sequence
  Synthetic oligonucleotide
tggagggcaagtgcctcatgactagccatt

SEQ ID NO: 243297 - DNA, 30 bp, Artificial Sequence
  Synthetic oligonucleotide
ggatggccgaagtggagaatggacgccatt

SEQ ID NO: 243298 - DNA, 30 bp, Artificial Sequence
  Synthetic oligonucleotide
ccgagtgatgacagagtcatgaccgccatt

SEQ ID NO: 243299 - DNA, 30 bp, Artificial Sequence
  Synthetic oligonucleotide
aacatgtcacgcgggtcagaagaggccatt

SEQ ID NO: 243300 - DNA, 30 bp, Artificial Sequence
  Synthetic oligonucleotide
ggacagaattgagacaatagcccggccatt

SEQ ID NO: 243301 - DNA, 30 bp, Artificial Sequence
  Synthetic oligonucleotide
atcatagggtcacgttggaagacatccatt

SEQ ID NO: 243302 - DNA, 30 bp, Artificial Sequence
  Synthetic oligonucleotide
cagagtagggcaaaccgcaacatatccatt

SEQ ID NO: 243303 - DNA, 30 bp, Artificial Sequence
  Synthetic oligonucleotide
ggcgcaaatcatgccaacttttactccatt

SEQ ID NO: 243304 - DNA, 31 bp, Artificial Sequence
  Synthetic oligonucleotide
ttaacacacgactagtctgatgatctccatt

SEQ ID NO: 243305 - DNA, 30 bp, Artificial Sequence
  Synthetic oligonucleotide
aagaaggtcagtgctgaatgtaggtccatt

SEQ ID NO: 243306 - DNA, 30 bp, Artificial Sequence
  Synthetic oligonucleotide
atgacggtacgtaaccgtagatgaagcatt

SEQ ID NO: 243307 - DNA, 30 bp, Artificial Sequence
  Synthetic oligonucleotide
gggtatattgaatcttaaagcaacagcatt

SEQ ID NO: 243308 - DNA, 30 bp, Artificial Sequence
  Synthetic oligonucleotide
gcaattggaaagcatataaggaacagcatt

SEQ ID NO: 243309 - DNA, 30 bp, Artificial Sequence
  Synthetic oligonucleotide
cgagtataggaagctcgtttctagagcatt

SEQ ID NO: 243310 - DNA, 30 bp, Artificial Sequence
  Synthetic oligonucleotide
tagggacttacataacagtgagcgagcatt

SEQ ID NO: 243311 - DNA, 30 bp, Artificial Sequence
  Synthetic oligonucleotide
agacagagacacggggcaactcctagcatt

SEQ ID NO: 243312 - DNA, 30 bp, Artificial Sequence
  Synthetic oligonucleotide
caataacagcgtgagttttgtcaacgcatt

SEQ ID NO: 243313 - DNA, 30 bp, Artificial Sequence
  Synthetic oligonucleotide
gttgaggcaaagagtctgtccccacgcatt

SEQ ID NO: 243314 - DNA, 30 bp, Artificial Sequence
  Synthetic oligonucleotide
gctgggccaggaatacatattgcccgcatt

SEQ ID NO: 243315 - DNA, 30 bp, Artificial Sequence
  Synthetic oligonucleotide
ataacatttgcttacttgtacaagcgcatt

SEQ ID NO: 243316 - DNA, 30 bp, Artificial Sequence
  Synthetic oligonucleotide
gctgggaaactattcgtttacgtaggcatt

SEQ ID NO: 243317 - DNA, 30 bp, Artificial Sequence
  Synthetic oligonucleotide
gctaaaacaaggagccatgtgcccggcatt

SEQ ID NO: 243318 - DNA, 30 bp, Artificial Sequence
  Synthetic oligonucleotide
gtgtcggtcggcgcgttgtggagcggcatt

SEQ ID NO: 243319 - DNA, 30 bp, Artificial Sequence
  Synthetic oligonucleotide
cacatcttcgaagcgtatggacagggcatt

SEQ ID NO: 243320 - DNA, 30 bp, Artificial Sequence
  Synthetic oligonucleotide
taatatacgtgagcttgggtacatggcatt

SEQ ID NO: 243321 - DNA, 30 bp, Artificial Sequence
  Synthetic oligonucleotide
aagcgagtctcatgagggcggaaatgcatt

SEQ ID NO: 243322 - DNA, 30 bp, Artificial Sequence
  Synthetic oligonucleotide
gaagacgaaagtcttttatgtgaatgcatt

SEQ ID NO: 243323 - DNA, 30 bp, Artificial Sequence
  Synthetic oligonucleotide
tgacggtagcccatctaaggtttatgcatt

SEQ ID NO: 243324 - DNA, 30 bp, Artificial Sequence
  Synthetic oligonucleotide
gcgcgactattgaggccgcgggcctgcatt

SEQ ID NO: 243325 - DNA, 30 bp, Artificial Sequence
  Synthetic oligonucleotide
tcatcactggacaatgcataagtctgcatt

SEQ ID NO: 243326 - DNA, 30 bp, Artificial Sequence
  Synthetic oligonucleotide
acaaaatacgcaaactaagcggagtgcatt

SEQ ID NO: 243327 - DNA, 30 bp, Artificial Sequence
  Synthetic oligonucleotide
aacgatggaccaaacagcgtgccaatcatt

SEQ ID NO: 243328 - DNA, 29 bp, Artificial Sequence
  Synthetic oligonucleotide
aagccctgtttacgtactccataatcatt

SEQ ID NO: 243329 - DNA, 30 bp, Artificial Sequence
  Synthetic oligonucleotide
ccgggtgtaaaatgaagccacttcatcatt

SEQ ID NO: 243330 - DNA, 30 bp, Artificial Sequence
  Synthetic oligonucleotide
gaccatagagtcagagtatccaatatcatt

SEQ ID NO: 243331 - DNA, 30 bp, Artificial Sequence
  Synthetic oligonucleotide
tgttgatcggggttaagcgtacatatcatt

SEQ ID NO: 243332 - DNA, 30 bp, Artificial Sequence
  Synthetic oligonucleotide
aacggcattcgaatcttagtatttatcatt

SEQ ID NO: 243333 - DNA, 30 bp, Artificial Sequence
  Synthetic oligonucleotide
gtccatgcatttgtcgactcacagctcatt

SEQ ID NO: 243334 - DNA, 31 bp, Artificial Sequence
  Synthetic oligonucleotide
cgaccaggaaatctagcatttggagctcatt

SEQ ID NO: 243335 - DNA, 30 bp, Artificial Sequence
  Synthetic oligonucleotide
aagaggttataaggttcaacaatgctcatt

SEQ ID NO: 243336 - DNA, 30 bp, Artificial Sequence
  Synthetic oligonucleotide
caattaaaccgctgtatctcacttctcatt

SEQ ID NO: 243337 - DNA, 30 bp, Artificial Sequence
  Synthetic oligonucleotide
gttactagctgcgagtcggtcgttctcatt

SEQ ID NO: 243338 - DNA, 30 bp, Artificial Sequence
  Synthetic oligonucleotide
atggatccattcaattctgtgcaagtcatt

SEQ ID NO: 243339 - DNA, 30 bp, Artificial Sequence
  Synthetic oligonucleotide
agcttgggtcaaagatggtttgatgtcatt

SEQ ID NO: 243340 - DNA, 30 bp, Artificial Sequence
  Synthetic oligonucleotide
taccatcgaacaatgagcctttctttcatt

SEQ ID NO: 243341 - DNA, 30 bp, Artificial Sequence
  Synthetic oligonucleotide
catgccctgcagagatggagaaaaaagatt

SEQ ID NO: 243342 - DNA, 30 bp, Artificial Sequence
  Synthetic oligonucleotide
gtaagtctgttaagtcgaagcaacaagatt

SEQ ID NO: 243343 - DNA, 30 bp, Artificial Sequence
  Synthetic oligonucleotide
gtcccagcacgcccgaacccggtcaagatt

SEQ ID NO: 243344 - DNA, 30 bp, Artificial Sequence
  Synthetic oligonucleotide
gacaagtcgtaagtggcgttatagaagatt

SEQ ID NO: 243345 - DNA, 30 bp, Artificial Sequence
  Synthetic oligonucleotide
gcatgtcatgcagtcgcggagaggaagatt

SEQ ID NO: 243346 - DNA, 30 bp, Artificial Sequence
  Synthetic oligonucleotide
taattgttctccgccactacacctaagatt

SEQ ID NO: 243347 - DNA, 30 bp, Artificial Sequence
  Synthetic oligonucleotide
cgctgccatagacctgctataatccagatt

SEQ ID NO: 243348 - DNA, 30 bp, Artificial Sequence
  Synthetic oligonucleotide
ctattagtacttcgtacattacatcagatt

SEQ ID NO: 243349 - DNA, 30 bp, Artificial Sequence
  Synthetic oligonucleotide
aactgtagttaagacatcgagcatcagatt

SEQ ID NO: 243350 - DNA, 30 bp, Artificial Sequence
  Synthetic oligonucleotide
ggattaagccgtttcggaatcactcagatt

SEQ ID NO: 243351 - DNA, 30 bp, Artificial Sequence
  Synthetic oligonucleotide
tgtattccgaattcgcgacttcgtcagatt

SEQ ID NO: 243352 - DNA, 30 bp, Artificial Sequence
  Synthetic oligonucleotide
agggggggtatagtgcagcttattcagatt

SEQ ID NO: 243353 - DNA, 30 bp, Artificial Sequence
  Synthetic oligonucleotide
attaagcgatgggatgtgggcggagagatt

SEQ ID NO: 243354 - DNA, 30 bp, Artificial Sequence
  Synthetic oligonucleotide
gccgcgaaaaatttggccactgccgagatt

SEQ ID NO: 243355 - DNA, 30 bp, Artificial Sequence
  Synthetic oligonucleotide
gtaggaaagtgatgattgttaatcgagatt

SEQ ID NO: 243356 - DNA, 30 bp, Artificial Sequence
  Synthetic oligonucleotide
ttcgagggagcgtggcaaagtctcgagatt

SEQ ID NO: 243357 - DNA, 30 bp, Artificial Sequence
  Synthetic oligonucleotide
ttcgaggcagagcggaactgggcggagatt

SEQ ID NO: 243358 - DNA, 30 bp, Artificial Sequence
  Synthetic oligonucleotide
gctgggcggactaggtagccggatgagatt

SEQ ID NO: 243359 - DNA, 30 bp, Artificial Sequence
  Synthetic oligonucleotide
attgatcctcggtgctcttcccaaacgatt

SEQ ID NO: 243360 - DNA, 30 bp, Artificial Sequence
  Synthetic oligonucleotide
tggctagggcctaaaggacacacgacgatt

SEQ ID NO: 243361 - DNA, 30 bp, Artificial Sequence
  Synthetic oligonucleotide
cagattctcaatggctgaaggggtacgatt

SEQ ID NO: 243362 - DNA, 30 bp, Artificial Sequence
  Synthetic oligonucleotide
gaaacatcggtacagggtaatgttacgatt

SEQ ID NO: 243363 - DNA, 30 bp, Artificial Sequence
  Synthetic oligonucleotide
tccatcacatcatatggcggatccccgatt

SEQ ID NO: 243364 - DNA, 30 bp, Artificial Sequence
  Synthetic oligonucleotide
cctgaatagctaacagcgcttgtcccgatt

SEQ ID NO: 243365 - DNA, 30 bp, Artificial Sequence
  Synthetic oligonucleotide
agagtaggtaccattctcgatagcgcgatt

SEQ ID NO: 243366 - DNA, 30 bp, Artificial Sequence
  Synthetic oligonucleotide
ggactgatttgttgcaacaatttcgcgatt

SEQ ID NO: 243367 - DNA, 30 bp, Artificial Sequence
  Synthetic oligonucleotide
cctaagatacagttgcagtggtttgcgatt

SEQ ID NO: 243368 - DNA, 30 bp, Artificial Sequence
  Synthetic oligonucleotide
acatgcacccatcggacagagatatcgatt

SEQ ID NO: 243369 - DNA, 30 bp, Artificial Sequence
  Synthetic oligonucleotide
atatgagttggtaactaaacgaagtcgatt

SEQ ID NO: 243370 - DNA, 30 bp, Artificial Sequence
  Synthetic oligonucleotide
gcagaccatacaccgccgcctgcttcgatt

SEQ ID NO: 243371 - DNA, 30 bp, Artificial Sequence
  Synthetic oligonucleotide
cacccaatgtgcgacggagatggttcgatt

SEQ ID NO: 243372 - DNA, 30 bp, Artificial Sequence
  Synthetic oligonucleotide
gccggagtgtgaatctggacatcaaggatt

SEQ ID NO: 243373 - DNA, 30 bp, Artificial Sequence
  Synthetic oligonucleotide
agtcgccactttggtcgggacatcaggatt

SEQ ID NO: 243374 - DNA, 30 bp, Artificial Sequence
  Synthetic oligonucleotide
cctcttcgaataagcatgccagtcaggatt

SEQ ID NO: 243375 - DNA, 30 bp, Artificial Sequence
  Synthetic oligonucleotide
ctcgcgagacgattctaatcggggaggatt

SEQ ID NO: 243376 - DNA, 30 bp, Artificial Sequence
  Synthetic oligonucleotide
catgtaagggtgtggctagggagacggatt

SEQ ID NO: 243377 - DNA, 30 bp, Artificial Sequence
  Synthetic oligonucleotide
gtcgagtatatcgtctgcagttggcggatt

SEQ ID NO: 243378 - DNA, 30 bp, Artificial Sequence
  Synthetic oligonucleotide
ccgtcttaaccctgtatcgaaaaagggatt

SEQ ID NO: 243379 - DNA, 30 bp, Artificial Sequence
  Synthetic oligonucleotide
ttatggctcacgagggtcgttcaagggatt

SEQ ID NO: 243380 - DNA, 30 bp, Artificial Sequence
  Synthetic oligonucleotide
ttgtgacatgtaatttgtaggttcgggatt

SEQ ID NO: 243381 - DNA, 30 bp, Artificial Sequence
  Synthetic oligonucleotide
tcaacaggatagcaccagtccagggggatt

SEQ ID NO: 243382 - DNA, 30 bp, Artificial Sequence
  Synthetic oligonucleotide
caagagacgattggtaaaaccagatggatt

SEQ ID NO: 243383 - DNA, 30 bp, Artificial Sequence
  Synthetic oligonucleotide
aaacactagtagtatgctcagcgctggatt

SEQ ID NO: 243384 - DNA, 30 bp, Artificial Sequence
  Synthetic oligonucleotide
ttcgaggatttaaagaaacgccattggatt

SEQ ID NO: 243385 - DNA, 30 bp, Artificial Sequence
  Synthetic oligonucleotide
tctgagcgtagctggttacgtatttggatt

SEQ ID NO: 243386 - DNA, 30 bp, Artificial Sequence
  Synthetic oligonucleotide
atgaggagacacgggatcgttgcaatgatt

SEQ ID NO: 243387 - DNA, 30 bp, Artificial Sequence
  Synthetic oligonucleotide
cgacgaagcaatgatgtaatgataatgatt

SEQ ID NO: 243388 - DNA, 30 bp, Artificial Sequence
  Synthetic oligonucleotide
gatagagattcccccggatcgttaatgatt

SEQ ID NO: 243389 - DNA, 30 bp, Artificial Sequence
  Synthetic oligonucleotide
ccattgattgtggccgagcgacacatgatt

SEQ ID NO: 243390 - DNA, 30 bp, Artificial Sequence
  Synthetic oligonucleotide
acaggtcatacgaatctctcgcacatgatt

SEQ ID NO: 243391 - DNA, 30 bp, Artificial Sequence
  Synthetic oligonucleotide
atggtttatacgaggttgtaagccatgatt

SEQ ID NO: 243392 - DNA, 30 bp, Artificial Sequence
  Synthetic oligonucleotide
ccgcaatgactgcgactgaatggcatgatt

SEQ ID NO: 243393 - DNA, 30 bp, Artificial Sequence
  Synthetic oligonucleotide
ataatctcaatcgccgtacgactcatgatt

SEQ ID NO: 243394 - DNA, 30 bp, Artificial Sequence
  Synthetic oligonucleotide
agggtctctaatagaaagcacgcgatgatt

SEQ ID NO: 243395 - DNA, 30 bp, Artificial Sequence
  Synthetic oligonucleotide
ggcacgtcgcgcaccacgtaggtgatgatt

SEQ ID NO: 243396 - DNA, 30 bp, Artificial Sequence
  Synthetic oligonucleotide
taactggggtgcgtgtggagccgtatgatt

SEQ ID NO: 243397 - DNA, 30 bp, Artificial Sequence
  Synthetic oligonucleotide
gacgtgattcgggcactcgtgcggctgatt

SEQ ID NO: 243398 - DNA, 30 bp, Artificial Sequence
  Synthetic oligonucleotide
ggtagaataggcagatgagatttgctgatt

SEQ ID NO: 243399 - DNA, 30 bp, Artificial Sequence
  Synthetic oligonucleotide
tccaacacccgacgtagtgctggtctgatt

SEQ ID NO: 243400 - DNA, 30 bp, Artificial Sequence
  Synthetic oligonucleotide
attagggtgtcatgttaaaggtaagtgatt

SEQ ID NO: 243401 - DNA, 30 bp, Artificial Sequence
  Synthetic oligonucleotide
gtgaaggtcatctactgcaggacagtgatt

SEQ ID NO: 243402 - DNA, 30 bp, Artificial Sequence
  Synthetic oligonucleotide
tcaccttatcggctcatcacagcggtgatt

SEQ ID NO: 243403 - DNA, 30 bp, Artificial Sequence
  Synthetic oligonucleotide
aaatcgtgacttgacgaaggaagggtgatt

SEQ ID NO: 243404 - DNA, 30 bp, Artificial Sequence
  Synthetic oligonucleotide
gtaggctgtgccagcattggatgggtgatt

SEQ ID NO: 243405 - DNA, 30 bp, Artificial Sequence
  Synthetic oligonucleotide
tgatgttgctatctgtccccgaatgtgatt

SEQ ID NO: 243406 - DNA, 30 bp, Artificial Sequence
  Synthetic oligonucleotide
ttgggcggagttgctggtgtgtgtgtgatt

SEQ ID NO: 243407 - DNA, 30 bp, Artificial Sequence
  Synthetic oligonucleotide
ggcaacaagtgtcattagtattttgtgatt

SEQ ID NO: 243408 - DNA, 25 bp, Artificial Sequence
  Synthetic oligonucleotide
tgtgcttgaaacatacgaattgatt

SEQ ID NO: 243409 - DNA, 30 bp, Artificial Sequence
  Synthetic oligonucleotide
tgatggtcatcttatatacccagattgatt

SEQ ID NO: 243410 - DNA, 30 bp, Artificial Sequence
  Synthetic oligonucleotide
gtgtaagagagtcagtagtactgcttgatt

SEQ ID NO: 243411 - DNA, 30 bp, Artificial Sequence
  Synthetic oligonucleotide
acgtatgctagcgcatgttaactcttgatt

SEQ ID NO: 243412 - DNA, 30 bp, Artificial Sequence
  Synthetic oligonucleotide
ataacgtgataactgggcgatcggttgatt

SEQ ID NO: 243413 - DNA, 30 bp, Artificial Sequence
  Synthetic oligonucleotide
aactgcacggaacggactccgactttgatt

SEQ ID NO: 243414 - DNA, 30 bp, Artificial Sequence
  Synthetic oligonucleotide
ttagagtcaagtctgcgcgagggcaatatt

SEQ ID NO: 243415 - DNA, 30 bp, Artificial Sequence
  Synthetic oligonucleotide
agtgcgaggatatgttaggcagcgaatatt

SEQ ID NO: 243416 - DNA, 30 bp, Artificial Sequence
  Synthetic oligonucleotide
tcgcaaagttaagacggctggcataatatt

SEQ ID NO: 243417 - DNA, 30 bp, Artificial Sequence
  Synthetic oligonucleotide
ggaaatatgtacggcagccagtgtaatatt

SEQ ID NO: 243418 - DNA, 30 bp, Artificial Sequence
  Synthetic oligonucleotide
tgagtctattgtgatccagtgagccatatt

SEQ ID NO: 243419 - DNA, 30 bp, Artificial Sequence
  Synthetic oligonucleotide
cgacactaggttgatcggtaccggcatatt

SEQ ID NO: 243420 - DNA, 30 bp, Artificial Sequence
  Synthetic oligonucleotide
ggtgatttaccttcactggttgggcatatt

SEQ ID NO: 243421 - DNA, 30 bp, Artificial Sequence
  Synthetic oligonucleotide
gaacttctaattatgaaagagtatcatatt

SEQ ID NO: 243422 - DNA, 30 bp, Artificial Sequence
  Synthetic oligonucleotide
caacctacctccatgttgtgtggcgatatt

SEQ ID NO: 243423 - DNA, 30 bp, Artificial Sequence
  Synthetic oligonucleotide
aaactaacgtgtgtggcatgttgtgatatt

SEQ ID NO: 243424 - DNA, 30 bp, Artificial Sequence
  Synthetic oligonucleotide
taacgttatgaggtataagtccttgatatt

SEQ ID NO: 243425 - DNA, 30 bp, Artificial Sequence
  Synthetic oligonucleotide
cgcgactcgactaagcagccatgatatatt

SEQ ID NO: 243426 - DNA, 30 bp, Artificial Sequence
  Synthetic oligonucleotide
ccatttacaatcgtaagggtgtactatatt

SEQ ID NO: 243427 - DNA, 30 bp, Artificial Sequence
  Synthetic oligonucleotide
ctgtagaaagtacccctactgtagtatatt

SEQ ID NO: 243428 - DNA, 30 bp, Artificial Sequence
  Synthetic oligonucleotide
atggattcggggtgacgaccggtgtatatt

SEQ ID NO: 243429 - DNA, 30 bp, Artificial Sequence
  Synthetic oligonucleotide
gttgggcacaacgcgtcttggtgttatatt

SEQ ID NO: 243430 - DNA, 30 bp, Artificial Sequence
  Synthetic oligonucleotide
ggcacgacgcccaaatgcacagtaactatt

SEQ ID NO: 243431 - DNA, 30 bp, Artificial Sequence
  Synthetic oligonucleotide
gaggttcgaaggcactacgaaaacactatt

SEQ ID NO: 243432 - DNA, 30 bp, Artificial Sequence
  Synthetic oligonucleotide
cagggtgggtttagggtacggggcactatt

SEQ ID NO: 243433 - DNA, 30 bp, Artificial Sequence
  Synthetic oligonucleotide
tcaatataacctaagtggcgactacctatt

SEQ ID NO: 243434 - DNA, 30 bp, Artificial Sequence
  Synthetic oligonucleotide
tggaggtttcatgctaacggctaccctatt

SEQ ID NO: 243435 - DNA, 30 bp, Artificial Sequence
  Synthetic oligonucleotide
tctttgtgagacataacttttgagcctatt

SEQ ID NO: 243436 - DNA, 30 bp, Artificial Sequence
  Synthetic oligonucleotide
gactaatttcaaacaagctgtccgcctatt

SEQ ID NO: 243437 - DNA, 30 bp, Artificial Sequence
  Synthetic oligonucleotide
aagtgccgggggtccgcgttcaggcctatt

SEQ ID NO: 243438 - DNA, 30 bp, Artificial Sequence
  Synthetic oligonucleotide
cttactatcagcatcttctgtaaagctatt

SEQ ID NO: 243439 - DNA, 30 bp, Artificial Sequence
  Synthetic oligonucleotide
tcggctattcagatggacaaagaagctatt

SEQ ID NO: 243440 - DNA, 30 bp, Artificial Sequence
  Synthetic oligonucleotide
acgttttaatgatgggtgtcggaagctatt

SEQ ID NO: 243441 - DNA, 30 bp, Artificial Sequence
  Synthetic oligonucleotide
tcatattgtaaggtctgatatacagctatt

SEQ ID NO: 243442 - DNA, 30 bp, Artificial Sequence
  Synthetic oligonucleotide
tatggacatattactcacaagagagctatt

SEQ ID NO: 243443 - DNA, 30 bp, Artificial Sequence
  Synthetic oligonucleotide
ttataggatgaaatacaaagatgagctatt

SEQ ID NO: 243444 - DNA, 30 bp, Artificial Sequence
  Synthetic oligonucleotide
agcgtaggcacgaactctcgtatagctatt

SEQ ID NO: 243445 - DNA, 30 bp, Artificial Sequence
  Synthetic oligonucleotide
ggctaaatgctcttaggctacctagctatt

SEQ ID NO: 243446 - DNA, 30 bp, Artificial Sequence
  Synthetic oligonucleotide
gtccagaatgatgtacggccccgctctatt

SEQ ID NO: 243447 - DNA, 30 bp, Artificial Sequence
  Synthetic oligonucleotide
ggggcacgcgggggtgagctcgtgtctatt

SEQ ID NO: 243448 - DNA, 30 bp, Artificial Sequence
  Synthetic oligonucleotide
gacggtagtctccgaaggtctgcttctatt

SEQ ID NO: 243449 - DNA, 30 bp, Artificial Sequence
  Synthetic oligonucleotide
agtagcttgcatgtggggtaatgtagtatt

SEQ ID NO: 243450 - DNA, 30 bp, Artificial Sequence
  Synthetic oligonucleotide
gctaaatattaggatcgaaaggaacgtatt

SEQ ID NO: 243451 - DNA, 30 bp, Artificial Sequence
  Synthetic oligonucleotide
agtcaacagtagaaactagtcgtacgtatt

SEQ ID NO: 243452 - DNA, 30 bp, Artificial Sequence
  Synthetic oligonucleotide
caattctccgcataacgatgttgccgtatt

SEQ ID NO: 243453 - DNA, 30 bp, Artificial Sequence
  Synthetic oligonucleotide
tctagtaggacccaaggggtaatgcgtatt

SEQ ID NO: 243454 - DNA, 34 bp, Artificial Sequence
  Synthetic oligonucleotide
tcagcttactaagaataggcatcatagtcgtatt

SEQ ID NO: 243455 - DNA, 30 bp, Artificial Sequence
  Synthetic oligonucleotide
gggcatgttccggtgtcgcagaacggtatt

SEQ ID NO: 243456 - DNA, 30 bp, Artificial Sequence
  Synthetic oligonucleotide
ggggagaggtaaaatttaattgacggtatt

SEQ ID NO: 243457 - DNA, 30 bp, Artificial Sequence
  Synthetic oligonucleotide
attttaagagggggaaaagcaacctgtatt

SEQ ID NO: 243458 - DNA, 30 bp, Artificial Sequence
  Synthetic oligonucleotide
tcccttgtgcgataattccccatctgtatt

SEQ ID NO: 243459 - DNA, 30 bp, Artificial Sequence
  Synthetic oligonucleotide
cctacgccataagcctcgaagcagtgtatt

SEQ ID NO: 243460 - DNA, 30 bp, Artificial Sequence
  Synthetic oligonucleotide
actaattgtaagtagtggttagggtgtatt

SEQ ID NO: 243461 - DNA, 30 bp, Artificial Sequence
  Synthetic oligonucleotide
gtgagcatgcatcggtttgtaaacattatt

SEQ ID NO: 243462 - DNA, 30 bp, Artificial Sequence
  Synthetic oligonucleotide
cggatgaatgtcaaaaatccaggcattatt

SEQ ID NO: 243463 - DNA, 30 bp, Artificial Sequence
  Synthetic oligonucleotide
acggggagcttaagagaaaataaccttatt

SEQ ID NO: 243464 - DNA, 30 bp, Artificial Sequence
  Synthetic oligonucleotide
gagaccacatcgatccctcctacccttatt

SEQ ID NO: 243465 - DNA, 30 bp, Artificial Sequence
  Synthetic oligonucleotide
cgtgccgaagggggggaccagccccttatt

SEQ ID NO: 243466 - DNA, 30 bp, Artificial Sequence
  Synthetic oligonucleotide
ctaaccacaatacccgctgcgggccttatt

SEQ ID NO: 243467 - DNA, 30 bp, Artificial Sequence
  Synthetic oligonucleotide
tggcatggcacccgctaaccactccttatt

SEQ ID NO: 243468 - DNA, 30 bp, Artificial Sequence
  Synthetic oligonucleotide
gcgggcggggaataaccaaaaaagcttatt

SEQ ID NO: 243469 - DNA, 30 bp, Artificial Sequence
  Synthetic oligonucleotide
caaacaagaagtctgggactacaagttatt

SEQ ID NO: 243470 - DNA, 30 bp, Artificial Sequence
  Synthetic oligonucleotide
agtgtacaggcgatcaggaacgaagttatt

SEQ ID NO: 243471 - DNA, 30 bp, Artificial Sequence
  Synthetic oligonucleotide
ggcacaaaggcgcgtccgtgaggagttatt

SEQ ID NO: 243472 - DNA, 30 bp, Artificial Sequence
  Synthetic oligonucleotide
acatctacagcgtagtagctagccgttatt

SEQ ID NO: 243473 - DNA, 30 bp, Artificial Sequence
  Synthetic oligonucleotide
aggaatgaaacgtttacatgtaatgttatt

SEQ ID NO: 243474 - DNA, 30 bp, Artificial Sequence
  Synthetic oligonucleotide
aacggggaagttcctcaccccgcatttatt

SEQ ID NO: 243475 - DNA, 30 bp, Artificial Sequence
  Synthetic oligonucleotide
cagtacggggatgccttgttgaactttatt

SEQ ID NO: 243476 - DNA, 30 bp, Artificial Sequence
  Synthetic oligonucleotide
taggaatgtggtgagtgtcagagctttatt

SEQ ID NO: 243477 - DNA, 30 bp, Artificial Sequence
  Synthetic oligonucleotide
cgttacttggtagcaaaactagcgtttatt

SEQ ID NO: 243478 - DNA, 30 bp, Artificial Sequence
  Synthetic oligonucleotide
ggatcaacgtagcacggaaatataaaactt

SEQ ID NO: 243479 - DNA, 30 bp, Artificial Sequence
  Synthetic oligonucleotide
gtcagtgtacataaatcagaatacaaactt

SEQ ID NO: 243480 - DNA, 30 bp, Artificial Sequence
  Synthetic oligonucleotide
gttgataggaaaacaacggaagagaaactt

SEQ ID NO: 243481 - DNA, 30 bp, Artificial Sequence
  Synthetic oligonucleotide
cgccgtctcaggcgacagacatggaaactt

SEQ ID NO: 243482 - DNA, 30 bp, Artificial Sequence
  Synthetic oligonucleotide
ttaacatgagaacgtcctcgggtgaaactt

SEQ ID NO: 243483 - DNA, 30 bp, Artificial Sequence
  Synthetic oligonucleotide
ttagttataacgagatttggagaacaactt

SEQ ID NO: 243484 - DNA, 30 bp, Artificial Sequence
  Synthetic oligonucleotide
tgttgaaaatttacggttgatcagcaactt

SEQ ID NO: 243485 - DNA, 30 bp, Artificial Sequence
  Synthetic oligonucleotide
ccgacggcacggtatgattggaggcaactt

SEQ ID NO: 243486 - DNA, 30 bp, Artificial Sequence
  Synthetic oligonucleotide
tgcaatagagactacgagcactatcaactt

SEQ ID NO: 243487 - DNA, 30 bp, Artificial Sequence
  Synthetic oligonucleotide
cgcgttgggcccggcccgtcacttcaactt

SEQ ID NO: 243488 - DNA, 30 bp, Artificial Sequence
  Synthetic oligonucleotide
ccggagacttacgaaggacgtcaggaactt

SEQ ID NO: 243489 - DNA, 30 bp, Artificial Sequence
  Synthetic oligonucleotide
caagggattatattttcgttgagtgaactt

SEQ ID NO: 243490 - DNA, 31 bp, Artificial Sequence
  Synthetic oligonucleotide
tgaggggtatcaggcgagagttattgaactt

SEQ ID NO: 243491 - DNA, 30 bp, Artificial Sequence
  Synthetic oligonucleotide
gacagttgtgccggagtcgagaaataactt

SEQ ID NO: 243492 - DNA, 30 bp, Artificial Sequence
  Synthetic oligonucleotide
agtagtagttcgagtgtgagctgttaactt

SEQ ID NO: 243493 - DNA, 30 bp, Artificial Sequence
  Synthetic oligonucleotide
ggtcaatgtgcattatcgatagaaacactt

SEQ ID NO: 243494 - DNA, 30 bp, Artificial Sequence
  Synthetic oligonucleotide
ggccagagtgtgcacacatagtcaacactt

SEQ ID NO: 243495 - DNA, 30 bp, Artificial Sequence
  Synthetic oligonucleotide
gtggggctcatcatcgatcggtgtacactt

SEQ ID NO: 243496 - DNA, 30 bp, Artificial Sequence
  Synthetic oligonucleotide
gaatggctcgaaattggctctgggccactt

SEQ ID NO: 243497 - DNA, 30 bp, Artificial Sequence
  Synthetic oligonucleotide
accgtacccagaaagggcgaaaatccactt

SEQ ID NO: 243498 - DNA, 30 bp, Artificial Sequence
  Synthetic oligonucleotide
cggggcacggctgctggagatttagcactt

SEQ ID NO: 243499 - DNA, 30 bp, Artificial Sequence
  Synthetic oligonucleotide
atagggaaacgcaccccgtttaacgcactt

SEQ ID NO: 243500 - DNA, 30 bp, Artificial Sequence
  Synthetic oligonucleotide
ctaggattcggacaccgtccgatggcactt

SEQ ID NO: 243501 - DNA, 30 bp, Artificial Sequence
  Synthetic oligonucleotide
ggggggggctagaaccaacaaatatcactt

SEQ ID NO: 243502 - DNA, 30 bp, Artificial Sequence
  Synthetic oligonucleotide
ttatcgctacgctgaggaacactatcactt

SEQ ID NO: 243503 - DNA, 30 bp, Artificial Sequence
  Synthetic oligonucleotide
tcgggcctcggaaaatgaagacgttcactt

SEQ ID NO: 243504 - DNA, 30 bp, Artificial Sequence
  Synthetic oligonucleotide
atcgagccactatagtgaatataaagactt

SEQ ID NO: 243505 - DNA, 30 bp, Artificial Sequence
  Synthetic oligonucleotide
aggattgtgactccgcgatccacaagactt

SEQ ID NO: 243506 - DNA, 30 bp, Artificial Sequence
  Synthetic oligonucleotide
gaatggggaaagttaaagctgcgaagactt

SEQ ID NO: 243507 - DNA, 30 bp, Artificial Sequence
  Synthetic oligonucleotide
gcgtaatcggacgccagcgttctaagactt

SEQ ID NO: 243508 - DNA, 30 bp, Artificial Sequence
  Synthetic oligonucleotide
aagccttgcatacgcatccagaccagactt

SEQ ID NO: 243509 - DNA, 30 bp, Artificial Sequence
  Synthetic oligonucleotide
tacagtcaaagcggttacgagacgagactt

SEQ ID NO: 243510 - DNA, 30 bp, Artificial Sequence
  Synthetic oligonucleotide
agggccgtactaaacggcggctctagactt

SEQ ID NO: 243511 - DNA, 30 bp, Artificial Sequence
  Synthetic oligonucleotide
tatgcgccaggctgtggggaaggccgactt

SEQ ID NO: 243512 - DNA, 30 bp, Artificial Sequence
  Synthetic oligonucleotide
gggtgcgactgcggccctaaagagcgactt

SEQ ID NO: 243513 - DNA, 30 bp, Artificial Sequence
  Synthetic oligonucleotide
ctctatataaccgttcaacgtgcgcgactt

SEQ ID NO: 243514 - DNA, 30 bp, Artificial Sequence
  Synthetic oligonucleotide
ctgggttcggcgaaactggaacatcgactt

SEQ ID NO: 243515 - DNA, 30 bp, Artificial Sequence
  Synthetic oligonucleotide
tccagcggttacactcagttatctcgactt

SEQ ID NO: 243516 - DNA, 30 bp, Artificial Sequence
  Synthetic oligonucleotide
agcatcgtgccgttcttgtaatgtcgactt

SEQ ID NO: 243517 - DNA, 30 bp, Artificial Sequence
  Synthetic oligonucleotide
agatgggacattaaaagactccaaggactt

SEQ ID NO: 243518 - DNA, 30 bp, Artificial Sequence
  Synthetic oligonucleotide
acatacaaaagtcatgtaaccgcaggactt

SEQ ID NO: 243519 - DNA, 30 bp, Artificial Sequence
  Synthetic oligonucleotide
aacgtgagttcaagcgggtactgaggactt

SEQ ID NO: 243520 - DNA, 29 bp, Artificial Sequence
  Synthetic oligonucleotide
aagtgggtaggaatatgttggcgggactt

SEQ ID NO: 243521 - DNA, 30 bp, Artificial Sequence
  Synthetic oligonucleotide
aaaaagggatacatgtaactgtatggactt

SEQ ID NO: 243522 - DNA, 30 bp, Artificial Sequence
  Synthetic oligonucleotide
ccaacacagatcaggcgcccctctggactt

SEQ ID NO: 243523 - DNA, 30 bp, Artificial Sequence
  Synthetic oligonucleotide
aatctcggtaagttcagggagtggtgactt

SEQ ID NO: 243524 - DNA, 30 bp, Artificial Sequence
  Synthetic oligonucleotide
gctcaatatctgctacctagttcttgactt

SEQ ID NO: 243525 - DNA, 30 bp, Artificial Sequence
  Synthetic oligonucleotide
aatgtcccactggaatggaaaggaatactt

SEQ ID NO: 243526 - DNA, 30 bp, Artificial Sequence
  Synthetic oligonucleotide
attggagtgaactacctgaacgccatactt

SEQ ID NO: 243527 - DNA, 30 bp, Artificial Sequence
  Synthetic oligonucleotide
tatgtgagcagaaatcgtgactacctactt

SEQ ID NO: 243528 - DNA, 30 bp, Artificial Sequence
  Synthetic oligonucleotide
ggcagtagggcatcgccaacgtgtctactt

SEQ ID NO: 243529 - DNA, 30 bp, Artificial Sequence
  Synthetic oligonucleotide
tccggatttagcggtagtatctcagtactt

SEQ ID NO: 243530 - DNA, 30 bp, Artificial Sequence
  Synthetic oligonucleotide
caccaggaagcactaatcttctacgtactt

SEQ ID NO: 243531 - DNA, 30 bp, Artificial Sequence
  Synthetic oligonucleotide
ttctggcaggtacctgtgtgggtcgtactt

SEQ ID NO: 243532 - DNA, 30 bp, Artificial Sequence
  Synthetic oligonucleotide
ctaacaagagaagatgtcgcgcgggtactt

SEQ ID NO: 243533 - DNA, 30 bp, Artificial Sequence
  Synthetic oligonucleotide
gtccgatcagcaaccggggactaattactt

SEQ ID NO: 243534 - DNA, 30 bp, Artificial Sequence
  Synthetic oligonucleotide
gagaggcacattgggattaaaacattactt

SEQ ID NO: 243535 - DNA, 30 bp, Artificial Sequence
  Synthetic oligonucleotide
gctgctgtggccgaacacgtaagattactt

SEQ ID NO: 243536 - DNA, 30 bp, Artificial Sequence
  Synthetic oligonucleotide
ggagaaaatgttcgaagacccgtattactt

SEQ ID NO: 243537 - DNA, 30 bp, Artificial Sequence
  Synthetic oligonucleotide
gtatgaattagcggattgtgggtgttactt

SEQ ID NO: 243538 - DNA, 30 bp, Artificial Sequence
  Synthetic oligonucleotide
atcatagctctctatgcaaaggacaacctt

SEQ ID NO: 243539 - DNA, 30 bp, Artificial Sequence
  Synthetic oligonucleotide
gtgacgtgtcaggcttactactgcaacctt

SEQ ID NO: 243540 - DNA, 30 bp, Artificial Sequence
  Synthetic oligonucleotide
cgggccgtattagactaaagttggaacctt

SEQ ID NO: 243541 - DNA, 30 bp, Artificial Sequence
  Synthetic oligonucleotide
tccgcggacagagaactggcaagtaacctt

SEQ ID NO: 243542 - DNA, 30 bp, Artificial Sequence
  Synthetic oligonucleotide
gcttcatggtaaggtcatattagtaacctt

SEQ ID NO: 243543 - DNA, 30 bp, Artificial Sequence
  Synthetic oligonucleotide
tagagacgtcagattcaaatctgtaacctt

SEQ ID NO: 243544 - DNA, 30 bp, Artificial Sequence
  Synthetic oligonucleotide
caacgtgctccacgcccacacagccacctt

SEQ ID NO: 243545 - DNA, 30 bp, Artificial Sequence
  Synthetic oligonucleotide
actctgaaaggcgcatttatgcggcacctt

SEQ ID NO: 243546 - DNA, 30 bp, Artificial Sequence
  Synthetic oligonucleotide
acgcttgaacaaccgatatcttctcacctt

SEQ ID NO: 243547 - DNA, 30 bp, Artificial Sequence
  Synthetic oligonucleotide
agcgagttcgtcagaggggcttcagacctt

SEQ ID NO: 243548 - DNA, 30 bp, Artificial Sequence
  Synthetic oligonucleotide
gacgggcacgaagtgagcaatagcgacctt

SEQ ID NO: 243549 - DNA, 30 bp, Artificial Sequence
  Synthetic oligonucleotide
ggtaccgagagtgtttcaggacgggacctt

SEQ ID NO: 243550 - DNA, 30 bp, Artificial Sequence
  Synthetic oligonucleotide
tgaactccgttccgtgcatcattggacctt

SEQ ID NO: 243551 - DNA, 30 bp, Artificial Sequence
  Synthetic oligonucleotide
aggggatagtcttgccgcgcgattgacctt

SEQ ID NO: 243552 - DNA, 30 bp, Artificial Sequence
  Synthetic oligonucleotide
gctagaggaccgtgacagggtccgtacctt

SEQ ID NO: 243553 - DNA, 30 bp, Artificial Sequence
  Synthetic oligonucleotide
ttcaaagaatcgaactagggcttgtacctt

SEQ ID NO: 243554 - DNA, 30 bp, Artificial Sequence
  Synthetic oligonucleotide
ctggttgtctatacgtaggatcaaaccctt

SEQ ID NO: 243555 - DNA, 30 bp, Artificial Sequence
  Synthetic oligonucleotide
tcagtatcatacatcacgccgacacccctt

SEQ ID NO: 243556 - DNA, 30 bp, Artificial Sequence
  Synthetic oligonucleotide
ggggacaaatagaataagcataagcccctt

SEQ ID NO: 243557 - DNA, 30 bp, Artificial Sequence
  Synthetic oligonucleotide
aagtcaagctttgtgtcgactggtcccctt

SEQ ID NO: 243558 - DNA, 30 bp, Artificial Sequence
  Synthetic oligonucleotide
gtgtcgcctgcgagtgtccaggctgccctt

SEQ ID NO: 243559 - DNA, 30 bp, Artificial Sequence
  Synthetic oligonucleotide
actgtctcgaccaatgcacgcttatccctt

SEQ ID NO: 243560 - DNA, 30 bp, Artificial Sequence
  Synthetic oligonucleotide
aggtagaccgaaggttcgcgacagtccctt

SEQ ID NO: 243561 - DNA, 30 bp, Artificial Sequence
  Synthetic oligonucleotide
gcggccgaacaccatcggctcgaaagcctt

SEQ ID NO: 243562 - DNA, 30 bp, Artificial Sequence
  Synthetic oligonucleotide
atagatcagtgcgagactcttcgaagcctt

SEQ ID NO: 243563 - DNA, 30 bp, Artificial Sequence
  Synthetic oligonucleotide
agtgccggtaaccttcaggttgtgagcctt

SEQ ID NO: 243564 - DNA, 30 bp, Artificial Sequence
  Synthetic oligonucleotide
acagcgcaaacgggcggccataaccgcctt

SEQ ID NO: 243565 - DNA, 30 bp, Artificial Sequence
  Synthetic oligonucleotide
ctcatggaacattacgagccctagcgcctt

SEQ ID NO: 243566 - DNA, 30 bp, Artificial Sequence
  Synthetic oligonucleotide
ttagtactcataacgcggtgaggtcgcctt

SEQ ID NO: 243567 - DNA, 30 bp, Artificial Sequence
  Synthetic oligonucleotide
ggcggtgtaccacatccataaagatgcctt

SEQ ID NO: 243568 - DNA, 30 bp, Artificial Sequence
  Synthetic oligonucleotide
ccccgagtcttcaactagatcccaatcctt

SEQ ID NO: 243569 - DNA, 30 bp, Artificial Sequence
  Synthetic oligonucleotide
atctacaagagtagatatggctacctcctt

SEQ ID NO: 243570 - DNA, 30 bp, Artificial Sequence
  Synthetic oligonucleotide
tagtgtaaagttacggggacatggctcctt

SEQ ID NO: 243571 - DNA, 30 bp, Artificial Sequence
  Synthetic oligonucleotide
aacatggtactatatcaattcacagtcctt

SEQ ID NO: 243572 - DNA, 30 bp, Artificial Sequence
  Synthetic oligonucleotide
ggatgttcatgagggtcgagacacgtcctt

SEQ ID NO: 243573 - DNA, 30 bp, Artificial Sequence
  Synthetic oligonucleotide
tcatatatcaaagacggtaatttggtcctt

SEQ ID NO: 243574 - DNA, 30 bp, Artificial Sequence
  Synthetic oligonucleotide
agacttctataaacaatactacgattcctt

SEQ ID NO: 243575 - DNA, 30 bp, Artificial Sequence
  Synthetic oligonucleotide
tctgaccaggtgcggaacctcgtcttcctt

SEQ ID NO: 243576 - DNA, 30 bp, Artificial Sequence
  Synthetic oligonucleotide
ggattccgacatgaaacttgcgcgttcctt

SEQ ID NO: 243577 - DNA, 30 bp, Artificial Sequence
  Synthetic oligonucleotide
aaggcaacctgttagacgttcctgttcctt

SEQ ID NO: 243578 - DNA, 30 bp, Artificial Sequence
  Synthetic oligonucleotide
cttcaaagacagtgaagcagggatttcctt

SEQ ID NO: 243579 - DNA, 30 bp, Artificial Sequence
  Synthetic oligonucleotide
cagctcacatgatcttctccaaacaagctt

SEQ ID NO: 243580 - DNA, 30 bp, Artificial Sequence
  Synthetic oligonucleotide
tctagccatccgagaagatgagacaagctt

SEQ ID NO: 243581 - DNA, 30 bp, Artificial Sequence
  Synthetic oligonucleotide
gctacgcacaggctggtctgttttaagctt

SEQ ID NO: 243582 - DNA, 30 bp, Artificial Sequence
  Synthetic oligonucleotide
aaaaggctagtatgcttcggtaaccagctt

SEQ ID NO: 243583 - DNA, 30 bp, Artificial Sequence
  Synthetic oligonucleotide
agctaaaagcatgcattggcgtatcagctt

SEQ ID NO: 243584 - DNA, 30 bp, Artificial Sequence
  Synthetic oligonucleotide
tcgtggttaggaatttacttgcaagagctt

SEQ ID NO: 243585 - DNA, 30 bp, Artificial Sequence
  Synthetic oligonucleotide
atacaccggcctaagtaaatgggagagctt

SEQ ID NO: 243586 - DNA, 30 bp, Artificial Sequence
  Synthetic oligonucleotide
gaaggggtctgtgaagtccccggggagctt

SEQ ID NO: 243587 - DNA, 30 bp, Artificial Sequence
  Synthetic oligonucleotide
ataaaaggtggtgtgcaaacatactagctt

SEQ ID NO: 243588 - DNA, 30 bp, Artificial Sequence
  Synthetic oligonucleotide
gctgcatcctaaaagatcttttagtagctt

SEQ ID NO: 243589 - DNA, 30 bp, Artificial Sequence
  Synthetic oligonucleotide
ggacagtagaagagagacttcgggtagctt

SEQ ID NO: 243590 - DNA, 30 bp, Artificial Sequence
  Synthetic oligonucleotide
cagaggcttaatgtggagaccgtgtagctt

SEQ ID NO: 243591 - DNA, 30 bp, Artificial Sequence
  Synthetic oligonucleotide
ccgttcctgtcgtccctcatcaattagctt

SEQ ID NO: 243592 - DNA, 30 bp, Artificial Sequence
  Synthetic oligonucleotide
tcagttccctcttaaaggaagaattagctt

SEQ ID NO: 243593 - DNA, 30 bp, Artificial Sequence
  Synthetic oligonucleotide
agagcaacccttaagtaatgcccttagctt

SEQ ID NO: 243594 - DNA, 30 bp, Artificial Sequence
  Synthetic oligonucleotide
atatagtaagttgatctcctagtttagctt

SEQ ID NO: 243595 - DNA, 30 bp, Artificial Sequence
  Synthetic oligonucleotide
tatagtccaagaggacgtcgtgaaacgctt

SEQ ID NO: 243596 - DNA, 30 bp, Artificial Sequence
  Synthetic oligonucleotide
gacggtctgtggagtgttgaaaatacgctt

SEQ ID NO: 243597 - DNA, 29 bp, Artificial Sequence
  Synthetic oligonucleotide
agtaaaggcgcaagaacatggcaccgctt

SEQ ID NO: 243598 - DNA, 30 bp, Artificial Sequence
  Synthetic oligonucleotide
ttggaacatagctaacagctgttcccgctt

SEQ ID NO: 243599 - DNA, 30 bp, Artificial Sequence
  Synthetic oligonucleotide
gaaacattaagtctgccagtagcgccgctt

SEQ ID NO: 243600 - DNA, 30 bp, Artificial Sequence
  Synthetic oligonucleotide
cagttggcgccggcagacagagggccgctt

SEQ ID NO: 243601 - DNA, 30 bp, Artificial Sequence
  Synthetic oligonucleotide
ctgacggcgagccgacgacaaacagcgctt

SEQ ID NO: 243602 - DNA, 30 bp, Artificial Sequence
  Synthetic oligonucleotide
agagaggttcccacgttattggtcgcgctt

SEQ ID NO: 243603 - DNA, 30 bp, Artificial Sequence
  Synthetic oligonucleotide
atattaatctcttacgtcactcctgcgctt

SEQ ID NO: 243604 - DNA, 30 bp, Artificial Sequence
  Synthetic oligonucleotide
agaaatccccaagtgcgaagagctgcgctt

SEQ ID NO: 243605 - DNA, 30 bp, Artificial Sequence
  Synthetic oligonucleotide
caggggtctgttgagttacgtgcatcgctt

SEQ ID NO: 243606 - DNA, 30 bp, Artificial Sequence
  Synthetic oligonucleotide
cggacgcgtatcggcaggaagcgctcgctt

SEQ ID NO: 243607 - DNA, 30 bp, Artificial Sequence
  Synthetic oligonucleotide
cgctcagctcggtccagcgagggctcgctt

SEQ ID NO: 243608 - DNA, 30 bp, Artificial Sequence
  Synthetic oligonucleotide
taggctaaggaagggcagcaaatttcgctt

SEQ ID NO: 243609 - DNA, 30 bp, Artificial Sequence
  Synthetic oligonucleotide
cggaacctcgagctaggcgacatttcgctt

SEQ ID NO: 243610 - DNA, 30 bp, Artificial Sequence
  Synthetic oligonucleotide
gaagccgatcgcaaagagcggctaaggctt

SEQ ID NO: 243611 - DNA, 30 bp, Artificial Sequence
  Synthetic oligonucleotide
ggggtaaatcttggtctaaggaagaggctt

SEQ ID NO: 243612 - DNA, 30 bp, Artificial Sequence
  Synthetic oligonucleotide
agataaggagaatattatttagataggctt

SEQ ID NO: 243613 - DNA, 30 bp, Artificial Sequence
  Synthetic oligonucleotide
tctgggaagattgttgtggaatgccggctt

SEQ ID NO: 243614 - DNA, 30 bp, Artificial Sequence
  Synthetic oligonucleotide
ggatgcgtccgtagattcggccagcggctt

SEQ ID NO: 243615 - DNA, 30 bp, Artificial Sequence
  Synthetic oligonucleotide
ggcgggagtagagatacataaactcggctt

SEQ ID NO: 243616 - DNA, 30 bp, Artificial Sequence
  Synthetic oligonucleotide
tacggactactctcgggattcacagggctt

SEQ ID NO: 243617 - DNA, 30 bp, Artificial Sequence
  Synthetic oligonucleotide
caccggtgcggagaaaaaaggttagggctt

SEQ ID NO: 243618 - DNA, 30 bp, Artificial Sequence
  Synthetic oligonucleotide
ctaccggctgagaaagaggggaacgggctt

SEQ ID NO: 243619 - DNA, 30 bp, Artificial Sequence
  Synthetic oligonucleotide
gccgagcgataggacgtaactcgggggctt

SEQ ID NO: 243620 - DNA, 30 bp, Artificial Sequence
  Synthetic oligonucleotide
ggggccagtccttcttcacttaatgggctt

SEQ ID NO: 243621 - DNA, 30 bp, Artificial Sequence
  Synthetic oligonucleotide
cttattccggtagaagaagtggatgggctt

SEQ ID NO: 243622 - DNA, 30 bp, Artificial Sequence
  Synthetic oligonucleotide
ataagcatcacatggtccaggtatgggctt

SEQ ID NO: 243623 - DNA, 30 bp, Artificial Sequence
  Synthetic oligonucleotide
aggcccacctgcggctagtctgcctggctt

SEQ ID NO: 243624 - DNA, 30 bp, Artificial Sequence
  Synthetic oligonucleotide
acaacttaatgccaggactgggcttggctt

SEQ ID NO: 243625 - DNA, 30 bp, Artificial Sequence
  Synthetic oligonucleotide
acaagatacaagccgcctgcgagttggctt

SEQ ID NO: 243626 - DNA, 30 bp, Artificial Sequence
  Synthetic oligonucleotide
gtaattgcttagaagtcatagggttggctt

SEQ ID NO: 243627 - DNA, 30 bp, Artificial Sequence
  Synthetic oligonucleotide
tgctggcagatgtgaaggatactcatgctt

SEQ ID NO: 243628 - DNA, 30 bp, Artificial Sequence
  Synthetic oligonucleotide
gcctaagataagccggagaaagtcatgctt

SEQ ID NO: 243629 - DNA, 30 bp, Artificial Sequence
  Synthetic oligonucleotide
tattatctgcacaggtcggagttcatgctt

SEQ ID NO: 243630 - DNA, 30 bp, Artificial Sequence
  Synthetic oligonucleotide
acaaccaatctgggagaatggaaactgctt

SEQ ID NO: 243631 - DNA, 30 bp, Artificial Sequence
  Synthetic oligonucleotide
atggctaaaggggcgtcacggatactgctt

SEQ ID NO: 243632 - DNA, 30 bp, Artificial Sequence
  Synthetic oligonucleotide
cagaaaaaaaagcgtcgaatattcctgctt

SEQ ID NO: 243633 - DNA, 30 bp, Artificial Sequence
  Synthetic oligonucleotide
taggctaccttccgtgagcgggttctgctt

SEQ ID NO: 243634 - DNA, 30 bp, Artificial Sequence
  Synthetic oligonucleotide
taaccatcgagtcttatgtagagcgtgctt

SEQ ID NO: 243635 - DNA, 30 bp, Artificial Sequence
  Synthetic oligonucleotide
catattagagggcttatcaggaaggtgctt

SEQ ID NO: 243636 - DNA, 30 bp, Artificial Sequence
  Synthetic oligonucleotide
tacggtaccatctgaacaccttatgtgctt

SEQ ID NO: 243637 - DNA, 30 bp, Artificial Sequence
  Synthetic oligonucleotide
aaagcaatttaaaagaatggtgacttgctt

SEQ ID NO: 243638 - DNA, 30 bp, Artificial Sequence
  Synthetic oligonucleotide
tggcctcaacatgcagggatttacttgctt

SEQ ID NO: 243639 - DNA, 30 bp, Artificial Sequence
  Synthetic oligonucleotide
agtcgttagatgtctcttagtaatttgctt

SEQ ID NO: 243640 - DNA, 30 bp, Artificial Sequence
  Synthetic oligonucleotide
cacatgggaagaaagtgcagcagcaatctt

SEQ ID NO: 243641 - DNA, 30 bp, Artificial Sequence
  Synthetic oligonucleotide
gacatggcaagcggtagccggaggaatctt

SEQ ID NO: 243642 - DNA, 30 bp, Artificial Sequence
  Synthetic oligonucleotide
aggggtaaaaattggtaacatatacatctt

SEQ ID NO: 243643 - DNA, 30 bp, Artificial Sequence
  Synthetic oligonucleotide
gactcctagccaaccatgaaagcccatctt

SEQ ID NO: 243644 - DNA, 30 bp, Artificial Sequence
  Synthetic oligonucleotide
agccccggtcttgtcatgacagatcatctt

SEQ ID NO: 243645 - DNA, 30 bp, Artificial Sequence
  Synthetic oligonucleotide
acaaactgatgtggaattcaaactcatctt

SEQ ID NO: 243646 - DNA, 30 bp, Artificial Sequence
  Synthetic oligonucleotide
aactacatcgtgcaatcgctgtaagatctt

SEQ ID NO: 243647 - DNA, 30 bp, Artificial Sequence
  Synthetic oligonucleotide
aagaccatgagcccggcgtcgggagatctt

SEQ ID NO: 243648 - DNA, 30 bp, Artificial Sequence
  Synthetic oligonucleotide
agaatacacgaagttgtcaatgcatatctt

SEQ ID NO: 243649 - DNA, 30 bp, Artificial Sequence
  Synthetic oligonucleotide
caatcgaccttgagtggaaggccgtatctt

SEQ ID NO: 243650 - DNA, 30 bp, Artificial Sequence
  Synthetic oligonucleotide
actaacatggtgttctagagcttgtatctt

SEQ ID NO: 243651 - DNA, 31 bp, Artificial Sequence
  Synthetic oligonucleotide
ctggggtgtatacatatgggcgggttatctt

SEQ ID NO: 243652 - DNA, 30 bp, Artificial Sequence
  Synthetic oligonucleotide
atgtataacaagccacgaacctcaactctt

SEQ ID NO: 243653 - DNA, 30 bp, Artificial Sequence
  Synthetic oligonucleotide
atgtcgaagattttccgcgctaaagctctt

SEQ ID NO: 243654 - DNA, 30 bp, Artificial Sequence
  Synthetic oligonucleotide
caccttcaaactacgctatggggagctctt

SEQ ID NO: 243655 - DNA, 30 bp, Artificial Sequence
  Synthetic oligonucleotide
aaaccacgctgcgaggagtagaccgctctt

SEQ ID NO: 243656 - DNA, 30 bp, Artificial Sequence
  Synthetic oligonucleotide
aggcaggtcactcgttacatgaggtctctt

SEQ ID NO: 243657 - DNA, 30 bp, Artificial Sequence
  Synthetic oligonucleotide
cgaaattcaggtaaattaaatcattctctt

SEQ ID NO: 243658 - DNA, 31 bp, Artificial Sequence
  Synthetic oligonucleotide
ttccctaggggagagcttcaagacaagtctt

SEQ ID NO: 243659 - DNA, 30 bp, Artificial Sequence
  Synthetic oligonucleotide
ctgcgatagaggctcaatgtggggagtctt

SEQ ID NO: 243660 - DNA, 30 bp, Artificial Sequence
  Synthetic oligonucleotide
ccacactctagggtcatcccgtatagtctt

SEQ ID NO: 243661 - DNA, 30 bp, Artificial Sequence
  Synthetic oligonucleotide
ggttcactggtatctgtgtggtatcgtctt

SEQ ID NO: 243662 - DNA, 30 bp, Artificial Sequence
  Synthetic oligonucleotide
atcgtcgtacaaattgttccacgaggtctt

SEQ ID NO: 243663 - DNA, 30 bp, Artificial Sequence
  Synthetic oligonucleotide
tgtcagaatgtcggtaatggtggaggtctt

SEQ ID NO: 243664 - DNA, 30 bp, Artificial Sequence
  Synthetic oligonucleotide
caagccgtattcccctgatgatatggtctt

SEQ ID NO: 243665 - DNA, 30 bp, Artificial Sequence
  Synthetic oligonucleotide
agtgcatttctgtaatgggtttatggtctt

SEQ ID NO: 243666 - DNA, 30 bp, Artificial Sequence
  Synthetic oligonucleotide
gggtatgttagaaaccatgcaagatgtctt

SEQ ID NO: 243667 - DNA, 30 bp, Artificial Sequence
  Synthetic oligonucleotide
acggtgggcgcttgtaaaacgagatgtctt

SEQ ID NO: 243668 - DNA, 30 bp, Artificial Sequence
  Synthetic oligonucleotide
ctggtcttccaaggtacatccacctgtctt

SEQ ID NO: 243669 - DNA, 30 bp, Artificial Sequence
  Synthetic oligonucleotide
ccgggactaatggaaatacctgattgtctt

SEQ ID NO: 243670 - DNA, 30 bp, Artificial Sequence
  Synthetic oligonucleotide
gtggcgttgcgaaaactgttggccattctt

SEQ ID NO: 243671 - DNA, 30 bp, Artificial Sequence
  Synthetic oligonucleotide
gaaaactgcatacgacttcgttagattctt

SEQ ID NO: 243672 - DNA, 30 bp, Artificial Sequence
  Synthetic oligonucleotide
cagacagtctctggatgaaagtctattctt

SEQ ID NO: 243673 - DNA, 30 bp, Artificial Sequence
  Synthetic oligonucleotide
aggttaaagaatcagggtgttatacttctt

SEQ ID NO: 243674 - DNA, 30 bp, Artificial Sequence
  Synthetic oligonucleotide
catatcgtacggttgcctcgatagcttctt

SEQ ID NO: 243675 - DNA, 30 bp, Artificial Sequence
  Synthetic oligonucleotide
aggcgaggggcaacgtacctggcgcttctt

SEQ ID NO: 243676 - DNA, 30 bp, Artificial Sequence
  Synthetic oligonucleotide
ctcgatcagagtgtcggaccgactcttctt

SEQ ID NO: 243677 - DNA, 30 bp, Artificial Sequence
  Synthetic oligonucleotide
cagtgacgggataatggaaccgtggttctt

SEQ ID NO: 243678 - DNA, 30 bp, Artificial Sequence
  Synthetic oligonucleotide
ctcaggcacgacaagcgaccacgctttctt

SEQ ID NO: 243679 - DNA, 31 bp, Artificial Sequence
  Synthetic oligonucleotide
gtgcgacagctccggagctctatcttttctt

SEQ ID NO: 243680 - DNA, 30 bp, Artificial Sequence
  Synthetic oligonucleotide
gagcgaccccgcgacaggctaggttttctt

SEQ ID NO: 243681 - DNA, 30 bp, Artificial Sequence
  Synthetic oligonucleotide
caactaccacttggagggttcggttttctt

SEQ ID NO: 243682 - DNA, 30 bp, Artificial Sequence
  Synthetic oligonucleotide
ctaacctgctggcagaagtttcacaaagtt

SEQ ID NO: 243683 - DNA, 30 bp, Artificial Sequence
  Synthetic oligonucleotide
gatctatatcacacattctgagcgaaagtt

SEQ ID NO: 243684 - DNA, 29 bp, Artificial Sequence
  Synthetic oligonucleotide
aagacataagggcactcgctaggaaagtt

SEQ ID NO: 243685 - DNA, 30 bp, Artificial Sequence
  Synthetic oligonucleotide
aaccaggttgcccaaggtgagaataaagtt

SEQ ID NO: 243686 - DNA, 30 bp, Artificial Sequence
  Synthetic oligonucleotide
tttggctgacaacgatctatcgataaagtt

SEQ ID NO: 243687 - DNA, 30 bp, Artificial Sequence
  Synthetic oligonucleotide
tcttggctgcgaataagacggcctaaagtt

SEQ ID NO: 243688 - DNA, 30 bp, Artificial Sequence
  Synthetic oligonucleotide
tccgttataacggaaaaaacacaacaagtt

SEQ ID NO: 243689 - DNA, 30 bp, Artificial Sequence
  Synthetic oligonucleotide
aaccaggtagtctcccgaggtgaacaagtt

SEQ ID NO: 243690 - DNA, 30 bp, Artificial Sequence
  Synthetic oligonucleotide
gaatcctcgcgaatcgagacagcccaagtt

SEQ ID NO: 243691 - DNA, 30 bp, Artificial Sequence
  Synthetic oligonucleotide
tagaggtacggctgcagctatgtccaagtt

SEQ ID NO: 243692 - DNA, 30 bp, Artificial Sequence
  Synthetic oligonucleotide
agataaaagtgtgtcacagaccgagaagtt

SEQ ID NO: 243693 - DNA, 30 bp, Artificial Sequence
  Synthetic oligonucleotide
tacttccgcaaagcaaatctaatagaagtt

SEQ ID NO: 243694 - DNA, 30 bp, Artificial Sequence
  Synthetic oligonucleotide
atcgaagacctagtacagtccctagaagtt

SEQ ID NO: 243695 - DNA, 30 bp, Artificial Sequence
  Synthetic oligonucleotide
gtagtgacctattattgtggatgggaagtt

SEQ ID NO: 243696 - DNA, 30 bp, Artificial Sequence
  Synthetic oligonucleotide
agagcgctgccgtattcgcgtccataagtt

SEQ ID NO: 243697 - DNA, 30 bp, Artificial Sequence
  Synthetic oligonucleotide
caatatttttcgctcaaaatgtactaagtt

SEQ ID NO: 243698 - DNA, 30 bp, Artificial Sequence
  Synthetic oligonucleotide
cgatatttctactcaaagtcaagctaagtt

SEQ ID NO: 243699 - DNA, 30 bp, Artificial Sequence
  Synthetic oligonucleotide
aggtgctgtgtcgtggcaagtggctaagtt

SEQ ID NO: 243700 - DNA, 30 bp, Artificial Sequence
  Synthetic oligonucleotide
aaacgctgaacatcgattcctccgtaagtt

SEQ ID NO: 243701 - DNA, 30 bp, Artificial Sequence
  Synthetic oligonucleotide
ggatttcggaacccccgaagggattaagtt

SEQ ID NO: 243702 - DNA, 30 bp, Artificial Sequence
  Synthetic oligonucleotide
aacttcatagccctgcggcccggttaagtt

SEQ ID NO: 243703 - DNA, 30 bp, Artificial Sequence
  Synthetic oligonucleotide
tttaagtaaccgaatcggctcagaccagtt

SEQ ID NO: 243704 - DNA, 30 bp, Artificial Sequence
  Synthetic oligonucleotide
ctgggacattttcgcaggggtcacccagtt

SEQ ID NO: 243705 - DNA, 30 bp, Artificial Sequence
  Synthetic oligonucleotide
gatgcaactatgtaaccatcttgcccagtt

SEQ ID NO: 243706 - DNA, 30 bp, Artificial Sequence
  Synthetic oligonucleotide
agccttcaacagattggtcattcgccagtt

SEQ ID NO: 243707 - DNA, 30 bp, Artificial Sequence
  Synthetic oligonucleotide
atgactccggaagagccgtataggccagtt

SEQ ID NO: 243708 - DNA, 30 bp, Artificial Sequence
  Synthetic oligonucleotide
gagtagccgagtagtacactgggtccagtt

SEQ ID NO: 243709 - DNA, 30 bp, Artificial Sequence
  Synthetic oligonucleotide
ggtgtggaacacatcccttcttaagcagtt

SEQ ID NO: 243710 - DNA, 30 bp, Artificial Sequence
  Synthetic oligonucleotide
tcagtgggtggcgcctttcagaacgcagtt

SEQ ID NO: 243711 - DNA, 30 bp, Artificial Sequence
  Synthetic oligonucleotide
tcgctagtaaagaccacctcaggcgcagtt

SEQ ID NO: 243712 - DNA, 30 bp, Artificial Sequence
  Synthetic oligonucleotide
agatcctacaagatcagaaagaaggcagtt

SEQ ID NO: 243713 - DNA, 30 bp, Artificial Sequence
  Synthetic oligonucleotide
cgttggaacaatttctgggtaccggcagtt

SEQ ID NO: 243714 - DNA, 30 bp, Artificial Sequence
  Synthetic oligonucleotide
gataggagagtgaataaagcaagggcagtt

SEQ ID NO: 243715 - DNA, 30 bp, Artificial Sequence
  Synthetic oligonucleotide
acagacacactgggattgggattatcagtt

SEQ ID NO: 243716 - DNA, 30 bp, Artificial Sequence
  Synthetic oligonucleotide
gcaagaaaaatacgactccaaggctcagtt

SEQ ID NO: 243717 - DNA, 30 bp, Artificial Sequence
  Synthetic oligonucleotide
gacaggttgtctgggctagggacttcagtt

SEQ ID NO: 243718 - DNA, 30 bp, Artificial Sequence
  Synthetic oligonucleotide
actatctgtttgaaagaagacggttcagtt

SEQ ID NO: 243719 - DNA, 30 bp, Artificial Sequence
  Synthetic oligonucleotide
acactagaagctaatttactgctttcagtt

SEQ ID NO: 243720 - DNA, 30 bp, Artificial Sequence
  Synthetic oligonucleotide
acagcaaccaaaagtttatgttgaagagtt

SEQ ID NO: 243721 - DNA, 30 bp, Artificial Sequence
  Synthetic oligonucleotide
ggacttagatgaatatacgatctcagagtt

SEQ ID NO: 243722 - DNA, 30 bp, Artificial Sequence
  Synthetic oligonucleotide
gctgcggtgttgtttcttctactgagagtt

SEQ ID NO: 243723 - DNA, 30 bp, Artificial Sequence
  Synthetic oligonucleotide
agagggcgaggctaatagtttactagagtt

SEQ ID NO: 243724 - DNA, 30 bp, Artificial Sequence
  Synthetic oligonucleotide
tccttcgtccatgatgaggtaccacgagtt

SEQ ID NO: 243725 - DNA, 30 bp, Artificial Sequence
  Synthetic oligonucleotide
tggttgttactgccgattccgtcacgagtt

SEQ ID NO: 243726 - DNA, 30 bp, Artificial Sequence
  Synthetic oligonucleotide
acgcgttggtgccactcaaccagacgagtt

SEQ ID NO: 243727 - DNA, 30 bp, Artificial Sequence
  Synthetic oligonucleotide
agtagagctaggcgtcaatattgcggagtt

SEQ ID NO: 243728 - DNA, 30 bp, Artificial Sequence
  Synthetic oligonucleotide
agtagctacttgacttgtctgtagggagtt

SEQ ID NO: 243729 - DNA, 30 bp, Artificial Sequence
  Synthetic oligonucleotide
ctacaaatcatgtcccggcattgatgagtt

SEQ ID NO: 243730 - DNA, 30 bp, Artificial Sequence
  Synthetic oligonucleotide
cgatgtttatcctactcgacgatatgagtt

SEQ ID NO: 243731 - DNA, 30 bp, Artificial Sequence
  Synthetic oligonucleotide
cgttgcaagaaactagcccacgactgagtt

SEQ ID NO: 243732 - DNA, 30 bp, Artificial Sequence
  Synthetic oligonucleotide
aatacatagaatttgcccaggtcctgagtt

SEQ ID NO: 243733 - DNA, 30 bp, Artificial Sequence
  Synthetic oligonucleotide
aacgttggccactagccctccatctgagtt

SEQ ID NO: 243734 - DNA, 30 bp, Artificial Sequence
  Synthetic oligonucleotide
ggagcgagatttgcgtagataacgtgagtt

SEQ ID NO: 243735 - DNA, 30 bp, Artificial Sequence
  Synthetic oligonucleotide
gtacaagggacgcgacgatatgaaatagtt

SEQ ID NO: 243736 - DNA, 30 bp, Artificial Sequence
  Synthetic oligonucleotide
caccctacagacatcggaggtacaatagtt

SEQ ID NO: 243737 - DNA, 30 bp, Artificial Sequence
  Synthetic oligonucleotide
gaagaggtcttgtaaaccacaccaatagtt

SEQ ID NO: 243738 - DNA, 30 bp, Artificial Sequence
  Synthetic oligonucleotide
tggagccatcagcaccttcttcccatagtt

SEQ ID NO: 243739 - DNA, 30 bp, Artificial Sequence
  Synthetic oligonucleotide
ggtgtgctcacctgctgaatttcgatagtt

SEQ ID NO: 243740 - DNA, 30 bp, Artificial Sequence
  Synthetic oligonucleotide
gggtctcgtctgaggtaactttggatagtt

SEQ ID NO: 243741 - DNA, 30 bp, Artificial Sequence
  Synthetic oligonucleotide
acaggaaactcgccagcaatgactatagtt

SEQ ID NO: 243742 - DNA, 30 bp, Artificial Sequence
  Synthetic oligonucleotide
ggtgtccgtttaatcaacggtactatagtt

SEQ ID NO: 243743 - DNA, 30 bp, Artificial Sequence
  Synthetic oligonucleotide
tttgccaaaactgcattacgcgaactagtt

SEQ ID NO: 243744 - DNA, 30 bp, Artificial Sequence
  Synthetic oligonucleotide
ctgttaatgtacggctctcgatgactagtt

SEQ ID NO: 243745 - DNA, 30 bp, Artificial Sequence
  Synthetic oligonucleotide
atgggggtaaacatgctcatatgactagtt

SEQ ID NO: 243746 - DNA, 30 bp, Artificial Sequence
  Synthetic oligonucleotide
gttgaggtggggtccgtataggatctagtt

SEQ ID NO: 243747 - DNA, 30 bp, Artificial Sequence
  Synthetic oligonucleotide
ccgccctaaccagtcgagagacaagtagtt

SEQ ID NO: 243748 - DNA, 30 bp, Artificial Sequence
  Synthetic oligonucleotide
agcagatattggttgctggggatagtagtt

SEQ ID NO: 243749 - DNA, 30 bp, Artificial Sequence
  Synthetic oligonucleotide
aggacggctttggggtcgaagtacgtagtt

SEQ ID NO: 243750 - DNA, 30 bp, Artificial Sequence
  Synthetic oligonucleotide
aatgcgacggcggtacggagcagcgtagtt

SEQ ID NO: 243751 - DNA, 30 bp, Artificial Sequence
  Synthetic oligonucleotide
acacgaaatgtcccgaaaccctgggtagtt

SEQ ID NO: 243752 - DNA, 30 bp, Artificial Sequence
  Synthetic oligonucleotide
ctcctcaagtcctcagatgtggaattagtt

SEQ ID NO: 243753 - DNA, 30 bp, Artificial Sequence
  Synthetic oligonucleotide
ccaacaccttaggttaagaaaggattagtt

SEQ ID NO: 243754 - DNA, 30 bp, Artificial Sequence
  Synthetic oligonucleotide
cttgacagtagtgcatagcggatattagtt

SEQ ID NO: 243755 - DNA, 30 bp, Artificial Sequence
  Synthetic oligonucleotide
cacctagcccgatcgatccagcccttagtt

SEQ ID NO: 243756 - DNA, 30 bp, Artificial Sequence
  Synthetic oligonucleotide
ctaggaataacgtactacctacgcttagtt

SEQ ID NO: 243757 - DNA, 30 bp, Artificial Sequence
  Synthetic oligonucleotide
tacccatcgtgcgcggcatgcggcttagtt

SEQ ID NO: 243758 - DNA, 30 bp, Artificial Sequence
  Synthetic oligonucleotide
acgcgcgtaagtgcattgattttcttagtt

SEQ ID NO: 243759 - DNA, 30 bp, Artificial Sequence
  Synthetic oligonucleotide
gatgtggggggccacattctttatttagtt

SEQ ID NO: 243760 - DNA, 30 bp, Artificial Sequence
  Synthetic oligonucleotide
ccagaatgttaccatactcaatgcaacgtt

SEQ ID NO: 243761 - DNA, 30 bp, Artificial Sequence
  Synthetic oligonucleotide
tactttgagaatacagcaaactgcaacgtt

SEQ ID NO: 243762 - DNA, 30 bp, Artificial Sequence
  Synthetic oligonucleotide
ttaacctttctgaatgatcagcggaacgtt

SEQ ID NO: 243763 - DNA, 30 bp, Artificial Sequence
  Synthetic oligonucleotide
agtgtgatggtaatgagacttgggaacgtt

SEQ ID NO: 243764 - DNA, 30 bp, Artificial Sequence
  Synthetic oligonucleotide
ctaatgcacttgtataacgcatgtaacgtt

SEQ ID NO: 243765 - DNA, 30 bp, Artificial Sequence
  Synthetic oligonucleotide
aaaaggcaactaatgtataccaagcacgtt

SEQ ID NO: 243766 - DNA, 30 bp, Artificial Sequence
  Synthetic oligonucleotide
aagagtaatggaagtcaagttaagcacgtt

SEQ ID NO: 243767 - DNA, 30 bp, Artificial Sequence
  Synthetic oligonucleotide
acgccggcgtcaccagggcagacgcacgtt

SEQ ID NO: 243768 - DNA, 30 bp, Artificial Sequence
  Synthetic oligonucleotide
cattgatgaacggaggtcattgaagacgtt

SEQ ID NO: 243769 - DNA, 30 bp, Artificial Sequence
  Synthetic oligonucleotide
gttgcgtctatgtcgtttcgggccgacgtt

SEQ ID NO: 243770 - DNA, 30 bp, Artificial Sequence
  Synthetic oligonucleotide
gagctcgggtacacgtgacaactggacgtt

SEQ ID NO: 243771 - DNA, 30 bp, Artificial Sequence
  Synthetic oligonucleotide
acaacgctatgccctagtcagactgacgtt

SEQ ID NO: 243772 - DNA, 30 bp, Artificial Sequence
  Synthetic oligonucleotide
taagaaccgttagcctagtcacgtgacgtt

SEQ ID NO: 243773 - DNA, 30 bp, Artificial Sequence
  Synthetic oligonucleotide
gagacagctgcaagaatgtgttagtacgtt

SEQ ID NO: 243774 - DNA, 30 bp, Artificial Sequence
  Synthetic oligonucleotide
ggtccctgttcgctaatcggtggttacgtt

SEQ ID NO: 243775 - DNA, 30 bp, Artificial Sequence
  Synthetic oligonucleotide
tgtcgtacacaaggcaacttggtcaccgtt

SEQ ID NO: 243776 - DNA, 30 bp, Artificial Sequence
  Synthetic oligonucleotide
ggtgcgagaggagatgaaatctcgaccgtt

SEQ ID NO: 243777 - DNA, 30 bp, Artificial Sequence
  Synthetic oligonucleotide
agacttttgattggtgtaggcaataccgtt

SEQ ID NO: 243778 - DNA, 30 bp, Artificial Sequence
  Synthetic oligonucleotide
ccttcgacgaacgtccaggcatgtaccgtt

SEQ ID NO: 243779 - DNA, 30 bp, Artificial Sequence
  Synthetic oligonucleotide
aggcagaaagtcgccagcccgggacccgtt

SEQ ID NO: 243780 - DNA, 30 bp, Artificial Sequence
  Synthetic oligonucleotide
ctgttagggcagaactctcctagccccgtt

SEQ ID NO: 243781 - DNA, 30 bp, Artificial Sequence
  Synthetic oligonucleotide
acagactttcagcggagtgacatggccgtt

SEQ ID NO: 243782 - DNA, 30 bp, Artificial Sequence
  Synthetic oligonucleotide
gggaatcggattcagattattgtggccgtt

SEQ ID NO: 243783 - DNA, 30 bp, Artificial Sequence
  Synthetic oligonucleotide
tcatttaaggttgtacaaccgtgtgccgtt

SEQ ID NO: 243784 - DNA, 30 bp, Artificial Sequence
  Synthetic oligonucleotide
atagtaacatctcgtccaagggttgccgtt

SEQ ID NO: 243785 - DNA, 30 bp, Artificial Sequence
  Synthetic oligonucleotide
gtgttcgtgaccaggcgagagcaatccgtt

SEQ ID NO: 243786 - DNA, 30 bp, Artificial Sequence
  Synthetic oligonucleotide
gacataagggaaaggtccggtacctccgtt

SEQ ID NO: 243787 - DNA, 30 bp, Artificial Sequence
  Synthetic oligonucleotide
agagcttggcgactgcagtcattcagcgtt

SEQ ID NO: 243788 - DNA, 30 bp, Artificial Sequence
  Synthetic oligonucleotide
acactccctactcagtggtgaaagagcgtt

SEQ ID NO: 243789 - DNA, 30 bp, Artificial Sequence
  Synthetic oligonucleotide
cgtctaacggtggagcactcggggagcgtt

SEQ ID NO: 243790 - DNA, 30 bp, Artificial Sequence
  Synthetic oligonucleotide
gccggatctgcaaggcagaggcttagcgtt

SEQ ID NO: 243791 - DNA, 30 bp, Artificial Sequence
  Synthetic oligonucleotide
agacacgcgtgtagttaggggacccgcgtt

SEQ ID NO: 243792 - DNA, 30 bp, Artificial Sequence
  Synthetic oligonucleotide
actagggaccaggtacaactaagccgcgtt

SEQ ID NO: 243793 - DNA, 30 bp, Artificial Sequence
  Synthetic oligonucleotide
ggaggcggggtaaaaactctatagcgcgtt

SEQ ID NO: 243794 - DNA, 30 bp, Artificial Sequence
  Synthetic oligonucleotide
aggggcagatcccccctggccagaggcgtt

SEQ ID NO: 243795 - DNA, 30 bp, Artificial Sequence
  Synthetic oligonucleotide
aacttgcatcattggactttggccggcgtt

SEQ ID NO: 243796 - DNA, 30 bp, Artificial Sequence
  Synthetic oligonucleotide
caaatctgttcttgcgggaccaagggcgtt

SEQ ID NO: 243797 - DNA, 30 bp, Artificial Sequence
  Synthetic oligonucleotide
ccacacgtgatgtctaaacctgatggcgtt

SEQ ID NO: 243798 - DNA, 30 bp, Artificial Sequence
  Synthetic oligonucleotide
gtggcgccgtacgtatggtcagactgcgtt

SEQ ID NO: 243799 - DNA, 30 bp, Artificial Sequence
  Synthetic oligonucleotide
aaaaaactggactgacatatagtgtgcgtt

SEQ ID NO: 243800 - DNA, 30 bp, Artificial Sequence
  Synthetic oligonucleotide
catcttgtctatcaggggacaacttgcgtt

SEQ ID NO: 243801 - DNA, 30 bp, Artificial Sequence
  Synthetic oligonucleotide
tttcccgcgtgatgtggaggtggttgcgtt

SEQ ID NO: 243802 - DNA, 30 bp, Artificial Sequence
  Synthetic oligonucleotide
agtaaagtagcccctttccagtgttgcgtt

SEQ ID NO: 243803 - DNA, 30 bp, Artificial Sequence
  Synthetic oligonucleotide
tcccactattaaagggacattgaaatcgtt

SEQ ID NO: 243804 - DNA, 30 bp, Artificial Sequence
  Synthetic oligonucleotide
agaatggcactgcttcggcgaaccatcgtt

SEQ ID NO: 243805 - DNA, 30 bp, Artificial Sequence
  Synthetic oligonucleotide
tgatacgcgggcgctgagcatcccatcgtt

SEQ ID NO: 243806 - DNA, 30 bp, Artificial Sequence
  Synthetic oligonucleotide
tccagcctcagttgggtcgatgagatcgtt

SEQ ID NO: 243807 - DNA, 30 bp, Artificial Sequence
  Synthetic oligonucleotide
gtagtttagtaatgtgatttcgcgatcgtt

SEQ ID NO: 243808 - DNA, 30 bp, Artificial Sequence
  Synthetic oligonucleotide
gagcaagaggggggagggacggtagtcgtt

SEQ ID NO: 243809 - DNA, 30 bp, Artificial Sequence
  Synthetic oligonucleotide
tgtcgcatctggttgtttaatcgtgtcgtt

SEQ ID NO: 243810 - DNA, 30 bp, Artificial Sequence
  Synthetic oligonucleotide
attgcgacgtccacaggactcgaattcgtt

SEQ ID NO: 243811 - DNA, 28 bp, Artificial Sequence
  Synthetic oligonucleotide
tgtgttaccagtgacaagcttattcgtt

SEQ ID NO: 243812 - DNA, 30 bp, Artificial Sequence
  Synthetic oligonucleotide
aacaaggtggaagcgtctaagatgttcgtt

SEQ ID NO: 243813 - DNA, 30 bp, Artificial Sequence
  Synthetic oligonucleotide
gcattcagaatagcgcaccgggtaaaggtt

SEQ ID NO: 243814 - DNA, 30 bp, Artificial Sequence
  Synthetic oligonucleotide
tcacagctcgtgtgacgagccagcaaggtt

SEQ ID NO: 243815 - DNA, 30 bp, Artificial Sequence
  Synthetic oligonucleotide
gcattaataagccagatagaactcaaggtt

SEQ ID NO: 243816 - DNA, 30 bp, Artificial Sequence
  Synthetic oligonucleotide
gggcgtgatctttctctgttaaagaaggtt

SEQ ID NO: 243817 - DNA, 30 bp, Artificial Sequence
  Synthetic oligonucleotide
ggcaaacagtcgcgaaaaatagagaaggtt

SEQ ID NO: 243818 - DNA, 30 bp, Artificial Sequence
  Synthetic oligonucleotide
ataagtggtgatccctgtgttacgaaggtt

SEQ ID NO: 243819 - DNA, 30 bp, Artificial Sequence
  Synthetic oligonucleotide
gaccttgggaacagcgatgtgctgaaggtt

SEQ ID NO: 243820 - DNA, 30 bp, Artificial Sequence
  Synthetic oligonucleotide
atgcaacgatattgcgggaagcataaggtt

SEQ ID NO: 243821 - DNA, 30 bp, Artificial Sequence
  Synthetic oligonucleotide
gtcaaaacatgcttgcgattaagtaaggtt

SEQ ID NO: 243822 - DNA, 30 bp, Artificial Sequence
  Synthetic oligonucleotide
gataactcggacaccccaccaggtaaggtt

SEQ ID NO: 243823 - DNA, 30 bp, Artificial Sequence
  Synthetic oligonucleotide
ctcggtatgttcggcttcccaagacaggtt

SEQ ID NO: 243824 - DNA, 30 bp, Artificial Sequence
  Synthetic oligonucleotide
gacctgaggtctaaggcctacgtccaggtt

SEQ ID NO: 243825 - DNA, 30 bp, Artificial Sequence
  Synthetic oligonucleotide
tgagattcgagtcatgatggcttccaggtt

SEQ ID NO: 243826 - DNA, 30 bp, Artificial Sequence
  Synthetic oligonucleotide
gaagtaggcgtgcatttacgaagagaggtt

SEQ ID NO: 243827 - DNA, 30 bp, Artificial Sequence
  Synthetic oligonucleotide
aacggcacagcgatttaatcgctcgaggtt

SEQ ID NO: 243828 - DNA, 30 bp, Artificial Sequence
  Synthetic oligonucleotide
gtcgacctggaaacgcaacgtgtcgaggtt

SEQ ID NO: 243829 - DNA, 30 bp, Artificial Sequence
  Synthetic oligonucleotide
cggtgtgaacgctcttacccagaggaggtt

SEQ ID NO: 243830 - DNA, 30 bp, Artificial Sequence
  Synthetic oligonucleotide
gtgataacgtcacaacacgcgccggaggtt

SEQ ID NO: 243831 - DNA, 30 bp, Artificial Sequence
  Synthetic oligonucleotide
taatcggggggtcgcattttgcatgaggtt

SEQ ID NO: 243832 - DNA, 30 bp, Artificial Sequence
  Synthetic oligonucleotide
aattagcatccataagggaggtcataggtt

SEQ ID NO: 243833 - DNA, 30 bp, Artificial Sequence
  Synthetic oligonucleotide
cgaggagaggaaggacacggccgataggtt

SEQ ID NO: 243834 - DNA, 30 bp, Artificial Sequence
  Synthetic oligonucleotide
agagtgtcgtacgttagacgactataggtt

SEQ ID NO: 243835 - DNA, 30 bp, Artificial Sequence
  Synthetic oligonucleotide
ataaattttcaggattagtgcagctaggtt

SEQ ID NO: 243836 - DNA, 30 bp, Artificial Sequence
  Synthetic oligonucleotide
aggataccatttgacagggctcattaggtt

SEQ ID NO: 243837 - DNA, 30 bp, Artificial Sequence
  Synthetic oligonucleotide
ggttaaaagtctcgttcttacgtttaggtt

SEQ ID NO: 243838 - DNA, 30 bp, Artificial Sequence
  Synthetic oligonucleotide
gggtaagataacaagctctcttccacggtt

SEQ ID NO: 243839 - DNA, 30 bp, Artificial Sequence
  Synthetic oligonucleotide
tcggtgttctatccgaatcagtgcacggtt

SEQ ID NO: 243840 - DNA, 30 bp, Artificial Sequence
  Synthetic oligonucleotide
aaaggagtgagcagccgcgcttatacggtt

SEQ ID NO: 243841 - DNA, 30 bp, Artificial Sequence
  Synthetic oligonucleotide
cacagcgctagattgatgtctccaccggtt

SEQ ID NO: 243842 - DNA, 30 bp, Artificial Sequence
  Synthetic oligonucleotide
cctatactccgaagcaagttagtaccggtt

SEQ ID NO: 243843 - DNA, 30 bp, Artificial Sequence
  Synthetic oligonucleotide
gtgtggccgttatatccgtgagggccggtt

SEQ ID NO: 243844 - DNA, 30 bp, Artificial Sequence
  Synthetic oligonucleotide
aactagaagaaccgcttttctatgccggtt

SEQ ID NO: 243845 - DNA, 30 bp, Artificial Sequence
  Synthetic oligonucleotide
gtcaatcggtgaagggggtaaactccggtt

SEQ ID NO: 243846 - DNA, 30 bp, Artificial Sequence
  Synthetic oligonucleotide
cggtgagcgactaccagaggtcctgcggtt

SEQ ID NO: 243847 - DNA, 30 bp, Artificial Sequence
  Synthetic oligonucleotide
cttaaagaacattgttgagtgtgtgcggtt

SEQ ID NO: 243848 - DNA, 30 bp, Artificial Sequence
  Synthetic oligonucleotide
atggggtgctgcgtggaggctagatcggtt

SEQ ID NO: 243849 - DNA, 30 bp, Artificial Sequence
  Synthetic oligonucleotide
aggcactatcatgccagctattgatcggtt

SEQ ID NO: 243850 - DNA, 30 bp, Artificial Sequence
  Synthetic oligonucleotide
gtgatatgcatcgtttcctaagtatcggtt

SEQ ID NO: 243851 - DNA, 30 bp, Artificial Sequence
  Synthetic oligonucleotide
gccactgccaatagaacgattgggtcggtt

SEQ ID NO: 243852 - DNA, 30 bp, Artificial Sequence
  Synthetic oligonucleotide
catgctgctctggcgttatgatattcggtt

SEQ ID NO: 243853 - DNA, 30 bp, Artificial Sequence
  Synthetic oligonucleotide
tcgggatggtcccggacgtccccaagggtt

SEQ ID NO: 243854 - DNA, 30 bp, Artificial Sequence
  Synthetic oligonucleotide
tacgatttggtcaatgcgaaagtcagggtt

SEQ ID NO: 243855 - DNA, 30 bp, Artificial Sequence
  Synthetic oligonucleotide
atgtaagattgttatccactgacgagggtt

SEQ ID NO: 243856 - DNA, 30 bp, Artificial Sequence
  Synthetic oligonucleotide
ccaaatagcgtgtattgtaatatgagggtt

SEQ ID NO: 243857 - DNA, 30 bp, Artificial Sequence
  Synthetic oligonucleotide
gcgagagcgggagaacggcggcctagggtt

SEQ ID NO: 243858 - DNA, 30 bp, Artificial Sequence
  Synthetic oligonucleotide
aaaaccgcgaagtaataggcccgtagggtt

SEQ ID NO: 243859 - DNA, 31 bp, Artificial Sequence
  Synthetic oligonucleotide
atcactcagtatattgactctatcccgggtt

SEQ ID NO: 243860 - DNA, 30 bp, Artificial Sequence
  Synthetic oligonucleotide
tagctcgctaggtgctagttagcgcgggtt

SEQ ID NO: 243861 - DNA, 30 bp, Artificial Sequence
  Synthetic oligonucleotide
gatccaagaggggcgtgcgatgggcgggtt

SEQ ID NO: 243862 - DNA, 30 bp, Artificial Sequence
  Synthetic oligonucleotide
catgactcatggtgttttcatactcgggtt

SEQ ID NO: 243863 - DNA, 30 bp, Artificial Sequence
  Synthetic oligonucleotide
taggtgggagaccggaaggccagtcgggtt

SEQ ID NO: 243864 - DNA, 30 bp, Artificial Sequence
  Synthetic oligonucleotide
cgttccctacataaaaacctgctaggggtt

SEQ ID NO: 243865 - DNA, 30 bp, Artificial Sequence
  Synthetic oligonucleotide
gtgtatacatctagatggttcaacggggtt

SEQ ID NO: 243866 - DNA, 30 bp, Artificial Sequence
  Synthetic oligonucleotide
gcatatggttccaagtaaaccagcggggtt

SEQ ID NO: 243867 - DNA, 30 bp, Artificial Sequence
  Synthetic oligonucleotide
taacccgagttacaataaatctctggggtt

SEQ ID NO: 243868 - DNA, 30 bp, Artificial Sequence
  Synthetic oligonucleotide
agtaggatcaccggcttttattctggggtt

SEQ ID NO: 243869 - DNA, 30 bp, Artificial Sequence
  Synthetic oligonucleotide
tgtactagtctgggcgctacgtgtggggtt

SEQ ID NO: 243870 - DNA, 30 bp, Artificial Sequence
  Synthetic oligonucleotide
aggctagacagattcacggggattggggtt

SEQ ID NO: 243871 - DNA, 30 bp, Artificial Sequence
  Synthetic oligonucleotide
tgtaggctggatagggtgaatgaatgggtt

SEQ ID NO: 243872 - DNA, 30 bp, Artificial Sequence
  Synthetic oligonucleotide
ctacatataaccccgacttaatcatgggtt

SEQ ID NO: 243873 - DNA, 30 bp, Artificial Sequence
  Synthetic oligonucleotide
tcggacggcaactgcaagagtatctgggtt

SEQ ID NO: 243874 - DNA, 30 bp, Artificial Sequence
  Synthetic oligonucleotide
tcttacgactcatgtgcgcaagcgtgggtt

SEQ ID NO: 243875 - DNA, 30 bp, Artificial Sequence
  Synthetic oligonucleotide
tgccacgtgcttaaattaaacctttgggtt

SEQ ID NO: 243876 - DNA, 30 bp, Artificial Sequence
  Synthetic oligonucleotide
aactcggaccgtgtaagacattgcatggtt

SEQ ID NO: 243877 - DNA, 30 bp, Artificial Sequence
  Synthetic oligonucleotide
gggcccaaacacgaagggcactggatggtt

SEQ ID NO: 243878 - DNA, 30 bp, Artificial Sequence
  Synthetic oligonucleotide
ttaaaactggtagggggtgggctactggtt

SEQ ID NO: 243879 - DNA, 30 bp, Artificial Sequence
  Synthetic oligonucleotide
cagtgttaattagggcaggggacgctggtt

SEQ ID NO: 243880 - DNA, 30 bp, Artificial Sequence
  Synthetic oligonucleotide
caacggaccggggatgctgcatggctggtt

SEQ ID NO: 243881 - DNA, 30 bp, Artificial Sequence
  Synthetic oligonucleotide
tatttcgcggagagtggaccacatctggtt

SEQ ID NO: 243882 - DNA, 30 bp, Artificial Sequence
  Synthetic oligonucleotide
ctacaccgtgcagtattggaaagtctggtt

SEQ ID NO: 243883 - DNA, 30 bp, Artificial Sequence
  Synthetic oligonucleotide
ccgacccaactgagggtgacctcagtggtt

SEQ ID NO: 243884 - DNA, 30 bp, Artificial Sequence
  Synthetic oligonucleotide
tgacaagaggcctatgcattgcacgtggtt

SEQ ID NO: 243885 - DNA, 30 bp, Artificial Sequence
  Synthetic oligonucleotide
ggcgaaaagggagggaactaacccgtggtt

SEQ ID NO: 243886 - DNA, 30 bp, Artificial Sequence
  Synthetic oligonucleotide
ccaactcgcaagcttgaaacggccgtggtt

SEQ ID NO: 243887 - DNA, 30 bp, Artificial Sequence
  Synthetic oligonucleotide
aaggggttacatgtctaatgctccgtggtt

SEQ ID NO: 243888 - DNA, 30 bp, Artificial Sequence
  Synthetic oligonucleotide
tatgcgcctaatctacagccaatggtggtt

SEQ ID NO: 243889 - DNA, 30 bp, Artificial Sequence
  Synthetic oligonucleotide
tccactggtttgcgtaaaagcaaattggtt

SEQ ID NO: 243890 - DNA, 30 bp, Artificial Sequence
  Synthetic oligonucleotide
tcaacgaagaatctgcggcacgagaatgtt

SEQ ID NO: 243891 - DNA, 30 bp, Artificial Sequence
  Synthetic oligonucleotide
tgtaacgattgactgcataggttgaatgtt

SEQ ID NO: 243892 - DNA, 30 bp, Artificial Sequence
  Synthetic oligonucleotide
atacccgcggtactagttcgtaataatgtt

SEQ ID NO: 243893 - DNA, 30 bp, Artificial Sequence
  Synthetic oligonucleotide
tgtggctataatgtaggcctgcataatgtt

SEQ ID NO: 243894 - DNA, 30 bp, Artificial Sequence
  Synthetic oligonucleotide
ggtcgtggcacagcaggactaattaatgtt

SEQ ID NO: 243895 - DNA, 30 bp, Artificial Sequence
  Synthetic oligonucleotide
ggccattaatcgagtgcgggatatcatgtt

SEQ ID NO: 243896 - DNA, 30 bp, Artificial Sequence
  Synthetic oligonucleotide
atgactacaacgttacgcccacgtcatgtt

SEQ ID NO: 243897 - DNA, 30 bp, Artificial Sequence
  Synthetic oligonucleotide
ggctaacccgtgagttgtaccgttcatgtt

SEQ ID NO: 243898 - DNA, 30 bp, Artificial Sequence
  Synthetic oligonucleotide
gaacagtagggctacagagctttagatgtt

SEQ ID NO: 243899 - DNA, 30 bp, Artificial Sequence
  Synthetic oligonucleotide
ccacgtaaggggaagccccgcgtcgatgtt

SEQ ID NO: 243900 - DNA, 30 bp, Artificial Sequence
  Synthetic oligonucleotide
cgttgtccttcagacagaattgcggatgtt

SEQ ID NO: 243901 - DNA, 30 bp, Artificial Sequence
  Synthetic oligonucleotide
tctgtcgaaagttacaagccctgtgatgtt

SEQ ID NO: 243902 - DNA, 30 bp, Artificial Sequence
  Synthetic oligonucleotide
cggatgtaagggagagcggcttaatatgtt

SEQ ID NO: 243903 - DNA, 30 bp, Artificial Sequence
  Synthetic oligonucleotide
gttgcaggggccagcacatggagatatgtt

SEQ ID NO: 243904 - DNA, 30 bp, Artificial Sequence
  Synthetic oligonucleotide
cagaggtacgtaaagtactaatgatatgtt

SEQ ID NO: 243905 - DNA, 30 bp, Artificial Sequence
  Synthetic oligonucleotide
gattatcaaaaatcttagtgccgctatgtt

SEQ ID NO: 243906 - DNA, 30 bp, Artificial Sequence
  Synthetic oligonucleotide
ggcggataggcaccaagtaaggtttatgtt

SEQ ID NO: 243907 - DNA, 30 bp, Artificial Sequence
  Synthetic oligonucleotide
ttcgatgcgtagtaggttgacagaactgtt

SEQ ID NO: 243908 - DNA, 30 bp, Artificial Sequence
  Synthetic oligonucleotide
ctgctgctatgcgcaaggcggggcactgtt

SEQ ID NO: 243909 - DNA, 30 bp, Artificial Sequence
  Synthetic oligonucleotide
cagctcatccgatgccataccttcactgtt

SEQ ID NO: 243910 - DNA, 30 bp, Artificial Sequence
  Synthetic oligonucleotide
aaacgttcgcgttgtcaaatgtagactgtt

SEQ ID NO: 243911 - DNA, 30 bp, Artificial Sequence
  Synthetic oligonucleotide
gcaccaattccgaatcgcattgcgactgtt

SEQ ID NO: 243912 - DNA, 30 bp, Artificial Sequence
  Synthetic oligonucleotide
agcgaaaggtcactagcaataatgactgtt

SEQ ID NO: 243913 - DNA, 30 bp, Artificial Sequence
  Synthetic oligonucleotide
acccagagaactggggaaacgggtactgtt

SEQ ID NO: 243914 - DNA, 30 bp, Artificial Sequence
  Synthetic oligonucleotide
acacctctggcaagagggaaaaagcctgtt

SEQ ID NO: 243915 - DNA, 30 bp, Artificial Sequence
  Synthetic oligonucleotide
catccggcggcacacgatacttctcctgtt

SEQ ID NO: 243916 - DNA, 30 bp, Artificial Sequence
  Synthetic oligonucleotide
gagttccgaagagtcatgatcagtcctgtt

SEQ ID NO: 243917 - DNA, 30 bp, Artificial Sequence
  Synthetic oligonucleotide
gggtccattgcggcatgacgactggctgtt

SEQ ID NO: 243918 - DNA, 30 bp, Artificial Sequence
  Synthetic oligonucleotide
aagatgtagagttccttttaccctgctgtt

SEQ ID NO: 243919 - DNA, 30 bp, Artificial Sequence
  Synthetic oligonucleotide
atgtttgaacctatcaccgcatactctgtt

SEQ ID NO: 243920 - DNA, 30 bp, Artificial Sequence
  Synthetic oligonucleotide
aggcgttaagtcagcccgattttctctgtt

SEQ ID NO: 243921 - DNA, 30 bp, Artificial Sequence
  Synthetic oligonucleotide
tcggaagaataagaagacctatggtctgtt

SEQ ID NO: 243922 - DNA, 30 bp, Artificial Sequence
  Synthetic oligonucleotide
tggagcggaagattcgtactctattctgtt

SEQ ID NO: 243923 - DNA, 30 bp, Artificial Sequence
  Synthetic oligonucleotide
gaactcgtatatcgctagaatcgttctgtt

SEQ ID NO: 243924 - DNA, 30 bp, Artificial Sequence
  Synthetic oligonucleotide
tatgggcactcggatgtgtgcaccagtgtt

SEQ ID NO: 243925 - DNA, 30 bp, Artificial Sequence
  Synthetic oligonucleotide
ccacgcgtcgaaatacatgaaccgagtgtt

SEQ ID NO: 243926 - DNA, 30 bp, Artificial Sequence
  Synthetic oligonucleotide
gctgacggtgactgagaggtcattagtgtt

SEQ ID NO: 243927 - DNA, 30 bp, Artificial Sequence
  Synthetic oligonucleotide
tgagacacttacgggtggtagtaacgtgtt

SEQ ID NO: 243928 - DNA, 29 bp, Artificial Sequence
  Synthetic oligonucleotide
agagtcgagtacctccgtttcaccgtgtt

SEQ ID NO: 243929 - DNA, 30 bp, Artificial Sequence
  Synthetic oligonucleotide
gcgaacgttcgaacagtaatgttccgtgtt

SEQ ID NO: 243930 - DNA, 30 bp, Artificial Sequence
  Synthetic oligonucleotide
agacagggtgtatagctctaagtgcgtgtt

SEQ ID NO: 243931 - DNA, 30 bp, Artificial Sequence
  Synthetic oligonucleotide
attggtgattattattgaaagagaggtgtt

SEQ ID NO: 243932 - DNA, 30 bp, Artificial Sequence
  Synthetic oligonucleotide
ttcgaggggtaaagaaccttgtcgggtgtt

SEQ ID NO: 243933 - DNA, 30 bp, Artificial Sequence
  Synthetic oligonucleotide
ctctaaaactgcattgaacacaatggtgtt

SEQ ID NO: 243934 - DNA, 30 bp, Artificial Sequence
  Synthetic oligonucleotide
agcataggtgtacaggaccttggtggtgtt

SEQ ID NO: 243935 - DNA, 30 bp, Artificial Sequence
  Synthetic oligonucleotide
agggtgcctacttaacgatatagctgtgtt

SEQ ID NO: 243936 - DNA, 30 bp, Artificial Sequence
  Synthetic oligonucleotide
ggtttgttagggtaaatatcttcaattgtt

SEQ ID NO: 243937 - DNA, 30 bp, Artificial Sequence
  Synthetic oligonucleotide
gggtcccgtgtagttggacacgccattgtt

SEQ ID NO: 243938 - DNA, 30 bp, Artificial Sequence
  Synthetic oligonucleotide
agaagataatgaattggttcgggcattgtt

SEQ ID NO: 243939 - DNA, 30 bp, Artificial Sequence
  Synthetic oligonucleotide
tgacgtcatcgacttcttggaacgattgtt

SEQ ID NO: 243940 - DNA, 30 bp, Artificial Sequence
  Synthetic oligonucleotide
cgattatccgaacacttgtgcaatattgtt

SEQ ID NO: 243941 - DNA, 30 bp, Artificial Sequence
  Synthetic oligonucleotide
tgccggcgttagatagaaccatgtattgtt

SEQ ID NO: 243942 - DNA, 30 bp, Artificial Sequence
  Synthetic oligonucleotide
gagatactggctattagacgtaaccttgtt

SEQ ID NO: 243943 - DNA, 30 bp, Artificial Sequence
  Synthetic oligonucleotide
aattcatcaccacaccctccacgccttgtt

SEQ ID NO: 243944 - DNA, 30 bp, Artificial Sequence
  Synthetic oligonucleotide
gcgcgaaagtcttactctagtcgtcttgtt

SEQ ID NO: 243945 - DNA, 30 bp, Artificial Sequence
  Synthetic oligonucleotide
ccctaggggtagaaagtatgaacggttgtt

SEQ ID NO: 243946 - DNA, 30 bp, Artificial Sequence
  Synthetic oligonucleotide
aagcgtaggtcaagtaacctcactgttgtt

SEQ ID NO: 243947 - DNA, 30 bp, Artificial Sequence
  Synthetic oligonucleotide
cctcaaagtacagggacacagccatttgtt

SEQ ID NO: 243948 - DNA, 30 bp, Artificial Sequence
  Synthetic oligonucleotide
ccggtagaccgtggattatcgggatttgtt

SEQ ID NO: 243949 - DNA, 30 bp, Artificial Sequence
  Synthetic oligonucleotide
gagctcaagctcgggcgagacatatttgtt

SEQ ID NO: 243950 - DNA, 29 bp, Artificial Sequence
  Synthetic oligonucleotide
ccaccgaaacggtttagcgtcattttgtt

SEQ ID NO: 243951 - DNA, 30 bp, Artificial Sequence
  Synthetic oligonucleotide
gcacgatgtgtcttgtttacctagaaattt

SEQ ID NO: 243952 - DNA, 30 bp, Artificial Sequence
  Synthetic oligonucleotide
cgtgatactaggaggatgcgtagtaaattt

SEQ ID NO: 243953 - DNA, 30 bp, Artificial Sequence
  Synthetic oligonucleotide
taaccgtagaagctctcgattgaacaattt

SEQ ID NO: 243954 - DNA, 30 bp, Artificial Sequence
  Synthetic oligonucleotide
ccaattaaatcggtcggctgataccaattt

SEQ ID NO: 243955 - DNA, 30 bp, Artificial Sequence
  Synthetic oligonucleotide
atgtatggcacgtttgactatacccaattt

SEQ ID NO: 243956 - DNA, 30 bp, Artificial Sequence
  Synthetic oligonucleotide
ccttgtaatgttccatcgggggcccaattt

SEQ ID NO: 243957 - DNA, 30 bp, Artificial Sequence
  Synthetic oligonucleotide
atacggcgtacgaggagactactgcaattt

SEQ ID NO: 243958 - DNA, 30 bp, Artificial Sequence
  Synthetic oligonucleotide
tctggggctatgtcgttatcgtatcaattt

SEQ ID NO: 243959 - DNA, 30 bp, Artificial Sequence
  Synthetic oligonucleotide
caatgggcacaacataggtgttatcaattt

SEQ ID NO: 243960 - DNA, 30 bp, Artificial Sequence
  Synthetic oligonucleotide
cacggcgcaacttgtaacggacctcaattt

SEQ ID NO: 243961 - DNA, 30 bp, Artificial Sequence
  Synthetic oligonucleotide
tgtaattgaggttgactggacgatgaattt

SEQ ID NO: 243962 - DNA, 30 bp, Artificial Sequence
  Synthetic oligonucleotide
acacctcccacacgttggttcgatgaattt

SEQ ID NO: 243963 - DNA, 30 bp, Artificial Sequence
  Synthetic oligonucleotide
agctagcgagcttcttctggtgatgaattt

SEQ ID NO: 243964 - DNA, 30 bp, Artificial Sequence
  Synthetic oligonucleotide
taacaggtatactccgtaccagctgaattt

SEQ ID NO: 243965 - DNA, 30 bp, Artificial Sequence
  Synthetic oligonucleotide
tcgcgcgagtatccttgttgcccataattt

SEQ ID NO: 243966 - DNA, 30 bp, Artificial Sequence
  Synthetic oligonucleotide
cgcagagatagtctaccattgctataattt

SEQ ID NO: 243967 - DNA, 30 bp, Artificial Sequence
  Synthetic oligonucleotide
cataatgaacccgtcttttcatcctaattt

SEQ ID NO: 243968 - DNA, 30 bp, Artificial Sequence
  Synthetic oligonucleotide
cccgcatccccacttcagcgtacgtaattt

SEQ ID NO: 243969 - DNA, 30 bp, Artificial Sequence
  Synthetic oligonucleotide
gaatcaacgggtagcgaatcttgttaattt

SEQ ID NO: 243970 - DNA, 30 bp, Artificial Sequence
  Synthetic oligonucleotide
gacgcggaatccagtgaatgggccacattt

SEQ ID NO: 243971 - DNA, 30 bp, Artificial Sequence
  Synthetic oligonucleotide
tctggcaaggaagtcgttcatatgacattt

SEQ ID NO: 243972 - DNA, 30 bp, Artificial Sequence
  Synthetic oligonucleotide
ggccacgcggatatacgctcttgtacattt

SEQ ID NO: 243973 - DNA, 30 bp, Artificial Sequence
  Synthetic oligonucleotide
tagcaagcacggatggtgacgacaccattt

SEQ ID NO: 243974 - DNA, 30 bp, Artificial Sequence
  Synthetic oligonucleotide
gcgggttaatgagcatgtcaaaccccattt

SEQ ID NO: 243975 - DNA, 30 bp, Artificial Sequence
  Synthetic oligonucleotide
attgagttgcgcacttggggactcccattt

SEQ ID NO: 243976 - DNA, 30 bp, Artificial Sequence
  Synthetic oligonucleotide
aaggcagcagtctacgtcataaaggcattt

SEQ ID NO: 243977 - DNA, 30 bp, Artificial Sequence
  Synthetic oligonucleotide
tatagatgcttaacagtatattgggcattt

SEQ ID NO: 243978 - DNA, 30 bp, Artificial Sequence
  Synthetic oligonucleotide
ttactgattcgtccataggaaacatcattt

SEQ ID NO: 243979 - DNA, 30 bp, Artificial Sequence
  Synthetic oligonucleotide
gacggcgaacacaattactaaacatcattt

SEQ ID NO: 243980 - DNA, 30 bp, Artificial Sequence
  Synthetic oligonucleotide
acgtggggtcctctcgggcagtcgtcattt

SEQ ID NO: 243981 - DNA, 30 bp, Artificial Sequence
  Synthetic oligonucleotide
atgataagaaacgggttttacatttcattt

SEQ ID NO: 243982 - DNA, 30 bp, Artificial Sequence
  Synthetic oligonucleotide
ctgcggcgacctgcccgggtaatcagattt

SEQ ID NO: 243983 - DNA, 30 bp, Artificial Sequence
  Synthetic oligonucleotide
tgctgagcacgactttatgctatgagattt

SEQ ID NO: 243984 - DNA, 30 bp, Artificial Sequence
  Synthetic oligonucleotide
ggtgaaggttacggcatgcctagtagattt

SEQ ID NO: 243985 - DNA, 30 bp, Artificial Sequence
  Synthetic oligonucleotide
ctcacggcgaatttgttccatggacgattt

SEQ ID NO: 243986 - DNA, 30 bp, Artificial Sequence
  Synthetic oligonucleotide
tgacgggaaattaggctagttaggcgattt

SEQ ID NO: 243987 - DNA, 30 bp, Artificial Sequence
  Synthetic oligonucleotide
aagctagacgaagttcggtttcggcgattt

SEQ ID NO: 243988 - DNA, 30 bp, Artificial Sequence
  Synthetic oligonucleotide
tgtatacggatgaagtgaggtttgcgattt

SEQ ID NO: 243989 - DNA, 30 bp, Artificial Sequence
  Synthetic oligonucleotide
cgacaggtccggtatcggtatcaaggattt

SEQ ID NO: 243990 - DNA, 30 bp, Artificial Sequence
  Synthetic oligonucleotide
aacctagagtataaatggactattggattt

SEQ ID NO: 243991 - DNA, 30 bp, Artificial Sequence
  Synthetic oligonucleotide
gccacagcgtgttttgcggttaaatgattt

SEQ ID NO: 243992 - DNA, 30 bp, Artificial Sequence
  Synthetic oligonucleotide
gggctaggatatcacatgccggcctgattt

SEQ ID NO: 243993 - DNA, 30 bp, Artificial Sequence
  Synthetic oligonucleotide
gttatacgatatcgagacaaaggctgattt

SEQ ID NO: 243994 - DNA, 30 bp, Artificial Sequence
  Synthetic oligonucleotide
gggaggaaacttcaggtcgcaatttgattt

SEQ ID NO: 243995 - DNA, 30 bp, Artificial Sequence
  Synthetic oligonucleotide
tgacatgtcgttgtacgtggagaaatattt

SEQ ID NO: 243996 - DNA, 30 bp, Artificial Sequence
  Synthetic oligonucleotide
tgaaaatggggtggacgaatggcaatattt

SEQ ID NO: 243997 - DNA, 30 bp, Artificial Sequence
  Synthetic oligonucleotide
agcacggctgacttaggaaggggaatattt

SEQ ID NO: 243998 - DNA, 30 bp, Artificial Sequence
  Synthetic oligonucleotide
aaggttaggatggtggcccaactaatattt

SEQ ID NO: 243999 - DNA, 30 bp, Artificial Sequence
  Synthetic oligonucleotide
gtattagatcaatgaaaagctcacatattt

SEQ ID NO: 244000 - DNA, 30 bp, Artificial Sequence
  Synthetic oligonucleotide
cgtggtgcgctaggaccactacccatattt

SEQ ID NO: 244001 - DNA, 30 bp, Artificial Sequence
  Synthetic oligonucleotide
ggcttagttcatgtgtcattactactattt

SEQ ID NO: 244002 - DNA, 30 bp, Artificial Sequence
  Synthetic oligonucleotide
aaggtccaagtggaacaaaccggcctattt

SEQ ID NO: 244003 - DNA, 30 bp, Artificial Sequence
  Synthetic oligonucleotide
aataagtccccgcgaattgtcaatctattt

SEQ ID NO: 244004 - DNA, 30 bp, Artificial Sequence
  Synthetic oligonucleotide
agctggggagtatctcgcgcgcaagtattt

SEQ ID NO: 244005 - DNA, 30 bp, Artificial Sequence
  Synthetic oligonucleotide
aactaagagggaggtaggactctagtattt

SEQ ID NO: 244006 - DNA, 30 bp, Artificial Sequence
  Synthetic oligonucleotide
atgacgcaaagtggttagacattagtattt

SEQ ID NO: 244007 - DNA, 29 bp, Artificial Sequence
  Synthetic oligonucleotide
cctactgtccctgagctcgattagtattt

SEQ ID NO: 244008 - DNA, 30 bp, Artificial Sequence
  Synthetic oligonucleotide
acacgaggtctcgactcctcgcaattattt

SEQ ID NO: 244009 - DNA, 30 bp, Artificial Sequence
  Synthetic oligonucleotide
ccagagcgatcccacaatcgtgaattattt

SEQ ID NO: 244010 - DNA, 30 bp, Artificial Sequence
  Synthetic oligonucleotide
acactggcctcatatgtagtcacgttattt

SEQ ID NO: 244011 - DNA, 30 bp, Artificial Sequence
  Synthetic oligonucleotide
cgcgatagaagggactcagttgaaaacttt

SEQ ID NO: 244012 - DNA, 30 bp, Artificial Sequence
  Synthetic oligonucleotide
gcgaagcgcagtgagatgactgtcaacttt

SEQ ID NO: 244013 - DNA, 30 bp, Artificial Sequence
  Synthetic oligonucleotide
cgaccagaactgtgatccccttctaacttt

SEQ ID NO: 244014 - DNA, 30 bp, Artificial Sequence
  Synthetic oligonucleotide
tgggagtaaggaaaggtgaggagtaacttt

SEQ ID NO: 244015 - DNA, 30 bp, Artificial Sequence
  Synthetic oligonucleotide
aaatgggctactacaggatcacaacacttt

SEQ ID NO: 244016 - DNA, 30 bp, Artificial Sequence
  Synthetic oligonucleotide
acctctcagaattaacagatatcacacttt

SEQ ID NO: 244017 - DNA, 30 bp, Artificial Sequence
  Synthetic oligonucleotide
aaggagctcttcgaggagaagaagcacttt

SEQ ID NO: 244018 - DNA, 30 bp, Artificial Sequence
  Synthetic oligonucleotide
attgctcctggggccggcaacaatcacttt

SEQ ID NO: 244019 - DNA, 30 bp, Artificial Sequence
  Synthetic oligonucleotide
actgcggatagaacaacagtttttcacttt

SEQ ID NO: 244020 - DNA, 30 bp, Artificial Sequence
  Synthetic oligonucleotide
atggggaaaattaaatgatataacgacttt

SEQ ID NO: 244021 - DNA, 30 bp, Artificial Sequence
  Synthetic oligonucleotide
tcaaaaaacactaaacggatccgcgacttt

SEQ ID NO: 244022 - DNA, 30 bp, Artificial Sequence
  Synthetic oligonucleotide
ccaattttacattgctcaagactcgacttt

SEQ ID NO: 244023 - DNA, 30 bp, Artificial Sequence
  Synthetic oligonucleotide
ggtgtgaactactggccgactgaggacttt

SEQ ID NO: 244024 - DNA, 30 bp, Artificial Sequence
  Synthetic oligonucleotide
gtcttggcaagttgtgcgagcggtgacttt

SEQ ID NO: 244025 - DNA, 30 bp, Artificial Sequence
  Synthetic oligonucleotide
gcgtcatacagcgtgtatgagtcatacttt

SEQ ID NO: 244026 - DNA, 30 bp, Artificial Sequence
  Synthetic oligonucleotide
gtcaaacaatagctttgcaccatctacttt

SEQ ID NO: 244027 - DNA, 30 bp, Artificial Sequence
  Synthetic oligonucleotide
agggcgagcgttgcgtttcccttaaccttt

SEQ ID NO: 244028 - DNA, 30 bp, Artificial Sequence
  Synthetic oligonucleotide
ctccatgagaccggaaatgaagacaccttt

SEQ ID NO: 244029 - DNA, 30 bp, Artificial Sequence
  Synthetic oligonucleotide
gccagctggctgcttcatccgtaacccttt

SEQ ID NO: 244030 - DNA, 30 bp, Artificial Sequence
  Synthetic oligonucleotide
ggagcttccctaattatctcgcgccccttt

SEQ ID NO: 244031 - DNA, 30 bp, Artificial Sequence
  Synthetic oligonucleotide
tgtagaagagtaacaagcatgtagcccttt

SEQ ID NO: 244032 - DNA, 30 bp, Artificial Sequence
  Synthetic oligonucleotide
gctcaacttacgttaaccatttagcccttt

SEQ ID NO: 244033 - DNA, 30 bp, Artificial Sequence
  Synthetic oligonucleotide
caggcttatcaagcaacaactaatcccttt

SEQ ID NO: 244034 - DNA, 30 bp, Artificial Sequence
  Synthetic oligonucleotide
taaagcaccaggcatttaacccgtcccttt

SEQ ID NO: 244035 - DNA, 30 bp, Artificial Sequence
  Synthetic oligonucleotide
cttccaagtctatggtgtgaatgtcccttt

SEQ ID NO: 244036 - DNA, 30 bp, Artificial Sequence
  Synthetic oligonucleotide
gactcaacgtactcacgacgggctgccttt

SEQ ID NO: 244037 - DNA, 30 bp, Artificial Sequence
  Synthetic oligonucleotide
ctcggtcgcggataagagtagagtgccttt

SEQ ID NO: 244038 - DNA, 30 bp, Artificial Sequence
  Synthetic oligonucleotide
acgtctacgtggaatgaccgactatccttt

SEQ ID NO: 244039 - DNA, 30 bp, Artificial Sequence
  Synthetic oligonucleotide
agtggcgcgaaccataggttccactccttt

SEQ ID NO: 244040 - DNA, 30 bp, Artificial Sequence
  Synthetic oligonucleotide
ggataagccgcaaccatgtatcagtccttt

SEQ ID NO: 244041 - DNA, 30 bp, Artificial Sequence
  Synthetic oligonucleotide
ctgcgatcagagaatcggcactggtccttt

SEQ ID NO: 244042 - DNA, 30 bp, Artificial Sequence
  Synthetic oligonucleotide
acataatcaaggaccaggactcgcagcttt

SEQ ID NO: 244043 - DNA, 30 bp, Artificial Sequence
  Synthetic oligonucleotide
aacggtacaccgtatcttcgtaggagcttt

SEQ ID NO: 244044 - DNA, 30 bp, Artificial Sequence
  Synthetic oligonucleotide
gaagaaccgaagtgctcgatcctgagcttt

SEQ ID NO: 244045 - DNA, 30 bp, Artificial Sequence
  Synthetic oligonucleotide
ggatggagaccagctgactgggatagcttt

SEQ ID NO: 244046 - DNA, 30 bp, Artificial Sequence
  Synthetic oligonucleotide
atcgtacgtatacatcccttggttagcttt

SEQ ID NO: 244047 - DNA, 30 bp, Artificial Sequence
  Synthetic oligonucleotide
gtgtgccgttttttttgtgcctgtcgcttt

SEQ ID NO: 244048 - DNA, 30 bp, Artificial Sequence
  Synthetic oligonucleotide
aatgagaagtatccaaataagtacggcttt

SEQ ID NO: 244049 - DNA, 30 bp, Artificial Sequence
  Synthetic oligonucleotide
taacatagtttgttataagaagtatgcttt

SEQ ID NO: 244050 - DNA, 30 bp, Artificial Sequence
  Synthetic oligonucleotide
ttggatgtacgcgtggtaccttcttgcttt

SEQ ID NO: 244051 - DNA, 30 bp, Artificial Sequence
  Synthetic oligonucleotide
cggtctaaagtcttgcaaacacggatcttt

SEQ ID NO: 244052 - DNA, 30 bp, Artificial Sequence
  Synthetic oligonucleotide
tctctgatgtggcgggtcgcgcatatcttt

SEQ ID NO: 244053 - DNA, 30 bp, Artificial Sequence
  Synthetic oligonucleotide
tgagcaactgagcaaagcttagatatcttt

SEQ ID NO: 244054 - DNA, 30 bp, Artificial Sequence
  Synthetic oligonucleotide
gtcgaaggagacggcttgagagcactcttt

SEQ ID NO: 244055 - DNA, 30 bp, Artificial Sequence
  Synthetic oligonucleotide
agaagagcacgaatcatccgggagctcttt

SEQ ID NO: 244056 - DNA, 30 bp, Artificial Sequence
  Synthetic oligonucleotide
ctgtgcaagcaatggcgtgtgatgctcttt

SEQ ID NO: 244057 - DNA, 30 bp, Artificial Sequence
  Synthetic oligonucleotide
cgaattaaactagcgactggagaggtcttt

SEQ ID NO: 244058 - DNA, 30 bp, Artificial Sequence
  Synthetic oligonucleotide
cgtaagaggggtagcacccacggggtcttt

SEQ ID NO: 244059 - DNA, 30 bp, Artificial Sequence
  Synthetic oligonucleotide
tggcagggaaccagatcctaactattcttt

SEQ ID NO: 244060 - DNA, 30 bp, Artificial Sequence
  Synthetic oligonucleotide
aatggtgcagtcttcgagcgcgacttcttt

SEQ ID NO: 244061 - DNA, 30 bp, Artificial Sequence
  Synthetic oligonucleotide
gtgttttgtacaatttatctcgagttcttt

SEQ ID NO: 244062 - DNA, 30 bp, Artificial Sequence
  Synthetic oligonucleotide
aggcccaatttggactagttgctgttcttt

SEQ ID NO: 244063 - DNA, 30 bp, Artificial Sequence
  Synthetic oligonucleotide
taatcaccatttgtgtcatagtatttcttt

SEQ ID NO: 244064 - DNA, 30 bp, Artificial Sequence
  Synthetic oligonucleotide
gcgagttgtcataatttacaggaaaagttt

SEQ ID NO: 244065 - DNA, 30 bp, Artificial Sequence
  Synthetic oligonucleotide
tggtctgcatctagcgagcggaccaagttt

SEQ ID NO: 244066 - DNA, 30 bp, Artificial Sequence
  Synthetic oligonucleotide
taagttcatggaaattatacatataagttt

SEQ ID NO: 244067 - DNA, 30 bp, Artificial Sequence
  Synthetic oligonucleotide
aacaattcagcgttggagtattataagttt

SEQ ID NO: 244068 - DNA, 30 bp, Artificial Sequence
  Synthetic oligonucleotide
caacatatgataggggaatcatcacagttt

SEQ ID NO: 244069 - DNA, 30 bp, Artificial Sequence
  Synthetic oligonucleotide
cggatgtactccagctcccaaggacagttt

SEQ ID NO: 244070 - DNA, 30 bp, Artificial Sequence
  Synthetic oligonucleotide
atcggcaccggtgcgttaccaggacagttt

SEQ ID NO: 244071 - DNA, 30 bp, Artificial Sequence
  Synthetic oligonucleotide
ctgtacggggattgcccacaaggtcagttt

SEQ ID NO: 244072 - DNA, 30 bp, Artificial Sequence
  Synthetic oligonucleotide
acgatagccatatctggtccccttcagttt

SEQ ID NO: 244073 - DNA, 30 bp, Artificial Sequence
  Synthetic oligonucleotide
aacctatttgttcttcatactgccgagttt

SEQ ID NO: 244074 - DNA, 30 bp, Artificial Sequence
  Synthetic oligonucleotide
ccgactttgagcgcgcataatctcgagttt

SEQ ID NO: 244075 - DNA, 30 bp, Artificial Sequence
  Synthetic oligonucleotide
ttgaattgcggagcgttcaataatgagttt

SEQ ID NO: 244076 - DNA, 30 bp, Artificial Sequence
  Synthetic oligonucleotide
atactaagagggtgagcaatgcgtgagttt

SEQ ID NO: 244077 - DNA, 30 bp, Artificial Sequence
  Synthetic oligonucleotide
tcactaagcatgattctatttttctagttt

SEQ ID NO: 244078 - DNA, 30 bp, Artificial Sequence
  Synthetic oligonucleotide
tgctaatcgtgtggttagggtaaaacgttt

SEQ ID NO: 244079 - DNA, 30 bp, Artificial Sequence
  Synthetic oligonucleotide
tctttgcccagcactggaccttacccgttt

SEQ ID NO: 244080 - DNA, 32 bp, Artificial Sequence
  Synthetic oligonucleotide
cggtaaggagggtcaccgacgtcgcgccgttt

SEQ ID NO: 244081 - DNA, 30 bp, Artificial Sequence
  Synthetic oligonucleotide
aaagagcacttgcaacaatacatgccgttt

SEQ ID NO: 244082 - DNA, 30 bp, Artificial Sequence
  Synthetic oligonucleotide
taccggtaccggaggcttaatattccgttt

SEQ ID NO: 244083 - DNA, 30 bp, Artificial Sequence
  Synthetic oligonucleotide
aatcggtgaagtacaggtgcgtacgcgttt

SEQ ID NO: 244084 - DNA, 30 bp, Artificial Sequence
  Synthetic oligonucleotide
gatgctgaatcggtcgttggaggggcgttt

SEQ ID NO: 244085 - DNA, 30 bp, Artificial Sequence
  Synthetic oligonucleotide
tcggaaccggtactacctaacgctgcgttt

SEQ ID NO: 244086 - DNA, 30 bp, Artificial Sequence
  Synthetic oligonucleotide
ggatgactcgtcgacatgaacggtgcgttt

SEQ ID NO: 244087 - DNA, 30 bp, Artificial Sequence
  Synthetic oligonucleotide
gactaacgaactgcgtagcgcacctcgttt

SEQ ID NO: 244088 - DNA, 30 bp, Artificial Sequence
  Synthetic oligonucleotide
acgaggcgggtcattaacagcgcgtcgttt

SEQ ID NO: 244089 - DNA, 30 bp, Artificial Sequence
  Synthetic oligonucleotide
cggggggtgtagtatccgaaggcaaggttt

SEQ ID NO: 244090 - DNA, 30 bp, Artificial Sequence
  Synthetic oligonucleotide
caatcggtctaagataatttgcacaggttt

SEQ ID NO: 244091 - DNA, 29 bp, Artificial Sequence
  Synthetic oligonucleotide
gatcagatcttatccatatcttcaggttt

SEQ ID NO: 244092 - DNA, 30 bp, Artificial Sequence
  Synthetic oligonucleotide
aaccgcacagaataaacagggtagaggttt

SEQ ID NO: 244093 - DNA, 30 bp, Artificial Sequence
  Synthetic oligonucleotide
ggtagggtgccttatatccaccggaggttt

SEQ ID NO: 244094 - DNA, 31 bp, Artificial Sequence
  Synthetic oligonucleotide
ctgcgagacagaattgtacatagttaggttt

SEQ ID NO: 244095 - DNA, 30 bp, Artificial Sequence
  Synthetic oligonucleotide
tagctggtcgaagcgctaatgcgtcggttt

SEQ ID NO: 244096 - DNA, 30 bp, Artificial Sequence
  Synthetic oligonucleotide
cgtcaaagcaatagagtagtatgcgggttt

SEQ ID NO: 244097 - DNA, 30 bp, Artificial Sequence
  Synthetic oligonucleotide
gaagttccaggtctatatgtaaaatggttt

SEQ ID NO: 244098 - DNA, 30 bp, Artificial Sequence
  Synthetic oligonucleotide
gataggaggatttgtatcagtacatggttt

SEQ ID NO: 244099 - DNA, 30 bp, Artificial Sequence
  Synthetic oligonucleotide
ggaacagttatgaagcatctcagatggttt

SEQ ID NO: 244100 - DNA, 30 bp, Artificial Sequence
  Synthetic oligonucleotide
aatcacagacgtcgagatccggactggttt

SEQ ID NO: 244101 - DNA, 30 bp, Artificial Sequence
  Synthetic oligonucleotide
agcacgtagctgctcgttccgccgtggttt

SEQ ID NO: 244102 - DNA, 30 bp, Artificial Sequence
  Synthetic oligonucleotide
aacgcttcgtgttccacggccgtgtggttt

SEQ ID NO: 244103 - DNA, 30 bp, Artificial Sequence
  Synthetic oligonucleotide
aggtagtactttcgacacaatgattggttt

SEQ ID NO: 244104 - DNA, 30 bp, Artificial Sequence
  Synthetic oligonucleotide
agaagtaccaattgcatctcctattggttt

SEQ ID NO: 244105 - DNA, 30 bp, Artificial Sequence
  Synthetic oligonucleotide
acgcgtgttccccggccgtctgtttggttt

SEQ ID NO: 244106 - DNA, 30 bp, Artificial Sequence
  Synthetic oligonucleotide
ggaaattagcgacctactttggccatgttt

SEQ ID NO: 244107 - DNA, 30 bp, Artificial Sequence
  Synthetic oligonucleotide
ggaatacccaacgactcgcgggatatgttt

SEQ ID NO: 244108 - DNA, 30 bp, Artificial Sequence
  Synthetic oligonucleotide
cgaccaaaaaacagggactatggtatgttt

SEQ ID NO: 244109 - DNA, 30 bp, Artificial Sequence
  Synthetic oligonucleotide
aacgtattgtggcgaatcagagtactgttt

SEQ ID NO: 244110 - DNA, 30 bp, Artificial Sequence
  Synthetic oligonucleotide
cgctacgcattgaagctccctcacctgttt

SEQ ID NO: 244111 - DNA, 30 bp, Artificial Sequence
  Synthetic oligonucleotide
aaggttggtcacacttcagaaccgctgttt

SEQ ID NO: 244112 - DNA, 30 bp, Artificial Sequence
  Synthetic oligonucleotide
cgatatcgggatgctgataatctgctgttt

SEQ ID NO: 244113 - DNA, 30 bp, Artificial Sequence
  Synthetic oligonucleotide
acggacctattcgtagaacccgcagtgttt

SEQ ID NO: 244114 - DNA, 30 bp, Artificial Sequence
  Synthetic oligonucleotide
gccagagatgatcggataatgatcgtgttt

SEQ ID NO: 244115 - DNA, 30 bp, Artificial Sequence
  Synthetic oligonucleotide
taccctaactcttggactaggatggtgttt

SEQ ID NO: 244116 - DNA, 30 bp, Artificial Sequence
  Synthetic oligonucleotide
aaatgtgtgcgtacggctgttcgattgttt

SEQ ID NO: 244117 - DNA, 30 bp, Artificial Sequence
  Synthetic oligonucleotide
agcaaaactgttggcattaaaagcttgttt

SEQ ID NO: 244118 - DNA, 30 bp, Artificial Sequence
  Synthetic oligonucleotide
atgttaaataggcatcagcgggcgttgttt

SEQ ID NO: 244119 - DNA, 30 bp, Artificial Sequence
  Synthetic oligonucleotide
aaggttgggaacgggtggcatgctttgttt

SEQ ID NO: 244120 - DNA, 30 bp, Artificial Sequence
  Synthetic oligonucleotide
agagcaaaatcagcgtgcatgtgtttgttt

SEQ ID NO: 244121 - DNA, 30 bp, Artificial Sequence
  Synthetic oligonucleotide
cggggtattgcgtcgtcagaacaaaatttt

SEQ ID NO: 244122 - DNA, 30 bp, Artificial Sequence
  Synthetic oligonucleotide
ccaataccggcgtgacctcgggaaaatttt

SEQ ID NO: 244123 - DNA, 31 bp, Artificial Sequence
  Synthetic oligonucleotide
ggttcaagaggtaaattgtcgagccaatttt

SEQ ID NO: 244124 - DNA, 30 bp, Artificial Sequence
  Synthetic oligonucleotide
agacacaatcactgataccgaagcaatttt

SEQ ID NO: 244125 - DNA, 30 bp, Artificial Sequence
  Synthetic oligonucleotide
agaacaagacttcacggggctacgaatttt

SEQ ID NO: 244126 - DNA, 30 bp, Artificial Sequence
  Synthetic oligonucleotide
tactagcatcggtctttgctccataatttt

SEQ ID NO: 244127 - DNA, 30 bp, Artificial Sequence
  Synthetic oligonucleotide
atgctaccaacccctactcatggacatttt

SEQ ID NO: 244128 - DNA, 30 bp, Artificial Sequence
  Synthetic oligonucleotide
ccttctaacaagaattatgaactacatttt

SEQ ID NO: 244129 - DNA, 30 bp, Artificial Sequence
  Synthetic oligonucleotide
tgtgcgacaccggtgtagtcccgccatttt

SEQ ID NO: 244130 - DNA, 30 bp, Artificial Sequence
  Synthetic oligonucleotide
ggactgggcacgttcttattgctccatttt

SEQ ID NO: 244131 - DNA, 30 bp, Artificial Sequence
  Synthetic oligonucleotide
tactaaagatcaacaaggccggcagatttt

SEQ ID NO: 244132 - DNA, 30 bp, Artificial Sequence
  Synthetic oligonucleotide
cgcaaagtcggatcctttagagaatatttt

SEQ ID NO: 244133 - DNA, 30 bp, Artificial Sequence
  Synthetic oligonucleotide
ttcatccggtagaaaagtagaacatatttt

SEQ ID NO: 244134 - DNA, 30 bp, Artificial Sequence
  Synthetic oligonucleotide
caaggaacgcataatcatcgatcatatttt

SEQ ID NO: 244135 - DNA, 30 bp, Artificial Sequence
  Synthetic oligonucleotide
aagcagttatgcaggctgattgtctatttt

SEQ ID NO: 244136 - DNA, 30 bp, Artificial Sequence
  Synthetic oligonucleotide
gggcagatgtcagagtacgagcggtatttt

SEQ ID NO: 244137 - DNA, 30 bp, Artificial Sequence
  Synthetic oligonucleotide
ttgtctaagagggtagcatagtggtatttt

SEQ ID NO: 244138 - DNA, 30 bp, Artificial Sequence
  Synthetic oligonucleotide
cctttaagtgggagaagaaggtcttatttt

SEQ ID NO: 244139 - DNA, 30 bp, Artificial Sequence
  Synthetic oligonucleotide
gttcgaagtcagcaaccaacatgaactttt

SEQ ID NO: 244140 - DNA, 30 bp, Artificial Sequence
  Synthetic oligonucleotide
aagtacatacaattccgggaaaagactttt

SEQ ID NO: 244141 - DNA, 30 bp, Artificial Sequence
  Synthetic oligonucleotide
ggatactgttcgggtattgctctgactttt

SEQ ID NO: 244142 - DNA, 30 bp, Artificial Sequence
  Synthetic oligonucleotide
cgcgatatatgaaagaaacggacacctttt

SEQ ID NO: 244143 - DNA, 30 bp, Artificial Sequence
  Synthetic oligonucleotide
cagcgttctaatgcgacatggaaccctttt

SEQ ID NO: 244144 - DNA, 30 bp, Artificial Sequence
  Synthetic oligonucleotide
ggaaacccgcgtgtgtgagatcagcctttt

SEQ ID NO: 244145 - DNA, 30 bp, Artificial Sequence
  Synthetic oligonucleotide
ccctaggcggtatctgtaagcaaagctttt

SEQ ID NO: 244146 - DNA, 30 bp, Artificial Sequence
  Synthetic oligonucleotide
agacggacaggagatgagagtgaggctttt

SEQ ID NO: 244147 - DNA, 30 bp, Artificial Sequence
  Synthetic oligonucleotide
gtctgagtgaaagcacctgggctggctttt

SEQ ID NO: 244148 - DNA, 30 bp, Artificial Sequence
  Synthetic oligonucleotide
tgccaggggatagagggataggatgctttt

SEQ ID NO: 244149 - DNA, 30 bp, Artificial Sequence
  Synthetic oligonucleotide
tgacgcctcgtaggtataacaggatctttt

SEQ ID NO: 244150 - DNA, 30 bp, Artificial Sequence
  Synthetic oligonucleotide
tgaaacctataagagtaaggcacaagtttt

SEQ ID NO: 244151 - DNA, 30 bp, Artificial Sequence
  Synthetic oligonucleotide
aaggacaggacctaagcaccagcaagtttt

SEQ ID NO: 244152 - DNA, 30 bp, Artificial Sequence
  Synthetic oligonucleotide
acaggggttaacagaccgcaaacccgtttt

SEQ ID NO: 244153 - DNA, 30 bp, Artificial Sequence
  Synthetic oligonucleotide
gcatcatctcgtcagggctatggccgtttt

SEQ ID NO: 244154 - DNA, 30 bp, Artificial Sequence
  Synthetic oligonucleotide
acaaaacggcaccgaacttgcatgcgtttt

SEQ ID NO: 244155 - DNA, 30 bp, Artificial Sequence
  Synthetic oligonucleotide
ccatgtaaccatagtaggaggatgcgtttt

SEQ ID NO: 244156 - DNA, 30 bp, Artificial Sequence
  Synthetic oligonucleotide
agaaacaagcaggcttgacagacaggtttt

SEQ ID NO: 244157 - DNA, 30 bp, Artificial Sequence
  Synthetic oligonucleotide
gcgtggtaactctaaacgaactcaggtttt

SEQ ID NO: 244158 - DNA, 30 bp, Artificial Sequence
  Synthetic oligonucleotide
gaaccgatcgggcccgcttagagtggtttt

SEQ ID NO: 244159 - DNA, 30 bp, Artificial Sequence
  Synthetic oligonucleotide
gaaaggcgttagtagcgttgacactgtttt

SEQ ID NO: 244160 - DNA, 30 bp, Artificial Sequence
  Synthetic oligonucleotide
tggggcgcaattacccgtaagtacattttt

SEQ ID NO: 244161 - DNA, 30 bp, Artificial Sequence
  Synthetic oligonucleotide
caacatggtctgctaaggaattacattttt

SEQ ID NO: 244162 - DNA, 30 bp, Artificial Sequence
  Synthetic oligonucleotide
ttcgagtggtttggttcgagccatattttt

SEQ ID NO: 244163 - DNA, 30 bp, Artificial Sequence
  Synthetic oligonucleotide
gcaactgtgttggaggacccatgtattttt

SEQ ID NO: 244164 - DNA, 30 bp, Artificial Sequence
  Synthetic oligonucleotide
cggacatcaaatcaactagcacgccttttt

SEQ ID NO: 244165 - DNA, 30 bp, Artificial Sequence
  Synthetic oligonucleotide
aacactctggggcaatagtagacgcttttt

SEQ ID NO: 244166 - DNA, 30 bp, Artificial Sequence
  Synthetic oligonucleotide
gaggcaacccacataagagggcaagttttt

SEQ ID NO: 244167 - DNA, 30 bp, Artificial Sequence
  Synthetic oligonucleotide
gcaaagatgaaaatgttatgcatagttttt

SEQ ID NO: 244168 - DNA, 30 bp, Artificial Sequence
  Synthetic oligonucleotide
ggcatgcgtgtatgcaattccaacgttttt

SEQ ID NO: 244169 - DNA, 30 bp, Artificial Sequence
  Synthetic oligonucleotide
cgacaccgggtgtaatccttattctttttt

SEQ ID NO: 244170 - DNA, 30 bp, Artificial Sequence
  Synthetic oligonucleotide
gtcaacaagtaagttaaacgtacgtttttt

SEQ ID NO: 244171 - DNA, 30 bp, Artificial Sequence
  Synthetic oligonucleotide
gcataacgagagctaataaagcgttttttt

SEQ ID NO: 244172 - DNA, 30 bp, Artificial Sequence
  Synthetic oligonucleotide
ctcttagtcacatccatccttatcaaaaaa

SEQ ID NO: 244173 - DNA, 30 bp, Artificial Sequence
  Synthetic oligonucleotide
ggcgcatacgaatcttccataagtaaaaaa

SEQ ID NO: 244174 - DNA, 30 bp, Artificial Sequence
  Synthetic oligonucleotide
cgattctactctaaaccggaccgtaaaaaa

SEQ ID NO: 244175 - DNA, 30 bp, Artificial Sequence
  Synthetic oligonucleotide
ggcgtctgaactcatgagtgatgtaaaaaa

SEQ ID NO: 244176 - DNA, 30 bp, Artificial Sequence
  Synthetic oligonucleotide
aagctacagcactatctagcattacaaaaa

SEQ ID NO: 244177 - DNA, 30 bp, Artificial Sequence
  Synthetic oligonucleotide
gaaactagtagttactatgcataccaaaaa

SEQ ID NO: 244178 - DNA, 30 bp, Artificial Sequence
  Synthetic oligonucleotide
atatgggcacagattatttttcgccaaaaa

SEQ ID NO: 244179 - DNA, 30 bp, Artificial Sequence
  Synthetic oligonucleotide
gcgccactcataggttgtgcgaatcaaaaa

SEQ ID NO: 244180 - DNA, 30 bp, Artificial Sequence
  Synthetic oligonucleotide
acttcggatgaaacccatatgagagaaaaa

SEQ ID NO: 244181 - DNA, 30 bp, Artificial Sequence
  Synthetic oligonucleotide
gagaaaggtagaaacgaagggggagaaaaa

SEQ ID NO: 244182 - DNA, 30 bp, Artificial Sequence
  Synthetic oligonucleotide
ttgccggtaaacctagcggagcgctaaaaa

SEQ ID NO: 244183 - DNA, 30 bp, Artificial Sequence
  Synthetic oligonucleotide
tcatgcgatcctggcgggacttagtaaaaa

SEQ ID NO: 244184 - DNA, 30 bp, Artificial Sequence
  Synthetic oligonucleotide
gacgggaacttcttatttactgggtaaaaa

SEQ ID NO: 244185 - DNA, 30 bp, Artificial Sequence
  Synthetic oligonucleotide
gcgggacgagcgtacgcataattgtaaaaa

SEQ ID NO: 244186 - DNA, 30 bp, Artificial Sequence
  Synthetic oligonucleotide
aaacttcagttttgatgaagagattaaaaa

SEQ ID NO: 244187 - DNA, 30 bp, Artificial Sequence
  Synthetic oligonucleotide
ttgaaagtacgttaagagaacagttaaaaa

SEQ ID NO: 244188 - DNA, 30 bp, Artificial Sequence
  Synthetic oligonucleotide
cgtatgtccccagacaataacaaaacaaaa

SEQ ID NO: 244189 - DNA, 30 bp, Artificial Sequence
  Synthetic oligonucleotide
tgatgaagaaatgacttcgtgcaaacaaaa

SEQ ID NO: 244190 - DNA, 30 bp, Artificial Sequence
  Synthetic oligonucleotide
gtgcttacaacctcttagctttgaacaaaa

SEQ ID NO: 244191 - DNA, 30 bp, Artificial Sequence
  Synthetic oligonucleotide
agccgcaggggagtgccaaggacgacaaaa

SEQ ID NO: 244192 - DNA, 30 bp, Artificial Sequence
  Synthetic oligonucleotide
agttagtgctggtccacttcatggacaaaa

SEQ ID NO: 244193 - DNA, 30 bp, Artificial Sequence
  Synthetic oligonucleotide
gggagggcacgataagggctagctacaaaa

SEQ ID NO: 244194 - DNA, 30 bp, Artificial Sequence
  Synthetic oligonucleotide
ctggcgacaaatttcgttggtccgccaaaa

SEQ ID NO: 244195 - DNA, 30 bp, Artificial Sequence
  Synthetic oligonucleotide
ccgctgacaggggtgcataataatccaaaa

SEQ ID NO: 244196 - DNA, 30 bp, Artificial Sequence
  Synthetic oligonucleotide
ggctttctgaccggaaactggtaagcaaaa

SEQ ID NO: 244197 - DNA, 30 bp, Artificial Sequence
  Synthetic oligonucleotide
atgatagcgctagttgcctaagcagcaaaa

SEQ ID NO: 244198 - DNA, 30 bp, Artificial Sequence
  Synthetic oligonucleotide
ttagcaggtagacttcacagtagagcaaaa

SEQ ID NO: 244199 - DNA, 30 bp, Artificial Sequence
  Synthetic oligonucleotide
cgttctgaagggacccggtatgatgcaaaa

SEQ ID NO: 244200 - DNA, 30 bp, Artificial Sequence
  Synthetic oligonucleotide
ctcatggctagcaacaatcatagtgcaaaa

SEQ ID NO: 244201 - DNA, 30 bp, Artificial Sequence
  Synthetic oligonucleotide
gcccaagaactggtgttaacccgtgcaaaa

SEQ ID NO: 244202 - DNA, 30 bp, Artificial Sequence
  Synthetic oligonucleotide
tcggcacctctcaaagacggtggtgcaaaa

SEQ ID NO: 244203 - DNA, 30 bp, Artificial Sequence
  Synthetic oligonucleotide
agtgactgggtgcagacaacacttgcaaaa

SEQ ID NO: 244204 - DNA, 30 bp, Artificial Sequence
  Synthetic oligonucleotide
gttgatcagtggtctctggagtgctcaaaa

SEQ ID NO: 244205 - DNA, 30 bp, Artificial Sequence
  Synthetic oligonucleotide
accaggagtatgtgggtgcacatctcaaaa

SEQ ID NO: 244206 - DNA, 30 bp, Artificial Sequence
  Synthetic oligonucleotide
gtagaagtgaattttgcggacggttcaaaa

SEQ ID NO: 244207 - DNA, 30 bp, Artificial Sequence
  Synthetic oligonucleotide
gaggaaaggacgcataaaactttttcaaaa

SEQ ID NO: 244208 - DNA, 30 bp, Artificial Sequence
  Synthetic oligonucleotide
agacttggttacaaggtaacgacaagaaaa

SEQ ID NO: 244209 - DNA, 30 bp, Artificial Sequence
  Synthetic oligonucleotide
cccaggacagcaggtaatggcccaagaaaa

SEQ ID NO: 244210 - DNA, 30 bp, Artificial Sequence
  Synthetic oligonucleotide
gcattcgtgcggagatcgcgtccaagaaaa

SEQ ID NO: 244211 - DNA, 30 bp, Artificial Sequence
  Synthetic oligonucleotide
tggtctacacttgggtgccggcgaagaaaa

SEQ ID NO: 244212 - DNA, 30 bp, Artificial Sequence
  Synthetic oligonucleotide
ttccgaggatgacgctagtctgctagaaaa

SEQ ID NO: 244213 - DNA, 30 bp, Artificial Sequence
  Synthetic oligonucleotide
ttaacgctgccgcactactgacgtagaaaa

SEQ ID NO: 244214 - DNA, 30 bp, Artificial Sequence
  Synthetic oligonucleotide
ctatctcataaggacctgaaaaaccgaaaa

SEQ ID NO: 244215 - DNA, 30 bp, Artificial Sequence
  Synthetic oligonucleotide
tgagaaatgactccgattgccatccgaaaa

SEQ ID NO: 244216 - DNA, 30 bp, Artificial Sequence
  Synthetic oligonucleotide
aaaacacagctacagtcatgtaggcgaaaa

SEQ ID NO: 244217 - DNA, 30 bp, Artificial Sequence
  Synthetic oligonucleotide
caggatccggtctgcgagcagcatcgaaaa

SEQ ID NO: 244218 - DNA, 30 bp, Artificial Sequence
  Synthetic oligonucleotide
ggactgcgcgaacattctcgggaaggaaaa

SEQ ID NO: 244219 - DNA, 30 bp, Artificial Sequence
  Synthetic oligonucleotide
gaccattaactagacctcgtactaggaaaa

SEQ ID NO: 244220 - DNA, 30 bp, Artificial Sequence
  Synthetic oligonucleotide
gctagaacgggaatagaactcatcggaaaa

SEQ ID NO: 244221 - DNA, 30 bp, Artificial Sequence
  Synthetic oligonucleotide
atcggaattggagtggggaagaagggaaaa

SEQ ID NO: 244222 - DNA, 30 bp, Artificial Sequence
  Synthetic oligonucleotide
aaaaccgcgaagtcaacgatagcatgaaaa

SEQ ID NO: 244223 - DNA, 30 bp, Artificial Sequence
  Synthetic oligonucleotide
taagatggtcaggcggtgcaacgatgaaaa

SEQ ID NO: 244224 - DNA, 30 bp, Artificial Sequence
  Synthetic oligonucleotide
aggtacggggtatttgaagtggtatgaaaa

SEQ ID NO: 244225 - DNA, 30 bp, Artificial Sequence
  Synthetic oligonucleotide
atctctataagggcgggctacaactgaaaa

SEQ ID NO: 244226 - DNA, 30 bp, Artificial Sequence
  Synthetic oligonucleotide
gcactgagtcttagctacctgaagtgaaaa

SEQ ID NO: 244227 - DNA, 30 bp, Artificial Sequence
  Synthetic oligonucleotide
tcgctttaatggctactggtgccttgaaaa

SEQ ID NO: 244228 - DNA, 29 bp, Artificial Sequence
  Synthetic oligonucleotide
ttggcccgttgcttccgttggcaataaaa

SEQ ID NO: 244229 - DNA, 30 bp, Artificial Sequence
  Synthetic oligonucleotide
gggatgacggtgtcaaaaattgcaataaaa

SEQ ID NO: 244230 - DNA, 30 bp, Artificial Sequence
  Synthetic oligonucleotide
atcgaggagtaattgtaacggtcaataaaa

SEQ ID NO: 244231 - DNA, 30 bp, Artificial Sequence
  Synthetic oligonucleotide
gttctcctaccgaatcagcacgacataaaa

SEQ ID NO: 244232 - DNA, 30 bp, Artificial Sequence
  Synthetic oligonucleotide
ctccgggtaagttaattaagatgcataaaa

SEQ ID NO: 244233 - DNA, 30 bp, Artificial Sequence
  Synthetic oligonucleotide
gggtgagattcactgagccgccagataaaa

SEQ ID NO: 244234 - DNA, 30 bp, Artificial Sequence
  Synthetic oligonucleotide
gagggccatacgttaacccgttagataaaa

SEQ ID NO: 244235 - DNA, 30 bp, Artificial Sequence
  Synthetic oligonucleotide
tgcgtacagtcaatacttgtggcgataaaa

SEQ ID NO: 244236 - DNA, 30 bp, Artificial Sequence
  Synthetic oligonucleotide
gtcactgagcaaccagtaaaccctataaaa

SEQ ID NO: 244237 - DNA, 30 bp, Artificial Sequence
  Synthetic oligonucleotide
cgagttctgttcattattgtggctataaaa

SEQ ID NO: 244238 - DNA, 30 bp, Artificial Sequence
  Synthetic oligonucleotide
gctgagtcaccattagctgggatcctaaaa

SEQ ID NO: 244239 - DNA, 30 bp, Artificial Sequence
  Synthetic oligonucleotide
cattaaaccatggacttggagcacgtaaaa

SEQ ID NO: 244240 - DNA, 30 bp, Artificial Sequence
  Synthetic oligonucleotide
gcgtcgcctattgttcggaatcccgtaaaa

SEQ ID NO: 244241 - DNA, 30 bp, Artificial Sequence
  Synthetic oligonucleotide
cactacatttaaagctccgggcgcgtaaaa

SEQ ID NO: 244242 - DNA, 30 bp, Artificial Sequence
  Synthetic oligonucleotide
ttcggagatgatacagcttggacggtaaaa

SEQ ID NO: 244243 - DNA, 30 bp, Artificial Sequence
  Synthetic oligonucleotide
tgtgtcaccgtaatgtcccgaccggtaaaa

SEQ ID NO: 244244 - DNA, 30 bp, Artificial Sequence
  Synthetic oligonucleotide
gaccctgagacgtccggtcccgcggtaaaa

SEQ ID NO: 244245 - DNA, 30 bp, Artificial Sequence
  Synthetic oligonucleotide
tgagaataccgctgtgtaccattggtaaaa

SEQ ID NO: 244246 - DNA, 30 bp, Artificial Sequence
  Synthetic oligonucleotide
agctagctcaattcaatagtggatgtaaaa

SEQ ID NO: 244247 - DNA, 30 bp, Artificial Sequence
  Synthetic oligonucleotide
aatgctggaaaaggccatcagtctgtaaaa

SEQ ID NO: 244248 - DNA, 30 bp, Artificial Sequence
  Synthetic oligonucleotide
atctcccggcagattgagtttgttgtaaaa

SEQ ID NO: 244249 - DNA, 30 bp, Artificial Sequence
  Synthetic oligonucleotide
ttgcagatagataccttccatgcattaaaa

SEQ ID NO: 244250 - DNA, 30 bp, Artificial Sequence
  Synthetic oligonucleotide
cgatcacggaaacggtcacatagattaaaa

SEQ ID NO: 244251 - DNA, 30 bp, Artificial Sequence
  Synthetic oligonucleotide
tcaattcagatggctggccggtgattaaaa

SEQ ID NO: 244252 - DNA, 30 bp, Artificial Sequence
  Synthetic oligonucleotide
ccggaaggggcccgtattgtgaccttaaaa

SEQ ID NO: 244253 - DNA, 30 bp, Artificial Sequence
  Synthetic oligonucleotide
ggtcgccgctggaggacacttcccttaaaa

SEQ ID NO: 244254 - DNA, 30 bp, Artificial Sequence
  Synthetic oligonucleotide
acgaaatcgggtctccggtgtgccttaaaa

SEQ ID NO: 244255 - DNA, 30 bp, Artificial Sequence
  Synthetic oligonucleotide
ccggttgaggacagaggttcgcgcttaaaa

SEQ ID NO: 244256 - DNA, 30 bp, Artificial Sequence
  Synthetic oligonucleotide
tgactccactacacaaagcggtagttaaaa

SEQ ID NO: 244257 - DNA, 30 bp, Artificial Sequence
  Synthetic oligonucleotide
aaggtcgagctcgagaattttatgttaaaa

SEQ ID NO: 244258 - DNA, 30 bp, Artificial Sequence
  Synthetic oligonucleotide
tcgctcaaaggaggttatatgtctttaaaa

SEQ ID NO: 244259 - DNA, 30 bp, Artificial Sequence
  Synthetic oligonucleotide
tgcttgggaagcactagcagtagtttaaaa

SEQ ID NO: 244260 - DNA, 30 bp, Artificial Sequence
  Synthetic oligonucleotide
ttggcattaagatctcgtggttaaaacaaa

SEQ ID NO: 244261 - DNA, 30 bp, Artificial Sequence
  Synthetic oligonucleotide
catcgatgttgcgctttagtgttcaacaaa

SEQ ID NO: 244262 - DNA, 30 bp, Artificial Sequence
  Synthetic oligonucleotide
gagtcaattaccgcacccgataggaacaaa

SEQ ID NO: 244263 - DNA, 30 bp, Artificial Sequence
  Synthetic oligonucleotide
tgcataaactcatggactaccaataacaaa

SEQ ID NO: 244264 - DNA, 30 bp, Artificial Sequence
  Synthetic oligonucleotide
gatatctatgcagtgcgacgcaaacacaaa

SEQ ID NO: 244265 - DNA, 30 bp, Artificial Sequence
  Synthetic oligonucleotide
agggagtatctcttgaatagcccacacaaa

SEQ ID NO: 244266 - DNA, 30 bp, Artificial Sequence
  Synthetic oligonucleotide
tgtgaccaacgttagtgcctcggacacaaa

SEQ ID NO: 244267 - DNA, 30 bp, Artificial Sequence
  Synthetic oligonucleotide
tgcctatttgctgacgtggatctacacaaa

SEQ ID NO: 244268 - DNA, 30 bp, Artificial Sequence
  Synthetic oligonucleotide
ttggcaggagtaatgtctacagtacacaaa

SEQ ID NO: 244269 - DNA, 31 bp, Artificial Sequence
  Synthetic oligonucleotide
ccgttgattgagcgccaaaacaggccacaaa

SEQ ID NO: 244270 - DNA, 30 bp, Artificial Sequence
  Synthetic oligonucleotide
accattgacggaatggtataccaagacaaa

SEQ ID NO: 244271 - DNA, 30 bp, Artificial Sequence
  Synthetic oligonucleotide
attggtgcccgagaaatttcgagagacaaa

SEQ ID NO: 244272 - DNA, 30 bp, Artificial Sequence
  Synthetic oligonucleotide
ccgataggactttggagcctccgagacaaa

SEQ ID NO: 244273 - DNA, 30 bp, Artificial Sequence
  Synthetic oligonucleotide
cgagtatcatttgtgcgggcccgcgacaaa

SEQ ID NO: 244274 - DNA, 30 bp, Artificial Sequence
  Synthetic oligonucleotide
aacaggttagtgcacatcagccgcgacaaa

SEQ ID NO: 244275 - DNA, 30 bp, Artificial Sequence
  Synthetic oligonucleotide
tacacccatgggcatgtatgcatcgacaaa

SEQ ID NO: 244276 - DNA, 30 bp, Artificial Sequence
  Synthetic oligonucleotide
ataatgggtgggcccgacggtcttgacaaa

SEQ ID NO: 244277 - DNA, 30 bp, Artificial Sequence
  Synthetic oligonucleotide
ggtgtaatgaacaagtaagatatatacaaa

SEQ ID NO: 244278 - DNA, 30 bp, Artificial Sequence
  Synthetic oligonucleotide
tcgacacgcgtgtcatgaaagcgctacaaa

SEQ ID NO: 244279 - DNA, 30 bp, Artificial Sequence
  Synthetic oligonucleotide
tgttgttggtatcgccacgaatggtacaaa

SEQ ID NO: 244280 - DNA, 30 bp, Artificial Sequence
  Synthetic oligonucleotide
tgtggtcactcacggccggggccttacaaa

SEQ ID NO: 244281 - DNA, 30 bp, Artificial Sequence
  Synthetic oligonucleotide
gtataaaatgcgggacatgctccttacaaa

SEQ ID NO: 244282 - DNA, 30 bp, Artificial Sequence
  Synthetic oligonucleotide
agattccctttgggataaaacgcttacaaa

SEQ ID NO: 244283 - DNA, 30 bp, Artificial Sequence
  Synthetic oligonucleotide
aaggcgcgttccatgtcgacactttacaaa

SEQ ID NO: 244284 - DNA, 30 bp, Artificial Sequence
  Synthetic oligonucleotide
cgatcgtatccactaccagataaaaccaaa

SEQ ID NO: 244285 - DNA, 30 bp, Artificial Sequence
  Synthetic oligonucleotide
aacacgtagattagagacgtacgaaccaaa

SEQ ID NO: 244286 - DNA, 30 bp, Artificial Sequence
  Synthetic oligonucleotide
acgcgtcccttagacgcaattggcaccaaa

SEQ ID NO: 244287 - DNA, 30 bp, Artificial Sequence
  Synthetic oligonucleotide
accagatccgttcaccttcttttcaccaaa

SEQ ID NO: 244288 - DNA, 30 bp, Artificial Sequence
  Synthetic oligonucleotide
agagcttccactgtcgttctgtagaccaaa

SEQ ID NO: 244289 - DNA, 30 bp, Artificial Sequence
  Synthetic oligonucleotide
ggtatattccagaagacctctactaccaaa

SEQ ID NO: 244290 - DNA, 30 bp, Artificial Sequence
  Synthetic oligonucleotide
aatcattggcatgataaacgtaaacccaaa

SEQ ID NO: 244291 - DNA, 30 bp, Artificial Sequence
  Synthetic oligonucleotide
tggttactcaaaccactggcgaagcccaaa

SEQ ID NO: 244292 - DNA, 31 bp, Artificial Sequence
  Synthetic oligonucleotide
agaggaaggtaatactgacgacaatcccaaa

SEQ ID NO: 244293 - DNA, 30 bp, Artificial Sequence
  Synthetic oligonucleotide
atcaatcgagagtgaccgcgggctcccaaa

SEQ ID NO: 244294 - DNA, 30 bp, Artificial Sequence
  Synthetic oligonucleotide
aagtaccttgcgctagctccatttcccaaa

SEQ ID NO: 244295 - DNA, 30 bp, Artificial Sequence
  Synthetic oligonucleotide
accttagcgcaacctgcgcctgaagccaaa

SEQ ID NO: 244296 - DNA, 30 bp, Artificial Sequence
  Synthetic oligonucleotide
cacactggtgtggcgaatcaagcagccaaa

SEQ ID NO: 244297 - DNA, 30 bp, Artificial Sequence
  Synthetic oligonucleotide
ggataggtggactccaagccgatagccaaa

SEQ ID NO: 244298 - DNA, 30 bp, Artificial Sequence
  Synthetic oligonucleotide
gccctagtgactggagtagttggcgccaaa

SEQ ID NO: 244299 - DNA, 30 bp, Artificial Sequence
  Synthetic oligonucleotide
agtgtgttggactgtcacgccgtcgccaaa

SEQ ID NO: 244300 - DNA, 30 bp, Artificial Sequence
  Synthetic oligonucleotide
gttctcacagcgctctcaattaaggccaaa

SEQ ID NO: 244301 - DNA, 30 bp, Artificial Sequence
  Synthetic oligonucleotide
tcaccaagccgtgaagagttaagggccaaa

SEQ ID NO: 244302 - DNA, 30 bp, Artificial Sequence
  Synthetic oligonucleotide
gatgcgcaagccaaatcagatatggccaaa

SEQ ID NO: 244303 - DNA, 30 bp, Artificial Sequence
  Synthetic oligonucleotide
ggtactatactaatagagctaaatgccaaa

SEQ ID NO: 244304 - DNA, 30 bp, Artificial Sequence
  Synthetic oligonucleotide
gatcgcacaagtaggtggacaaaatccaaa

SEQ ID NO: 244305 - DNA, 30 bp, Artificial Sequence
  Synthetic oligonucleotide
ttgttacatttgtgaacagtaaaatccaaa

SEQ ID NO: 244306 - DNA, 30 bp, Artificial Sequence
  Synthetic oligonucleotide
ataaaggtccggtagattcattaatccaaa

SEQ ID NO: 244307 - DNA, 30 bp, Artificial Sequence
  Synthetic oligonucleotide
ggaacatggcggtaagaagatttctccaaa

SEQ ID NO: 244308 - DNA, 30 bp, Artificial Sequence
  Synthetic oligonucleotide
agcgttcaacaaactaagcatcagtccaaa

SEQ ID NO: 244309 - DNA, 30 bp, Artificial Sequence
  Synthetic oligonucleotide
gaccaccattggggtgtggcgccttccaaa

SEQ ID NO: 244310 - DNA, 30 bp, Artificial Sequence
  Synthetic oligonucleotide
cgtctcgtgataagcggtcatgcaagcaaa

SEQ ID NO: 244311 - DNA, 30 bp, Artificial Sequence
  Synthetic oligonucleotide
agagaggagcggacatggtgtagaagcaaa

SEQ ID NO: 244312 - DNA, 30 bp, Artificial Sequence
  Synthetic oligonucleotide
gatataatgttcgtgcgggtgtgaagcaaa

SEQ ID NO: 244313 - DNA, 30 bp, Artificial Sequence
  Synthetic oligonucleotide
agactgggtggttaacttaggggcagcaaa

SEQ ID NO: 244314 - DNA, 30 bp, Artificial Sequence
  Synthetic oligonucleotide
tctattaggttgaaacacaacgtcagcaaa

SEQ ID NO: 244315 - DNA, 30 bp, Artificial Sequence
  Synthetic oligonucleotide
gcttaccggcccgtacataaatcgagcaaa

SEQ ID NO: 244316 - DNA, 30 bp, Artificial Sequence
  Synthetic oligonucleotide
gcaaacgtattcagctctgaggggagcaaa

SEQ ID NO: 244317 - DNA, 30 bp, Artificial Sequence
  Synthetic oligonucleotide
ccccttttgaatgggtgtctggctagcaaa

SEQ ID NO: 244318 - DNA, 30 bp, Artificial Sequence
  Synthetic oligonucleotide
cgcttcgtaagtcacgctgactctagcaaa

SEQ ID NO: 244319 - DNA, 30 bp, Artificial Sequence
  Synthetic oligonucleotide
gttcgacacggggtggatacgctacgcaaa

SEQ ID NO: 244320 - DNA, 30 bp, Artificial Sequence
  Synthetic oligonucleotide
taagacggaccgcagatatccaagcgcaaa

SEQ ID NO: 244321 - DNA, 30 bp, Artificial Sequence
  Synthetic oligonucleotide
tgcccttgatagagcaggataatgcgcaaa

SEQ ID NO: 244322 - DNA, 30 bp, Artificial Sequence
  Synthetic oligonucleotide
cctgtaaagatgcagaacttaatgcgcaaa

SEQ ID NO: 244323 - DNA, 30 bp, Artificial Sequence
  Synthetic oligonucleotide
gactatctattcggcaatctgtgtcgcaaa

SEQ ID NO: 244324 - DNA, 30 bp, Artificial Sequence
  Synthetic oligonucleotide
actgactgtcgagtgtatattataggcaaa

SEQ ID NO: 244325 - DNA, 30 bp, Artificial Sequence
  Synthetic oligonucleotide
tgtaataaatccgccatcggctccggcaaa

SEQ ID NO: 244326 - DNA, 30 bp, Artificial Sequence
  Synthetic oligonucleotide
attcctgcctgctttactggggtcggcaaa

SEQ ID NO: 244327 - DNA, 30 bp, Artificial Sequence
  Synthetic oligonucleotide
aaaccggctttcggaattagtgtcggcaaa

SEQ ID NO: 244328 - DNA, 30 bp, Artificial Sequence
  Synthetic oligonucleotide
acaggaatcttcccgatgcttgcgggcaaa

SEQ ID NO: 244329 - DNA, 30 bp, Artificial Sequence
  Synthetic oligonucleotide
gaacttaaggccagttacggcactggcaaa

SEQ ID NO: 244330 - DNA, 30 bp, Artificial Sequence
  Synthetic oligonucleotide
tgttgggaagacgaaagtagaggtggcaaa

SEQ ID NO: 244331 - DNA, 30 bp, Artificial Sequence
  Synthetic oligonucleotide
gaataatgaatgacgatgtattttggcaaa

SEQ ID NO: 244332 - DNA, 30 bp, Artificial Sequence
  Synthetic oligonucleotide
tcttaagttggacgtgttttaagatgcaaa

SEQ ID NO: 244333 - DNA, 31 bp, Artificial Sequence
  Synthetic oligonucleotide
ggtttagacgtctaggcagtcccgatgcaaa

SEQ ID NO: 244334 - DNA, 30 bp, Artificial Sequence
  Synthetic oligonucleotide
gttgctaaaaggcttgcggtgggatgcaaa

SEQ ID NO: 244335 - DNA, 30 bp, Artificial Sequence
  Synthetic oligonucleotide
cgctccaggatgcaatccggcctatgcaaa

SEQ ID NO: 244336 - DNA, 30 bp, Artificial Sequence
  Synthetic oligonucleotide
ggtctaggacgcgtatgggcatactgcaaa

SEQ ID NO: 244337 - DNA, 30 bp, Artificial Sequence
  Synthetic oligonucleotide
ttcactaaggttgtggaaagacgttgcaaa

SEQ ID NO: 244338 - DNA, 30 bp, Artificial Sequence
  Synthetic oligonucleotide
tgcggaagaccggtaatacagttttgcaaa

SEQ ID NO: 244339 - DNA, 30 bp, Artificial Sequence
  Synthetic oligonucleotide
gtagactcatctgaatgcaaacaaatcaaa

SEQ ID NO: 244340 - DNA, 30 bp, Artificial Sequence
  Synthetic oligonucleotide
ctacaaatgtagggtgtaagggccatcaaa

SEQ ID NO: 244341 - DNA, 30 bp, Artificial Sequence
  Synthetic oligonucleotide
tgtctagtcacgcgtagccctgcgatcaaa

SEQ ID NO: 244342 - DNA, 30 bp, Artificial Sequence
  Synthetic oligonucleotide
ttccccactactgccagttcctggatcaaa

SEQ ID NO: 244343 - DNA, 30 bp, Artificial Sequence
  Synthetic oligonucleotide
agggcgtgcgtgtatggaatgagtatcaaa

SEQ ID NO: 244344 - DNA, 29 bp, Artificial Sequence
  Synthetic oligonucleotide
ttagcatcaaatacgtccagggtatcaaa

SEQ ID NO: 244345 - DNA, 30 bp, Artificial Sequence
  Synthetic oligonucleotide
ggccgataggcgtttcgccatcttatcaaa

SEQ ID NO: 244346 - DNA, 29 bp, Artificial Sequence
  Synthetic oligonucleotide
caaacatggtcagtagtctgctactcaaa

SEQ ID NO: 244347 - DNA, 30 bp, Artificial Sequence
  Synthetic oligonucleotide
gatttagaacgcgaatcccagtccctcaaa

SEQ ID NO: 244348 - DNA, 31 bp, Artificial Sequence
  Synthetic oligonucleotide
gagtgtggaggaaccgctgaccccgctcaaa

SEQ ID NO: 244349 - DNA, 30 bp, Artificial Sequence
  Synthetic oligonucleotide
ataggaaatatctctggaagactgctcaaa

SEQ ID NO: 244350 - DNA, 30 bp, Artificial Sequence
  Synthetic oligonucleotide
ttcattcgctcataaaatttgtctctcaaa

SEQ ID NO: 244351 - DNA, 30 bp, Artificial Sequence
  Synthetic oligonucleotide
atggtccgtctccgtggatcataagtcaaa

SEQ ID NO: 244352 - DNA, 30 bp, Artificial Sequence
  Synthetic oligonucleotide
tccgggtgcttcttgcaagagtaagtcaaa

SEQ ID NO: 244353 - DNA, 30 bp, Artificial Sequence
  Synthetic oligonucleotide
gcaaacctgagaggtgtactgtgagtcaaa

SEQ ID NO: 244354 - DNA, 30 bp, Artificial Sequence
  Synthetic oligonucleotide
tacttacaggtcgcgtacgcggtagtcaaa

SEQ ID NO: 244355 - DNA, 30 bp, Artificial Sequence
  Synthetic oligonucleotide
aatgaggcccgaccaaggcacggggtcaaa

SEQ ID NO: 244356 - DNA, 30 bp, Artificial Sequence
  Synthetic oligonucleotide
acacaatcgactccagtgagagtggtcaaa

SEQ ID NO: 244357 - DNA, 30 bp, Artificial Sequence
  Synthetic oligonucleotide
gtgtaaggagaggatcacggtttggtcaaa

SEQ ID NO: 244358 - DNA, 30 bp, Artificial Sequence
  Synthetic oligonucleotide
taaaggaacggtgcattaaaataattcaaa

SEQ ID NO: 244359 - DNA, 30 bp, Artificial Sequence
  Synthetic oligonucleotide
taaggctgaagtaacacgatataattcaaa

SEQ ID NO: 244360 - DNA, 30 bp, Artificial Sequence
  Synthetic oligonucleotide
gctgaagggaactttattgggtacttcaaa

SEQ ID NO: 244361 - DNA, 30 bp, Artificial Sequence
  Synthetic oligonucleotide
atattgggaccatattgaggagtcttcaaa

SEQ ID NO: 244362 - DNA, 30 bp, Artificial Sequence
  Synthetic oligonucleotide
gtaatataggtaataaaggcgaatttcaaa

SEQ ID NO: 244363 - DNA, 30 bp, Artificial Sequence
  Synthetic oligonucleotide
gagcgggcagcgccacgacctcatttcaaa

SEQ ID NO: 244364 - DNA, 30 bp, Artificial Sequence
  Synthetic oligonucleotide
gtacaagtccgcgtttctgaaaccaagaaa

SEQ ID NO: 244365 - DNA, 30 bp, Artificial Sequence
  Synthetic oligonucleotide
cacagataggccctgggctggcgcaagaaa

SEQ ID NO: 244366 - DNA, 30 bp, Artificial Sequence
  Synthetic oligonucleotide
tgaccattcattcatggcctcccgaagaaa

SEQ ID NO: 244367 - DNA, 30 bp, Artificial Sequence
  Synthetic oligonucleotide
tggagaataacgccgtgtctggctaagaaa

SEQ ID NO: 244368 - DNA, 30 bp, Artificial Sequence
  Synthetic oligonucleotide
ttgcatgttttcagacttccgtttaagaaa

SEQ ID NO: 244369 - DNA, 30 bp, Artificial Sequence
  Synthetic oligonucleotide
caaactaagggccgaaccgttcgacagaaa

SEQ ID NO: 244370 - DNA, 30 bp, Artificial Sequence
  Synthetic oligonucleotide
cacgtcttggcatactgagtcacccagaaa

SEQ ID NO: 244371 - DNA, 30 bp, Artificial Sequence
  Synthetic oligonucleotide
acaagtaactgcggcggtcgggcccagaaa

SEQ ID NO: 244372 - DNA, 30 bp, Artificial Sequence
  Synthetic oligonucleotide
ggtaaagctacggctagtgaatcgcagaaa

SEQ ID NO: 244373 - DNA, 30 bp, Artificial Sequence
  Synthetic oligonucleotide
catttcactagtccattataagtgcagaaa

SEQ ID NO: 244374 - DNA, 30 bp, Artificial Sequence
  Synthetic oligonucleotide
tagaccgttcattcttggagtattcagaaa

SEQ ID NO: 244375 - DNA, 30 bp, Artificial Sequence
  Synthetic oligonucleotide
ttcgccagacctggagtaagcgttcagaaa

SEQ ID NO: 244376 - DNA, 30 bp, Artificial Sequence
  Synthetic oligonucleotide
cgtccccacgtaggcgcctagggagagaaa

SEQ ID NO: 244377 - DNA, 30 bp, Artificial Sequence
  Synthetic oligonucleotide
tctgcccctgttgggtaaggcaccgagaaa

SEQ ID NO: 244378 - DNA, 30 bp, Artificial Sequence
  Synthetic oligonucleotide
tgttgggatcttgtaacatggggcgagaaa

SEQ ID NO: 244379 - DNA, 30 bp, Artificial Sequence
  Synthetic oligonucleotide
gatataagtatatatcagttctgcgagaaa

SEQ ID NO: 244380 - DNA, 30 bp, Artificial Sequence
  Synthetic oligonucleotide
cttacgcaaaacactgtgagacaggagaaa

SEQ ID NO: 244381 - DNA, 30 bp, Artificial Sequence
  Synthetic oligonucleotide
actgtatgcgggataaatcggggtgagaaa

SEQ ID NO: 244382 - DNA, 30 bp, Artificial Sequence
  Synthetic oligonucleotide
caaacgcagaaggtcgatgagcaatagaaa

SEQ ID NO: 244383 - DNA, 30 bp, Artificial Sequence
  Synthetic oligonucleotide
ccggcgtcgttggagtacaaataatagaaa

SEQ ID NO: 244384 - DNA, 30 bp, Artificial Sequence
  Synthetic oligonucleotide
tgaacggaggcggcacagactgtatagaaa

SEQ ID NO: 244385 - DNA, 30 bp, Artificial Sequence
  Synthetic oligonucleotide
ggcgctcgattatctttattggcctagaaa

SEQ ID NO: 244386 - DNA, 30 bp, Artificial Sequence
  Synthetic oligonucleotide
cccaaacatgctagatctatgtggtagaaa

SEQ ID NO: 244387 - DNA, 30 bp, Artificial Sequence
  Synthetic oligonucleotide
gatcgggcagtaagaaatgatgcttagaaa

SEQ ID NO: 244388 - DNA, 30 bp, Artificial Sequence
  Synthetic oligonucleotide
agcagattagggtaagaaaccggttagaaa

SEQ ID NO: 244389 - DNA, 30 bp, Artificial Sequence
  Synthetic oligonucleotide
tcaataaaggtacggtgttgtatttagaaa

SEQ ID NO: 244390 - DNA, 30 bp, Artificial Sequence
  Synthetic oligonucleotide
tcaataacgtgttgctaacgtctgacgaaa

SEQ ID NO: 244391 - DNA, 30 bp, Artificial Sequence
  Synthetic oligonucleotide
acagatacgagtttagaaggggctacgaaa

SEQ ID NO: 244392 - DNA, 30 bp, Artificial Sequence
  Synthetic oligonucleotide
gctcctagcgaggacgttatttaaccgaaa

SEQ ID NO: 244393 - DNA, 30 bp, Artificial Sequence
  Synthetic oligonucleotide
aggtgtcattgcagcccgggaatcccgaaa

SEQ ID NO: 244394 - DNA, 30 bp, Artificial Sequence
  Synthetic oligonucleotide
acatatgatctggcagaagccatcccgaaa

SEQ ID NO: 244395 - DNA, 30 bp, Artificial Sequence
  Synthetic oligonucleotide
gtgtgcgggtaagctagacgctcgccgaaa

SEQ ID NO: 244396 - DNA, 30 bp, Artificial Sequence
  Synthetic oligonucleotide
ggcactgtgtaccactagggggtgccgaaa

SEQ ID NO: 244397 - DNA, 30 bp, Artificial Sequence
  Synthetic oligonucleotide
atgggtttctaacaatcgcgagcagcgaaa

SEQ ID NO: 244398 - DNA, 30 bp, Artificial Sequence
  Synthetic oligonucleotide
cgtgtcgggatatgatcgctgtgagcgaaa

SEQ ID NO: 244399 - DNA, 30 bp, Artificial Sequence
  Synthetic oligonucleotide
ctccaactatgtgagtcgagcatagcgaaa

SEQ ID NO: 244400 - DNA, 30 bp, Artificial Sequence
  Synthetic oligonucleotide
atgatgcggcatctcttaacccacgcgaaa

SEQ ID NO: 244401 - DNA, 30 bp, Artificial Sequence
  Synthetic oligonucleotide
tgtttggaatcgccaagtcccggggcgaaa

SEQ ID NO: 244402 - DNA, 30 bp, Artificial Sequence
  Synthetic oligonucleotide
acatgcaaaccagtctgcggatggtcgaaa

SEQ ID NO: 244403 - DNA, 30 bp, Artificial Sequence
  Synthetic oligonucleotide
atctcaaatccgggcttgaccggttcgaaa

SEQ ID NO: 244404 - DNA, 30 bp, Artificial Sequence
  Synthetic oligonucleotide
catggcgcagacaacgttactcaaaggaaa

SEQ ID NO: 244405 - DNA, 30 bp, Artificial Sequence
  Synthetic oligonucleotide
gagctattaacggtcgtagatcacaggaaa

SEQ ID NO: 244406 - DNA, 30 bp, Artificial Sequence
  Synthetic oligonucleotide
gagtcggtcagaaggttaaccttcaggaaa

SEQ ID NO: 244407 - DNA, 30 bp, Artificial Sequence
  Synthetic oligonucleotide
gctttaagatatgcgtcctagttcaggaaa

SEQ ID NO: 244408 - DNA, 30 bp, Artificial Sequence
  Synthetic oligonucleotide
gtacgctgtatatagtaataaaggaggaaa

SEQ ID NO: 244409 - DNA, 30 bp, Artificial Sequence
  Synthetic oligonucleotide
taaacaagtcgatgcacaccgctgaggaaa

SEQ ID NO: 244410 - DNA, 30 bp, Artificial Sequence
  Synthetic oligonucleotide
gcctggcttggcttgcagagggataggaaa

SEQ ID NO: 244411 - DNA, 30 bp, Artificial Sequence
  Synthetic oligonucleotide
tctagtgtctgcgcatttaaggctaggaaa

SEQ ID NO: 244412 - DNA, 30 bp, Artificial Sequence
  Synthetic oligonucleotide
gcatcgttccaaaagcacatgcaacggaaa

SEQ ID NO: 244413 - DNA, 30 bp, Artificial Sequence
  Synthetic oligonucleotide
atgaaaagacagcctttctaaatacggaaa

SEQ ID NO: 244414 - DNA, 30 bp, Artificial Sequence
  Synthetic oligonucleotide
tattgtacggctttaagggcgtaccggaaa

SEQ ID NO: 244415 - DNA, 30 bp, Artificial Sequence
  Synthetic oligonucleotide
atagggctcctaagtaactcgtcccggaaa

SEQ ID NO: 244416 - DNA, 30 bp, Artificial Sequence
  Synthetic oligonucleotide
ggtcaaatgtgcttcgttagaacgcggaaa

SEQ ID NO: 244417 - DNA, 30 bp, Artificial Sequence
  Synthetic oligonucleotide
ctagaggcgggctagtggcctgggcggaaa

SEQ ID NO: 244418 - DNA, 30 bp, Artificial Sequence
  Synthetic oligonucleotide
cgggttcagtttgccttgtaggttcggaaa

SEQ ID NO: 244419 - DNA, 30 bp, Artificial Sequence
  Synthetic oligonucleotide
tcatgggttgtcaatgagagatcagggaaa

SEQ ID NO: 244420 - DNA, 30 bp, Artificial Sequence
  Synthetic oligonucleotide
atgctcggtcgttacgcccagaacgggaaa

SEQ ID NO: 244421 - DNA, 30 bp, Artificial Sequence
  Synthetic oligonucleotide
agcagcaatagagacagccattgcgggaaa

SEQ ID NO: 244422 - DNA, 30 bp, Artificial Sequence
  Synthetic oligonucleotide
ccgacccgcgtagtcaggtagggggggaaa

SEQ ID NO: 244423 - DNA, 30 bp, Artificial Sequence
  Synthetic oligonucleotide
tcaacgcagtgctcaagacctggggggaaa

SEQ ID NO: 244424 - DNA, 30 bp, Artificial Sequence
  Synthetic oligonucleotide
ttggatgacttgcccctgcatgctgggaaa

SEQ ID NO: 244425 - DNA, 31 bp, Artificial Sequence
  Synthetic oligonucleotide
tccgtacactgggtgtgatagcggatggaaa

SEQ ID NO: 244426 - DNA, 30 bp, Artificial Sequence
  Synthetic oligonucleotide
acaatgtatgttgcgggcggtatatggaaa

SEQ ID NO: 244427 - DNA, 30 bp, Artificial Sequence
  Synthetic oligonucleotide
gagggttatgtagggtacagcgcctggaaa

SEQ ID NO: 244428 - DNA, 30 bp, Artificial Sequence
  Synthetic oligonucleotide
tcagagatactggccatgccgatctggaaa

SEQ ID NO: 244429 - DNA, 30 bp, Artificial Sequence
  Synthetic oligonucleotide
gctggaaaaatcccatatggatagtggaaa

SEQ ID NO: 244430 - DNA, 30 bp, Artificial Sequence
  Synthetic oligonucleotide
gtacggagatttttcgctgaacgaatgaaa

SEQ ID NO: 244431 - DNA, 30 bp, Artificial Sequence
  Synthetic oligonucleotide
gcgttagcctttgtgaagtacggaatgaaa

SEQ ID NO: 244432 - DNA, 30 bp, Artificial Sequence
  Synthetic oligonucleotide
aaaaaatagtgcataggaagtcgcatgaaa

SEQ ID NO: 244433 - DNA, 30 bp, Artificial Sequence
  Synthetic oligonucleotide
atcagtgtggaatgggcgttcggcatgaaa

SEQ ID NO: 244434 - DNA, 30 bp, Artificial Sequence
  Synthetic oligonucleotide
catctcccataaacttctcagccgatgaaa

SEQ ID NO: 244435 - DNA, 30 bp, Artificial Sequence
  Synthetic oligonucleotide
gagctctttgcagggtcttgtgcgatgaaa

SEQ ID NO: 244436 - DNA, 30 bp, Artificial Sequence
  Synthetic oligonucleotide
tgatctatcgactcgacgtcctctatgaaa

SEQ ID NO: 244437 - DNA, 30 bp, Artificial Sequence
  Synthetic oligonucleotide
ggccggcttcgctgtaacaaatgtatgaaa

SEQ ID NO: 244438 - DNA, 30 bp, Artificial Sequence
  Synthetic oligonucleotide
acatagggtgtgactttatgcgaactgaaa

SEQ ID NO: 244439 - DNA, 30 bp, Artificial Sequence
  Synthetic oligonucleotide
atcacatcacgcagttgaacagcactgaaa

SEQ ID NO: 244440 - DNA, 30 bp, Artificial Sequence
  Synthetic oligonucleotide
taggataaaccctgtagtaggggactgaaa

SEQ ID NO: 244441 - DNA, 30 bp, Artificial Sequence
  Synthetic oligonucleotide
tgacgcacgtccgtgaatcaatacctgaaa

SEQ ID NO: 244442 - DNA, 30 bp, Artificial Sequence
  Synthetic oligonucleotide
gaacgagtggtaaaacgcgctttcctgaaa

SEQ ID NO: 244443 - DNA, 30 bp, Artificial Sequence
  Synthetic oligonucleotide
tattaagtctagctggccatactgctgaaa

SEQ ID NO: 244444 - DNA, 30 bp, Artificial Sequence
  Synthetic oligonucleotide
gcctcgataacccgagattaacctctgaaa

SEQ ID NO: 244445 - DNA, 30 bp, Artificial Sequence
  Synthetic oligonucleotide
gtcgggtcgcgaccagctattcacgtgaaa

SEQ ID NO: 244446 - DNA, 30 bp, Artificial Sequence
  Synthetic oligonucleotide
ggcatcgtaccgtaaacgtcttgggtgaaa

SEQ ID NO: 244447 - DNA, 30 bp, Artificial Sequence
  Synthetic oligonucleotide
agttagcgctcactcaatttaactgtgaaa

SEQ ID NO: 244448 - DNA, 30 bp, Artificial Sequence
  Synthetic oligonucleotide
aaatgatcgcagaggagggaaaacttgaaa

SEQ ID NO: 244449 - DNA, 30 bp, Artificial Sequence
  Synthetic oligonucleotide
ggattccatctgaggagttccaccttgaaa

SEQ ID NO: 244450 - DNA, 30 bp, Artificial Sequence
  Synthetic oligonucleotide
gaatagaatgcgaggcttcgatgcttgaaa

SEQ ID NO: 244451 - DNA, 30 bp, Artificial Sequence
  Synthetic oligonucleotide
atccgcactctagaaggcagatcgttgaaa

SEQ ID NO: 244452 - DNA, 30 bp, Artificial Sequence
  Synthetic oligonucleotide
agcgttatgttgtcataacgagtgttgaaa

SEQ ID NO: 244453 - DNA, 30 bp, Artificial Sequence
  Synthetic oligonucleotide
cgctcacgtcaccatggggtctttttgaaa

SEQ ID NO: 244454 - DNA, 30 bp, Artificial Sequence
  Synthetic oligonucleotide
aaatgcggctttaggtcatggcccaataaa

SEQ ID NO: 244455 - DNA, 30 bp, Artificial Sequence
  Synthetic oligonucleotide
acgttggttcaacggacaccgtccaataaa

SEQ ID NO: 244456 - DNA, 30 bp, Artificial Sequence
  Synthetic oligonucleotide
caggcgttctcgaagttgaccccgaataaa

SEQ ID NO: 244457 - DNA, 30 bp, Artificial Sequence
  Synthetic oligonucleotide
ggtaaataatggttactacgttcgaataaa

SEQ ID NO: 244458 - DNA, 30 bp, Artificial Sequence
  Synthetic oligonucleotide
aacgagttagcccggggtacagggaataaa

SEQ ID NO: 244459 - DNA, 30 bp, Artificial Sequence
  Synthetic oligonucleotide
atatcggggcggtcagcaagagctaataaa

SEQ ID NO: 244460 - DNA, 30 bp, Artificial Sequence
  Synthetic oligonucleotide
ccgtctgagtgaaggctactagctaataaa

SEQ ID NO: 244461 - DNA, 30 bp, Artificial Sequence
  Synthetic oligonucleotide
cccccctccgactagctcggaacacataaa

SEQ ID NO: 244462 - DNA, 30 bp, Artificial Sequence
  Synthetic oligonucleotide
gtgggacaatgctcgcatattacacataaa

SEQ ID NO: 244463 - DNA, 30 bp, Artificial Sequence
  Synthetic oligonucleotide
ggggctgatggcgatctgagctcacataaa

SEQ ID NO: 244464 - DNA, 30 bp, Artificial Sequence
  Synthetic oligonucleotide
cgtggtcatccgtgaggactaggacataaa

SEQ ID NO: 244465 - DNA, 30 bp, Artificial Sequence
  Synthetic oligonucleotide
gatccgaagtagataacgtagatacataaa

SEQ ID NO: 244466 - DNA, 30 bp, Artificial Sequence
  Synthetic oligonucleotide
ttaccagcattctacgacgggggccataaa

SEQ ID NO: 244467 - DNA, 30 bp, Artificial Sequence
  Synthetic oligonucleotide
gcgcaagtgcagaaaagctgcttccataaa

SEQ ID NO: 244468 - DNA, 30 bp, Artificial Sequence
  Synthetic oligonucleotide
ttgcgtatgtaacgatataacaagcataaa

SEQ ID NO: 244469 - DNA, 30 bp, Artificial Sequence
  Synthetic oligonucleotide
attgacttacctcgggaaaccgctcataaa

SEQ ID NO: 244470 - DNA, 30 bp, Artificial Sequence
  Synthetic oligonucleotide
tgtgatcacttaggccgtgttattcataaa

SEQ ID NO: 244471 - DNA, 30 bp, Artificial Sequence
  Synthetic oligonucleotide
cggatatccacatccccaagtggagataaa

SEQ ID NO: 244472 - DNA, 30 bp, Artificial Sequence
  Synthetic oligonucleotide
ggtggcaacttatttctccaatccgataaa

SEQ ID NO: 244473 - DNA, 30 bp, Artificial Sequence
  Synthetic oligonucleotide
accagacgttagcgaagaccacgcgataaa

SEQ ID NO: 244474 - DNA, 30 bp, Artificial Sequence
  Synthetic oligonucleotide
ccctaggtgcgagtaccttagaatgataaa

SEQ ID NO: 244475 - DNA, 30 bp, Artificial Sequence
  Synthetic oligonucleotide
aaggttcaccttcgtggaatcggctataaa

SEQ ID NO: 244476 - DNA, 30 bp, Artificial Sequence
  Synthetic oligonucleotide
atattaataaaaaggctattaacgtataaa

SEQ ID NO: 244477 - DNA, 31 bp, Artificial Sequence
  Synthetic oligonucleotide
tcttatcacatccggggaaggagattataaa

SEQ ID NO: 244478 - DNA, 30 bp, Artificial Sequence
  Synthetic oligonucleotide
gccgttcgctctagactccttctttataaa

SEQ ID NO: 244479 - DNA, 30 bp, Artificial Sequence
  Synthetic oligonucleotide
tgcgcataatgatccaacctgataactaaa

SEQ ID NO: 244480 - DNA, 30 bp, Artificial Sequence
  Synthetic oligonucleotide
tttggatacgcaaatggttaagtcactaaa

SEQ ID NO: 244481 - DNA, 30 bp, Artificial Sequence
  Synthetic oligonucleotide
agccgcattctgagaaggggagtcactaaa

SEQ ID NO: 244482 - DNA, 28 bp, Artificial Sequence
  Synthetic oligonucleotide
gatgagtacgtttgccaaagctactaaa

SEQ ID NO: 244483 - DNA, 30 bp, Artificial Sequence
  Synthetic oligonucleotide
agagctcaagagaagagtccgcttactaaa

SEQ ID NO: 244484 - DNA, 30 bp, Artificial Sequence
  Synthetic oligonucleotide
gctattgaccgttgtaggtcagaacctaaa

SEQ ID NO: 244485 - DNA, 30 bp, Artificial Sequence
  Synthetic oligonucleotide
agagtcgggcacgtggttgagccacctaaa

SEQ ID NO: 244486 - DNA, 30 bp, Artificial Sequence
  Synthetic oligonucleotide
atgagtttataaatagaacggccacctaaa

SEQ ID NO: 244487 - DNA, 30 bp, Artificial Sequence
  Synthetic oligonucleotide
ggtatgttcacccagcggcaaaggcctaaa

SEQ ID NO: 244488 - DNA, 30 bp, Artificial Sequence
  Synthetic oligonucleotide
aatgccacagacacgcgtggaatgcctaaa

SEQ ID NO: 244489 - DNA, 30 bp, Artificial Sequence
  Synthetic oligonucleotide
cgcatagccaccttgcgatcaaaagctaaa

SEQ ID NO: 244490 - DNA, 30 bp, Artificial Sequence
  Synthetic oligonucleotide
acggcacttgttggggtttcaccagctaaa

SEQ ID NO: 244491 - DNA, 30 bp, Artificial Sequence
  Synthetic oligonucleotide
tgttgaatcgatgatgactagtcagctaaa

SEQ ID NO: 244492 - DNA, 30 bp, Artificial Sequence
  Synthetic oligonucleotide
gttccagaacttactatcggacccgctaaa

SEQ ID NO: 244493 - DNA, 30 bp, Artificial Sequence
  Synthetic oligonucleotide
atccaaaacaacggccggaccagcgctaaa

SEQ ID NO: 244494 - DNA, 30 bp, Artificial Sequence
  Synthetic oligonucleotide
atcatgttgagcgcacttacactcgctaaa

SEQ ID NO: 244495 - DNA, 30 bp, Artificial Sequence
  Synthetic oligonucleotide
acgatactagactcagtgttaaaggctaaa

SEQ ID NO: 244496 - DNA, 30 bp, Artificial Sequence
  Synthetic oligonucleotide
aggtcccccgacgcaatagccgaggctaaa

SEQ ID NO: 244497 - DNA, 30 bp, Artificial Sequence
  Synthetic oligonucleotide
atggagaatcgtcacgttgacatggctaaa

SEQ ID NO: 244498 - DNA, 30 bp, Artificial Sequence
  Synthetic oligonucleotide
gtcccagctcgaacggtggagcttgctaaa

SEQ ID NO: 244499 - DNA, 30 bp, Artificial Sequence
  Synthetic oligonucleotide
gatgtgtagagcacgttttgagtatctaaa

SEQ ID NO: 244500 - DNA, 30 bp, Artificial Sequence
  Synthetic oligonucleotide
aactccgaatggcgcggtgtcaactctaaa

SEQ ID NO: 244501 - DNA, 30 bp, Artificial Sequence
  Synthetic oligonucleotide
tacacgggtattgcggcatctgtgtctaaa

SEQ ID NO: 244502 - DNA, 30 bp, Artificial Sequence
  Synthetic oligonucleotide
agcgagttcgtcagggtccaaaattctaaa

SEQ ID NO: 244503 - DNA, 30 bp, Artificial Sequence
  Synthetic oligonucleotide
ggcgcaaaatttgtgtcaaacctttctaaa

SEQ ID NO: 244504 - DNA, 30 bp, Artificial Sequence
  Synthetic oligonucleotide
ctgccacgtataaaatacgtgataagtaaa

SEQ ID NO: 244505 - DNA, 30 bp, Artificial Sequence
  Synthetic oligonucleotide
cggtataagacccgatattagtacagtaaa

SEQ ID NO: 244506 - DNA, 30 bp, Artificial Sequence
  Synthetic oligonucleotide
tgggttcatcttaagacagttcagagtaaa

SEQ ID NO: 244507 - DNA, 30 bp, Artificial Sequence
  Synthetic oligonucleotide
gcgacgtggcaacttccattaaggagtaaa

SEQ ID NO: 244508 - DNA, 30 bp, Artificial Sequence
  Synthetic oligonucleotide
tcgaagataggccgcatacctgggagtaaa

SEQ ID NO: 244509 - DNA, 30 bp, Artificial Sequence
  Synthetic oligonucleotide
ggagctgggttgatcgttgttcatagtaaa

SEQ ID NO: 244510 - DNA, 31 bp, Artificial Sequence
  Synthetic oligonucleotide
gcgtcagttatcaattaatctatttagtaaa

SEQ ID NO: 244511 - DNA, 30 bp, Artificial Sequence
  Synthetic oligonucleotide
atcgctaccatatcagtgtggcaacgtaaa

SEQ ID NO: 244512 - DNA, 30 bp, Artificial Sequence
  Synthetic oligonucleotide
gcgacaagtgaattcgcataggaacgtaaa

SEQ ID NO: 244513 - DNA, 30 bp, Artificial Sequence
  Synthetic oligonucleotide
aagtatgcagggcgttcatctaaccgtaaa

SEQ ID NO: 244514 - DNA, 30 bp, Artificial Sequence
  Synthetic oligonucleotide
tcctattgggggactttacaggggcgtaaa

SEQ ID NO: 244515 - DNA, 30 bp, Artificial Sequence
  Synthetic oligonucleotide
acaggcatacactgttggttcactcgtaaa

SEQ ID NO: 244516 - DNA, 30 bp, Artificial Sequence
  Synthetic oligonucleotide
cacggaagttcatgtattcgtagtcgtaaa

SEQ ID NO: 244517 - DNA, 30 bp, Artificial Sequence
  Synthetic oligonucleotide
tagtggattggaaaacataggaaaggtaaa

SEQ ID NO: 244518 - DNA, 31 bp, Artificial Sequence
  Synthetic oligonucleotide
gggttgccccggtgccccgcttatcggtaaa

SEQ ID NO: 244519 - DNA, 30 bp, Artificial Sequence
  Synthetic oligonucleotide
tcaaactatggcccacgagggtcgggtaaa

SEQ ID NO: 244520 - DNA, 30 bp, Artificial Sequence
  Synthetic oligonucleotide
gcgtctgcaggggttctcacagctggtaaa

SEQ ID NO: 244521 - DNA, 30 bp, Artificial Sequence
  Synthetic oligonucleotide
ggcgttaatcaacattgaataagtggtaaa

SEQ ID NO: 244522 - DNA, 30 bp, Artificial Sequence
  Synthetic oligonucleotide
gaagaactgggatcatcgcgctaatgtaaa

SEQ ID NO: 244523 - DNA, 30 bp, Artificial Sequence
  Synthetic oligonucleotide
gaagtggacaaactgactcggtaatgtaaa

SEQ ID NO: 244524 - DNA, 30 bp, Artificial Sequence
  Synthetic oligonucleotide
ctaacgggctctgtcaagcagggatgtaaa

SEQ ID NO: 244525 - DNA, 30 bp, Artificial Sequence
  Synthetic oligonucleotide
cggcattaacgcgttttgtggtgctgtaaa

SEQ ID NO: 244526 - DNA, 30 bp, Artificial Sequence
  Synthetic oligonucleotide
agcagagatgatatatttccagtctgtaaa

SEQ ID NO: 244527 - DNA, 30 bp, Artificial Sequence
  Synthetic oligonucleotide
ctgtgatgttgtgatatcagtacgtgtaaa

SEQ ID NO: 244528 - DNA, 30 bp, Artificial Sequence
  Synthetic oligonucleotide
attggcggatgacgattgatcttgtgtaaa

SEQ ID NO: 244529 - DNA, 30 bp, Artificial Sequence
  Synthetic oligonucleotide
ccgtggctgcaacgtctctatgattgtaaa

SEQ ID NO: 244530 - DNA, 30 bp, Artificial Sequence
  Synthetic oligonucleotide
agcgagtgttacgtgtttggatattgtaaa

SEQ ID NO: 244531 - DNA, 30 bp, Artificial Sequence
  Synthetic oligonucleotide
ttatgttccagacaggtgtgtatttgtaaa

SEQ ID NO: 244532 - DNA, 30 bp, Artificial Sequence
  Synthetic oligonucleotide
tgccgatccatacagccagcctaaattaaa

SEQ ID NO: 244533 - DNA, 30 bp, Artificial Sequence
  Synthetic oligonucleotide
agcggagggcagtccgatcgcgcaattaaa

SEQ ID NO: 244534 - DNA, 30 bp, Artificial Sequence
  Synthetic oligonucleotide
aaaagcaagataatctacgataacattaaa

SEQ ID NO: 244535 - DNA, 30 bp, Artificial Sequence
  Synthetic oligonucleotide
cacaacataatcaaatgggaacccattaaa

SEQ ID NO: 244536 - DNA, 30 bp, Artificial Sequence
  Synthetic oligonucleotide
ggagccgtgtggaccgagagttgcattaaa

SEQ ID NO: 244537 - DNA, 30 bp, Artificial Sequence
  Synthetic oligonucleotide
ggcaatgttgtaggaccatctacgattaaa

SEQ ID NO: 244538 - DNA, 30 bp, Artificial Sequence
  Synthetic oligonucleotide
ggatggaacgcactactcgtatatattaaa

SEQ ID NO: 244539 - DNA, 30 bp, Artificial Sequence
  Synthetic oligonucleotide
aagttatcgagatgatatgcatcacttaaa

SEQ ID NO: 244540 - DNA, 30 bp, Artificial Sequence
  Synthetic oligonucleotide
ttaccattttctcgtaagtattatcttaaa

SEQ ID NO: 244541 - DNA, 30 bp, Artificial Sequence
  Synthetic oligonucleotide
tgctatatatagtgcccaatccttcttaaa

SEQ ID NO: 244542 - DNA, 30 bp, Artificial Sequence
  Synthetic oligonucleotide
gtcttccatacgagcgtgacagaagttaaa

SEQ ID NO: 244543 - DNA, 30 bp, Artificial Sequence
  Synthetic oligonucleotide
ccatgtactcaagcaccaccttaagttaaa

SEQ ID NO: 244544 - DNA, 30 bp, Artificial Sequence
  Synthetic oligonucleotide
tgttgcgtgcacagggcgggagcagttaaa

SEQ ID NO: 244545 - DNA, 30 bp, Artificial Sequence
  Synthetic oligonucleotide
ccacgatagtctgtaactcggtccgttaaa

SEQ ID NO: 244546 - DNA, 30 bp, Artificial Sequence
  Synthetic oligonucleotide
gatcctcacatgccaatacgaggcgttaaa

SEQ ID NO: 244547 - DNA, 30 bp, Artificial Sequence
  Synthetic oligonucleotide
cgacttcataagcatgctggattcgttaaa

SEQ ID NO: 244548 - DNA, 30 bp, Artificial Sequence
  Synthetic oligonucleotide
gtaacactccagcgaagaaggcaggttaaa

SEQ ID NO: 244549 - DNA, 30 bp, Artificial Sequence
  Synthetic oligonucleotide
ctgcactaaagcagtctgctctcggttaaa

SEQ ID NO: 244550 - DNA, 30 bp, Artificial Sequence
  Synthetic oligonucleotide
gaccggaaggcaattgggcacctggttaaa

SEQ ID NO: 244551 - DNA, 30 bp, Artificial Sequence
  Synthetic oligonucleotide
cgacgctaagaggtacacccgactgttaaa

SEQ ID NO: 244552 - DNA, 30 bp, Artificial Sequence
  Synthetic oligonucleotide
agcgttttttggaatcctgggggatttaaa

SEQ ID NO: 244553 - DNA, 30 bp, Artificial Sequence
  Synthetic oligonucleotide
aagccacgcttaatagtgaactgatttaaa

SEQ ID NO: 244554 - DNA, 30 bp, Artificial Sequence
  Synthetic oligonucleotide
aagacaatgtggttgcgtagggtatttaaa

SEQ ID NO: 244555 - DNA, 30 bp, Artificial Sequence
  Synthetic oligonucleotide
gacactagaacgagcgttcatacctttaaa

SEQ ID NO: 244556 - DNA, 30 bp, Artificial Sequence
  Synthetic oligonucleotide
gacagatacgcggggggggcttgctttaaa

SEQ ID NO: 244557 - DNA, 30 bp, Artificial Sequence
  Synthetic oligonucleotide
ttgtggagcggaacctcagatcggtttaaa

SEQ ID NO: 244558 - DNA, 30 bp, Artificial Sequence
  Synthetic oligonucleotide
ataatatctaaaatcacgagaatgtttaaa

SEQ ID NO: 244559 - DNA, 30 bp, Artificial Sequence
  Synthetic oligonucleotide
gtaaagcttaattggctgatcatgtttaaa

SEQ ID NO: 244560 - DNA, 30 bp, Artificial Sequence
  Synthetic oligonucleotide
ctgctctcgaaactcgttgacaccaaacaa

SEQ ID NO: 244561 - DNA, 30 bp, Artificial Sequence
  Synthetic oligonucleotide
taatgggaactacagctctggaccaaacaa

SEQ ID NO: 244562 - DNA, 30 bp, Artificial Sequence
  Synthetic oligonucleotide
cgtccaaccgccatcgcatgcaagaaacaa

SEQ ID NO: 244563 - DNA, 30 bp, Artificial Sequence
  Synthetic oligonucleotide
gggggcccggaccttccagaggggaaacaa

SEQ ID NO: 244564 - DNA, 30 bp, Artificial Sequence
  Synthetic oligonucleotide
tacgacggtcgaccttatatgactaaacaa

SEQ ID NO: 244565 - DNA, 30 bp, Artificial Sequence
  Synthetic oligonucleotide
cagaaaggggcgggtaaggcataacaacaa

SEQ ID NO: 244566 - DNA, 30 bp, Artificial Sequence
  Synthetic oligonucleotide
gagctatgaattggcccgtttcggcaacaa

SEQ ID NO: 244567 - DNA, 30 bp, Artificial Sequence
  Synthetic oligonucleotide
attaggtcctctcgcgatcgaattcaacaa

SEQ ID NO: 244568 - DNA, 30 bp, Artificial Sequence
  Synthetic oligonucleotide
taaggatagtgctatgagataattcaacaa

SEQ ID NO: 244569 - DNA, 30 bp, Artificial Sequence
  Synthetic oligonucleotide
tggcatgtgggtgtgcgggagtttcaacaa

SEQ ID NO: 244570 - DNA, 30 bp, Artificial Sequence
  Synthetic oligonucleotide
tgtgcccccacagagggctctgaggaacaa

SEQ ID NO: 244571 - DNA, 30 bp, Artificial Sequence
  Synthetic oligonucleotide
taggattgtcccgatattaaatcctaacaa

SEQ ID NO: 244572 - DNA, 30 bp, Artificial Sequence
  Synthetic oligonucleotide
gcgggagggttagatggaatctcctaacaa

SEQ ID NO: 244573 - DNA, 30 bp, Artificial Sequence
  Synthetic oligonucleotide
cgctataacggaatcgctaccagctaacaa

SEQ ID NO: 244574 - DNA, 30 bp, Artificial Sequence
  Synthetic oligonucleotide
agttatcgacctatgcgaatgtgctaacaa

SEQ ID NO: 244575 - DNA, 30 bp, Artificial Sequence
  Synthetic oligonucleotide
gttggcctctcggtatacagaacgtaacaa

SEQ ID NO: 244576 - DNA, 30 bp, Artificial Sequence
  Synthetic oligonucleotide
aaagtaaaatctggtactacgaggtaacaa

SEQ ID NO: 244577 - DNA, 30 bp, Artificial Sequence
  Synthetic oligonucleotide
ctagtcccgtgttgcgtagttagttaacaa

SEQ ID NO: 244578 - DNA, 30 bp, Artificial Sequence
  Synthetic oligonucleotide
tctaggcgtagactcaagagttgttaacaa

SEQ ID NO: 244579 - DNA, 30 bp, Artificial Sequence
  Synthetic oligonucleotide
taacaaaccaatggtattctcgagacacaa

SEQ ID NO: 244580 - DNA, 30 bp, Artificial Sequence
  Synthetic oligonucleotide
ggagcacgagtatgattagagcggacacaa

SEQ ID NO: 244581 - DNA, 30 bp, Artificial Sequence
  Synthetic oligonucleotide
cgtatcgtcacccgcgggacatttacacaa

SEQ ID NO: 244582 - DNA, 30 bp, Artificial Sequence
  Synthetic oligonucleotide
gtgtgggcatatcacgtgatgacgccacaa

SEQ ID NO: 244583 - DNA, 30 bp, Artificial Sequence
  Synthetic oligonucleotide
ttggaatgttaactgtattaaatagcacaa

SEQ ID NO: 244584 - DNA, 30 bp, Artificial Sequence
  Synthetic oligonucleotide
ttccgaagcagcttgcccatcttagcacaa

SEQ ID NO: 244585 - DNA, 30 bp, Artificial Sequence
  Synthetic oligonucleotide
aaaagataacgtgctgcgaaacccgcacaa

SEQ ID NO: 244586 - DNA, 30 bp, Artificial Sequence
  Synthetic oligonucleotide
atccatttacctttcacaaagctcgcacaa

SEQ ID NO: 244587 - DNA, 30 bp, Artificial Sequence
  Synthetic oligonucleotide
aactaaaatggacagagttatgatgcacaa

SEQ ID NO: 244588 - DNA, 30 bp, Artificial Sequence
  Synthetic oligonucleotide
cacaaaaactctgttgaaagggtatcacaa

SEQ ID NO: 244589 - DNA, 30 bp, Artificial Sequence
  Synthetic oligonucleotide
acccagaatattccacagacagcctcacaa

SEQ ID NO: 244590 - DNA, 30 bp, Artificial Sequence
  Synthetic oligonucleotide
catatcacaggggactatccattctcacaa

SEQ ID NO: 244591 - DNA, 30 bp, Artificial Sequence
  Synthetic oligonucleotide
cgggtaagtatactggtagtaaggtcacaa

SEQ ID NO: 244592 - DNA, 30 bp, Artificial Sequence
  Synthetic oligonucleotide
atcgttcacaggtgtgtaaggtggtcacaa

SEQ ID NO: 244593 - DNA, 30 bp, Artificial Sequence
  Synthetic oligonucleotide
gtttactgggaacttgggaaattgtcacaa

SEQ ID NO: 244594 - DNA, 30 bp, Artificial Sequence
  Synthetic oligonucleotide
ctggtagatacgtcatagccatcaagacaa

SEQ ID NO: 244595 - DNA, 30 bp, Artificial Sequence
  Synthetic oligonucleotide
taagaaagctcacctccgtatataagacaa

SEQ ID NO: 244596 - DNA, 30 bp, Artificial Sequence
  Synthetic oligonucleotide
acttcccgtgggtaggttccgctaagacaa

SEQ ID NO: 244597 - DNA, 30 bp, Artificial Sequence
  Synthetic oligonucleotide
actggtgttgtggacataatacgcagacaa

SEQ ID NO: 244598 - DNA, 30 bp, Artificial Sequence
  Synthetic oligonucleotide
gcggtcacaagctactcagtccatagacaa

SEQ ID NO: 244599 - DNA, 30 bp, Artificial Sequence
  Synthetic oligonucleotide
ccgttaaccattcgagtaaaggctagacaa

SEQ ID NO: 244600 - DNA, 30 bp, Artificial Sequence
  Synthetic oligonucleotide
tcttctaaaatgtatgtcagccttagacaa

SEQ ID NO: 244601 - DNA, 30 bp, Artificial Sequence
  Synthetic oligonucleotide
gttcgtatgtctactatgaacaaacgacaa

SEQ ID NO: 244602 - DNA, 30 bp, Artificial Sequence
  Synthetic oligonucleotide
tagtcaattggacatttgaaacaccgacaa

SEQ ID NO: 244603 - DNA, 30 bp, Artificial Sequence
  Synthetic oligonucleotide
gctcttcaacgaaaagtgatcgcgcgacaa

SEQ ID NO: 244604 - DNA, 30 bp, Artificial Sequence
  Synthetic oligonucleotide
aggtcgtttcgctataacgcttggcgacaa

SEQ ID NO: 244605 - DNA, 30 bp, Artificial Sequence
  Synthetic oligonucleotide
ctacgctcgaaaacaccccttaatcgacaa

SEQ ID NO: 244606 - DNA, 30 bp, Artificial Sequence
  Synthetic oligonucleotide
tctgaagcgatctttgtacaatgaggacaa

SEQ ID NO: 244607 - DNA, 30 bp, Artificial Sequence
  Synthetic oligonucleotide
caatgtagtctcaatcctcattccggacaa

SEQ ID NO: 244608 - DNA, 30 bp, Artificial Sequence
  Synthetic oligonucleotide
cgagagcaattaaacttaccccgcggacaa

SEQ ID NO: 244609 - DNA, 30 bp, Artificial Sequence
  Synthetic oligonucleotide
aaaagtcaaatttcatcctacggcggacaa

SEQ ID NO: 244610 - DNA, 30 bp, Artificial Sequence
  Synthetic oligonucleotide
ggatcgaattgcaacagtaattcgggacaa

SEQ ID NO: 244611 - DNA, 30 bp, Artificial Sequence
  Synthetic oligonucleotide
cattattgactatattagcgttcgggacaa

SEQ ID NO: 244612 - DNA, 30 bp, Artificial Sequence
  Synthetic oligonucleotide
aggtgacagcgacgcagtgcaaaatgacaa

SEQ ID NO: 244613 - DNA, 30 bp, Artificial Sequence
  Synthetic oligonucleotide
gttatccccaaagaatcggttgaatgacaa

SEQ ID NO: 244614 - DNA, 30 bp, Artificial Sequence
  Synthetic oligonucleotide
ctgggatagtaaagttcctgttaatgacaa

SEQ ID NO: 244615 - DNA, 30 bp, Artificial Sequence
  Synthetic oligonucleotide
tgtggtgaagcgggctgccatatatgacaa

SEQ ID NO: 244616 - DNA, 30 bp, Artificial Sequence
  Synthetic oligonucleotide
aaatggacagccaggcactgcgtctgacaa

SEQ ID NO: 244617 - DNA, 30 bp, Artificial Sequence
  Synthetic oligonucleotide
catcggtgacaggtgggctgtgagtgacaa

SEQ ID NO: 244618 - DNA, 30 bp, Artificial Sequence
  Synthetic oligonucleotide
ataaaattagaagcacgctataggtgacaa

SEQ ID NO: 244619 - DNA, 30 bp, Artificial Sequence
  Synthetic oligonucleotide
ggattccccgtatcactgggatggtgacaa

SEQ ID NO: 244620 - DNA, 30 bp, Artificial Sequence
  Synthetic oligonucleotide
acgaaaagtcaaggcactctctcttgacaa

SEQ ID NO: 244621 - DNA, 30 bp, Artificial Sequence
  Synthetic oligonucleotide
tatcaatcgtcgtgcgcaataataatacaa

SEQ ID NO: 244622 - DNA, 30 bp, Artificial Sequence
  Synthetic oligonucleotide
aatattgagaatcagcagcgagggatacaa

SEQ ID NO: 244623 - DNA, 30 bp, Artificial Sequence
  Synthetic oligonucleotide
agaagcggtcatggtcacttctatatacaa

SEQ ID NO: 244624 - DNA, 30 bp, Artificial Sequence
  Synthetic oligonucleotide
gagtaggcctgttaatgatcacgtatacaa

SEQ ID NO: 244625 - DNA, 30 bp, Artificial Sequence
  Synthetic oligonucleotide
ggctgtataaggcgggctataattatacaa

SEQ ID NO: 244626 - DNA, 30 bp, Artificial Sequence
  Synthetic oligonucleotide
ttcgggcgctgacatggcaacggactacaa

SEQ ID NO: 244627 - DNA, 30 bp, Artificial Sequence
  Synthetic oligonucleotide
gccacgttaaaaaaaggggaagccctacaa

SEQ ID NO: 244628 - DNA, 30 bp, Artificial Sequence
  Synthetic oligonucleotide
tgcagaggtgtttgcctttgttgcctacaa

SEQ ID NO: 244629 - DNA, 30 bp, Artificial Sequence
  Synthetic oligonucleotide
aaattggtgaatccgttaaagaagctacaa

SEQ ID NO: 244630 - DNA, 30 bp, Artificial Sequence
  Synthetic oligonucleotide
gctcgatgctatttccgcatgccgctacaa

SEQ ID NO: 244631 - DNA, 30 bp, Artificial Sequence
  Synthetic oligonucleotide
cccgggacatacacgggggcaaaagtacaa

SEQ ID NO: 244632 - DNA, 30 bp, Artificial Sequence
  Synthetic oligonucleotide
gaacagcttagcttgtccgacaaagtacaa

SEQ ID NO: 244633 - DNA, 30 bp, Artificial Sequence
  Synthetic oligonucleotide
ggtgtcctctgctcaagtgcacgagtacaa

SEQ ID NO: 244634 - DNA, 30 bp, Artificial Sequence
  Synthetic oligonucleotide
ggtattattgccaggaccaagcgagtacaa

SEQ ID NO: 244635 - DNA, 30 bp, Artificial Sequence
  Synthetic oligonucleotide
gcttctacattatttaaacagttagtacaa

SEQ ID NO: 244636 - DNA, 30 bp, Artificial Sequence
  Synthetic oligonucleotide
tttgcgagggttctctccggctacgtacaa

SEQ ID NO: 244637 - DNA, 30 bp, Artificial Sequence
  Synthetic oligonucleotide
tgaaaggggttagctaacggtaccgtacaa

SEQ ID NO: 244638 - DNA, 30 bp, Artificial Sequence
  Synthetic oligonucleotide
gtgttggcaacggtaccgaagaaggtacaa

SEQ ID NO: 244639 - DNA, 30 bp, Artificial Sequence
  Synthetic oligonucleotide
atgtacggcatggctatacggatggtacaa

SEQ ID NO: 244640 - DNA, 30 bp, Artificial Sequence
  Synthetic oligonucleotide
tctcgttgggaataacatgtggtggtacaa

SEQ ID NO: 244641 - DNA, 30 bp, Artificial Sequence
  Synthetic oligonucleotide
ccagcagacgatttagtcccttgtgtacaa

SEQ ID NO: 244642 - DNA, 30 bp, Artificial Sequence
  Synthetic oligonucleotide
ggggcacagtgtgcgcttacgctattacaa

SEQ ID NO: 244643 - DNA, 30 bp, Artificial Sequence
  Synthetic oligonucleotide
atcgtccggagtgaatttgaggacttacaa

SEQ ID NO: 244644 - DNA, 30 bp, Artificial Sequence
  Synthetic oligonucleotide
taacaatcatagttaagcgggcatttacaa

SEQ ID NO: 244645 - DNA, 30 bp, Artificial Sequence
  Synthetic oligonucleotide
tgagcaagaaacacttgggactccaaccaa

SEQ ID NO: 244646 - DNA, 30 bp, Artificial Sequence
  Synthetic oligonucleotide
ataccccgcgtattccctgcgatcaaccaa

SEQ ID NO: 244647 - DNA, 30 bp, Artificial Sequence
  Synthetic oligonucleotide
tgcaggactgcgccaatctgaaagaaccaa

SEQ ID NO: 244648 - DNA, 30 bp, Artificial Sequence
  Synthetic oligonucleotide
tagagtaacactgcgctaacgacgaaccaa

SEQ ID NO: 244649 - DNA, 30 bp, Artificial Sequence
  Synthetic oligonucleotide
ttaaccgacctggtaccgcgttcacaccaa

SEQ ID NO: 244650 - DNA, 30 bp, Artificial Sequence
  Synthetic oligonucleotide
caggaggagtaaccggaagggctgcaccaa

SEQ ID NO: 244651 - DNA, 30 bp, Artificial Sequence
  Synthetic oligonucleotide
gacctattacgcggttgcgtacccgaccaa

SEQ ID NO: 244652 - DNA, 30 bp, Artificial Sequence
  Synthetic oligonucleotide
ggcctagaagttgatacttattccgaccaa

SEQ ID NO: 244653 - DNA, 30 bp, Artificial Sequence
  Synthetic oligonucleotide
tccgacaggcattccggggaaaatgaccaa

SEQ ID NO: 244654 - DNA, 30 bp, Artificial Sequence
  Synthetic oligonucleotide
gtagaatcgtccacactgtgctgtgaccaa

SEQ ID NO: 244655 - DNA, 30 bp, Artificial Sequence
  Synthetic oligonucleotide
cctaacctcgttagggacccaattgaccaa

SEQ ID NO: 244656 - DNA, 30 bp, Artificial Sequence
  Synthetic oligonucleotide
caactcctgaaaggtgcatcttcataccaa

SEQ ID NO: 244657 - DNA, 30 bp, Artificial Sequence
  Synthetic oligonucleotide
gacggtacgtcgcataactggctctaccaa

SEQ ID NO: 244658 - DNA, 30 bp, Artificial Sequence
  Synthetic oligonucleotide
tgaaagacaccagtaccattagtgtaccaa

SEQ ID NO: 244659 - DNA, 30 bp, Artificial Sequence
  Synthetic oligonucleotide
agttggagaccgctctcgatccattaccaa

SEQ ID NO: 244660 - DNA, 30 bp, Artificial Sequence
  Synthetic oligonucleotide
aaccgcgcttcgcaatatctatcttaccaa

SEQ ID NO: 244661 - DNA, 30 bp, Artificial Sequence
  Synthetic oligonucleotide
cgaattggctgccagctgatgggttaccaa

SEQ ID NO: 244662 - DNA, 30 bp, Artificial Sequence
  Synthetic oligonucleotide
tttaaagggggatacgaccattatacccaa

SEQ ID NO: 244663 - DNA, 30 bp, Artificial Sequence
  Synthetic oligonucleotide
tcacataaagacagtgcgtgtcaaccccaa

SEQ ID NO: 244664 - DNA, 30 bp, Artificial Sequence
  Synthetic oligonucleotide
taactttcaaatgcaccagaatcaccccaa

SEQ ID NO: 244665 - DNA, 30 bp, Artificial Sequence
  Synthetic oligonucleotide
ccgctcagtatgtgactgattgtaccccaa

SEQ ID NO: 244666 - DNA, 30 bp, Artificial Sequence
  Synthetic oligonucleotide
cggtctcgggacaggggagtcacgccccaa

SEQ ID NO: 244667 - DNA, 30 bp, Artificial Sequence
  Synthetic oligonucleotide
ttggttatgggttagacgtcacgtccccaa

SEQ ID NO: 244668 - DNA, 30 bp, Artificial Sequence
  Synthetic oligonucleotide
gcgtaccgtggacggcgttcagtcgcccaa

SEQ ID NO: 244669 - DNA, 30 bp, Artificial Sequence
  Synthetic oligonucleotide
cggcgatccctgaatagggtataggcccaa

SEQ ID NO: 244670 - DNA, 30 bp, Artificial Sequence
  Synthetic oligonucleotide
tcctgtggatgtacgcttgctaatgcccaa

SEQ ID NO: 244671 - DNA, 30 bp, Artificial Sequence
  Synthetic oligonucleotide
ggggtcccatcttcagcattagtctcccaa

SEQ ID NO: 244672 - DNA, 30 bp, Artificial Sequence
  Synthetic oligonucleotide
ggtgccacctcgtcaacataaaggtcccaa

SEQ ID NO: 244673 - DNA, 30 bp, Artificial Sequence
  Synthetic oligonucleotide
aaatagttagaccgcctgcctaggtcccaa

SEQ ID NO: 244674 - DNA, 30 bp, Artificial Sequence
  Synthetic oligonucleotide
cgcacacgcggatctcacgcaagttcccaa

SEQ ID NO: 244675 - DNA, 30 bp, Artificial Sequence
  Synthetic oligonucleotide
acaattggctattgcccatataacagccaa

SEQ ID NO: 244676 - DNA, 30 bp, Artificial Sequence
  Synthetic oligonucleotide
acactattgacggaggatgggaccagccaa

SEQ ID NO: 244677 - DNA, 30 bp, Artificial Sequence
  Synthetic oligonucleotide
cctggagacgtgatgttgcgtacgagccaa

SEQ ID NO: 244678 - DNA, 30 bp, Artificial Sequence
  Synthetic oligonucleotide
gagtaaccttatggtaggcctgctagccaa

SEQ ID NO: 244679 - DNA, 30 bp, Artificial Sequence
  Synthetic oligonucleotide
atgaaagcgtccggtaagttacttagccaa

SEQ ID NO: 244680 - DNA, 30 bp, Artificial Sequence
  Synthetic oligonucleotide
agacaataaaaggacagggttcttagccaa

SEQ ID NO: 244681 - DNA, 30 bp, Artificial Sequence
  Synthetic oligonucleotide
gaagggaaaatgtgtagaaatttccgccaa

SEQ ID NO: 244682 - DNA, 30 bp, Artificial Sequence
  Synthetic oligonucleotide
gggcgacacggcatcaaagatgcgcgccaa

SEQ ID NO: 244683 - DNA, 30 bp, Artificial Sequence
  Synthetic oligonucleotide
tgatgggatatactagactaacggcgccaa

SEQ ID NO: 244684 - DNA, 30 bp, Artificial Sequence
  Synthetic oligonucleotide
tgtggtcactcgatagaatgagctcgccaa

SEQ ID NO: 244685 - DNA, 30 bp, Artificial Sequence
  Synthetic oligonucleotide
cctatcgcttggctatctctacgtcgccaa

SEQ ID NO: 244686 - DNA, 30 bp, Artificial Sequence
  Synthetic oligonucleotide
ctcttaaattgtgaacatggtacaggccaa

SEQ ID NO: 244687 - DNA, 30 bp, Artificial Sequence
  Synthetic oligonucleotide
ggtgggtccagcttctgtataagaggccaa

SEQ ID NO: 244688 - DNA, 30 bp, Artificial Sequence
  Synthetic oligonucleotide
gcactagcaatactgtccgctcgaggccaa

SEQ ID NO: 244689 - DNA, 30 bp, Artificial Sequence
  Synthetic oligonucleotide
gtatgtcgatggaagcggacactaggccaa

SEQ ID NO: 244690 - DNA, 30 bp, Artificial Sequence
  Synthetic oligonucleotide
cagcaacgattgggctttttccccggccaa

SEQ ID NO: 244691 - DNA, 30 bp, Artificial Sequence
  Synthetic oligonucleotide
tgatatagtgtgtgcatttcctagggccaa

SEQ ID NO: 244692 - DNA, 30 bp, Artificial Sequence
  Synthetic oligonucleotide
aggaggtaactaaaacaaaagttgggccaa

SEQ ID NO: 244693 - DNA, 30 bp, Artificial Sequence
  Synthetic oligonucleotide
gtgtaccaaagcgtagacgtgtatggccaa

SEQ ID NO: 244694 - DNA, 30 bp, Artificial Sequence
  Synthetic oligonucleotide
gttgcaacggctagatggcgagactgccaa

SEQ ID NO: 244695 - DNA, 30 bp, Artificial Sequence
  Synthetic oligonucleotide
cgcgtatcgggctcagtcatacgctgccaa

SEQ ID NO: 244696 - DNA, 30 bp, Artificial Sequence
  Synthetic oligonucleotide
cggaaagaggtagatcactgtgagtgccaa

SEQ ID NO: 244697 - DNA, 30 bp, Artificial Sequence
  Synthetic oligonucleotide
gcaaacttgccaggagtcgctaattgccaa

SEQ ID NO: 244698 - DNA, 30 bp, Artificial Sequence
  Synthetic oligonucleotide
gagcgacctataggattatgccagatccaa

SEQ ID NO: 244699 - DNA, 30 bp, Artificial Sequence
  Synthetic oligonucleotide
agttatactcgggatacactccagatccaa

SEQ ID NO: 244700 - DNA, 30 bp, Artificial Sequence
  Synthetic oligonucleotide
aatggggttaaaatacacgcgatgatccaa

SEQ ID NO: 244701 - DNA, 30 bp, Artificial Sequence
  Synthetic oligonucleotide
gagcggtgctggctagaatatcttatccaa

SEQ ID NO: 244702 - DNA, 30 bp, Artificial Sequence
  Synthetic oligonucleotide
cggttaaccttaagagcccgagaactccaa

SEQ ID NO: 244703 - DNA, 30 bp, Artificial Sequence
  Synthetic oligonucleotide
cgcagagttaggtaaacgaggagactccaa

SEQ ID NO: 244704 - DNA, 30 bp, Artificial Sequence
  Synthetic oligonucleotide
ggttccaactataatcacatttgcctccaa

SEQ ID NO: 244705 - DNA, 30 bp, Artificial Sequence
  Synthetic oligonucleotide
tggatcgcagtggcgaggatccatctccaa

SEQ ID NO: 244706 - DNA, 30 bp, Artificial Sequence
  Synthetic oligonucleotide
ggcggtagggccctgtgatggtctctccaa

SEQ ID NO: 244707 - DNA, 30 bp, Artificial Sequence
  Synthetic oligonucleotide
agatgtgtcgaagtgtattggcgtctccaa

SEQ ID NO: 244708 - DNA, 30 bp, Artificial Sequence
  Synthetic oligonucleotide
gtcctaagggcagcagccttcttagtccaa

SEQ ID NO: 244709 - DNA, 30 bp, Artificial Sequence
  Synthetic oligonucleotide
agtactaaccgcgattagcatagggtccaa

SEQ ID NO: 244710 - DNA, 30 bp, Artificial Sequence
  Synthetic oligonucleotide
aatcaacgtttacggtagattatggtccaa

SEQ ID NO: 244711 - DNA, 30 bp, Artificial Sequence
  Synthetic oligonucleotide
cggcacggtgagtaaatgttatgcttccaa

SEQ ID NO: 244712 - DNA, 30 bp, Artificial Sequence
  Synthetic oligonucleotide
aacgctgccgtgcctgctcgggaaaagcaa

SEQ ID NO: 244713 - DNA, 30 bp, Artificial Sequence
  Synthetic oligonucleotide
gctaataaaatgcgtatttctataaagcaa

SEQ ID NO: 244714 - DNA, 30 bp, Artificial Sequence
  Synthetic oligonucleotide
gtattgcatatgatcagagacaccaagcaa

SEQ ID NO: 244715 - DNA, 30 bp, Artificial Sequence
  Synthetic oligonucleotide
tcgggtgttgatttagcatcggtcaagcaa

SEQ ID NO: 244716 - DNA, 30 bp, Artificial Sequence
  Synthetic oligonucleotide
gatatgccatcgccacttcctcataagcaa

SEQ ID NO: 244717 - DNA, 30 bp, Artificial Sequence
  Synthetic oligonucleotide
aatgggtatacgccgagtcgttgtaagcaa

SEQ ID NO: 244718 - DNA, 30 bp, Artificial Sequence
  Synthetic oligonucleotide
ttaatacagaccggccggcaacttaagcaa

SEQ ID NO: 244719 - DNA, 30 bp, Artificial Sequence
  Synthetic oligonucleotide
catgtctcaaaggatacctagtttaagcaa

SEQ ID NO: 244720 - DNA, 30 bp, Artificial Sequence
  Synthetic oligonucleotide
ttatgctggttggttatagtagcacagcaa

SEQ ID NO: 244721 - DNA, 30 bp, Artificial Sequence
  Synthetic oligonucleotide
gggcctttggggcgatttactctccagcaa

SEQ ID NO: 244722 - DNA, 30 bp, Artificial Sequence
  Synthetic oligonucleotide
actaagggaagcttgggggggtagcagcaa

SEQ ID NO: 244723 - DNA, 30 bp, Artificial Sequence
  Synthetic oligonucleotide
ttacgcctcgatcaacttacttatcagcaa

SEQ ID NO: 244724 - DNA, 30 bp, Artificial Sequence
  Synthetic oligonucleotide
attcctcttaatctttcagggcaagagcaa

SEQ ID NO: 244725 - DNA, 30 bp, Artificial Sequence
  Synthetic oligonucleotide
ttcacccacaaccaatactcatcagagcaa

SEQ ID NO: 244726 - DNA, 30 bp, Artificial Sequence
  Synthetic oligonucleotide
aagtggcaggaagatcccctgttagagcaa

SEQ ID NO: 244727 - DNA, 30 bp, Artificial Sequence
  Synthetic oligonucleotide
cgtccggggtttatatggtcttgcgagcaa

SEQ ID NO: 244728 - DNA, 30 bp, Artificial Sequence
  Synthetic oligonucleotide
cgataattcgcggcctatgcaaatgagcaa

SEQ ID NO: 244729 - DNA, 30 bp, Artificial Sequence
  Synthetic oligonucleotide
atccctcgtccataattacatcctgagcaa

SEQ ID NO: 244730 - DNA, 30 bp, Artificial Sequence
  Synthetic oligonucleotide
attcgggaacataaaatgccagctgagcaa

SEQ ID NO: 244731 - DNA, 30 bp, Artificial Sequence
  Synthetic oligonucleotide
gcgttatgattgccaacacagggatagcaa

SEQ ID NO: 244732 - DNA, 30 bp, Artificial Sequence
  Synthetic oligonucleotide
gagcggtggcggattaaaataatatagcaa

SEQ ID NO: 244733 - DNA, 30 bp, Artificial Sequence
  Synthetic oligonucleotide
ttcggaaggagtacaactgctatatagcaa

SEQ ID NO: 244734 - DNA, 30 bp, Artificial Sequence
  Synthetic oligonucleotide
tactgcactgtattgtcctgagggtagcaa

SEQ ID NO: 244735 - DNA, 30 bp, Artificial Sequence
  Synthetic oligonucleotide
ttaattctgtcatttccgttcgattagcaa

SEQ ID NO: 244736 - DNA, 30 bp, Artificial Sequence
  Synthetic oligonucleotide
ttggggtcagtacaggggaaggcttagcaa

SEQ ID NO: 244737 - DNA, 30 bp, Artificial Sequence
  Synthetic oligonucleotide
tggaggggcagatggccccgcccaacgcaa

SEQ ID NO: 244738 - DNA, 30 bp, Artificial Sequence
  Synthetic oligonucleotide
gagccaacctgtaagacgtcggcaacgcaa

SEQ ID NO: 244739 - DNA, 30 bp, Artificial Sequence
  Synthetic oligonucleotide
tcgtgccaggcgagcggtatcctaacgcaa

SEQ ID NO: 244740 - DNA, 30 bp, Artificial Sequence
  Synthetic oligonucleotide
gctcagggggagaggtaatcaaacacgcaa

SEQ ID NO: 244741 - DNA, 30 bp, Artificial Sequence
  Synthetic oligonucleotide
gaaaacatgcacaatccgtaatacacgcaa

SEQ ID NO: 244742 - DNA, 30 bp, Artificial Sequence
  Synthetic oligonucleotide
atacaaaagtttagtacggaaacgacgcaa

SEQ ID NO: 244743 - DNA, 30 bp, Artificial Sequence
  Synthetic oligonucleotide
ttaggcccgcgtaggcgagagtgtacgcaa

SEQ ID NO: 244744 - DNA, 30 bp, Artificial Sequence
  Synthetic oligonucleotide
cttgtaagcctgcatatttactcgccgcaa

SEQ ID NO: 244745 - DNA, 30 bp, Artificial Sequence
  Synthetic oligonucleotide
tttagacgtaggcagtgaaggatgccgcaa

SEQ ID NO: 244746 - DNA, 30 bp, Artificial Sequence
  Synthetic oligonucleotide
caagaacccggttggttgggagtgccgcaa

SEQ ID NO: 244747 - DNA, 30 bp, Artificial Sequence
  Synthetic oligonucleotide
gccagtggtttggaaggcgcgcatccgcaa

SEQ ID NO: 244748 - DNA, 30 bp, Artificial Sequence
  Synthetic oligonucleotide
gtagtactctattggttgggggatccgcaa

SEQ ID NO: 244749 - DNA, 30 bp, Artificial Sequence
  Synthetic oligonucleotide
ctattgatgtaagttcaattaggtccgcaa

SEQ ID NO: 244750 - DNA, 29 bp, Artificial Sequence
  Synthetic oligonucleotide
actggtgcttggtgggcacaaaggcgcaa

SEQ ID NO: 244751 - DNA, 30 bp, Artificial Sequence
  Synthetic oligonucleotide
actatcgcaagccaatataaattggcgcaa

SEQ ID NO: 244752 - DNA, 30 bp, Artificial Sequence
  Synthetic oligonucleotide
cttcggcgtccacctctccgacttgcgcaa

SEQ ID NO: 244753 - DNA, 31 bp, Artificial Sequence
  Synthetic oligonucleotide
atagtcaaaaaagtgggaaacactctcgcaa

SEQ ID NO: 244754 - DNA, 30 bp, Artificial Sequence
  Synthetic oligonucleotide
gttctataacatatgctaatcgggtcgcaa

SEQ ID NO: 244755 - DNA, 30 bp, Artificial Sequence
  Synthetic oligonucleotide
aaatctctgatcaaccccaaaatttcgcaa

SEQ ID NO: 244756 - DNA, 30 bp, Artificial Sequence
  Synthetic oligonucleotide
gcagttcggcttgatgagttcttaaggcaa

SEQ ID NO: 244757 - DNA, 30 bp, Artificial Sequence
  Synthetic oligonucleotide
gtttacgcaacggtgtggtgtcagaggcaa

SEQ ID NO: 244758 - DNA, 30 bp, Artificial Sequence
  Synthetic oligonucleotide
agcctggacaacacgagcactgcgaggcaa

SEQ ID NO: 244759 - DNA, 30 bp, Artificial Sequence
  Synthetic oligonucleotide
cgttcgtagaagtataacagtggtaggcaa

SEQ ID NO: 244760 - DNA, 30 bp, Artificial Sequence
  Synthetic oligonucleotide
agatagggagccccgtcatttatacggcaa

SEQ ID NO: 244761 - DNA, 30 bp, Artificial Sequence
  Synthetic oligonucleotide
agtatgcttcacgactcctgccaccggcaa

SEQ ID NO: 244762 - DNA, 30 bp, Artificial Sequence
  Synthetic oligonucleotide
ggactgcagttaatcggaaatccccggcaa

SEQ ID NO: 244763 - DNA, 30 bp, Artificial Sequence
  Synthetic oligonucleotide
gtcgtttaggtagagcgtgggtcgcggcaa

SEQ ID NO: 244764 - DNA, 30 bp, Artificial Sequence
  Synthetic oligonucleotide
ggggacggcctcatagaaaataaagggcaa

SEQ ID NO: 244765 - DNA, 30 bp, Artificial Sequence
  Synthetic oligonucleotide
tgtgtcggtcggagcacgagtacagggcaa

SEQ ID NO: 244766 - DNA, 30 bp, Artificial Sequence
  Synthetic oligonucleotide
gatggtgacgactccacttcttgagggcaa

SEQ ID NO: 244767 - DNA, 30 bp, Artificial Sequence
  Synthetic oligonucleotide
tagtgcacctacattagtacctatgggcaa

SEQ ID NO: 244768 - DNA, 30 bp, Artificial Sequence
  Synthetic oligonucleotide
tgagcaaaaaagctatttcaaaaatggcaa

SEQ ID NO: 244769 - DNA, 30 bp, Artificial Sequence
  Synthetic oligonucleotide
tgggctgcccagagataccaagaatggcaa

SEQ ID NO: 244770 - DNA, 30 bp, Artificial Sequence
  Synthetic oligonucleotide
aggtgtcgggcgctatttcacttctggcaa

SEQ ID NO: 244771 - DNA, 30 bp, Artificial Sequence
  Synthetic oligonucleotide
gtctacatctagaagctagttacttggcaa

SEQ ID NO: 244772 - DNA, 30 bp, Artificial Sequence
  Synthetic oligonucleotide
aacatacacagccattaatcaccttggcaa

SEQ ID NO: 244773 - DNA, 30 bp, Artificial Sequence
  Synthetic oligonucleotide
gcggggcaatagtatttacagccttggcaa

SEQ ID NO: 244774 - DNA, 30 bp, Artificial Sequence
  Synthetic oligonucleotide
gtacggcaaaacacgttgcctaaaatgcaa

SEQ ID NO: 244775 - DNA, 30 bp, Artificial Sequence
  Synthetic oligonucleotide
tggtgacgtccatagcagtgtctaatgcaa

SEQ ID NO: 244776 - DNA, 30 bp, Artificial Sequence
  Synthetic oligonucleotide
attgcggtgggaaggtagccattaatgcaa

SEQ ID NO: 244777 - DNA, 30 bp, Artificial Sequence
  Synthetic oligonucleotide
gtgcggcgggttgaattacgggggctgcaa

SEQ ID NO: 244778 - DNA, 30 bp, Artificial Sequence
  Synthetic oligonucleotide
gcgcagcaggatgatccatgactgctgcaa

SEQ ID NO: 244779 - DNA, 30 bp, Artificial Sequence
  Synthetic oligonucleotide
acgttgaagggttatgttcgacatctgcaa

SEQ ID NO: 244780 - DNA, 30 bp, Artificial Sequence
  Synthetic oligonucleotide
atgaaactcaggctactgtggagtctgcaa

SEQ ID NO: 244781 - DNA, 30 bp, Artificial Sequence
  Synthetic oligonucleotide
cagcgtcagagagggtattcagttctgcaa

SEQ ID NO: 244782 - DNA, 30 bp, Artificial Sequence
  Synthetic oligonucleotide
aggaagggctaaattgatgtagccgtgcaa

SEQ ID NO: 244783 - DNA, 30 bp, Artificial Sequence
  Synthetic oligonucleotide
gatgtgaaagattcaaattaattcgtgcaa

SEQ ID NO: 244784 - DNA, 30 bp, Artificial Sequence
  Synthetic oligonucleotide
gagtaagtacgggatcagcggttcgtgcaa

SEQ ID NO: 244785 - DNA, 30 bp, Artificial Sequence
  Synthetic oligonucleotide
gcgaaactgactcctgtctttccattgcaa

SEQ ID NO: 244786 - DNA, 30 bp, Artificial Sequence
  Synthetic oligonucleotide
cccacagtaaatggattggcagcattgcaa

SEQ ID NO: 244787 - DNA, 30 bp, Artificial Sequence
  Synthetic oligonucleotide
cgttataactttactggcatcatattgcaa

SEQ ID NO: 244788 - DNA, 30 bp, Artificial Sequence
  Synthetic oligonucleotide
aaaagtccagccctaattgcaaacttgcaa

SEQ ID NO: 244789 - DNA, 30 bp, Artificial Sequence
  Synthetic oligonucleotide
ttatgttaaactccatatcttagcttgcaa

SEQ ID NO: 244790 - DNA, 30 bp, Artificial Sequence
  Synthetic oligonucleotide
caatttgcccaagcccagcacaagttgcaa

SEQ ID NO: 244791 - DNA, 30 bp, Artificial Sequence
  Synthetic oligonucleotide
tgggctggtatgcaagtagttcagttgcaa

SEQ ID NO: 244792 - DNA, 30 bp, Artificial Sequence
  Synthetic oligonucleotide
ggttaacacataacgctgcgctctttgcaa

SEQ ID NO: 244793 - DNA, 30 bp, Artificial Sequence
  Synthetic oligonucleotide
gccagtccgatccatgattggtctttgcaa

SEQ ID NO: 244794 - DNA, 30 bp, Artificial Sequence
  Synthetic oligonucleotide
tacctcccgacgcgagaaagagtaaatcaa

SEQ ID NO: 244795 - DNA, 30 bp, Artificial Sequence
  Synthetic oligonucleotide
cctgcggctgcaatgtaagtcgtaaatcaa

SEQ ID NO: 244796 - DNA, 30 bp, Artificial Sequence
  Synthetic oligonucleotide
cgtgcatcataaaagctgacggccaatcaa

SEQ ID NO: 244797 - DNA, 30 bp, Artificial Sequence
  Synthetic oligonucleotide
ggttgtaaggtgaggcatgacaagaatcaa

SEQ ID NO: 244798 - DNA, 29 bp, Artificial Sequence
  Synthetic oligonucleotide
gtcagccggtgaggaatttcgagaatcaa

SEQ ID NO: 244799 - DNA, 30 bp, Artificial Sequence
  Synthetic oligonucleotide
tcttcaaacctcgtcggtccagcgaatcaa

SEQ ID NO: 244800 - DNA, 30 bp, Artificial Sequence
  Synthetic oligonucleotide
acacgtgactaccggtgagggaataatcaa

SEQ ID NO: 244801 - DNA, 30 bp, Artificial Sequence
  Synthetic oligonucleotide
ttcacacaaatcaattagtaatataatcaa

SEQ ID NO: 244802 - DNA, 30 bp, Artificial Sequence
  Synthetic oligonucleotide
gggtaaccgcgagacggacccggtaatcaa

SEQ ID NO: 244803 - DNA, 30 bp, Artificial Sequence
  Synthetic oligonucleotide
gcgtgacttcagttcctggggattaatcaa

SEQ ID NO: 244804 - DNA, 30 bp, Artificial Sequence
  Synthetic oligonucleotide
tcatcggagcaacgtatcatgtaacatcaa

SEQ ID NO: 244805 - DNA, 30 bp, Artificial Sequence
  Synthetic oligonucleotide
tcgttcgtctttagaaagtcctgtcatcaa

SEQ ID NO: 244806 - DNA, 30 bp, Artificial Sequence
  Synthetic oligonucleotide
gagccccccgcaaactaataggttcatcaa

SEQ ID NO: 244807 - DNA, 30 bp, Artificial Sequence
  Synthetic oligonucleotide
gaaggatctcccactgggtctgaagatcaa

SEQ ID NO: 244808 - DNA, 30 bp, Artificial Sequence
  Synthetic oligonucleotide
aattggaccgcattaagaatctcagatcaa

SEQ ID NO: 244809 - DNA, 30 bp, Artificial Sequence
  Synthetic oligonucleotide
agccatcctgtctctaattcagacgatcaa

SEQ ID NO: 244810 - DNA, 30 bp, Artificial Sequence
  Synthetic oligonucleotide
gacgaagccagcacggccattgccgatcaa

SEQ ID NO: 244811 - DNA, 30 bp, Artificial Sequence
  Synthetic oligonucleotide
taaggccggcgcctagcctgactcgatcaa

SEQ ID NO: 244812 - DNA, 30 bp, Artificial Sequence
  Synthetic oligonucleotide
taagatagccgtcacgggagctcggatcaa

SEQ ID NO: 244813 - DNA, 30 bp, Artificial Sequence
  Synthetic oligonucleotide
ggggtagcgtagagcggacgtctggatcaa

SEQ ID NO: 244814 - DNA, 30 bp, Artificial Sequence
  Synthetic oligonucleotide
tctaagtatgtgactcagcttctggatcaa

SEQ ID NO: 244815 - DNA, 30 bp, Artificial Sequence
  Synthetic oligonucleotide
gatgtcagaagcgcaggttttaatgatcaa

SEQ ID NO: 244816 - DNA, 30 bp, Artificial Sequence
  Synthetic oligonucleotide
atgaatatatgcctctcggagcgctatcaa

SEQ ID NO: 244817 - DNA, 30 bp, Artificial Sequence
  Synthetic oligonucleotide
cctgcagaatgagcggaattagtctatcaa

SEQ ID NO: 244818 - DNA, 30 bp, Artificial Sequence
  Synthetic oligonucleotide
gcttgtaccactaggagtacattctatcaa

SEQ ID NO: 244819 - DNA, 30 bp, Artificial Sequence
  Synthetic oligonucleotide
agcaagctgtggaggctaggtaacactcaa

SEQ ID NO: 244820 - DNA, 30 bp, Artificial Sequence
  Synthetic oligonucleotide
aaataaccaactagaacgatttcgactcaa

SEQ ID NO: 244821 - DNA, 30 bp, Artificial Sequence
  Synthetic oligonucleotide
ctaacgggcctagaccttagactacctcaa

SEQ ID NO: 244822 - DNA, 30 bp, Artificial Sequence
  Synthetic oligonucleotide
gaacgtttcggctctcgacataagcctcaa

SEQ ID NO: 244823 - DNA, 30 bp, Artificial Sequence
  Synthetic oligonucleotide
ttgaaggagagtacactacagtttcctcaa

SEQ ID NO: 244824 - DNA, 30 bp, Artificial Sequence
  Synthetic oligonucleotide
tccaatcatatacgccttccgtttcctcaa

SEQ ID NO: 244825 - DNA, 30 bp, Artificial Sequence
  Synthetic oligonucleotide
aagcatggtatggtatgtgcgcgagctcaa

SEQ ID NO: 244826 - DNA, 30 bp, Artificial Sequence
  Synthetic oligonucleotide
agacacctttaactgggttttatcgctcaa

SEQ ID NO: 244827 - DNA, 30 bp, Artificial Sequence
  Synthetic oligonucleotide
gctcggccctattgtctatgctatgctcaa

SEQ ID NO: 244828 - DNA, 30 bp, Artificial Sequence
  Synthetic oligonucleotide
cttactggtaatgtccgcttaagtgctcaa

SEQ ID NO: 244829 - DNA, 30 bp, Artificial Sequence
  Synthetic oligonucleotide
gcatgtttagtcacagacgacaaaagtcaa

SEQ ID NO: 244830 - DNA, 30 bp, Artificial Sequence
  Synthetic oligonucleotide
gcataaatcgctagcgtagcgtaaagtcaa

SEQ ID NO: 244831 - DNA, 30 bp, Artificial Sequence
  Synthetic oligonucleotide
gcgaagatgcaagagatcttattaagtcaa

SEQ ID NO: 244832 - DNA, 30 bp, Artificial Sequence
  Synthetic oligonucleotide
tgaactatgcaaaagctgaggctcagtcaa

SEQ ID NO: 244833 - DNA, 30 bp, Artificial Sequence
  Synthetic oligonucleotide
gataaggggcggagcgcattgccacgtcaa

SEQ ID NO: 244834 - DNA, 30 bp, Artificial Sequence
  Synthetic oligonucleotide
catttgtaaccacagtcacggtcacgtcaa

SEQ ID NO: 244835 - DNA, 30 bp, Artificial Sequence
  Synthetic oligonucleotide
cacctcacttatgaaggccgaagacgtcaa

SEQ ID NO: 244836 - DNA, 30 bp, Artificial Sequence
  Synthetic oligonucleotide
gaggtccgacaatggaccgcaacgcgtcaa

SEQ ID NO: 244837 - DNA, 30 bp, Artificial Sequence
  Synthetic oligonucleotide
gtaaatgcttggcaacgtaattcgcgtcaa

SEQ ID NO: 244838 - DNA, 30 bp, Artificial Sequence
  Synthetic oligonucleotide
ctacgaagatcatttacaacaggtcgtcaa

SEQ ID NO: 244839 - DNA, 30 bp, Artificial Sequence
  Synthetic oligonucleotide
atgatgagcgattcagtaaatgcaggtcaa

SEQ ID NO: 244840 - DNA, 30 bp, Artificial Sequence
  Synthetic oligonucleotide
tgattaccgcagtcggagaggcgaggtcaa

SEQ ID NO: 244841 - DNA, 30 bp, Artificial Sequence
  Synthetic oligonucleotide
gcgtgtaacttagtgtaagggaagggtcaa

SEQ ID NO: 244842 - DNA, 30 bp, Artificial Sequence
  Synthetic oligonucleotide
ggcatctgatcaactctaggcagtggtcaa

SEQ ID NO: 244843 - DNA, 30 bp, Artificial Sequence
  Synthetic oligonucleotide
tggctgatcctatcaacgctacgtggtcaa

SEQ ID NO: 244844 - DNA, 30 bp, Artificial Sequence
  Synthetic oligonucleotide
catctgtaggcccaggtcgcaaaatgtcaa

SEQ ID NO: 244845 - DNA, 30 bp, Artificial Sequence
  Synthetic oligonucleotide
gatggctatgtcaacggcagaaaatgtcaa

SEQ ID NO: 244846 - DNA, 30 bp, Artificial Sequence
  Synthetic oligonucleotide
atgctcggtttacagaacaagcaatgtcaa

SEQ ID NO: 244847 - DNA, 30 bp, Artificial Sequence
  Synthetic oligonucleotide
acgagtgagttagcaactttctggtgtcaa

SEQ ID NO: 244848 - DNA, 30 bp, Artificial Sequence
  Synthetic oligonucleotide
caagcacggggcatgacgagggtgtgtcaa

SEQ ID NO: 244849 - DNA, 30 bp, Artificial Sequence
  Synthetic oligonucleotide
tcggtttagagagcgcggcaccattgtcaa

SEQ ID NO: 244850 - DNA, 30 bp, Artificial Sequence
  Synthetic oligonucleotide
tcacaactataactcggagctcgttgtcaa

SEQ ID NO: 244851 - DNA, 30 bp, Artificial Sequence
  Synthetic oligonucleotide
gggttcgccacgacatcgaggtgttgtcaa

SEQ ID NO: 244852 - DNA, 30 bp, Artificial Sequence
  Synthetic oligonucleotide
atatgttaaccgttgacgagcacaattcaa

SEQ ID NO: 244853 - DNA, 30 bp, Artificial Sequence
  Synthetic oligonucleotide
cagggatgtttcgggacaattagaattcaa

SEQ ID NO: 244854 - DNA, 30 bp, Artificial Sequence
  Synthetic oligonucleotide
ctcgggcactgggttgttacaaacattcaa

SEQ ID NO: 244855 - DNA, 30 bp, Artificial Sequence
  Synthetic oligonucleotide
ttgagcgccgtaatgccgtatgacattcaa

SEQ ID NO: 244856 - DNA, 30 bp, Artificial Sequence
  Synthetic oligonucleotide
gagacggaagagcctgagcagtttattcaa

SEQ ID NO: 244857 - DNA, 30 bp, Artificial Sequence
  Synthetic oligonucleotide
aggggaagtggcagtctcaagccccttcaa

SEQ ID NO: 244858 - DNA, 30 bp, Artificial Sequence
  Synthetic oligonucleotide
tggccgcacccaagggtattaggccttcaa

SEQ ID NO: 244859 - DNA, 30 bp, Artificial Sequence
  Synthetic oligonucleotide
tctgtctggaccagtagcggggatcttcaa

SEQ ID NO: 244860 - DNA, 30 bp, Artificial Sequence
  Synthetic oligonucleotide
gtgaactggagaggataaaagtgtcttcaa

SEQ ID NO: 244861 - DNA, 30 bp, Artificial Sequence
  Synthetic oligonucleotide
gacgttatgggggcacacaggctagttcaa

SEQ ID NO: 244862 - DNA, 30 bp, Artificial Sequence
  Synthetic oligonucleotide
aacttacattatactagttacagggttcaa

SEQ ID NO: 244863 - DNA, 30 bp, Artificial Sequence
  Synthetic oligonucleotide
cagggggcagaagcggcacttagggttcaa

SEQ ID NO: 244864 - DNA, 30 bp, Artificial Sequence
  Synthetic oligonucleotide
aatgcatcggacccgcgcccctgggttcaa

SEQ ID NO: 244865 - DNA, 30 bp, Artificial Sequence
  Synthetic oligonucleotide
ccgatcttattactctaattccatgttcaa

SEQ ID NO: 244866 - DNA, 30 bp, Artificial Sequence
  Synthetic oligonucleotide
atcactatagtgtgcatccgggatgttcaa

SEQ ID NO: 244867 - DNA, 30 bp, Artificial Sequence
  Synthetic oligonucleotide
gtaaacgagataattaaacctggtgttcaa

SEQ ID NO: 244868 - DNA, 30 bp, Artificial Sequence
  Synthetic oligonucleotide
tcgacgaattcgcaaaccatacttgttcaa

SEQ ID NO: 244869 - DNA, 30 bp, Artificial Sequence
  Synthetic oligonucleotide
ggaacggtacaatatccgggggttgttcaa

SEQ ID NO: 244870 - DNA, 30 bp, Artificial Sequence
  Synthetic oligonucleotide
aagaagatgcggacttcaatcatatttcaa

SEQ ID NO: 244871 - DNA, 30 bp, Artificial Sequence
  Synthetic oligonucleotide
ccaattcttaatgatttttagctatttcaa

SEQ ID NO: 244872 - DNA, 30 bp, Artificial Sequence
  Synthetic oligonucleotide
ggcgtaaaggcactaagccggaactttcaa

SEQ ID NO: 244873 - DNA, 30 bp, Artificial Sequence
  Synthetic oligonucleotide
gcatgccagatctaaaaaacggtgtttcaa

SEQ ID NO: 244874 - DNA, 30 bp, Artificial Sequence
  Synthetic oligonucleotide
cattgagaaagcaatctcaaaataaaagaa

SEQ ID NO: 244875 - DNA, 30 bp, Artificial Sequence
  Synthetic oligonucleotide
cagaaggcttcgccggggtatagcaaagaa

SEQ ID NO: 244876 - DNA, 30 bp, Artificial Sequence
  Synthetic oligonucleotide
tcgacagagtcggcacattcgatcaaagaa

SEQ ID NO: 244877 - DNA, 30 bp, Artificial Sequence
  Synthetic oligonucleotide
ttgcccaatcgtccaggcctccagaaagaa

SEQ ID NO: 244878 - DNA, 30 bp, Artificial Sequence
  Synthetic oligonucleotide
gtgatagtgcaatgtaggatgcataaagaa

SEQ ID NO: 244879 - DNA, 30 bp, Artificial Sequence
  Synthetic oligonucleotide
taggcggcggtgttagtatggagtaaagaa

SEQ ID NO: 244880 - DNA, 30 bp, Artificial Sequence
  Synthetic oligonucleotide
cgtatgcgtgcgtgtaccggaattaaagaa

SEQ ID NO: 244881 - DNA, 30 bp, Artificial Sequence
  Synthetic oligonucleotide
ttgctagctcgccattgcgaacttaaagaa

SEQ ID NO: 244882 - DNA, 30 bp, Artificial Sequence
  Synthetic oligonucleotide
gtggtatagtactttcactgcgaacaagaa

SEQ ID NO: 244883 - DNA, 30 bp, Artificial Sequence
  Synthetic oligonucleotide
gcgcgacgcgatttggttggtggacaagaa

SEQ ID NO: 244884 - DNA, 30 bp, Artificial Sequence
  Synthetic oligonucleotide
acaattctcggccacggaaatacccaagaa

SEQ ID NO: 244885 - DNA, 30 bp, Artificial Sequence
  Synthetic oligonucleotide
tttaagacctggaaaagcccttagcaagaa

SEQ ID NO: 244886 - DNA, 30 bp, Artificial Sequence
  Synthetic oligonucleotide
gctttccaccctgtcattcaagggcaagaa

SEQ ID NO: 244887 - DNA, 30 bp, Artificial Sequence
  Synthetic oligonucleotide
aaaaggttggtaaggcgattcatgcaagaa

SEQ ID NO: 244888 - DNA, 30 bp, Artificial Sequence
  Synthetic oligonucleotide
acatcatgtggttacatactcgacgaagaa

SEQ ID NO: 244889 - DNA, 30 bp, Artificial Sequence
  Synthetic oligonucleotide
tgccaagtacctataccgttttacgaagaa

SEQ ID NO: 244890 - DNA, 30 bp, Artificial Sequence
  Synthetic oligonucleotide
agtgaactgagccgcgaccacctcgaagaa

SEQ ID NO: 244891 - DNA, 30 bp, Artificial Sequence
  Synthetic oligonucleotide
aaagtgtcgaagggattgtaccgggaagaa

SEQ ID NO: 244892 - DNA, 30 bp, Artificial Sequence
  Synthetic oligonucleotide
gccgcactcccaagacttactcgggaagaa

SEQ ID NO: 244893 - DNA, 30 bp, Artificial Sequence
  Synthetic oligonucleotide
ccattacttagcagctgcctccgataagaa

SEQ ID NO: 244894 - DNA, 30 bp, Artificial Sequence
  Synthetic oligonucleotide
tcgtgtctaactacctgctacatctaagaa

SEQ ID NO: 244895 - DNA, 30 bp, Artificial Sequence
  Synthetic oligonucleotide
gcctaagagaacggttcccaggcttaagaa

SEQ ID NO: 244896 - DNA, 30 bp, Artificial Sequence
  Synthetic oligonucleotide
agaggttcatgtttgcattatagaacagaa

SEQ ID NO: 244897 - DNA, 30 bp, Artificial Sequence
  Synthetic oligonucleotide
tcctatgaactgtgttgtttaggaacagaa

SEQ ID NO: 244898 - DNA, 30 bp, Artificial Sequence
  Synthetic oligonucleotide
tatgtcgatccaatccgcaccttaacagaa

SEQ ID NO: 244899 - DNA, 30 bp, Artificial Sequence
  Synthetic oligonucleotide
ctagctccacgcctaccgcaggacacagaa

SEQ ID NO: 244900 - DNA, 30 bp, Artificial Sequence
  Synthetic oligonucleotide
taaggtgttctcctgattataagtacagaa

SEQ ID NO: 244901 - DNA, 30 bp, Artificial Sequence
  Synthetic oligonucleotide
agagagtcggctcgagattgcgccccagaa

SEQ ID NO: 244902 - DNA, 30 bp, Artificial Sequence
  Synthetic oligonucleotide
gacgttaggcctaagaggatcaggccagaa

SEQ ID NO: 244903 - DNA, 30 bp, Artificial Sequence
  Synthetic oligonucleotide
cctctggctacagtactttgaatgccagaa

SEQ ID NO: 244904 - DNA, 30 bp, Artificial Sequence
  Synthetic oligonucleotide
ttccccggaataccatcgtgtgtgccagaa

SEQ ID NO: 244905 - DNA, 30 bp, Artificial Sequence
  Synthetic oligonucleotide
aacgccgtgtcgcgcatgaagcgtccagaa

SEQ ID NO: 244906 - DNA, 30 bp, Artificial Sequence
  Synthetic oligonucleotide
caaaattcagctgtgcatatacaagcagaa

SEQ ID NO: 244907 - DNA, 30 bp, Artificial Sequence
  Synthetic oligonucleotide
cgttgggaggccctgcatacgtaagcagaa

SEQ ID NO: 244908 - DNA, 30 bp, Artificial Sequence
  Synthetic oligonucleotide
tactgtgcttagggtcaagcatgcgcagaa

SEQ ID NO: 244909 - DNA, 30 bp, Artificial Sequence
  Synthetic oligonucleotide
atgaccgcaccaaatcaccccagggcagaa

SEQ ID NO: 244910 - DNA, 30 bp, Artificial Sequence
  Synthetic oligonucleotide
gtattgggcggtgcagggtttttggcagaa

SEQ ID NO: 244911 - DNA, 30 bp, Artificial Sequence
  Synthetic oligonucleotide
gatcaagggtcgaccctatcgggctcagaa

SEQ ID NO: 244912 - DNA, 30 bp, Artificial Sequence
  Synthetic oligonucleotide
cagaactggagcctcatcctgccgtcagaa

SEQ ID NO: 244913 - DNA, 30 bp, Artificial Sequence
  Synthetic oligonucleotide
tggggtaaactcaaaactctttggtcagaa

SEQ ID NO: 244914 - DNA, 30 bp, Artificial Sequence
  Synthetic oligonucleotide
acgtagcgttcgggaggaaaaatgtcagaa

SEQ ID NO: 244915 - DNA, 30 bp, Artificial Sequence
  Synthetic oligonucleotide
tccatcgccgaccgtggtgctatgtcagaa

SEQ ID NO: 244916 - DNA, 30 bp, Artificial Sequence
  Synthetic oligonucleotide
taatggactattggctgtatgctaagagaa

SEQ ID NO: 244917 - DNA, 30 bp, Artificial Sequence
  Synthetic oligonucleotide
gatctacagggcccggagtttagacgagaa

SEQ ID NO: 244918 - DNA, 30 bp, Artificial Sequence
  Synthetic oligonucleotide
agagggtgaacattgggtacaggacgagaa

SEQ ID NO: 244919 - DNA, 30 bp, Artificial Sequence
  Synthetic oligonucleotide
atagtcagaacgggattcttagcgcgagaa

SEQ ID NO: 244920 - DNA, 30 bp, Artificial Sequence
  Synthetic oligonucleotide
ggcgttcatccgagcactataatgcgagaa

SEQ ID NO: 244921 - DNA, 30 bp, Artificial Sequence
  Synthetic oligonucleotide
tacagccatgaatccccaaccattcgagaa

SEQ ID NO: 244922 - DNA, 30 bp, Artificial Sequence
  Synthetic oligonucleotide
ccgcgcttaagttttcgtcaaagaggagaa

SEQ ID NO: 244923 - DNA, 30 bp, Artificial Sequence
  Synthetic oligonucleotide
acgtttgtcttgtaacgatgcggaggagaa

SEQ ID NO: 244924 - DNA, 30 bp, Artificial Sequence
  Synthetic oligonucleotide
tccgctaaaaaacccgcacgggggggagaa

SEQ ID NO: 244925 - DNA, 30 bp, Artificial Sequence
  Synthetic oligonucleotide
gcctcaacgccttatgaactaccatgagaa

SEQ ID NO: 244926 - DNA, 30 bp, Artificial Sequence
  Synthetic oligonucleotide
ttaagcggcgcacacaagaacgactgagaa

SEQ ID NO: 244927 - DNA, 30 bp, Artificial Sequence
  Synthetic oligonucleotide
attactggttgatcggctcgtgcctgagaa

SEQ ID NO: 244928 - DNA, 30 bp, Artificial Sequence
  Synthetic oligonucleotide
tgttaatagcacttcgcgcggcagtgagaa

SEQ ID NO: 244929 - DNA, 30 bp, Artificial Sequence
  Synthetic oligonucleotide
catgattgttgtacccgacgaaggtgagaa

SEQ ID NO: 244930 - DNA, 30 bp, Artificial Sequence
  Synthetic oligonucleotide
gattgttcgtacgaccgactaaattgagaa

SEQ ID NO: 244931 - DNA, 30 bp, Artificial Sequence
  Synthetic oligonucleotide
agtttataggtacacttcggtggttgagaa

SEQ ID NO: 244932 - DNA, 30 bp, Artificial Sequence
  Synthetic oligonucleotide
atgctcctaatgtcacattacaaaatagaa

SEQ ID NO: 244933 - DNA, 30 bp, Artificial Sequence
  Synthetic oligonucleotide
cacaggtaatgtgtgaaggcttaaatagaa

SEQ ID NO: 244934 - DNA, 30 bp, Artificial Sequence
  Synthetic oligonucleotide
gaaccaatccatagaaagctttgaatagaa

SEQ ID NO: 244935 - DNA, 30 bp, Artificial Sequence
  Synthetic oligonucleotide
agaacggcgtggtgtttcaccataatagaa

SEQ ID NO: 244936 - DNA, 30 bp, Artificial Sequence
  Synthetic oligonucleotide
gactagtcaccacatggctgtaacatagaa

SEQ ID NO: 244937 - DNA, 30 bp, Artificial Sequence
  Synthetic oligonucleotide
acaattcaacttgggaatggatagatagaa

SEQ ID NO: 244938 - DNA, 30 bp, Artificial Sequence
  Synthetic oligonucleotide
tgttgtttctctggcataagaccgatagaa

SEQ ID NO: 244939 - DNA, 31 bp, Artificial Sequence
  Synthetic oligonucleotide
gcctaggtatagcccacctgcaaggatagaa

SEQ ID NO: 244940 - DNA, 30 bp, Artificial Sequence
  Synthetic oligonucleotide
gcatagcatgtatccacgacattgatagaa

SEQ ID NO: 244941 - DNA, 30 bp, Artificial Sequence
  Synthetic oligonucleotide
agacggtcggtaattatcgggcgtatagaa

SEQ ID NO: 244942 - DNA, 30 bp, Artificial Sequence
  Synthetic oligonucleotide
tggtagtccccgtcatgatactttatagaa

SEQ ID NO: 244943 - DNA, 30 bp, Artificial Sequence
  Synthetic oligonucleotide
gtcgtatcagatatgttgacgagcctagaa

SEQ ID NO: 244944 - DNA, 30 bp, Artificial Sequence
  Synthetic oligonucleotide
ataatgatagtttaccggcgtacgctagaa

SEQ ID NO: 244945 - DNA, 30 bp, Artificial Sequence
  Synthetic oligonucleotide
ggggtgccgaaggcttcaccatgtctagaa

SEQ ID NO: 244946 - DNA, 30 bp, Artificial Sequence
  Synthetic oligonucleotide
gccgcctataacaaaaatgcatttctagaa

SEQ ID NO: 244947 - DNA, 30 bp, Artificial Sequence
  Synthetic oligonucleotide
ccactttcagtcccatgcctaacagtagaa

SEQ ID NO: 244948 - DNA, 31 bp, Artificial Sequence
  Synthetic oligonucleotide
cacaaataagtggtatatgacaccagtagaa

SEQ ID NO: 244949 - DNA, 30 bp, Artificial Sequence
  Synthetic oligonucleotide
ttaacagtggctgtcgtcgtgtgcgtagaa

SEQ ID NO: 244950 - DNA, 30 bp, Artificial Sequence
  Synthetic oligonucleotide
tcgcggaagtgttcccagctactcgtagaa

SEQ ID NO: 244951 - DNA, 30 bp, Artificial Sequence
  Synthetic oligonucleotide
agcaatctggagtattgcgagtgggtagaa

SEQ ID NO: 244952 - DNA, 30 bp, Artificial Sequence
  Synthetic oligonucleotide
atcaacaaagtatgcaagcggcaattagaa

SEQ ID NO: 244953 - DNA, 30 bp, Artificial Sequence
  Synthetic oligonucleotide
agaggatgacagacgcttggggaattagaa

SEQ ID NO: 244954 - DNA, 30 bp, Artificial Sequence
  Synthetic oligonucleotide
aatagacgcccgatccttgattcattagaa

SEQ ID NO: 244955 - DNA, 30 bp, Artificial Sequence
  Synthetic oligonucleotide
tgaatctgaaatgcgtaaatagggttagaa

SEQ ID NO: 244956 - DNA, 30 bp, Artificial Sequence
  Synthetic oligonucleotide
tattctacgatatagcggactctgttagaa

SEQ ID NO: 244957 - DNA, 30 bp, Artificial Sequence
  Synthetic oligonucleotide
gcaaagacgctaccattaggagaaaacgaa

SEQ ID NO: 244958 - DNA, 30 bp, Artificial Sequence
  Synthetic oligonucleotide
aagagatgatcgtcgcggaacgcaaacgaa

SEQ ID NO: 244959 - DNA, 30 bp, Artificial Sequence
  Synthetic oligonucleotide
acactagtgtaaactattcgatcaaacgaa

SEQ ID NO: 244960 - DNA, 30 bp, Artificial Sequence
  Synthetic oligonucleotide
actcgaagcgtttatgaccccagaaacgaa

SEQ ID NO: 244961 - DNA, 30 bp, Artificial Sequence
  Synthetic oligonucleotide
cccagcaaccagtccaatgttagaaacgaa

SEQ ID NO: 244962 - DNA, 30 bp, Artificial Sequence
  Synthetic oligonucleotide
tgcggtccctcaacgctccatgcgaacgaa

SEQ ID NO: 244963 - DNA, 30 bp, Artificial Sequence
  Synthetic oligonucleotide
tagcagcactagtaacctgcaatgaacgaa

SEQ ID NO: 244964 - DNA, 30 bp, Artificial Sequence
  Synthetic oligonucleotide
gtcagtgggggtttgtggtcctctaacgaa

SEQ ID NO: 244965 - DNA, 30 bp, Artificial Sequence
  Synthetic oligonucleotide
gtatcctatcaggtactggtgggtaacgaa

SEQ ID NO: 244966 - DNA, 30 bp, Artificial Sequence
  Synthetic oligonucleotide
acaaggagtttagcctagtactttaacgaa

SEQ ID NO: 244967 - DNA, 30 bp, Artificial Sequence
  Synthetic oligonucleotide
aaatgagttctgaaggtccaaatacacgaa

SEQ ID NO: 244968 - DNA, 30 bp, Artificial Sequence
  Synthetic oligonucleotide
taagtattcaccaccagcaatccccacgaa

SEQ ID NO: 244969 - DNA, 30 bp, Artificial Sequence
  Synthetic oligonucleotide
caaagggtcggcataagacttatccacgaa

SEQ ID NO: 244970 - DNA, 30 bp, Artificial Sequence
  Synthetic oligonucleotide
gatacttctggataggtgtcacagcacgaa

SEQ ID NO: 244971 - DNA, 30 bp, Artificial Sequence
  Synthetic oligonucleotide
gggcaatgactacactaagtcacgcacgaa

SEQ ID NO: 244972 - DNA, 30 bp, Artificial Sequence
  Synthetic oligonucleotide
ggtgcatctaagaacgtggaaccgcacgaa

SEQ ID NO: 244973 - DNA, 30 bp, Artificial Sequence
  Synthetic oligonucleotide
cttgactgtccaagtgtatgtgttcacgaa

SEQ ID NO: 244974 - DNA, 29 bp, Artificial Sequence
  Synthetic oligonucleotide
gcggagtaacaatctttacgtaagacgaa

SEQ ID NO: 244975 - DNA, 30 bp, Artificial Sequence
  Synthetic oligonucleotide
aggtgcttcgggacatcaagcgcagacgaa

SEQ ID NO: 244976 - DNA, 30 bp, Artificial Sequence
  Synthetic oligonucleotide
cgggagtagatttccgaacgtaatgacgaa

SEQ ID NO: 244977 - DNA, 30 bp, Artificial Sequence
  Synthetic oligonucleotide
tattacaacggatacgagttttatgacgaa

SEQ ID NO: 244978 - DNA, 30 bp, Artificial Sequence
  Synthetic oligonucleotide
aacacgatacctataggaagacctgacgaa

SEQ ID NO: 244979 - DNA, 30 bp, Artificial Sequence
  Synthetic oligonucleotide
catcggtgtataaattcgctgcgatacgaa

SEQ ID NO: 244980 - DNA, 30 bp, Artificial Sequence
  Synthetic oligonucleotide
gttatgcactagttggactttggatacgaa

SEQ ID NO: 244981 - DNA, 30 bp, Artificial Sequence
  Synthetic oligonucleotide
tgtacgagcactcacgcccagaactacgaa

SEQ ID NO: 244982 - DNA, 30 bp, Artificial Sequence
  Synthetic oligonucleotide
tccttgtaggtatcgatcggtaattacgaa

SEQ ID NO: 244983 - DNA, 30 bp, Artificial Sequence
  Synthetic oligonucleotide
aaacccccagtctctaggaagtattacgaa

SEQ ID NO: 244984 - DNA, 30 bp, Artificial Sequence
  Synthetic oligonucleotide
aaagctacagaagatggggtacacaccgaa

SEQ ID NO: 244985 - DNA, 30 bp, Artificial Sequence
  Synthetic oligonucleotide
cgacgtctccattgacgcttaagcaccgaa

SEQ ID NO: 244986 - DNA, 30 bp, Artificial Sequence
  Synthetic oligonucleotide
tttatcaaatctacgtggctgagcaccgaa

SEQ ID NO: 244987 - DNA, 30 bp, Artificial Sequence
  Synthetic oligonucleotide
acaccgttagagccgcccggcactaccgaa

SEQ ID NO: 244988 - DNA, 30 bp, Artificial Sequence
  Synthetic oligonucleotide
ctgaggtccccgcatcgattgactaccgaa

SEQ ID NO: 244989 - DNA, 30 bp, Artificial Sequence
  Synthetic oligonucleotide
aatgcattagtatggatcatggctaccgaa

SEQ ID NO: 244990 - DNA, 30 bp, Artificial Sequence
  Synthetic oligonucleotide
ccaagacttcctaggcatctagaacccgaa

SEQ ID NO: 244991 - DNA, 30 bp, Artificial Sequence
  Synthetic oligonucleotide
gttactatcatgtctgtgtcagatcccgaa

SEQ ID NO: 244992 - DNA, 30 bp, Artificial Sequence
  Synthetic oligonucleotide
tttggtgaaccacagtttaggtatcccgaa

SEQ ID NO: 244993 - DNA, 30 bp, Artificial Sequence
  Synthetic oligonucleotide
cgtacgtttgacagataacggcctgccgaa

SEQ ID NO: 244994 - DNA, 30 bp, Artificial Sequence
  Synthetic oligonucleotide
aagcgcactgccttagtgacggaatccgaa

SEQ ID NO: 244995 - DNA, 30 bp, Artificial Sequence
  Synthetic oligonucleotide
ataggagacgtggcgaaaacgccatccgaa

SEQ ID NO: 244996 - DNA, 30 bp, Artificial Sequence
  Synthetic oligonucleotide
gcggtgtagtataatgttttggactccgaa

SEQ ID NO: 244997 - DNA, 30 bp, Artificial Sequence
  Synthetic oligonucleotide
ccagacttagggatgctaaagttctccgaa

SEQ ID NO: 244998 - DNA, 30 bp, Artificial Sequence
  Synthetic oligonucleotide
ctccttcctagaatgttgaggctgtccgaa

SEQ ID NO: 244999 - DNA, 30 bp, Artificial Sequence
  Synthetic oligonucleotide
tgggttatttctgcgagtacatcttccgaa

SEQ ID NO: 245000 - DNA, 30 bp, Artificial Sequence
  Synthetic oligonucleotide
cagttgtataagcaaagaggtatttccgaa

SEQ ID NO: 245001 - DNA, 30 bp, Artificial Sequence
  Synthetic oligonucleotide
tcggaaacggagaggcttggtatttccgaa

SEQ ID NO: 245002 - DNA, 30 bp, Artificial Sequence
  Synthetic oligonucleotide
atctgaatgacgtagtaaaaagaaagcgaa

SEQ ID NO: 245003 - DNA, 30 bp, Artificial Sequence
  Synthetic oligonucleotide
cataggacaacgtatcatgattgaagcgaa

SEQ ID NO: 245004 - DNA, 30 bp, Artificial Sequence
  Synthetic oligonucleotide
tacagtcgtgatacgcgttcgagcagcgaa

SEQ ID NO: 245005 - DNA, 30 bp, Artificial Sequence
  Synthetic oligonucleotide
gagaagcaaaatgattattagcagagcgaa

SEQ ID NO: 245006 - DNA, 30 bp, Artificial Sequence
  Synthetic oligonucleotide
cattcgatgttgcgtcgcaatagtagcgaa

SEQ ID NO: 245007 - DNA, 30 bp, Artificial Sequence
  Synthetic oligonucleotide
gaaatcttgatatgaatctttaaccgcgaa

SEQ ID NO: 245008 - DNA, 30 bp, Artificial Sequence
  Synthetic oligonucleotide
acttattcttggacaaggagatgccgcgaa

SEQ ID NO: 245009 - DNA, 30 bp, Artificial Sequence
  Synthetic oligonucleotide
ggtgaacggcgctttcatttatcaggcgaa

SEQ ID NO: 245010 - DNA, 30 bp, Artificial Sequence
  Synthetic oligonucleotide
catttaaacttcatgagggaacaatgcgaa

SEQ ID NO: 245011 - DNA, 30 bp, Artificial Sequence
  Synthetic oligonucleotide
gtcagcacgagtggttactgcgaatgcgaa

SEQ ID NO: 245012 - DNA, 30 bp, Artificial Sequence
  Synthetic oligonucleotide
ctgcatgggttacggtggtccggatgcgaa

SEQ ID NO: 245013 - DNA, 30 bp, Artificial Sequence
  Synthetic oligonucleotide
tcattagtacgtgggaaatccttctgcgaa

SEQ ID NO: 245014 - DNA, 30 bp, Artificial Sequence
  Synthetic oligonucleotide
aataacgtgaggagagttctgccgtgcgaa

SEQ ID NO: 245015 - DNA, 30 bp, Artificial Sequence
  Synthetic oligonucleotide
agctaatgagtagccccgactgggtgcgaa

SEQ ID NO: 245016 - DNA, 30 bp, Artificial Sequence
  Synthetic oligonucleotide
ccaattcgattacgcgtgagcggttgcgaa

SEQ ID NO: 245017 - DNA, 30 bp, Artificial Sequence
  Synthetic oligonucleotide
atggcgagaggggttagttagggcatcgaa

SEQ ID NO: 245018 - DNA, 30 bp, Artificial Sequence
  Synthetic oligonucleotide
acgtcgtaatagatcccatactggatcgaa

SEQ ID NO: 245019 - DNA, 30 bp, Artificial Sequence
  Synthetic oligonucleotide
cattattgtaggatgacgatccttatcgaa

SEQ ID NO: 245020 - DNA, 30 bp, Artificial Sequence
  Synthetic oligonucleotide
agggactgtcgttaaactcaaatcctcgaa

SEQ ID NO: 245021 - DNA, 30 bp, Artificial Sequence
  Synthetic oligonucleotide
tgatatttagctggacgcacttcgctcgaa

SEQ ID NO: 245022 - DNA, 30 bp, Artificial Sequence
  Synthetic oligonucleotide
gtgacgaagtggttagacccgtgcgtcgaa

SEQ ID NO: 245023 - DNA, 30 bp, Artificial Sequence
  Synthetic oligonucleotide
gtctaattagctgattagtgtcaggtcgaa

SEQ ID NO: 245024 - DNA, 30 bp, Artificial Sequence
  Synthetic oligonucleotide
tcctactcggccataccgaaacaattcgaa

SEQ ID NO: 245025 - DNA, 30 bp, Artificial Sequence
  Synthetic oligonucleotide
ctggtaagcagccaaacggtctcattcgaa

SEQ ID NO: 245026 - DNA, 30 bp, Artificial Sequence
  Synthetic oligonucleotide
agagcgtgcactcttaaataaggattcgaa

SEQ ID NO: 245027 - DNA, 30 bp, Artificial Sequence
  Synthetic oligonucleotide
cttaagacctttcgctagggtgtcttcgaa

SEQ ID NO: 245028 - DNA, 30 bp, Artificial Sequence
  Synthetic oligonucleotide
gctaacagtacctctcttgcattcttcgaa

SEQ ID NO: 245029 - DNA, 30 bp, Artificial Sequence
  Synthetic oligonucleotide
gtcacacgctagcgaggtcgtactttcgaa

SEQ ID NO: 245030 - DNA, 31 bp, Artificial Sequence
  Synthetic oligonucleotide
aagaggggtgatccgggtcaaagctttcgaa

SEQ ID NO: 245031 - DNA, 30 bp, Artificial Sequence
  Synthetic oligonucleotide
cctggaaaagattgctgaggttctttcgaa

SEQ ID NO: 245032 - DNA, 30 bp, Artificial Sequence
  Synthetic oligonucleotide
tgtacctgagccaaacgcccccttttcgaa

SEQ ID NO: 245033 - DNA, 30 bp, Artificial Sequence
  Synthetic oligonucleotide
tgcactggagcatgggaggctggaaaggaa

SEQ ID NO: 245034 - DNA, 30 bp, Artificial Sequence
  Synthetic oligonucleotide
gcgccaggatcctgtaacaactgaaaggaa

SEQ ID NO: 245035 - DNA, 30 bp, Artificial Sequence
  Synthetic oligonucleotide
caggttgccacctgttccttccccaaggaa

SEQ ID NO: 245036 - DNA, 30 bp, Artificial Sequence
  Synthetic oligonucleotide
ggcggcgagccattaaacgttgcgaaggaa

SEQ ID NO: 245037 - DNA, 30 bp, Artificial Sequence
  Synthetic oligonucleotide
catgcgctaaaataattatgtatgaaggaa

SEQ ID NO: 245038 - DNA, 30 bp, Artificial Sequence
  Synthetic oligonucleotide
gtatccgagcaaggatcttggaataaggaa

SEQ ID NO: 245039 - DNA, 30 bp, Artificial Sequence
  Synthetic oligonucleotide
tcaacgatttaacaagaattttgtaaggaa

SEQ ID NO: 245040 - DNA, 30 bp, Artificial Sequence
  Synthetic oligonucleotide
cgacgcagtgacacttgaaaagtccaggaa

SEQ ID NO: 245041 - DNA, 30 bp, Artificial Sequence
  Synthetic oligonucleotide
ggtttcaggggacgggcaggggagcaggaa

SEQ ID NO: 245042 - DNA, 29 bp, Artificial Sequence
  Synthetic oligonucleotide
cgtcctcacgtgttagaggtacgcaggaa

SEQ ID NO: 245043 - DNA, 30 bp, Artificial Sequence
  Synthetic oligonucleotide
aaccggcctacagcgaggtccctgcaggaa

SEQ ID NO: 245044 - DNA, 30 bp, Artificial Sequence
  Synthetic oligonucleotide
gtggcacaggaatctgctcggcctcaggaa

SEQ ID NO: 245045 - DNA, 30 bp, Artificial Sequence
  Synthetic oligonucleotide
gtaactgaccgaaattgctagtacgaggaa

SEQ ID NO: 245046 - DNA, 30 bp, Artificial Sequence
  Synthetic oligonucleotide
agggggtatcatttatgtgatcatgaggaa

SEQ ID NO: 245047 - DNA, 30 bp, Artificial Sequence
  Synthetic oligonucleotide
ataaaagaaaccctgggctggcgataggaa

SEQ ID NO: 245048 - DNA, 30 bp, Artificial Sequence
  Synthetic oligonucleotide
tggcactcacaatagtggcgtgcgtaggaa

SEQ ID NO: 245049 - DNA, 30 bp, Artificial Sequence
  Synthetic oligonucleotide
taaagtctgctttgtaactccttgtaggaa

SEQ ID NO: 245050 - DNA, 30 bp, Artificial Sequence
  Synthetic oligonucleotide
ggtgcgccattgagagtttgggcttaggaa

SEQ ID NO: 245051 - DNA, 30 bp, Artificial Sequence
  Synthetic oligonucleotide
gcctattgacacctactgggtaaaacggaa

SEQ ID NO: 245052 - DNA, 30 bp, Artificial Sequence
  Synthetic oligonucleotide
taggaggaaagtcccctaccgcatacggaa

SEQ ID NO: 245053 - DNA, 30 bp, Artificial Sequence
  Synthetic oligonucleotide
ctcacaaggtgcctctttactcatacggaa

SEQ ID NO: 245054 - DNA, 30 bp, Artificial Sequence
  Synthetic oligonucleotide
cttgtcatttaaccgcgggacaaaccggaa

SEQ ID NO: 245055 - DNA, 30 bp, Artificial Sequence
  Synthetic oligonucleotide
tggtatgggtgaatcgttaaacaaccggaa

SEQ ID NO: 245056 - DNA, 30 bp, Artificial Sequence
  Synthetic oligonucleotide
gacaatgtgacttcactactggaaccggaa

SEQ ID NO: 245057 - DNA, 30 bp, Artificial Sequence
  Synthetic oligonucleotide
aaatacggggtcttaatgcgtcgaccggaa

SEQ ID NO: 245058 - DNA, 30 bp, Artificial Sequence
  Synthetic oligonucleotide
atttgggtgacacagagactttgaccggaa

SEQ ID NO: 245059 - DNA, 30 bp, Artificial Sequence
  Synthetic oligonucleotide
ggtgccgtccattttataagacacccggaa

SEQ ID NO: 245060 - DNA, 30 bp, Artificial Sequence
  Synthetic oligonucleotide
tctttacactattacgcactggtcgcggaa

SEQ ID NO: 245061 - DNA, 30 bp, Artificial Sequence
  Synthetic oligonucleotide
gcacatcgaggctacgtcgtaccggcggaa

SEQ ID NO: 245062 - DNA, 31 bp, Artificial Sequence
  Synthetic oligonucleotide
gatgacaatttgtctcggacgtccatcggaa

SEQ ID NO: 245063 - DNA, 30 bp, Artificial Sequence
  Synthetic oligonucleotide
ttcttcaacccgaagggtgatatgtcggaa

SEQ ID NO: 245064 - DNA, 30 bp, Artificial Sequence
  Synthetic oligonucleotide
ggctacggtacgaagtgaggggtttcggaa

SEQ ID NO: 245065 - DNA, 30 bp, Artificial Sequence
  Synthetic oligonucleotide
tgagttgaaaccaccgtgtggtaaagggaa

SEQ ID NO: 245066 - DNA, 30 bp, Artificial Sequence
  Synthetic oligonucleotide
tagacttcgcatagtgcccaattaagggaa

SEQ ID NO: 245067 - DNA, 30 bp, Artificial Sequence
  Synthetic oligonucleotide
cttgtcacatcatgtactttacccagggaa

SEQ ID NO: 245068 - DNA, 30 bp, Artificial Sequence
  Synthetic oligonucleotide
aagaaaggctattaccgcgagctcagggaa

SEQ ID NO: 245069 - DNA, 30 bp, Artificial Sequence
  Synthetic oligonucleotide
cctcggaaggacggtattagggtcagggaa

SEQ ID NO: 245070 - DNA, 30 bp, Artificial Sequence
  Synthetic oligonucleotide
gctcattcgctgtatcaatagacgagggaa

SEQ ID NO: 245071 - DNA, 30 bp, Artificial Sequence
  Synthetic oligonucleotide
atgcttcgagcctgtcatggggcgagggaa

SEQ ID NO: 245072 - DNA, 30 bp, Artificial Sequence
  Synthetic oligonucleotide
ctctggtcatccaagataatatatagggaa

SEQ ID NO: 245073 - DNA, 30 bp, Artificial Sequence
  Synthetic oligonucleotide
ggggataacctgcgcgtttcaattagggaa

SEQ ID NO: 245074 - DNA, 30 bp, Artificial Sequence
  Synthetic oligonucleotide
gggcatgcttcatttaagcctattagggaa

SEQ ID NO: 245075 - DNA, 30 bp, Artificial Sequence
  Synthetic oligonucleotide
tattaagccatcatgctgtagggacgggaa

SEQ ID NO: 245076 - DNA, 30 bp, Artificial Sequence
  Synthetic oligonucleotide
tggtccatgcgcacagcgcaatgacgggaa

SEQ ID NO: 245077 - DNA, 30 bp, Artificial Sequence
  Synthetic oligonucleotide
ttactaatcgccgatggcgggacccgggaa

SEQ ID NO: 245078 - DNA, 30 bp, Artificial Sequence
  Synthetic oligonucleotide
tttagggccatctcacaactatagcgggaa

SEQ ID NO: 245079 - DNA, 30 bp, Artificial Sequence
  Synthetic oligonucleotide
tatcatggtgatggtgcaataatgcgggaa

SEQ ID NO: 245080 - DNA, 30 bp, Artificial Sequence
  Synthetic oligonucleotide
cgtacggcactagcgaggtcaaatcgggaa

SEQ ID NO: 245081 - DNA, 30 bp, Artificial Sequence
  Synthetic oligonucleotide
ctactgaaatttgttgagataaatcgggaa

SEQ ID NO: 245082 - DNA, 30 bp, Artificial Sequence
  Synthetic oligonucleotide
cattgcctgggtactggtagtcatcgggaa

SEQ ID NO: 245083 - DNA, 30 bp, Artificial Sequence
  Synthetic oligonucleotide
gtctgtgggctcgtagaacagtttcgggaa

SEQ ID NO: 245084 - DNA, 30 bp, Artificial Sequence
  Synthetic oligonucleotide
gaccttgtcagtcacgtagcgacaggggaa

SEQ ID NO: 245085 - DNA, 30 bp, Artificial Sequence
  Synthetic oligonucleotide
gtggatatgttaagcaaccgtctaggggaa

SEQ ID NO: 245086 - DNA, 30 bp, Artificial Sequence
  Synthetic oligonucleotide
ggtgaccaaaaatatggcctgttaggggaa

SEQ ID NO: 245087 - DNA, 30 bp, Artificial Sequence
  Synthetic oligonucleotide
taatagacagattctaggctaaccggggaa

SEQ ID NO: 245088 - DNA, 30 bp, Artificial Sequence
  Synthetic oligonucleotide
atcgtaagctgtaaacgcgattttggggaa

SEQ ID NO: 245089 - DNA, 30 bp, Artificial Sequence
  Synthetic oligonucleotide
tgcttaggctcgtctacttagaggtgggaa

SEQ ID NO: 245090 - DNA, 30 bp, Artificial Sequence
  Synthetic oligonucleotide
cacgaatgctagtgcaacgcaatgtgggaa

SEQ ID NO: 245091 - DNA, 30 bp, Artificial Sequence
  Synthetic oligonucleotide
tctttaagcacactcataagtcgttgggaa

SEQ ID NO: 245092 - DNA, 30 bp, Artificial Sequence
  Synthetic oligonucleotide
atatgtcctcagtctcgtattcgttgggaa

SEQ ID NO: 245093 - DNA, 30 bp, Artificial Sequence
  Synthetic oligonucleotide
tgcaatactgaacttagagaaggttgggaa

SEQ ID NO: 245094 - DNA, 30 bp, Artificial Sequence
  Synthetic oligonucleotide
attcaggggggtttccaatacctttgggaa

SEQ ID NO: 245095 - DNA, 30 bp, Artificial Sequence
  Synthetic oligonucleotide
tgtgcaccaagatatggtgaactaatggaa

SEQ ID NO: 245096 - DNA, 30 bp, Artificial Sequence
  Synthetic oligonucleotide
ccacctcaggtaaaagcgcgacgcatggaa

SEQ ID NO: 245097 - DNA, 30 bp, Artificial Sequence
  Synthetic oligonucleotide
ggtattgtgtcgctcaccctatgcatggaa

SEQ ID NO: 245098 - DNA, 30 bp, Artificial Sequence
  Synthetic oligonucleotide
tgaggggaccggcagatgtctaatatggaa

SEQ ID NO: 245099 - DNA, 30 bp, Artificial Sequence
  Synthetic oligonucleotide
atatggctgaggatccagtttgttatggaa

SEQ ID NO: 245100 - DNA, 30 bp, Artificial Sequence
  Synthetic oligonucleotide
aatcagccgcccccatcagcgagactggaa

SEQ ID NO: 245101 - DNA, 30 bp, Artificial Sequence
  Synthetic oligonucleotide
cgaagtcggtttaacataaccaacctggaa

SEQ ID NO: 245102 - DNA, 30 bp, Artificial Sequence
  Synthetic oligonucleotide
gggaaaatgaagatccccagggacctggaa

SEQ ID NO: 245103 - DNA, 30 bp, Artificial Sequence
  Synthetic oligonucleotide
cttagcaatgagtgttgtgcttacctggaa

SEQ ID NO: 245104 - DNA, 30 bp, Artificial Sequence
  Synthetic oligonucleotide
aacagcactcgagtagatagctctctggaa

SEQ ID NO: 245105 - DNA, 30 bp, Artificial Sequence
  Synthetic oligonucleotide
gtccattaatcggagagccggtaagtggaa

SEQ ID NO: 245106 - DNA, 30 bp, Artificial Sequence
  Synthetic oligonucleotide
tagctgccggaagaaccggtagcagtggaa

SEQ ID NO: 245107 - DNA, 30 bp, Artificial Sequence
  Synthetic oligonucleotide
gggagattgtacgtgacctctcgcgtggaa

SEQ ID NO: 245108 - DNA, 30 bp, Artificial Sequence
  Synthetic oligonucleotide
tcagtcggaaagcgtggcttggcggtggaa

SEQ ID NO: 245109 - DNA, 30 bp, Artificial Sequence
  Synthetic oligonucleotide
gacgaatgccactagtagggctcggtggaa

SEQ ID NO: 245110 - DNA, 30 bp, Artificial Sequence
  Synthetic oligonucleotide
acttacacgttgtgcatcgcacttgtggaa

SEQ ID NO: 245111 - DNA, 29 bp, Artificial Sequence
  Synthetic oligonucleotide
ccgtgcccatgctgtgattgggattggaa

SEQ ID NO: 245112 - DNA, 30 bp, Artificial Sequence
  Synthetic oligonucleotide
gcggacagggctctggaaagcatattggaa

SEQ ID NO: 245113 - DNA, 30 bp, Artificial Sequence
  Synthetic oligonucleotide
aagcgaacctgcgagggtgtggtattggaa

SEQ ID NO: 245114 - DNA, 30 bp, Artificial Sequence
  Synthetic oligonucleotide
gaagttcacatgaaaatttaccacttggaa

SEQ ID NO: 245115 - DNA, 30 bp, Artificial Sequence
  Synthetic oligonucleotide
gataggaatgcgtaaaatcttcccttggaa

SEQ ID NO: 245116 - DNA, 30 bp, Artificial Sequence
  Synthetic oligonucleotide
tggataacttgtggtaaggaggccttggaa

SEQ ID NO: 245117 - DNA, 30 bp, Artificial Sequence
  Synthetic oligonucleotide
tgacaagcgaggttatataaagtcttggaa

SEQ ID NO: 245118 - DNA, 30 bp, Artificial Sequence
  Synthetic oligonucleotide
ggcactctgaagtactcaatgtatttggaa

SEQ ID NO: 245119 - DNA, 30 bp, Artificial Sequence
  Synthetic oligonucleotide
tgtggaggtgcgctccgcgctcaaaatgaa

SEQ ID NO: 245120 - DNA, 30 bp, Artificial Sequence
  Synthetic oligonucleotide
agcggcagcaactgatatctcgaaaatgaa

SEQ ID NO: 245121 - DNA, 30 bp, Artificial Sequence
  Synthetic oligonucleotide
gtgacagattctggggccttgtacaatgaa

SEQ ID NO: 245122 - DNA, 30 bp, Artificial Sequence
  Synthetic oligonucleotide
gtggggtccctgaactctgtggcgaatgaa

SEQ ID NO: 245123 - DNA, 30 bp, Artificial Sequence
  Synthetic oligonucleotide
tcacctacaccctgtggcgctcctaatgaa

SEQ ID NO: 245124 - DNA, 30 bp, Artificial Sequence
  Synthetic oligonucleotide
caacatgaccgtgatgaagttcgtaatgaa

SEQ ID NO: 245125 - DNA, 30 bp, Artificial Sequence
  Synthetic oligonucleotide
aggaggtagcctgatgtactcacacatgaa

SEQ ID NO: 245126 - DNA, 30 bp, Artificial Sequence
  Synthetic oligonucleotide
ggcaatacaagcttatgactcaggcatgaa

SEQ ID NO: 245127 - DNA, 30 bp, Artificial Sequence
  Synthetic oligonucleotide
tcacacctagatgaatatcttagtcatgaa

SEQ ID NO: 245128 - DNA, 30 bp, Artificial Sequence
  Synthetic oligonucleotide
ctgcaatggttacgagaccgtctagatgaa

SEQ ID NO: 245129 - DNA, 30 bp, Artificial Sequence
  Synthetic oligonucleotide
aaggaaggtggtcctgtagttagcgatgaa

SEQ ID NO: 245130 - DNA, 30 bp, Artificial Sequence
  Synthetic oligonucleotide
gcatgagattacacacgagctttcgatgaa

SEQ ID NO: 245131 - DNA, 30 bp, Artificial Sequence
  Synthetic oligonucleotide
tagaatgctccactcagcagaaaggatgaa

SEQ ID NO: 245132 - DNA, 30 bp, Artificial Sequence
  Synthetic oligonucleotide
agaacgtcctgtctaatgaatcaggatgaa

SEQ ID NO: 245133 - DNA, 30 bp, Artificial Sequence
  Synthetic oligonucleotide
atgtcacaggacgagtatggaagggatgaa

SEQ ID NO: 245134 - DNA, 30 bp, Artificial Sequence
  Synthetic oligonucleotide
gccgaccttatgctaagaatcagtgatgaa

SEQ ID NO: 245135 - DNA, 30 bp, Artificial Sequence
  Synthetic oligonucleotide
aggcggcggatttatctttgtaaatatgaa

SEQ ID NO: 245136 - DNA, 30 bp, Artificial Sequence
  Synthetic oligonucleotide
caacggtggatcgccagaatatcatatgaa

SEQ ID NO: 245137 - DNA, 30 bp, Artificial Sequence
  Synthetic oligonucleotide
tagacggaatgagtggtaccggcgtatgaa

SEQ ID NO: 245138 - DNA, 30 bp, Artificial Sequence
  Synthetic oligonucleotide
gaacaggaacacataatcatgaggtatgaa

SEQ ID NO: 245139 - DNA, 30 bp, Artificial Sequence
  Synthetic oligonucleotide
ggccgaaggaggcggaatagttggtatgaa

SEQ ID NO: 245140 - DNA, 30 bp, Artificial Sequence
  Synthetic oligonucleotide
gcttggaaggcggctacgacagattatgaa

SEQ ID NO: 245141 - DNA, 30 bp, Artificial Sequence
  Synthetic oligonucleotide
acggcgaagtttagtcggtatcgttatgaa

SEQ ID NO: 245142 - DNA, 30 bp, Artificial Sequence
  Synthetic oligonucleotide
accttcgctcgtcgtctgatgcaaactgaa

SEQ ID NO: 245143 - DNA, 30 bp, Artificial Sequence
  Synthetic oligonucleotide
ctaaatactgccatcttgcgggcaactgaa

SEQ ID NO: 245144 - DNA, 30 bp, Artificial Sequence
  Synthetic oligonucleotide
gtccaaataattgtccggcttcggactgaa

SEQ ID NO: 245145 - DNA, 30 bp, Artificial Sequence
  Synthetic oligonucleotide
aacgtaaggttatgcacagacactactgaa

SEQ ID NO: 245146 - DNA, 30 bp, Artificial Sequence
  Synthetic oligonucleotide
ctcatgcctaggcaaacgtatagtactgaa

SEQ ID NO: 245147 - DNA, 30 bp, Artificial Sequence
  Synthetic oligonucleotide
aggggcaagtatcaggtgagtagacctgaa

SEQ ID NO: 245148 - DNA, 30 bp, Artificial Sequence
  Synthetic oligonucleotide
tatcaaactctagggtcaggtatccctgaa

SEQ ID NO: 245149 - DNA, 30 bp, Artificial Sequence
  Synthetic oligonucleotide
cgggtaggttggtaactgagcatgcctgaa

SEQ ID NO: 245150 - DNA, 30 bp, Artificial Sequence
  Synthetic oligonucleotide
cgctcacgcgcgaccaaaacaactcctgaa

SEQ ID NO: 245151 - DNA, 30 bp, Artificial Sequence
  Synthetic oligonucleotide
ataagaaacctcgtgttggcatcggctgaa

SEQ ID NO: 245152 - DNA, 30 bp, Artificial Sequence
  Synthetic oligonucleotide
cgactattagtattagccttatcggctgaa

SEQ ID NO: 245153 - DNA, 30 bp, Artificial Sequence
  Synthetic oligonucleotide
gtttggcagatgaccggaaaagtggctgaa

SEQ ID NO: 245154 - DNA, 30 bp, Artificial Sequence
  Synthetic oligonucleotide
cgcaggttcgtatggcgtccaatatctgaa

SEQ ID NO: 245155 - DNA, 30 bp, Artificial Sequence
  Synthetic oligonucleotide
tacgtatacgggttgtgggcacactctgaa

SEQ ID NO: 245156 - DNA, 30 bp, Artificial Sequence
  Synthetic oligonucleotide
aggtccctacggtcaggacactggtctgaa

SEQ ID NO: 245157 - DNA, 30 bp, Artificial Sequence
  Synthetic oligonucleotide
acacaagatgtcgaggtagacctttctgaa

SEQ ID NO: 245158 - DNA, 30 bp, Artificial Sequence
  Synthetic oligonucleotide
tgtaaaaggtcaaccaacccgaaaagtgaa

SEQ ID NO: 245159 - DNA, 30 bp, Artificial Sequence
  Synthetic oligonucleotide
agttaaagtaaatgcgtcccaggaagtgaa

SEQ ID NO: 245160 - DNA, 30 bp, Artificial Sequence
  Synthetic oligonucleotide
agtccgcctggagcgttacggctaagtgaa

SEQ ID NO: 245161 - DNA, 30 bp, Artificial Sequence
  Synthetic oligonucleotide
ccattgtggaattcgatgcaattaagtgaa

SEQ ID NO: 245162 - DNA, 30 bp, Artificial Sequence
  Synthetic oligonucleotide
agcgcactggtacaacggtcggacagtgaa

SEQ ID NO: 245163 - DNA, 30 bp, Artificial Sequence
  Synthetic oligonucleotide
attacagttgcacggtgtgtagatagtgaa

SEQ ID NO: 245164 - DNA, 30 bp, Artificial Sequence
  Synthetic oligonucleotide
gggcgtgtcaacccgtaccggattagtgaa

SEQ ID NO: 245165 - DNA, 30 bp, Artificial Sequence
  Synthetic oligonucleotide
gaacaacctcaaatgcattcagttagtgaa

SEQ ID NO: 245166 - DNA, 30 bp, Artificial Sequence
  Synthetic oligonucleotide
catgccggataggaatctgatctacgtgaa

SEQ ID NO: 245167 - DNA, 30 bp, Artificial Sequence
  Synthetic oligonucleotide
gcgtatattgtaccaatgttggtacgtgaa

SEQ ID NO: 245168 - DNA, 30 bp, Artificial Sequence
  Synthetic oligonucleotide
actatagttggatcggtataggagcgtgaa

SEQ ID NO: 245169 - DNA, 30 bp, Artificial Sequence
  Synthetic oligonucleotide
gggtaaccaacagtgccttagaaaggtgaa

SEQ ID NO: 245170 - DNA, 30 bp, Artificial Sequence
  Synthetic oligonucleotide
gcccgggtgtcaggtcaggcacaaggtgaa

SEQ ID NO: 245171 - DNA, 30 bp, Artificial Sequence
  Synthetic oligonucleotide
cttttcgaactgagaatagtgagaggtgaa

SEQ ID NO: 245172 - DNA, 30 bp, Artificial Sequence
  Synthetic oligonucleotide
caagtaggaacgccgccgatcatcggtgaa

SEQ ID NO: 245173 - DNA, 30 bp, Artificial Sequence
  Synthetic oligonucleotide
aagcggaagttgacgctctgggtcggtgaa

SEQ ID NO: 245174 - DNA, 30 bp, Artificial Sequence
  Synthetic oligonucleotide
ataagtttacggtttactagtaggggtgaa

SEQ ID NO: 245175 - DNA, 30 bp, Artificial Sequence
  Synthetic oligonucleotide
actgtttcagatgagcgagtgtggggtgaa

SEQ ID NO: 245176 - DNA, 30 bp, Artificial Sequence
  Synthetic oligonucleotide
tgaggtgttagtcacataatatatggtgaa

SEQ ID NO: 245177 - DNA, 30 bp, Artificial Sequence
  Synthetic oligonucleotide
attgtcatagtgccacacacctatggtgaa

SEQ ID NO: 245178 - DNA, 30 bp, Artificial Sequence
  Synthetic oligonucleotide
cacccagtccgtatcagataggctggtgaa

SEQ ID NO: 245179 - DNA, 30 bp, Artificial Sequence
  Synthetic oligonucleotide
cggtagggcaaatgcgactgcaaatgtgaa

SEQ ID NO: 245180 - DNA, 30 bp, Artificial Sequence
  Synthetic oligonucleotide
aaagaaggagttagtaacggcagatgtgaa

SEQ ID NO: 245181 - DNA, 30 bp, Artificial Sequence
  Synthetic oligonucleotide
cggcaacacagatacatagattgatgtgaa

SEQ ID NO: 245182 - DNA, 30 bp, Artificial Sequence
  Synthetic oligonucleotide
acgaagcaatatgcgctgacctcctgtgaa

SEQ ID NO: 245183 - DNA, 30 bp, Artificial Sequence
  Synthetic oligonucleotide
aagtcaagacgttgaaagcctaattgtgaa

SEQ ID NO: 245184 - DNA, 30 bp, Artificial Sequence
  Synthetic oligonucleotide
cctactagtccgcgctcgagtacttgtgaa

SEQ ID NO: 245185 - DNA, 30 bp, Artificial Sequence
  Synthetic oligonucleotide
ttgcttgcaagtacgatagagagaattgaa

SEQ ID NO: 245186 - DNA, 30 bp, Artificial Sequence
  Synthetic oligonucleotide
atcaccacggctcatatggtacgaattgaa

SEQ ID NO: 245187 - DNA, 30 bp, Artificial Sequence
  Synthetic oligonucleotide
gaaaataaaagattgttgaatggaattgaa

SEQ ID NO: 245188 - DNA, 30 bp, Artificial Sequence
  Synthetic oligonucleotide
cagttcattggatggtatactggaattgaa

SEQ ID NO: 245189 - DNA, 30 bp, Artificial Sequence
  Synthetic oligonucleotide
tgaatccacgatacgctaaagtccattgaa

SEQ ID NO: 245190 - DNA, 30 bp, Artificial Sequence
  Synthetic oligonucleotide
ccagaggctcgattcatctttgggattgaa

SEQ ID NO: 245191 - DNA, 30 bp, Artificial Sequence
  Synthetic oligonucleotide
tagttattggcagacaaccggtcacttgaa

SEQ ID NO: 245192 - DNA, 30 bp, Artificial Sequence
  Synthetic oligonucleotide
ggacggaggtaaaaccacggaccccttgaa

SEQ ID NO: 245193 - DNA, 30 bp, Artificial Sequence
  Synthetic oligonucleotide
agattttaccgcttaaagatacgccttgaa

SEQ ID NO: 245194 - DNA, 30 bp, Artificial Sequence
  Synthetic oligonucleotide
gtggtgtgccgtgggcgggaaaggcttgaa

SEQ ID NO: 245195 - DNA, 30 bp, Artificial Sequence
  Synthetic oligonucleotide
tatacgaaatgcctagttaagcatcttgaa

SEQ ID NO: 245196 - DNA, 30 bp, Artificial Sequence
  Synthetic oligonucleotide
ggtttcctcccgcgagagggcgatcttgaa

SEQ ID NO: 245197 - DNA, 30 bp, Artificial Sequence
  Synthetic oligonucleotide
taaagcacacgggagtcgattagcgttgaa

SEQ ID NO: 245198 - DNA, 30 bp, Artificial Sequence
  Synthetic oligonucleotide
tagggtacgtaagacaatacgctcgttgaa

SEQ ID NO: 245199 - DNA, 30 bp, Artificial Sequence
  Synthetic oligonucleotide
accttccaaaagcggatctacccggttgaa

SEQ ID NO: 245200 - DNA, 30 bp, Artificial Sequence
  Synthetic oligonucleotide
acgggttgatgggtgggtaagttggttgaa

SEQ ID NO: 245201 - DNA, 30 bp, Artificial Sequence
  Synthetic oligonucleotide
actaggcgggctgcctggccaacatttgaa

SEQ ID NO: 245202 - DNA, 30 bp, Artificial Sequence
  Synthetic oligonucleotide
ttaccaggtgggaccaatcaggactttgaa

SEQ ID NO: 245203 - DNA, 30 bp, Artificial Sequence
  Synthetic oligonucleotide
gaatggcatataatgaaacaaggctttgaa

SEQ ID NO: 245204 - DNA, 30 bp, Artificial Sequence
  Synthetic oligonucleotide
cagatagtaagcagtgtattcgtctttgaa

SEQ ID NO: 245205 - DNA, 30 bp, Artificial Sequence
  Synthetic oligonucleotide
tgatgggacaaactttcaaaagtgtttgaa

SEQ ID NO: 245206 - DNA, 30 bp, Artificial Sequence
  Synthetic oligonucleotide
acaagtcaatacgctacacgagtgtttgaa

SEQ ID NO: 245207 - DNA, 30 bp, Artificial Sequence
  Synthetic oligonucleotide
tatgggccgtttggatacacatccaaataa

SEQ ID NO: 245208 - DNA, 30 bp, Artificial Sequence
  Synthetic oligonucleotide
ctcttgccgggaacacactatggcaaataa

SEQ ID NO: 245209 - DNA, 30 bp, Artificial Sequence
  Synthetic oligonucleotide
cactcggttaagcatgggtgatgcaaataa

SEQ ID NO: 245210 - DNA, 30 bp, Artificial Sequence
  Synthetic oligonucleotide
gtgaaggcggcccagatctgtggtaaataa

SEQ ID NO: 245211 - DNA, 30 bp, Artificial Sequence
  Synthetic oligonucleotide
acattcggcccgacctccacttaacaataa

SEQ ID NO: 245212 - DNA, 30 bp, Artificial Sequence
  Synthetic oligonucleotide
tggatcgctgatggggagtcaacacaataa

SEQ ID NO: 245213 - DNA, 30 bp, Artificial Sequence
  Synthetic oligonucleotide
tcaaggcaatcttcgcagcagacacaataa

SEQ ID NO: 245214 - DNA, 30 bp, Artificial Sequence
  Synthetic oligonucleotide
tcattactggaactcggctgagcacaataa

SEQ ID NO: 245215 - DNA, 30 bp, Artificial Sequence
  Synthetic oligonucleotide
ttgtattaggtatttagggtgcgacaataa

SEQ ID NO: 245216 - DNA, 30 bp, Artificial Sequence
  Synthetic oligonucleotide
taccccagacgtgcagtcatgggacaataa

SEQ ID NO: 245217 - DNA, 30 bp, Artificial Sequence
  Synthetic oligonucleotide
caccggtgttatcatcgggattcgcaataa

SEQ ID NO: 245218 - DNA, 30 bp, Artificial Sequence
  Synthetic oligonucleotide
aactcgtcaacacctgggaatatgcaataa

SEQ ID NO: 245219 - DNA, 30 bp, Artificial Sequence
  Synthetic oligonucleotide
gggagctgagtttggtcccctttgcaataa

SEQ ID NO: 245220 - DNA, 30 bp, Artificial Sequence
  Synthetic oligonucleotide
agagtaatatgaacaaataggcgtcaataa

SEQ ID NO: 245221 - DNA, 30 bp, Artificial Sequence
  Synthetic oligonucleotide
gagtaacgattccaataccggggtcaataa

SEQ ID NO: 245222 - DNA, 30 bp, Artificial Sequence
  Synthetic oligonucleotide
cggtgggacctgatgtagaactcagaataa

SEQ ID NO: 245223 - DNA, 30 bp, Artificial Sequence
  Synthetic oligonucleotide
tgaactcgtggcagagaaagaggagaataa

SEQ ID NO: 245224 - DNA, 30 bp, Artificial Sequence
  Synthetic oligonucleotide
gaagtattaacggtccaggaacgcgaataa

SEQ ID NO: 245225 - DNA, 30 bp, Artificial Sequence
  Synthetic oligonucleotide
tcgcacagattgcacatgaggtgcgaataa

SEQ ID NO: 245226 - DNA, 30 bp, Artificial Sequence
  Synthetic oligonucleotide
aaaggtcctgagcaaagatattctgaataa

SEQ ID NO: 245227 - DNA, 30 bp, Artificial Sequence
  Synthetic oligonucleotide
agactccaggtaggcggaacctgtgaataa

SEQ ID NO: 245228 - DNA, 30 bp, Artificial Sequence
  Synthetic oligonucleotide
ctcccgctaggaagaggttcccttgaataa

SEQ ID NO: 245229 - DNA, 30 bp, Artificial Sequence
  Synthetic oligonucleotide
attgcttgtaatgggagaagttttgaataa

SEQ ID NO: 245230 - DNA, 30 bp, Artificial Sequence
  Synthetic oligonucleotide
tggttgtaaggtggtaaggtcccgtaataa

SEQ ID NO: 245231 - DNA, 30 bp, Artificial Sequence
  Synthetic oligonucleotide
ataagcatacataaaggcgatgcttaataa

SEQ ID NO: 245232 - DNA, 30 bp, Artificial Sequence
  Synthetic oligonucleotide
cggttcgctttggcgagggccctttaataa

SEQ ID NO: 245233 - DNA, 31 bp, Artificial Sequence
  Synthetic oligonucleotide
tcgcgtgttgtcgacgctttcagctacataa

SEQ ID NO: 245234 - DNA, 30 bp, Artificial Sequence
  Synthetic oligonucleotide
gaatcgttaagacccacaacgtaaccataa

SEQ ID NO: 245235 - DNA, 30 bp, Artificial Sequence
  Synthetic oligonucleotide
aagaataacggcaaggactttctaccataa

SEQ ID NO: 245236 - DNA, 30 bp, Artificial Sequence
  Synthetic oligonucleotide
cgactatacctcgcagaagggcacccataa

SEQ ID NO: 245237 - DNA, 30 bp, Artificial Sequence
  Synthetic oligonucleotide
gattccaggcgacatggcaaacccccataa

SEQ ID NO: 245238 - DNA, 30 bp, Artificial Sequence
  Synthetic oligonucleotide
gggacactcattgcaatctatttcccataa

SEQ ID NO: 245239 - DNA, 30 bp, Artificial Sequence
  Synthetic oligonucleotide
atgataaccgcaggacaaatcccgccataa

SEQ ID NO: 245240 - DNA, 30 bp, Artificial Sequence
  Synthetic oligonucleotide
caatgctaaatgctttgattaagtccataa

SEQ ID NO: 245241 - DNA, 30 bp, Artificial Sequence
  Synthetic oligonucleotide
taagctttgcgagactatctggaagcataa

SEQ ID NO: 245242 - DNA, 30 bp, Artificial Sequence
  Synthetic oligonucleotide
catcgggcattgggtcgtaacagagcataa

SEQ ID NO: 245243 - DNA, 30 bp, Artificial Sequence
  Synthetic oligonucleotide
tgagctgtccgcctctctcaacgcgcataa

SEQ ID NO: 245244 - DNA, 30 bp, Artificial Sequence
  Synthetic oligonucleotide
gtccacgctcggtataagtcgctggcataa

SEQ ID NO: 245245 - DNA, 30 bp, Artificial Sequence
  Synthetic oligonucleotide
atgcgaacttgtagcgtacagaatgcataa

SEQ ID NO: 245246 - DNA, 30 bp, Artificial Sequence
  Synthetic oligonucleotide
tagaagtcgcaaaacgggcccactgcataa

SEQ ID NO: 245247 - DNA, 30 bp, Artificial Sequence
  Synthetic oligonucleotide
cagttcgacagtctgacttggactgcataa

SEQ ID NO: 245248 - DNA, 30 bp, Artificial Sequence
  Synthetic oligonucleotide
agtctgcacctgccttaatcgtctgcataa

SEQ ID NO: 245249 - DNA, 30 bp, Artificial Sequence
  Synthetic oligonucleotide
ggaggattgatggtcgttacgcggtcataa

SEQ ID NO: 245250 - DNA, 30 bp, Artificial Sequence
  Synthetic oligonucleotide
ctcgcggtgatctacttagttgattcataa

SEQ ID NO: 245251 - DNA, 30 bp, Artificial Sequence
  Synthetic oligonucleotide
gttggtagttaacaagaactctattcataa

SEQ ID NO: 245252 - DNA, 30 bp, Artificial Sequence
  Synthetic oligonucleotide
gctgcatagggaaacagcaagggttcataa

SEQ ID NO: 245253 - DNA, 30 bp, Artificial Sequence
  Synthetic oligonucleotide
cctgtctcgtcgctccaccctacaagataa

SEQ ID NO: 245254 - DNA, 30 bp, Artificial Sequence
  Synthetic oligonucleotide
cacaacggcgcggtaggtttagcaagataa

SEQ ID NO: 245255 - DNA, 30 bp, Artificial Sequence
  Synthetic oligonucleotide
tctgacgcaaatgatcaagaccacagataa

SEQ ID NO: 245256 - DNA, 30 bp, Artificial Sequence
  Synthetic oligonucleotide
agtcttcgccggagggttctagacagataa

SEQ ID NO: 245257 - DNA, 30 bp, Artificial Sequence
  Synthetic oligonucleotide
ccgttcactgcattggcgtcccagagataa

SEQ ID NO: 245258 - DNA, 30 bp, Artificial Sequence
  Synthetic oligonucleotide
tggctgactgatcacagttagcaacgataa

SEQ ID NO: 245259 - DNA, 30 bp, Artificial Sequence
  Synthetic oligonucleotide
ggccaagttggaactggaatgttacgataa

SEQ ID NO: 245260 - DNA, 30 bp, Artificial Sequence
  Synthetic oligonucleotide
gtcgagataatgatagcggagatccgataa

SEQ ID NO: 245261 - DNA, 30 bp, Artificial Sequence
  Synthetic oligonucleotide
catacttaccgccgtgtttctgagcgataa

SEQ ID NO: 245262 - DNA, 30 bp, Artificial Sequence
  Synthetic oligonucleotide
acttgtatcaggtaggtatttgagcgataa

SEQ ID NO: 245263 - DNA, 30 bp, Artificial Sequence
  Synthetic oligonucleotide
gataggctatggacacctacggcgcgataa

SEQ ID NO: 245264 - DNA, 30 bp, Artificial Sequence
  Synthetic oligonucleotide
gagaggcaagggcctcaaaactggcgataa

SEQ ID NO: 245265 - DNA, 30 bp, Artificial Sequence
  Synthetic oligonucleotide
cacctcttaattgaagatcaggatcgataa

SEQ ID NO: 245266 - DNA, 30 bp, Artificial Sequence
  Synthetic oligonucleotide
agtgacgccgccaacacggaggctcgataa

SEQ ID NO: 245267 - DNA, 30 bp, Artificial Sequence
  Synthetic oligonucleotide
accgcggggaaatccatgcaaagaggataa

SEQ ID NO: 245268 - DNA, 30 bp, Artificial Sequence
  Synthetic oligonucleotide
cgaagatacaggtataagtgatacggataa

SEQ ID NO: 245269 - DNA, 30 bp, Artificial Sequence
  Synthetic oligonucleotide
gggattagccccgagcaaatctgcggataa

SEQ ID NO: 245270 - DNA, 30 bp, Artificial Sequence
  Synthetic oligonucleotide
gccctggcgaagattcgaaacatcggataa

SEQ ID NO: 245271 - DNA, 30 bp, Artificial Sequence
  Synthetic oligonucleotide
atgacacgaagcggtcgcgaacggggataa

SEQ ID NO: 245272 - DNA, 30 bp, Artificial Sequence
  Synthetic oligonucleotide
tgcacggggaataaattactgactggataa

SEQ ID NO: 245273 - DNA, 30 bp, Artificial Sequence
  Synthetic oligonucleotide
tcctgatgcgcgagcaattcatcctgataa

SEQ ID NO: 245274 - DNA, 30 bp, Artificial Sequence
  Synthetic oligonucleotide
gcacattgtactagagctcagggctgataa

SEQ ID NO: 245275 - DNA, 30 bp, Artificial Sequence
  Synthetic oligonucleotide
tagccattaggtgaagatgttggctgataa

SEQ ID NO: 245276 - DNA, 30 bp, Artificial Sequence
  Synthetic oligonucleotide
taaagcctagagcctttaccgttctgataa

SEQ ID NO: 245277 - DNA, 30 bp, Artificial Sequence
  Synthetic oligonucleotide
gtggtgagtttagttcgatttatgtgataa

SEQ ID NO: 245278 - DNA, 30 bp, Artificial Sequence
  Synthetic oligonucleotide
tatcactcggcgaaacaccggtattgataa

SEQ ID NO: 245279 - DNA, 30 bp, Artificial Sequence
  Synthetic oligonucleotide
ctagcgacagtcatgctcacgtcttgataa

SEQ ID NO: 245280 - DNA, 30 bp, Artificial Sequence
  Synthetic oligonucleotide
gttcatactgggacgtgacggggaatataa

SEQ ID NO: 245281 - DNA, 30 bp, Artificial Sequence
  Synthetic oligonucleotide
ggactttgcgatgattcggtgataatataa

SEQ ID NO: 245282 - DNA, 30 bp, Artificial Sequence
  Synthetic oligonucleotide
gcagcgccgttaactataaggcacatataa

SEQ ID NO: 245283 - DNA, 30 bp, Artificial Sequence
  Synthetic oligonucleotide
tcatctattagagttaccagtaccatataa

SEQ ID NO: 245284 - DNA, 30 bp, Artificial Sequence
  Synthetic oligonucleotide
cacaaaaaggatgtggcatagcgcatataa

SEQ ID NO: 245285 - DNA, 30 bp, Artificial Sequence
  Synthetic oligonucleotide
aaattgaatccaacgactcgttatatataa

SEQ ID NO: 245286 - DNA, 30 bp, Artificial Sequence
  Synthetic oligonucleotide
caagtaagtatagttctcaagtgtatataa

SEQ ID NO: 245287 - DNA, 30 bp, Artificial Sequence
  Synthetic oligonucleotide
atagttacggcgatagcaacaaacctataa

SEQ ID NO: 245288 - DNA, 30 bp, Artificial Sequence
  Synthetic oligonucleotide
tatttcggaccgcgtgagggaaacctataa

SEQ ID NO: 245289 - DNA, 30 bp, Artificial Sequence
  Synthetic oligonucleotide
aggtaacgttgttgtccgactaccctataa

SEQ ID NO: 245290 - DNA, 30 bp, Artificial Sequence
  Synthetic oligonucleotide
cgatttatcaggacattccggaggctataa

SEQ ID NO: 245291 - DNA, 30 bp, Artificial Sequence
  Synthetic oligonucleotide
ctcatgagaattcacgccggctggctataa

SEQ ID NO: 245292 - DNA, 30 bp, Artificial Sequence
  Synthetic oligonucleotide
acagcgcggtaagtggatgggtatctataa

SEQ ID NO: 245293 - DNA, 30 bp, Artificial Sequence
  Synthetic oligonucleotide
tccgccattgaggatcgacgatttctataa

SEQ ID NO: 245294 - DNA, 30 bp, Artificial Sequence
  Synthetic oligonucleotide
tccaatggaaggaacgtgtcgcaagtataa

SEQ ID NO: 245295 - DNA, 30 bp, Artificial Sequence
  Synthetic oligonucleotide
gatgtgcatgcggatgagactgcagtataa

SEQ ID NO: 245296 - DNA, 30 bp, Artificial Sequence
  Synthetic oligonucleotide
agatctcccgatagaaccccatcagtataa

SEQ ID NO: 245297 - DNA, 30 bp, Artificial Sequence
  Synthetic oligonucleotide
atattggtatagggtttcgcgtgagtataa

SEQ ID NO: 245298 - DNA, 30 bp, Artificial Sequence
  Synthetic oligonucleotide
tttatatgaggctggaatgagctagtataa

SEQ ID NO: 245299 - DNA, 30 bp, Artificial Sequence
  Synthetic oligonucleotide
tctcaaacagtgaaactgacagtagtataa

SEQ ID NO: 245300 - DNA, 30 bp, Artificial Sequence
  Synthetic oligonucleotide
ttcagggatgaaatttcccgagccgtataa

SEQ ID NO: 245301 - DNA, 30 bp, Artificial Sequence
  Synthetic oligonucleotide
cagagggaggaacccggacaccgcgtataa

SEQ ID NO: 245302 - DNA, 30 bp, Artificial Sequence
  Synthetic oligonucleotide
ttcgtatcgcgcggaaaaccgacggtataa

SEQ ID NO: 245303 - DNA, 30 bp, Artificial Sequence
  Synthetic oligonucleotide
gccatgagactagtgctaagcccggtataa

SEQ ID NO: 245304 - DNA, 30 bp, Artificial Sequence
  Synthetic oligonucleotide
acgtaggagatactattgtcctatgtataa

SEQ ID NO: 245305 - DNA, 30 bp, Artificial Sequence
  Synthetic oligonucleotide
acatgcaattggtgcgtgtatagtgtataa

SEQ ID NO: 245306 - DNA, 30 bp, Artificial Sequence
  Synthetic oligonucleotide
tcttcactataggccattgagattgtataa

SEQ ID NO: 245307 - DNA, 30 bp, Artificial Sequence
  Synthetic oligonucleotide
gctgtattacggggattagttgttgtataa

SEQ ID NO: 245308 - DNA, 30 bp, Artificial Sequence
  Synthetic oligonucleotide
ccagcaacgcgagggcaaccccaattataa

SEQ ID NO: 245309 - DNA, 30 bp, Artificial Sequence
  Synthetic oligonucleotide
gcttctgtaaaatagcacacaggcttataa

SEQ ID NO: 245310 - DNA, 30 bp, Artificial Sequence
  Synthetic oligonucleotide
gccatcgacaggtataaagcgctgttataa

SEQ ID NO: 245311 - DNA, 30 bp, Artificial Sequence
  Synthetic oligonucleotide
ctgaccatactggtcgtgatacaaaactaa

SEQ ID NO: 245312 - DNA, 30 bp, Artificial Sequence
  Synthetic oligonucleotide
gtgtgtggcgtacaagataaatgaaactaa

SEQ ID NO: 245313 - DNA, 30 bp, Artificial Sequence
  Synthetic oligonucleotide
aacgtactatcgaaattctaatgaaactaa

SEQ ID NO: 245314 - DNA, 30 bp, Artificial Sequence
  Synthetic oligonucleotide
tacgctccctaacggcagtaccgcaactaa

SEQ ID NO: 245315 - DNA, 30 bp, Artificial Sequence
  Synthetic oligonucleotide
tctgactgacagttaaccagcaataactaa

SEQ ID NO: 245316 - DNA, 30 bp, Artificial Sequence
  Synthetic oligonucleotide
ggcaaagtcaccactagatctaataactaa

SEQ ID NO: 245317 - DNA, 30 bp, Artificial Sequence
  Synthetic oligonucleotide
gaacgtttttagggatggcttaataactaa

SEQ ID NO: 245318 - DNA, 30 bp, Artificial Sequence
  Synthetic oligonucleotide
tgcggttaacgccacatgccatgtaactaa

SEQ ID NO: 245319 - DNA, 30 bp, Artificial Sequence
  Synthetic oligonucleotide
aagacaggcttatgagagtaccttaactaa

SEQ ID NO: 245320 - DNA, 30 bp, Artificial Sequence
  Synthetic oligonucleotide
acgcctagacgcgtgacacctgcacactaa

SEQ ID NO: 245321 - DNA, 30 bp, Artificial Sequence
  Synthetic oligonucleotide
tatgtttcgcgatgagattgacgacactaa

SEQ ID NO: 245322 - DNA, 30 bp, Artificial Sequence
  Synthetic oligonucleotide
attgtctcaggggtccgggtattacactaa

SEQ ID NO: 245323 - DNA, 30 bp, Artificial Sequence
  Synthetic oligonucleotide
gatgccgagcggtcagagggtttgcactaa

SEQ ID NO: 245324 - DNA, 30 bp, Artificial Sequence
  Synthetic oligonucleotide
tccagaaggcgtccgtatagagaagactaa

SEQ ID NO: 245325 - DNA, 30 bp, Artificial Sequence
  Synthetic oligonucleotide
aaccacagggaagtacataaatcagactaa

SEQ ID NO: 245326 - DNA, 30 bp, Artificial Sequence
  Synthetic oligonucleotide
gagtctgagtcgggctatttcggcgactaa

SEQ ID NO: 245327 - DNA, 30 bp, Artificial Sequence
  Synthetic oligonucleotide
tcagtcgtttgtttgtctcgcgtcgactaa

SEQ ID NO: 245328 - DNA, 30 bp, Artificial Sequence
  Synthetic oligonucleotide
gtgcagcaacattgctggaggtcggactaa

SEQ ID NO: 245329 - DNA, 31 bp, Artificial Sequence
  Synthetic oligonucleotide
cagtgccactttacttcgtcgagctgactaa

SEQ ID NO: 245330 - DNA, 30 bp, Artificial Sequence
  Synthetic oligonucleotide
ctttagcggggctgcggaattcgtgactaa

SEQ ID NO: 245331 - DNA, 30 bp, Artificial Sequence
  Synthetic oligonucleotide
gtaagccccgctcgaattttggcatactaa

SEQ ID NO: 245332 - DNA, 30 bp, Artificial Sequence
  Synthetic oligonucleotide
gttcatgttcatttcgaactggactactaa

SEQ ID NO: 245333 - DNA, 30 bp, Artificial Sequence
  Synthetic oligonucleotide
cgcggtctgcaaggaagtggctactactaa

SEQ ID NO: 245334 - DNA, 30 bp, Artificial Sequence
  Synthetic oligonucleotide
aaagataatcgcgttttcgtctcctactaa

SEQ ID NO: 245335 - DNA, 30 bp, Artificial Sequence
  Synthetic oligonucleotide
tggcccagaaacacttacaatcgctactaa

SEQ ID NO: 245336 - DNA, 30 bp, Artificial Sequence
  Synthetic oligonucleotide
gccaatcccggcaaaagatcatgctactaa

SEQ ID NO: 245337 - DNA, 30 bp, Artificial Sequence
  Synthetic oligonucleotide
ttaagttcgtcgatgtgcgctgtctactaa

SEQ ID NO: 245338 - DNA, 30 bp, Artificial Sequence
  Synthetic oligonucleotide
tcatgggaagctgtgctgccaccgtactaa

SEQ ID NO: 245339 - DNA, 30 bp, Artificial Sequence
  Synthetic oligonucleotide
cgaacgttcaatatgcttacgcggtactaa

SEQ ID NO: 245340 - DNA, 30 bp, Artificial Sequence
  Synthetic oligonucleotide
ccatttacaaagtggcgttattccacctaa

SEQ ID NO: 245341 - DNA, 30 bp, Artificial Sequence
  Synthetic oligonucleotide
tgactatcagacaccaagatacagacctaa

SEQ ID NO: 245342 - DNA, 30 bp, Artificial Sequence
  Synthetic oligonucleotide
accatatccacggtcacgtttgggccctaa

SEQ ID NO: 245343 - DNA, 30 bp, Artificial Sequence
  Synthetic oligonucleotide
ctataaagcgaatgtcatatacaagcctaa

SEQ ID NO: 245344 - DNA, 30 bp, Artificial Sequence
  Synthetic oligonucleotide
taaggcggcgtcatacgtaaaccagcctaa

SEQ ID NO: 245345 - DNA, 30 bp, Artificial Sequence
  Synthetic oligonucleotide
gggagttcagaaggagatgtgctagcctaa

SEQ ID NO: 245346 - DNA, 30 bp, Artificial Sequence
  Synthetic oligonucleotide
caaaaatagtaacggctgctcttagcctaa

SEQ ID NO: 245347 - DNA, 30 bp, Artificial Sequence
  Synthetic oligonucleotide
gtgcggtgttactaagttacgcatgcctaa

SEQ ID NO: 245348 - DNA, 30 bp, Artificial Sequence
  Synthetic oligonucleotide
gaagccccttttagaccaaaggctgcctaa

SEQ ID NO: 245349 - DNA, 30 bp, Artificial Sequence
  Synthetic oligonucleotide
ataggccctggcctcattatttctgcctaa

SEQ ID NO: 245350 - DNA, 30 bp, Artificial Sequence
  Synthetic oligonucleotide
tggccgatcgggtaataaaaccaatcctaa

SEQ ID NO: 245351 - DNA, 30 bp, Artificial Sequence
  Synthetic oligonucleotide
atctaggcgtgacttctacctggctcctaa

SEQ ID NO: 245352 - DNA, 30 bp, Artificial Sequence
  Synthetic oligonucleotide
ggaagcacagacggttaacgcttctcctaa

SEQ ID NO: 245353 - DNA, 30 bp, Artificial Sequence
  Synthetic oligonucleotide
ccgcacgcgcgggatatactaagttcctaa

SEQ ID NO: 245354 - DNA, 30 bp, Artificial Sequence
  Synthetic oligonucleotide
tccgcatcgatttagaccgagaaaagctaa

SEQ ID NO: 245355 - DNA, 30 bp, Artificial Sequence
  Synthetic oligonucleotide
ccctgtcttaagagcgtcgggcgaagctaa

SEQ ID NO: 245356 - DNA, 30 bp, Artificial Sequence
  Synthetic oligonucleotide
acggcttatttttactagagtgatagctaa

SEQ ID NO: 245357 - DNA, 30 bp, Artificial Sequence
  Synthetic oligonucleotide
aagcactagcgccacaaacgtactagctaa

SEQ ID NO: 245358 - DNA, 30 bp, Artificial Sequence
  Synthetic oligonucleotide
gctcataaacgaactcgcatagttagctaa

SEQ ID NO: 245359 - DNA, 30 bp, Artificial Sequence
  Synthetic oligonucleotide
taactacttaggttaacttcatttagctaa

SEQ ID NO: 245360 - DNA, 30 bp, Artificial Sequence
  Synthetic oligonucleotide
cgctgaggaaagattatcaaggaccgctaa

SEQ ID NO: 245361 - DNA, 30 bp, Artificial Sequence
  Synthetic oligonucleotide
tcatatacaggtgagattataacgcgctaa

SEQ ID NO: 245362 - DNA, 30 bp, Artificial Sequence
  Synthetic oligonucleotide
ccgagcctcatattggagtcacatcgctaa

SEQ ID NO: 245363 - DNA, 30 bp, Artificial Sequence
  Synthetic oligonucleotide
cgataactgacgtgaaggtcttcaggctaa

SEQ ID NO: 245364 - DNA, 30 bp, Artificial Sequence
  Synthetic oligonucleotide
caatttctggtatccccacagcgaggctaa

SEQ ID NO: 245365 - DNA, 30 bp, Artificial Sequence
  Synthetic oligonucleotide
atgataataagcccacaagcaggaggctaa

SEQ ID NO: 245366 - DNA, 30 bp, Artificial Sequence
  Synthetic oligonucleotide
tccctatcatttaattgagcagagggctaa

SEQ ID NO: 245367 - DNA, 30 bp, Artificial Sequence
  Synthetic oligonucleotide
gaatgatgcgtgcgggaatgcggtggctaa

SEQ ID NO: 245368 - DNA, 30 bp, Artificial Sequence
  Synthetic oligonucleotide
ctgtgcgtgtagcaaacgttaaactgctaa

SEQ ID NO: 245369 - DNA, 30 bp, Artificial Sequence
  Synthetic oligonucleotide
cgaaatggatagacccattagctgtgctaa

SEQ ID NO: 245370 - DNA, 30 bp, Artificial Sequence
  Synthetic oligonucleotide
gcctgggtgcgatcgcaagtgcattgctaa

SEQ ID NO: 245371 - DNA, 30 bp, Artificial Sequence
  Synthetic oligonucleotide
cacaaactgtcaattctatattcttgctaa

SEQ ID NO: 245372 - DNA, 30 bp, Artificial Sequence
  Synthetic oligonucleotide
tagggattaggggaaccttacccgatctaa

SEQ ID NO: 245373 - DNA, 30 bp, Artificial Sequence
  Synthetic oligonucleotide
attgcgaggataaagcacactgggatctaa

SEQ ID NO: 245374 - DNA, 30 bp, Artificial Sequence
  Synthetic oligonucleotide
acggcgtttcgactgaaatcattgatctaa

SEQ ID NO: 245375 - DNA, 30 bp, Artificial Sequence
  Synthetic oligonucleotide
gacccatagaggaatgggaaacatatctaa

SEQ ID NO: 245376 - DNA, 30 bp, Artificial Sequence
  Synthetic oligonucleotide
ctggaatttgtcgaagccattcatatctaa

SEQ ID NO: 245377 - DNA, 30 bp, Artificial Sequence
  Synthetic oligonucleotide
cagtgtaatcctgcgcaaccaactatctaa

SEQ ID NO: 245378 - DNA, 30 bp, Artificial Sequence
  Synthetic oligonucleotide
cctagtcatcggcatggtacatctatctaa

SEQ ID NO: 245379 - DNA, 30 bp, Artificial Sequence
  Synthetic oligonucleotide
caggttggagagacttgatcgattatctaa

SEQ ID NO: 245380 - DNA, 30 bp, Artificial Sequence
  Synthetic oligonucleotide
tgggaactatgccgtggcctatcactctaa

SEQ ID NO: 245381 - DNA, 30 bp, Artificial Sequence
  Synthetic oligonucleotide
ataagaaactagggcctcgaccgactctaa

SEQ ID NO: 245382 - DNA, 30 bp, Artificial Sequence
  Synthetic oligonucleotide
aaggccctagggagtgaattgaacctctaa

SEQ ID NO: 245383 - DNA, 30 bp, Artificial Sequence
  Synthetic oligonucleotide
tcgcgtgttcaaccgtgattaaagctctaa

SEQ ID NO: 245384 - DNA, 30 bp, Artificial Sequence
  Synthetic oligonucleotide
ctccgtaaggcaccaaggaaggcgctctaa

SEQ ID NO: 245385 - DNA, 30 bp, Artificial Sequence
  Synthetic oligonucleotide
gccttacacttaggctcacacaatctctaa

SEQ ID NO: 245386 - DNA, 30 bp, Artificial Sequence
  Synthetic oligonucleotide
cggagcctgttatcttcggggatagtctaa

SEQ ID NO: 245387 - DNA, 30 bp, Artificial Sequence
  Synthetic oligonucleotide
aagcgggctaagataagtctgcacgtctaa

SEQ ID NO: 245388 - DNA, 30 bp, Artificial Sequence
  Synthetic oligonucleotide
accaattgatcgtcaggatgtcacgtctaa

SEQ ID NO: 245389 - DNA, 30 bp, Artificial Sequence
  Synthetic oligonucleotide
cagggctaaagttgttagtatatcgtctaa

SEQ ID NO: 245390 - DNA, 30 bp, Artificial Sequence
  Synthetic oligonucleotide
tccatacacaggtgggtttaacaattctaa

SEQ ID NO: 245391 - DNA, 30 bp, Artificial Sequence
  Synthetic oligonucleotide
gcgctcataggtcccggggaaaacttctaa

SEQ ID NO: 245392 - DNA, 30 bp, Artificial Sequence
  Synthetic oligonucleotide
aaatttggcggcacgtctaccaccttctaa

SEQ ID NO: 245393 - DNA, 30 bp, Artificial Sequence
  Synthetic oligonucleotide
caacatatcgatacaccgcgccccttctaa

SEQ ID NO: 245394 - DNA, 30 bp, Artificial Sequence
  Synthetic oligonucleotide
tgtattacggttactaaggggtggttctaa

SEQ ID NO: 245395 - DNA, 30 bp, Artificial Sequence
  Synthetic oligonucleotide
gattcgctatagaattccacgttgttctaa

SEQ ID NO: 245396 - DNA, 30 bp, Artificial Sequence
  Synthetic oligonucleotide
atgaatcacgaacgttcattacatttctaa

SEQ ID NO: 245397 - DNA, 30 bp, Artificial Sequence
  Synthetic oligonucleotide
atctcgtcctattaattttacacaaagtaa

SEQ ID NO: 245398 - DNA, 30 bp, Artificial Sequence
  Synthetic oligonucleotide
tgagtgtcactacgttgacatcgaaagtaa

SEQ ID NO: 245399 - DNA, 30 bp, Artificial Sequence
  Synthetic oligonucleotide
gtgccatcagagacatgggatataaagtaa

SEQ ID NO: 245400 - DNA, 25 bp, Artificial Sequence
  Synthetic oligonucleotide
gggctggccacacgaggtaaagtaa

SEQ ID NO: 245401 - DNA, 30 bp, Artificial Sequence
  Synthetic oligonucleotide
tccctgctgtggaagagagtatccaagtaa

SEQ ID NO: 245402 - DNA, 30 bp, Artificial Sequence
  Synthetic oligonucleotide
gcaccggtagcaggcttcatgctcaagtaa

SEQ ID NO: 245403 - DNA, 30 bp, Artificial Sequence
  Synthetic oligonucleotide
ctagaaaagcccggcaatgacacgaagtaa

SEQ ID NO: 245404 - DNA, 30 bp, Artificial Sequence
  Synthetic oligonucleotide
caactgtttggcgttattattaggaagtaa

SEQ ID NO: 245405 - DNA, 30 bp, Artificial Sequence
  Synthetic oligonucleotide
tagcatcgggttgattccagcactaagtaa

SEQ ID NO: 245406 - DNA, 30 bp, Artificial Sequence
  Synthetic oligonucleotide
aaaattgggctgggacgagatactaagtaa

SEQ ID NO: 245407 - DNA, 30 bp, Artificial Sequence
  Synthetic oligonucleotide
ttcacacacgttagaatagaagctaagtaa

SEQ ID NO: 245408 - DNA, 30 bp, Artificial Sequence
  Synthetic oligonucleotide
gggctgcccgatggggttggggctaagtaa

SEQ ID NO: 245409 - DNA, 30 bp, Artificial Sequence
  Synthetic oligonucleotide
agtctccgcaatccggcatgtgctaagtaa

SEQ ID NO: 245410 - DNA, 30 bp, Artificial Sequence
  Synthetic oligonucleotide
gcatggttgtgtacacaactaattaagtaa

SEQ ID NO: 245411 - DNA, 30 bp, Artificial Sequence
  Synthetic oligonucleotide
tccaatccggtcggtttgactgtacagtaa

SEQ ID NO: 245412 - DNA, 30 bp, Artificial Sequence
  Synthetic oligonucleotide
ggatatggaaccttccgtccgcaccagtaa

SEQ ID NO: 245413 - DNA, 30 bp, Artificial Sequence
  Synthetic oligonucleotide
aatggctataattgtggctgagggcagtaa

SEQ ID NO: 245414 - DNA, 30 bp, Artificial Sequence
  Synthetic oligonucleotide
gagcatataaatacaatgggcctgcagtaa

SEQ ID NO: 245415 - DNA, 30 bp, Artificial Sequence
  Synthetic oligonucleotide
ttcataagtcgaatcaagtcttttcagtaa

SEQ ID NO: 245416 - DNA, 30 bp, Artificial Sequence
  Synthetic oligonucleotide
attcgaacattgccggatgagatagagtaa

SEQ ID NO: 245417 - DNA, 30 bp, Artificial Sequence
  Synthetic oligonucleotide
tcggagattagattttcgagtatagagtaa

SEQ ID NO: 245418 - DNA, 30 bp, Artificial Sequence
  Synthetic oligonucleotide
taaggcgtattgtgagccaacgtagagtaa

SEQ ID NO: 245419 - DNA, 30 bp, Artificial Sequence
  Synthetic oligonucleotide
tcatacgagccacgttggatgtaggagtaa

SEQ ID NO: 245420 - DNA, 30 bp, Artificial Sequence
  Synthetic oligonucleotide
atgattggaaaatgacctgacagggagtaa

SEQ ID NO: 245421 - DNA, 30 bp, Artificial Sequence
  Synthetic oligonucleotide
acaacccaatgatcggctgctaatgagtaa

SEQ ID NO: 245422 - DNA, 30 bp, Artificial Sequence
  Synthetic oligonucleotide
tcattacgcattaccatcgagaaatagtaa

SEQ ID NO: 245423 - DNA, 30 bp, Artificial Sequence
  Synthetic oligonucleotide
tggataggttgcggtaattaacgatagtaa

SEQ ID NO: 245424 - DNA, 30 bp, Artificial Sequence
  Synthetic oligonucleotide
caccccgggtatatgctactctgatagtaa

SEQ ID NO: 245425 - DNA, 30 bp, Artificial Sequence
  Synthetic oligonucleotide
gccctcattatgacgttatctctatagtaa

SEQ ID NO: 245426 - DNA, 30 bp, Artificial Sequence
  Synthetic oligonucleotide
actggctgggttacgacaaagttatagtaa

SEQ ID NO: 245427 - DNA, 30 bp, Artificial Sequence
  Synthetic oligonucleotide
agtaacagcttgggattaggtttatagtaa

SEQ ID NO: 245428 - DNA, 30 bp, Artificial Sequence
  Synthetic oligonucleotide
ctgggagccaccaattcgactttctagtaa

SEQ ID NO: 245429 - DNA, 30 bp, Artificial Sequence
  Synthetic oligonucleotide
tgattgagcacagcaggtctccaaacgtaa

SEQ ID NO: 245430 - DNA, 30 bp, Artificial Sequence
  Synthetic oligonucleotide
ctgctgatccaagttgatccaagaacgtaa

SEQ ID NO: 245431 - DNA, 30 bp, Artificial Sequence
  Synthetic oligonucleotide
acatgagtttggtgctgagatcagacgtaa

SEQ ID NO: 245432 - DNA, 30 bp, Artificial Sequence
  Synthetic oligonucleotide
ttgctattcggcgaaagtttggctacgtaa

SEQ ID NO: 245433 - DNA, 31 bp, Artificial Sequence
  Synthetic oligonucleotide
cagcgtgttatggtcgaagtccattacgtaa

SEQ ID NO: 245434 - DNA, 30 bp, Artificial Sequence
  Synthetic oligonucleotide
cgccttgtgactctgtggatccttacgtaa

SEQ ID NO: 245435 - DNA, 30 bp, Artificial Sequence
  Synthetic oligonucleotide
gcatcatgtagtgccatgggggttacgtaa

SEQ ID NO: 245436 - DNA, 30 bp, Artificial Sequence
  Synthetic oligonucleotide
cgctctagctgtaagtgaaactcaccgtaa

SEQ ID NO: 245437 - DNA, 31 bp, Artificial Sequence
  Synthetic oligonucleotide
aatacgaacggtgggagccgtaagaccgtaa

SEQ ID NO: 245438 - DNA, 30 bp, Artificial Sequence
  Synthetic oligonucleotide
attagtggattcaataatcgtagcccgtaa

SEQ ID NO: 245439 - DNA, 30 bp, Artificial Sequence
  Synthetic oligonucleotide
ctaacgcattactatgttactacgccgtaa

SEQ ID NO: 245440 - DNA, 30 bp, Artificial Sequence
  Synthetic oligonucleotide
cattgattgactcgacgcaacgcgccgtaa

SEQ ID NO: 245441 - DNA, 30 bp, Artificial Sequence
  Synthetic oligonucleotide
aataggctgactacgaactattttccgtaa

SEQ ID NO: 245442 - DNA, 30 bp, Artificial Sequence
  Synthetic oligonucleotide
ggacgttaggggaacccgaaccgagcgtaa

SEQ ID NO: 245443 - DNA, 30 bp, Artificial Sequence
  Synthetic oligonucleotide
tgctaacggccgtgttgtaacgccgcgtaa

SEQ ID NO: 245444 - DNA, 30 bp, Artificial Sequence
  Synthetic oligonucleotide
taacgtactagatattatactcgcgcgtaa

SEQ ID NO: 245445 - DNA, 30 bp, Artificial Sequence
  Synthetic oligonucleotide
tgtcactgatattgcccagcttgcgcgtaa

SEQ ID NO: 245446 - DNA, 30 bp, Artificial Sequence
  Synthetic oligonucleotide
taaaactagatatgtacaatggaggcgtaa

SEQ ID NO: 245447 - DNA, 30 bp, Artificial Sequence
  Synthetic oligonucleotide
actagcctcgggcaccctcaaggggcgtaa

SEQ ID NO: 245448 - DNA, 30 bp, Artificial Sequence
  Synthetic oligonucleotide
tagccaatgttattgctggagggggcgtaa

SEQ ID NO: 245449 - DNA, 30 bp, Artificial Sequence
  Synthetic oligonucleotide
catgtaaagtgtcatcgtagagatgcgtaa

SEQ ID NO: 245450 - DNA, 30 bp, Artificial Sequence
  Synthetic oligonucleotide
agtcgttggaaagtgctatttagtgcgtaa

SEQ ID NO: 245451 - DNA, 30 bp, Artificial Sequence
  Synthetic oligonucleotide
attgtattcgtgaactggctgggatcgtaa

SEQ ID NO: 245452 - DNA, 30 bp, Artificial Sequence
  Synthetic oligonucleotide
tctatagcaccgactttttcctcctcgtaa

SEQ ID NO: 245453 - DNA, 29 bp, Artificial Sequence
  Synthetic oligonucleotide
agttgcgcgcggggaagtttgggtcgtaa

SEQ ID NO: 245454 - DNA, 30 bp, Artificial Sequence
  Synthetic oligonucleotide
gcatctgggagagctcctgaagtttcgtaa

SEQ ID NO: 245455 - DNA, 30 bp, Artificial Sequence
  Synthetic oligonucleotide
tacattgcaggttaactgctacaaaggtaa

SEQ ID NO: 245456 - DNA, 30 bp, Artificial Sequence
  Synthetic oligonucleotide
gccacgctaattccgaatgtcacaaggtaa

SEQ ID NO: 245457 - DNA, 30 bp, Artificial Sequence
  Synthetic oligonucleotide
gacctgggggtagggatgagtgccaggtaa

SEQ ID NO: 245458 - DNA, 30 bp, Artificial Sequence
  Synthetic oligonucleotide
accggcactatcatattagtaggcaggtaa

SEQ ID NO: 245459 - DNA, 30 bp, Artificial Sequence
  Synthetic oligonucleotide
aatggcaccgtcagcacgcgacagaggtaa

SEQ ID NO: 245460 - DNA, 30 bp, Artificial Sequence
  Synthetic oligonucleotide
ctcagatactagcgaaataccgataggtaa

SEQ ID NO: 245461 - DNA, 30 bp, Artificial Sequence
  Synthetic oligonucleotide
ccgtacgtaatctagtgaacactacggtaa

SEQ ID NO: 245462 - DNA, 30 bp, Artificial Sequence
  Synthetic oligonucleotide
attaatggctcccatttacacttacggtaa

SEQ ID NO: 245463 - DNA, 30 bp, Artificial Sequence
  Synthetic oligonucleotide
gtatcggtggagtcgccttcgcgccggtaa

SEQ ID NO: 245464 - DNA, 30 bp, Artificial Sequence
  Synthetic oligonucleotide
ttaggggggggtcagaaaacgaagcggtaa

SEQ ID NO: 245465 - DNA, 30 bp, Artificial Sequence
  Synthetic oligonucleotide
cccatccgccctgcttgaccatttcggtaa

SEQ ID NO: 245466 - DNA, 30 bp, Artificial Sequence
  Synthetic oligonucleotide
gcatggccattcttattgaataaagggtaa

SEQ ID NO: 245467 - DNA, 30 bp, Artificial Sequence
  Synthetic oligonucleotide
aattcgcggtcacaaatgcagtaagggtaa

SEQ ID NO: 245468 - DNA, 30 bp, Artificial Sequence
  Synthetic oligonucleotide
gagtaacccaatgtgaaaacagcagggtaa

SEQ ID NO: 245469 - DNA, 30 bp, Artificial Sequence
  Synthetic oligonucleotide
tcctgcgacgcgcatactgaggaggggtaa

SEQ ID NO: 245470 - DNA, 30 bp, Artificial Sequence
  Synthetic oligonucleotide
gcaaaccggtcagacaccgtgctggggtaa

SEQ ID NO: 245471 - DNA, 30 bp, Artificial Sequence
  Synthetic oligonucleotide
tatttgggcttctaaacggtaaatgggtaa

SEQ ID NO: 245472 - DNA, 30 bp, Artificial Sequence
  Synthetic oligonucleotide
cggtcttaggagcgaccacattttgggtaa

SEQ ID NO: 245473 - DNA, 30 bp, Artificial Sequence
  Synthetic oligonucleotide
acgctgggggtgtcggcgcatccatggtaa

SEQ ID NO: 245474 - DNA, 30 bp, Artificial Sequence
  Synthetic oligonucleotide
taaaaggttatccggggacataactggtaa

SEQ ID NO: 245475 - DNA, 30 bp, Artificial Sequence
  Synthetic oligonucleotide
ctgagggagattggacgagtacactggtaa

SEQ ID NO: 245476 - DNA, 30 bp, Artificial Sequence
  Synthetic oligonucleotide
tggacctgaatgccgggttattgctggtaa

SEQ ID NO: 245477 - DNA, 30 bp, Artificial Sequence
  Synthetic oligonucleotide
atagtgattgaccccgaggggaagtggtaa

SEQ ID NO: 245478 - DNA, 30 bp, Artificial Sequence
  Synthetic oligonucleotide
acacgagggggagttatagacggttggtaa

SEQ ID NO: 245479 - DNA, 30 bp, Artificial Sequence
  Synthetic oligonucleotide
atcgataattagaaagatcgggcaatgtaa

SEQ ID NO: 245480 - DNA, 30 bp, Artificial Sequence
  Synthetic oligonucleotide
caaagacgctagtcgggtatcaacatgtaa

SEQ ID NO: 245481 - DNA, 30 bp, Artificial Sequence
  Synthetic oligonucleotide
gctggctcaagagcccactcaggcatgtaa

SEQ ID NO: 245482 - DNA, 30 bp, Artificial Sequence
  Synthetic oligonucleotide
tatgctatcgagtcaagatggcagatgtaa

SEQ ID NO: 245483 - DNA, 30 bp, Artificial Sequence
  Synthetic oligonucleotide
caattgaagcccagtggcctccggatgtaa

SEQ ID NO: 245484 - DNA, 30 bp, Artificial Sequence
  Synthetic oligonucleotide
ggggagcggccacgcaagatcaatatgtaa

SEQ ID NO: 245485 - DNA, 30 bp, Artificial Sequence
  Synthetic oligonucleotide
taatggtagcgttaggagtgggatatgtaa

SEQ ID NO: 245486 - DNA, 30 bp, Artificial Sequence
  Synthetic oligonucleotide
gagcgccgtgtagagttaagaaccctgtaa

SEQ ID NO: 245487 - DNA, 30 bp, Artificial Sequence
  Synthetic oligonucleotide
gtgggcaacaaatattaactgttgctgtaa

SEQ ID NO: 245488 - DNA, 30 bp, Artificial Sequence
  Synthetic oligonucleotide
ggatcagaagattttattagtggtctgtaa

SEQ ID NO: 245489 - DNA, 30 bp, Artificial Sequence
  Synthetic oligonucleotide
tttttagtagcgtattgcggaacagtgtaa

SEQ ID NO: 245490 - DNA, 30 bp, Artificial Sequence
  Synthetic oligonucleotide
agactaaaatacgcaaagtaacgagtgtaa

SEQ ID NO: 245491 - DNA, 30 bp, Artificial Sequence
  Synthetic oligonucleotide
taccctttgagggagactgtttgagtgtaa

SEQ ID NO: 245492 - DNA, 30 bp, Artificial Sequence
  Synthetic oligonucleotide
agcaaacgtacaagctcgctccacgtgtaa

SEQ ID NO: 245493 - DNA, 30 bp, Artificial Sequence
  Synthetic oligonucleotide
tgctagaccgaccggacattagacgtgtaa

SEQ ID NO: 245494 - DNA, 30 bp, Artificial Sequence
  Synthetic oligonucleotide
cgacttgagccttggccttaatcggtgtaa

SEQ ID NO: 245495 - DNA, 30 bp, Artificial Sequence
  Synthetic oligonucleotide
ctccgcaagaggagtttactatcggtgtaa

SEQ ID NO: 245496 - DNA, 30 bp, Artificial Sequence
  Synthetic oligonucleotide
agagattcttgcccttaattcactgtgtaa

SEQ ID NO: 245497 - DNA, 30 bp, Artificial Sequence
  Synthetic oligonucleotide
gcgcgctgggacatatccaggtctgtgtaa

SEQ ID NO: 245498 - DNA, 30 bp, Artificial Sequence
  Synthetic oligonucleotide
aagtgcggaggaataaaagcttgtgtgtaa

SEQ ID NO: 245499 - DNA, 30 bp, Artificial Sequence
  Synthetic oligonucleotide
cgattagaaacattcgctcgagttgtgtaa

SEQ ID NO: 245500 - DNA, 30 bp, Artificial Sequence
  Synthetic oligonucleotide
tgttgaggtgttggtcgcaagccgttgtaa

SEQ ID NO: 245501 - DNA, 30 bp, Artificial Sequence
  Synthetic oligonucleotide
catactcaatgcgtgtgcttattgttgtaa

SEQ ID NO: 245502 - DNA, 30 bp, Artificial Sequence
  Synthetic oligonucleotide
ctgcttgcaagtagctggtaggatttgtaa

SEQ ID NO: 245503 - DNA, 30 bp, Artificial Sequence
  Synthetic oligonucleotide
ccgtataagcgcaataatcttgatttgtaa

SEQ ID NO: 245504 - DNA, 30 bp, Artificial Sequence
  Synthetic oligonucleotide
ttgtgagcgcgttggagtgtaggtttgtaa

SEQ ID NO: 245505 - DNA, 30 bp, Artificial Sequence
  Synthetic oligonucleotide
ttcgggggcccagataggagaattttgtaa

SEQ ID NO: 245506 - DNA, 30 bp, Artificial Sequence
  Synthetic oligonucleotide
tgacccccgctcattctgacacaaaattaa

SEQ ID NO: 245507 - DNA, 30 bp, Artificial Sequence
  Synthetic oligonucleotide
cgtcgtatatagtcaaggggattaaattaa

SEQ ID NO: 245508 - DNA, 30 bp, Artificial Sequence
  Synthetic oligonucleotide
ccggtccgcgaccgcatttcagagaattaa

SEQ ID NO: 245509 - DNA, 30 bp, Artificial Sequence
  Synthetic oligonucleotide
gcggatcgaagtgtgacggctttgaattaa

SEQ ID NO: 245510 - DNA, 30 bp, Artificial Sequence
  Synthetic oligonucleotide
caagtatacagcacgggaatgtaacattaa

SEQ ID NO: 245511 - DNA, 30 bp, Artificial Sequence
  Synthetic oligonucleotide
ataagctgacataaaaagagcagacattaa

SEQ ID NO: 245512 - DNA, 30 bp, Artificial Sequence
  Synthetic oligonucleotide
tcgcgttgactcgggcattgcagccattaa

SEQ ID NO: 245513 - DNA, 30 bp, Artificial Sequence
  Synthetic oligonucleotide
cacttgggcaaaccgatcttatagcattaa

SEQ ID NO: 245514 - DNA, 30 bp, Artificial Sequence
  Synthetic oligonucleotide
acgctaagcccggtagttaagcggcattaa

SEQ ID NO: 245515 - DNA, 30 bp, Artificial Sequence
  Synthetic oligonucleotide
ccgtcacatttctcatctataaatcattaa

SEQ ID NO: 245516 - DNA, 30 bp, Artificial Sequence
  Synthetic oligonucleotide
ttcgttttcccatccactgtgacagattaa

SEQ ID NO: 245517 - DNA, 30 bp, Artificial Sequence
  Synthetic oligonucleotide
acacctgattgcaaaaggcgtcgcgattaa

SEQ ID NO: 245518 - DNA, 30 bp, Artificial Sequence
  Synthetic oligonucleotide
gacgggcttaaaaagacaatgctcgattaa

SEQ ID NO: 245519 - DNA, 30 bp, Artificial Sequence
  Synthetic oligonucleotide
atctcggtaaaggcgtgcaaaaaggattaa

SEQ ID NO: 245520 - DNA, 30 bp, Artificial Sequence
  Synthetic oligonucleotide
tatctatatctgcccgattgctcggattaa

SEQ ID NO: 245521 - DNA, 30 bp, Artificial Sequence
  Synthetic oligonucleotide
ccaggagcatgcagactaagggactattaa

SEQ ID NO: 245522 - DNA, 30 bp, Artificial Sequence
  Synthetic oligonucleotide
gtgcgccaaatttagtgcgggtactattaa

SEQ ID NO: 245523 - DNA, 30 bp, Artificial Sequence
  Synthetic oligonucleotide
aaagcacgggggacgctccgtgtctattaa

SEQ ID NO: 245524 - DNA, 30 bp, Artificial Sequence
  Synthetic oligonucleotide
ggaacccgaacggtattaaacacgtattaa

SEQ ID NO: 245525 - DNA, 30 bp, Artificial Sequence
  Synthetic oligonucleotide
aaccacaatgcggcttagcgcaggtattaa

SEQ ID NO: 245526 - DNA, 30 bp, Artificial Sequence
  Synthetic oligonucleotide
cacatcaccgcgagatcctcgtgttattaa

SEQ ID NO: 245527 - DNA, 30 bp, Artificial Sequence
  Synthetic oligonucleotide
tgcaaactcactccaacagtaatttattaa

SEQ ID NO: 245528 - DNA, 30 bp, Artificial Sequence
  Synthetic oligonucleotide
gccctgagtgataagctgccggtttattaa

SEQ ID NO: 245529 - DNA, 30 bp, Artificial Sequence
  Synthetic oligonucleotide
tgatgcacggtctgcaatatgtaaacttaa

SEQ ID NO: 245530 - DNA, 30 bp, Artificial Sequence
  Synthetic oligonucleotide
tcacggctctacgcaaagggcgcaacttaa

SEQ ID NO: 245531 - DNA, 30 bp, Artificial Sequence
  Synthetic oligonucleotide
catccagtggggtcgggcaactgaacttaa

SEQ ID NO: 245532 - DNA, 30 bp, Artificial Sequence
  Synthetic oligonucleotide
ttatggatttctccacattcgtgcacttaa

SEQ ID NO: 245533 - DNA, 30 bp, Artificial Sequence
  Synthetic oligonucleotide
ttccttgagccaggtaaagttcagacttaa

SEQ ID NO: 245534 - DNA, 29 bp, Artificial Sequence
  Synthetic oligonucleotide
taccatgttagtttaggcgagtgacttaa

SEQ ID NO: 245535 - DNA, 30 bp, Artificial Sequence
  Synthetic oligonucleotide
ttgcatcgagttagatttgaagctacttaa

SEQ ID NO: 245536 - DNA, 30 bp, Artificial Sequence
  Synthetic oligonucleotide
cacggttcatgggggaaggagtcggcttaa

SEQ ID NO: 245537 - DNA, 30 bp, Artificial Sequence
  Synthetic oligonucleotide
tcagggcacttggcataatcctgggcttaa

SEQ ID NO: 245538 - DNA, 30 bp, Artificial Sequence
  Synthetic oligonucleotide
ttgaacagaaccctcagtcaaatatcttaa

SEQ ID NO: 245539 - DNA, 30 bp, Artificial Sequence
  Synthetic oligonucleotide
aatgtctggactgtgtggggtgtctcttaa

SEQ ID NO: 245540 - DNA, 30 bp, Artificial Sequence
  Synthetic oligonucleotide
caaacgcaaccttcgggaggacagtcttaa

SEQ ID NO: 245541 - DNA, 30 bp, Artificial Sequence
  Synthetic oligonucleotide
ctctactaatgtggtactaggtggtcttaa

SEQ ID NO: 245542 - DNA, 30 bp, Artificial Sequence
  Synthetic oligonucleotide
ggcgagggctcgtggtaagcgttttcttaa

SEQ ID NO: 245543 - DNA, 30 bp, Artificial Sequence
  Synthetic oligonucleotide
cctacgccgagggctatgtgtataagttaa

SEQ ID NO: 245544 - DNA, 30 bp, Artificial Sequence
  Synthetic oligonucleotide
ttcggacacacatcccacaatttcagttaa

SEQ ID NO: 245545 - DNA, 30 bp, Artificial Sequence
  Synthetic oligonucleotide
atgggaatttacaaaagcaatcagagttaa

SEQ ID NO: 245546 - DNA, 30 bp, Artificial Sequence
  Synthetic oligonucleotide
gcgagaggcgcccatgtagacgcgagttaa

SEQ ID NO: 245547 - DNA, 30 bp, Artificial Sequence
  Synthetic oligonucleotide
cacgatagaccgcgtttatctggtagttaa

SEQ ID NO: 245548 - DNA, 30 bp, Artificial Sequence
  Synthetic oligonucleotide
ttaacgtggggtaccagctacgttagttaa

SEQ ID NO: 245549 - DNA, 30 bp, Artificial Sequence
  Synthetic oligonucleotide
gtgaatcggtccaaccccgacgaacgttaa

SEQ ID NO: 245550 - DNA, 30 bp, Artificial Sequence
  Synthetic oligonucleotide
tgtgtatttgacttcccgaacagacgttaa

SEQ ID NO: 245551 - DNA, 30 bp, Artificial Sequence
  Synthetic oligonucleotide
caaatttacgtgatcctgcttccccgttaa

SEQ ID NO: 245552 - DNA, 30 bp, Artificial Sequence
  Synthetic oligonucleotide
agtaccagcatgacaaatagagagcgttaa

SEQ ID NO: 245553 - DNA, 30 bp, Artificial Sequence
  Synthetic oligonucleotide
ttcgccaccgaaaagcaaattcacggttaa

SEQ ID NO: 245554 - DNA, 30 bp, Artificial Sequence
  Synthetic oligonucleotide
ttgtaatttccgctctcgtcggacggttaa

SEQ ID NO: 245555 - DNA, 30 bp, Artificial Sequence
  Synthetic oligonucleotide
gcaaggcggttgtcagtcacgatgggttaa

SEQ ID NO: 245556 - DNA, 30 bp, Artificial Sequence
  Synthetic oligonucleotide
ggcttggtaaaagatgagttttctggttaa

SEQ ID NO: 245557 - DNA, 30 bp, Artificial Sequence
  Synthetic oligonucleotide
ggacctgaaaggaatccactgttgtgttaa

SEQ ID NO: 245558 - DNA, 30 bp, Artificial Sequence
  Synthetic oligonucleotide
cgtaaataagtgagccgtacttaaatttaa

SEQ ID NO: 245559 - DNA, 30 bp, Artificial Sequence
  Synthetic oligonucleotide
ttaccagccgtccgacaatagagaatttaa

SEQ ID NO: 245560 - DNA, 30 bp, Artificial Sequence
  Synthetic oligonucleotide
gctaagggcggactccggatgttcatttaa

SEQ ID NO: 245561 - DNA, 30 bp, Artificial Sequence
  Synthetic oligonucleotide
ggagtgtaaaaggcaaatgatgcgatttaa

SEQ ID NO: 245562 - DNA, 30 bp, Artificial Sequence
  Synthetic oligonucleotide
tcaggccgacaatgaggagtctggatttaa

SEQ ID NO: 245563 - DNA, 30 bp, Artificial Sequence
  Synthetic oligonucleotide
tgacctttggctcgggtgtacctactttaa

SEQ ID NO: 245564 - DNA, 30 bp, Artificial Sequence
  Synthetic oligonucleotide
tgacggaggatgagtggtcaaatcctttaa

SEQ ID NO: 245565 - DNA, 30 bp, Artificial Sequence
  Synthetic oligonucleotide
cggctcggatcgtgtgatgcccggctttaa

SEQ ID NO: 245566 - DNA, 30 bp, Artificial Sequence
  Synthetic oligonucleotide
gaggtaaggaggtgacaatcaattctttaa

SEQ ID NO: 245567 - DNA, 30 bp, Artificial Sequence
  Synthetic oligonucleotide
taatacggacattcttaatagattctttaa

SEQ ID NO: 245568 - DNA, 30 bp, Artificial Sequence
  Synthetic oligonucleotide
tttcgtccatcgagcacttgccgagtttaa

SEQ ID NO: 245569 - DNA, 30 bp, Artificial Sequence
  Synthetic oligonucleotide
ttgtgaccatacaggtaaattaccgtttaa

SEQ ID NO: 245570 - DNA, 30 bp, Artificial Sequence
  Synthetic oligonucleotide
cgttagttttcgctcatactatcggtttaa

SEQ ID NO: 245571 - DNA, 30 bp, Artificial Sequence
  Synthetic oligonucleotide
cccgattcgaaaaggtacaccagggtttaa

SEQ ID NO: 245572 - DNA, 30 bp, Artificial Sequence
  Synthetic oligonucleotide
atgggtaaacttcattactgaatggtttaa

SEQ ID NO: 245573 - DNA, 30 bp, Artificial Sequence
  Synthetic oligonucleotide
gaggttcagcgaacacaatgtgtggtttaa

SEQ ID NO: 245574 - DNA, 30 bp, Artificial Sequence
  Synthetic oligonucleotide
ccgcggactgggcttaaagatcgtgtttaa

SEQ ID NO: 245575 - DNA, 30 bp, Artificial Sequence
  Synthetic oligonucleotide
tatcgcataatcagagctgcgacattttaa

SEQ ID NO: 245576 - DNA, 30 bp, Artificial Sequence
  Synthetic oligonucleotide
cgtatagcagctgtcagtaaaagattttaa

SEQ ID NO: 245577 - DNA, 30 bp, Artificial Sequence
  Synthetic oligonucleotide
agagatcatcacgatgttcgggacttttaa

SEQ ID NO: 245578 - DNA, 30 bp, Artificial Sequence
  Synthetic oligonucleotide
gacacaggacaatagtgtaacggcttttaa

SEQ ID NO: 245579 - DNA, 30 bp, Artificial Sequence
  Synthetic oligonucleotide
gtatcggccctggaaactcaaatcttttaa

SEQ ID NO: 245580 - DNA, 30 bp, Artificial Sequence
  Synthetic oligonucleotide
ccatatagccggcgggataggtcaaaaaca

SEQ ID NO: 245581 - DNA, 30 bp, Artificial Sequence
  Synthetic oligonucleotide
atgtgatacatacagggatgcataaaaaca

SEQ ID NO: 245582 - DNA, 30 bp, Artificial Sequence
  Synthetic oligonucleotide
tagcgtttaactccaatgctctacaaaaca

SEQ ID NO: 245583 - DNA, 30 bp, Artificial Sequence
  Synthetic oligonucleotide
acctggacaacgagacaccgagagaaaaca

SEQ ID NO: 245584 - DNA, 30 bp, Artificial Sequence
  Synthetic oligonucleotide
gggcggcgtttaaaagacaaatataaaaca

SEQ ID NO: 245585 - DNA, 30 bp, Artificial Sequence
  Synthetic oligonucleotide
gagttcgtgtaagcggactgctaacaaaca

SEQ ID NO: 245586 - DNA, 30 bp, Artificial Sequence
  Synthetic oligonucleotide
tggaaacattgttatagtgagatacaaaca

SEQ ID NO: 245587 - DNA, 30 bp, Artificial Sequence
  Synthetic oligonucleotide
actagttcattcgagaaaggaccccaaaca

SEQ ID NO: 245588 - DNA, 30 bp, Artificial Sequence
  Synthetic oligonucleotide
tgtaacgtgtaccacgacgccaagcaaaca

SEQ ID NO: 245589 - DNA, 30 bp, Artificial Sequence
  Synthetic oligonucleotide
tcgaagccgagccatcggcaatggcaaaca

SEQ ID NO: 245590 - DNA, 30 bp, Artificial Sequence
  Synthetic oligonucleotide
gtccggttctgggcgaagcgcagtcaaaca

SEQ ID NO: 245591 - DNA, 30 bp, Artificial Sequence
  Synthetic oligonucleotide
actcggtgttgaaatctagtgaaagaaaca

SEQ ID NO: 245592 - DNA, 30 bp, Artificial Sequence
  Synthetic oligonucleotide
tctcggctcacggttggtagcgaagaaaca

SEQ ID NO: 245593 - DNA, 30 bp, Artificial Sequence
  Synthetic oligonucleotide
gctccggcctcgatcccctatgaagaaaca

SEQ ID NO: 245594 - DNA, 30 bp, Artificial Sequence
  Synthetic oligonucleotide
cggtttctaacttatatgtgcccagaaaca

SEQ ID NO: 245595 - DNA, 30 bp, Artificial Sequence
  Synthetic oligonucleotide
ggcttggctatctcgttaacacgggaaaca

SEQ ID NO: 245596 - DNA, 30 bp, Artificial Sequence
  Synthetic oligonucleotide
ttcagttagagtgtacaacgctgggaaaca

SEQ ID NO: 245597 - DNA, 30 bp, Artificial Sequence
  Synthetic oligonucleotide
ttatggcgtcgttagtggtttaatgaaaca

SEQ ID NO: 245598 - DNA, 30 bp, Artificial Sequence
  Synthetic oligonucleotide
gtatttaagagaagccgaccatgtgaaaca

SEQ ID NO: 245599 - DNA, 30 bp, Artificial Sequence
  Synthetic oligonucleotide
tttgtatgcaaaggaagccatcaataaaca

SEQ ID NO: 245600 - DNA, 30 bp, Artificial Sequence
  Synthetic oligonucleotide
cttccagtagattgtcgtgggcactaaaca

SEQ ID NO: 245601 - DNA, 30 bp, Artificial Sequence
  Synthetic oligonucleotide
cttgtggtcggctacacgcgtgagtaaaca

SEQ ID NO: 245602 - DNA, 30 bp, Artificial Sequence
  Synthetic oligonucleotide
cccgtataggtcagcaatgaaaggtaaaca

SEQ ID NO: 245603 - DNA, 30 bp, Artificial Sequence
  Synthetic oligonucleotide
gacgaccatcttttagggtcgtggtaaaca

SEQ ID NO: 245604 - DNA, 30 bp, Artificial Sequence
  Synthetic oligonucleotide
ccgggggtcaattggggccagcaaacaaca

SEQ ID NO: 245605 - DNA, 30 bp, Artificial Sequence
  Synthetic oligonucleotide
gcagaggcccaggggctatttagaacaaca

SEQ ID NO: 245606 - DNA, 30 bp, Artificial Sequence
  Synthetic oligonucleotide
tctatgccgagggcagtaagggtaacaaca

SEQ ID NO: 245607 - DNA, 30 bp, Artificial Sequence
  Synthetic oligonucleotide
atacataccagaattaccggttgcacaaca

SEQ ID NO: 245608 - DNA, 30 bp, Artificial Sequence
  Synthetic oligonucleotide
ggattcagtcggcctgtgcgggcgacaaca

SEQ ID NO: 245609 - DNA, 30 bp, Artificial Sequence
  Synthetic oligonucleotide
tggtggcaacagtgctattcttcgacaaca

SEQ ID NO: 245610 - DNA, 30 bp, Artificial Sequence
  Synthetic oligonucleotide
gtacggacgtgccctctggcgactacaaca

SEQ ID NO: 245611 - DNA, 30 bp, Artificial Sequence
  Synthetic oligonucleotide
tccgctcctgggccaccgaaggaaccaaca

SEQ ID NO: 245612 - DNA, 30 bp, Artificial Sequence
  Synthetic oligonucleotide
tagaccatgatggcaaagaattagccaaca

SEQ ID NO: 245613 - DNA, 30 bp, Artificial Sequence
  Synthetic oligonucleotide
aaggcggttccacacgcgattgggccaaca

SEQ ID NO: 245614 - DNA, 30 bp, Artificial Sequence
  Synthetic oligonucleotide
tccgagcgattgtatggttattaagcaaca

SEQ ID NO: 245615 - DNA, 30 bp, Artificial Sequence
  Synthetic oligonucleotide
gcggccccaaactgaacacatgtagcaaca

SEQ ID NO: 245616 - DNA, 30 bp, Artificial Sequence
  Synthetic oligonucleotide
cattcataaagcacttaacagatcgcaaca

SEQ ID NO: 245617 - DNA, 30 bp, Artificial Sequence
  Synthetic oligonucleotide
gcagtcaggtcgaggtttgtaaaggcaaca

SEQ ID NO: 245618 - DNA, 30 bp, Artificial Sequence
  Synthetic oligonucleotide
gcttttctcctacggaacacaacggcaaca

SEQ ID NO: 245619 - DNA, 29 bp, Artificial Sequence
  Synthetic oligonucleotide
gctctctgacgtggcgtagcggatcaaca

SEQ ID NO: 245620 - DNA, 30 bp, Artificial Sequence
  Synthetic oligonucleotide
ctagaagagggcaaaagttagttatcaaca

SEQ ID NO: 245621 - DNA, 30 bp, Artificial Sequence
  Synthetic oligonucleotide
cagtacggcgccggaaatagtatctcaaca

SEQ ID NO: 245622 - DNA, 30 bp, Artificial Sequence
  Synthetic oligonucleotide
atggtcttatttaagatggtccagtcaaca

SEQ ID NO: 245623 - DNA, 30 bp, Artificial Sequence
  Synthetic oligonucleotide
acttaaatccagctatgaaatacgtcaaca

SEQ ID NO: 245624 - DNA, 30 bp, Artificial Sequence
  Synthetic oligonucleotide
acgactgcgtcgggccttacatcgtcaaca

SEQ ID NO: 245625 - DNA, 30 bp, Artificial Sequence
  Synthetic oligonucleotide
atgtatgcggacaccgcaaataattcaaca

SEQ ID NO: 245626 - DNA, 30 bp, Artificial Sequence
  Synthetic oligonucleotide
aggtttctcgctgtataagacacaagaaca

SEQ ID NO: 245627 - DNA, 30 bp, Artificial Sequence
  Synthetic oligonucleotide
tgtggcccggtatcggagtgtataagaaca

SEQ ID NO: 245628 - DNA, 30 bp, Artificial Sequence
  Synthetic oligonucleotide
aaaacgccaaacatgtcacgacacagaaca

SEQ ID NO: 245629 - DNA, 30 bp, Artificial Sequence
  Synthetic oligonucleotide
ctgggacccgcatgtatgctagtgagaaca

SEQ ID NO: 245630 - DNA, 30 bp, Artificial Sequence
  Synthetic oligonucleotide
tatattcggcagatcaccatatgtagaaca

SEQ ID NO: 245631 - DNA, 30 bp, Artificial Sequence
  Synthetic oligonucleotide
gttataagctgcaagacgacctaacgaaca

SEQ ID NO: 245632 - DNA, 30 bp, Artificial Sequence
  Synthetic oligonucleotide
ccactccagtgccaatggggtggacgaaca

SEQ ID NO: 245633 - DNA, 30 bp, Artificial Sequence
  Synthetic oligonucleotide
gtagatcccaagtgattaagccggcgaaca

SEQ ID NO: 245634 - DNA, 30 bp, Artificial Sequence
  Synthetic oligonucleotide
tattgtacgatcccaagcgccatgcgaaca

SEQ ID NO: 245635 - DNA, 30 bp, Artificial Sequence
  Synthetic oligonucleotide
aggtatcacggttagcagatgcccggaaca

SEQ ID NO: 245636 - DNA, 30 bp, Artificial Sequence
  Synthetic oligonucleotide
cattttaagcctttttgcagctgcggaaca

SEQ ID NO: 245637 - DNA, 30 bp, Artificial Sequence
  Synthetic oligonucleotide
ctggtggccgaggttgagtaggtcggaaca

SEQ ID NO: 245638 - DNA, 30 bp, Artificial Sequence
  Synthetic oligonucleotide
ggacggagtaccgggcctgaagggggaaca

SEQ ID NO: 245639 - DNA, 30 bp, Artificial Sequence
  Synthetic oligonucleotide
gtctaagactttattcaatgacatggaaca

SEQ ID NO: 245640 - DNA, 30 bp, Artificial Sequence
  Synthetic oligonucleotide
tccggtggtgtggcccgcatgtcatgaaca

SEQ ID NO: 245641 - DNA, 30 bp, Artificial Sequence
  Synthetic oligonucleotide
aggcggggattcaatatgctattatgaaca

SEQ ID NO: 245642 - DNA, 30 bp, Artificial Sequence
  Synthetic oligonucleotide
gattataccgtaataatggagaactgaaca

SEQ ID NO: 245643 - DNA, 30 bp, Artificial Sequence
  Synthetic oligonucleotide
cgcagagtcgtaccgatcgtatactgaaca

SEQ ID NO: 245644 - DNA, 30 bp, Artificial Sequence
  Synthetic oligonucleotide
gataataggtcgcgagcgtcatcctgaaca

SEQ ID NO: 245645 - DNA, 30 bp, Artificial Sequence
  Synthetic oligonucleotide
tcgggtgactctagagatataacgtgaaca

SEQ ID NO: 245646 - DNA, 30 bp, Artificial Sequence
  Synthetic oligonucleotide
gaggaaaaagtccttagtggcacgtgaaca

SEQ ID NO: 245647 - DNA, 30 bp, Artificial Sequence
  Synthetic oligonucleotide
agacctgtcgaggtaccgcttctttgaaca

SEQ ID NO: 245648 - DNA, 31 bp, Artificial Sequence
  Synthetic oligonucleotide
tgttatgagattattgctgctggaaataaca

SEQ ID NO: 245649 - DNA, 30 bp, Artificial Sequence
  Synthetic oligonucleotide
cggagtgtggtggggaatgacgcaataaca

SEQ ID NO: 245650 - DNA, 30 bp, Artificial Sequence
  Synthetic oligonucleotide
ggccccccgagttgagccggtgcaataaca

SEQ ID NO: 245651 - DNA, 30 bp, Artificial Sequence
  Synthetic oligonucleotide
gcttgcgtatagcgtgtcatatggctaaca

SEQ ID NO: 245652 - DNA, 30 bp, Artificial Sequence
  Synthetic oligonucleotide
ggcagctagactgaagattgtggtctaaca

SEQ ID NO: 245653 - DNA, 30 bp, Artificial Sequence
  Synthetic oligonucleotide
ttgactcggtcgcgcatgcgtagagtaaca

SEQ ID NO: 245654 - DNA, 30 bp, Artificial Sequence
  Synthetic oligonucleotide
agagtataggatgtaagaagaggcgtaaca

SEQ ID NO: 245655 - DNA, 30 bp, Artificial Sequence
  Synthetic oligonucleotide
tgccagcgtctgagtgtcaggaaggtaaca

SEQ ID NO: 245656 - DNA, 30 bp, Artificial Sequence
  Synthetic oligonucleotide
gcagcagtcggaacttagatacaggtaaca

SEQ ID NO: 245657 - DNA, 30 bp, Artificial Sequence
  Synthetic oligonucleotide
tgactgataaaatgacttaagacggtaaca

SEQ ID NO: 245658 - DNA, 30 bp, Artificial Sequence
  Synthetic oligonucleotide
tccacagtcggattcgcgggatgggtaaca

SEQ ID NO: 245659 - DNA, 30 bp, Artificial Sequence
  Synthetic oligonucleotide
gctaatagccatggacgtaaaggtgtaaca

SEQ ID NO: 245660 - DNA, 30 bp, Artificial Sequence
  Synthetic oligonucleotide
attcgtagacggattggcctgggtgtaaca

SEQ ID NO: 245661 - DNA, 30 bp, Artificial Sequence
  Synthetic oligonucleotide
cgtgggcattcgtgcgcctgctccttaaca

SEQ ID NO: 245662 - DNA, 30 bp, Artificial Sequence
  Synthetic oligonucleotide
cttgcttaaattggccgggcttccttaaca

SEQ ID NO: 245663 - DNA, 30 bp, Artificial Sequence
  Synthetic oligonucleotide
ggacactactctagtggtttatcgttaaca

SEQ ID NO: 245664 - DNA, 30 bp, Artificial Sequence
  Synthetic oligonucleotide
actcccccgtggctatataatgggttaaca

SEQ ID NO: 245665 - DNA, 30 bp, Artificial Sequence
  Synthetic oligonucleotide
atgctgcctgctgttcgatgggaaaacaca

SEQ ID NO: 245666 - DNA, 30 bp, Artificial Sequence
  Synthetic oligonucleotide
ggtatgctaccgagcttcaaatggaacaca

SEQ ID NO: 245667 - DNA, 30 bp, Artificial Sequence
  Synthetic oligonucleotide
ggcttcttgcgattatgcgatctgaacaca

SEQ ID NO: 245668 - DNA, 30 bp, Artificial Sequence
  Synthetic oligonucleotide
tgtgtaaggatctacggaggaggtaacaca

SEQ ID NO: 245669 - DNA, 30 bp, Artificial Sequence
  Synthetic oligonucleotide
tagaggtcttaggaacagtcgcaacacaca

SEQ ID NO: 245670 - DNA, 30 bp, Artificial Sequence
  Synthetic oligonucleotide
tgcagaaaaccgacgcgttccccacacaca

SEQ ID NO: 245671 - DNA, 30 bp, Artificial Sequence
  Synthetic oligonucleotide
agagatatgtgctaggagcaataccacaca

SEQ ID NO: 245672 - DNA, 30 bp, Artificial Sequence
  Synthetic oligonucleotide
tttgttgttgtcggttcgcctaggcacaca

SEQ ID NO: 245673 - DNA, 29 bp, Artificial Sequence
  Synthetic oligonucleotide
acgtaatgggccgcttgcctatgcacaca

SEQ ID NO: 245674 - DNA, 30 bp, Artificial Sequence
  Synthetic oligonucleotide
gagttggcacaaaacataatcactcacaca

SEQ ID NO: 245675 - DNA, 30 bp, Artificial Sequence
  Synthetic oligonucleotide
ttgttgcagtgtttatctaagcttcacaca

SEQ ID NO: 245676 - DNA, 30 bp, Artificial Sequence
  Synthetic oligonucleotide
agaatacgcgacagccaatgggaagacaca

SEQ ID NO: 245677 - DNA, 30 bp, Artificial Sequence
  Synthetic oligonucleotide
agagtgttgaaaggctacggaaccgacaca

SEQ ID NO: 245678 - DNA, 30 bp, Artificial Sequence
  Synthetic oligonucleotide
gggctgggatgagcgtggaggaccgacaca

SEQ ID NO: 245679 - DNA, 30 bp, Artificial Sequence
  Synthetic oligonucleotide
atggagacattcggaatgttgcccgacaca

SEQ ID NO: 245680 - DNA, 30 bp, Artificial Sequence
  Synthetic oligonucleotide
taagcttcatttgggcaagcgatctacaca

SEQ ID NO: 245681 - DNA, 30 bp, Artificial Sequence
  Synthetic oligonucleotide
gccgaagagtccgagttggttatctacaca

SEQ ID NO: 245682 - DNA, 30 bp, Artificial Sequence
  Synthetic oligonucleotide
cgttgtttagtaagacacaaatagaccaca

SEQ ID NO: 245683 - DNA, 30 bp, Artificial Sequence
  Synthetic oligonucleotide
ggtgcggcagtttagcgtatgtggaccaca

SEQ ID NO: 245684 - DNA, 30 bp, Artificial Sequence
  Synthetic oligonucleotide
gggtgaaagttcccgagtccacataccaca

SEQ ID NO: 245685 - DNA, 30 bp, Artificial Sequence
  Synthetic oligonucleotide
aactcccatttttttctaagtgataccaca

SEQ ID NO: 245686 - DNA, 30 bp, Artificial Sequence
  Synthetic oligonucleotide
cggataatgcgaatggctaaacaacccaca

SEQ ID NO: 245687 - DNA, 30 bp, Artificial Sequence
  Synthetic oligonucleotide
gataatgtgttcgttaatacgacacccaca

SEQ ID NO: 245688 - DNA, 25 bp, Artificial Sequence
  Synthetic oligonucleotide
cgtggaagtttacaatctgcccaca

SEQ ID NO: 245689 - DNA, 30 bp, Artificial Sequence
  Synthetic oligonucleotide
ccaacagagcttccgcaagatctgcccaca

SEQ ID NO: 245690 - DNA, 30 bp, Artificial Sequence
  Synthetic oligonucleotide
atcacgtccttggcgcattcaatcgccaca

SEQ ID NO: 245691 - DNA, 30 bp, Artificial Sequence
  Synthetic oligonucleotide
gaccatctatagactaaaattatcgccaca

SEQ ID NO: 245692 - DNA, 30 bp, Artificial Sequence
  Synthetic oligonucleotide
cgggcgctatagatggttcgaacatccaca

SEQ ID NO: 245693 - DNA, 30 bp, Artificial Sequence
  Synthetic oligonucleotide
cgtgaactcgagtggatgaagctatccaca

SEQ ID NO: 245694 - DNA, 30 bp, Artificial Sequence
  Synthetic oligonucleotide
attgaggggcgggcatcttcggtctccaca

SEQ ID NO: 245695 - DNA, 30 bp, Artificial Sequence
  Synthetic oligonucleotide
agcagagagaagcggccgcggaagtccaca

SEQ ID NO: 245696 - DNA, 30 bp, Artificial Sequence
  Synthetic oligonucleotide
ggtaacagcgcatgctcgcagacgtccaca

SEQ ID NO: 245697 - DNA, 30 bp, Artificial Sequence
  Synthetic oligonucleotide
ccacattagcgtgcattgggagggtccaca

SEQ ID NO: 245698 - DNA, 30 bp, Artificial Sequence
  Synthetic oligonucleotide
caagtcgcgaagttccgggcttggtccaca

SEQ ID NO: 245699 - DNA, 30 bp, Artificial Sequence
  Synthetic oligonucleotide
cgaatgctgcgtcgtcttgggttgtccaca

SEQ ID NO: 245700 - DNA, 30 bp, Artificial Sequence
  Synthetic oligonucleotide
cgaacattctagaagctaccgttttccaca

SEQ ID NO: 245701 - DNA, 30 bp, Artificial Sequence
  Synthetic oligonucleotide
ctgaactttatattagcgagtgtaagcaca

SEQ ID NO: 245702 - DNA, 30 bp, Artificial Sequence
  Synthetic oligonucleotide
aatgcccactcagagatgcataacagcaca

SEQ ID NO: 245703 - DNA, 30 bp, Artificial Sequence
  Synthetic oligonucleotide
accgttgcacttacggtcgccctcagcaca

SEQ ID NO: 245704 - DNA, 30 bp, Artificial Sequence
  Synthetic oligonucleotide
caattgccaggaggcacaaccatccgcaca

SEQ ID NO: 245705 - DNA, 30 bp, Artificial Sequence
  Synthetic oligonucleotide
tgtccatttcatgcatgggagatccgcaca

SEQ ID NO: 245706 - DNA, 30 bp, Artificial Sequence
  Synthetic oligonucleotide
ggctgtgagagggtcgtcagatagcgcaca

SEQ ID NO: 245707 - DNA, 30 bp, Artificial Sequence
  Synthetic oligonucleotide
gagatgcgtccagggtgcgactagcgcaca

SEQ ID NO: 245708 - DNA, 30 bp, Artificial Sequence
  Synthetic oligonucleotide
catccattcgcagtgttaggggtgcgcaca

SEQ ID NO: 245709 - DNA, 30 bp, Artificial Sequence
  Synthetic oligonucleotide
tattgctcagtcggatggttcggcggcaca

SEQ ID NO: 245710 - DNA, 30 bp, Artificial Sequence
  Synthetic oligonucleotide
agtaggcgcacaatagcggaggcgggcaca

SEQ ID NO: 245711 - DNA, 30 bp, Artificial Sequence
  Synthetic oligonucleotide
cccagtgagcaaaatactggtatgggcaca

SEQ ID NO: 245712 - DNA, 30 bp, Artificial Sequence
  Synthetic oligonucleotide
tgttgcggcaggacggtctggttgggcaca

SEQ ID NO: 245713 - DNA, 30 bp, Artificial Sequence
  Synthetic oligonucleotide
atggccctggacgcgagaatcgttggcaca

SEQ ID NO: 245714 - DNA, 30 bp, Artificial Sequence
  Synthetic oligonucleotide
tgcgtatctcaaacatgggcaaaatgcaca

SEQ ID NO: 245715 - DNA, 30 bp, Artificial Sequence
  Synthetic oligonucleotide
caatgtgctgtaccgcgcgtgtaatgcaca

SEQ ID NO: 245716 - DNA, 30 bp, Artificial Sequence
  Synthetic oligonucleotide
tcattcaagacggccaaggtggtatgcaca

SEQ ID NO: 245717 - DNA, 30 bp, Artificial Sequence
  Synthetic oligonucleotide
agtgtcggcacagaagaatgcaactgcaca

SEQ ID NO: 245718 - DNA, 30 bp, Artificial Sequence
  Synthetic oligonucleotide
attatcggaacacctgacctgctgtgcaca

SEQ ID NO: 245719 - DNA, 30 bp, Artificial Sequence
  Synthetic oligonucleotide
ttacgatcctggtaggtcggacgttgcaca

SEQ ID NO: 245720 - DNA, 30 bp, Artificial Sequence
  Synthetic oligonucleotide
gatcgcgtactgctcgcaaagaaaatcaca

SEQ ID NO: 245721 - DNA, 30 bp, Artificial Sequence
  Synthetic oligonucleotide
atatgtgccgctgcggaaaaattaatcaca

SEQ ID NO: 245722 - DNA, 30 bp, Artificial Sequence
  Synthetic oligonucleotide
atgggatggagtagttcttgtttcatcaca

SEQ ID NO: 245723 - DNA, 30 bp, Artificial Sequence
  Synthetic oligonucleotide
cacggagcgtaactctatagtggactcaca

SEQ ID NO: 245724 - DNA, 30 bp, Artificial Sequence
  Synthetic oligonucleotide
tggtatgattagagatatgaatgactcaca

SEQ ID NO: 245725 - DNA, 30 bp, Artificial Sequence
  Synthetic oligonucleotide
ttccgaaaagactgccgatctgtactcaca

SEQ ID NO: 245726 - DNA, 30 bp, Artificial Sequence
  Synthetic oligonucleotide
atagccagtcttgttagcggatctctcaca

SEQ ID NO: 245727 - DNA, 30 bp, Artificial Sequence
  Synthetic oligonucleotide
aaaatcgtgcacatccggaccagagtcaca

SEQ ID NO: 245728 - DNA, 30 bp, Artificial Sequence
  Synthetic oligonucleotide
gcgacagcattgtttgttaacaccgtcaca

SEQ ID NO: 245729 - DNA, 30 bp, Artificial Sequence
  Synthetic oligonucleotide
ggcttaatacccatcaggggcaaggtcaca

SEQ ID NO: 245730 - DNA, 30 bp, Artificial Sequence
  Synthetic oligonucleotide
ttggttcccacgcaaaagtatcgggtcaca

SEQ ID NO: 245731 - DNA, 30 bp, Artificial Sequence
  Synthetic oligonucleotide
cttgaaacgcatcttggaagacttgtcaca

SEQ ID NO: 245732 - DNA, 30 bp, Artificial Sequence
  Synthetic oligonucleotide
atccctatttgtgaacgtaccatattcaca

SEQ ID NO: 245733 - DNA, 30 bp, Artificial Sequence
  Synthetic oligonucleotide
taaacctgaaatcacaggagtatattcaca

SEQ ID NO: 245734 - DNA, 30 bp, Artificial Sequence
  Synthetic oligonucleotide
gagctgaggtccccagaggcgaacttcaca

SEQ ID NO: 245735 - DNA, 31 bp, Artificial Sequence
  Synthetic oligonucleotide
tgcgcgacatgccggtactgctacgttcaca

SEQ ID NO: 245736 - DNA, 30 bp, Artificial Sequence
  Synthetic oligonucleotide
tcatgtaggattccatataggcgaaagaca

SEQ ID NO: 245737 - DNA, 30 bp, Artificial Sequence
  Synthetic oligonucleotide
acgcgagcgcggtccgacgccggaaagaca

SEQ ID NO: 245738 - DNA, 30 bp, Artificial Sequence
  Synthetic oligonucleotide
aaagaggggacgactcaaactaacaagaca

SEQ ID NO: 245739 - DNA, 30 bp, Artificial Sequence
  Synthetic oligonucleotide
agtcctaactctacatatcgctataagaca

SEQ ID NO: 245740 - DNA, 29 bp, Artificial Sequence
  Synthetic oligonucleotide
taagtgactcgagtgtagaaaaacagaca

SEQ ID NO: 245741 - DNA, 30 bp, Artificial Sequence
  Synthetic oligonucleotide
ggcctttgtaagatcatctgaggacagaca

SEQ ID NO: 245742 - DNA, 30 bp, Artificial Sequence
  Synthetic oligonucleotide
cgttaggcttgtactgttcttacccagaca

SEQ ID NO: 245743 - DNA, 30 bp, Artificial Sequence
  Synthetic oligonucleotide
gtggagttcatacacgcggaggcccagaca

SEQ ID NO: 245744 - DNA, 30 bp, Artificial Sequence
  Synthetic oligonucleotide
gccattccacttagtctcttactccagaca

SEQ ID NO: 245745 - DNA, 30 bp, Artificial Sequence
  Synthetic oligonucleotide
cacggctttttacactcgggtcatcagaca

SEQ ID NO: 245746 - DNA, 30 bp, Artificial Sequence
  Synthetic oligonucleotide
cgctatcgtgaaccgagctgatttcagaca

SEQ ID NO: 245747 - DNA, 30 bp, Artificial Sequence
  Synthetic oligonucleotide
caagatgggggtggagcactctaagagaca

SEQ ID NO: 245748 - DNA, 31 bp, Artificial Sequence
  Synthetic oligonucleotide
gtcggctctgataagaaatcttagagagaca

SEQ ID NO: 245749 - DNA, 30 bp, Artificial Sequence
  Synthetic oligonucleotide
gtacgaagttaccgctcagatttagagaca

SEQ ID NO: 245750 - DNA, 30 bp, Artificial Sequence
  Synthetic oligonucleotide
atttataaaacgactggggtgaacgagaca

SEQ ID NO: 245751 - DNA, 30 bp, Artificial Sequence
  Synthetic oligonucleotide
tcattttcatatcgcaagccgaccgagaca

SEQ ID NO: 245752 - DNA, 30 bp, Artificial Sequence
  Synthetic oligonucleotide
tgcaagaacttacgtgtagttctcgagaca

SEQ ID NO: 245753 - DNA, 30 bp, Artificial Sequence
  Synthetic oligonucleotide
tgtgtatacgagatgatattataggagaca

SEQ ID NO: 245754 - DNA, 30 bp, Artificial Sequence
  Synthetic oligonucleotide
tatggaaacagtgttgaagagaaatagaca

SEQ ID NO: 245755 - DNA, 30 bp, Artificial Sequence
  Synthetic oligonucleotide
ggaaagcaaaactcgtccgcggactagaca

SEQ ID NO: 245756 - DNA, 30 bp, Artificial Sequence
  Synthetic oligonucleotide
caacgtacccaggcgtaatgcttctagaca

SEQ ID NO: 245757 - DNA, 30 bp, Artificial Sequence
  Synthetic oligonucleotide
gacgagtcatgctatccgaacaagtagaca

SEQ ID NO: 245758 - DNA, 30 bp, Artificial Sequence
  Synthetic oligonucleotide
tagtcaacagagtaatcgattccgtagaca

SEQ ID NO: 245759 - DNA, 30 bp, Artificial Sequence
  Synthetic oligonucleotide
tgtacaaggcttcgttcttactattagaca

SEQ ID NO: 245760 - DNA, 30 bp, Artificial Sequence
  Synthetic oligonucleotide
aatgccacccttgcgttcagtgtttagaca

SEQ ID NO: 245761 - DNA, 30 bp, Artificial Sequence
  Synthetic oligonucleotide
atactcccgaagaaaactgtgtaaacgaca

SEQ ID NO: 245762 - DNA, 30 bp, Artificial Sequence
  Synthetic oligonucleotide
ccaaaatagggtttgttgtggctaacgaca

SEQ ID NO: 245763 - DNA, 30 bp, Artificial Sequence
  Synthetic oligonucleotide
aatcgaatatccgcttcacgggttacgaca

SEQ ID NO: 245764 - DNA, 30 bp, Artificial Sequence
  Synthetic oligonucleotide
ctcaggatacataatccgtgatcaccgaca

SEQ ID NO: 245765 - DNA, 30 bp, Artificial Sequence
  Synthetic oligonucleotide
atcggcctaatcccgggaaatgtgccgaca

SEQ ID NO: 245766 - DNA, 30 bp, Artificial Sequence
  Synthetic oligonucleotide
tgcggtccgcgctaagggcccatagcgaca

SEQ ID NO: 245767 - DNA, 30 bp, Artificial Sequence
  Synthetic oligonucleotide
taccaggatttgagatggtgcttagcgaca

SEQ ID NO: 245768 - DNA, 30 bp, Artificial Sequence
  Synthetic oligonucleotide
aagcggatgcaccctgattttaaggcgaca

SEQ ID NO: 245769 - DNA, 30 bp, Artificial Sequence
  Synthetic oligonucleotide
ggcgggcagcatccaaaagacaactcgaca

SEQ ID NO: 245770 - DNA, 30 bp, Artificial Sequence
  Synthetic oligonucleotide
ataccactgggaacccgactaggctcgaca

SEQ ID NO: 245771 - DNA, 30 bp, Artificial Sequence
  Synthetic oligonucleotide
cacacatgcgctgaaccgtgtgtctcgaca

SEQ ID NO: 245772 - DNA, 30 bp, Artificial Sequence
  Synthetic oligonucleotide
gaattcctaaaggtcaagttgtagtcgaca

SEQ ID NO: 245773 - DNA, 30 bp, Artificial Sequence
  Synthetic oligonucleotide
aggactcccgcggacaccctggacaggaca

SEQ ID NO: 245774 - DNA, 30 bp, Artificial Sequence
  Synthetic oligonucleotide
ttaatacctcttccggctgtctcgaggaca

SEQ ID NO: 245775 - DNA, 30 bp, Artificial Sequence
  Synthetic oligonucleotide
aggtcccgtcacaaccattcaatgaggaca

SEQ ID NO: 245776 - DNA, 30 bp, Artificial Sequence
  Synthetic oligonucleotide
ggttttatcctgccgtacacacgacggaca

SEQ ID NO: 245777 - DNA, 30 bp, Artificial Sequence
  Synthetic oligonucleotide
gagcgctacttagaggagcgaacgcggaca

SEQ ID NO: 245778 - DNA, 30 bp, Artificial Sequence
  Synthetic oligonucleotide
accggtacaaccaattgatcctctcggaca

SEQ ID NO: 245779 - DNA, 30 bp, Artificial Sequence
  Synthetic oligonucleotide
gcggttcaagggccagatttacgtcggaca

SEQ ID NO: 245780 - DNA, 30 bp, Artificial Sequence
  Synthetic oligonucleotide
atgaacggtcttctaaagataccagggaca

SEQ ID NO: 245781 - DNA, 30 bp, Artificial Sequence
  Synthetic oligonucleotide
atgcatgcattgatgagtgaattagggaca

SEQ ID NO: 245782 - DNA, 30 bp, Artificial Sequence
  Synthetic oligonucleotide
taatgtgtgcctaacccacggcccgggaca

SEQ ID NO: 245783 - DNA, 30 bp, Artificial Sequence
  Synthetic oligonucleotide
cagaaaattgctacgatatttttcgggaca

SEQ ID NO: 245784 - DNA, 30 bp, Artificial Sequence
  Synthetic oligonucleotide
gccgggagctttcaaacgtgataggggaca

SEQ ID NO: 245785 - DNA, 30 bp, Artificial Sequence
  Synthetic oligonucleotide
ttagggcatagggtttagaaattggggaca

SEQ ID NO: 245786 - DNA, 30 bp, Artificial Sequence
  Synthetic oligonucleotide
tttaactgtcattacagatctggtgggaca

SEQ ID NO: 245787 - DNA, 30 bp, Artificial Sequence
  Synthetic oligonucleotide
aacaacgtacaacttcggccttttgggaca

SEQ ID NO: 245788 - DNA, 30 bp, Artificial Sequence
  Synthetic oligonucleotide
ataacggttcacagtatggttcaatggaca

SEQ ID NO: 245789 - DNA, 30 bp, Artificial Sequence
  Synthetic oligonucleotide
cgacatccagagtctgcgagttaatggaca

SEQ ID NO: 245790 - DNA, 30 bp, Artificial Sequence
  Synthetic oligonucleotide
gggtccgacccttatgctaagttatggaca

SEQ ID NO: 245791 - DNA, 30 bp, Artificial Sequence
  Synthetic oligonucleotide
tctgtgtgtggacagctgcgaatctggaca

SEQ ID NO: 245792 - DNA, 30 bp, Artificial Sequence
  Synthetic oligonucleotide
ggacaatttacggttattgtatagtggaca

SEQ ID NO: 245793 - DNA, 30 bp, Artificial Sequence
  Synthetic oligonucleotide
tatagcttagaagttacgagaatgtggaca

SEQ ID NO: 245794 - DNA, 30 bp, Artificial Sequence
  Synthetic oligonucleotide
gattggcgtgcgaaacataaagaaatgaca

SEQ ID NO: 245795 - DNA, 30 bp, Artificial Sequence
  Synthetic oligonucleotide
ccgggcagaggtgtggttgcatagatgaca

SEQ ID NO: 245796 - DNA, 30 bp, Artificial Sequence
  Synthetic oligonucleotide
tcattgaatttgttccttacagtgatgaca

SEQ ID NO: 245797 - DNA, 30 bp, Artificial Sequence
  Synthetic oligonucleotide
aaggtgtgggacattctatcccttatgaca

SEQ ID NO: 245798 - DNA, 30 bp, Artificial Sequence
  Synthetic oligonucleotide
actataaaattcgtcaaagatccactgaca

SEQ ID NO: 245799 - DNA, 30 bp, Artificial Sequence
  Synthetic oligonucleotide
gacgtcctataatattagcactcactgaca

SEQ ID NO: 245800 - DNA, 30 bp, Artificial Sequence
  Synthetic oligonucleotide
ttgacgcagggactataacctggactgaca

SEQ ID NO: 245801 - DNA, 30 bp, Artificial Sequence
  Synthetic oligonucleotide
attcttaacgatatgcaatcgcggctgaca

SEQ ID NO: 245802 - DNA, 30 bp, Artificial Sequence
  Synthetic oligonucleotide
cacagggccaaagcagtcaacatgctgaca

SEQ ID NO: 245803 - DNA, 30 bp, Artificial Sequence
  Synthetic oligonucleotide
gcatattactggaccaggtactaagtgaca

SEQ ID NO: 245804 - DNA, 30 bp, Artificial Sequence
  Synthetic oligonucleotide
agatattcgatccacggatgttcagtgaca

SEQ ID NO: 245805 - DNA, 30 bp, Artificial Sequence
  Synthetic oligonucleotide
ataatgggaaatattgagcgcttcgtgaca

SEQ ID NO: 245806 - DNA, 30 bp, Artificial Sequence
  Synthetic oligonucleotide
tatgggagcataggcttccacaaggtgaca

SEQ ID NO: 245807 - DNA, 30 bp, Artificial Sequence
  Synthetic oligonucleotide
gaaatatagcgatggtgtaaataggtgaca

SEQ ID NO: 245808 - DNA, 30 bp, Artificial Sequence
  Synthetic oligonucleotide
atctctggctggtacacgtatccggtgaca

SEQ ID NO: 245809 - DNA, 30 bp, Artificial Sequence
  Synthetic oligonucleotide
tatgtcgtacaagaaatatatactgtgaca

SEQ ID NO: 245810 - DNA, 30 bp, Artificial Sequence
  Synthetic oligonucleotide
acgaaaccgaggttatggtttcgtgtgaca

SEQ ID NO: 245811 - DNA, 30 bp, Artificial Sequence
  Synthetic oligonucleotide
aagaatgaataagatggctcctaattgaca

SEQ ID NO: 245812 - DNA, 30 bp, Artificial Sequence
  Synthetic oligonucleotide
actaggttgagcaagtgggtcgccttgaca

SEQ ID NO: 245813 - DNA, 30 bp, Artificial Sequence
  Synthetic oligonucleotide
atggttcattggtatctggcttccttgaca

SEQ ID NO: 245814 - DNA, 30 bp, Artificial Sequence
  Synthetic oligonucleotide
aagggagacaagttaaacaccggcttgaca

SEQ ID NO: 245815 - DNA, 30 bp, Artificial Sequence
  Synthetic oligonucleotide
atcgttattaatatggctatgggcttgaca

SEQ ID NO: 245816 - DNA, 30 bp, Artificial Sequence
  Synthetic oligonucleotide
cacaattgaggtcgtaccagtggcttgaca

SEQ ID NO: 245817 - DNA, 30 bp, Artificial Sequence
  Synthetic oligonucleotide
agtagcatccttgagatgcgaacgttgaca

SEQ ID NO: 245818 - DNA, 29 bp, Artificial Sequence
  Synthetic oligonucleotide
aagttaaagttagcgtagatacgttgaca

SEQ ID NO: 245819 - DNA, 30 bp, Artificial Sequence
  Synthetic oligonucleotide
ccatctccgtacattgtgaacgttttgaca

SEQ ID NO: 245820 - DNA, 30 bp, Artificial Sequence
  Synthetic oligonucleotide
atagacgcaggaatctaacggtaaaataca

SEQ ID NO: 245821 - DNA, 30 bp, Artificial Sequence
  Synthetic oligonucleotide
caatgattagaaagacgcacgagaaataca

SEQ ID NO: 245822 - DNA, 30 bp, Artificial Sequence
  Synthetic oligonucleotide
agtgaaacgatcttagtgctttgcaataca

SEQ ID NO: 245823 - DNA, 30 bp, Artificial Sequence
  Synthetic oligonucleotide
gtacatggaaagatgagtccggagaataca

SEQ ID NO: 245824 - DNA, 30 bp, Artificial Sequence
  Synthetic oligonucleotide
tattggcgggactgggctcgtcaacataca

SEQ ID NO: 245825 - DNA, 30 bp, Artificial Sequence
  Synthetic oligonucleotide
tttagagcacataagcccatataacataca

SEQ ID NO: 245826 - DNA, 30 bp, Artificial Sequence
  Synthetic oligonucleotide
aaaggtggggggatgtatatattacataca

SEQ ID NO: 245827 - DNA, 30 bp, Artificial Sequence
  Synthetic oligonucleotide
ttcggggtaacgatcccgggggaccataca

SEQ ID NO: 245828 - DNA, 31 bp, Artificial Sequence
  Synthetic oligonucleotide
ggcttgtgagtatatatcccgccagcataca

SEQ ID NO: 245829 - DNA, 30 bp, Artificial Sequence
  Synthetic oligonucleotide
tagcgacctggatccggccaacggcataca

SEQ ID NO: 245830 - DNA, 30 bp, Artificial Sequence
  Synthetic oligonucleotide
ttgggccgagaactacggttgtggcataca

SEQ ID NO: 245831 - DNA, 30 bp, Artificial Sequence
  Synthetic oligonucleotide
tcgggtcagccaaagatgggggttcataca

SEQ ID NO: 245832 - DNA, 30 bp, Artificial Sequence
  Synthetic oligonucleotide
gcacgcaacgcgctacctctaaaagataca

SEQ ID NO: 245833 - DNA, 30 bp, Artificial Sequence
  Synthetic oligonucleotide
tgatataagtgatgcttgccagtagataca

SEQ ID NO: 245834 - DNA, 30 bp, Artificial Sequence
  Synthetic oligonucleotide
actctgatgtactgtcctcgcaccgataca

SEQ ID NO: 245835 - DNA, 30 bp, Artificial Sequence
  Synthetic oligonucleotide
tcctacggtctatctaagatcagggataca

SEQ ID NO: 245836 - DNA, 30 bp, Artificial Sequence
  Synthetic oligonucleotide
agccccgttagggaagaaacgcgggataca

SEQ ID NO: 245837 - DNA, 30 bp, Artificial Sequence
  Synthetic oligonucleotide
cttatgtgagcctagagctgtatggataca

SEQ ID NO: 245838 - DNA, 30 bp, Artificial Sequence
  Synthetic oligonucleotide
ctgacgggggctcaatactcgttggataca

SEQ ID NO: 245839 - DNA, 30 bp, Artificial Sequence
  Synthetic oligonucleotide
tgtcgtgtggttcgtttggactttgataca

SEQ ID NO: 245840 - DNA, 30 bp, Artificial Sequence
  Synthetic oligonucleotide
atagacaaacggcgtagatttaaatataca

SEQ ID NO: 245841 - DNA, 30 bp, Artificial Sequence
  Synthetic oligonucleotide
gcgcgcaaatacagcagcaatgcatataca

SEQ ID NO: 245842 - DNA, 30 bp, Artificial Sequence
  Synthetic oligonucleotide
ctaggtggttttgtaaagacctgatataca

SEQ ID NO: 245843 - DNA, 30 bp, Artificial Sequence
  Synthetic oligonucleotide
caccgttactactacagttgcacctataca

SEQ ID NO: 245844 - DNA, 30 bp, Artificial Sequence
  Synthetic oligonucleotide
tgcgacccttcatcgataacggcctataca

SEQ ID NO: 245845 - DNA, 30 bp, Artificial Sequence
  Synthetic oligonucleotide
atgttagttgcatgagagctacgctataca

SEQ ID NO: 245846 - DNA, 30 bp, Artificial Sequence
  Synthetic oligonucleotide
tatcatcacgggccgtcagctcggtataca

SEQ ID NO: 245847 - DNA, 30 bp, Artificial Sequence
  Synthetic oligonucleotide
tctatccagagggtttacattacttataca

SEQ ID NO: 245848 - DNA, 30 bp, Artificial Sequence
  Synthetic oligonucleotide
tgtacatctacaggaccggccgcaactaca

SEQ ID NO: 245849 - DNA, 30 bp, Artificial Sequence
  Synthetic oligonucleotide
taacccggggggcttaatagggggactaca

SEQ ID NO: 245850 - DNA, 30 bp, Artificial Sequence
  Synthetic oligonucleotide
tcattagtagaggtgatataacctactaca

SEQ ID NO: 245851 - DNA, 30 bp, Artificial Sequence
  Synthetic oligonucleotide
aatgctctatagaaaggcgtgtgacctaca

SEQ ID NO: 245852 - DNA, 30 bp, Artificial Sequence
  Synthetic oligonucleotide
tggtcccacaaaattaggatacaccctaca

SEQ ID NO: 245853 - DNA, 30 bp, Artificial Sequence
  Synthetic oligonucleotide
ttgtatctaacacccatagcacttcctaca

SEQ ID NO: 245854 - DNA, 30 bp, Artificial Sequence
  Synthetic oligonucleotide
tcgcatgggtgtgggtattgcaccgctaca

SEQ ID NO: 245855 - DNA, 30 bp, Artificial Sequence
  Synthetic oligonucleotide
agtcagctcagtgaatggaatgaggctaca

SEQ ID NO: 245856 - DNA, 30 bp, Artificial Sequence
  Synthetic oligonucleotide
acggcggcgacgatccgttcttgggctaca

SEQ ID NO: 245857 - DNA, 30 bp, Artificial Sequence
  Synthetic oligonucleotide
tgaaaaccgttgggtttaggagctgctaca

SEQ ID NO: 245858 - DNA, 30 bp, Artificial Sequence
  Synthetic oligonucleotide
atcggtagctgcacaacggctaaatctaca

SEQ ID NO: 245859 - DNA, 31 bp, Artificial Sequence
  Synthetic oligonucleotide
catgcaagttacagctgggcgcgggtctaca

SEQ ID NO: 245860 - DNA, 30 bp, Artificial Sequence
  Synthetic oligonucleotide
ctcgtgtcattgccggctaacgtgtctaca

SEQ ID NO: 245861 - DNA, 30 bp, Artificial Sequence
  Synthetic oligonucleotide
gaaaacactaggttctccaggcaaagtaca

SEQ ID NO: 245862 - DNA, 30 bp, Artificial Sequence
  Synthetic oligonucleotide
accggtttacaaccgacccgcacaagtaca

SEQ ID NO: 245863 - DNA, 30 bp, Artificial Sequence
  Synthetic oligonucleotide
agaaacacttgtcaacgctcggtaagtaca

SEQ ID NO: 245864 - DNA, 30 bp, Artificial Sequence
  Synthetic oligonucleotide
atttaatcttataggaaggcgttaagtaca

SEQ ID NO: 245865 - DNA, 30 bp, Artificial Sequence
  Synthetic oligonucleotide
cccgtaccttgaaactccttgcgcagtaca

SEQ ID NO: 245866 - DNA, 30 bp, Artificial Sequence
  Synthetic oligonucleotide
ttagaagtaacgagagatgcgcagagtaca

SEQ ID NO: 245867 - DNA, 30 bp, Artificial Sequence
  Synthetic oligonucleotide
ttgtcccaacaacctccaggcatgagtaca

SEQ ID NO: 245868 - DNA, 30 bp, Artificial Sequence
  Synthetic oligonucleotide
ggtgcgaggggcatgaaaatatatagtaca

SEQ ID NO: 245869 - DNA, 30 bp, Artificial Sequence
  Synthetic oligonucleotide
gagttcccaccagtgtaggcgggacgtaca

SEQ ID NO: 245870 - DNA, 30 bp, Artificial Sequence
  Synthetic oligonucleotide
gtaccgcgtatagaacacactgagcgtaca

SEQ ID NO: 245871 - DNA, 30 bp, Artificial Sequence
  Synthetic oligonucleotide
cggtgtccaacatcccgcgtatcgcgtaca

SEQ ID NO: 245872 - DNA, 30 bp, Artificial Sequence
  Synthetic oligonucleotide
tagccggaatatgatacggtgactcgtaca

SEQ ID NO: 245873 - DNA, 30 bp, Artificial Sequence
  Synthetic oligonucleotide
gaatacaggctaaccacctggcttcgtaca

SEQ ID NO: 245874 - DNA, 30 bp, Artificial Sequence
  Synthetic oligonucleotide
acaatagatgtacaactaatgggaggtaca

SEQ ID NO: 245875 - DNA, 30 bp, Artificial Sequence
  Synthetic oligonucleotide
cgaatgtttagggaggaggccttaggtaca

SEQ ID NO: 245876 - DNA, 30 bp, Artificial Sequence
  Synthetic oligonucleotide
cagatccaacgaagcgagacgcgcggtaca

SEQ ID NO: 245877 - DNA, 30 bp, Artificial Sequence
  Synthetic oligonucleotide
gctgcgtatggtaatacggtcttcggtaca

SEQ ID NO: 245878 - DNA, 30 bp, Artificial Sequence
  Synthetic oligonucleotide
caagacctatgtcgattatctcagggtaca

SEQ ID NO: 245879 - DNA, 30 bp, Artificial Sequence
  Synthetic oligonucleotide
acatgcgctccaatagcatcctagggtaca

SEQ ID NO: 245880 - DNA, 30 bp, Artificial Sequence
  Synthetic oligonucleotide
atgtcaggagattccttcgtatcgggtaca

SEQ ID NO: 245881 - DNA, 30 bp, Artificial Sequence
  Synthetic oligonucleotide
agttgtattattggctttaagctgggtaca

SEQ ID NO: 245882 - DNA, 30 bp, Artificial Sequence
  Synthetic oligonucleotide
gcttgtccgacagcttgtctcgttggtaca

SEQ ID NO: 245883 - DNA, 30 bp, Artificial Sequence
  Synthetic oligonucleotide
aatccgggtactgggcaactagaatgtaca

SEQ ID NO: 245884 - DNA, 30 bp, Artificial Sequence
  Synthetic oligonucleotide
gaggtggtacctcttaaaacaagatgtaca

SEQ ID NO: 245885 - DNA, 30 bp, Artificial Sequence
  Synthetic oligonucleotide
taatattgaatggcgtaggtggactgtaca

SEQ ID NO: 245886 - DNA, 30 bp, Artificial Sequence
  Synthetic oligonucleotide
agtactacacgggatttggcgatctgtaca

SEQ ID NO: 245887 - DNA, 30 bp, Artificial Sequence
  Synthetic oligonucleotide
ccaacgcacgacaatcccaggcattgtaca

SEQ ID NO: 245888 - DNA, 30 bp, Artificial Sequence
  Synthetic oligonucleotide
agcaaggatgtttccaaggagtgttgtaca

SEQ ID NO: 245889 - DNA, 30 bp, Artificial Sequence
  Synthetic oligonucleotide
accggggtgcaccagcatgcaacaattaca

SEQ ID NO: 245890 - DNA, 30 bp, Artificial Sequence
  Synthetic oligonucleotide
ggcccgtagccgatatatggagcaattaca

SEQ ID NO: 245891 - DNA, 30 bp, Artificial Sequence
  Synthetic oligonucleotide
ttggtaatacgatatcgaagggtaattaca

SEQ ID NO: 245892 - DNA, 30 bp, Artificial Sequence
  Synthetic oligonucleotide
tcggccagtactctctctcgcggcattaca

SEQ ID NO: 245893 - DNA, 30 bp, Artificial Sequence
  Synthetic oligonucleotide
gaaagtataatgtaggagcgattcattaca

SEQ ID NO: 245894 - DNA, 30 bp, Artificial Sequence
  Synthetic oligonucleotide
ttagtcatgggctacgagtctaggattaca

SEQ ID NO: 245895 - DNA, 30 bp, Artificial Sequence
  Synthetic oligonucleotide
gggtaatggcgcgttgttcattggattaca

SEQ ID NO: 245896 - DNA, 30 bp, Artificial Sequence
  Synthetic oligonucleotide
gtacagagtactcgagctacaggtattaca

SEQ ID NO: 245897 - DNA, 30 bp, Artificial Sequence
  Synthetic oligonucleotide
cttggtattagggggtgcaaacttattaca

SEQ ID NO: 245898 - DNA, 30 bp, Artificial Sequence
  Synthetic oligonucleotide
atgtacgatatcgtaaattaacaacttaca

SEQ ID NO: 245899 - DNA, 30 bp, Artificial Sequence
  Synthetic oligonucleotide
tcacggaagtcgctagattacatacttaca

SEQ ID NO: 245900 - DNA, 30 bp, Artificial Sequence
  Synthetic oligonucleotide
cgcgcggttagattcaacagtgcgcttaca

SEQ ID NO: 245901 - DNA, 30 bp, Artificial Sequence
  Synthetic oligonucleotide
catacgctatttccaactttttgtcttaca

SEQ ID NO: 245902 - DNA, 30 bp, Artificial Sequence
  Synthetic oligonucleotide
gtgagaatcagagaatcggacatagttaca

SEQ ID NO: 245903 - DNA, 30 bp, Artificial Sequence
  Synthetic oligonucleotide
gagctgccatccagcgtcaatctcgttaca

SEQ ID NO: 245904 - DNA, 31 bp, Artificial Sequence
  Synthetic oligonucleotide
ctagtggcgggcaacactacacgtggttaca

SEQ ID NO: 245905 - DNA, 30 bp, Artificial Sequence
  Synthetic oligonucleotide
tctgatttaaagcgaatagatactgttaca

SEQ ID NO: 245906 - DNA, 30 bp, Artificial Sequence
  Synthetic oligonucleotide
agaaataatctcctacccggtacatttaca

SEQ ID NO: 245907 - DNA, 30 bp, Artificial Sequence
  Synthetic oligonucleotide
gccgacgcccctataatatgacgatttaca

SEQ ID NO: 245908 - DNA, 30 bp, Artificial Sequence
  Synthetic oligonucleotide
gcataagaggaaagtcatgcaaactttaca

SEQ ID NO: 245909 - DNA, 30 bp, Artificial Sequence
  Synthetic oligonucleotide
aagggagacaagttaaacaccggctttaca

SEQ ID NO: 245910 - DNA, 30 bp, Artificial Sequence
  Synthetic oligonucleotide
ggtatacactttgtaatggaccggtttaca

SEQ ID NO: 245911 - DNA, 30 bp, Artificial Sequence
  Synthetic oligonucleotide
caaaccgtgtattttatatgacccaaacca

SEQ ID NO: 245912 - DNA, 30 bp, Artificial Sequence
  Synthetic oligonucleotide
gcaatcactcgagattattaaaagaaacca

SEQ ID NO: 245913 - DNA, 30 bp, Artificial Sequence
  Synthetic oligonucleotide
tgttctgcgaataaggagacatagaaacca

SEQ ID NO: 245914 - DNA, 29 bp, Artificial Sequence
  Synthetic oligonucleotide
tattaggcattaatatgtgacggaaacca

SEQ ID NO: 245915 - DNA, 30 bp, Artificial Sequence
  Synthetic oligonucleotide
ctaactaactagttggtggaatataaacca

SEQ ID NO: 245916 - DNA, 30 bp, Artificial Sequence
  Synthetic oligonucleotide
cccctcacaattctgccgataactaaacca

SEQ ID NO: 245917 - DNA, 30 bp, Artificial Sequence
  Synthetic oligonucleotide
aaaaggtaggcagttagttccccacaacca

SEQ ID NO: 245918 - DNA, 30 bp, Artificial Sequence
  Synthetic oligonucleotide
aataatcggtggtgtagagccagacaacca

SEQ ID NO: 245919 - DNA, 30 bp, Artificial Sequence
  Synthetic oligonucleotide
acgagtctgttttcaagatagagacaacca

SEQ ID NO: 245920 - DNA, 30 bp, Artificial Sequence
  Synthetic oligonucleotide
aatcattgcgaaatcaaggacttacaacca

SEQ ID NO: 245921 - DNA, 30 bp, Artificial Sequence
  Synthetic oligonucleotide
aacggatacaccgaagggatgcttcaacca

SEQ ID NO: 245922 - DNA, 30 bp, Artificial Sequence
  Synthetic oligonucleotide
ctagagccgccagacctcgggcgagaacca

SEQ ID NO: 245923 - DNA, 30 bp, Artificial Sequence
  Synthetic oligonucleotide
gtggaactccgcgccgctaattgagaacca

SEQ ID NO: 245924 - DNA, 30 bp, Artificial Sequence
  Synthetic oligonucleotide
tttccctaatgaaataatcgtagcgaacca

SEQ ID NO: 245925 - DNA, 30 bp, Artificial Sequence
  Synthetic oligonucleotide
ttggatctgcgggacggcaaacaggaacca

SEQ ID NO: 245926 - DNA, 30 bp, Artificial Sequence
  Synthetic oligonucleotide
tacaatacggtacccaggatcggtgaacca

SEQ ID NO: 245927 - DNA, 30 bp, Artificial Sequence
  Synthetic oligonucleotide
tctgcacacatacagaggatttgtgaacca

SEQ ID NO: 245928 - DNA, 30 bp, Artificial Sequence
  Synthetic oligonucleotide
tcgccggccttcatgcgttgcaaataacca

SEQ ID NO: 245929 - DNA, 30 bp, Artificial Sequence
  Synthetic oligonucleotide
ctggctattgtgagacttgagagataacca

SEQ ID NO: 245930 - DNA, 30 bp, Artificial Sequence
  Synthetic oligonucleotide
ttgtcgacttctgcgagacttcgataacca

SEQ ID NO: 245931 - DNA, 30 bp, Artificial Sequence
  Synthetic oligonucleotide
cgggtcgcagtaaaggctcttggctaacca

SEQ ID NO: 245932 - DNA, 30 bp, Artificial Sequence
  Synthetic oligonucleotide
aatttgcgcaacggctcttgatagtaacca

SEQ ID NO: 245933 - DNA, 30 bp, Artificial Sequence
  Synthetic oligonucleotide
ccccatactaaaattacatgaatgtaacca

SEQ ID NO: 245934 - DNA, 30 bp, Artificial Sequence
  Synthetic oligonucleotide
aaaaggaaagctccagtactcatgtaacca

SEQ ID NO: 245935 - DNA, 30 bp, Artificial Sequence
  Synthetic oligonucleotide
gacagacaaccgagcagccccccttaacca

SEQ ID NO: 245936 - DNA, 30 bp, Artificial Sequence
  Synthetic oligonucleotide
atcaatggggttcgggttatacgttaacca

SEQ ID NO: 245937 - DNA, 30 bp, Artificial Sequence
  Synthetic oligonucleotide
accgtcatagattttttctaaatttaacca

SEQ ID NO: 245938 - DNA, 30 bp, Artificial Sequence
  Synthetic oligonucleotide
gtcatcctattactgctggactgaacacca

SEQ ID NO: 245939 - DNA, 30 bp, Artificial Sequence
  Synthetic oligonucleotide
atcccgaaagctcttctgcttagcacacca

SEQ ID NO: 245940 - DNA, 30 bp, Artificial Sequence
  Synthetic oligonucleotide
cggcatatagcccacgaatcacggacacca

SEQ ID NO: 245941 - DNA, 30 bp, Artificial Sequence
  Synthetic oligonucleotide
accaatgcagcactcagaacgcttacacca

SEQ ID NO: 245942 - DNA, 30 bp, Artificial Sequence
  Synthetic oligonucleotide
cttagactaagccggacggtcacgccacca

SEQ ID NO: 245943 - DNA, 30 bp, Artificial Sequence
  Synthetic oligonucleotide
cacggaaccaaaaacagacaatatccacca

SEQ ID NO: 245944 - DNA, 30 bp, Artificial Sequence
  Synthetic oligonucleotide
caattctgcagtctacgatcctaggcacca

SEQ ID NO: 245945 - DNA, 30 bp, Artificial Sequence
  Synthetic oligonucleotide
tttcatggccgaggtatgtatagggcacca

SEQ ID NO: 245946 - DNA, 30 bp, Artificial Sequence
  Synthetic oligonucleotide
tataagccatgaaatcgtagatgggcacca

SEQ ID NO: 245947 - DNA, 30 bp, Artificial Sequence
  Synthetic oligonucleotide
aagatggatcgtaaccaggccaatgcacca

SEQ ID NO: 245948 - DNA, 30 bp, Artificial Sequence
  Synthetic oligonucleotide
gcccagcagccgcgttagaattagtcacca

SEQ ID NO: 245949 - DNA, 30 bp, Artificial Sequence
  Synthetic oligonucleotide
gacagaacttcggccatagttacgtcacca

SEQ ID NO: 245950 - DNA, 30 bp, Artificial Sequence
  Synthetic oligonucleotide
gagaatttttggagtggaaccaggtcacca

SEQ ID NO: 245951 - DNA, 30 bp, Artificial Sequence
  Synthetic oligonucleotide
cgggaagttctcgttgcgtgagtgtcacca

SEQ ID NO: 245952 - DNA, 30 bp, Artificial Sequence
  Synthetic oligonucleotide
tgtgtggtggcaccagatccggtttcacca

SEQ ID NO: 245953 - DNA, 30 bp, Artificial Sequence
  Synthetic oligonucleotide
gtccgtaaactgatcctacgccacagacca

SEQ ID NO: 245954 - DNA, 30 bp, Artificial Sequence
  Synthetic oligonucleotide
agaaaaagttggtctggcatagacagacca

SEQ ID NO: 245955 - DNA, 30 bp, Artificial Sequence
  Synthetic oligonucleotide
gctataatggatatactcgcccccagacca

SEQ ID NO: 245956 - DNA, 30 bp, Artificial Sequence
  Synthetic oligonucleotide
tccgcaaccttcatagcactgcccagacca

SEQ ID NO: 245957 - DNA, 30 bp, Artificial Sequence
  Synthetic oligonucleotide
gatatcagctacttattgcgatccagacca

SEQ ID NO: 245958 - DNA, 30 bp, Artificial Sequence
  Synthetic oligonucleotide
aggaaaccaagggtaccggagcaacgacca

SEQ ID NO: 245959 - DNA, 30 bp, Artificial Sequence
  Synthetic oligonucleotide
agacagcattcgttaccccctgaacgacca

SEQ ID NO: 245960 - DNA, 30 bp, Artificial Sequence
  Synthetic oligonucleotide
gtcatagtgagtgacccatggggacgacca

SEQ ID NO: 245961 - DNA, 30 bp, Artificial Sequence
  Synthetic oligonucleotide
ggtaatagactgtctgagagtctacgacca

SEQ ID NO: 245962 - DNA, 30 bp, Artificial Sequence
  Synthetic oligonucleotide
acgccctagatttatatggtaccccgacca

SEQ ID NO: 245963 - DNA, 30 bp, Artificial Sequence
  Synthetic oligonucleotide
tgccctggggggaacccgcgtctccgacca

SEQ ID NO: 245964 - DNA, 30 bp, Artificial Sequence
  Synthetic oligonucleotide
gggagcaagacccatacgaggtcgcgacca

SEQ ID NO: 245965 - DNA, 30 bp, Artificial Sequence
  Synthetic oligonucleotide
gagcactctacatggtagcgtacaggacca

SEQ ID NO: 245966 - DNA, 30 bp, Artificial Sequence
  Synthetic oligonucleotide
gtgaaatctgaatctcgattcaacggacca

SEQ ID NO: 245967 - DNA, 30 bp, Artificial Sequence
  Synthetic oligonucleotide
agaaaagtagtgactgcttgccccggacca

SEQ ID NO: 245968 - DNA, 30 bp, Artificial Sequence
  Synthetic oligonucleotide
tctgactccggtaccgtgcactccggacca

SEQ ID NO: 245969 - DNA, 30 bp, Artificial Sequence
  Synthetic oligonucleotide
agcatagttcggagtgtcggtggcggacca

SEQ ID NO: 245970 - DNA, 30 bp, Artificial Sequence
  Synthetic oligonucleotide
atacaagaccggctgctatgccagggacca

SEQ ID NO: 245971 - DNA, 30 bp, Artificial Sequence
  Synthetic oligonucleotide
ctaaacatcatgttagctcaggggggacca

SEQ ID NO: 245972 - DNA, 30 bp, Artificial Sequence
  Synthetic oligonucleotide
cgcctaggtaaactaatatggatatgacca

SEQ ID NO: 245973 - DNA, 30 bp, Artificial Sequence
  Synthetic oligonucleotide
gcctgcgagttgctcatgtgcctctgacca

SEQ ID NO: 245974 - DNA, 30 bp, Artificial Sequence
  Synthetic oligonucleotide
acttggtttggccactagcccgaaatacca

SEQ ID NO: 245975 - DNA, 30 bp, Artificial Sequence
  Synthetic oligonucleotide
cttaatgtttaagaggggtattagatacca

SEQ ID NO: 245976 - DNA, 30 bp, Artificial Sequence
  Synthetic oligonucleotide
cgtgatcccgaatgtaggatgttgatacca

SEQ ID NO: 245977 - DNA, 30 bp, Artificial Sequence
  Synthetic oligonucleotide
tccaatcgctagttaatttttcggctacca

SEQ ID NO: 245978 - DNA, 30 bp, Artificial Sequence
  Synthetic oligonucleotide
tctcccggggttggtacttaggtgctacca

SEQ ID NO: 245979 - DNA, 30 bp, Artificial Sequence
  Synthetic oligonucleotide
catgacatgttaaatccgatccatctacca

SEQ ID NO: 245980 - DNA, 30 bp, Artificial Sequence
  Synthetic oligonucleotide
gctggatcgttggtgccctttcaagtacca

SEQ ID NO: 245981 - DNA, 30 bp, Artificial Sequence
  Synthetic oligonucleotide
gaatagcctatcagcgcacagtcagtacca

SEQ ID NO: 245982 - DNA, 30 bp, Artificial Sequence
  Synthetic oligonucleotide
agaggctatggggaccgcacgatagtacca

SEQ ID NO: 245983 - DNA, 30 bp, Artificial Sequence
  Synthetic oligonucleotide
taggtacgcacttaggaaccgattgtacca

SEQ ID NO: 245984 - DNA, 30 bp, Artificial Sequence
  Synthetic oligonucleotide
atccccattaaggagcagttgaagttacca

SEQ ID NO: 245985 - DNA, 30 bp, Artificial Sequence
  Synthetic oligonucleotide
ggtaaatactataatccacactggttacca

SEQ ID NO: 245986 - DNA, 30 bp, Artificial Sequence
  Synthetic oligonucleotide
aaaagtgtcgatgcgagggagactttacca

SEQ ID NO: 245987 - DNA, 30 bp, Artificial Sequence
  Synthetic oligonucleotide
ggggtcacgaacgtcacatcgctaaaccca

SEQ ID NO: 245988 - DNA, 30 bp, Artificial Sequence
  Synthetic oligonucleotide
gacgctagcgagaagctcgtggtaaaccca

SEQ ID NO: 245989 - DNA, 30 bp, Artificial Sequence
  Synthetic oligonucleotide
aaagtacactcgcccgagttaatcaaccca

SEQ ID NO: 245990 - DNA, 30 bp, Artificial Sequence
  Synthetic oligonucleotide
atgtgtcgttgggtatgtttcatacaccca

SEQ ID NO: 245991 - DNA, 30 bp, Artificial Sequence
  Synthetic oligonucleotide
aatcggtgaaggagcactagggggcaccca

SEQ ID NO: 245992 - DNA, 30 bp, Artificial Sequence
  Synthetic oligonucleotide
attccgggccaagccacatagaatcaccca

SEQ ID NO: 245993 - DNA, 30 bp, Artificial Sequence
  Synthetic oligonucleotide
aacaacgctctgggatacttcgaagaccca

SEQ ID NO: 245994 - DNA, 30 bp, Artificial Sequence
  Synthetic oligonucleotide
tcgaaaaaaataatctgggtcacagaccca

SEQ ID NO: 245995 - DNA, 30 bp, Artificial Sequence
  Synthetic oligonucleotide
gcctataagtggtcccaatggacagaccca

SEQ ID NO: 245996 - DNA, 30 bp, Artificial Sequence
  Synthetic oligonucleotide
cagcgctgcccgctcgtagacgccgaccca

SEQ ID NO: 245997 - DNA, 30 bp, Artificial Sequence
  Synthetic oligonucleotide
gttaatgtgaatgagttggctaaataccca

SEQ ID NO: 245998 - DNA, 30 bp, Artificial Sequence
  Synthetic oligonucleotide
ttcgcgtggtgaaccgcccacgtgtaccca

SEQ ID NO: 245999 - DNA, 30 bp, Artificial Sequence
  Synthetic oligonucleotide
tcacgtcacgaaggaggtcggtcttaccca

SEQ ID NO: 246000 - DNA, 30 bp, Artificial Sequence
  Synthetic oligonucleotide
ctgttcgaatcggatatcgccagttaccca

SEQ ID NO: 246001 - DNA, 30 bp, Artificial Sequence
  Synthetic oligonucleotide
tgaccgtctcataatgcttgactaacccca

SEQ ID NO: 246002 - DNA, 30 bp, Artificial Sequence
  Synthetic oligonucleotide
caagtgtttcggcttttatgtcacacccca

SEQ ID NO: 246003 - DNA, 30 bp, Artificial Sequence
  Synthetic oligonucleotide
cctggttaagggatgggaacctccacccca

SEQ ID NO: 246004 - DNA, 30 bp, Artificial Sequence
  Synthetic oligonucleotide
cagggatagctagtagtcgagataccccca

SEQ ID NO: 246005 - DNA, 30 bp, Artificial Sequence
  Synthetic oligonucleotide
aagatactcgaaactgtaaaattaccccca

SEQ ID NO: 246006 - DNA, 30 bp, Artificial Sequence
  Synthetic oligonucleotide
tcggctaacttccgcatgaacggagcccca

SEQ ID NO: 246007 - DNA, 30 bp, Artificial Sequence
  Synthetic oligonucleotide
aacgtattgtagggcagtaatcaggcccca

SEQ ID NO: 246008 - DNA, 30 bp, Artificial Sequence
  Synthetic oligonucleotide
catcagggagggcgatacttaagggcccca

SEQ ID NO: 246009 - DNA, 31 bp, Artificial Sequence
  Synthetic oligonucleotide
cctaatgggtgcatctcgggttatggcccca

SEQ ID NO: 246010 - DNA, 30 bp, Artificial Sequence
  Synthetic oligonucleotide
tggactcgtaaaatgcaaacatgtgcccca

SEQ ID NO: 246011 - DNA, 30 bp, Artificial Sequence
  Synthetic oligonucleotide
agcccgtcacgactgtcgtaaatctcccca

SEQ ID NO: 246012 - DNA, 30 bp, Artificial Sequence
  Synthetic oligonucleotide
gtccttgcatagatcgaaattcggtcccca

SEQ ID NO: 246013 - DNA, 30 bp, Artificial Sequence
  Synthetic oligonucleotide
actaggttgaaagcacgctcccaaagccca

SEQ ID NO: 246014 - DNA, 30 bp, Artificial Sequence
  Synthetic oligonucleotide
tgacaactctgatgatgctttttaagccca

SEQ ID NO: 246015 - DNA, 30 bp, Artificial Sequence
  Synthetic oligonucleotide
gaggcaatcgctggttaggttgacagccca

SEQ ID NO: 246016 - DNA, 30 bp, Artificial Sequence
  Synthetic oligonucleotide
agatcccaaagagaatcgcaggttagccca

SEQ ID NO: 246017 - DNA, 30 bp, Artificial Sequence
  Synthetic oligonucleotide
cggtctctcgacgaggcgcgcgcacgccca

SEQ ID NO: 246018 - DNA, 30 bp, Artificial Sequence
  Synthetic oligonucleotide
ggtcatagaatgccaggggcaccccgccca

SEQ ID NO: 246019 - DNA, 30 bp, Artificial Sequence
  Synthetic oligonucleotide
agataatacattttgactcgggggcgccca

SEQ ID NO: 246020 - DNA, 30 bp, Artificial Sequence
  Synthetic oligonucleotide
tagtaggatcctgtttaggaattgcgccca

SEQ ID NO: 246021 - DNA, 30 bp, Artificial Sequence
  Synthetic oligonucleotide
ccctcggcaaatattcggtattaaggccca

SEQ ID NO: 246022 - DNA, 30 bp, Artificial Sequence
  Synthetic oligonucleotide
ttgtgcgtccctgtcttgtcgtgaggccca

SEQ ID NO: 246023 - DNA, 30 bp, Artificial Sequence
  Synthetic oligonucleotide
catacgccgacacgctttcttaacggccca

SEQ ID NO: 246024 - DNA, 30 bp, Artificial Sequence
  Synthetic oligonucleotide
attactgtaaaagtcttgaccacatgccca

SEQ ID NO: 246025 - DNA, 30 bp, Artificial Sequence
  Synthetic oligonucleotide
atgcgcatcgtcttgacgtcaacgtgccca

SEQ ID NO: 246026 - DNA, 30 bp, Artificial Sequence
  Synthetic oligonucleotide
aagtctggcgggtggcctcagatgtgccca

SEQ ID NO: 246027 - DNA, 30 bp, Artificial Sequence
  Synthetic oligonucleotide
agtcgttggcggttgacggcgtcttgccca

SEQ ID NO: 246028 - DNA, 30 bp, Artificial Sequence
  Synthetic oligonucleotide
aggggtaacctcggttcgctgtgttgccca

SEQ ID NO: 246029 - DNA, 30 bp, Artificial Sequence
  Synthetic oligonucleotide
cactttccagaatccgtgtgaatttgccca

SEQ ID NO: 246030 - DNA, 30 bp, Artificial Sequence
  Synthetic oligonucleotide
ccgggctgtcttgtgtcgtttcgaatccca

SEQ ID NO: 246031 - DNA, 30 bp, Artificial Sequence
  Synthetic oligonucleotide
ggtatagggctcaaagtcatttgaatccca

SEQ ID NO: 246032 - DNA, 30 bp, Artificial Sequence
  Synthetic oligonucleotide
gtagggggcattttgaacgtctgcatccca

SEQ ID NO: 246033 - DNA, 30 bp, Artificial Sequence
  Synthetic oligonucleotide
tgctcataagttgttgcgccacctatccca

SEQ ID NO: 246034 - DNA, 30 bp, Artificial Sequence
  Synthetic oligonucleotide
cgcaaatcctcgctaagagtcgttatccca

SEQ ID NO: 246035 - DNA, 30 bp, Artificial Sequence
  Synthetic oligonucleotide
gtgatgtggagtgattattttggactccca

SEQ ID NO: 246036 - DNA, 30 bp, Artificial Sequence
  Synthetic oligonucleotide
gccgacgtctgtgatgaactgaacctccca

SEQ ID NO: 246037 - DNA, 30 bp, Artificial Sequence
  Synthetic oligonucleotide
gtcccgataccgccgacactgaatctccca

SEQ ID NO: 246038 - DNA, 30 bp, Artificial Sequence
  Synthetic oligonucleotide
ccgtccgtaaaacgggatggagtggtccca

SEQ ID NO: 246039 - DNA, 30 bp, Artificial Sequence
  Synthetic oligonucleotide
gaggggatcaccgctcgtaaacttgtccca

SEQ ID NO: 246040 - DNA, 30 bp, Artificial Sequence
  Synthetic oligonucleotide
cgtgaacgatgcaagggcagagttgtccca

SEQ ID NO: 246041 - DNA, 30 bp, Artificial Sequence
  Synthetic oligonucleotide
cggttgcccttctttctagatagattccca

SEQ ID NO: 246042 - DNA, 30 bp, Artificial Sequence
  Synthetic oligonucleotide
ataccgaacaagtacagaaatttattccca

SEQ ID NO: 246043 - DNA, 30 bp, Artificial Sequence
  Synthetic oligonucleotide
gaaagctaggaatctaaatttatgttccca

SEQ ID NO: 246044 - DNA, 30 bp, Artificial Sequence
  Synthetic oligonucleotide
tcaaacaagagcataatgggaactttccca

SEQ ID NO: 246045 - DNA, 30 bp, Artificial Sequence
  Synthetic oligonucleotide
gtctccatcggtacagtaatacttttccca

SEQ ID NO: 246046 - DNA, 30 bp, Artificial Sequence
  Synthetic oligonucleotide
tgcgagaaggatttaatcagaagcaagcca

SEQ ID NO: 246047 - DNA, 30 bp, Artificial Sequence
  Synthetic oligonucleotide
gatagtcacccagtaccttcgcgtaagcca

SEQ ID NO: 246048 - DNA, 30 bp, Artificial Sequence
  Synthetic oligonucleotide
tggctcctacgaggtgttacttgtaagcca

SEQ ID NO: 246049 - DNA, 30 bp, Artificial Sequence
  Synthetic oligonucleotide
gatggcgccgtacagtcccgtatacagcca

SEQ ID NO: 246050 - DNA, 30 bp, Artificial Sequence
  Synthetic oligonucleotide
gctaattatcggaaatagcccgtacagcca

SEQ ID NO: 246051 - DNA, 30 bp, Artificial Sequence
  Synthetic oligonucleotide
ctggtatcacccgtgcaatatcgccagcca

SEQ ID NO: 246052 - DNA, 30 bp, Artificial Sequence
  Synthetic oligonucleotide
agccccgcctgcgttagggcagaagagcca

SEQ ID NO: 246053 - DNA, 30 bp, Artificial Sequence
  Synthetic oligonucleotide
gaagccggccttcgcgtactttcagagcca

SEQ ID NO: 246054 - DNA, 30 bp, Artificial Sequence
  Synthetic oligonucleotide
gagcaggagcatgaaatagcccacgagcca

SEQ ID NO: 246055 - DNA, 30 bp, Artificial Sequence
  Synthetic oligonucleotide
tgacccgcaatcgggcgagagtcggagcca

SEQ ID NO: 246056 - DNA, 30 bp, Artificial Sequence
  Synthetic oligonucleotide
aagacaaatctaccctcgcttgactagcca

SEQ ID NO: 246057 - DNA, 30 bp, Artificial Sequence
  Synthetic oligonucleotide
ggcttttaccaatctattggtagctagcca

SEQ ID NO: 246058 - DNA, 30 bp, Artificial Sequence
  Synthetic oligonucleotide
agctgaccagacagagataatggctagcca

SEQ ID NO: 246059 - DNA, 30 bp, Artificial Sequence
  Synthetic oligonucleotide
cgcctcgtccgattaaaaccattctagcca

SEQ ID NO: 246060 - DNA, 30 bp, Artificial Sequence
  Synthetic oligonucleotide
ttaaatcctcttgaaggaattaagtagcca

SEQ ID NO: 246061 - DNA, 30 bp, Artificial Sequence
  Synthetic oligonucleotide
tgttctagctagagtgtcaacagttagcca

SEQ ID NO: 246062 - DNA, 30 bp, Artificial Sequence
  Synthetic oligonucleotide
ctgggttgatgcaccgaatggggaacgcca

SEQ ID NO: 246063 - DNA, 30 bp, Artificial Sequence
  Synthetic oligonucleotide
attcatcgcagctcggtgggttagacgcca

SEQ ID NO: 246064 - DNA, 30 bp, Artificial Sequence
  Synthetic oligonucleotide
tttgaaatgagggcccagcggaatacgcca

SEQ ID NO: 246065 - DNA, 30 bp, Artificial Sequence
  Synthetic oligonucleotide
acggcaggtttgcgggttcagtttacgcca

SEQ ID NO: 246066 - DNA, 30 bp, Artificial Sequence
  Synthetic oligonucleotide
taaggacttgggaactgctcggaaccgcca

SEQ ID NO: 246067 - DNA, 30 bp, Artificial Sequence
  Synthetic oligonucleotide
tgccgtgcgggacacagggcggccccgcca

SEQ ID NO: 246068 - DNA, 30 bp, Artificial Sequence
  Synthetic oligonucleotide
gagctgaccccatgtactagagggccgcca

SEQ ID NO: 246069 - DNA, 30 bp, Artificial Sequence
  Synthetic oligonucleotide
tgagcagtccacattttccgtatcgcgcca

SEQ ID NO: 246070 - DNA, 30 bp, Artificial Sequence
  Synthetic oligonucleotide
cgcgtcacgtcttagccaccggtcgcgcca

SEQ ID NO: 246071 - DNA, 30 bp, Artificial Sequence
  Synthetic oligonucleotide
atactcttcagaaaggcgagtaaggcgcca

SEQ ID NO: 246072 - DNA, 30 bp, Artificial Sequence
  Synthetic oligonucleotide
ttcggtccccccgcctccgatagggcgcca

SEQ ID NO: 246073 - DNA, 30 bp, Artificial Sequence
  Synthetic oligonucleotide
ctccgggacagagtcttacgactggcgcca

SEQ ID NO: 246074 - DNA, 30 bp, Artificial Sequence
  Synthetic oligonucleotide
actggtcggcggaaggggctggcatcgcca

SEQ ID NO: 246075 - DNA, 30 bp, Artificial Sequence
  Synthetic oligonucleotide
gaccgttaagacgtcgaatgtgcatcgcca

SEQ ID NO: 246076 - DNA, 30 bp, Artificial Sequence
  Synthetic oligonucleotide
tgtaggtgaagcggagaccttcactcgcca

SEQ ID NO: 246077 - DNA, 30 bp, Artificial Sequence
  Synthetic oligonucleotide
acggatcggctactttgatatacctcgcca

SEQ ID NO: 246078 - DNA, 30 bp, Artificial Sequence
  Synthetic oligonucleotide
cagggatggaaagagaatattttgtcgcca

SEQ ID NO: 246079 - DNA, 30 bp, Artificial Sequence
  Synthetic oligonucleotide
gcccggaggaagatttgaagaggttcgcca

SEQ ID NO: 246080 - DNA, 30 bp, Artificial Sequence
  Synthetic oligonucleotide
cgcgccctcgacaagaggtaacaaaggcca

SEQ ID NO: 246081 - DNA, 30 bp, Artificial Sequence
  Synthetic oligonucleotide
gtgaatgggttcataggcgagacaaggcca

SEQ ID NO: 246082 - DNA, 30 bp, Artificial Sequence
  Synthetic oligonucleotide
taagccagcacgaagcggcgccccaggcca

SEQ ID NO: 246083 - DNA, 30 bp, Artificial Sequence
  Synthetic oligonucleotide
ggtgtagggcacacagcgccattcaggcca

SEQ ID NO: 246084 - DNA, 30 bp, Artificial Sequence
  Synthetic oligonucleotide
cctgtctcaggggatcataggcagaggcca

SEQ ID NO: 246085 - DNA, 30 bp, Artificial Sequence
  Synthetic oligonucleotide
gggcactgcccaaaagtattttagaggcca

SEQ ID NO: 246086 - DNA, 30 bp, Artificial Sequence
  Synthetic oligonucleotide
ttacctcacgaccaacggcgttggaggcca

SEQ ID NO: 246087 - DNA, 30 bp, Artificial Sequence
  Synthetic oligonucleotide
ctggaagaaccagtattaaactttaggcca

SEQ ID NO: 246088 - DNA, 30 bp, Artificial Sequence
  Synthetic oligonucleotide
gctcccgaggacatatatcttcaacggcca

SEQ ID NO: 246089 - DNA, 30 bp, Artificial Sequence
  Synthetic oligonucleotide
gtttcaaaagcaacgcccgcgatacggcca

SEQ ID NO: 246090 - DNA, 30 bp, Artificial Sequence
  Synthetic oligonucleotide
tcaggtaaattacggtctcaggagcggcca

SEQ ID NO: 246091 - DNA, 30 bp, Artificial Sequence
  Synthetic oligonucleotide
cctccatcagggtgatgcgacgggcggcca

SEQ ID NO: 246092 - DNA, 30 bp, Artificial Sequence
  Synthetic oligonucleotide
caaaagggaatttctataacattgcggcca

SEQ ID NO: 246093 - DNA, 30 bp, Artificial Sequence
  Synthetic oligonucleotide
ggtgtgccttcatatcacctgagtcggcca

SEQ ID NO: 246094 - DNA, 30 bp, Artificial Sequence
  Synthetic oligonucleotide
agcttattgcccagaagggctagtcggcca

SEQ ID NO: 246095 - DNA, 30 bp, Artificial Sequence
  Synthetic oligonucleotide
ttccttataacggttacctaaagcgggcca

SEQ ID NO: 246096 - DNA, 30 bp, Artificial Sequence
  Synthetic oligonucleotide
gtgtgaagagtatcggcgtatatggggcca

SEQ ID NO: 246097 - DNA, 30 bp, Artificial Sequence
  Synthetic oligonucleotide
tatggtgactttgtggccgttatggggcca

SEQ ID NO: 246098 - DNA, 30 bp, Artificial Sequence
  Synthetic oligonucleotide
cttatggttccgagtatacgtattgggcca

SEQ ID NO: 246099 - DNA, 30 bp, Artificial Sequence
  Synthetic oligonucleotide
cggtacaagcgtgagttagaggttgggcca

SEQ ID NO: 246100 - DNA, 30 bp, Artificial Sequence
  Synthetic oligonucleotide
ccatgactgtttaacttatgtagatggcca

SEQ ID NO: 246101 - DNA, 30 bp, Artificial Sequence
  Synthetic oligonucleotide
ggtataactacggggcgcaacttatggcca

SEQ ID NO: 246102 - DNA, 30 bp, Artificial Sequence
  Synthetic oligonucleotide
ggttgtgcatgggagtggggggactggcca

SEQ ID NO: 246103 - DNA, 30 bp, Artificial Sequence
  Synthetic oligonucleotide
taaaatgttagtggtgagggtcgaatgcca

SEQ ID NO: 246104 - DNA, 30 bp, Artificial Sequence
  Synthetic oligonucleotide
caaagttagtcgtcagggacacacatgcca

SEQ ID NO: 246105 - DNA, 30 bp, Artificial Sequence
  Synthetic oligonucleotide
tgatagttctgactggtataggacatgcca

SEQ ID NO: 246106 - DNA, 30 bp, Artificial Sequence
  Synthetic oligonucleotide
gctattgagcgttataacaatgggatgcca

SEQ ID NO: 246107 - DNA, 30 bp, Artificial Sequence
  Synthetic oligonucleotide
cagcgatccacaatagattgttctatgcca

SEQ ID NO: 246108 - DNA, 30 bp, Artificial Sequence
  Synthetic oligonucleotide
gtggcacggtccttctagaaatgactgcca

SEQ ID NO: 246109 - DNA, 30 bp, Artificial Sequence
  Synthetic oligonucleotide
tgatgatccgataaggctcgttgactgcca

SEQ ID NO: 246110 - DNA, 30 bp, Artificial Sequence
  Synthetic oligonucleotide
cttgattgtcgtcagttgagaatactgcca

SEQ ID NO: 246111 - DNA, 30 bp, Artificial Sequence
  Synthetic oligonucleotide
ttgttagacgagagcatcttcctactgcca

SEQ ID NO: 246112 - DNA, 30 bp, Artificial Sequence
  Synthetic oligonucleotide
gtcaatggttaagcacatgcagagctgcca

SEQ ID NO: 246113 - DNA, 30 bp, Artificial Sequence
  Synthetic oligonucleotide
ggttttcgcgaactacggtcggtgctgcca

SEQ ID NO: 246114 - DNA, 30 bp, Artificial Sequence
  Synthetic oligonucleotide
gggatcatgcagtacgcaaaatatctgcca

SEQ ID NO: 246115 - DNA, 30 bp, Artificial Sequence
  Synthetic oligonucleotide
acgcagtcatgaaatatgtcaggtctgcca

SEQ ID NO: 246116 - DNA, 30 bp, Artificial Sequence
  Synthetic oligonucleotide
actcgtaggcaaatgcagggtcttctgcca

SEQ ID NO: 246117 - DNA, 30 bp, Artificial Sequence
  Synthetic oligonucleotide
ggattggttggcctataaagcgtagtgcca

SEQ ID NO: 246118 - DNA, 30 bp, Artificial Sequence
  Synthetic oligonucleotide
acgttcacttgacgactcatgttagtgcca

SEQ ID NO: 246119 - DNA, 30 bp, Artificial Sequence
  Synthetic oligonucleotide
ggttcagcctgggctggatgcgtggtgcca

SEQ ID NO: 246120 - DNA, 30 bp, Artificial Sequence
  Synthetic oligonucleotide
ggaacattggcgggtggacgtgtggtgcca

SEQ ID NO: 246121 - DNA, 30 bp, Artificial Sequence
  Synthetic oligonucleotide
gcgtccttcggaagcataaggtttgtgcca

SEQ ID NO: 246122 - DNA, 30 bp, Artificial Sequence
  Synthetic oligonucleotide
gtcgtcttgttgttgttcaccaggttgcca

SEQ ID NO: 246123 - DNA, 30 bp, Artificial Sequence
  Synthetic oligonucleotide
gcaagcgttatgtccgtattctatttgcca

SEQ ID NO: 246124 - DNA, 31 bp, Artificial Sequence
  Synthetic oligonucleotide
caccacgggtatttccaggggagctttgcca

SEQ ID NO: 246125 - DNA, 30 bp, Artificial Sequence
  Synthetic oligonucleotide
gcttggctgaatattgtacagattttgcca

SEQ ID NO: 246126 - DNA, 30 bp, Artificial Sequence
  Synthetic oligonucleotide
ctagggcgctcaccattcactccaaatcca

SEQ ID NO: 246127 - DNA, 30 bp, Artificial Sequence
  Synthetic oligonucleotide
gcgggtgtaactgacccccttgtaaatcca

SEQ ID NO: 246128 - DNA, 30 bp, Artificial Sequence
  Synthetic oligonucleotide
tgctacagcacgtactattgacgcaatcca

SEQ ID NO: 246129 - DNA, 30 bp, Artificial Sequence
  Synthetic oligonucleotide
tttaaagagttgtccacactgcgtaatcca

SEQ ID NO: 246130 - DNA, 30 bp, Artificial Sequence
  Synthetic oligonucleotide
gcacaagtgccgagacggccctcacatcca

SEQ ID NO: 246131 - DNA, 30 bp, Artificial Sequence
  Synthetic oligonucleotide
agggaccaagtctctatacttacgcatcca

SEQ ID NO: 246132 - DNA, 30 bp, Artificial Sequence
  Synthetic oligonucleotide
gacggaattcatctccaagccgttcatcca

SEQ ID NO: 246133 - DNA, 30 bp, Artificial Sequence
  Synthetic oligonucleotide
caaggatatcttgtttgaaggatagatcca

SEQ ID NO: 246134 - DNA, 30 bp, Artificial Sequence
  Synthetic oligonucleotide
ggtccaacaactcgactcctactagatcca

SEQ ID NO: 246135 - DNA, 30 bp, Artificial Sequence
  Synthetic oligonucleotide
gcagcggcgccttctagcggcttagatcca

SEQ ID NO: 246136 - DNA, 30 bp, Artificial Sequence
  Synthetic oligonucleotide
gggtattaatggcacataatgatcgatcca

SEQ ID NO: 246137 - DNA, 30 bp, Artificial Sequence
  Synthetic oligonucleotide
ttatggcgatgtggtactttgttcgatcca

SEQ ID NO: 246138 - DNA, 30 bp, Artificial Sequence
  Synthetic oligonucleotide
atcgcacgtaatctagacattcatgatcca

SEQ ID NO: 246139 - DNA, 30 bp, Artificial Sequence
  Synthetic oligonucleotide
tcagtaacggacacgcatggggatgatcca

SEQ ID NO: 246140 - DNA, 30 bp, Artificial Sequence
  Synthetic oligonucleotide
atgggcaggcccactactatgcctgatcca

SEQ ID NO: 246141 - DNA, 30 bp, Artificial Sequence
  Synthetic oligonucleotide
tcgggcaacagtgatttaagtgtatatcca

SEQ ID NO: 246142 - DNA, 30 bp, Artificial Sequence
  Synthetic oligonucleotide
tgaccgtattgccctgaaagtatctatcca

SEQ ID NO: 246143 - DNA, 30 bp, Artificial Sequence
  Synthetic oligonucleotide
gttggccccttggaagacaaggagtatcca

SEQ ID NO: 246144 - DNA, 30 bp, Artificial Sequence
  Synthetic oligonucleotide
aaaaccggaaacgtgacggcgtcgtatcca

SEQ ID NO: 246145 - DNA, 30 bp, Artificial Sequence
  Synthetic oligonucleotide
gtcaattgtaaacgctaaacacggtatcca

SEQ ID NO: 246146 - DNA, 30 bp, Artificial Sequence
  Synthetic oligonucleotide
aaagaccagtatcgatcggaggattatcca

SEQ ID NO: 246147 - DNA, 30 bp, Artificial Sequence
  Synthetic oligonucleotide
tgtaataacgtcccagtcagctgcactcca

SEQ ID NO: 246148 - DNA, 30 bp, Artificial Sequence
  Synthetic oligonucleotide
gtgggatatctaagcggcttggtcactcca

SEQ ID NO: 246149 - DNA, 30 bp, Artificial Sequence
  Synthetic oligonucleotide
attagtagacatgggatggaccaacctcca

SEQ ID NO: 246150 - DNA, 30 bp, Artificial Sequence
  Synthetic oligonucleotide
ctcagcagttgtcatggatgatcagctcca

SEQ ID NO: 246151 - DNA, 30 bp, Artificial Sequence
  Synthetic oligonucleotide
cagccgctatccacggctacatacgctcca

SEQ ID NO: 246152 - DNA, 30 bp, Artificial Sequence
  Synthetic oligonucleotide
tcagcacagagcttctctctatcggctcca

SEQ ID NO: 246153 - DNA, 30 bp, Artificial Sequence
  Synthetic oligonucleotide
gaccaggtaggtgcattatctcgggctcca

SEQ ID NO: 246154 - DNA, 30 bp, Artificial Sequence
  Synthetic oligonucleotide
gcttaagaaaaacattcacgtgttgctcca

SEQ ID NO: 246155 - DNA, 30 bp, Artificial Sequence
  Synthetic oligonucleotide
ggcttacttgggtatacagttaaatctcca

SEQ ID NO: 246156 - DNA, 30 bp, Artificial Sequence
  Synthetic oligonucleotide
ctgtatccataccgcaggcaaagatctcca

SEQ ID NO: 246157 - DNA, 30 bp, Artificial Sequence
  Synthetic oligonucleotide
tgcagactgccgccgcgttaagactctcca

SEQ ID NO: 246158 - DNA, 30 bp, Artificial Sequence
  Synthetic oligonucleotide
gcatcggttcaaaaagtcttctactctcca

SEQ ID NO: 246159 - DNA, 30 bp, Artificial Sequence
  Synthetic oligonucleotide
cccaccaggtgaggcacgacggcgagtcca

SEQ ID NO: 246160 - DNA, 30 bp, Artificial Sequence
  Synthetic oligonucleotide
cagtaaaaaatcccatgttgacggagtcca

SEQ ID NO: 246161 - DNA, 30 bp, Artificial Sequence
  Synthetic oligonucleotide
taactccactcctacgtgatgatacgtcca

SEQ ID NO: 246162 - DNA, 30 bp, Artificial Sequence
  Synthetic oligonucleotide
aaagacgccccttcgcacagtaaccgtcca

SEQ ID NO: 246163 - DNA, 29 bp, Artificial Sequence
  Synthetic oligonucleotide
tggttgataaaacaacatacaatcgtcca

SEQ ID NO: 246164 - DNA, 30 bp, Artificial Sequence
  Synthetic oligonucleotide
ttcatacagactattatggtcgttcgtcca

SEQ ID NO: 246165 - DNA, 30 bp, Artificial Sequence
  Synthetic oligonucleotide
gacactagatcagaggggatcgtcggtcca

SEQ ID NO: 246166 - DNA, 30 bp, Artificial Sequence
  Synthetic oligonucleotide
gttcggcgttgggaaatacttccgggtcca

SEQ ID NO: 246167 - DNA, 30 bp, Artificial Sequence
  Synthetic oligonucleotide
aaaaacgtgtagggtatggttccgggtcca

SEQ ID NO: 246168 - DNA, 30 bp, Artificial Sequence
  Synthetic oligonucleotide
attgtatatcagcgctttcgctggggtcca

SEQ ID NO: 246169 - DNA, 30 bp, Artificial Sequence
  Synthetic oligonucleotide
agatttagacggtagtgatatactggtcca

SEQ ID NO: 246170 - DNA, 30 bp, Artificial Sequence
  Synthetic oligonucleotide
cagagaaggataaggggttcatttggtcca

SEQ ID NO: 246171 - DNA, 30 bp, Artificial Sequence
  Synthetic oligonucleotide
cgacgggtgtcgaattataacaactgtcca

SEQ ID NO: 246172 - DNA, 30 bp, Artificial Sequence
  Synthetic oligonucleotide
agaaattgcggccaagttctgccttgtcca

SEQ ID NO: 246173 - DNA, 30 bp, Artificial Sequence
  Synthetic oligonucleotide
ggattgttttgaaaaactcggtcaattcca

SEQ ID NO: 246174 - DNA, 31 bp, Artificial Sequence
  Synthetic oligonucleotide
ccgacaggtacgacatggaagttcaattcca

SEQ ID NO: 246175 - DNA, 30 bp, Artificial Sequence
  Synthetic oligonucleotide
cggagctaggaaaggcacgctggaattcca

SEQ ID NO: 246176 - DNA, 31 bp, Artificial Sequence
  Synthetic oligonucleotide
cccacttacatttgcaacccgtctaattcca

SEQ ID NO: 246177 - DNA, 30 bp, Artificial Sequence
  Synthetic oligonucleotide
ggattggtgaaagatgaactcgtaattcca

SEQ ID NO: 246178 - DNA, 30 bp, Artificial Sequence
  Synthetic oligonucleotide
cggcagggggtattgaaatttcacattcca

SEQ ID NO: 246179 - DNA, 30 bp, Artificial Sequence
  Synthetic oligonucleotide
ttatattgatacaccttaatgaccattcca

SEQ ID NO: 246180 - DNA, 30 bp, Artificial Sequence
  Synthetic oligonucleotide
attcatagggagattctgttctccattcca

SEQ ID NO: 246181 - DNA, 30 bp, Artificial Sequence
  Synthetic oligonucleotide
tggccaatattccaggctagatggattcca

SEQ ID NO: 246182 - DNA, 30 bp, Artificial Sequence
  Synthetic oligonucleotide
ccgctgtccaataagtctatctggattcca

SEQ ID NO: 246183 - DNA, 30 bp, Artificial Sequence
  Synthetic oligonucleotide
ttactgcctaattgctacaactatattcca

SEQ ID NO: 246184 - DNA, 30 bp, Artificial Sequence
  Synthetic oligonucleotide
gtgcttaatctgcaatcgagatttattcca

SEQ ID NO: 246185 - DNA, 30 bp, Artificial Sequence
  Synthetic oligonucleotide
ccatcattcgacgaattcacctgccttcca

SEQ ID NO: 246186 - DNA, 30 bp, Artificial Sequence
  Synthetic oligonucleotide
gttggaaccataaagccgctcgagcttcca

SEQ ID NO: 246187 - DNA, 30 bp, Artificial Sequence
  Synthetic oligonucleotide
tgtcgccgtatggcgcctgaggtgcttcca

SEQ ID NO: 246188 - DNA, 30 bp, Artificial Sequence
  Synthetic oligonucleotide
gtacgctggtgagtgtcacattgtcttcca

SEQ ID NO: 246189 - DNA, 30 bp, Artificial Sequence
  Synthetic oligonucleotide
tccctaattgcgctcttccagtcggttcca

SEQ ID NO: 246190 - DNA, 30 bp, Artificial Sequence
  Synthetic oligonucleotide
caccgcattccgcgtagatgcacatttcca

SEQ ID NO: 246191 - DNA, 30 bp, Artificial Sequence
  Synthetic oligonucleotide
tggcagacagagctggatgaatcgtttcca

SEQ ID NO: 246192 - DNA, 30 bp, Artificial Sequence
  Synthetic oligonucleotide
tcatgcgaggccataggcccacaaaaagca

SEQ ID NO: 246193 - DNA, 30 bp, Artificial Sequence
  Synthetic oligonucleotide
gcactgtacattacgattttgcaacaagca

SEQ ID NO: 246194 - DNA, 30 bp, Artificial Sequence
  Synthetic oligonucleotide
cgatggtagtgaagttgtttttaacaagca

SEQ ID NO: 246195 - DNA, 30 bp, Artificial Sequence
  Synthetic oligonucleotide
cggtcctgtctcccacactagaagcaagca

SEQ ID NO: 246196 - DNA, 30 bp, Artificial Sequence
  Synthetic oligonucleotide
gaaaatggtgattataggtaactgcaagca

SEQ ID NO: 246197 - DNA, 30 bp, Artificial Sequence
  Synthetic oligonucleotide
tttatcggtcagcgttgcgacaatcaagca

SEQ ID NO: 246198 - DNA, 30 bp, Artificial Sequence
  Synthetic oligonucleotide
ctttgtccacgagttttcgtcactcaagca

SEQ ID NO: 246199 - DNA, 30 bp, Artificial Sequence
  Synthetic oligonucleotide
gaaacggtgggtgcctgtccgaaagaagca

SEQ ID NO: 246200 - DNA, 31 bp, Artificial Sequence
  Synthetic oligonucleotide
ttaccggggtaggggttccccatcagaagca

SEQ ID NO: 246201 - DNA, 30 bp, Artificial Sequence
  Synthetic oligonucleotide
ggcagctcgtccggaacacccttagaagca

SEQ ID NO: 246202 - DNA, 30 bp, Artificial Sequence
  Synthetic oligonucleotide
ccgcgtcctaaatgttccgccaccgaagca

SEQ ID NO: 246203 - DNA, 30 bp, Artificial Sequence
  Synthetic oligonucleotide
atatagcgtgcgcggtcggataactaagca

SEQ ID NO: 246204 - DNA, 30 bp, Artificial Sequence
  Synthetic oligonucleotide
acgcaaccgtgcttgagatgcggctaagca

SEQ ID NO: 246205 - DNA, 30 bp, Artificial Sequence
  Synthetic oligonucleotide
tatggacccctagagcaccatttctaagca

SEQ ID NO: 246206 - DNA, 30 bp, Artificial Sequence
  Synthetic oligonucleotide
gaattctgttggagcggggaaaggtaagca

SEQ ID NO: 246207 - DNA, 30 bp, Artificial Sequence
  Synthetic oligonucleotide
accagtttatttccagctaaagggtaagca

SEQ ID NO: 246208 - DNA, 30 bp, Artificial Sequence
  Synthetic oligonucleotide
aatcaccagcattacacaaatatgtaagca

SEQ ID NO: 246209 - DNA, 30 bp, Artificial Sequence
  Synthetic oligonucleotide
gtaaagtagataaaaggcgtagatacagca

SEQ ID NO: 246210 - DNA, 30 bp, Artificial Sequence
  Synthetic oligonucleotide
atagaacccttgcacatcgtgtctacagca

SEQ ID NO: 246211 - DNA, 30 bp, Artificial Sequence
  Synthetic oligonucleotide
cgacggtatcgcaagttacgctgtacagca

SEQ ID NO: 246212 - DNA, 30 bp, Artificial Sequence
  Synthetic oligonucleotide
atttacattgaacgggcgaaagacccagca

SEQ ID NO: 246213 - DNA, 30 bp, Artificial Sequence
  Synthetic oligonucleotide
acaaattatgctactgagaaactcccagca

SEQ ID NO: 246214 - DNA, 30 bp, Artificial Sequence
  Synthetic oligonucleotide
attttcgcacagagttcgcgtaagccagca

SEQ ID NO: 246215 - DNA, 30 bp, Artificial Sequence
  Synthetic oligonucleotide
tcctgctggtaacagttatttgtgccagca

SEQ ID NO: 246216 - DNA, 30 bp, Artificial Sequence
  Synthetic oligonucleotide
agttacttgtagataggctttcatccagca

SEQ ID NO: 246217 - DNA, 30 bp, Artificial Sequence
  Synthetic oligonucleotide
gttagctaacggtcaccggcccaggcagca

SEQ ID NO: 246218 - DNA, 30 bp, Artificial Sequence
  Synthetic oligonucleotide
acgacaatgggcgctggctcagcggcagca

SEQ ID NO: 246219 - DNA, 30 bp, Artificial Sequence
  Synthetic oligonucleotide
agacacgaatctgtctgccaaggggcagca

SEQ ID NO: 246220 - DNA, 30 bp, Artificial Sequence
  Synthetic oligonucleotide
tctcagcagcctctactaagatatgcagca

SEQ ID NO: 246221 - DNA, 30 bp, Artificial Sequence
  Synthetic oligonucleotide
ccggtatacagctaatgagcgggatcagca

SEQ ID NO: 246222 - DNA, 30 bp, Artificial Sequence
  Synthetic oligonucleotide
actgttcttgagggactacacatatcagca

SEQ ID NO: 246223 - DNA, 30 bp, Artificial Sequence
  Synthetic oligonucleotide
aggacgctcaggatctaaacttcgtcagca

SEQ ID NO: 246224 - DNA, 30 bp, Artificial Sequence
  Synthetic oligonucleotide
accacacatggccggctgcttcccagagca

SEQ ID NO: 246225 - DNA, 30 bp, Artificial Sequence
  Synthetic oligonucleotide
ggcgcgacgagagtgtatatcatcagagca

SEQ ID NO: 246226 - DNA, 30 bp, Artificial Sequence
  Synthetic oligonucleotide
atacttctatagtacatctaacggagagca

SEQ ID NO: 246227 - DNA, 30 bp, Artificial Sequence
  Synthetic oligonucleotide
aattcgggatcaggagcggatgggagagca

SEQ ID NO: 246228 - DNA, 30 bp, Artificial Sequence
  Synthetic oligonucleotide
agacctaattcgaagcgacgggaccgagca

SEQ ID NO: 246229 - DNA, 30 bp, Artificial Sequence
  Synthetic oligonucleotide
cccgtctacggatcgatggtctagcgagca

SEQ ID NO: 246230 - DNA, 30 bp, Artificial Sequence
  Synthetic oligonucleotide
tatgattgaaatttattgggatggcgagca

SEQ ID NO: 246231 - DNA, 30 bp, Artificial Sequence
  Synthetic oligonucleotide
cattggttcagtcgtaacagacgtcgagca

SEQ ID NO: 246232 - DNA, 30 bp, Artificial Sequence
  Synthetic oligonucleotide
gaaggtgtttggccacgggggggaggagca

SEQ ID NO: 246233 - DNA, 30 bp, Artificial Sequence
  Synthetic oligonucleotide
cacgtttaaccaaaatcttcactaggagca

SEQ ID NO: 246234 - DNA, 30 bp, Artificial Sequence
  Synthetic oligonucleotide
acgcagctactgaggaacgatctaggagca

SEQ ID NO: 246235 - DNA, 30 bp, Artificial Sequence
  Synthetic oligonucleotide
cttaatagtgatatcatttaaccgggagca

SEQ ID NO: 246236 - DNA, 30 bp, Artificial Sequence
  Synthetic oligonucleotide
acaggtcaacgtagtgtatgtcgtggagca

SEQ ID NO: 246237 - DNA, 30 bp, Artificial Sequence
  Synthetic oligonucleotide
cacagtatacgaatagtttgggttggagca

SEQ ID NO: 246238 - DNA, 30 bp, Artificial Sequence
  Synthetic oligonucleotide
cctcgccttatatcaggttaatcctgagca

SEQ ID NO: 246239 - DNA, 30 bp, Artificial Sequence
  Synthetic oligonucleotide
aaggaccacccgcggcggtgcaattgagca

SEQ ID NO: 246240 - DNA, 30 bp, Artificial Sequence
  Synthetic oligonucleotide
tgcttaggtgaattcagtcagaaaatagca

SEQ ID NO: 246241 - DNA, 30 bp, Artificial Sequence
  Synthetic oligonucleotide
gaatgctgatgttatcccctaccaatagca

SEQ ID NO: 246242 - DNA, 30 bp, Artificial Sequence
  Synthetic oligonucleotide
taagagtaattatgatttgggtcaatagca

SEQ ID NO: 246243 - DNA, 30 bp, Artificial Sequence
  Synthetic oligonucleotide
agatctgggcggtggatcatgctaatagca

SEQ ID NO: 246244 - DNA, 30 bp, Artificial Sequence
  Synthetic oligonucleotide
cgtgttaacccattccggtacagtatagca

SEQ ID NO: 246245 - DNA, 30 bp, Artificial Sequence
  Synthetic oligonucleotide
gcttcaatgctggttgattacaaactagca

SEQ ID NO: 246246 - DNA, 30 bp, Artificial Sequence
  Synthetic oligonucleotide
tattatatctgggcaagaagggtactagca

SEQ ID NO: 246247 - DNA, 30 bp, Artificial Sequence
  Synthetic oligonucleotide
gacaggcacaaatagcgtggactcctagca

SEQ ID NO: 246248 - DNA, 30 bp, Artificial Sequence
  Synthetic oligonucleotide
tctagcaagtttgtacgatatggtctagca

SEQ ID NO: 246249 - DNA, 30 bp, Artificial Sequence
  Synthetic oligonucleotide
gcaggggctgacacgttacctagcgtagca

SEQ ID NO: 246250 - DNA, 30 bp, Artificial Sequence
  Synthetic oligonucleotide
gggctatttgcaggattttaacgcgtagca

SEQ ID NO: 246251 - DNA, 30 bp, Artificial Sequence
  Synthetic oligonucleotide
cgcgtgactccagaggcattttgggtagca

SEQ ID NO: 246252 - DNA, 30 bp, Artificial Sequence
  Synthetic oligonucleotide
agcgttacaagtcgatatcgtgctgtagca

SEQ ID NO: 246253 - DNA, 30 bp, Artificial Sequence
  Synthetic oligonucleotide
tgttcgctcagacgttacgtgaaattagca

SEQ ID NO: 246254 - DNA, 30 bp, Artificial Sequence
  Synthetic oligonucleotide
gatatcttgggcgtggactcacaattagca

SEQ ID NO: 246255 - DNA, 30 bp, Artificial Sequence
  Synthetic oligonucleotide
ggccccggctgatctactagcaacttagca

SEQ ID NO: 246256 - DNA, 30 bp, Artificial Sequence
  Synthetic oligonucleotide
cgcgtcttagtttgcaacgcgacgttagca

SEQ ID NO: 246257 - DNA, 30 bp, Artificial Sequence
  Synthetic oligonucleotide
atgtgcagcgggagttataacacaaacgca

SEQ ID NO: 246258 - DNA, 30 bp, Artificial Sequence
  Synthetic oligonucleotide
aaaacagggtcccgctctagtgcacacgca

SEQ ID NO: 246259 - DNA, 30 bp, Artificial Sequence
  Synthetic oligonucleotide
gttcgatgtatcagggatcgccggcacgca

SEQ ID NO: 246260 - DNA, 30 bp, Artificial Sequence
  Synthetic oligonucleotide
caagatccttggacgtaattcgggcacgca

SEQ ID NO: 246261 - DNA, 30 bp, Artificial Sequence
  Synthetic oligonucleotide
ggtctgtgaagagaaatggaggcagacgca

SEQ ID NO: 246262 - DNA, 30 bp, Artificial Sequence
  Synthetic oligonucleotide
cgtgggagtaaacggtacaacgacgacgca

SEQ ID NO: 246263 - DNA, 30 bp, Artificial Sequence
  Synthetic oligonucleotide
attagagcatcgaggatacatcccgacgca

SEQ ID NO: 246264 - DNA, 30 bp, Artificial Sequence
  Synthetic oligonucleotide
cataggaagacggtaatccggcgggacgca

SEQ ID NO: 246265 - DNA, 30 bp, Artificial Sequence
  Synthetic oligonucleotide
accaagtgtgtgatcaatcctcgctacgca

SEQ ID NO: 246266 - DNA, 30 bp, Artificial Sequence
  Synthetic oligonucleotide
gtccttctgctatggagagatttctacgca

SEQ ID NO: 246267 - DNA, 30 bp, Artificial Sequence
  Synthetic oligonucleotide
tgaaggggtaagatgacttcgagttacgca

SEQ ID NO: 246268 - DNA, 30 bp, Artificial Sequence
  Synthetic oligonucleotide
aagacgacagttgcgatctaagcaaccgca

SEQ ID NO: 246269 - DNA, 30 bp, Artificial Sequence
  Synthetic oligonucleotide
acccgaatcggtgatagttcggccaccgca

SEQ ID NO: 246270 - DNA, 30 bp, Artificial Sequence
  Synthetic oligonucleotide
ggcggcgccttcagccgaaccctgaccgca

SEQ ID NO: 246271 - DNA, 30 bp, Artificial Sequence
  Synthetic oligonucleotide
agggtaccatcgaaggtgacggtgaccgca

SEQ ID NO: 246272 - DNA, 30 bp, Artificial Sequence
  Synthetic oligonucleotide
cctgaggggcagacagattatttacccgca

SEQ ID NO: 246273 - DNA, 30 bp, Artificial Sequence
  Synthetic oligonucleotide
gactgcggtgatttctacaagtcgcccgca

SEQ ID NO: 246274 - DNA, 30 bp, Artificial Sequence
  Synthetic oligonucleotide
agatcgtaactctaactgatgtcgcccgca

SEQ ID NO: 246275 - DNA, 30 bp, Artificial Sequence
  Synthetic oligonucleotide
aaatggacaatatgggataattctcccgca

SEQ ID NO: 246276 - DNA, 30 bp, Artificial Sequence
  Synthetic oligonucleotide
acgagacccttttaaccaagcaaggccgca

SEQ ID NO: 246277 - DNA, 30 bp, Artificial Sequence
  Synthetic oligonucleotide
gctaatgcgaattggcacaaactggccgca

SEQ ID NO: 246278 - DNA, 30 bp, Artificial Sequence
  Synthetic oligonucleotide
atacattacggaagcaacttacttgccgca

SEQ ID NO: 246279 - DNA, 30 bp, Artificial Sequence
  Synthetic oligonucleotide
gtacaaagatagtgagagggcatatccgca

SEQ ID NO: 246280 - DNA, 30 bp, Artificial Sequence
  Synthetic oligonucleotide
caccttcaaggcaactgcatctgcagcgca

SEQ ID NO: 246281 - DNA, 30 bp, Artificial Sequence
  Synthetic oligonucleotide
catgaagcgggacgcacttcgatcagcgca

SEQ ID NO: 246282 - DNA, 29 bp, Artificial Sequence
  Synthetic oligonucleotide
tagattccacctgagtctcaggtagcgca

SEQ ID NO: 246283 - DNA, 30 bp, Artificial Sequence
  Synthetic oligonucleotide
tagatacggctagttttctgcgtacgcgca

SEQ ID NO: 246284 - DNA, 30 bp, Artificial Sequence
  Synthetic oligonucleotide
atagccattcgggacggggcgcgccgcgca

SEQ ID NO: 246285 - DNA, 30 bp, Artificial Sequence
  Synthetic oligonucleotide
gctagggagtcttagtagacgagtcgcgca

SEQ ID NO: 246286 - DNA, 30 bp, Artificial Sequence
  Synthetic oligonucleotide
gtagataaccacagcgccaaagggggcgca

SEQ ID NO: 246287 - DNA, 30 bp, Artificial Sequence
  Synthetic oligonucleotide
tgggacgagtacgtgatcgggaactgcgca

SEQ ID NO: 246288 - DNA, 30 bp, Artificial Sequence
  Synthetic oligonucleotide
ccagctaggatttaaaaggcggacatcgca

SEQ ID NO: 246289 - DNA, 30 bp, Artificial Sequence
  Synthetic oligonucleotide
aagttaaacatcctaggggagtggatcgca

SEQ ID NO: 246290 - DNA, 30 bp, Artificial Sequence
  Synthetic oligonucleotide
cgagcataattcgagcgacttatgatcgca

SEQ ID NO: 246291 - DNA, 30 bp, Artificial Sequence
  Synthetic oligonucleotide
gcatatacgtccgtacaaagagtgatcgca

SEQ ID NO: 246292 - DNA, 30 bp, Artificial Sequence
  Synthetic oligonucleotide
atcatgtgaagtgagattgtattgatcgca

SEQ ID NO: 246293 - DNA, 30 bp, Artificial Sequence
  Synthetic oligonucleotide
tactttcaataagataggccgtgtatcgca

SEQ ID NO: 246294 - DNA, 30 bp, Artificial Sequence
  Synthetic oligonucleotide
tacgcggcgtgaaaccgcgatgaactcgca

SEQ ID NO: 246295 - DNA, 30 bp, Artificial Sequence
  Synthetic oligonucleotide
ccgacagctcgaatgatttgcgtactcgca

SEQ ID NO: 246296 - DNA, 30 bp, Artificial Sequence
  Synthetic oligonucleotide
cccatttgcgtatgcgcacctaacctcgca

SEQ ID NO: 246297 - DNA, 30 bp, Artificial Sequence
  Synthetic oligonucleotide
cctggtcatattcgctcggtcagcctcgca

SEQ ID NO: 246298 - DNA, 30 bp, Artificial Sequence
  Synthetic oligonucleotide
acatgtaccagtagatgacttcctctcgca

SEQ ID NO: 246299 - DNA, 30 bp, Artificial Sequence
  Synthetic oligonucleotide
cggttaggagcaatccctggtccagtcgca

SEQ ID NO: 246300 - DNA, 30 bp, Artificial Sequence
  Synthetic oligonucleotide
gcttcaagcgcgacgagtgtttcagtcgca

SEQ ID NO: 246301 - DNA, 30 bp, Artificial Sequence
  Synthetic oligonucleotide
catgcttactggcaaaaggataacgtcgca

SEQ ID NO: 246302 - DNA, 30 bp, Artificial Sequence
  Synthetic oligonucleotide
ctcgctggagcttcacgccggccattcgca

SEQ ID NO: 246303 - DNA, 30 bp, Artificial Sequence
  Synthetic oligonucleotide
tcggatgcgaacagtactaatgcattcgca

SEQ ID NO: 246304 - DNA, 30 bp, Artificial Sequence
  Synthetic oligonucleotide
gtgctagttttaggggtcattatattcgca

SEQ ID NO: 246305 - DNA, 30 bp, Artificial Sequence
  Synthetic oligonucleotide
tgggacacatacaattatcctgtattcgca

SEQ ID NO: 246306 - DNA, 30 bp, Artificial Sequence
  Synthetic oligonucleotide
gggtcacccaattagtcggattggttcgca

SEQ ID NO: 246307 - DNA, 30 bp, Artificial Sequence
  Synthetic oligonucleotide
ccaggatttttctttaccacatctttcgca

SEQ ID NO: 246308 - DNA, 30 bp, Artificial Sequence
  Synthetic oligonucleotide
ctatacagaatagttctgggcgcaaaggca

SEQ ID NO: 246309 - DNA, 30 bp, Artificial Sequence
  Synthetic oligonucleotide
tctcgttcgactcatagcggtacgaaggca

SEQ ID NO: 246310 - DNA, 30 bp, Artificial Sequence
  Synthetic oligonucleotide
aattgcgcacaaagcaaatgctcgaaggca

SEQ ID NO: 246311 - DNA, 30 bp, Artificial Sequence
  Synthetic oligonucleotide
gcttataggtaagaaaaagcctataaggca

SEQ ID NO: 246312 - DNA, 30 bp, Artificial Sequence
  Synthetic oligonucleotide
tctggttcagatcgaggtacatgtaaggca

SEQ ID NO: 246313 - DNA, 30 bp, Artificial Sequence
  Synthetic oligonucleotide
caaataacctcaatcgggagtcaacaggca

SEQ ID NO: 246314 - DNA, 30 bp, Artificial Sequence
  Synthetic oligonucleotide
gacacgatctgactacgccctgtacaggca

SEQ ID NO: 246315 - DNA, 30 bp, Artificial Sequence
  Synthetic oligonucleotide
catattgcgtcacgctcaacggcccaggca

SEQ ID NO: 246316 - DNA, 30 bp, Artificial Sequence
  Synthetic oligonucleotide
aggggaagaattgcgctggtagtccaggca

SEQ ID NO: 246317 - DNA, 30 bp, Artificial Sequence
  Synthetic oligonucleotide
ggggcagaggactgcgtattgaggcaggca

SEQ ID NO: 246318 - DNA, 30 bp, Artificial Sequence
  Synthetic oligonucleotide
ccgagatacgtgttatttacgcggcaggca

SEQ ID NO: 246319 - DNA, 30 bp, Artificial Sequence
  Synthetic oligonucleotide
atcttactggaatagtgtctacatcaggca

SEQ ID NO: 246320 - DNA, 30 bp, Artificial Sequence
  Synthetic oligonucleotide
gggcaatttagatatgcggcgtcagaggca

SEQ ID NO: 246321 - DNA, 30 bp, Artificial Sequence
  Synthetic oligonucleotide
gatcagcgcggtaccgcatactaggaggca

SEQ ID NO: 246322 - DNA, 30 bp, Artificial Sequence
  Synthetic oligonucleotide
ttcaatcaaagaggggacttgcgggaggca

SEQ ID NO: 246323 - DNA, 30 bp, Artificial Sequence
  Synthetic oligonucleotide
ttagaaacctggcaccccagagatgaggca

SEQ ID NO: 246324 - DNA, 30 bp, Artificial Sequence
  Synthetic oligonucleotide
gaatgtgtgggtctattggatccgtaggca

SEQ ID NO: 246325 - DNA, 30 bp, Artificial Sequence
  Synthetic oligonucleotide
aggtcaatcaatgtagccttatggtaggca

SEQ ID NO: 246326 - DNA, 30 bp, Artificial Sequence
  Synthetic oligonucleotide
ataactgagttagcatacgtgttgtaggca

SEQ ID NO: 246327 - DNA, 30 bp, Artificial Sequence
  Synthetic oligonucleotide
tcgttaagttcgctcctggcccattaggca

SEQ ID NO: 246328 - DNA, 30 bp, Artificial Sequence
  Synthetic oligonucleotide
agcctggcctctgattccggggattaggca

SEQ ID NO: 246329 - DNA, 30 bp, Artificial Sequence
  Synthetic oligonucleotide
gacaggacgggcagattatggtcttaggca

SEQ ID NO: 246330 - DNA, 30 bp, Artificial Sequence
  Synthetic oligonucleotide
attgatatgtatgggtgaatgcgttaggca

SEQ ID NO: 246331 - DNA, 30 bp, Artificial Sequence
  Synthetic oligonucleotide
gcgcccgtcgcatgggcaggttacacggca

SEQ ID NO: 246332 - DNA, 30 bp, Artificial Sequence
  Synthetic oligonucleotide
acaagttgttcttttagtcatgccacggca

SEQ ID NO: 246333 - DNA, 30 bp, Artificial Sequence
  Synthetic oligonucleotide
ggggcaaacgcgagctccgtaggcacggca

SEQ ID NO: 246334 - DNA, 30 bp, Artificial Sequence
  Synthetic oligonucleotide
gacgtaatacttttcagcgatttcacggca

SEQ ID NO: 246335 - DNA, 30 bp, Artificial Sequence
  Synthetic oligonucleotide
ggcaccgattattctatatgcacgacggca

SEQ ID NO: 246336 - DNA, 30 bp, Artificial Sequence
  Synthetic oligonucleotide
caacctcgtgtttgcgttagatcgacggca

SEQ ID NO: 246337 - DNA, 30 bp, Artificial Sequence
  Synthetic oligonucleotide
ggcatttaagcgcatcgtgaatttacggca

SEQ ID NO: 246338 - DNA, 30 bp, Artificial Sequence
  Synthetic oligonucleotide
ggaactataccttcccgcataacaccggca

SEQ ID NO: 246339 - DNA, 30 bp, Artificial Sequence
  Synthetic oligonucleotide
tccgaaatgagagaactggcgggaccggca

SEQ ID NO: 246340 - DNA, 30 bp, Artificial Sequence
  Synthetic oligonucleotide
tatttagtcggaaggtttcagataccggca

SEQ ID NO: 246341 - DNA, 30 bp, Artificial Sequence
  Synthetic oligonucleotide
gtacaagctggtcaagtcactctcccggca

SEQ ID NO: 246342 - DNA, 30 bp, Artificial Sequence
  Synthetic oligonucleotide
ggcgcgcggcagattcccagtttgccggca

SEQ ID NO: 246343 - DNA, 30 bp, Artificial Sequence
  Synthetic oligonucleotide
catcttcggctaggattcatgtatccggca

SEQ ID NO: 246344 - DNA, 29 bp, Artificial Sequence
  Synthetic oligonucleotide
gataacaggggacgagtggtactccggca

SEQ ID NO: 246345 - DNA, 30 bp, Artificial Sequence
  Synthetic oligonucleotide
cgcaaggtttagttttcttagcaagcggca

SEQ ID NO: 246346 - DNA, 30 bp, Artificial Sequence
  Synthetic oligonucleotide
tctgtcagatgggtatccttgaacgcggca

SEQ ID NO: 246347 - DNA, 30 bp, Artificial Sequence
  Synthetic oligonucleotide
aggggggtccgaaagcaccccgacgcggca

SEQ ID NO: 246348 - DNA, 30 bp, Artificial Sequence
  Synthetic oligonucleotide
ctggtgacccggaagcctgataatgcggca

SEQ ID NO: 246349 - DNA, 30 bp, Artificial Sequence
  Synthetic oligonucleotide
agatcgcgaggctgatagacttatgcggca

SEQ ID NO: 246350 - DNA, 30 bp, Artificial Sequence
  Synthetic oligonucleotide
ctctcgctagcccgaggagcgcgtgcggca

SEQ ID NO: 246351 - DNA, 30 bp, Artificial Sequence
  Synthetic oligonucleotide
ccctgaaagtgctttgtctatatatcggca

SEQ ID NO: 246352 - DNA, 30 bp, Artificial Sequence
  Synthetic oligonucleotide
aagaggaaccagttttaatcggactcggca

SEQ ID NO: 246353 - DNA, 30 bp, Artificial Sequence
  Synthetic oligonucleotide
gattttaagaccaactcaaaattgtcggca

SEQ ID NO: 246354 - DNA, 30 bp, Artificial Sequence
  Synthetic oligonucleotide
ctgctagaggacactaaggttcattcggca

SEQ ID NO: 246355 - DNA, 30 bp, Artificial Sequence
  Synthetic oligonucleotide
gctgtgaagtagctgagtcactattcggca

SEQ ID NO: 246356 - DNA, 30 bp, Artificial Sequence
  Synthetic oligonucleotide
agcattaaactagggtataagtaaagggca

SEQ ID NO: 246357 - DNA, 30 bp, Artificial Sequence
  Synthetic oligonucleotide
gcttaaccggtatttttctttgcaagggca

SEQ ID NO: 246358 - DNA, 30 bp, Artificial Sequence
  Synthetic oligonucleotide
tgcggtctctgcttatcctgttgaagggca

SEQ ID NO: 246359 - DNA, 30 bp, Artificial Sequence
  Synthetic oligonucleotide
cgagttggtttatggcccatggacagggca

SEQ ID NO: 246360 - DNA, 30 bp, Artificial Sequence
  Synthetic oligonucleotide
aggtatagtggagtggtgctactcagggca

SEQ ID NO: 246361 - DNA, 30 bp, Artificial Sequence
  Synthetic oligonucleotide
tccacgaatgcaactatgagctctagggca

SEQ ID NO: 246362 - DNA, 30 bp, Artificial Sequence
  Synthetic oligonucleotide
gggacataatagtcctcaacttaacgggca

SEQ ID NO: 246363 - DNA, 30 bp, Artificial Sequence
  Synthetic oligonucleotide
ggttgggttacctacttaggagcgcgggca

SEQ ID NO: 246364 - DNA, 30 bp, Artificial Sequence
  Synthetic oligonucleotide
cctgtcggtatgaagctggcggctcgggca

SEQ ID NO: 246365 - DNA, 30 bp, Artificial Sequence
  Synthetic oligonucleotide
tccattatggaacaagttatcgcaggggca

SEQ ID NO: 246366 - DNA, 30 bp, Artificial Sequence
  Synthetic oligonucleotide
cgaatgttttttaaagcctagagaggggca

SEQ ID NO: 246367 - DNA, 30 bp, Artificial Sequence
  Synthetic oligonucleotide
agtgtttctgatgtgcagggtacgggggca

SEQ ID NO: 246368 - DNA, 30 bp, Artificial Sequence
  Synthetic oligonucleotide
agcccctgtgcctgtcgacctcggggggca

SEQ ID NO: 246369 - DNA, 30 bp, Artificial Sequence
  Synthetic oligonucleotide
aggaaacttaagtccgagggatggggggca

SEQ ID NO: 246370 - DNA, 30 bp, Artificial Sequence
  Synthetic oligonucleotide
ggaatattgccgttgttccggactggggca

SEQ ID NO: 246371 - DNA, 30 bp, Artificial Sequence
  Synthetic oligonucleotide
atggatagagttcaccaagctcgtggggca

SEQ ID NO: 246372 - DNA, 30 bp, Artificial Sequence
  Synthetic oligonucleotide
gcataggcgtcatgtcagctaaactgggca

SEQ ID NO: 246373 - DNA, 30 bp, Artificial Sequence
  Synthetic oligonucleotide
aaattaagagatctgggcctgaactgggca

SEQ ID NO: 246374 - DNA, 30 bp, Artificial Sequence
  Synthetic oligonucleotide
atatctctggcgactcgccgagactgggca

SEQ ID NO: 246375 - DNA, 30 bp, Artificial Sequence
  Synthetic oligonucleotide
ttattcgggaaaaacttgtgatgctgggca

SEQ ID NO: 246376 - DNA, 30 bp, Artificial Sequence
  Synthetic oligonucleotide
cgctgagtaaatcacggatggcagtgggca

SEQ ID NO: 246377 - DNA, 30 bp, Artificial Sequence
  Synthetic oligonucleotide
caatgcctttacctcgaagtggggtgggca

SEQ ID NO: 246378 - DNA, 30 bp, Artificial Sequence
  Synthetic oligonucleotide
tgctgggcattcaagcaaggattgtgggca

SEQ ID NO: 246379 - DNA, 30 bp, Artificial Sequence
  Synthetic oligonucleotide
atgaaccgcgaagcatgtgaaataatggca

SEQ ID NO: 246380 - DNA, 30 bp, Artificial Sequence
  Synthetic oligonucleotide
ggtcccaaagtaagtcggaagataatggca

SEQ ID NO: 246381 - DNA, 30 bp, Artificial Sequence
  Synthetic oligonucleotide
gcctgtgccaccctaggttccgtaatggca

SEQ ID NO: 246382 - DNA, 30 bp, Artificial Sequence
  Synthetic oligonucleotide
gccgcaggtcttaacggggcaaggatggca

SEQ ID NO: 246383 - DNA, 30 bp, Artificial Sequence
  Synthetic oligonucleotide
tctccgcacttcaattagcgggggatggca

SEQ ID NO: 246384 - DNA, 30 bp, Artificial Sequence
  Synthetic oligonucleotide
agtaatccaccaaccaacagtgttatggca

SEQ ID NO: 246385 - DNA, 30 bp, Artificial Sequence
  Synthetic oligonucleotide
gtaatgtgcgcagaaaacaacaaactggca

SEQ ID NO: 246386 - DNA, 30 bp, Artificial Sequence
  Synthetic oligonucleotide
aagctcagtacctagccgctgcgactggca

SEQ ID NO: 246387 - DNA, 30 bp, Artificial Sequence
  Synthetic oligonucleotide
ttaaaggtacatgccctataaaggctggca

SEQ ID NO: 246388 - DNA, 30 bp, Artificial Sequence
  Synthetic oligonucleotide
tgtatggggaacgggatgtgtgggctggca

SEQ ID NO: 246389 - DNA, 30 bp, Artificial Sequence
  Synthetic oligonucleotide
atcggtcttagtaaacccgcgaaagtggca

SEQ ID NO: 246390 - DNA, 30 bp, Artificial Sequence
  Synthetic oligonucleotide
gacatgggtttgtgcaaggtaggagtggca

SEQ ID NO: 246391 - DNA, 30 bp, Artificial Sequence
  Synthetic oligonucleotide
caaagtccgttcacagatcagatagtggca

SEQ ID NO: 246392 - DNA, 30 bp, Artificial Sequence
  Synthetic oligonucleotide
gctgtggaaagactgccgatgctagtggca

SEQ ID NO: 246393 - DNA, 30 bp, Artificial Sequence
  Synthetic oligonucleotide
ggtgatgcgcgctcgacgctgtgcgtggca

SEQ ID NO: 246394 - DNA, 30 bp, Artificial Sequence
  Synthetic oligonucleotide
tccgacagtccctgtagagcaggtgtggca

SEQ ID NO: 246395 - DNA, 30 bp, Artificial Sequence
  Synthetic oligonucleotide
cttgccaaatgatataacttgggattggca

SEQ ID NO: 246396 - DNA, 30 bp, Artificial Sequence
  Synthetic oligonucleotide
ttggctttaaactaatctgcgttattggca

SEQ ID NO: 246397 - DNA, 30 bp, Artificial Sequence
  Synthetic oligonucleotide
tgtattctggggttcgagatacgcttggca

SEQ ID NO: 246398 - DNA, 30 bp, Artificial Sequence
  Synthetic oligonucleotide
tcgagcctagcggcgagctgcatcttggca

SEQ ID NO: 246399 - DNA, 30 bp, Artificial Sequence
  Synthetic oligonucleotide
ggacgtaaaaattgtagcgccgtcttggca

SEQ ID NO: 246400 - DNA, 30 bp, Artificial Sequence
  Synthetic oligonucleotide
atacgtcgtctctgcccctcacggttggca

SEQ ID NO: 246401 - DNA, 30 bp, Artificial Sequence
  Synthetic oligonucleotide
tacacgggtgccgaggagtacgatttggca

SEQ ID NO: 246402 - DNA, 30 bp, Artificial Sequence
  Synthetic oligonucleotide
acgttattatccgcggacacagaaaatgca

SEQ ID NO: 246403 - DNA, 30 bp, Artificial Sequence
  Synthetic oligonucleotide
ggagttcgtactttacacaattcaaatgca

SEQ ID NO: 246404 - DNA, 30 bp, Artificial Sequence
  Synthetic oligonucleotide
tctcgaatcgaggtgagggctagaaatgca

SEQ ID NO: 246405 - DNA, 30 bp, Artificial Sequence
  Synthetic oligonucleotide
ccgccaggcgtcatacataaccacaatgca

SEQ ID NO: 246406 - DNA, 30 bp, Artificial Sequence
  Synthetic oligonucleotide
ctacttcacccgtaccgagtagaccatgca

SEQ ID NO: 246407 - DNA, 30 bp, Artificial Sequence
  Synthetic oligonucleotide
acggtagttatatctcatgtgatgcatgca

SEQ ID NO: 246408 - DNA, 30 bp, Artificial Sequence
  Synthetic oligonucleotide
taagcctatacacaccacggcagtcatgca

SEQ ID NO: 246409 - DNA, 30 bp, Artificial Sequence
  Synthetic oligonucleotide
cagacgggcctatggctccgataagatgca

SEQ ID NO: 246410 - DNA, 30 bp, Artificial Sequence
  Synthetic oligonucleotide
taggggtccataacctctgtcagcgatgca

SEQ ID NO: 246411 - DNA, 30 bp, Artificial Sequence
  Synthetic oligonucleotide
tcttggagttcgagtaggtagtatgatgca

SEQ ID NO: 246412 - DNA, 30 bp, Artificial Sequence
  Synthetic oligonucleotide
caaaaacgcatgagaggaagaagtgatgca

SEQ ID NO: 246413 - DNA, 30 bp, Artificial Sequence
  Synthetic oligonucleotide
tagtacgttggatgattttaagcatatgca

SEQ ID NO: 246414 - DNA, 30 bp, Artificial Sequence
  Synthetic oligonucleotide
ggcgtgtcatgatccccactgtattatgca

SEQ ID NO: 246415 - DNA, 30 bp, Artificial Sequence
  Synthetic oligonucleotide
ggggctaagtcagcttaaacattcactgca

SEQ ID NO: 246416 - DNA, 30 bp, Artificial Sequence
  Synthetic oligonucleotide
cagaatgtccaagtacgtgacctgactgca

SEQ ID NO: 246417 - DNA, 30 bp, Artificial Sequence
  Synthetic oligonucleotide
gggcgccctcatgtaaagggagcccctgca

SEQ ID NO: 246418 - DNA, 29 bp, Artificial Sequence
  Synthetic oligonucleotide
atcccacgtcggaacgagtacggcctgca

SEQ ID NO: 246419 - DNA, 30 bp, Artificial Sequence
  Synthetic oligonucleotide
agagggtaaacaagttcacactggcctgca

SEQ ID NO: 246420 - DNA, 29 bp, Artificial Sequence
  Synthetic oligonucleotide
gggacttgaacttcacctggtggcctgca

SEQ ID NO: 246421 - DNA, 30 bp, Artificial Sequence
  Synthetic oligonucleotide
aggacgttcatcaaaggcctcggtcctgca

SEQ ID NO: 246422 - DNA, 30 bp, Artificial Sequence
  Synthetic oligonucleotide
ctgataaggatgatgttagaatttcctgca

SEQ ID NO: 246423 - DNA, 30 bp, Artificial Sequence
  Synthetic oligonucleotide
tgttagatcttatttcgaaggaaagctgca

SEQ ID NO: 246424 - DNA, 30 bp, Artificial Sequence
  Synthetic oligonucleotide
ttggctacaattccgaagtctaaggctgca

SEQ ID NO: 246425 - DNA, 30 bp, Artificial Sequence
  Synthetic oligonucleotide
tggtttcgggggggattggagagggctgca

SEQ ID NO: 246426 - DNA, 30 bp, Artificial Sequence
  Synthetic oligonucleotide
agacctatagcacggcaggacggggctgca

SEQ ID NO: 246427 - DNA, 30 bp, Artificial Sequence
  Synthetic oligonucleotide
caatactcaggatgtacgacgggggctgca

SEQ ID NO: 246428 - DNA, 30 bp, Artificial Sequence
  Synthetic oligonucleotide
atgcatgtgtctgtatttctttgatctgca

SEQ ID NO: 246429 - DNA, 30 bp, Artificial Sequence
  Synthetic oligonucleotide
aaatatggaaggcatttggtgccgtctgca

SEQ ID NO: 246430 - DNA, 30 bp, Artificial Sequence
  Synthetic oligonucleotide
tatacaatattagccttagtcgcttctgca

SEQ ID NO: 246431 - DNA, 30 bp, Artificial Sequence
  Synthetic oligonucleotide
tcccacactgtgattagcatgccaagtgca

SEQ ID NO: 246432 - DNA, 30 bp, Artificial Sequence
  Synthetic oligonucleotide
tatcgtaatgctctctaaggctgaagtgca

SEQ ID NO: 246433 - DNA, 30 bp, Artificial Sequence
  Synthetic oligonucleotide
atgcatcagacggtaattaacataagtgca

SEQ ID NO: 246434 - DNA, 30 bp, Artificial Sequence
  Synthetic oligonucleotide
aacgagggccactccccgggtcgcagtgca

SEQ ID NO: 246435 - DNA, 30 bp, Artificial Sequence
  Synthetic oligonucleotide
attaaattgtgaatagatcaaggcagtgca

SEQ ID NO: 246436 - DNA, 30 bp, Artificial Sequence
  Synthetic oligonucleotide
tattagcggccggctcggctcatgagtgca

SEQ ID NO: 246437 - DNA, 30 bp, Artificial Sequence
  Synthetic oligonucleotide
ttctgtgggaatgtggttacgatgagtgca

SEQ ID NO: 246438 - DNA, 30 bp, Artificial Sequence
  Synthetic oligonucleotide
tggtgtcatcagtgcgtttgttttagtgca

SEQ ID NO: 246439 - DNA, 30 bp, Artificial Sequence
  Synthetic oligonucleotide
tttaaagagcgaatgtggctgtaacgtgca

SEQ ID NO: 246440 - DNA, 30 bp, Artificial Sequence
  Synthetic oligonucleotide
cgcatgcccagatcgtatgcaatccgtgca

SEQ ID NO: 246441 - DNA, 30 bp, Artificial Sequence
  Synthetic oligonucleotide
aagtgagctcctgagaaatattggcgtgca

SEQ ID NO: 246442 - DNA, 30 bp, Artificial Sequence
  Synthetic oligonucleotide
agtcacctcatttgttcaaacagtcgtgca

SEQ ID NO: 246443 - DNA, 30 bp, Artificial Sequence
  Synthetic oligonucleotide
taactaagtcgggtactgtcaccaggtgca

SEQ ID NO: 246444 - DNA, 30 bp, Artificial Sequence
  Synthetic oligonucleotide
ccgtaaggttatatgtagtcatcaggtgca

SEQ ID NO: 246445 - DNA, 30 bp, Artificial Sequence
  Synthetic oligonucleotide
agcggatctacttggataggttccggtgca

SEQ ID NO: 246446 - DNA, 30 bp, Artificial Sequence
  Synthetic oligonucleotide
attaatgagtaacgccacgccgtcggtgca

SEQ ID NO: 246447 - DNA, 30 bp, Artificial Sequence
  Synthetic oligonucleotide
gtttcatgggacaacttaagtcagggtgca

SEQ ID NO: 246448 - DNA, 30 bp, Artificial Sequence
  Synthetic oligonucleotide
gcaacctcaatccgatatggtgagggtgca

SEQ ID NO: 246449 - DNA, 30 bp, Artificial Sequence
  Synthetic oligonucleotide
tctagcgctaggaacggtgtaacgggtgca

SEQ ID NO: 246450 - DNA, 30 bp, Artificial Sequence
  Synthetic oligonucleotide
aggtaagaggctttcgcagagaggggtgca

SEQ ID NO: 246451 - DNA, 30 bp, Artificial Sequence
  Synthetic oligonucleotide
aggctcccgctgggtaacctcgggggtgca

SEQ ID NO: 246452 - DNA, 30 bp, Artificial Sequence
  Synthetic oligonucleotide
agaagtttacttcagcgacaccgtggtgca

SEQ ID NO: 246453 - DNA, 30 bp, Artificial Sequence
  Synthetic oligonucleotide
gtgagatccgaggactcactcaaatgtgca

SEQ ID NO: 246454 - DNA, 30 bp, Artificial Sequence
  Synthetic oligonucleotide
tcaaaaaaccggcaactcactatatgtgca

SEQ ID NO: 246455 - DNA, 30 bp, Artificial Sequence
  Synthetic oligonucleotide
accgcgaggatcacgagcagtctctgtgca

SEQ ID NO: 246456 - DNA, 30 bp, Artificial Sequence
  Synthetic oligonucleotide
atgaaggcatacagtcaacgtaggtgtgca

SEQ ID NO: 246457 - DNA, 30 bp, Artificial Sequence
  Synthetic oligonucleotide
tggagttatgagtgagtccaactgtgtgca

SEQ ID NO: 246458 - DNA, 30 bp, Artificial Sequence
  Synthetic oligonucleotide
cccagtatacgactgctatcctattgtgca

SEQ ID NO: 246459 - DNA, 30 bp, Artificial Sequence
  Synthetic oligonucleotide
gggaagggccaatcgtgttatggttgtgca

SEQ ID NO: 246460 - DNA, 30 bp, Artificial Sequence
  Synthetic oligonucleotide
gttcacaagcaattggccgctgagattgca

SEQ ID NO: 246461 - DNA, 30 bp, Artificial Sequence
  Synthetic oligonucleotide
agtgtagtcacttttagcatatggattgca

SEQ ID NO: 246462 - DNA, 30 bp, Artificial Sequence
  Synthetic oligonucleotide
gcatcctacgatgatatatcgatgattgca

SEQ ID NO: 246463 - DNA, 30 bp, Artificial Sequence
  Synthetic oligonucleotide
aacggtcttagcgggccaatagcacttgca

SEQ ID NO: 246464 - DNA, 30 bp, Artificial Sequence
  Synthetic oligonucleotide
gcgcagaaaaaaaccggcttttcccttgca

SEQ ID NO: 246465 - DNA, 30 bp, Artificial Sequence
  Synthetic oligonucleotide
tgagcaaataacggggactagtcgcttgca

SEQ ID NO: 246466 - DNA, 30 bp, Artificial Sequence
  Synthetic oligonucleotide
tatagggtcgggttcatcgaaatgcttgca

SEQ ID NO: 246467 - DNA, 30 bp, Artificial Sequence
  Synthetic oligonucleotide
gcactgcaggcgacactgcggcgtcttgca

SEQ ID NO: 246468 - DNA, 30 bp, Artificial Sequence
  Synthetic oligonucleotide
agccgatgactaccgataattacagttgca

SEQ ID NO: 246469 - DNA, 30 bp, Artificial Sequence
  Synthetic oligonucleotide
ctcaacgcaaagcaaggtaaatgagttgca

SEQ ID NO: 246470 - DNA, 30 bp, Artificial Sequence
  Synthetic oligonucleotide
tggcttcgaaagggcatgacatgcgttgca

SEQ ID NO: 246471 - DNA, 30 bp, Artificial Sequence
  Synthetic oligonucleotide
aattgatacgatgaaattcggtcggttgca

SEQ ID NO: 246472 - DNA, 30 bp, Artificial Sequence
  Synthetic oligonucleotide
cctgtgcaccagtataggccctgtgttgca

SEQ ID NO: 246473 - DNA, 30 bp, Artificial Sequence
  Synthetic oligonucleotide
cctgggaggaggcagattagtcttgttgca

SEQ ID NO: 246474 - DNA, 30 bp, Artificial Sequence
  Synthetic oligonucleotide
atagcgagatggcgcttcgacttatttgca

SEQ ID NO: 246475 - DNA, 30 bp, Artificial Sequence
  Synthetic oligonucleotide
gtaggctaggttcccccacgtcactttgca

SEQ ID NO: 246476 - DNA, 30 bp, Artificial Sequence
  Synthetic oligonucleotide
cttctatcgtaatctcaaaacgagtttgca

SEQ ID NO: 246477 - DNA, 30 bp, Artificial Sequence
  Synthetic oligonucleotide
tattatagggtgataccgtagcggtttgca

SEQ ID NO: 246478 - DNA, 30 bp, Artificial Sequence
  Synthetic oligonucleotide
atcagcgacacgattgcaaatctgtttgca

SEQ ID NO: 246479 - DNA, 30 bp, Artificial Sequence
  Synthetic oligonucleotide
ctgatctgttcaaagggagacctaaaatca

SEQ ID NO: 246480 - DNA, 30 bp, Artificial Sequence
  Synthetic oligonucleotide
gggcagtctaggcaacagcggaacaaatca

SEQ ID NO: 246481 - DNA, 29 bp, Artificial Sequence
  Synthetic oligonucleotide
aattggaataatttgaatataacaaatca

SEQ ID NO: 246482 - DNA, 30 bp, Artificial Sequence
  Synthetic oligonucleotide
ttcaaacggcggaatctttaaacgaaatca

SEQ ID NO: 246483 - DNA, 30 bp, Artificial Sequence
  Synthetic oligonucleotide
tcaggtcctcggtaattcggccataaatca

SEQ ID NO: 246484 - DNA, 30 bp, Artificial Sequence
  Synthetic oligonucleotide
atcatggactcatagggccagcaacaatca

SEQ ID NO: 246485 - DNA, 30 bp, Artificial Sequence
  Synthetic oligonucleotide
aaaccaatatcgtttgtgtcattacaatca

SEQ ID NO: 246486 - DNA, 30 bp, Artificial Sequence
  Synthetic oligonucleotide
attaagcgggtttacatggtcaaccaatca

SEQ ID NO: 246487 - DNA, 30 bp, Artificial Sequence
  Synthetic oligonucleotide
tgaagacacgggtgatggcggtcccaatca

SEQ ID NO: 246488 - DNA, 30 bp, Artificial Sequence
  Synthetic oligonucleotide
catgtctctatgtgcaacctccatcaatca

SEQ ID NO: 246489 - DNA, 31 bp, Artificial Sequence
  Synthetic oligonucleotide
ttgtccgcgaatcatcaccgaaactcaatca

SEQ ID NO: 246490 - DNA, 30 bp, Artificial Sequence
  Synthetic oligonucleotide
gttaaatgggacggattgaacactcaatca

SEQ ID NO: 246491 - DNA, 30 bp, Artificial Sequence
  Synthetic oligonucleotide
gcagttgaaaagaagtgagtttcagaatca

SEQ ID NO: 246492 - DNA, 30 bp, Artificial Sequence
  Synthetic oligonucleotide
gtcggagcggcttacgggcatggagaatca

SEQ ID NO: 246493 - DNA, 30 bp, Artificial Sequence
  Synthetic oligonucleotide
aacgcataacctacacttttattcgaatca

SEQ ID NO: 246494 - DNA, 30 bp, Artificial Sequence
  Synthetic oligonucleotide
ggtaaggtaagcgtgcccgtcaaggaatca

SEQ ID NO: 246495 - DNA, 30 bp, Artificial Sequence
  Synthetic oligonucleotide
aaaagctgaatcttctacctaatggaatca

SEQ ID NO: 246496 - DNA, 30 bp, Artificial Sequence
  Synthetic oligonucleotide
caaaagtggtccctgtgtcaggttgaatca

SEQ ID NO: 246497 - DNA, 30 bp, Artificial Sequence
  Synthetic oligonucleotide
ggcccgggcgtattaaatactagataatca

SEQ ID NO: 246498 - DNA, 30 bp, Artificial Sequence
  Synthetic oligonucleotide
ggtgcgctccgcagatcaaaattataatca

SEQ ID NO: 246499 - DNA, 30 bp, Artificial Sequence
  Synthetic oligonucleotide
tatatggcgaacgtctagtttacctaatca

SEQ ID NO: 246500 - DNA, 30 bp, Artificial Sequence
  Synthetic oligonucleotide
gagagagaagccaggttaagggtctaatca

SEQ ID NO: 246501 - DNA, 30 bp, Artificial Sequence
  Synthetic oligonucleotide
gaccagtgatacgggagacgctagtaatca

SEQ ID NO: 246502 - DNA, 30 bp, Artificial Sequence
  Synthetic oligonucleotide
gaatccccacatgaaccttcgccgacatca

SEQ ID NO: 246503 - DNA, 30 bp, Artificial Sequence
  Synthetic oligonucleotide
ctcgtgacatagattataaaagggacatca

SEQ ID NO: 246504 - DNA, 30 bp, Artificial Sequence
  Synthetic oligonucleotide
aatggtagaggtgccataacctggacatca

SEQ ID NO: 246505 - DNA, 30 bp, Artificial Sequence
  Synthetic oligonucleotide
ctgtcggaacgctagttgcgaagtacatca

SEQ ID NO: 246506 - DNA, 30 bp, Artificial Sequence
  Synthetic oligonucleotide
cagtctaatcgaaaaggttatcacccatca

SEQ ID NO: 246507 - DNA, 30 bp, Artificial Sequence
  Synthetic oligonucleotide
gttagctaacggggtttcttctacccatca

SEQ ID NO: 246508 - DNA, 30 bp, Artificial Sequence
  Synthetic oligonucleotide
gatgctttaacccgatctaggggcccatca

SEQ ID NO: 246509 - DNA, 30 bp, Artificial Sequence
  Synthetic oligonucleotide
ttttaccgcaaatatctgtgcgggccatca

SEQ ID NO: 246510 - DNA, 30 bp, Artificial Sequence
  Synthetic oligonucleotide
gcggtgcggaaagggatttatattccatca

SEQ ID NO: 246511 - DNA, 30 bp, Artificial Sequence
  Synthetic oligonucleotide
gacaatcacaacctttattccacagcatca

SEQ ID NO: 246512 - DNA, 30 bp, Artificial Sequence
  Synthetic oligonucleotide
cgagtagggttagcctcgccacgagcatca

SEQ ID NO: 246513 - DNA, 30 bp, Artificial Sequence
  Synthetic oligonucleotide
tgaaagatcttcgttggagtctgagcatca

SEQ ID NO: 246514 - DNA, 30 bp, Artificial Sequence
  Synthetic oligonucleotide
gctactaagtctctaggggggctagcatca

SEQ ID NO: 246515 - DNA, 30 bp, Artificial Sequence
  Synthetic oligonucleotide
catgggttccggacgagttataacgcatca

SEQ ID NO: 246516 - DNA, 30 bp, Artificial Sequence
  Synthetic oligonucleotide
aacgggacccacatacttcacgtcgcatca

SEQ ID NO: 246517 - DNA, 30 bp, Artificial Sequence
  Synthetic oligonucleotide
gaatgggcatcaatagtataagatgcatca

SEQ ID NO: 246518 - DNA, 30 bp, Artificial Sequence
  Synthetic oligonucleotide
caggattctggaacctgatccggatcatca

SEQ ID NO: 246519 - DNA, 30 bp, Artificial Sequence
  Synthetic oligonucleotide
aacctcatatgcaggcacggaaactcatca

SEQ ID NO: 246520 - DNA, 30 bp, Artificial Sequence
  Synthetic oligonucleotide
cggttacgggtgtagttataggactcatca

SEQ ID NO: 246521 - DNA, 30 bp, Artificial Sequence
  Synthetic oligonucleotide
acaaatacgctattaggtacacggtcatca

SEQ ID NO: 246522 - DNA, 30 bp, Artificial Sequence
  Synthetic oligonucleotide
gacattcacattgagtacatgatgtcatca

SEQ ID NO: 246523 - DNA, 30 bp, Artificial Sequence
  Synthetic oligonucleotide
ctacccggtatacttgaaggtatgtcatca

SEQ ID NO: 246524 - DNA, 30 bp, Artificial Sequence
  Synthetic oligonucleotide
agtgggataatctgatcggtaccaagatca

SEQ ID NO: 246525 - DNA, 30 bp, Artificial Sequence
  Synthetic oligonucleotide
tcaatgggcctggttggtaccagaagatca

SEQ ID NO: 246526 - DNA, 30 bp, Artificial Sequence
  Synthetic oligonucleotide
gatctccaaagggtaacatggagaagatca

SEQ ID NO: 246527 - DNA, 30 bp, Artificial Sequence
  Synthetic oligonucleotide
acgtatacgtatgatggcagtgtaagatca

SEQ ID NO: 246528 - DNA, 30 bp, Artificial Sequence
  Synthetic oligonucleotide
aagaaacgaagacgttgacttgacagatca

SEQ ID NO: 246529 - DNA, 30 bp, Artificial Sequence
  Synthetic oligonucleotide
agattctataagtgtagtgatatcagatca

SEQ ID NO: 246530 - DNA, 30 bp, Artificial Sequence
  Synthetic oligonucleotide
atattgcatcccctaggtcataggagatca

SEQ ID NO: 246531 - DNA, 30 bp, Artificial Sequence
  Synthetic oligonucleotide
tgcggactcgaggtgaccattaatagatca

SEQ ID NO: 246532 - DNA, 30 bp, Artificial Sequence
  Synthetic oligonucleotide
gggaggattgagcggtaggacggtagatca

SEQ ID NO: 246533 - DNA, 30 bp, Artificial Sequence
  Synthetic oligonucleotide
ctgacattgagaaatttaaccaaacgatca

SEQ ID NO: 246534 - DNA, 30 bp, Artificial Sequence
  Synthetic oligonucleotide
gcgcttgaggctatctaatctgtacgatca

SEQ ID NO: 246535 - DNA, 30 bp, Artificial Sequence
  Synthetic oligonucleotide
gggcaaaatttgcatgtttccacgcgatca

SEQ ID NO: 246536 - DNA, 30 bp, Artificial Sequence
  Synthetic oligonucleotide
ctttgatgaaatccgtaaagtatgcgatca

SEQ ID NO: 246537 - DNA, 30 bp, Artificial Sequence
  Synthetic oligonucleotide
atcacgtctccggtccgataagtgcgatca

SEQ ID NO: 246538 - DNA, 30 bp, Artificial Sequence
  Synthetic oligonucleotide
agagcaacgtttgaacgtgcccaaggatca

SEQ ID NO: 246539 - DNA, 30 bp, Artificial Sequence
  Synthetic oligonucleotide
acggcttgggtaaagattccgagaggatca

SEQ ID NO: 246540 - DNA, 30 bp, Artificial Sequence
  Synthetic oligonucleotide
acagttgctgaaggacccataaacggatca

SEQ ID NO: 246541 - DNA, 30 bp, Artificial Sequence
  Synthetic oligonucleotide
atgcccgtcttagtcaaaagtaacggatca

SEQ ID NO: 246542 - DNA, 30 bp, Artificial Sequence
  Synthetic oligonucleotide
tagtcatgatgatgattgacagacggatca

SEQ ID NO: 246543 - DNA, 30 bp, Artificial Sequence
  Synthetic oligonucleotide
atgttctagagaacggtatataatggatca

SEQ ID NO: 246544 - DNA, 30 bp, Artificial Sequence
  Synthetic oligonucleotide
ttgaacaactctgtaaggtataatggatca

SEQ ID NO: 246545 - DNA, 30 bp, Artificial Sequence
  Synthetic oligonucleotide
caccccaacggttcaatgtttcaatgatca

SEQ ID NO: 246546 - DNA, 30 bp, Artificial Sequence
  Synthetic oligonucleotide
cgattcatagacaacctatgataatgatca

SEQ ID NO: 246547 - DNA, 30 bp, Artificial Sequence
  Synthetic oligonucleotide
aagggaaacgttcttggatgcgcatgatca

SEQ ID NO: 246548 - DNA, 30 bp, Artificial Sequence
  Synthetic oligonucleotide
acgtttagtcccgaaagtaaagtatgatca

SEQ ID NO: 246549 - DNA, 30 bp, Artificial Sequence
  Synthetic oligonucleotide
ttgattgcgtcattccaacgcttatgatca

SEQ ID NO: 246550 - DNA, 30 bp, Artificial Sequence
  Synthetic oligonucleotide
gacatgaaatagttccccgtctcctgatca

SEQ ID NO: 246551 - DNA, 30 bp, Artificial Sequence
  Synthetic oligonucleotide
tacctttaggatgatagtccgggctgatca

SEQ ID NO: 246552 - DNA, 30 bp, Artificial Sequence
  Synthetic oligonucleotide
aaccaaggtgttcaatgagatgtgtgatca

SEQ ID NO: 246553 - DNA, 30 bp, Artificial Sequence
  Synthetic oligonucleotide
gcctatcgtaggtgagcagttacttgatca

SEQ ID NO: 246554 - DNA, 30 bp, Artificial Sequence
  Synthetic oligonucleotide
agggccgtttaaccatggctgggttgatca

SEQ ID NO: 246555 - DNA, 30 bp, Artificial Sequence
  Synthetic oligonucleotide
cgaagcagctcgatgtttgtgccaatatca

SEQ ID NO: 246556 - DNA, 30 bp, Artificial Sequence
  Synthetic oligonucleotide
cggaatgtagccgctctggcaataatatca

SEQ ID NO: 246557 - DNA, 30 bp, Artificial Sequence
  Synthetic oligonucleotide
accagtcttgaaagcttagcgctgatatca

SEQ ID NO: 246558 - DNA, 30 bp, Artificial Sequence
  Synthetic oligonucleotide
gtacaagtgctctcgtcttcgctgatatca

SEQ ID NO: 246559 - DNA, 30 bp, Artificial Sequence
  Synthetic oligonucleotide
ggagcagatggattcacaaatcgtatatca

SEQ ID NO: 246560 - DNA, 30 bp, Artificial Sequence
  Synthetic oligonucleotide
aaaagatacgtgggccgtttgcttatatca

SEQ ID NO: 246561 - DNA, 30 bp, Artificial Sequence
  Synthetic oligonucleotide
cacagagaatgatttacgggaagcctatca

SEQ ID NO: 246562 - DNA, 30 bp, Artificial Sequence
  Synthetic oligonucleotide
ctaaagggcaaggcgaagacatagctatca

SEQ ID NO: 246563 - DNA, 30 bp, Artificial Sequence
  Synthetic oligonucleotide
agtacttcatacgccctctgaggtctatca

SEQ ID NO: 246564 - DNA, 30 bp, Artificial Sequence
  Synthetic oligonucleotide
ttgcgataaattagacattctaacgtatca

SEQ ID NO: 246565 - DNA, 30 bp, Artificial Sequence
  Synthetic oligonucleotide
gtcagtgcggataagtgcagatacgtatca

SEQ ID NO: 246566 - DNA, 30 bp, Artificial Sequence
  Synthetic oligonucleotide
tactgtttagatggcgaaaggcaggtatca

SEQ ID NO: 246567 - DNA, 30 bp, Artificial Sequence
  Synthetic oligonucleotide
gaccatgccccacggccttcggtgttatca

SEQ ID NO: 246568 - DNA, 30 bp, Artificial Sequence
  Synthetic oligonucleotide
aggatttgtctcgcaagaatcaacaactca

SEQ ID NO: 246569 - DNA, 30 bp, Artificial Sequence
  Synthetic oligonucleotide
tgagcagaagaaacagtgacccacaactca

SEQ ID NO: 246570 - DNA, 30 bp, Artificial Sequence
  Synthetic oligonucleotide
gtctcactataactagtcgtcctgaactca

SEQ ID NO: 246571 - DNA, 30 bp, Artificial Sequence
  Synthetic oligonucleotide
ccaagaaataatgtgtacatttcacactca

SEQ ID NO: 246572 - DNA, 30 bp, Artificial Sequence
  Synthetic oligonucleotide
atgaagcgcacgagttggactagacactca

SEQ ID NO: 246573 - DNA, 30 bp, Artificial Sequence
  Synthetic oligonucleotide
ctatagccccccctaccgaccgggcactca

SEQ ID NO: 246574 - DNA, 30 bp, Artificial Sequence
  Synthetic oligonucleotide
atatcacagtcttcacatcgtttgcactca

SEQ ID NO: 246575 - DNA, 30 bp, Artificial Sequence
  Synthetic oligonucleotide
cgggcgaactgcgcgccggatacagactca

SEQ ID NO: 246576 - DNA, 30 bp, Artificial Sequence
  Synthetic oligonucleotide
tacgaaagatgtacaagtatcttggactca

SEQ ID NO: 246577 - DNA, 30 bp, Artificial Sequence
  Synthetic oligonucleotide
cgcgcgtatataaaagaaaatcgtgactca

SEQ ID NO: 246578 - DNA, 30 bp, Artificial Sequence
  Synthetic oligonucleotide
ccatatgctattggtctcacctaatactca

SEQ ID NO: 246579 - DNA, 30 bp, Artificial Sequence
  Synthetic oligonucleotide
gactggatgctctgtgtgaaattatactca

SEQ ID NO: 246580 - DNA, 30 bp, Artificial Sequence
  Synthetic oligonucleotide
gtgatcatgcatatcttgtcaagctactca

SEQ ID NO: 246581 - DNA, 30 bp, Artificial Sequence
  Synthetic oligonucleotide
tacgtgtgtgtgctgcgcggtaggtactca

SEQ ID NO: 246582 - DNA, 30 bp, Artificial Sequence
  Synthetic oligonucleotide
tcagattcaatcagcctaatttggtactca

SEQ ID NO: 246583 - DNA, 30 bp, Artificial Sequence
  Synthetic oligonucleotide
caataaccgatttagggaaaattgtactca

SEQ ID NO: 246584 - DNA, 30 bp, Artificial Sequence
  Synthetic oligonucleotide
cagtagttaatactcagacaagcttactca

SEQ ID NO: 246585 - DNA, 30 bp, Artificial Sequence
  Synthetic oligonucleotide
tatgtccctgggaggcaaaacaccacctca

SEQ ID NO: 246586 - DNA, 30 bp, Artificial Sequence
  Synthetic oligonucleotide
catagactagcacattaaaatcagacctca

SEQ ID NO: 246587 - DNA, 30 bp, Artificial Sequence
  Synthetic oligonucleotide
caaagcgcggatgttgtggatccgacctca

SEQ ID NO: 246588 - DNA, 30 bp, Artificial Sequence
  Synthetic oligonucleotide
gcctgaatacgctatagttgtaggacctca

SEQ ID NO: 246589 - DNA, 30 bp, Artificial Sequence
  Synthetic oligonucleotide
gcagtcaatgcaagaaagagcgttacctca

SEQ ID NO: 246590 - DNA, 30 bp, Artificial Sequence
  Synthetic oligonucleotide
tcttgggccgacacgaatacccaaccctca

SEQ ID NO: 246591 - DNA, 30 bp, Artificial Sequence
  Synthetic oligonucleotide
gtgatgcccttcgcgcagttaaacccctca

SEQ ID NO: 246592 - DNA, 30 bp, Artificial Sequence
  Synthetic oligonucleotide
tatagacttattgtgttcgtatgcccctca

SEQ ID NO: 246593 - DNA, 30 bp, Artificial Sequence
  Synthetic oligonucleotide
tgtcgaactggcctgtttattttcccctca

SEQ ID NO: 246594 - DNA, 30 bp, Artificial Sequence
  Synthetic oligonucleotide
ggaagctttggggtatggaagaacgcctca

SEQ ID NO: 246595 - DNA, 30 bp, Artificial Sequence
  Synthetic oligonucleotide
aacagttacagcttctagtatagcgcctca

SEQ ID NO: 246596 - DNA, 30 bp, Artificial Sequence
  Synthetic oligonucleotide
tgccatagagctcggataagggtggcctca

SEQ ID NO: 246597 - DNA, 30 bp, Artificial Sequence
  Synthetic oligonucleotide
ctaacgatggggcgcggcgcggctagctca

SEQ ID NO: 246598 - DNA, 30 bp, Artificial Sequence
  Synthetic oligonucleotide
caaactgcatccgttctttaagttagctca

SEQ ID NO: 246599 - DNA, 30 bp, Artificial Sequence
  Synthetic oligonucleotide
gcgtgtcatgcggaaatgatttcacgctca

SEQ ID NO: 246600 - DNA, 30 bp, Artificial Sequence
  Synthetic oligonucleotide
tactgagatagatcactgtgtctacgctca

SEQ ID NO: 246601 - DNA, 30 bp, Artificial Sequence
  Synthetic oligonucleotide
tggcctaaaaagtcgacttggaaccgctca

SEQ ID NO: 246602 - DNA, 30 bp, Artificial Sequence
  Synthetic oligonucleotide
ggagcacgacgaggtgatagagaccgctca

SEQ ID NO: 246603 - DNA, 30 bp, Artificial Sequence
  Synthetic oligonucleotide
cgtacatgtggctccagcggcgttcgctca

SEQ ID NO: 246604 - DNA, 30 bp, Artificial Sequence
  Synthetic oligonucleotide
taatagttgacactttaccggaaaggctca

SEQ ID NO: 246605 - DNA, 30 bp, Artificial Sequence
  Synthetic oligonucleotide
atcaccagtgtgttcccgtgccaaggctca

SEQ ID NO: 246606 - DNA, 30 bp, Artificial Sequence
  Synthetic oligonucleotide
taagcgaaatttgtgcacaagcaaggctca

SEQ ID NO: 246607 - DNA, 30 bp, Artificial Sequence
  Synthetic oligonucleotide
cacgctgtaatgtaatactacacaggctca

SEQ ID NO: 246608 - DNA, 30 bp, Artificial Sequence
  Synthetic oligonucleotide
aaactccgactagacagtaaatccggctca

SEQ ID NO: 246609 - DNA, 30 bp, Artificial Sequence
  Synthetic oligonucleotide
aactagaagcgtacacctccaaagggctca

SEQ ID NO: 246610 - DNA, 30 bp, Artificial Sequence
  Synthetic oligonucleotide
aagagtctaactgctcgaacacatggctca

SEQ ID NO: 246611 - DNA, 30 bp, Artificial Sequence
  Synthetic oligonucleotide
tatggactgatgagttatactcaatgctca

SEQ ID NO: 246612 - DNA, 30 bp, Artificial Sequence
  Synthetic oligonucleotide
tttagggcgcgctaaagtttagaatgctca

SEQ ID NO: 246613 - DNA, 30 bp, Artificial Sequence
  Synthetic oligonucleotide
gggattttgcactggtcaaccaactgctca

SEQ ID NO: 246614 - DNA, 30 bp, Artificial Sequence
  Synthetic oligonucleotide
gcgtatgtattctcgctcacattgtgctca

SEQ ID NO: 246615 - DNA, 30 bp, Artificial Sequence
  Synthetic oligonucleotide
cctagtaaccgagaaatggtcggttgctca

SEQ ID NO: 246616 - DNA, 30 bp, Artificial Sequence
  Synthetic oligonucleotide
tgacgaaaagggacccgatgtgcaatctca

SEQ ID NO: 246617 - DNA, 30 bp, Artificial Sequence
  Synthetic oligonucleotide
acggttaccggcttcccttcagccatctca

SEQ ID NO: 246618 - DNA, 30 bp, Artificial Sequence
  Synthetic oligonucleotide
gaccatcgggaattcgcaggatgcatctca

SEQ ID NO: 246619 - DNA, 30 bp, Artificial Sequence
  Synthetic oligonucleotide
ccgtgacagtttcggggacgagtcatctca

SEQ ID NO: 246620 - DNA, 30 bp, Artificial Sequence
  Synthetic oligonucleotide
gggtgttgtaaatattctgtctggatctca

SEQ ID NO: 246621 - DNA, 30 bp, Artificial Sequence
  Synthetic oligonucleotide
tacgcttcaccttgttagtaccttatctca

SEQ ID NO: 246622 - DNA, 30 bp, Artificial Sequence
  Synthetic oligonucleotide
ctgcaaggggcctccagtctgatactctca

SEQ ID NO: 246623 - DNA, 30 bp, Artificial Sequence
  Synthetic oligonucleotide
cggcgcgcaggggcgttttgcaagctctca

SEQ ID NO: 246624 - DNA, 30 bp, Artificial Sequence
  Synthetic oligonucleotide
acctacagtaggagcaaattcagtctctca

SEQ ID NO: 246625 - DNA, 30 bp, Artificial Sequence
  Synthetic oligonucleotide
ttgccgccggccgccagtcagccagtctca

SEQ ID NO: 246626 - DNA, 30 bp, Artificial Sequence
  Synthetic oligonucleotide
ggcatggagactccggtggacaccgtctca

SEQ ID NO: 246627 - DNA, 30 bp, Artificial Sequence
  Synthetic oligonucleotide
aatggtgcacgttaggattttgtcgtctca

SEQ ID NO: 246628 - DNA, 30 bp, Artificial Sequence
  Synthetic oligonucleotide
ccgacgcatgctttagctctgggtgtctca

SEQ ID NO: 246629 - DNA, 30 bp, Artificial Sequence
  Synthetic oligonucleotide
tgtagaatggacaggcctttttgtgtctca

SEQ ID NO: 246630 - DNA, 30 bp, Artificial Sequence
  Synthetic oligonucleotide
aacggggatacaaattaggacattgtctca

SEQ ID NO: 246631 - DNA, 30 bp, Artificial Sequence
  Synthetic oligonucleotide
acgatccgacatgagaaacaatcattctca

SEQ ID NO: 246632 - DNA, 30 bp, Artificial Sequence
  Synthetic oligonucleotide
ttcagttagaaacattgacttggattctca

SEQ ID NO: 246633 - DNA, 30 bp, Artificial Sequence
  Synthetic oligonucleotide
tcgatttcggcgtatggctagatcttctca

SEQ ID NO: 246634 - DNA, 30 bp, Artificial Sequence
  Synthetic oligonucleotide
gtttcgatagaacaacaaggtttgttctca

SEQ ID NO: 246635 - DNA, 30 bp, Artificial Sequence
  Synthetic oligonucleotide
gactgaattattcacgattgcgatttctca

SEQ ID NO: 246636 - DNA, 30 bp, Artificial Sequence
  Synthetic oligonucleotide
aagtttcttcgaggaaaagcatatttctca

SEQ ID NO: 246637 - DNA, 30 bp, Artificial Sequence
  Synthetic oligonucleotide
gaaaagcggagttggtagggacttttctca

SEQ ID NO: 246638 - DNA, 30 bp, Artificial Sequence
  Synthetic oligonucleotide
gtgtctagtgggttcaccggcgataagtca

SEQ ID NO: 246639 - DNA, 30 bp, Artificial Sequence
  Synthetic oligonucleotide
agaaaataacgaactacagtcattaagtca

SEQ ID NO: 246640 - DNA, 30 bp, Artificial Sequence
  Synthetic oligonucleotide
tcccaatgaggaggtctcaaagaccagtca

SEQ ID NO: 246641 - DNA, 30 bp, Artificial Sequence
  Synthetic oligonucleotide
ttagttgaggtcccaattgcaagccagtca

SEQ ID NO: 246642 - DNA, 30 bp, Artificial Sequence
  Synthetic oligonucleotide
agcgacaactaacctgcagttgtccagtca

SEQ ID NO: 246643 - DNA, 25 bp, Artificial Sequence
  Synthetic oligonucleotide
gtgacattaaaaaatagttcagtca

SEQ ID NO: 246644 - DNA, 30 bp, Artificial Sequence
  Synthetic oligonucleotide
ccagaagacctccaccgcaacaaagagtca

SEQ ID NO: 246645 - DNA, 30 bp, Artificial Sequence
  Synthetic oligonucleotide
cggaagacacgcttatctgtgcaagagtca

SEQ ID NO: 246646 - DNA, 30 bp, Artificial Sequence
  Synthetic oligonucleotide
caagagtaaacgcacctagctcaggagtca

SEQ ID NO: 246647 - DNA, 30 bp, Artificial Sequence
  Synthetic oligonucleotide
gtcacgatgaaggtatgctttcaggagtca

SEQ ID NO: 246648 - DNA, 30 bp, Artificial Sequence
  Synthetic oligonucleotide
agggtattgtgattttgatggcgggagtca

SEQ ID NO: 246649 - DNA, 30 bp, Artificial Sequence
  Synthetic oligonucleotide
agctcctcaactacacccgtcaatgagtca

SEQ ID NO: 246650 - DNA, 29 bp, Artificial Sequence
  Synthetic oligonucleotide
acggggaattggaacttcgggatgagtca

SEQ ID NO: 246651 - DNA, 30 bp, Artificial Sequence
  Synthetic oligonucleotide
accaggacgtctgaatgtgctgctgagtca

SEQ ID NO: 246652 - DNA, 30 bp, Artificial Sequence
  Synthetic oligonucleotide
cccatccagtgttgccttgaacgtgagtca

SEQ ID NO: 246653 - DNA, 30 bp, Artificial Sequence
  Synthetic oligonucleotide
accaaggtctaaggatgttatgtctagtca

SEQ ID NO: 246654 - DNA, 30 bp, Artificial Sequence
  Synthetic oligonucleotide
ttgagacataaatcccaggaggcttagtca

SEQ ID NO: 246655 - DNA, 30 bp, Artificial Sequence
  Synthetic oligonucleotide
gaaagcagtcatccacgggacgaaacgtca

SEQ ID NO: 246656 - DNA, 30 bp, Artificial Sequence
  Synthetic oligonucleotide
aatttctctagccgcgtacgaagaacgtca

SEQ ID NO: 246657 - DNA, 30 bp, Artificial Sequence
  Synthetic oligonucleotide
aatggtggattcaatgggcgcttaacgtca

SEQ ID NO: 246658 - DNA, 30 bp, Artificial Sequence
  Synthetic oligonucleotide
ctattgcgagcggtagccctatacacgtca

SEQ ID NO: 246659 - DNA, 30 bp, Artificial Sequence
  Synthetic oligonucleotide
ggcgagacgcgataggcaagcaccacgtca

SEQ ID NO: 246660 - DNA, 30 bp, Artificial Sequence
  Synthetic oligonucleotide
cgggcctcataagtacgggagaggacgtca

SEQ ID NO: 246661 - DNA, 31 bp, Artificial Sequence
  Synthetic oligonucleotide
atgatgcgatgcttcaccctaattgacgtca

SEQ ID NO: 246662 - DNA, 30 bp, Artificial Sequence
  Synthetic oligonucleotide
atgggtgacatggaacatctgttgacgtca

SEQ ID NO: 246663 - DNA, 40 bp, Artificial Sequence
  Synthetic oligonucleotide
cggtaaggagggtcaccgacgtcgcgccgttgctacgtca

SEQ ID NO: 246664 - DNA, 30 bp, Artificial Sequence
  Synthetic oligonucleotide
aaaggcgacgttcgcacagcacgtacgtca

SEQ ID NO: 246665 - DNA, 30 bp, Artificial Sequence
  Synthetic oligonucleotide
ttaagcttaccgcgatcccggataccgtca

SEQ ID NO: 246666 - DNA, 30 bp, Artificial Sequence
  Synthetic oligonucleotide
tccaaggggcgataatcatttgtcccgtca

SEQ ID NO: 246667 - DNA, 30 bp, Artificial Sequence
  Synthetic oligonucleotide
gctgaaggagagcagaaactgctgccgtca

SEQ ID NO: 246668 - DNA, 31 bp, Artificial Sequence
  Synthetic oligonucleotide
cgcctcctggaatgcgctcccttctccgtca

SEQ ID NO: 246669 - DNA, 30 bp, Artificial Sequence
  Synthetic oligonucleotide
tccgatcctaccatctaggattaagcgtca

SEQ ID NO: 246670 - DNA, 30 bp, Artificial Sequence
  Synthetic oligonucleotide
ccagcatgtgacctacgtgacccagcgtca

SEQ ID NO: 246671 - DNA, 30 bp, Artificial Sequence
  Synthetic oligonucleotide
agagtacagggtatgcagggcgacgcgtca

SEQ ID NO: 246672 - DNA, 30 bp, Artificial Sequence
  Synthetic oligonucleotide
ctgttcaattagtgtggcggttgcgcgtca

SEQ ID NO: 246673 - DNA, 30 bp, Artificial Sequence
  Synthetic oligonucleotide
ctcacgtcaggtgctgccttagttgcgtca

SEQ ID NO: 246674 - DNA, 30 bp, Artificial Sequence
  Synthetic oligonucleotide
agtactctgccgggcgtagttggatcgtca

SEQ ID NO: 246675 - DNA, 30 bp, Artificial Sequence
  Synthetic oligonucleotide
ggcggttccaccagtaaagccgtatcgtca

SEQ ID NO: 246676 - DNA, 30 bp, Artificial Sequence
  Synthetic oligonucleotide
cttagaaagccatacgaagactactcgtca

SEQ ID NO: 246677 - DNA, 30 bp, Artificial Sequence
  Synthetic oligonucleotide
gcccgtcgctatcaggtgttgaggtcgtca

SEQ ID NO: 246678 - DNA, 30 bp, Artificial Sequence
  Synthetic oligonucleotide
tgtgaggcgggtttcataacgtcttcgtca

SEQ ID NO: 246679 - DNA, 30 bp, Artificial Sequence
  Synthetic oligonucleotide
atgggtgaacgttaaaaggccttaaggtca

SEQ ID NO: 246680 - DNA, 30 bp, Artificial Sequence
  Synthetic oligonucleotide
gaaagcgttcactgcacgtccaccaggtca

SEQ ID NO: 246681 - DNA, 30 bp, Artificial Sequence
  Synthetic oligonucleotide
cccggctgggcaattgggtcttccaggtca

SEQ ID NO: 246682 - DNA, 30 bp, Artificial Sequence
  Synthetic oligonucleotide
gctatgacatgatctgagtgattcaggtca

SEQ ID NO: 246683 - DNA, 30 bp, Artificial Sequence
  Synthetic oligonucleotide
aaacgaaatatgttagggttgttcaggtca

SEQ ID NO: 246684 - DNA, 30 bp, Artificial Sequence
  Synthetic oligonucleotide
gtcggtaagtgattaatcggcccgaggtca

SEQ ID NO: 246685 - DNA, 30 bp, Artificial Sequence
  Synthetic oligonucleotide
tggccaacatgtgcggcctctccgaggtca

SEQ ID NO: 246686 - DNA, 30 bp, Artificial Sequence
  Synthetic oligonucleotide
ttacgttgcctatgagggtgtaggaggtca

SEQ ID NO: 246687 - DNA, 30 bp, Artificial Sequence
  Synthetic oligonucleotide
acgggagccaggtgctgggaattgaggtca

SEQ ID NO: 246688 - DNA, 30 bp, Artificial Sequence
  Synthetic oligonucleotide
gtattttgccaaatgttcactcctaggtca

SEQ ID NO: 246689 - DNA, 30 bp, Artificial Sequence
  Synthetic oligonucleotide
ctggtgcgcggtgtgtctacataccggtca

SEQ ID NO: 246690 - DNA, 30 bp, Artificial Sequence
  Synthetic oligonucleotide
gccactgcgtatatcaggaattaccggtca

SEQ ID NO: 246691 - DNA, 30 bp, Artificial Sequence
  Synthetic oligonucleotide
ttttggtcctgccctatggagctccggtca

SEQ ID NO: 246692 - DNA, 30 bp, Artificial Sequence
  Synthetic oligonucleotide
gaggatatctcataatcatctgtgcggtca

SEQ ID NO: 246693 - DNA, 30 bp, Artificial Sequence
  Synthetic oligonucleotide
tacctactatttagggtgtgagctcggtca

SEQ ID NO: 246694 - DNA, 30 bp, Artificial Sequence
  Synthetic oligonucleotide
ccactcgatccacggacttcgtctcggtca

SEQ ID NO: 246695 - DNA, 30 bp, Artificial Sequence
  Synthetic oligonucleotide
aatagtcaagctggttgtctgatagggtca

SEQ ID NO: 246696 - DNA, 30 bp, Artificial Sequence
  Synthetic oligonucleotide
cagctaataggatgcagaactgaggggtca

SEQ ID NO: 246697 - DNA, 30 bp, Artificial Sequence
  Synthetic oligonucleotide
aatggtgttgacccacgagacagggggtca

SEQ ID NO: 246698 - DNA, 30 bp, Artificial Sequence
  Synthetic oligonucleotide
ggagtcatagtaaattctaataatgggtca

SEQ ID NO: 246699 - DNA, 30 bp, Artificial Sequence
  Synthetic oligonucleotide
ttatcggccctgaatctgttcattgggtca

SEQ ID NO: 246700 - DNA, 30 bp, Artificial Sequence
  Synthetic oligonucleotide
cgctccttgctagtgcaagactaatggtca

SEQ ID NO: 246701 - DNA, 30 bp, Artificial Sequence
  Synthetic oligonucleotide
ttcctgaaactagaggagtcaatatggtca

SEQ ID NO: 246702 - DNA, 30 bp, Artificial Sequence
  Synthetic oligonucleotide
cagccacgaacatactaaggcaactggtca

SEQ ID NO: 246703 - DNA, 30 bp, Artificial Sequence
  Synthetic oligonucleotide
actggcagcgcagggacctcccactggtca

SEQ ID NO: 246704 - DNA, 30 bp, Artificial Sequence
  Synthetic oligonucleotide
ccttcattggtcctccacggggactggtca

SEQ ID NO: 246705 - DNA, 30 bp, Artificial Sequence
  Synthetic oligonucleotide
ttcgtggtggaccccgtaggaggctggtca

SEQ ID NO: 246706 - DNA, 30 bp, Artificial Sequence
  Synthetic oligonucleotide
gatcttcggaagcaggtacttttctggtca

SEQ ID NO: 246707 - DNA, 30 bp, Artificial Sequence
  Synthetic oligonucleotide
tcacggcaaaattgaactacatggtggtca

SEQ ID NO: 246708 - DNA, 30 bp, Artificial Sequence
  Synthetic oligonucleotide
gtgcgctttacattgcaagttacttggtca

SEQ ID NO: 246709 - DNA, 30 bp, Artificial Sequence
  Synthetic oligonucleotide
aagtaaccagacgcgtgtccatgttggtca

SEQ ID NO: 246710 - DNA, 30 bp, Artificial Sequence
  Synthetic oligonucleotide
caacggcaaccatgccgacacagaatgtca

SEQ ID NO: 246711 - DNA, 30 bp, Artificial Sequence
  Synthetic oligonucleotide
agacaggacgatcataagtctgtaatgtca

SEQ ID NO: 246712 - DNA, 30 bp, Artificial Sequence
  Synthetic oligonucleotide
ctcctaagtgtctcttcatgacccatgtca

SEQ ID NO: 246713 - DNA, 30 bp, Artificial Sequence
  Synthetic oligonucleotide
atggtcctggacttagagaaattcatgtca

SEQ ID NO: 246714 - DNA, 30 bp, Artificial Sequence
  Synthetic oligonucleotide
cagagtggagaacagggtcctttcatgtca

SEQ ID NO: 246715 - DNA, 30 bp, Artificial Sequence
  Synthetic oligonucleotide
gcgcagaatattcgtcggtgacagatgtca

SEQ ID NO: 246716 - DNA, 30 bp, Artificial Sequence
  Synthetic oligonucleotide
gaggaaccgacgtgctatacagtgatgtca

SEQ ID NO: 246717 - DNA, 30 bp, Artificial Sequence
  Synthetic oligonucleotide
atagcaagtcttggcgggatattgatgtca

SEQ ID NO: 246718 - DNA, 30 bp, Artificial Sequence
  Synthetic oligonucleotide
gaaggtaggtaagggatccataccctgtca

SEQ ID NO: 246719 - DNA, 30 bp, Artificial Sequence
  Synthetic oligonucleotide
acttgacaaatggctgtctcatggctgtca

SEQ ID NO: 246720 - DNA, 30 bp, Artificial Sequence
  Synthetic oligonucleotide
tatgggcgaaagctagcaggtatgctgtca

SEQ ID NO: 246721 - DNA, 30 bp, Artificial Sequence
  Synthetic oligonucleotide
tacggtagcgctgtagattcataagtgtca

SEQ ID NO: 246722 - DNA, 30 bp, Artificial Sequence
  Synthetic oligonucleotide
aagagatcaatacgcgcgatttcagtgtca

SEQ ID NO: 246723 - DNA, 30 bp, Artificial Sequence
  Synthetic oligonucleotide
aaattgacaggtgcactggcggaggtgtca

SEQ ID NO: 246724 - DNA, 30 bp, Artificial Sequence
  Synthetic oligonucleotide
tgtaaaggatgacactcacggcgggtgtca

SEQ ID NO: 246725 - DNA, 30 bp, Artificial Sequence
  Synthetic oligonucleotide
gaccggagtttcaatccgcgctatgtgtca

SEQ ID NO: 246726 - DNA, 30 bp, Artificial Sequence
  Synthetic oligonucleotide
gatcgttaggatggggggaattaattgtca

SEQ ID NO: 246727 - DNA, 30 bp, Artificial Sequence
  Synthetic oligonucleotide
ttcctatgcggtgcgtgtccgtgcttgtca

SEQ ID NO: 246728 - DNA, 30 bp, Artificial Sequence
  Synthetic oligonucleotide
gactcacagacctatttcgtcgatttgtca

SEQ ID NO: 246729 - DNA, 30 bp, Artificial Sequence
  Synthetic oligonucleotide
ccatgtattttcagggtagagacaaattca

SEQ ID NO: 246730 - DNA, 30 bp, Artificial Sequence
  Synthetic oligonucleotide
acttctactgagatcaacccacacaattca

SEQ ID NO: 246731 - DNA, 30 bp, Artificial Sequence
  Synthetic oligonucleotide
ccactctggaagcattatgcaaccaattca

SEQ ID NO: 246732 - DNA, 30 bp, Artificial Sequence
  Synthetic oligonucleotide
ggattactgcacggaaaactcagcaattca

SEQ ID NO: 246733 - DNA, 30 bp, Artificial Sequence
  Synthetic oligonucleotide
ctccgcgctgattttagaatgagcaattca

SEQ ID NO: 246734 - DNA, 30 bp, Artificial Sequence
  Synthetic oligonucleotide
agataacattcgccatcgaattagaattca

SEQ ID NO: 246735 - DNA, 30 bp, Artificial Sequence
  Synthetic oligonucleotide
agattagtggggcagggtctcaggaattca

SEQ ID NO: 246736 - DNA, 30 bp, Artificial Sequence
  Synthetic oligonucleotide
agtatctcctcctggtggaagcataattca

SEQ ID NO: 246737 - DNA, 30 bp, Artificial Sequence
  Synthetic oligonucleotide
ccttggatatgccaagttgctactaattca

SEQ ID NO: 246738 - DNA, 30 bp, Artificial Sequence
  Synthetic oligonucleotide
tacttggctgattcgtagaagagtaattca

SEQ ID NO: 246739 - DNA, 30 bp, Artificial Sequence
  Synthetic oligonucleotide
ggatcgatttgatataagaaacgacattca

SEQ ID NO: 246740 - DNA, 30 bp, Artificial Sequence
  Synthetic oligonucleotide
gcctatagagggggtagttcattacattca

SEQ ID NO: 246741 - DNA, 30 bp, Artificial Sequence
  Synthetic oligonucleotide
agtaagtgtcgactacgacttcgccattca

SEQ ID NO: 246742 - DNA, 30 bp, Artificial Sequence
  Synthetic oligonucleotide
atggtattaaaacctgaggcttagcattca

SEQ ID NO: 246743 - DNA, 30 bp, Artificial Sequence
  Synthetic oligonucleotide
ctatccaagtgtgttgccaatcgtcattca

SEQ ID NO: 246744 - DNA, 30 bp, Artificial Sequence
  Synthetic oligonucleotide
ctgtagaaaatgaactcctaaaaagattca

SEQ ID NO: 246745 - DNA, 30 bp, Artificial Sequence
  Synthetic oligonucleotide
aatggaagatcctctgggagaggcgattca

SEQ ID NO: 246746 - DNA, 30 bp, Artificial Sequence
  Synthetic oligonucleotide
tgtatgaggtcggcttcttccgtcgattca

SEQ ID NO: 246747 - DNA, 30 bp, Artificial Sequence
  Synthetic oligonucleotide
tggctaagagtacataggtcattcgattca

SEQ ID NO: 246748 - DNA, 30 bp, Artificial Sequence
  Synthetic oligonucleotide
acaagcctggtgcgacagaatctggattca

SEQ ID NO: 246749 - DNA, 30 bp, Artificial Sequence
  Synthetic oligonucleotide
gacaaaaggtaataaaataccactgattca

SEQ ID NO: 246750 - DNA, 30 bp, Artificial Sequence
  Synthetic oligonucleotide
gggggtcaacaacacgcgcgcacatattca

SEQ ID NO: 246751 - DNA, 30 bp, Artificial Sequence
  Synthetic oligonucleotide
agttttggatataagcaattgtgctattca

SEQ ID NO: 246752 - DNA, 30 bp, Artificial Sequence
  Synthetic oligonucleotide
ggcttaactcgaacagcaccagcgtattca

SEQ ID NO: 246753 - DNA, 30 bp, Artificial Sequence
  Synthetic oligonucleotide
gaacaagacaagagcaaacttggttattca

SEQ ID NO: 246754 - DNA, 30 bp, Artificial Sequence
  Synthetic oligonucleotide
gcaagcaggacccaacgccaagtttattca

SEQ ID NO: 246755 - DNA, 30 bp, Artificial Sequence
  Synthetic oligonucleotide
accggatattgggaaaaagacgtttattca

SEQ ID NO: 246756 - DNA, 30 bp, Artificial Sequence
  Synthetic oligonucleotide
gaagaccaacgaggttattataaaacttca

SEQ ID NO: 246757 - DNA, 30 bp, Artificial Sequence
  Synthetic oligonucleotide
gtcacttcatgagcagggtgagcaacttca

SEQ ID NO: 246758 - DNA, 30 bp, Artificial Sequence
  Synthetic oligonucleotide
ctgccgcctaagacgtaaccaggaacttca

SEQ ID NO: 246759 - DNA, 30 bp, Artificial Sequence
  Synthetic oligonucleotide
gttaattcatcgtagagggacccgccttca

SEQ ID NO: 246760 - DNA, 30 bp, Artificial Sequence
  Synthetic oligonucleotide
tcgaagagtcttttaaccccaatgccttca

SEQ ID NO: 246761 - DNA, 30 bp, Artificial Sequence
  Synthetic oligonucleotide
cgcctagtgtcgtgtgcggctaaagcttca

SEQ ID NO: 246762 - DNA, 30 bp, Artificial Sequence
  Synthetic oligonucleotide
ctcatggtgttcatgttaggaggcgcttca

SEQ ID NO: 246763 - DNA, 30 bp, Artificial Sequence
  Synthetic oligonucleotide
ggaccagaacgaactacatgctatgcttca

SEQ ID NO: 246764 - DNA, 30 bp, Artificial Sequence
  Synthetic oligonucleotide
gtcacagaggtaaatgggagttcatcttca

SEQ ID NO: 246765 - DNA, 30 bp, Artificial Sequence
  Synthetic oligonucleotide
gatcctctgtcttgcggaacagcctcttca

SEQ ID NO: 246766 - DNA, 30 bp, Artificial Sequence
  Synthetic oligonucleotide
aaccggaatagagttgtggaagagtcttca

SEQ ID NO: 246767 - DNA, 30 bp, Artificial Sequence
  Synthetic oligonucleotide
acggtcgaagaggaacgcggcgggtcttca

SEQ ID NO: 246768 - DNA, 30 bp, Artificial Sequence
  Synthetic oligonucleotide
attaactagagaaaatccaatatttcttca

SEQ ID NO: 246769 - DNA, 30 bp, Artificial Sequence
  Synthetic oligonucleotide
cttggggtagtgtcaaggtgccacagttca

SEQ ID NO: 246770 - DNA, 30 bp, Artificial Sequence
  Synthetic oligonucleotide
ccaagagtttcagccctcccaatcagttca

SEQ ID NO: 246771 - DNA, 30 bp, Artificial Sequence
  Synthetic oligonucleotide
aagctatctgtggatggaactgggagttca

SEQ ID NO: 246772 - DNA, 30 bp, Artificial Sequence
  Synthetic oligonucleotide
tagctacgctagccacgtataagtagttca

SEQ ID NO: 246773 - DNA, 30 bp, Artificial Sequence
  Synthetic oligonucleotide
agatgtgcaaatgacatcgcaatacgttca

SEQ ID NO: 246774 - DNA, 30 bp, Artificial Sequence
  Synthetic oligonucleotide
taacgccaaaggattgtatacatgcgttca

SEQ ID NO: 246775 - DNA, 30 bp, Artificial Sequence
  Synthetic oligonucleotide
tagagccaaccactccgctttatgcgttca

SEQ ID NO: 246776 - DNA, 30 bp, Artificial Sequence
  Synthetic oligonucleotide
atgcgggctttgtattttaaacttcgttca

SEQ ID NO: 246777 - DNA, 30 bp, Artificial Sequence
  Synthetic oligonucleotide
gtgctctttggaactcaatatgcaggttca

SEQ ID NO: 246778 - DNA, 30 bp, Artificial Sequence
  Synthetic oligonucleotide
agtagagtgggtaatgcaggttgaggttca

SEQ ID NO: 246779 - DNA, 30 bp, Artificial Sequence
  Synthetic oligonucleotide
accactatatgggcatcaacttccggttca

SEQ ID NO: 246780 - DNA, 30 bp, Artificial Sequence
  Synthetic oligonucleotide
ttattgtaacctgtggtcacacatggttca

SEQ ID NO: 246781 - DNA, 30 bp, Artificial Sequence
  Synthetic oligonucleotide
tctcattcaatacattgtaaacgtggttca

SEQ ID NO: 246782 - DNA, 30 bp, Artificial Sequence
  Synthetic oligonucleotide
aacgaggctacgggtccagcaggtggttca

SEQ ID NO: 246783 - DNA, 30 bp, Artificial Sequence
  Synthetic oligonucleotide
taaatgatgggagtaaactcgggatgttca

SEQ ID NO: 246784 - DNA, 30 bp, Artificial Sequence
  Synthetic oligonucleotide
cgtaaaaaaaaattgtgtactcactgttca

SEQ ID NO: 246785 - DNA, 30 bp, Artificial Sequence
  Synthetic oligonucleotide
atagggccatcagtcaaaagaaaaatttca

SEQ ID NO: 246786 - DNA, 30 bp, Artificial Sequence
  Synthetic oligonucleotide
gtcggattcttgggttactgtaaaatttca

SEQ ID NO: 246787 - DNA, 30 bp, Artificial Sequence
  Synthetic oligonucleotide
tcagaatcattataccaaccttgaatttca

SEQ ID NO: 246788 - DNA, 30 bp, Artificial Sequence
  Synthetic oligonucleotide
gcggcaagcacaagggcatccctaatttca

SEQ ID NO: 246789 - DNA, 30 bp, Artificial Sequence
  Synthetic oligonucleotide
accgtcgtttaggatggcgcccacatttca

SEQ ID NO: 246790 - DNA, 30 bp, Artificial Sequence
  Synthetic oligonucleotide
gctcgtgtctggtaaaatcttgtcatttca

SEQ ID NO: 246791 - DNA, 30 bp, Artificial Sequence
  Synthetic oligonucleotide
aacggacgcgctagcgatgatgagatttca

SEQ ID NO: 246792 - DNA, 30 bp, Artificial Sequence
  Synthetic oligonucleotide
cgcgagcggatacgcatacaagtgatttca

SEQ ID NO: 246793 - DNA, 30 bp, Artificial Sequence
  Synthetic oligonucleotide
atcaaacttgtccgccacacgtctatttca

SEQ ID NO: 246794 - DNA, 30 bp, Artificial Sequence
  Synthetic oligonucleotide
tacaccggcgggcgagctcgttgtatttca

SEQ ID NO: 246795 - DNA, 30 bp, Artificial Sequence
  Synthetic oligonucleotide
acgataaccgacgaaaagacgttcctttca

SEQ ID NO: 246796 - DNA, 30 bp, Artificial Sequence
  Synthetic oligonucleotide
agttggtcgccggccaaaatgccgctttca

SEQ ID NO: 246797 - DNA, 30 bp, Artificial Sequence
  Synthetic oligonucleotide
taatgattagagttaccaagttcgctttca

SEQ ID NO: 246798 - DNA, 30 bp, Artificial Sequence
  Synthetic oligonucleotide
agtatcgggcacggcgattgcttgctttca

SEQ ID NO: 246799 - DNA, 30 bp, Artificial Sequence
  Synthetic oligonucleotide
acccatgaggccgagatccacgcagtttca

SEQ ID NO: 246800 - DNA, 30 bp, Artificial Sequence
  Synthetic oligonucleotide
ctgggtagtcaagggattcccaccgtttca

SEQ ID NO: 246801 - DNA, 30 bp, Artificial Sequence
  Synthetic oligonucleotide
agcgagtcagcaatgcagcaccaggtttca

SEQ ID NO: 246802 - DNA, 30 bp, Artificial Sequence
  Synthetic oligonucleotide
gttcaaatatggaaccggatcgcattttca

SEQ ID NO: 246803 - DNA, 30 bp, Artificial Sequence
  Synthetic oligonucleotide
gtctagggcaatgtggacgaaagattttca

SEQ ID NO: 246804 - DNA, 30 bp, Artificial Sequence
  Synthetic oligonucleotide
gacaagcgtgtgacacgtgtcatattttca

SEQ ID NO: 246805 - DNA, 30 bp, Artificial Sequence
  Synthetic oligonucleotide
gaggcgtcaggctactggcaaacgttttca

SEQ ID NO: 246806 - DNA, 30 bp, Artificial Sequence
  Synthetic oligonucleotide
agtcatcaatactgaggggcgagtttttca

SEQ ID NO: 246807 - DNA, 30 bp, Artificial Sequence
  Synthetic oligonucleotide
cttaagacaccatttggacgctgtttttca

SEQ ID NO: 246808 - DNA, 30 bp, Artificial Sequence
  Synthetic oligonucleotide
aggaacatgcgggtgaaagggtaaaaaaga

SEQ ID NO: 246809 - DNA, 30 bp, Artificial Sequence
  Synthetic oligonucleotide
gattgaccaactctaaagcgaggaaaaaga

SEQ ID NO: 246810 - DNA, 30 bp, Artificial Sequence
  Synthetic oligonucleotide
ttaataaaagggtttgccaggcacaaaaga

SEQ ID NO: 246811 - DNA, 30 bp, Artificial Sequence
  Synthetic oligonucleotide
ttgaattactgatgtaaagtacagaaaaga

SEQ ID NO: 246812 - DNA, 30 bp, Artificial Sequence
  Synthetic oligonucleotide
ggttgtagctgcaacatagaaagtaaaaga

SEQ ID NO: 246813 - DNA, 30 bp, Artificial Sequence
  Synthetic oligonucleotide
cagcacggttgggggtctagacgtaaaaga

SEQ ID NO: 246814 - DNA, 30 bp, Artificial Sequence
  Synthetic oligonucleotide
ggcggcacatcagtcagggcggttaaaaga

SEQ ID NO: 246815 - DNA, 30 bp, Artificial Sequence
  Synthetic oligonucleotide
ctcgacttttcgctagctgtctcgcaaaga

SEQ ID NO: 246816 - DNA, 30 bp, Artificial Sequence
  Synthetic oligonucleotide
cggacgtagatatcctgggatggtcaaaga

SEQ ID NO: 246817 - DNA, 30 bp, Artificial Sequence
  Synthetic oligonucleotide
gccaaaaaaccgggagacttatgtcaaaga

SEQ ID NO: 246818 - DNA, 30 bp, Artificial Sequence
  Synthetic oligonucleotide
gtgagcggtggcgcgactccacttcaaaga

SEQ ID NO: 246819 - DNA, 30 bp, Artificial Sequence
  Synthetic oligonucleotide
gcgtttagcattagagcgactcttcaaaga

SEQ ID NO: 246820 - DNA, 30 bp, Artificial Sequence
  Synthetic oligonucleotide
gacatccttagcagtaggtgtcacgaaaga

SEQ ID NO: 246821 - DNA, 30 bp, Artificial Sequence
  Synthetic oligonucleotide
ctggtacaactacatactcctccggaaaga

SEQ ID NO: 246822 - DNA, 30 bp, Artificial Sequence
  Synthetic oligonucleotide
atcaagcattacagcgtatgcggggaaaga

SEQ ID NO: 246823 - DNA, 30 bp, Artificial Sequence
  Synthetic oligonucleotide
gtcggcagtattcagtgagaggcctaaaga

SEQ ID NO: 246824 - DNA, 30 bp, Artificial Sequence
  Synthetic oligonucleotide
aaaccggagggtattacaatagggtaaaga

SEQ ID NO: 246825 - DNA, 30 bp, Artificial Sequence
  Synthetic oligonucleotide
attatgatgttccatgggggcacttaaaga

SEQ ID NO: 246826 - DNA, 30 bp, Artificial Sequence
  Synthetic oligonucleotide
cccgtcaaacttccagcaggaggttaaaga

SEQ ID NO: 246827 - DNA, 30 bp, Artificial Sequence
  Synthetic oligonucleotide
aattaattgagaagattgtgaggttaaaga

SEQ ID NO: 246828 - DNA, 30 bp, Artificial Sequence
  Synthetic oligonucleotide
gtctggtagatagtcgtgtttatttaaaga

SEQ ID NO: 246829 - DNA, 30 bp, Artificial Sequence
  Synthetic oligonucleotide
ttgatcggatagattgaatgaaaaacaaga

SEQ ID NO: 246830 - DNA, 30 bp, Artificial Sequence
  Synthetic oligonucleotide
ccattctattatcagctgcgtgatacaaga

SEQ ID NO: 246831 - DNA, 30 bp, Artificial Sequence
  Synthetic oligonucleotide
acattaggcataattgatccatatacaaga

SEQ ID NO: 246832 - DNA, 30 bp, Artificial Sequence
  Synthetic oligonucleotide
accagcatggacttcgtggtatctacaaga

SEQ ID NO: 246833 - DNA, 30 bp, Artificial Sequence
  Synthetic oligonucleotide
acaataacggaggcacgcgtgtgcccaaga

SEQ ID NO: 246834 - DNA, 30 bp, Artificial Sequence
  Synthetic oligonucleotide
ccttggaaatgggcaacaactatcccaaga

SEQ ID NO: 246835 - DNA, 30 bp, Artificial Sequence
  Synthetic oligonucleotide
ttacatatggtgtatgcttacccgccaaga

SEQ ID NO: 246836 - DNA, 30 bp, Artificial Sequence
  Synthetic oligonucleotide
atagaagttcaaaaaggaccctgtccaaga

SEQ ID NO: 246837 - DNA, 30 bp, Artificial Sequence
  Synthetic oligonucleotide
ctgatcgtttgctagttgtcagaagcaaga

SEQ ID NO: 246838 - DNA, 30 bp, Artificial Sequence
  Synthetic oligonucleotide
tctgcgtttcgcgccaccaagatagcaaga

SEQ ID NO: 246839 - DNA, 30 bp, Artificial Sequence
  Synthetic oligonucleotide
gaagatgggatggtttttcgccacgcaaga

SEQ ID NO: 246840 - DNA, 30 bp, Artificial Sequence
  Synthetic oligonucleotide
ttgattattgccacggcgtcaagcgcaaga

SEQ ID NO: 246841 - DNA, 30 bp, Artificial Sequence
  Synthetic oligonucleotide
ctctcagggatcttagtcttcatcgcaaga

SEQ ID NO: 246842 - DNA, 30 bp, Artificial Sequence
  Synthetic oligonucleotide
agtctaattcaatatggttgtagggcaaga

SEQ ID NO: 246843 - DNA, 30 bp, Artificial Sequence
  Synthetic oligonucleotide
cataagttcgcaataggtataaaatcaaga

SEQ ID NO: 246844 - DNA, 30 bp, Artificial Sequence
  Synthetic oligonucleotide
cgttggtctaaacacacagattaatcaaga

SEQ ID NO: 246845 - DNA, 30 bp, Artificial Sequence
  Synthetic oligonucleotide
agtggttctcttgtttgagttggatcaaga

SEQ ID NO: 246846 - DNA, 30 bp, Artificial Sequence
  Synthetic oligonucleotide
ccttaataggcgcggtgagccttatcaaga

SEQ ID NO: 246847 - DNA, 30 bp, Artificial Sequence
  Synthetic oligonucleotide
gggtatagcgtcctgaccggtctgtcaaga

SEQ ID NO: 246848 - DNA, 30 bp, Artificial Sequence
  Synthetic oligonucleotide
actagaataagtcaaattaagatttcaaga

SEQ ID NO: 246849 - DNA, 30 bp, Artificial Sequence
  Synthetic oligonucleotide
ggaccgtagcgtatcccctaactttcaaga

SEQ ID NO: 246850 - DNA, 30 bp, Artificial Sequence
  Synthetic oligonucleotide
cagagtcggtcgagcatacaaagaagaaga

SEQ ID NO: 246851 - DNA, 30 bp, Artificial Sequence
  Synthetic oligonucleotide
agcaacgcccgcgtattggagttaagaaga

SEQ ID NO: 246852 - DNA, 30 bp, Artificial Sequence
  Synthetic oligonucleotide
gcacgctggaatgtgaatcaacgcagaaga

SEQ ID NO: 246853 - DNA, 30 bp, Artificial Sequence
  Synthetic oligonucleotide
tcagaaatcttagcagcgtaaacgagaaga

SEQ ID NO: 246854 - DNA, 30 bp, Artificial Sequence
  Synthetic oligonucleotide
ggaaccataagccgatcttgctggagaaga

SEQ ID NO: 246855 - DNA, 30 bp, Artificial Sequence
  Synthetic oligonucleotide
ataaatgctatacagcatgccatgagaaga

SEQ ID NO: 246856 - DNA, 30 bp, Artificial Sequence
  Synthetic oligonucleotide
ttacctaagacgggtataatgtaacgaaga

SEQ ID NO: 246857 - DNA, 30 bp, Artificial Sequence
  Synthetic oligonucleotide
tcgcgatgaactatcttagttccacgaaga

SEQ ID NO: 246858 - DNA, 30 bp, Artificial Sequence
  Synthetic oligonucleotide
ggagggctccacgaattaaaatgacgaaga

SEQ ID NO: 246859 - DNA, 30 bp, Artificial Sequence
  Synthetic oligonucleotide
agatttaggagactctcgtcaaggcgaaga

SEQ ID NO: 246860 - DNA, 30 bp, Artificial Sequence
  Synthetic oligonucleotide
aaccatggtcaatgctgttaagggcgaaga

SEQ ID NO: 246861 - DNA, 30 bp, Artificial Sequence
  Synthetic oligonucleotide
caacgtgtgtatgatcatccgcaaggaaga

SEQ ID NO: 246862 - DNA, 30 bp, Artificial Sequence
  Synthetic oligonucleotide
tgtcgacaccacttctagtccgacggaaga

SEQ ID NO: 246863 - DNA, 30 bp, Artificial Sequence
  Synthetic oligonucleotide
ctgaattagggccaaacaggatgcggaaga

SEQ ID NO: 246864 - DNA, 30 bp, Artificial Sequence
  Synthetic oligonucleotide
aggaatttatgaggctgagttgtcggaaga

SEQ ID NO: 246865 - DNA, 30 bp, Artificial Sequence
  Synthetic oligonucleotide
aaaccgttcataatctcccgtttcggaaga

SEQ ID NO: 246866 - DNA, 30 bp, Artificial Sequence
  Synthetic oligonucleotide
accatctaattcagctccctcgtgggaaga

SEQ ID NO: 246867 - DNA, 30 bp, Artificial Sequence
  Synthetic oligonucleotide
cgcactgttcagtgttgtccgtcgtgaaga

SEQ ID NO: 246868 - DNA, 30 bp, Artificial Sequence
  Synthetic oligonucleotide
caccctcttgcatgcctgaactattgaaga

SEQ ID NO: 246869 - DNA, 30 bp, Artificial Sequence
  Synthetic oligonucleotide
cgtgttaactcaagcgaacagtaaataaga

SEQ ID NO: 246870 - DNA, 30 bp, Artificial Sequence
  Synthetic oligonucleotide
ttccaggtgttaactgctatccccataaga

SEQ ID NO: 246871 - DNA, 30 bp, Artificial Sequence
  Synthetic oligonucleotide
accaggctgaatttcccggatggcataaga

SEQ ID NO: 246872 - DNA, 30 bp, Artificial Sequence
  Synthetic oligonucleotide
ggctaagctcgtgcattttatgatataaga

SEQ ID NO: 246873 - DNA, 30 bp, Artificial Sequence
  Synthetic oligonucleotide
aggaagacgatggggtacatcagtataaga

SEQ ID NO: 246874 - DNA, 30 bp, Artificial Sequence
  Synthetic oligonucleotide
agcaagtattggacctcttgggaactaaga

SEQ ID NO: 246875 - DNA, 30 bp, Artificial Sequence
  Synthetic oligonucleotide
gccatggcttctggcctcgttcccctaaga

SEQ ID NO: 246876 - DNA, 30 bp, Artificial Sequence
  Synthetic oligonucleotide
cgcgatattctccctggaaacgagctaaga

SEQ ID NO: 246877 - DNA, 30 bp, Artificial Sequence
  Synthetic oligonucleotide
tagagaactcacttcttgtcgaggctaaga

SEQ ID NO: 246878 - DNA, 30 bp, Artificial Sequence
  Synthetic oligonucleotide
tttgggcagacctcggataggcggctaaga

SEQ ID NO: 246879 - DNA, 30 bp, Artificial Sequence
  Synthetic oligonucleotide
cgaaacttgtttacattctaaacggtaaga

SEQ ID NO: 246880 - DNA, 30 bp, Artificial Sequence
  Synthetic oligonucleotide
gcactggtcaatcaacttgtcttggtaaga

SEQ ID NO: 246881 - DNA, 30 bp, Artificial Sequence
  Synthetic oligonucleotide
tatatcatttgtcagacagccgaattaaga

SEQ ID NO: 246882 - DNA, 30 bp, Artificial Sequence
  Synthetic oligonucleotide
gtaggtttcgcgaaaagtcgtgaattaaga

SEQ ID NO: 246883 - DNA, 30 bp, Artificial Sequence
  Synthetic oligonucleotide
tcggattgtaaggcattgcatcgattaaga

SEQ ID NO: 246884 - DNA, 30 bp, Artificial Sequence
  Synthetic oligonucleotide
aataattcgaatgcgttatagctcttaaga

SEQ ID NO: 246885 - DNA, 30 bp, Artificial Sequence
  Synthetic oligonucleotide
acgccattgttaagtctcaacaagttaaga

SEQ ID NO: 246886 - DNA, 30 bp, Artificial Sequence
  Synthetic oligonucleotide
cacatcgattgcattgctgggctgttaaga

SEQ ID NO: 246887 - DNA, 30 bp, Artificial Sequence
  Synthetic oligonucleotide
ggccaggttgtgacacctcgaaaaaacaga

SEQ ID NO: 246888 - DNA, 30 bp, Artificial Sequence
  Synthetic oligonucleotide
aacgacttaacatcgggtcgtagaaacaga

SEQ ID NO: 246889 - DNA, 30 bp, Artificial Sequence
  Synthetic oligonucleotide
gttggtaaaatgacggttgcttttaacaga

SEQ ID NO: 246890 - DNA, 30 bp, Artificial Sequence
  Synthetic oligonucleotide
gccactgtccagtgagtgatgaaacacaga

SEQ ID NO: 246891 - DNA, 30 bp, Artificial Sequence
  Synthetic oligonucleotide
agcatttgtggtggcaatcacactcacaga

SEQ ID NO: 246892 - DNA, 30 bp, Artificial Sequence
  Synthetic oligonucleotide
ctgctttaaacgcacaattatgctcacaga

SEQ ID NO: 246893 - DNA, 30 bp, Artificial Sequence
  Synthetic oligonucleotide
tattaagcacgtgcggtgtggagtcacaga

SEQ ID NO: 246894 - DNA, 30 bp, Artificial Sequence
  Synthetic oligonucleotide
tttgtgcagaaagtagcagaaattcacaga

SEQ ID NO: 246895 - DNA, 30 bp, Artificial Sequence
  Synthetic oligonucleotide
gtaggttgtggcctccgcacgggagacaga

SEQ ID NO: 246896 - DNA, 30 bp, Artificial Sequence
  Synthetic oligonucleotide
aaaatggcgtggggtccaggcgacgacaga

SEQ ID NO: 246897 - DNA, 30 bp, Artificial Sequence
  Synthetic oligonucleotide
ctaaattcgcgcagtctattagccgacaga

SEQ ID NO: 246898 - DNA, 30 bp, Artificial Sequence
  Synthetic oligonucleotide
gcatgtgagagttcttgttttagggacaga

SEQ ID NO: 246899 - DNA, 30 bp, Artificial Sequence
  Synthetic oligonucleotide
agaggattcaaatcataactcaatgacaga

SEQ ID NO: 246900 - DNA, 30 bp, Artificial Sequence
  Synthetic oligonucleotide
tcagcaagtcgggatacgctctttgacaga

SEQ ID NO: 246901 - DNA, 30 bp, Artificial Sequence
  Synthetic oligonucleotide
cattccagacctggtatatcagcatacaga

SEQ ID NO: 246902 - DNA, 30 bp, Artificial Sequence
  Synthetic oligonucleotide
gggtcgttagatttacgggtttgatacaga

SEQ ID NO: 246903 - DNA, 30 bp, Artificial Sequence
  Synthetic oligonucleotide
ttttgggggtcacgacgggggaagtacaga

SEQ ID NO: 246904 - DNA, 30 bp, Artificial Sequence
  Synthetic oligonucleotide
agtaggacgattggcggtgacaattacaga

SEQ ID NO: 246905 - DNA, 30 bp, Artificial Sequence
  Synthetic oligonucleotide
tatactttgatatgggaaggtgtgaccaga

SEQ ID NO: 246906 - DNA, 30 bp, Artificial Sequence
  Synthetic oligonucleotide
agaagagatgcacgcctgtagttgaccaga

SEQ ID NO: 246907 - DNA, 30 bp, Artificial Sequence
  Synthetic oligonucleotide
tagcagcctctacgcgaggtcaataccaga

SEQ ID NO: 246908 - DNA, 30 bp, Artificial Sequence
  Synthetic oligonucleotide
atgctcggggtatagatggatcaacccaga

SEQ ID NO: 246909 - DNA, 30 bp, Artificial Sequence
  Synthetic oligonucleotide
ttgccgggatgaaacgtatgaaaccccaga

SEQ ID NO: 246910 - DNA, 30 bp, Artificial Sequence
  Synthetic oligonucleotide
agccagcagtgtggcgtccgttgtcccaga

SEQ ID NO: 246911 - DNA, 30 bp, Artificial Sequence
  Synthetic oligonucleotide
ggatatcttgggaagatttgttaagccaga

SEQ ID NO: 246912 - DNA, 30 bp, Artificial Sequence
  Synthetic oligonucleotide
atctgatgtgttctataacaaacagccaga

SEQ ID NO: 246913 - DNA, 30 bp, Artificial Sequence
  Synthetic oligonucleotide
accggcatcacgcttgggccttacgccaga

SEQ ID NO: 246914 - DNA, 30 bp, Artificial Sequence
  Synthetic oligonucleotide
tagcagaatttttgatctgataatgccaga

SEQ ID NO: 246915 - DNA, 30 bp, Artificial Sequence
  Synthetic oligonucleotide
ggtgctacgcgggcgcagtggcctgccaga

SEQ ID NO: 246916 - DNA, 30 bp, Artificial Sequence
  Synthetic oligonucleotide
cggattgaaacggcccccgaccaatccaga

SEQ ID NO: 246917 - DNA, 30 bp, Artificial Sequence
  Synthetic oligonucleotide
gagttcgagccccagtatagttcgtccaga

SEQ ID NO: 246918 - DNA, 30 bp, Artificial Sequence
  Synthetic oligonucleotide
caagtgctactagggcaggggcattccaga

SEQ ID NO: 246919 - DNA, 30 bp, Artificial Sequence
  Synthetic oligonucleotide
acaactagatttttcatatgcagttccaga

SEQ ID NO: 246920 - DNA, 30 bp, Artificial Sequence
  Synthetic oligonucleotide
actacgcttaaagcactgcctagttccaga

SEQ ID NO: 246921 - DNA, 30 bp, Artificial Sequence
  Synthetic oligonucleotide
aagcaatggatcaaagtcctcattagcaga

SEQ ID NO: 246922 - DNA, 30 bp, Artificial Sequence
  Synthetic oligonucleotide
atttgaggcaaccgggaacggtcacgcaga

SEQ ID NO: 246923 - DNA, 30 bp, Artificial Sequence
  Synthetic oligonucleotide
atgactactattgaataacatgtacgcaga

SEQ ID NO: 246924 - DNA, 30 bp, Artificial Sequence
  Synthetic oligonucleotide
acgtcagcgcttacgggccggttacgcaga

SEQ ID NO: 246925 - DNA, 30 bp, Artificial Sequence
  Synthetic oligonucleotide
aacaacatttgcccagatttaaaccgcaga

SEQ ID NO: 246926 - DNA, 30 bp, Artificial Sequence
  Synthetic oligonucleotide
cagcccatccagaagagattgtcccgcaga

SEQ ID NO: 246927 - DNA, 30 bp, Artificial Sequence
  Synthetic oligonucleotide
tctccccccgacagctgccacctccgcaga

SEQ ID NO: 246928 - DNA, 30 bp, Artificial Sequence
  Synthetic oligonucleotide
cgcccggttaccggttgtggagtccgcaga

SEQ ID NO: 246929 - DNA, 30 bp, Artificial Sequence
  Synthetic oligonucleotide
atcgcccgtatgacaaataagccaggcaga

SEQ ID NO: 246930 - DNA, 30 bp, Artificial Sequence
  Synthetic oligonucleotide
ttactacgcggtgcaacagcactaggcaga

SEQ ID NO: 246931 - DNA, 30 bp, Artificial Sequence
  Synthetic oligonucleotide
gatgaatgtaacatataacgttgcggcaga

SEQ ID NO: 246932 - DNA, 30 bp, Artificial Sequence
  Synthetic oligonucleotide
gtcaatgggtaagatgatgacgagggcaga

SEQ ID NO: 246933 - DNA, 30 bp, Artificial Sequence
  Synthetic oligonucleotide
ggggtccaagccagtcggccaaggggcaga

SEQ ID NO: 246934 - DNA, 30 bp, Artificial Sequence
  Synthetic oligonucleotide
ttaaaaggactcgggacgatcaggggcaga

SEQ ID NO: 246935 - DNA, 30 bp, Artificial Sequence
  Synthetic oligonucleotide
gtggattgccgtccacgaagtcatggcaga

SEQ ID NO: 246936 - DNA, 30 bp, Artificial Sequence
  Synthetic oligonucleotide
atcatagacccccgggattgatatggcaga

SEQ ID NO: 246937 - DNA, 30 bp, Artificial Sequence
  Synthetic oligonucleotide
actagccgggttaggtttggaagtggcaga

SEQ ID NO: 246938 - DNA, 30 bp, Artificial Sequence
  Synthetic oligonucleotide
actgggatcagctcacagtggtttggcaga

SEQ ID NO: 246939 - DNA, 30 bp, Artificial Sequence
  Synthetic oligonucleotide
agcgcttcggaacttggacggcaatgcaga

SEQ ID NO: 246940 - DNA, 30 bp, Artificial Sequence
  Synthetic oligonucleotide
tggttatagctttccaaacaacgctgcaga

SEQ ID NO: 246941 - DNA, 30 bp, Artificial Sequence
  Synthetic oligonucleotide
ccatacaatagactgaggctggcgtgcaga

SEQ ID NO: 246942 - DNA, 30 bp, Artificial Sequence
  Synthetic oligonucleotide
ggcagcttgtcccagaggccctggtgcaga

SEQ ID NO: 246943 - DNA, 30 bp, Artificial Sequence
  Synthetic oligonucleotide
gggaattgccctcaacgcggttcttgcaga

SEQ ID NO: 246944 - DNA, 30 bp, Artificial Sequence
  Synthetic oligonucleotide
gtcacgtgatccaacggcttactttgcaga

SEQ ID NO: 246945 - DNA, 30 bp, Artificial Sequence
  Synthetic oligonucleotide
gtgagacgcatagaggagtctaacatcaga

SEQ ID NO: 246946 - DNA, 30 bp, Artificial Sequence
  Synthetic oligonucleotide
gactttaaaagcactttctaggacatcaga

SEQ ID NO: 246947 - DNA, 30 bp, Artificial Sequence
  Synthetic oligonucleotide
aagtagtggaaccctaccacggacatcaga

SEQ ID NO: 246948 - DNA, 30 bp, Artificial Sequence
  Synthetic oligonucleotide
tacttgttgctgccaaatctagccatcaga

SEQ ID NO: 246949 - DNA, 30 bp, Artificial Sequence
  Synthetic oligonucleotide
ttataccgtatcttcgtaaggctcatcaga

SEQ ID NO: 246950 - DNA, 30 bp, Artificial Sequence
  Synthetic oligonucleotide
cttgtactgatggcgcgtaaattcatcaga

SEQ ID NO: 246951 - DNA, 30 bp, Artificial Sequence
  Synthetic oligonucleotide
attacaacgatcggttttatggatatcaga

SEQ ID NO: 246952 - DNA, 30 bp, Artificial Sequence
  Synthetic oligonucleotide
aaacgtccgataactgttaactctatcaga

SEQ ID NO: 246953 - DNA, 30 bp, Artificial Sequence
  Synthetic oligonucleotide
ataagtcgcataattatttacagtctcaga

SEQ ID NO: 246954 - DNA, 30 bp, Artificial Sequence
  Synthetic oligonucleotide
tgatactatcaaagggctgagtgtctcaga

SEQ ID NO: 246955 - DNA, 30 bp, Artificial Sequence
  Synthetic oligonucleotide
gcacgttctcccggactcatcagggtcaga

SEQ ID NO: 246956 - DNA, 30 bp, Artificial Sequence
  Synthetic oligonucleotide
attttgataaggtaaccgtggctggtcaga

SEQ ID NO: 246957 - DNA, 30 bp, Artificial Sequence
  Synthetic oligonucleotide
gaagcttacgaaatatcggcagctgtcaga

SEQ ID NO: 246958 - DNA, 30 bp, Artificial Sequence
  Synthetic oligonucleotide
ggctgtgaagcgtcacgtatatcattcaga

SEQ ID NO: 246959 - DNA, 30 bp, Artificial Sequence
  Synthetic oligonucleotide
tagcacgagcttaggatagtactattcaga

SEQ ID NO: 246960 - DNA, 30 bp, Artificial Sequence
  Synthetic oligonucleotide
gatctcgtgacgagatgcaacccgttcaga

SEQ ID NO: 246961 - DNA, 30 bp, Artificial Sequence
  Synthetic oligonucleotide
cacatttgaaatgaaggataaaaaaagaga

SEQ ID NO: 246962 - DNA, 30 bp, Artificial Sequence
  Synthetic oligonucleotide
attttccggaaaaaagaagttagaaagaga

SEQ ID NO: 246963 - DNA, 30 bp, Artificial Sequence
  Synthetic oligonucleotide
tctcgtccgttgtacggggaggacaagaga

SEQ ID NO: 246964 - DNA, 30 bp, Artificial Sequence
  Synthetic oligonucleotide
ttcgattctacaactgccctcatcaagaga

SEQ ID NO: 246965 - DNA, 30 bp, Artificial Sequence
  Synthetic oligonucleotide
atttgctaggcagtaaggtaattcaagaga

SEQ ID NO: 246966 - DNA, 30 bp, Artificial Sequence
  Synthetic oligonucleotide
ttacgcacatctggcatggctgtgaagaga

SEQ ID NO: 246967 - DNA, 30 bp, Artificial Sequence
  Synthetic oligonucleotide
gaagcagtctgtcaccaaaactataagaga

SEQ ID NO: 246968 - DNA, 30 bp, Artificial Sequence
  Synthetic oligonucleotide
gcggatgagtctgacaccgctaccgagaga

SEQ ID NO: 246969 - DNA, 30 bp, Artificial Sequence
  Synthetic oligonucleotide
agatatcaaaggatagccgaaggcgagaga

SEQ ID NO: 246970 - DNA, 30 bp, Artificial Sequence
  Synthetic oligonucleotide
ataactttgacaggatcaccgtcggagaga

SEQ ID NO: 246971 - DNA, 30 bp, Artificial Sequence
  Synthetic oligonucleotide
gaaccacgctgtgtcgtattaagggagaga

SEQ ID NO: 246972 - DNA, 30 bp, Artificial Sequence
  Synthetic oligonucleotide
aatgacagcattcagtttagacaatagaga

SEQ ID NO: 246973 - DNA, 30 bp, Artificial Sequence
  Synthetic oligonucleotide
gaagcaaagtccgcccgcgacgcatagaga

SEQ ID NO: 246974 - DNA, 30 bp, Artificial Sequence
  Synthetic oligonucleotide
cttggcggaaaggcgttattagactagaga

SEQ ID NO: 246975 - DNA, 30 bp, Artificial Sequence
  Synthetic oligonucleotide
ctgtaccggtgctcgtgcgcgtagtagaga

SEQ ID NO: 246976 - DNA, 30 bp, Artificial Sequence
  Synthetic oligonucleotide
gaatttgtatgcctttcgacaaggtagaga

SEQ ID NO: 246977 - DNA, 30 bp, Artificial Sequence
  Synthetic oligonucleotide
cataggtatacgcaaatgacgtggtagaga

SEQ ID NO: 246978 - DNA, 28 bp, Artificial Sequence
  Synthetic oligonucleotide
tgaggccttcccgtaattgttgtagaga

SEQ ID NO: 246979 - DNA, 30 bp, Artificial Sequence
  Synthetic oligonucleotide
gttgtcaaggatcagaggagagattagaga

SEQ ID NO: 246980 - DNA, 30 bp, Artificial Sequence
  Synthetic oligonucleotide
atctgagttaaaacttagcaggaaacgaga

SEQ ID NO: 246981 - DNA, 30 bp, Artificial Sequence
  Synthetic oligonucleotide
acaaatatagccttggtgggttcaacgaga

SEQ ID NO: 246982 - DNA, 30 bp, Artificial Sequence
  Synthetic oligonucleotide
tggggattagtcctctccgcgataacgaga

SEQ ID NO: 246983 - DNA, 30 bp, Artificial Sequence
  Synthetic oligonucleotide
tgctcttggatgtgacgaatattaacgaga

SEQ ID NO: 246984 - DNA, 30 bp, Artificial Sequence
  Synthetic oligonucleotide
gtttgtccaacgtaggccaagtatacgaga

SEQ ID NO: 246985 - DNA, 30 bp, Artificial Sequence
  Synthetic oligonucleotide
cgattcatagagtacgtttaaagtacgaga

SEQ ID NO: 246986 - DNA, 30 bp, Artificial Sequence
  Synthetic oligonucleotide
gcacgcacaaagtcgaaaccccgtacgaga

SEQ ID NO: 246987 - DNA, 30 bp, Artificial Sequence
  Synthetic oligonucleotide
tagacgcaaagggatcaacatattacgaga

SEQ ID NO: 246988 - DNA, 31 bp, Artificial Sequence
  Synthetic oligonucleotide
ggagaggtagcaagcttcaatacttacgaga

SEQ ID NO: 246989 - DNA, 30 bp, Artificial Sequence
  Synthetic oligonucleotide
tacgttagtgtcgaagtatgtgcaccgaga

SEQ ID NO: 246990 - DNA, 30 bp, Artificial Sequence
  Synthetic oligonucleotide
actgtctgacgcaatatggtaaggccgaga

SEQ ID NO: 246991 - DNA, 30 bp, Artificial Sequence
  Synthetic oligonucleotide
gttaggggccatcagacactagaagcgaga

SEQ ID NO: 246992 - DNA, 30 bp, Artificial Sequence
  Synthetic oligonucleotide
ggcaaccaggtatcgctatagcgcgcgaga

SEQ ID NO: 246993 - DNA, 31 bp, Artificial Sequence
  Synthetic oligonucleotide
cgactccgaaaaacgcggacacccggcgaga

SEQ ID NO: 246994 - DNA, 30 bp, Artificial Sequence
  Synthetic oligonucleotide
catgtgcatgcgagaaggactggggcgaga

SEQ ID NO: 246995 - DNA, 30 bp, Artificial Sequence
  Synthetic oligonucleotide
tgtagagtacgcatcagtgagagatcgaga

SEQ ID NO: 246996 - DNA, 30 bp, Artificial Sequence
  Synthetic oligonucleotide
ttagcactggatactatgggccgatcgaga

SEQ ID NO: 246997 - DNA, 30 bp, Artificial Sequence
  Synthetic oligonucleotide
tccggctacaggccgggtgtatgatcgaga

SEQ ID NO: 246998 - DNA, 30 bp, Artificial Sequence
  Synthetic oligonucleotide
gcagggtagtgtatccaaatgttatcgaga

SEQ ID NO: 246999 - DNA, 30 bp, Artificial Sequence
  Synthetic oligonucleotide
gattgacattcggtttcttcccagtcgaga

SEQ ID NO: 247000 - DNA, 30 bp, Artificial Sequence
  Synthetic oligonucleotide
aagttaaagatagctgtacagtattcgaga

SEQ ID NO: 247001 - DNA, 30 bp, Artificial Sequence
  Synthetic oligonucleotide
ataagcgcttgttgtatgggtggttcgaga

SEQ ID NO: 247002 - DNA, 30 bp, Artificial Sequence
  Synthetic oligonucleotide
tcctcaagattgcggctgctcgtaaggaga

SEQ ID NO: 247003 - DNA, 30 bp, Artificial Sequence
  Synthetic oligonucleotide
gccaggggtgcaaaaattgtgccgaggaga

SEQ ID NO: 247004 - DNA, 30 bp, Artificial Sequence
  Synthetic oligonucleotide
gtacattggcaatgattggtaaggaggaga

SEQ ID NO: 247005 - DNA, 30 bp, Artificial Sequence
  Synthetic oligonucleotide
cgttcggtcagtgcgtatctcttgaggaga

SEQ ID NO: 247006 - DNA, 30 bp, Artificial Sequence
  Synthetic oligonucleotide
ttatatatggaataggggataccacggaga

SEQ ID NO: 247007 - DNA, 30 bp, Artificial Sequence
  Synthetic oligonucleotide
taaacacaattcatatcaacctgacggaga

SEQ ID NO: 247008 - DNA, 30 bp, Artificial Sequence
  Synthetic oligonucleotide
ttacatattggtagcgacatactacggaga

SEQ ID NO: 247009 - DNA, 30 bp, Artificial Sequence
  Synthetic oligonucleotide
agtcacaggccacagtcgaaattgcggaga

SEQ ID NO: 247010 - DNA, 30 bp, Artificial Sequence
  Synthetic oligonucleotide
agagtctgatttcgaactcacgctcggaga

SEQ ID NO: 247011 - DNA, 30 bp, Artificial Sequence
  Synthetic oligonucleotide
taccgggtaagtagaggttagggtcggaga

SEQ ID NO: 247012 - DNA, 30 bp, Artificial Sequence
  Synthetic oligonucleotide
aacgatattgctccgtcgaattgtcggaga

SEQ ID NO: 247013 - DNA, 30 bp, Artificial Sequence
  Synthetic oligonucleotide
aggaccgcaggtggcttcataattcggaga

SEQ ID NO: 247014 - DNA, 30 bp, Artificial Sequence
  Synthetic oligonucleotide
tcctcagtaatattggtttggatagggaga

SEQ ID NO: 247015 - DNA, 30 bp, Artificial Sequence
  Synthetic oligonucleotide
tattctgacccggtgagatatatagggaga

SEQ ID NO: 247016 - DNA, 30 bp, Artificial Sequence
  Synthetic oligonucleotide
ttgatagcaccgtggcaagcgtacgggaga

SEQ ID NO: 247017 - DNA, 30 bp, Artificial Sequence
  Synthetic oligonucleotide
cagatagaagagcccccgaagggcgggaga

SEQ ID NO: 247018 - DNA, 30 bp, Artificial Sequence
  Synthetic oligonucleotide
aagggtatagttagcaaagtatgcgggaga

SEQ ID NO: 247019 - DNA, 30 bp, Artificial Sequence
  Synthetic oligonucleotide
acttctaatattgatgtggggtaggggaga

SEQ ID NO: 247020 - DNA, 30 bp, Artificial Sequence
  Synthetic oligonucleotide
gggagtcccaattccgtctaggatgggaga

SEQ ID NO: 247021 - DNA, 30 bp, Artificial Sequence
  Synthetic oligonucleotide
tagaccttttccggggaacggatatggaga

SEQ ID NO: 247022 - DNA, 30 bp, Artificial Sequence
  Synthetic oligonucleotide
gactaagaagaccagctcgtgttatggaga

SEQ ID NO: 247023 - DNA, 30 bp, Artificial Sequence
  Synthetic oligonucleotide
attagcccagggacggctcagcactggaga

SEQ ID NO: 247024 - DNA, 30 bp, Artificial Sequence
  Synthetic oligonucleotide
gaattacgccgagggttgcatgactggaga

SEQ ID NO: 247025 - DNA, 30 bp, Artificial Sequence
  Synthetic oligonucleotide
tcgactctggaacaaacaggaaaaatgaga

SEQ ID NO: 247026 - DNA, 30 bp, Artificial Sequence
  Synthetic oligonucleotide
aatgaggttttccctaagaggataatgaga

SEQ ID NO: 247027 - DNA, 30 bp, Artificial Sequence
  Synthetic oligonucleotide
cgtatgcattggtttacatcgtagatgaga

SEQ ID NO: 247028 - DNA, 30 bp, Artificial Sequence
  Synthetic oligonucleotide
taggaatacggtagtcagttaaatatgaga

SEQ ID NO: 247029 - DNA, 30 bp, Artificial Sequence
  Synthetic oligonucleotide
atatcgattacataaatatgttgactgaga

SEQ ID NO: 247030 - DNA, 30 bp, Artificial Sequence
  Synthetic oligonucleotide
aaataatagtcatgagctaaatccctgaga

SEQ ID NO: 247031 - DNA, 30 bp, Artificial Sequence
  Synthetic oligonucleotide
aacacgcgccccaggtggatttaggtgaga

SEQ ID NO: 247032 - DNA, 30 bp, Artificial Sequence
  Synthetic oligonucleotide
ttacagcctagatgctacgctttggtgaga

SEQ ID NO: 247033 - DNA, 30 bp, Artificial Sequence
  Synthetic oligonucleotide
catgatcgcaatcgactcgacgatgtgaga

SEQ ID NO: 247034 - DNA, 30 bp, Artificial Sequence
  Synthetic oligonucleotide
tacagtttagaccataaagtgtctgtgaga

SEQ ID NO: 247035 - DNA, 31 bp, Artificial Sequence
  Synthetic oligonucleotide
agttacgtctttgaaggtcagcggtgtgaga

SEQ ID NO: 247036 - DNA, 30 bp, Artificial Sequence
  Synthetic oligonucleotide
atttcgtaacaccgtggtacacaattgaga

SEQ ID NO: 247037 - DNA, 30 bp, Artificial Sequence
  Synthetic oligonucleotide
atccgcatctacttccgtggaaacttgaga

SEQ ID NO: 247038 - DNA, 30 bp, Artificial Sequence
  Synthetic oligonucleotide
aggcactgtcccacagtacgggtcttgaga

SEQ ID NO: 247039 - DNA, 30 bp, Artificial Sequence
  Synthetic oligonucleotide
atcattcttccatggcaaaatggaaataga

SEQ ID NO: 247040 - DNA, 30 bp, Artificial Sequence
  Synthetic oligonucleotide
attgaacggttcctaatgaatttaaataga

SEQ ID NO: 247041 - DNA, 30 bp, Artificial Sequence
  Synthetic oligonucleotide
actagtaattgagtccctgtaaacaataga

SEQ ID NO: 247042 - DNA, 30 bp, Artificial Sequence
  Synthetic oligonucleotide
atcgggtgcgttataagaatatacaataga

SEQ ID NO: 247043 - DNA, 30 bp, Artificial Sequence
  Synthetic oligonucleotide
ctgtatatagccggcttaagaactaataga

SEQ ID NO: 247044 - DNA, 30 bp, Artificial Sequence
  Synthetic oligonucleotide
gcagggatttggcaatccatccaacataga

SEQ ID NO: 247045 - DNA, 30 bp, Artificial Sequence
  Synthetic oligonucleotide
gggacacgttaaaacttctcctcacataga

SEQ ID NO: 247046 - DNA, 30 bp, Artificial Sequence
  Synthetic oligonucleotide
gaatgacacagattgcgggaaagacataga

SEQ ID NO: 247047 - DNA, 30 bp, Artificial Sequence
  Synthetic oligonucleotide
aagccaacgctaaaccaggccggccataga

SEQ ID NO: 247048 - DNA, 30 bp, Artificial Sequence
  Synthetic oligonucleotide
tcgagtgtacagctcgataagtttcataga

SEQ ID NO: 247049 - DNA, 30 bp, Artificial Sequence
  Synthetic oligonucleotide
ggttaaatcataccggagtgattagataga

SEQ ID NO: 247050 - DNA, 30 bp, Artificial Sequence
  Synthetic oligonucleotide
agttgaacatgcccagtgcggaacgataga

SEQ ID NO: 247051 - DNA, 30 bp, Artificial Sequence
  Synthetic oligonucleotide
taacatagtatctaacccagccgcgataga

SEQ ID NO: 247052 - DNA, 30 bp, Artificial Sequence
  Synthetic oligonucleotide
agatgttacgtaccttggatgttggataga

SEQ ID NO: 247053 - DNA, 30 bp, Artificial Sequence
  Synthetic oligonucleotide
cgggcagtgttgtgagaggtacgtgataga

SEQ ID NO: 247054 - DNA, 30 bp, Artificial Sequence
  Synthetic oligonucleotide
agcaggacggttgcgctcttgccatataga

SEQ ID NO: 247055 - DNA, 30 bp, Artificial Sequence
  Synthetic oligonucleotide
gtagcagcttggggcctggcatcatataga

SEQ ID NO: 247056 - DNA, 30 bp, Artificial Sequence
  Synthetic oligonucleotide
gtacccatccaggaggccggttcatataga

SEQ ID NO: 247057 - DNA, 30 bp, Artificial Sequence
  Synthetic oligonucleotide
caaaaactaccttcatcgttgtattataga

SEQ ID NO: 247058 - DNA, 30 bp, Artificial Sequence
  Synthetic oligonucleotide
aataagtgtatgctagaggggggttataga

SEQ ID NO: 247059 - DNA, 30 bp, Artificial Sequence
  Synthetic oligonucleotide
agagtagtgtgctacacccagtaaactaga

SEQ ID NO: 247060 - DNA, 30 bp, Artificial Sequence
  Synthetic oligonucleotide
tagctacgatcaccttgcgtaatgactaga

SEQ ID NO: 247061 - DNA, 30 bp, Artificial Sequence
  Synthetic oligonucleotide
taggtaccggtccaagagacgcgtactaga

SEQ ID NO: 247062 - DNA, 30 bp, Artificial Sequence
  Synthetic oligonucleotide
ttagaacgaaaaaggatatgctagcctaga

SEQ ID NO: 247063 - DNA, 30 bp, Artificial Sequence
  Synthetic oligonucleotide
atagatgattgccgtatgggtcggcctaga

SEQ ID NO: 247064 - DNA, 30 bp, Artificial Sequence
  Synthetic oligonucleotide
cgacctgtttacgtgatgcaccaagctaga

SEQ ID NO: 247065 - DNA, 30 bp, Artificial Sequence
  Synthetic oligonucleotide
gaaggttaagttgggtttatcacagctaga

SEQ ID NO: 247066 - DNA, 30 bp, Artificial Sequence
  Synthetic oligonucleotide
taactcgtaccgagatgttgatgagctaga

SEQ ID NO: 247067 - DNA, 30 bp, Artificial Sequence
  Synthetic oligonucleotide
caaccatcacatctgttgggcttcgctaga

SEQ ID NO: 247068 - DNA, 30 bp, Artificial Sequence
  Synthetic oligonucleotide
aggttcttgtgacataaatagagggctaga

SEQ ID NO: 247069 - DNA, 30 bp, Artificial Sequence
  Synthetic oligonucleotide
actcatctccggcgtgaggctagggctaga

SEQ ID NO: 247070 - DNA, 30 bp, Artificial Sequence
  Synthetic oligonucleotide
tcatcccgtgatgattattatggggctaga

SEQ ID NO: 247071 - DNA, 30 bp, Artificial Sequence
  Synthetic oligonucleotide
taatctgatccagagaaaggaaagtctaga

SEQ ID NO: 247072 - DNA, 30 bp, Artificial Sequence
  Synthetic oligonucleotide
ttggacggaaaaggagcgttcgcttctaga

SEQ ID NO: 247073 - DNA, 30 bp, Artificial Sequence
  Synthetic oligonucleotide
atataatcgaattttgcccaagaaagtaga

SEQ ID NO: 247074 - DNA, 30 bp, Artificial Sequence
  Synthetic oligonucleotide
acaattggaaggattgtgacgcgaagtaga

SEQ ID NO: 247075 - DNA, 30 bp, Artificial Sequence
  Synthetic oligonucleotide
cattggtagtgcaattccgggctaagtaga

SEQ ID NO: 247076 - DNA, 30 bp, Artificial Sequence
  Synthetic oligonucleotide
catccttagtgttaactgaatctcagtaga

SEQ ID NO: 247077 - DNA, 30 bp, Artificial Sequence
  Synthetic oligonucleotide
ctccggtgtcgtgtaaattacatgagtaga

SEQ ID NO: 247078 - DNA, 30 bp, Artificial Sequence
  Synthetic oligonucleotide
caggcaatattcgttgaacttcatagtaga

SEQ ID NO: 247079 - DNA, 30 bp, Artificial Sequence
  Synthetic oligonucleotide
gcgggtgtgcgtataggtcctgatagtaga

SEQ ID NO: 247080 - DNA, 30 bp, Artificial Sequence
  Synthetic oligonucleotide
gggcgagcatggcaacaaccatgtagtaga

SEQ ID NO: 247081 - DNA, 30 bp, Artificial Sequence
  Synthetic oligonucleotide
gaacgccagcaaactaggcgtattagtaga

SEQ ID NO: 247082 - DNA, 30 bp, Artificial Sequence
  Synthetic oligonucleotide
accacgatgtgctacacaagaacccgtaga

SEQ ID NO: 247083 - DNA, 30 bp, Artificial Sequence
  Synthetic oligonucleotide
ttcgcagtgatgagggaactaagccgtaga

SEQ ID NO: 247084 - DNA, 30 bp, Artificial Sequence
  Synthetic oligonucleotide
tcgagtcttccgacggtacgtaaaggtaga

SEQ ID NO: 247085 - DNA, 30 bp, Artificial Sequence
  Synthetic oligonucleotide
ggttattagggacttttgggcgtaggtaga

SEQ ID NO: 247086 - DNA, 30 bp, Artificial Sequence
  Synthetic oligonucleotide
acatctgtagtccaaggcaaatccggtaga

SEQ ID NO: 247087 - DNA, 30 bp, Artificial Sequence
  Synthetic oligonucleotide
cagtggaacacgaaccagtctaagggtaga

SEQ ID NO: 247088 - DNA, 31 bp, Artificial Sequence
  Synthetic oligonucleotide
aaagattatccctttcaggatcgggggtaga

SEQ ID NO: 247089 - DNA, 30 bp, Artificial Sequence
  Synthetic oligonucleotide
gcacgggtagtggctaaccgtatgggtaga

SEQ ID NO: 247090 - DNA, 30 bp, Artificial Sequence
  Synthetic oligonucleotide
acaatggaaccgaggattaggtctggtaga

SEQ ID NO: 247091 - DNA, 30 bp, Artificial Sequence
  Synthetic oligonucleotide
aatccgaataaatcgccaccactatgtaga

SEQ ID NO: 247092 - DNA, 30 bp, Artificial Sequence
  Synthetic oligonucleotide
cctttgaagatccacacgacggtatgtaga

SEQ ID NO: 247093 - DNA, 30 bp, Artificial Sequence
  Synthetic oligonucleotide
acggtatcagctacctttggtacctgtaga

SEQ ID NO: 247094 - DNA, 30 bp, Artificial Sequence
  Synthetic oligonucleotide
ctgccggaatgctaatccatagtgtgtaga

SEQ ID NO: 247095 - DNA, 30 bp, Artificial Sequence
  Synthetic oligonucleotide
cgcactaagatcggacgttatttgtgtaga

SEQ ID NO: 247096 - DNA, 30 bp, Artificial Sequence
  Synthetic oligonucleotide
agtatgcgtaccaatcgataatattgtaga

SEQ ID NO: 247097 - DNA, 30 bp, Artificial Sequence
  Synthetic oligonucleotide
aaaaccgtgcagcgacaaagtaagattaga

SEQ ID NO: 247098 - DNA, 30 bp, Artificial Sequence
  Synthetic oligonucleotide
tacgaaggatgtacgcattaggagattaga

SEQ ID NO: 247099 - DNA, 30 bp, Artificial Sequence
  Synthetic oligonucleotide
tagcgattccccacacgcatcaggattaga

SEQ ID NO: 247100 - DNA, 30 bp, Artificial Sequence
  Synthetic oligonucleotide
tgcatgcaccttgcgagtttagggattaga

SEQ ID NO: 247101 - DNA, 30 bp, Artificial Sequence
  Synthetic oligonucleotide
tcgtcattcggggatatgatcgtgattaga

SEQ ID NO: 247102 - DNA, 30 bp, Artificial Sequence
  Synthetic oligonucleotide
taacaagatattgtttaggcacgtattaga

SEQ ID NO: 247103 - DNA, 30 bp, Artificial Sequence
  Synthetic oligonucleotide
cctatgcactagggatgggtctgccttaga

SEQ ID NO: 247104 - DNA, 30 bp, Artificial Sequence
  Synthetic oligonucleotide
agacgaatgctctaaagagattgccttaga

SEQ ID NO: 247105 - DNA, 30 bp, Artificial Sequence
  Synthetic oligonucleotide
ggtgatagtcatctactttggcttcttaga

SEQ ID NO: 247106 - DNA, 30 bp, Artificial Sequence
  Synthetic oligonucleotide
ctacaaagaaccgtgcggctctgcgttaga

SEQ ID NO: 247107 - DNA, 30 bp, Artificial Sequence
  Synthetic oligonucleotide
gtcagtagtatccctggccgaccggttaga

SEQ ID NO: 247108 - DNA, 30 bp, Artificial Sequence
  Synthetic oligonucleotide
gctgtacgggatgtggaactctctgttaga

SEQ ID NO: 247109 - DNA, 30 bp, Artificial Sequence
  Synthetic oligonucleotide
agtctttggtacaaggtcaggtgatttaga

SEQ ID NO: 247110 - DNA, 30 bp, Artificial Sequence
  Synthetic oligonucleotide
tagtcagcttgatggatctacgtatttaga

SEQ ID NO: 247111 - DNA, 30 bp, Artificial Sequence
  Synthetic oligonucleotide
gcatgtgaaccctccgggaactactttaga

SEQ ID NO: 247112 - DNA, 30 bp, Artificial Sequence
  Synthetic oligonucleotide
cgtactataggtgaatactcaacctttaga

SEQ ID NO: 247113 - DNA, 30 bp, Artificial Sequence
  Synthetic oligonucleotide
caagacccgatcaaggcatcggcaaaacga

SEQ ID NO: 247114 - DNA, 30 bp, Artificial Sequence
  Synthetic oligonucleotide
taggctcatttatagttaaaacacaaacga

SEQ ID NO: 247115 - DNA, 30 bp, Artificial Sequence
  Synthetic oligonucleotide
ggcgcgtttacggaacacgacgggaaacga

SEQ ID NO: 247116 - DNA, 30 bp, Artificial Sequence
  Synthetic oligonucleotide
gcagcaatacctcaactatggtataaacga

SEQ ID NO: 247117 - DNA, 30 bp, Artificial Sequence
  Synthetic oligonucleotide
agtagggtatgtttcagaagttgtaaacga

SEQ ID NO: 247118 - DNA, 30 bp, Artificial Sequence
  Synthetic oligonucleotide
gtgctcgagttttacctatgcggacaacga

SEQ ID NO: 247119 - DNA, 30 bp, Artificial Sequence
  Synthetic oligonucleotide
tttccaaacccttcgtgctcttaccaacga

SEQ ID NO: 247120 - DNA, 30 bp, Artificial Sequence
  Synthetic oligonucleotide
tggagtatcactgggcgtgacagccaacga

SEQ ID NO: 247121 - DNA, 30 bp, Artificial Sequence
  Synthetic oligonucleotide
agctgttcacgaaatccgattcggcaacga

SEQ ID NO: 247122 - DNA, 30 bp, Artificial Sequence
  Synthetic oligonucleotide
acccgatccaatacggaaaacagtcaacga

SEQ ID NO: 247123 - DNA, 30 bp, Artificial Sequence
  Synthetic oligonucleotide
ggctgtaaatcgcgccaagaataagaacga

SEQ ID NO: 247124 - DNA, 30 bp, Artificial Sequence
  Synthetic oligonucleotide
tcggtctcatagtttaaggatacagaacga

SEQ ID NO: 247125 - DNA, 30 bp, Artificial Sequence
  Synthetic oligonucleotide
agccagatgaatcggaagctctcagaacga

SEQ ID NO: 247126 - DNA, 30 bp, Artificial Sequence
  Synthetic oligonucleotide
ctcaggtttaccgaaaaagcgtcagaacga

SEQ ID NO: 247127 - DNA, 30 bp, Artificial Sequence
  Synthetic oligonucleotide
ccatcgcaaggctagttacttcccgaacga

SEQ ID NO: 247128 - DNA, 30 bp, Artificial Sequence
  Synthetic oligonucleotide
ctacgcaaacagtaacgatgcctggaacga

SEQ ID NO: 247129 - DNA, 30 bp, Artificial Sequence
  Synthetic oligonucleotide
tgtacattgaccgaggggccattataacga

SEQ ID NO: 247130 - DNA, 30 bp, Artificial Sequence
  Synthetic oligonucleotide
agaatggtgggtttagaatttaggtaacga

SEQ ID NO: 247131 - DNA, 30 bp, Artificial Sequence
  Synthetic oligonucleotide
tcaagtgtagagcctggcccagattaacga

SEQ ID NO: 247132 - DNA, 30 bp, Artificial Sequence
  Synthetic oligonucleotide
catccagtaccacaggatttaagttaacga

SEQ ID NO: 247133 - DNA, 30 bp, Artificial Sequence
  Synthetic oligonucleotide
tggatactgaaaaagtccggaatcacacga

SEQ ID NO: 247134 - DNA, 30 bp, Artificial Sequence
  Synthetic oligonucleotide
gactaggagccagagggtcctgagacacga

SEQ ID NO: 247135 - DNA, 30 bp, Artificial Sequence
  Synthetic oligonucleotide
gtcatctaggatcttgagtaacgtacacga

SEQ ID NO: 247136 - DNA, 30 bp, Artificial Sequence
  Synthetic oligonucleotide
tggcttcggggggccaaggtgcatccacga

SEQ ID NO: 247137 - DNA, 30 bp, Artificial Sequence
  Synthetic oligonucleotide
actaagagcacgcgtataggtcgtccacga

SEQ ID NO: 247138 - DNA, 30 bp, Artificial Sequence
  Synthetic oligonucleotide
gccttagtcattactcagagaggtccacga

SEQ ID NO: 247139 - DNA, 30 bp, Artificial Sequence
  Synthetic oligonucleotide
cccgggttgtgctcattgagaacggcacga

SEQ ID NO: 247140 - DNA, 30 bp, Artificial Sequence
  Synthetic oligonucleotide
gcctatccgagttccggtgctgcggcacga

SEQ ID NO: 247141 - DNA, 30 bp, Artificial Sequence
  Synthetic oligonucleotide
gtaatggcggtcaggtcttttattgcacga

SEQ ID NO: 247142 - DNA, 30 bp, Artificial Sequence
  Synthetic oligonucleotide
gcatgttaacggtaggtgaaccaatcacga

SEQ ID NO: 247143 - DNA, 30 bp, Artificial Sequence
  Synthetic oligonucleotide
aacatcgcgctaagccgtacactatcacga

SEQ ID NO: 247144 - DNA, 30 bp, Artificial Sequence
  Synthetic oligonucleotide
catataaactctacatcttctttttcacga

SEQ ID NO: 247145 - DNA, 30 bp, Artificial Sequence
  Synthetic oligonucleotide
tattaatgtcacatgccacgttgaagacga

SEQ ID NO: 247146 - DNA, 30 bp, Artificial Sequence
  Synthetic oligonucleotide
gcacagtaactcccgttacgattaagacga

SEQ ID NO: 247147 - DNA, 30 bp, Artificial Sequence
  Synthetic oligonucleotide
ctgtgcgaatgttgaaagtaatacagacga

SEQ ID NO: 247148 - DNA, 30 bp, Artificial Sequence
  Synthetic oligonucleotide
ggagagaggcagggaccgggacccagacga

SEQ ID NO: 247149 - DNA, 30 bp, Artificial Sequence
  Synthetic oligonucleotide
gccaggactgagtgtcttaacgatagacga

SEQ ID NO: 247150 - DNA, 30 bp, Artificial Sequence
  Synthetic oligonucleotide
caagccgtaagatagacgcactctagacga

SEQ ID NO: 247151 - DNA, 30 bp, Artificial Sequence
  Synthetic oligonucleotide
agctcagcgtaatgttacttaagtagacga

SEQ ID NO: 247152 - DNA, 30 bp, Artificial Sequence
  Synthetic oligonucleotide
aggaactaattagtgtgactcgttagacga

SEQ ID NO: 247153 - DNA, 30 bp, Artificial Sequence
  Synthetic oligonucleotide
aaacttcgtcacgggaacatgcaccgacga

SEQ ID NO: 247154 - DNA, 30 bp, Artificial Sequence
  Synthetic oligonucleotide
tggaattatgatatccggggcgaccgacga

SEQ ID NO: 247155 - DNA, 30 bp, Artificial Sequence
  Synthetic oligonucleotide
ggaataatcccgcgtaacatggtccgacga

SEQ ID NO: 247156 - DNA, 30 bp, Artificial Sequence
  Synthetic oligonucleotide
ttcgtagaaaaagtaaattatgtgcgacga

SEQ ID NO: 247157 - DNA, 30 bp, Artificial Sequence
  Synthetic oligonucleotide
atctacgacgggggggagagtaatcgacga

SEQ ID NO: 247158 - DNA, 30 bp, Artificial Sequence
  Synthetic oligonucleotide
atagcccgctaatcaatggtagaaggacga

SEQ ID NO: 247159 - DNA, 30 bp, Artificial Sequence
  Synthetic oligonucleotide
gctagggtgggatgtgctagcccaggacga

SEQ ID NO: 247160 - DNA, 30 bp, Artificial Sequence
  Synthetic oligonucleotide
cagtatgaagtccggaataagccaggacga

SEQ ID NO: 247161 - DNA, 30 bp, Artificial Sequence
  Synthetic oligonucleotide
tctctcgagtaaatcgggagcgcaggacga

SEQ ID NO: 247162 - DNA, 30 bp, Artificial Sequence
  Synthetic oligonucleotide
ggagtcgacatacagcaagatgtcggacga

SEQ ID NO: 247163 - DNA, 30 bp, Artificial Sequence
  Synthetic oligonucleotide
tgttcctgccgttaaatcagggcgggacga

SEQ ID NO: 247164 - DNA, 30 bp, Artificial Sequence
  Synthetic oligonucleotide
tggcggtaagttgtggttggcaggggacga

SEQ ID NO: 247165 - DNA, 30 bp, Artificial Sequence
  Synthetic oligonucleotide
gggtaggtcgatactttgagtcggggacga

SEQ ID NO: 247166 - DNA, 30 bp, Artificial Sequence
  Synthetic oligonucleotide
gctggacaccagtgcacagaagtgggacga

SEQ ID NO: 247167 - DNA, 30 bp, Artificial Sequence
  Synthetic oligonucleotide
ttgataaatttcgggtccgaacatggacga

SEQ ID NO: 247168 - DNA, 30 bp, Artificial Sequence
  Synthetic oligonucleotide
acaattgacgtcacacgatgctatggacga

SEQ ID NO: 247169 - DNA, 30 bp, Artificial Sequence
  Synthetic oligonucleotide
catctgagactgggtcactcggactgacga

SEQ ID NO: 247170 - DNA, 30 bp, Artificial Sequence
  Synthetic oligonucleotide
agcagagtatttggagtagtgagctgacga

SEQ ID NO: 247171 - DNA, 30 bp, Artificial Sequence
  Synthetic oligonucleotide
gtagaagatgtacgggccctgccgtgacga

SEQ ID NO: 247172 - DNA, 30 bp, Artificial Sequence
  Synthetic oligonucleotide
gcacacggcgcggaccggggtatgtgacga

SEQ ID NO: 247173 - DNA, 30 bp, Artificial Sequence
  Synthetic oligonucleotide
ataagacgcgggatctccagacattgacga

SEQ ID NO: 247174 - DNA, 30 bp, Artificial Sequence
  Synthetic oligonucleotide
gcacgagcacagtggcctggacgttgacga

SEQ ID NO: 247175 - DNA, 30 bp, Artificial Sequence
  Synthetic oligonucleotide
cgtacggccaatatatgattgggttgacga

SEQ ID NO: 247176 - DNA, 30 bp, Artificial Sequence
  Synthetic oligonucleotide
acgcgcccctccaccgttcggtcaatacga

SEQ ID NO: 247177 - DNA, 30 bp, Artificial Sequence
  Synthetic oligonucleotide
ctttacacattatgtatgatgtgaatacga

SEQ ID NO: 247178 - DNA, 30 bp, Artificial Sequence
  Synthetic oligonucleotide
tgatgctattaatagaggataatgatacga

SEQ ID NO: 247179 - DNA, 30 bp, Artificial Sequence
  Synthetic oligonucleotide
gtagtattgcacgacttttctcttatacga

SEQ ID NO: 247180 - DNA, 30 bp, Artificial Sequence
  Synthetic oligonucleotide
gcgaaacttagctgttcgcgacgactacga

SEQ ID NO: 247181 - DNA, 30 bp, Artificial Sequence
  Synthetic oligonucleotide
agggtacatccaccacaagcgtgcctacga

SEQ ID NO: 247182 - DNA, 30 bp, Artificial Sequence
  Synthetic oligonucleotide
tgaaaagactcttgttagattaggctacga

SEQ ID NO: 247183 - DNA, 30 bp, Artificial Sequence
  Synthetic oligonucleotide
gtgcggcaagcccaaaaggcttatctacga

SEQ ID NO: 247184 - DNA, 30 bp, Artificial Sequence
  Synthetic oligonucleotide
cgttccaaccactatttgccaaccgtacga

SEQ ID NO: 247185 - DNA, 30 bp, Artificial Sequence
  Synthetic oligonucleotide
gaacgttatagacaatttccataggtacga

SEQ ID NO: 247186 - DNA, 30 bp, Artificial Sequence
  Synthetic oligonucleotide
gggggtggggtggtcccagacgtggtacga

SEQ ID NO: 247187 - DNA, 30 bp, Artificial Sequence
  Synthetic oligonucleotide
taatagaacgatatctcaatcgttgtacga

SEQ ID NO: 247188 - DNA, 30 bp, Artificial Sequence
  Synthetic oligonucleotide
ccgataccagcgattcggtgttttgtacga

SEQ ID NO: 247189 - DNA, 30 bp, Artificial Sequence
  Synthetic oligonucleotide
actgtcgattcgcattatagtgcattacga

SEQ ID NO: 247190 - DNA, 30 bp, Artificial Sequence
  Synthetic oligonucleotide
tttctacgatcgtcaaacttatgattacga

SEQ ID NO: 247191 - DNA, 30 bp, Artificial Sequence
  Synthetic oligonucleotide
tgacacgaaatctatgtacagttattacga

SEQ ID NO: 247192 - DNA, 30 bp, Artificial Sequence
  Synthetic oligonucleotide
gaacaattcatgcgatccccgaatttacga

SEQ ID NO: 247193 - DNA, 30 bp, Artificial Sequence
  Synthetic oligonucleotide
ggccggagggctcctccaggacgaaaccga

SEQ ID NO: 247194 - DNA, 30 bp, Artificial Sequence
  Synthetic oligonucleotide
cgcggaaaagggcccgtattaataaaccga

SEQ ID NO: 247195 - DNA, 30 bp, Artificial Sequence
  Synthetic oligonucleotide
tggttatatgtggcagagagagagaaccga

SEQ ID NO: 247196 - DNA, 30 bp, Artificial Sequence
  Synthetic oligonucleotide
cctaaggtacttaggattcgagggaaccga

SEQ ID NO: 247197 - DNA, 30 bp, Artificial Sequence
  Synthetic oligonucleotide
ggccctttggaacaattcaggtataaccga

SEQ ID NO: 247198 - DNA, 30 bp, Artificial Sequence
  Synthetic oligonucleotide
acccgggacaccccaataggccctaaccga

SEQ ID NO: 247199 - DNA, 30 bp, Artificial Sequence
  Synthetic oligonucleotide
aacgttaacggaagatttttcagtaaccga

SEQ ID NO: 247200 - DNA, 30 bp, Artificial Sequence
  Synthetic oligonucleotide
gggtcaagaacttggtattattgtaaccga

SEQ ID NO: 247201 - DNA, 30 bp, Artificial Sequence
  Synthetic oligonucleotide
aagctcgggatgaacaaatgggagcaccga

SEQ ID NO: 247202 - DNA, 30 bp, Artificial Sequence
  Synthetic oligonucleotide
tcaggacagctaatcaaggtgatgcaccga

SEQ ID NO: 247203 - DNA, 30 bp, Artificial Sequence
  Synthetic oligonucleotide
taagagatgtatagacgcgtttctcaccga

SEQ ID NO: 247204 - DNA, 30 bp, Artificial Sequence
  Synthetic oligonucleotide
taagcacgctaaatgtggttattagaccga

SEQ ID NO: 247205 - DNA, 30 bp, Artificial Sequence
  Synthetic oligonucleotide
tcactagtgtccagtttcgattccgaccga

SEQ ID NO: 247206 - DNA, 30 bp, Artificial Sequence
  Synthetic oligonucleotide
tatcgggtggtatactctcatatcgaccga

SEQ ID NO: 247207 - DNA, 30 bp, Artificial Sequence
  Synthetic oligonucleotide
ttagatgaacaagtctaagtgtaggaccga

SEQ ID NO: 247208 - DNA, 30 bp, Artificial Sequence
  Synthetic oligonucleotide
gatcgctggcgcagtgcatggaaataccga

SEQ ID NO: 247209 - DNA, 30 bp, Artificial Sequence
  Synthetic oligonucleotide
gataatgagctaacgatcaatgtctaccga

SEQ ID NO: 247210 - DNA, 30 bp, Artificial Sequence
  Synthetic oligonucleotide
atcggtaataagcatacgcgtcagtaccga

SEQ ID NO: 247211 - DNA, 30 bp, Artificial Sequence
  Synthetic oligonucleotide
tagtccatctccgatgtgacaaggtaccga

SEQ ID NO: 247212 - DNA, 30 bp, Artificial Sequence
  Synthetic oligonucleotide
gctctctgagctcattcgactctgtaccga

SEQ ID NO: 247213 - DNA, 30 bp, Artificial Sequence
  Synthetic oligonucleotide
aaactcgctgatgaaccccacttcacccga

SEQ ID NO: 247214 - DNA, 30 bp, Artificial Sequence
  Synthetic oligonucleotide
tcgtggtgcttatacttaaagtatccccga

SEQ ID NO: 247215 - DNA, 30 bp, Artificial Sequence
  Synthetic oligonucleotide
gagacgccgtaggaccatgcccttccccga

SEQ ID NO: 247216 - DNA, 30 bp, Artificial Sequence
  Synthetic oligonucleotide
tgccagactcgacatttttaaacagcccga

SEQ ID NO: 247217 - DNA, 30 bp, Artificial Sequence
  Synthetic oligonucleotide
ggtctcgcggggacgtgtgtacgagcccga

SEQ ID NO: 247218 - DNA, 30 bp, Artificial Sequence
  Synthetic oligonucleotide
aaataaggcgtcaggcatgccaacgcccga

SEQ ID NO: 247219 - DNA, 30 bp, Artificial Sequence
  Synthetic oligonucleotide
agcgctacactgcggttaggaagcgcccga

SEQ ID NO: 247220 - DNA, 30 bp, Artificial Sequence
  Synthetic oligonucleotide
ggatggtatataatacttaatagggcccga

SEQ ID NO: 247221 - DNA, 30 bp, Artificial Sequence
  Synthetic oligonucleotide
cttccagataaacgatagtccggggcccga

SEQ ID NO: 247222 - DNA, 30 bp, Artificial Sequence
  Synthetic oligonucleotide
cccaacgctctagtgggcgcattggcccga

SEQ ID NO: 247223 - DNA, 30 bp, Artificial Sequence
  Synthetic oligonucleotide
agggtttctgtaggcttttatccatcccga

SEQ ID NO: 247224 - DNA, 30 bp, Artificial Sequence
  Synthetic oligonucleotide
tgcaccgtatttgtcttgagatgctcccga

SEQ ID NO: 247225 - DNA, 30 bp, Artificial Sequence
  Synthetic oligonucleotide
tggttcaactctacgaagatattgtcccga

SEQ ID NO: 247226 - DNA, 30 bp, Artificial Sequence
  Synthetic oligonucleotide
taaagttcgggacgtgacaaaccaagccga

SEQ ID NO: 247227 - DNA, 30 bp, Artificial Sequence
  Synthetic oligonucleotide
ttgacctcactttgaaggtaatcaagccga

SEQ ID NO: 247228 - DNA, 30 bp, Artificial Sequence
  Synthetic oligonucleotide
agggtcggcctcttcagatgtcacagccga

SEQ ID NO: 247229 - DNA, 30 bp, Artificial Sequence
  Synthetic oligonucleotide
gacttaatgcacgtaatagaccggagccga

SEQ ID NO: 247230 - DNA, 30 bp, Artificial Sequence
  Synthetic oligonucleotide
tcgcgctggatgttggctgctctgagccga

SEQ ID NO: 247231 - DNA, 30 bp, Artificial Sequence
  Synthetic oligonucleotide
ctcatatcgtggccattatagaatagccga

SEQ ID NO: 247232 - DNA, 30 bp, Artificial Sequence
  Synthetic oligonucleotide
ggatttcagggcgggattcattatagccga

SEQ ID NO: 247233 - DNA, 30 bp, Artificial Sequence
  Synthetic oligonucleotide
gtataagctgggaactgagttacacgccga

SEQ ID NO: 247234 - DNA, 30 bp, Artificial Sequence
  Synthetic oligonucleotide
cgagggggactttaaggtacggttcgccga

SEQ ID NO: 247235 - DNA, 30 bp, Artificial Sequence
  Synthetic oligonucleotide
attggtaccgaggcatcgagggttcgccga

SEQ ID NO: 247236 - DNA, 30 bp, Artificial Sequence
  Synthetic oligonucleotide
ttgggactgtatagctgcgctcaaggccga

SEQ ID NO: 247237 - DNA, 30 bp, Artificial Sequence
  Synthetic oligonucleotide
ggacaattatcagccttaccggaaggccga

SEQ ID NO: 247238 - DNA, 30 bp, Artificial Sequence
  Synthetic oligonucleotide
tgcgttactgcagatggtgcgccaggccga

SEQ ID NO: 247239 - DNA, 30 bp, Artificial Sequence
  Synthetic oligonucleotide
gaattatgtggtatagtgaagaagggccga

SEQ ID NO: 247240 - DNA, 30 bp, Artificial Sequence
  Synthetic oligonucleotide
tacggaaagcagggggaaaaaatgggccga

SEQ ID NO: 247241 - DNA, 30 bp, Artificial Sequence
  Synthetic oligonucleotide
tattatagccagccggacaattgtggccga

SEQ ID NO: 247242 - DNA, 30 bp, Artificial Sequence
  Synthetic oligonucleotide
tgacaagcactcttagacttgcttggccga

SEQ ID NO: 247243 - DNA, 30 bp, Artificial Sequence
  Synthetic oligonucleotide
ctgttgacgcggagttgtatgaaaatccga

SEQ ID NO: 247244 - DNA, 30 bp, Artificial Sequence
  Synthetic oligonucleotide
actttcgggcgttggaggtctaagatccga

SEQ ID NO: 247245 - DNA, 30 bp, Artificial Sequence
  Synthetic oligonucleotide
acttcgcatgtaccaacgaccgggatccga

SEQ ID NO: 247246 - DNA, 30 bp, Artificial Sequence
  Synthetic oligonucleotide
gaaagtagcaagagatgggtggatatccga

SEQ ID NO: 247247 - DNA, 30 bp, Artificial Sequence
  Synthetic oligonucleotide
tcgaatgtagaagtcgcataacagctccga

SEQ ID NO: 247248 - DNA, 30 bp, Artificial Sequence
  Synthetic oligonucleotide
aagttaacacacggttgcagatctctccga

SEQ ID NO: 247249 - DNA, 30 bp, Artificial Sequence
  Synthetic oligonucleotide
tggatgagatcgagataacgacgtctccga

SEQ ID NO: 247250 - DNA, 30 bp, Artificial Sequence
  Synthetic oligonucleotide
ttctacgagcccgcctcgcaatgtctccga

SEQ ID NO: 247251 - DNA, 30 bp, Artificial Sequence
  Synthetic oligonucleotide
gcatgtgttaagcccgcgggaagagtccga

SEQ ID NO: 247252 - DNA, 30 bp, Artificial Sequence
  Synthetic oligonucleotide
ccgattcaataatcgaattctagcgtccga

SEQ ID NO: 247253 - DNA, 25 bp, Artificial Sequence
  Synthetic oligonucleotide
atgtatagtgcgaaatggcgtccga

SEQ ID NO: 247254 - DNA, 30 bp, Artificial Sequence
  Synthetic oligonucleotide
gccccggttctaaccgattatttcgtccga

SEQ ID NO: 247255 - DNA, 30 bp, Artificial Sequence
  Synthetic oligonucleotide
gtaacttggtggacatagaacgtggtccga

SEQ ID NO: 247256 - DNA, 30 bp, Artificial Sequence
  Synthetic oligonucleotide
gacacactcggtattctgaggtatgtccga

SEQ ID NO: 247257 - DNA, 30 bp, Artificial Sequence
  Synthetic oligonucleotide
attcgtttccaagttctaagttatgtccga

SEQ ID NO: 247258 - DNA, 30 bp, Artificial Sequence
  Synthetic oligonucleotide
cgacgtcttctccactatctttctgtccga

SEQ ID NO: 247259 - DNA, 30 bp, Artificial Sequence
  Synthetic oligonucleotide
tgcctcttgttcccttgcattaacttccga

SEQ ID NO: 247260 - DNA, 30 bp, Artificial Sequence
  Synthetic oligonucleotide
aaagatactctctagtatggatgaaagcga

SEQ ID NO: 247261 - DNA, 30 bp, Artificial Sequence
  Synthetic oligonucleotide
gttttacagccaaaatcccccggcaagcga

SEQ ID NO: 247262 - DNA, 30 bp, Artificial Sequence
  Synthetic oligonucleotide
agatcccttgcagataaaggtaggaagcga

SEQ ID NO: 247263 - DNA, 30 bp, Artificial Sequence
  Synthetic oligonucleotide
ccttggagtacctctccgcagtggaagcga

SEQ ID NO: 247264 - DNA, 30 bp, Artificial Sequence
  Synthetic oligonucleotide
cactggaacattaaaccggtaaataagcga

SEQ ID NO: 247265 - DNA, 30 bp, Artificial Sequence
  Synthetic oligonucleotide
ttagagatgcacggcgtccatagtaagcga

SEQ ID NO: 247266 - DNA, 30 bp, Artificial Sequence
  Synthetic oligonucleotide
gaaagagtcatcatcctttgagaacagcga

SEQ ID NO: 247267 - DNA, 30 bp, Artificial Sequence
  Synthetic oligonucleotide
aggctcacaatagaaaggtttggacagcga

SEQ ID NO: 247268 - DNA, 30 bp, Artificial Sequence
  Synthetic oligonucleotide
ggaagccttcggtaaagtttcgggcagcga

SEQ ID NO: 247269 - DNA, 30 bp, Artificial Sequence
  Synthetic oligonucleotide
cctgtcctactatagctccagcgtcagcga

SEQ ID NO: 247270 - DNA, 30 bp, Artificial Sequence
  Synthetic oligonucleotide
catgaacgttttgagactggaacagagcga

SEQ ID NO: 247271 - DNA, 30 bp, Artificial Sequence
  Synthetic oligonucleotide
ggccgaaagggacgttgggactttgagcga

SEQ ID NO: 247272 - DNA, 30 bp, Artificial Sequence
  Synthetic oligonucleotide
ggttcgggagcggtcgcaagacaatagcga

SEQ ID NO: 247273 - DNA, 30 bp, Artificial Sequence
  Synthetic oligonucleotide
tccgccgggtggttgcatgatttatagcga

SEQ ID NO: 247274 - DNA, 30 bp, Artificial Sequence
  Synthetic oligonucleotide
ggtctaaggatgtacgtcccgtagtagcga

SEQ ID NO: 247275 - DNA, 30 bp, Artificial Sequence
  Synthetic oligonucleotide
caagtaatccagtggtgtaaatattagcga

SEQ ID NO: 247276 - DNA, 30 bp, Artificial Sequence
  Synthetic oligonucleotide
ttgttctagggtatgtgttcgtgttagcga

SEQ ID NO: 247277 - DNA, 30 bp, Artificial Sequence
  Synthetic oligonucleotide
cgaccgtctcactccgtttaaatttagcga

SEQ ID NO: 247278 - DNA, 30 bp, Artificial Sequence
  Synthetic oligonucleotide
cgagaatctatgctgcgcgccgtttagcga

SEQ ID NO: 247279 - DNA, 30 bp, Artificial Sequence
  Synthetic oligonucleotide
caggcgatagcgccagcctgcggaacgcga

SEQ ID NO: 247280 - DNA, 30 bp, Artificial Sequence
  Synthetic oligonucleotide
gtagtcagagtaaaagcacatgtcacgcga

SEQ ID NO: 247281 - DNA, 30 bp, Artificial Sequence
  Synthetic oligonucleotide
tggaaggaagtccggccatccgcgacgcga

SEQ ID NO: 247282 - DNA, 30 bp, Artificial Sequence
  Synthetic oligonucleotide
tatactaccgcaaaaaatgaacggacgcga

SEQ ID NO: 247283 - DNA, 30 bp, Artificial Sequence
  Synthetic oligonucleotide
gcatatcacatgtgggaaagtgggacgcga

SEQ ID NO: 247284 - DNA, 30 bp, Artificial Sequence
  Synthetic oligonucleotide
ttgcatgatagggaggaaagctgtacgcga

SEQ ID NO: 247285 - DNA, 30 bp, Artificial Sequence
  Synthetic oligonucleotide
ttcacgcttataaacgggggcaaaccgcga

SEQ ID NO: 247286 - DNA, 30 bp, Artificial Sequence
  Synthetic oligonucleotide
ttcgataatgatgtatccccgaacccgcga

SEQ ID NO: 247287 - DNA, 30 bp, Artificial Sequence
  Synthetic oligonucleotide
tccggagctgttagtctcctagagccgcga

SEQ ID NO: 247288 - DNA, 30 bp, Artificial Sequence
  Synthetic oligonucleotide
cagggcatcgattcacaagtgaatccgcga

SEQ ID NO: 247289 - DNA, 30 bp, Artificial Sequence
  Synthetic oligonucleotide
cgaagctactctctattctaccatccgcga

SEQ ID NO: 247290 - DNA, 30 bp, Artificial Sequence
  Synthetic oligonucleotide
ttaaacatgtcgtcgacccagtttccgcga

SEQ ID NO: 247291 - DNA, 30 bp, Artificial Sequence
  Synthetic oligonucleotide
ttggcacacgagtgatttgttccagcgcga

SEQ ID NO: 247292 - DNA, 30 bp, Artificial Sequence
  Synthetic oligonucleotide
cacggatggtccttgacccaaatcgcgcga

SEQ ID NO: 247293 - DNA, 30 bp, Artificial Sequence
  Synthetic oligonucleotide
cagtaagtcacagaagaacagtaggcgcga

SEQ ID NO: 247294 - DNA, 30 bp, Artificial Sequence
  Synthetic oligonucleotide
ggcggaggcttttttagacacgtggcgcga

SEQ ID NO: 247295 - DNA, 30 bp, Artificial Sequence
  Synthetic oligonucleotide
cccgttaacgccgctaatcaattggcgcga

SEQ ID NO: 247296 - DNA, 30 bp, Artificial Sequence
  Synthetic oligonucleotide
ggccttgatttgaagggtcgtgttgcgcga

SEQ ID NO: 247297 - DNA, 30 bp, Artificial Sequence
  Synthetic oligonucleotide
ggatctgcctagcaacaaataagatcgcga

SEQ ID NO: 247298 - DNA, 30 bp, Artificial Sequence
  Synthetic oligonucleotide
gggcaatctctcagtggaactgtatcgcga

SEQ ID NO: 247299 - DNA, 30 bp, Artificial Sequence
  Synthetic oligonucleotide
cgcggttttctgacggcttgtgagtcgcga

SEQ ID NO: 247300 - DNA, 30 bp, Artificial Sequence
  Synthetic oligonucleotide
gatcctaggtgtgtaatacctatgtcgcga

SEQ ID NO: 247301 - DNA, 30 bp, Artificial Sequence
  Synthetic oligonucleotide
atatccagcaaacataatcggtgaaggcga

SEQ ID NO: 247302 - DNA, 30 bp, Artificial Sequence
  Synthetic oligonucleotide
gcacccgaatagttggtaaagccacggcga

SEQ ID NO: 247303 - DNA, 30 bp, Artificial Sequence
  Synthetic oligonucleotide
gcggattcggtgcttttgacgtgccggcga

SEQ ID NO: 247304 - DNA, 30 bp, Artificial Sequence
  Synthetic oligonucleotide
atcacagtatgatgtttgcaccggcggcga

SEQ ID NO: 247305 - DNA, 30 bp, Artificial Sequence
  Synthetic oligonucleotide
aaaaagccatctggcagcgtgtatcggcga

SEQ ID NO: 247306 - DNA, 30 bp, Artificial Sequence
  Synthetic oligonucleotide
aaagcccgtagagcaatgactggtcggcga

SEQ ID NO: 247307 - DNA, 30 bp, Artificial Sequence
  Synthetic oligonucleotide
atagcgcatattattaccagcaaagggcga

SEQ ID NO: 247308 - DNA, 30 bp, Artificial Sequence
  Synthetic oligonucleotide
acctcagaacatatcgaggcactcgggcga

SEQ ID NO: 247309 - DNA, 30 bp, Artificial Sequence
  Synthetic oligonucleotide
agacccaacttggaatcttgaagtgggcga

SEQ ID NO: 247310 - DNA, 30 bp, Artificial Sequence
  Synthetic oligonucleotide
cacaggcatttcgcggcatgcattgggcga

SEQ ID NO: 247311 - DNA, 30 bp, Artificial Sequence
  Synthetic oligonucleotide
aggggaactcgtatcaatcgtacatggcga

SEQ ID NO: 247312 - DNA, 30 bp, Artificial Sequence
  Synthetic oligonucleotide
ttttgaccaaactacattgccaagtggcga

SEQ ID NO: 247313 - DNA, 30 bp, Artificial Sequence
  Synthetic oligonucleotide
taaacctgacgtatacgttcggcttggcga

SEQ ID NO: 247314 - DNA, 30 bp, Artificial Sequence
  Synthetic oligonucleotide
ggccgtcgtatatgtaactacatttggcga

SEQ ID NO: 247315 - DNA, 30 bp, Artificial Sequence
  Synthetic oligonucleotide
ctcagcgtagcgggcgttcaaagaatgcga

SEQ ID NO: 247316 - DNA, 30 bp, Artificial Sequence
  Synthetic oligonucleotide
accctctactactctggtcgggacatgcga

SEQ ID NO: 247317 - DNA, 30 bp, Artificial Sequence
  Synthetic oligonucleotide
cgggctagttgcaaaaggtcaactatgcga

SEQ ID NO: 247318 - DNA, 30 bp, Artificial Sequence
  Synthetic oligonucleotide
cgggggtagtatctcatatcttttatgcga

SEQ ID NO: 247319 - DNA, 30 bp, Artificial Sequence
  Synthetic oligonucleotide
aaataagggggaattggggtcaacctgcga

SEQ ID NO: 247320 - DNA, 30 bp, Artificial Sequence
  Synthetic oligonucleotide
ctgtaaaagcagttcggggccatcctgcga

SEQ ID NO: 247321 - DNA, 30 bp, Artificial Sequence
  Synthetic oligonucleotide
aaggattgaaaggacgtacggccgctgcga

SEQ ID NO: 247322 - DNA, 30 bp, Artificial Sequence
  Synthetic oligonucleotide
acaggagttattgggcctcaagggctgcga

SEQ ID NO: 247323 - DNA, 30 bp, Artificial Sequence
  Synthetic oligonucleotide
actttgggacaagcattagaggtgctgcga

SEQ ID NO: 247324 - DNA, 30 bp, Artificial Sequence
  Synthetic oligonucleotide
cgagagccctgcaacaaccccagagtgcga

SEQ ID NO: 247325 - DNA, 30 bp, Artificial Sequence
  Synthetic oligonucleotide
tttcagcaagagttgatttaggaattgcga

SEQ ID NO: 247326 - DNA, 30 bp, Artificial Sequence
  Synthetic oligonucleotide
ttacatatcacgtataacggtaacttgcga

SEQ ID NO: 247327 - DNA, 30 bp, Artificial Sequence
  Synthetic oligonucleotide
agtgagcccagatgtccaataggcttgcga

SEQ ID NO: 247328 - DNA, 30 bp, Artificial Sequence
  Synthetic oligonucleotide
atctaaggtacattccctctcgtcttgcga

SEQ ID NO: 247329 - DNA, 30 bp, Artificial Sequence
  Synthetic oligonucleotide
atcgtcggaaaaggacccgattagttgcga

SEQ ID NO: 247330 - DNA, 30 bp, Artificial Sequence
  Synthetic oligonucleotide
atagaaacatactgtcatttggcgttgcga

SEQ ID NO: 247331 - DNA, 30 bp, Artificial Sequence
  Synthetic oligonucleotide
gtcatgtcgccccccaccctgtttttgcga

SEQ ID NO: 247332 - DNA, 30 bp, Artificial Sequence
  Synthetic oligonucleotide
gaggatgttagggagcaccataaaaatcga

SEQ ID NO: 247333 - DNA, 30 bp, Artificial Sequence
  Synthetic oligonucleotide
agttggggagccctaaagctgtcaaatcga

SEQ ID NO: 247334 - DNA, 30 bp, Artificial Sequence
  Synthetic oligonucleotide
tcgtcgaaatcgttgttggtcaccaatcga

SEQ ID NO: 247335 - DNA, 30 bp, Artificial Sequence
  Synthetic oligonucleotide
gctcggcttcagacaactatcggcaatcga

SEQ ID NO: 247336 - DNA, 30 bp, Artificial Sequence
  Synthetic oligonucleotide
cgccagactccatacagaggcgtgaatcga

SEQ ID NO: 247337 - DNA, 30 bp, Artificial Sequence
  Synthetic oligonucleotide
acttgggtaatcccccgtctataacatcga

SEQ ID NO: 247338 - DNA, 30 bp, Artificial Sequence
  Synthetic oligonucleotide
ataagagggtcgaaggtagcaccacatcga

SEQ ID NO: 247339 - DNA, 30 bp, Artificial Sequence
  Synthetic oligonucleotide
atctgtattaagttggaccccggacatcga

SEQ ID NO: 247340 - DNA, 30 bp, Artificial Sequence
  Synthetic oligonucleotide
tgacgatccagccgagttcggtgacatcga

SEQ ID NO: 247341 - DNA, 30 bp, Artificial Sequence
  Synthetic oligonucleotide
ttattcaggtacccgacgaacgaccatcga

SEQ ID NO: 247342 - DNA, 30 bp, Artificial Sequence
  Synthetic oligonucleotide
catgggacttaaaaggaccgatcccatcga

SEQ ID NO: 247343 - DNA, 30 bp, Artificial Sequence
  Synthetic oligonucleotide
gtggtatcccatggcagatgaccgcatcga

SEQ ID NO: 247344 - DNA, 30 bp, Artificial Sequence
  Synthetic oligonucleotide
gttatgattagagtacgtacttatcatcga

SEQ ID NO: 247345 - DNA, 30 bp, Artificial Sequence
  Synthetic oligonucleotide
tgagcataggtacacacttgttgtcatcga

SEQ ID NO: 247346 - DNA, 30 bp, Artificial Sequence
  Synthetic oligonucleotide
ttaagtctcgcatctattccgtgagatcga

SEQ ID NO: 247347 - DNA, 30 bp, Artificial Sequence
  Synthetic oligonucleotide
tcgatatagggactgcaggcctccgatcga

SEQ ID NO: 247348 - DNA, 30 bp, Artificial Sequence
  Synthetic oligonucleotide
tttatgggccggaatcaaacattcgatcga

SEQ ID NO: 247349 - DNA, 30 bp, Artificial Sequence
  Synthetic oligonucleotide
gcgtgatactgcgatgctctaatggatcga

SEQ ID NO: 247350 - DNA, 30 bp, Artificial Sequence
  Synthetic oligonucleotide
acggactctgtcatggccgtcggatatcga

SEQ ID NO: 247351 - DNA, 30 bp, Artificial Sequence
  Synthetic oligonucleotide
gaggtttgggtagaatatgtactttatcga

SEQ ID NO: 247352 - DNA, 30 bp, Artificial Sequence
  Synthetic oligonucleotide
ttcgaacggaacgcaatccaaggaactcga

SEQ ID NO: 247353 - DNA, 30 bp, Artificial Sequence
  Synthetic oligonucleotide
gggtagctcagactaatagcgataactcga

SEQ ID NO: 247354 - DNA, 30 bp, Artificial Sequence
  Synthetic oligonucleotide
cctgcaaggaatcggttacaacccactcga

SEQ ID NO: 247355 - DNA, 30 bp, Artificial Sequence
  Synthetic oligonucleotide
ttaggcagaaaagtgccaagcgggactcga

SEQ ID NO: 247356 - DNA, 30 bp, Artificial Sequence
  Synthetic oligonucleotide
ataagggagcatgtatacattgatactcga

SEQ ID NO: 247357 - DNA, 30 bp, Artificial Sequence
  Synthetic oligonucleotide
ataggagatacgggaccagggacccctcga

SEQ ID NO: 247358 - DNA, 30 bp, Artificial Sequence
  Synthetic oligonucleotide
tgctactctaggcccatgagtacggctcga

SEQ ID NO: 247359 - DNA, 30 bp, Artificial Sequence
  Synthetic oligonucleotide
gactatcgcctacccgtcaagggggctcga

SEQ ID NO: 247360 - DNA, 30 bp, Artificial Sequence
  Synthetic oligonucleotide
ttgaccagtttaaacggggactgggctcga

SEQ ID NO: 247361 - DNA, 30 bp, Artificial Sequence
  Synthetic oligonucleotide
tccacacatctaaattgcgtgggttctcga

SEQ ID NO: 247362 - DNA, 30 bp, Artificial Sequence
  Synthetic oligonucleotide
ttgtaaccctagtagagcgggtgcagtcga

SEQ ID NO: 247363 - DNA, 30 bp, Artificial Sequence
  Synthetic oligonucleotide
tcagaagatattcagttaagcgcgagtcga

SEQ ID NO: 247364 - DNA, 30 bp, Artificial Sequence
  Synthetic oligonucleotide
agaaattgtcgtgacgtactcagacgtcga

SEQ ID NO: 247365 - DNA, 30 bp, Artificial Sequence
  Synthetic oligonucleotide
tgtccgctgtggttctaaagcctccgtcga

SEQ ID NO: 247366 - DNA, 30 bp, Artificial Sequence
  Synthetic oligonucleotide
atcgagactgctataggtcttatgcgtcga

SEQ ID NO: 247367 - DNA, 30 bp, Artificial Sequence
  Synthetic oligonucleotide
ggaccacttggtcgggcgaattagggtcga

SEQ ID NO: 247368 - DNA, 30 bp, Artificial Sequence
  Synthetic oligonucleotide
gacactggagatgaatgaattcggggtcga

SEQ ID NO: 247369 - DNA, 30 bp, Artificial Sequence
  Synthetic oligonucleotide
atgcatatcagtagcggtatctggggtcga

SEQ ID NO: 247370 - DNA, 30 bp, Artificial Sequence
  Synthetic oligonucleotide
tagagttcctgaatcactagacagtgtcga

SEQ ID NO: 247371 - DNA, 30 bp, Artificial Sequence
  Synthetic oligonucleotide
catggagtcacttatataaacgaaattcga

SEQ ID NO: 247372 - DNA, 31 bp, Artificial Sequence
  Synthetic oligonucleotide
gacgagtggatattcaggaaaacacattcga

SEQ ID NO: 247373 - DNA, 30 bp, Artificial Sequence
  Synthetic oligonucleotide
taattagggtttagggtgagactcattcga

SEQ ID NO: 247374 - DNA, 30 bp, Artificial Sequence
  Synthetic oligonucleotide
atcgagagtaatagactcataaggattcga

SEQ ID NO: 247375 - DNA, 30 bp, Artificial Sequence
  Synthetic oligonucleotide
cagctttacgggttggacgagcggattcga

SEQ ID NO: 247376 - DNA, 30 bp, Artificial Sequence
  Synthetic oligonucleotide
acagtcgcatatctagtttagtggattcga

SEQ ID NO: 247377 - DNA, 30 bp, Artificial Sequence
  Synthetic oligonucleotide
ggcagttggtgaaggaggggggatattcga

SEQ ID NO: 247378 - DNA, 30 bp, Artificial Sequence
  Synthetic oligonucleotide
tattaagtgaaggttgtgagcgttattcga

SEQ ID NO: 247379 - DNA, 30 bp, Artificial Sequence
  Synthetic oligonucleotide
ctacaactcaaagttgatgatagccttcga

SEQ ID NO: 247380 - DNA, 30 bp, Artificial Sequence
  Synthetic oligonucleotide
cttattagtccctttccgatatagcttcga

SEQ ID NO: 247381 - DNA, 30 bp, Artificial Sequence
  Synthetic oligonucleotide
tagacctgcgatttaaacatacatcttcga

SEQ ID NO: 247382 - DNA, 30 bp, Artificial Sequence
  Synthetic oligonucleotide
agaatggtcataggcatatcggctcttcga

SEQ ID NO: 247383 - DNA, 30 bp, Artificial Sequence
  Synthetic oligonucleotide
gagtactctgacgaacaagaacctgttcga

SEQ ID NO: 247384 - DNA, 30 bp, Artificial Sequence
  Synthetic oligonucleotide
ggcgcccagacagaactccgtgtctttcga

SEQ ID NO: 247385 - DNA, 30 bp, Artificial Sequence
  Synthetic oligonucleotide
atgatacaccaacctatgtgtttctttcga

SEQ ID NO: 247386 - DNA, 30 bp, Artificial Sequence
  Synthetic oligonucleotide
gcagcgttcgacgtagtgcgcgaaaaagga

SEQ ID NO: 247387 - DNA, 30 bp, Artificial Sequence
  Synthetic oligonucleotide
ggatccggggtggctacggccagaaaagga

SEQ ID NO: 247388 - DNA, 30 bp, Artificial Sequence
  Synthetic oligonucleotide
aagggagtcggggggcggttctgaaaagga

SEQ ID NO: 247389 - DNA, 30 bp, Artificial Sequence
  Synthetic oligonucleotide
gttgagtgtccgcacgtaagctacaaagga

SEQ ID NO: 247390 - DNA, 30 bp, Artificial Sequence
  Synthetic oligonucleotide
aaggttattgtgaaggagtgcaccaaagga

SEQ ID NO: 247391 - DNA, 30 bp, Artificial Sequence
  Synthetic oligonucleotide
agtgaatgagggagtctcttaatcaaagga

SEQ ID NO: 247392 - DNA, 30 bp, Artificial Sequence
  Synthetic oligonucleotide
gggagttaaccaaatggccggctcaaagga

SEQ ID NO: 247393 - DNA, 30 bp, Artificial Sequence
  Synthetic oligonucleotide
gcgtcgattgatagctgaacgtggaaagga

SEQ ID NO: 247394 - DNA, 30 bp, Artificial Sequence
  Synthetic oligonucleotide
ggttgagttagcccggcttcagataaagga

SEQ ID NO: 247395 - DNA, 30 bp, Artificial Sequence
  Synthetic oligonucleotide
gatggtcctcactctgtagatgcacaagga

SEQ ID NO: 247396 - DNA, 30 bp, Artificial Sequence
  Synthetic oligonucleotide
tataaaggagccaaggactcctaccaagga

SEQ ID NO: 247397 - DNA, 30 bp, Artificial Sequence
  Synthetic oligonucleotide
acactatcggatcttcggcgtccccaagga

SEQ ID NO: 247398 - DNA, 30 bp, Artificial Sequence
  Synthetic oligonucleotide
gtatgagaatcgcattgtttatgccaagga

SEQ ID NO: 247399 - DNA, 30 bp, Artificial Sequence
  Synthetic oligonucleotide
tgtagcggtctataggtttacgtccaagga

SEQ ID NO: 247400 - DNA, 30 bp, Artificial Sequence
  Synthetic oligonucleotide
aaaagattcccgtgtgaaagtcagcaagga

SEQ ID NO: 247401 - DNA, 30 bp, Artificial Sequence
  Synthetic oligonucleotide
aacacagagaaggcgcaactcctgcaagga

SEQ ID NO: 247402 - DNA, 30 bp, Artificial Sequence
  Synthetic oligonucleotide
ggcaggctttacctagtattggatcaagga

SEQ ID NO: 247403 - DNA, 30 bp, Artificial Sequence
  Synthetic oligonucleotide
attagagggttcaacttcaaatgagaagga

SEQ ID NO: 247404 - DNA, 30 bp, Artificial Sequence
  Synthetic oligonucleotide
cgttttagtgcgcaaccgttaaccgaagga

SEQ ID NO: 247405 - DNA, 30 bp, Artificial Sequence
  Synthetic oligonucleotide
cgtagttcgcattactcatcgggcgaagga

SEQ ID NO: 247406 - DNA, 30 bp, Artificial Sequence
  Synthetic oligonucleotide
tgtaaacatatagtataccacatggaagga

SEQ ID NO: 247407 - DNA, 30 bp, Artificial Sequence
  Synthetic oligonucleotide
gtaactctacacgtggaagcttgtgaagga

SEQ ID NO: 247408 - DNA, 30 bp, Artificial Sequence
  Synthetic oligonucleotide
atttcctggtcggctaagcctgaataagga

SEQ ID NO: 247409 - DNA, 30 bp, Artificial Sequence
  Synthetic oligonucleotide
ttaatggagtacacccccccaacataagga

SEQ ID NO: 247410 - DNA, 30 bp, Artificial Sequence
  Synthetic oligonucleotide
gccatgcgacttagcagagcttcataagga

SEQ ID NO: 247411 - DNA, 30 bp, Artificial Sequence
  Synthetic oligonucleotide
aagtggacagggttccttttaagaacagga

SEQ ID NO: 247412 - DNA, 30 bp, Artificial Sequence
  Synthetic oligonucleotide
acattcctagaggctaatactataacagga

SEQ ID NO: 247413 - DNA, 31 bp, Artificial Sequence
  Synthetic oligonucleotide
tggtcaacttcggggtcttcggaagacagga

SEQ ID NO: 247414 - DNA, 30 bp, Artificial Sequence
  Synthetic oligonucleotide
ggttgggccgcgtgccgcgagaggacagga

SEQ ID NO: 247415 - DNA, 30 bp, Artificial Sequence
  Synthetic oligonucleotide
gaggggctcgggggaaattttacaccagga

SEQ ID NO: 247416 - DNA, 30 bp, Artificial Sequence
  Synthetic oligonucleotide
ctgcgagcgtcggttacgagggcaccagga

SEQ ID NO: 247417 - DNA, 30 bp, Artificial Sequence
  Synthetic oligonucleotide
taaagagacacagcgatcagttggccagga

SEQ ID NO: 247418 - DNA, 30 bp, Artificial Sequence
  Synthetic oligonucleotide
gtttacgcgtccaatttatcgcgtccagga

SEQ ID NO: 247419 - DNA, 30 bp, Artificial Sequence
  Synthetic oligonucleotide
tcgatggaacaagtgaaatcaggtccagga

SEQ ID NO: 247420 - DNA, 30 bp, Artificial Sequence
  Synthetic oligonucleotide
taccgagacctcatcgactcgcaagcagga

SEQ ID NO: 247421 - DNA, 30 bp, Artificial Sequence
  Synthetic oligonucleotide
gagaggctcatcacacccttataagcagga

SEQ ID NO: 247422 - DNA, 30 bp, Artificial Sequence
  Synthetic oligonucleotide
ttggggccgtatatcacttcgccagcagga

SEQ ID NO: 247423 - DNA, 30 bp, Artificial Sequence
  Synthetic oligonucleotide
tcgtatgcaactcgacctaggtcagcagga

SEQ ID NO: 247424 - DNA, 30 bp, Artificial Sequence
  Synthetic oligonucleotide
gagctaacatgcaagtagctctacgcagga

SEQ ID NO: 247425 - DNA, 30 bp, Artificial Sequence
  Synthetic oligonucleotide
gcccgctgtagttacatgtagatctcagga

SEQ ID NO: 247426 - DNA, 30 bp, Artificial Sequence
  Synthetic oligonucleotide
tagggttcgcgcctaactgtgccttcagga

SEQ ID NO: 247427 - DNA, 30 bp, Artificial Sequence
  Synthetic oligonucleotide
ccttatccccgaatattttaggcttcagga

SEQ ID NO: 247428 - DNA, 30 bp, Artificial Sequence
  Synthetic oligonucleotide
atagtatccgttctacagcgggaaagagga

SEQ ID NO: 247429 - DNA, 30 bp, Artificial Sequence
  Synthetic oligonucleotide
ggctcatgattcttttcgccgacaagagga

SEQ ID NO: 247430 - DNA, 30 bp, Artificial Sequence
  Synthetic oligonucleotide
ttacttaatggctggaaggtctcaagagga

SEQ ID NO: 247431 - DNA, 30 bp, Artificial Sequence
  Synthetic oligonucleotide
tgaagttcggcaacttttcccaacagagga

SEQ ID NO: 247432 - DNA, 30 bp, Artificial Sequence
  Synthetic oligonucleotide
agagtgattgaggactcaagggacagagga

SEQ ID NO: 247433 - DNA, 30 bp, Artificial Sequence
  Synthetic oligonucleotide
ttcggagagaacccggagggcttacgagga

SEQ ID NO: 247434 - DNA, 30 bp, Artificial Sequence
  Synthetic oligonucleotide
ctagttaaaggaccaacaccttgccgagga

SEQ ID NO: 247435 - DNA, 30 bp, Artificial Sequence
  Synthetic oligonucleotide
ctatggattaaggtatgacccgcgcgagga

SEQ ID NO: 247436 - DNA, 30 bp, Artificial Sequence
  Synthetic oligonucleotide
taccatcgtttgattacgttagggcgagga

SEQ ID NO: 247437 - DNA, 30 bp, Artificial Sequence
  Synthetic oligonucleotide
ccgtccatggaatgatagtatcatcgagga

SEQ ID NO: 247438 - DNA, 30 bp, Artificial Sequence
  Synthetic oligonucleotide
tctgaggatacgttgaggacggcaggagga

SEQ ID NO: 247439 - DNA, 30 bp, Artificial Sequence
  Synthetic oligonucleotide
tgcgtcggaatcgttgtccacgacggagga

SEQ ID NO: 247440 - DNA, 30 bp, Artificial Sequence
  Synthetic oligonucleotide
atatgtactggcgtcggaacgaccggagga

SEQ ID NO: 247441 - DNA, 30 bp, Artificial Sequence
  Synthetic oligonucleotide
tgtgattaatcgcgcagcaaaaagggagga

SEQ ID NO: 247442 - DNA, 29 bp, Artificial Sequence
  Synthetic oligonucleotide
ccagggataggggatacggcaggggagga

SEQ ID NO: 247443 - DNA, 30 bp, Artificial Sequence
  Synthetic oligonucleotide
gtagaggactaacggcgtatacggggagga

SEQ ID NO: 247444 - DNA, 30 bp, Artificial Sequence
  Synthetic oligonucleotide
taagcgtgtacgctgtcattttggggagga

SEQ ID NO: 247445 - DNA, 30 bp, Artificial Sequence
  Synthetic oligonucleotide
gagtgcaatacagaacgcgtgactggagga

SEQ ID NO: 247446 - DNA, 30 bp, Artificial Sequence
  Synthetic oligonucleotide
cgcaattcaacctggggtactattggagga

SEQ ID NO: 247447 - DNA, 30 bp, Artificial Sequence
  Synthetic oligonucleotide
ggtcatccttcgatttcatcagaatgagga

SEQ ID NO: 247448 - DNA, 30 bp, Artificial Sequence
  Synthetic oligonucleotide
ctgacagagaccgcggcctatgtatgagga

SEQ ID NO: 247449 - DNA, 30 bp, Artificial Sequence
  Synthetic oligonucleotide
tcgaccgagctaactcttaagtagtgagga

SEQ ID NO: 247450 - DNA, 30 bp, Artificial Sequence
  Synthetic oligonucleotide
aacagatgatgcttgggagcagcgtgagga

SEQ ID NO: 247451 - DNA, 30 bp, Artificial Sequence
  Synthetic oligonucleotide
attgggggcaagaggttcggatcttgagga

SEQ ID NO: 247452 - DNA, 30 bp, Artificial Sequence
  Synthetic oligonucleotide
agacaacgctcaacagctacattttgagga

SEQ ID NO: 247453 - DNA, 30 bp, Artificial Sequence
  Synthetic oligonucleotide
tttgccgacgataatttggacggaatagga

SEQ ID NO: 247454 - DNA, 30 bp, Artificial Sequence
  Synthetic oligonucleotide
tgatcagcccctggtgtacaacatatagga

SEQ ID NO: 247455 - DNA, 30 bp, Artificial Sequence
  Synthetic oligonucleotide
tgttaggcgatgagcagtaagtttatagga

SEQ ID NO: 247456 - DNA, 30 bp, Artificial Sequence
  Synthetic oligonucleotide
gttaaacgtgttgatcctgatcaactagga

SEQ ID NO: 247457 - DNA, 30 bp, Artificial Sequence
  Synthetic oligonucleotide
aaggggaagggtacgttggataacctagga

SEQ ID NO: 247458 - DNA, 30 bp, Artificial Sequence
  Synthetic oligonucleotide
ggatcctatatcgttagttcatacctagga

SEQ ID NO: 247459 - DNA, 30 bp, Artificial Sequence
  Synthetic oligonucleotide
gcagcgctatttagcgtatctaccctagga

SEQ ID NO: 247460 - DNA, 30 bp, Artificial Sequence
  Synthetic oligonucleotide
tgaacctatgtcttcttatatcaagtagga

SEQ ID NO: 247461 - DNA, 30 bp, Artificial Sequence
  Synthetic oligonucleotide
gtgtgaattccgattaagcttcaagtagga

SEQ ID NO: 247462 - DNA, 30 bp, Artificial Sequence
  Synthetic oligonucleotide
gcaagctgcttactggactacgacgtagga

SEQ ID NO: 247463 - DNA, 30 bp, Artificial Sequence
  Synthetic oligonucleotide
tattgaaatcattgtgtcacggaggtagga

SEQ ID NO: 247464 - DNA, 30 bp, Artificial Sequence
  Synthetic oligonucleotide
atagtgccgtcttaggccagcgaattagga

SEQ ID NO: 247465 - DNA, 30 bp, Artificial Sequence
  Synthetic oligonucleotide
agtcccggatttgggaatacgtcattagga

SEQ ID NO: 247466 - DNA, 30 bp, Artificial Sequence
  Synthetic oligonucleotide
tcgtgtcgaagctgctacaaacagaacgga

SEQ ID NO: 247467 - DNA, 30 bp, Artificial Sequence
  Synthetic oligonucleotide
caacttgccaataatccagtaacgaacgga

SEQ ID NO: 247468 - DNA, 30 bp, Artificial Sequence
  Synthetic oligonucleotide
gtgactatggtcatgtgtcttccgaacgga

SEQ ID NO: 247469 - DNA, 30 bp, Artificial Sequence
  Synthetic oligonucleotide
tcgggtggctaggcacaactacggaacgga

SEQ ID NO: 247470 - DNA, 30 bp, Artificial Sequence
  Synthetic oligonucleotide
atattcttcataactgaccaggcccacgga

SEQ ID NO: 247471 - DNA, 30 bp, Artificial Sequence
  Synthetic oligonucleotide
gacactctgcatagccctcactcgcacgga

SEQ ID NO: 247472 - DNA, 30 bp, Artificial Sequence
  Synthetic oligonucleotide
cccaaaattcgactaaggtagggtcacgga

SEQ ID NO: 247473 - DNA, 30 bp, Artificial Sequence
  Synthetic oligonucleotide
tcgagtagcgtaccttttattcaagacgga

SEQ ID NO: 247474 - DNA, 30 bp, Artificial Sequence
  Synthetic oligonucleotide
gcgcctacgagtatgagcgggtcagacgga

SEQ ID NO: 247475 - DNA, 30 bp, Artificial Sequence
  Synthetic oligonucleotide
tagccttgcgaaacatcaccattagacgga

SEQ ID NO: 247476 - DNA, 30 bp, Artificial Sequence
  Synthetic oligonucleotide
acgcagtaagcgaaggcgctttccgacgga

SEQ ID NO: 247477 - DNA, 30 bp, Artificial Sequence
  Synthetic oligonucleotide
ccagagagcggtttttcagaaacggacgga

SEQ ID NO: 247478 - DNA, 30 bp, Artificial Sequence
  Synthetic oligonucleotide
gcctgctgatcgaataacattcgatacgga

SEQ ID NO: 247479 - DNA, 30 bp, Artificial Sequence
  Synthetic oligonucleotide
tacatgcatggagagatcgacggatacgga

SEQ ID NO: 247480 - DNA, 30 bp, Artificial Sequence
  Synthetic oligonucleotide
agtgaagcatcaatgaaggtccgctacgga

SEQ ID NO: 247481 - DNA, 30 bp, Artificial Sequence
  Synthetic oligonucleotide
atttcgaaataatggcattcgcagtacgga

SEQ ID NO: 247482 - DNA, 30 bp, Artificial Sequence
  Synthetic oligonucleotide
caaggttaccctatagaattttagtacgga

SEQ ID NO: 247483 - DNA, 30 bp, Artificial Sequence
  Synthetic oligonucleotide
gcaggacaaatctttaagtaacggtacgga

SEQ ID NO: 247484 - DNA, 30 bp, Artificial Sequence
  Synthetic oligonucleotide
tgactgcgggcgtgatagaacaagaccgga

SEQ ID NO: 247485 - DNA, 30 bp, Artificial Sequence
  Synthetic oligonucleotide
ggttgggagtgggagagagtctgtaccgga

SEQ ID NO: 247486 - DNA, 30 bp, Artificial Sequence
  Synthetic oligonucleotide
agacaagctggcactcgatcacttaccgga

SEQ ID NO: 247487 - DNA, 30 bp, Artificial Sequence
  Synthetic oligonucleotide
atgtatgccaatgactgccttgaacccgga

SEQ ID NO: 247488 - DNA, 30 bp, Artificial Sequence
  Synthetic oligonucleotide
ccgcagtaggacgaccacgtcatacccgga

SEQ ID NO: 247489 - DNA, 30 bp, Artificial Sequence
  Synthetic oligonucleotide
tcgagcacgctagcttggtagattcccgga

SEQ ID NO: 247490 - DNA, 30 bp, Artificial Sequence
  Synthetic oligonucleotide
aattggctcggtaacgtgggtgcagccgga

SEQ ID NO: 247491 - DNA, 30 bp, Artificial Sequence
  Synthetic oligonucleotide
tatgaaagtaggttataactctgagccgga

SEQ ID NO: 247492 - DNA, 30 bp, Artificial Sequence
  Synthetic oligonucleotide
gctcaaggatgccgcttcagcgacgccgga

SEQ ID NO: 247493 - DNA, 30 bp, Artificial Sequence
  Synthetic oligonucleotide
ttctgtcattacgtccataccgaggccgga

SEQ ID NO: 247494 - DNA, 30 bp, Artificial Sequence
  Synthetic oligonucleotide
atatgggattcttagttggacaatgccgga

SEQ ID NO: 247495 - DNA, 30 bp, Artificial Sequence
  Synthetic oligonucleotide
gtcgctgggcccaatcccgagaatgccgga

SEQ ID NO: 247496 - DNA, 30 bp, Artificial Sequence
  Synthetic oligonucleotide
cggaaaggctgtcgactgcaccgtgccgga

SEQ ID NO: 247497 - DNA, 30 bp, Artificial Sequence
  Synthetic oligonucleotide
aggtataatggctactcttaaacatccgga

SEQ ID NO: 247498 - DNA, 30 bp, Artificial Sequence
  Synthetic oligonucleotide
cgataggggtaattcccggtcgagtccgga

SEQ ID NO: 247499 - DNA, 30 bp, Artificial Sequence
  Synthetic oligonucleotide
acatgtggatcactatcttttaggtccgga

SEQ ID NO: 247500 - DNA, 30 bp, Artificial Sequence
  Synthetic oligonucleotide
gggatagcgcttcaggatagtccttccgga

SEQ ID NO: 247501 - DNA, 30 bp, Artificial Sequence
  Synthetic oligonucleotide
aaatccacccaacgtccaactgacagcgga

SEQ ID NO: 247502 - DNA, 30 bp, Artificial Sequence
  Synthetic oligonucleotide
gctaaataccaagggcgaggcaccagcgga

SEQ ID NO: 247503 - DNA, 30 bp, Artificial Sequence
  Synthetic oligonucleotide
cacggatgagtataccgtcggcatagcgga

SEQ ID NO: 247504 - DNA, 30 bp, Artificial Sequence
  Synthetic oligonucleotide
ggataggaggagacaatctatatacgcgga

SEQ ID NO: 247505 - DNA, 30 bp, Artificial Sequence
  Synthetic oligonucleotide
tttcgtccagaccgaaaaatcaaccgcgga

SEQ ID NO: 247506 - DNA, 31 bp, Artificial Sequence
  Synthetic oligonucleotide
ccacttatgagggagttcagatcgccgcgga

SEQ ID NO: 247507 - DNA, 30 bp, Artificial Sequence
  Synthetic oligonucleotide
gagtctcgagaactaccactgctccgcgga

SEQ ID NO: 247508 - DNA, 30 bp, Artificial Sequence
  Synthetic oligonucleotide
gtacctggtgtatagtccagaaatcgcgga

SEQ ID NO: 247509 - DNA, 30 bp, Artificial Sequence
  Synthetic oligonucleotide
aaacatctggagtggctcgaccagggcgga

SEQ ID NO: 247510 - DNA, 30 bp, Artificial Sequence
  Synthetic oligonucleotide
gtaggttccttatgttttttaaggggcgga

SEQ ID NO: 247511 - DNA, 31 bp, Artificial Sequence
  Synthetic oligonucleotide
aggtaaagctcctatacctccactgggcgga

SEQ ID NO: 247512 - DNA, 30 bp, Artificial Sequence
  Synthetic oligonucleotide
cctgtaattcatcgcaatttatatggcgga

SEQ ID NO: 247513 - DNA, 30 bp, Artificial Sequence
  Synthetic oligonucleotide
gttgaacgctccctagttggtgctggcgga

SEQ ID NO: 247514 - DNA, 30 bp, Artificial Sequence
  Synthetic oligonucleotide
aaaggtttctgtgcggtcaggagtggcgga

SEQ ID NO: 247515 - DNA, 30 bp, Artificial Sequence
  Synthetic oligonucleotide
tctacacgttccgaactgtgcattggcgga

SEQ ID NO: 247516 - DNA, 30 bp, Artificial Sequence
  Synthetic oligonucleotide
caagctgcgcggcgtccttgaagttgcgga

SEQ ID NO: 247517 - DNA, 30 bp, Artificial Sequence
  Synthetic oligonucleotide
ggattagctcgcgtgcgtgcagaaatcgga

SEQ ID NO: 247518 - DNA, 30 bp, Artificial Sequence
  Synthetic oligonucleotide
acggtgtatctgcaggacacgagaatcgga

SEQ ID NO: 247519 - DNA, 30 bp, Artificial Sequence
  Synthetic oligonucleotide
attcactcaacactgtcgaacataatcgga

SEQ ID NO: 247520 - DNA, 30 bp, Artificial Sequence
  Synthetic oligonucleotide
ggaacttcgtacaggctgactaccatcgga

SEQ ID NO: 247521 - DNA, 30 bp, Artificial Sequence
  Synthetic oligonucleotide
attagcagtagtagttaaacagagatcgga

SEQ ID NO: 247522 - DNA, 30 bp, Artificial Sequence
  Synthetic oligonucleotide
gatagactcaccgtagtcctagagatcgga

SEQ ID NO: 247523 - DNA, 30 bp, Artificial Sequence
  Synthetic oligonucleotide
tcaagggtagtaattttgcttgcgctcgga

SEQ ID NO: 247524 - DNA, 30 bp, Artificial Sequence
  Synthetic oligonucleotide
gcacacaacttgtgttttagttcagtcgga

SEQ ID NO: 247525 - DNA, 30 bp, Artificial Sequence
  Synthetic oligonucleotide
cactatctgttagttggtaaatgagtcgga

SEQ ID NO: 247526 - DNA, 30 bp, Artificial Sequence
  Synthetic oligonucleotide
atataaccatcttgatagttacgcgtcgga

SEQ ID NO: 247527 - DNA, 30 bp, Artificial Sequence
  Synthetic oligonucleotide
ttgactattgaatggagggacattgtcgga

SEQ ID NO: 247528 - DNA, 30 bp, Artificial Sequence
  Synthetic oligonucleotide
gccgattgggatgatcgagcaaaattcgga

SEQ ID NO: 247529 - DNA, 30 bp, Artificial Sequence
  Synthetic oligonucleotide
tgctattgcaagtgctatagtacattcgga

SEQ ID NO: 247530 - DNA, 30 bp, Artificial Sequence
  Synthetic oligonucleotide
gtcgggacactacatagggccttattcgga

SEQ ID NO: 247531 - DNA, 30 bp, Artificial Sequence
  Synthetic oligonucleotide
atggattcaggctatggtggatacttcgga

SEQ ID NO: 247532 - DNA, 30 bp, Artificial Sequence
  Synthetic oligonucleotide
ggtgctgctccatccaagtgcatgttcgga

SEQ ID NO: 247533 - DNA, 30 bp, Artificial Sequence
  Synthetic oligonucleotide
taaattatccaagagttagtcgtgttcgga

SEQ ID NO: 247534 - DNA, 30 bp, Artificial Sequence
  Synthetic oligonucleotide
tgttccatagattctacacattttttcgga

SEQ ID NO: 247535 - DNA, 30 bp, Artificial Sequence
  Synthetic oligonucleotide
ttagttaaatataacagttaccgaaaggga

SEQ ID NO: 247536 - DNA, 30 bp, Artificial Sequence
  Synthetic oligonucleotide
cgcaccaaaggcatggttcgaggcaaggga

SEQ ID NO: 247537 - DNA, 30 bp, Artificial Sequence
  Synthetic oligonucleotide
tgtacgccactggtcatgggtatcaaggga

SEQ ID NO: 247538 - DNA, 30 bp, Artificial Sequence
  Synthetic oligonucleotide
actcgctttacacgtgtgacattcaaggga

SEQ ID NO: 247539 - DNA, 30 bp, Artificial Sequence
  Synthetic oligonucleotide
tgagcgtactaaggatcgcacaagaaggga

SEQ ID NO: 247540 - DNA, 30 bp, Artificial Sequence
  Synthetic oligonucleotide
agagacggtccagtttgggaaaggaaggga

SEQ ID NO: 247541 - DNA, 30 bp, Artificial Sequence
  Synthetic oligonucleotide
attgccggatggaatagtggtcggaaggga

SEQ ID NO: 247542 - DNA, 30 bp, Artificial Sequence
  Synthetic oligonucleotide
tgacgttgcccttagaccctagggaaggga

SEQ ID NO: 247543 - DNA, 30 bp, Artificial Sequence
  Synthetic oligonucleotide
cggcagtagatgattgacccgatgaaggga

SEQ ID NO: 247544 - DNA, 30 bp, Artificial Sequence
  Synthetic oligonucleotide
ctacagtgtggcactgtgtagtttaaggga

SEQ ID NO: 247545 - DNA, 30 bp, Artificial Sequence
  Synthetic oligonucleotide
aattaggcgaccagcactacagcacaggga

SEQ ID NO: 247546 - DNA, 30 bp, Artificial Sequence
  Synthetic oligonucleotide
agcctagtttgctccctcgtggaccaggga

SEQ ID NO: 247547 - DNA, 30 bp, Artificial Sequence
  Synthetic oligonucleotide
tggaatctccaagagactttgctgcaggga

SEQ ID NO: 247548 - DNA, 30 bp, Artificial Sequence
  Synthetic oligonucleotide
ggcatagtaaaataaccaaggggtcaggga

SEQ ID NO: 247549 - DNA, 30 bp, Artificial Sequence
  Synthetic oligonucleotide
tctgggacattttagggatataaagaggga

SEQ ID NO: 247550 - DNA, 30 bp, Artificial Sequence
  Synthetic oligonucleotide
gtcccgtagatataacaatgttaagaggga

SEQ ID NO: 247551 - DNA, 30 bp, Artificial Sequence
  Synthetic oligonucleotide
atgacctgctccgtgacgctatttgaggga

SEQ ID NO: 247552 - DNA, 30 bp, Artificial Sequence
  Synthetic oligonucleotide
gggggggccaggctgccaaggtgataggga

SEQ ID NO: 247553 - DNA, 30 bp, Artificial Sequence
  Synthetic oligonucleotide
gcggtacctcccgccagtccttgataggga

SEQ ID NO: 247554 - DNA, 30 bp, Artificial Sequence
  Synthetic oligonucleotide
tggggtgtattggactaactcgtataggga

SEQ ID NO: 247555 - DNA, 30 bp, Artificial Sequence
  Synthetic oligonucleotide
gcattccgcatgaactgcgcgctctaggga

SEQ ID NO: 247556 - DNA, 30 bp, Artificial Sequence
  Synthetic oligonucleotide
gattagtttagacgtgaacgttagtaggga

SEQ ID NO: 247557 - DNA, 30 bp, Artificial Sequence
  Synthetic oligonucleotide
tggcgaagtgtcacacaccgcttgtaggga

SEQ ID NO: 247558 - DNA, 30 bp, Artificial Sequence
  Synthetic oligonucleotide
tgcaacaaccgtgcacgtggtccttaggga

SEQ ID NO: 247559 - DNA, 31 bp, Artificial Sequence
  Synthetic oligonucleotide
gcccttccgccatacatatcacggaacggga

SEQ ID NO: 247560 - DNA, 30 bp, Artificial Sequence
  Synthetic oligonucleotide
gactcatatgttgcatgtcaatacacggga

SEQ ID NO: 247561 - DNA, 30 bp, Artificial Sequence
  Synthetic oligonucleotide
gggggtatcgcggcggagtgttgcacggga

SEQ ID NO: 247562 - DNA, 30 bp, Artificial Sequence
  Synthetic oligonucleotide
cgcatacaaactaagcgctcaaggacggga

SEQ ID NO: 247563 - DNA, 30 bp, Artificial Sequence
  Synthetic oligonucleotide
cccaataactgcctgtgtccaattacggga

SEQ ID NO: 247564 - DNA, 30 bp, Artificial Sequence
  Synthetic oligonucleotide
gggaaagatggaaatcgattttcaccggga

SEQ ID NO: 247565 - DNA, 30 bp, Artificial Sequence
  Synthetic oligonucleotide
cggacgatctgttgcttcaggtacccggga

SEQ ID NO: 247566 - DNA, 30 bp, Artificial Sequence
  Synthetic oligonucleotide
gcggaatcactcgtccctaggatcccggga

SEQ ID NO: 247567 - DNA, 30 bp, Artificial Sequence
  Synthetic oligonucleotide
catagtcacaagagcaccggcgagccggga

SEQ ID NO: 247568 - DNA, 30 bp, Artificial Sequence
  Synthetic oligonucleotide
tatctactacaaagcgtcacacatccggga

SEQ ID NO: 247569 - DNA, 30 bp, Artificial Sequence
  Synthetic oligonucleotide
cagttaaccatctaaaaggattgtccggga

SEQ ID NO: 247570 - DNA, 30 bp, Artificial Sequence
  Synthetic oligonucleotide
ggcaagcagggaatcggacgtagcgcggga

SEQ ID NO: 247571 - DNA, 30 bp, Artificial Sequence
  Synthetic oligonucleotide
tactacagtgttcaaacggattaggcggga

SEQ ID NO: 247572 - DNA, 30 bp, Artificial Sequence
  Synthetic oligonucleotide
gggatgcgcgcatcaatatcgagggcggga

SEQ ID NO: 247573 - DNA, 30 bp, Artificial Sequence
  Synthetic oligonucleotide
ccaccgcctgtatgctcacttcgggcggga

SEQ ID NO: 247574 - DNA, 30 bp, Artificial Sequence
  Synthetic oligonucleotide
cgaagcaatgatcagtttcaccgtgcggga

SEQ ID NO: 247575 - DNA, 30 bp, Artificial Sequence
  Synthetic oligonucleotide
ctgcacggccgagacactatcagatcggga

SEQ ID NO: 247576 - DNA, 30 bp, Artificial Sequence
  Synthetic oligonucleotide
acgccgtcctaataggaagcgttgtcggga

SEQ ID NO: 247577 - DNA, 30 bp, Artificial Sequence
  Synthetic oligonucleotide
gggaggagtggattactgtgcgattcggga

SEQ ID NO: 247578 - DNA, 30 bp, Artificial Sequence
  Synthetic oligonucleotide
aggctttcaggatagaaaaaggattcggga

SEQ ID NO: 247579 - DNA, 30 bp, Artificial Sequence
  Synthetic oligonucleotide
aactgggagtgctcaaaggagtattcggga

SEQ ID NO: 247580 - DNA, 30 bp, Artificial Sequence
  Synthetic oligonucleotide
ttgactaagtatttaagtaattgaagggga

SEQ ID NO: 247581 - DNA, 30 bp, Artificial Sequence
  Synthetic oligonucleotide
gaaaatgggtttggcataatgtacagggga

SEQ ID NO: 247582 - DNA, 30 bp, Artificial Sequence
  Synthetic oligonucleotide
tgctctaaccgatttgtcttcaatagggga

SEQ ID NO: 247583 - DNA, 30 bp, Artificial Sequence
  Synthetic oligonucleotide
cagtcgtataagggcggttcatttagggga

SEQ ID NO: 247584 - DNA, 30 bp, Artificial Sequence
  Synthetic oligonucleotide
ggcagcgcctcgcccaagccaacacgggga

SEQ ID NO: 247585 - DNA, 30 bp, Artificial Sequence
  Synthetic oligonucleotide
catggcagatgtccaaaaatgacacgggga

SEQ ID NO: 247586 - DNA, 31 bp, Artificial Sequence
  Synthetic oligonucleotide
gccttacagtgcaaacgcacagtaccgggga

SEQ ID NO: 247587 - DNA, 30 bp, Artificial Sequence
  Synthetic oligonucleotide
taggccgcgacatcatggtacaagcgggga

SEQ ID NO: 247588 - DNA, 30 bp, Artificial Sequence
  Synthetic oligonucleotide
ttagcatgtcctctgataggggagcgggga

SEQ ID NO: 247589 - DNA, 30 bp, Artificial Sequence
  Synthetic oligonucleotide
ggcgatcaccatatagcttgagaaggggga

SEQ ID NO: 247590 - DNA, 30 bp, Artificial Sequence
  Synthetic oligonucleotide
gacctgcattgttgttggccgaggggggga

SEQ ID NO: 247591 - DNA, 40 bp, Artificial Sequence
  Synthetic oligonucleotide
aagataatacattcaaggtatggtcggggatcggggggga

SEQ ID NO: 247592 - DNA, 40 bp, Artificial Sequence
  Synthetic oligonucleotide
gagataatacattcatggtatggtcggggatcggggggga

SEQ ID NO: 247593 - DNA, 30 bp, Artificial Sequence
  Synthetic oligonucleotide
tgcacaatcaatggggttactcctggggga

SEQ ID NO: 247594 - DNA, 30 bp, Artificial Sequence
  Synthetic oligonucleotide
attgattcatgggtctcacatcgtggggga

SEQ ID NO: 247595 - DNA, 30 bp, Artificial Sequence
  Synthetic oligonucleotide
cgcatcgcgtgatgctcgcctaagtgggga

SEQ ID NO: 247596 - DNA, 30 bp, Artificial Sequence
  Synthetic oligonucleotide
tcttgcgacattcaggtgtggtattgggga

SEQ ID NO: 247597 - DNA, 30 bp, Artificial Sequence
  Synthetic oligonucleotide
tcgccgcttacgtgacgcgttttttgggga

SEQ ID NO: 247598 - DNA, 30 bp, Artificial Sequence
  Synthetic oligonucleotide
gttacccatcactacggtgccacaatggga

SEQ ID NO: 247599 - DNA, 30 bp, Artificial Sequence
  Synthetic oligonucleotide
atacagtatgttgtggagacctgaatggga

SEQ ID NO: 247600 - DNA, 30 bp, Artificial Sequence
  Synthetic oligonucleotide
gcttcagaaagggccggggcattaatggga

SEQ ID NO: 247601 - DNA, 30 bp, Artificial Sequence
  Synthetic oligonucleotide
tacgatccgctcgcacaagtcttcatggga

SEQ ID NO: 247602 - DNA, 30 bp, Artificial Sequence
  Synthetic oligonucleotide
cgcgcaaacctctcgcatcaaaagatggga

SEQ ID NO: 247603 - DNA, 30 bp, Artificial Sequence
  Synthetic oligonucleotide
catgagggtgacgatttgactacgatggga

SEQ ID NO: 247604 - DNA, 30 bp, Artificial Sequence
  Synthetic oligonucleotide
cctctatatcatccgcatggcaggatggga

SEQ ID NO: 247605 - DNA, 30 bp, Artificial Sequence
  Synthetic oligonucleotide
tcacttctcacccgactgatttgactggga

SEQ ID NO: 247606 - DNA, 30 bp, Artificial Sequence
  Synthetic oligonucleotide
acggggcgccggaaatatttttacctggga

SEQ ID NO: 247607 - DNA, 30 bp, Artificial Sequence
  Synthetic oligonucleotide
atccaaagtgttagcatatagtgcctggga

SEQ ID NO: 247608 - DNA, 30 bp, Artificial Sequence
  Synthetic oligonucleotide
ttcactgacagttatcatcggccgctggga

SEQ ID NO: 247609 - DNA, 30 bp, Artificial Sequence
  Synthetic oligonucleotide
ttaagagcggcatacatgccgacagtggga

SEQ ID NO: 247610 - DNA, 30 bp, Artificial Sequence
  Synthetic oligonucleotide
tgagctcgaaaggcgttcagtccagtggga

SEQ ID NO: 247611 - DNA, 30 bp, Artificial Sequence
  Synthetic oligonucleotide
aagaccgtaggggaactagcggccgtggga

SEQ ID NO: 247612 - DNA, 30 bp, Artificial Sequence
  Synthetic oligonucleotide
tatattatacgcaaaaacaggagcgtggga

SEQ ID NO: 247613 - DNA, 30 bp, Artificial Sequence
  Synthetic oligonucleotide
tagacacgccgagaaggtatcaaggtggga

SEQ ID NO: 247614 - DNA, 30 bp, Artificial Sequence
  Synthetic oligonucleotide
atattggacaagggctgtcagagtgtggga

SEQ ID NO: 247615 - DNA, 30 bp, Artificial Sequence
  Synthetic oligonucleotide
cgaaactcgtgggtttgtctctgtgtggga

SEQ ID NO: 247616 - DNA, 30 bp, Artificial Sequence
  Synthetic oligonucleotide
cattcgcatgatggaccttacacattggga

SEQ ID NO: 247617 - DNA, 30 bp, Artificial Sequence
  Synthetic oligonucleotide
gccattattatcaaaaaggaggagttggga

SEQ ID NO: 247618 - DNA, 30 bp, Artificial Sequence
  Synthetic oligonucleotide
ctgaggcaaattcactgtggtattttggga

SEQ ID NO: 247619 - DNA, 30 bp, Artificial Sequence
  Synthetic oligonucleotide
attcgtaggcacaagcgggaggcaaatgga

SEQ ID NO: 247620 - DNA, 30 bp, Artificial Sequence
  Synthetic oligonucleotide
ctcgaggttgtcaatctcaagtgaaatgga

SEQ ID NO: 247621 - DNA, 30 bp, Artificial Sequence
  Synthetic oligonucleotide
tcatccgggagtttaggtacatccaatgga

SEQ ID NO: 247622 - DNA, 30 bp, Artificial Sequence
  Synthetic oligonucleotide
tcgatatgattagaaaacgaaatcaatgga

SEQ ID NO: 247623 - DNA, 28 bp, Artificial Sequence
  Synthetic oligonucleotide
attcgtcaactaaccagcaagtaatgga

SEQ ID NO: 247624 - DNA, 30 bp, Artificial Sequence
  Synthetic oligonucleotide
taggtgtccagcggaggttagtctcatgga

SEQ ID NO: 247625 - DNA, 30 bp, Artificial Sequence
  Synthetic oligonucleotide
acctgcgacatagctaccctgagtcatgga

SEQ ID NO: 247626 - DNA, 30 bp, Artificial Sequence
  Synthetic oligonucleotide
ctctgaccgttgggaatgtagtttcatgga

SEQ ID NO: 247627 - DNA, 30 bp, Artificial Sequence
  Synthetic oligonucleotide
taagccctgtgccgttctgagaaagatgga

SEQ ID NO: 247628 - DNA, 30 bp, Artificial Sequence
  Synthetic oligonucleotide
taactaacgataaaggtttcggtagatgga

SEQ ID NO: 247629 - DNA, 30 bp, Artificial Sequence
  Synthetic oligonucleotide
cgtgaatactaagtgacaacattagatgga

SEQ ID NO: 247630 - DNA, 30 bp, Artificial Sequence
  Synthetic oligonucleotide
aacggattgagtgtttttacttacgatgga

SEQ ID NO: 247631 - DNA, 30 bp, Artificial Sequence
  Synthetic oligonucleotide
atgaaagcgcttgatggaccgttcgatgga

SEQ ID NO: 247632 - DNA, 30 bp, Artificial Sequence
  Synthetic oligonucleotide
ccatgaaaacaggggtctctgagggatgga

SEQ ID NO: 247633 - DNA, 30 bp, Artificial Sequence
  Synthetic oligonucleotide
gacgatcatgctgatgatatagagtatgga

SEQ ID NO: 247634 - DNA, 30 bp, Artificial Sequence
  Synthetic oligonucleotide
tcaccacggttgaagttctgcgcgtatgga

SEQ ID NO: 247635 - DNA, 30 bp, Artificial Sequence
  Synthetic oligonucleotide
acgtcaagggattagttgacgaggtatgga

SEQ ID NO: 247636 - DNA, 30 bp, Artificial Sequence
  Synthetic oligonucleotide
tgtgaacagcaacggcccacaaattatgga

SEQ ID NO: 247637 - DNA, 30 bp, Artificial Sequence
  Synthetic oligonucleotide
ccgtaattgggacgatctcgattttatgga

SEQ ID NO: 247638 - DNA, 30 bp, Artificial Sequence
  Synthetic oligonucleotide
ggcagacattattgtgtgcctcgaactgga

SEQ ID NO: 247639 - DNA, 30 bp, Artificial Sequence
  Synthetic oligonucleotide
acaggtaatattcgagcctacggaactgga

SEQ ID NO: 247640 - DNA, 30 bp, Artificial Sequence
  Synthetic oligonucleotide
tcacccagggttattttgtgcgtaactgga

SEQ ID NO: 247641 - DNA, 30 bp, Artificial Sequence
  Synthetic oligonucleotide
tagttccactcacgattacatagcactgga

SEQ ID NO: 247642 - DNA, 30 bp, Artificial Sequence
  Synthetic oligonucleotide
gtcagatctagctcccaacgctggactgga

SEQ ID NO: 247643 - DNA, 30 bp, Artificial Sequence
  Synthetic oligonucleotide
taatcactctgtcaaaagggtgatactgga

SEQ ID NO: 247644 - DNA, 30 bp, Artificial Sequence
  Synthetic oligonucleotide
tgaagaacaagttggcatgacgcacctgga

SEQ ID NO: 247645 - DNA, 30 bp, Artificial Sequence
  Synthetic oligonucleotide
ctatatgatggcatgatagcgtgccctgga

SEQ ID NO: 247646 - DNA, 29 bp, Artificial Sequence
  Synthetic oligonucleotide
caccggtaactactcaggctgcgcctgga

SEQ ID NO: 247647 - DNA, 30 bp, Artificial Sequence
  Synthetic oligonucleotide
cgaataggaaattgagcctctgcgcctgga

SEQ ID NO: 247648 - DNA, 30 bp, Artificial Sequence
  Synthetic oligonucleotide
aagaaacttgcccaccttgtaaggcctgga

SEQ ID NO: 247649 - DNA, 30 bp, Artificial Sequence
  Synthetic oligonucleotide
aaaacactgaactcggccggccctcctgga

SEQ ID NO: 247650 - DNA, 30 bp, Artificial Sequence
  Synthetic oligonucleotide
tagcaggtatggttagagggacttcctgga

SEQ ID NO: 247651 - DNA, 30 bp, Artificial Sequence
  Synthetic oligonucleotide
tgaacaaatgagaagccgcaaaaagctgga

SEQ ID NO: 247652 - DNA, 30 bp, Artificial Sequence
  Synthetic oligonucleotide
ggcattatacactagggtttataagctgga

SEQ ID NO: 247653 - DNA, 30 bp, Artificial Sequence
  Synthetic oligonucleotide
gtctgaatgtggctggacatcgtagctgga

SEQ ID NO: 247654 - DNA, 30 bp, Artificial Sequence
  Synthetic oligonucleotide
taggccggggcttattcgacaaacgctgga

SEQ ID NO: 247655 - DNA, 30 bp, Artificial Sequence
  Synthetic oligonucleotide
tgtctatatctctccgagccttcggctgga

SEQ ID NO: 247656 - DNA, 30 bp, Artificial Sequence
  Synthetic oligonucleotide
cacaaagctagttgactcgtgcgggctgga

SEQ ID NO: 247657 - DNA, 30 bp, Artificial Sequence
  Synthetic oligonucleotide
gggggtaatagaataggtgacctggctgga

SEQ ID NO: 247658 - DNA, 30 bp, Artificial Sequence
  Synthetic oligonucleotide
tgccaagtaataactagaagcgcatctgga

SEQ ID NO: 247659 - DNA, 30 bp, Artificial Sequence
  Synthetic oligonucleotide
tgagcgaaaccccaaatgacgctatctgga

SEQ ID NO: 247660 - DNA, 30 bp, Artificial Sequence
  Synthetic oligonucleotide
gccctgggggttgcgtgagtgaggtctgga

SEQ ID NO: 247661 - DNA, 30 bp, Artificial Sequence
  Synthetic oligonucleotide
gttaattaagagttatctctagaaagtgga

SEQ ID NO: 247662 - DNA, 30 bp, Artificial Sequence
  Synthetic oligonucleotide
tcgttcggtactttcagcctttgcagtgga

SEQ ID NO: 247663 - DNA, 30 bp, Artificial Sequence
  Synthetic oligonucleotide
cagcttcatattaataaggatctgagtgga

SEQ ID NO: 247664 - DNA, 30 bp, Artificial Sequence
  Synthetic oligonucleotide
gtaacgtgaatctccgagactcatagtgga

SEQ ID NO: 247665 - DNA, 30 bp, Artificial Sequence
  Synthetic oligonucleotide
atatacccaacttgttaattacctagtgga

SEQ ID NO: 247666 - DNA, 30 bp, Artificial Sequence
  Synthetic oligonucleotide
tttaactacgatagggccaaataacgtgga

SEQ ID NO: 247667 - DNA, 30 bp, Artificial Sequence
  Synthetic oligonucleotide
tacgcagaagcaccgcagataggacgtgga

SEQ ID NO: 247668 - DNA, 30 bp, Artificial Sequence
  Synthetic oligonucleotide
atgtcatgattccaatgttgcggacgtgga

SEQ ID NO: 247669 - DNA, 30 bp, Artificial Sequence
  Synthetic oligonucleotide
cgaagccccacaggcggcactgtacgtgga

SEQ ID NO: 247670 - DNA, 30 bp, Artificial Sequence
  Synthetic oligonucleotide
ttgctcccggcagaatcacgaccgcgtgga

SEQ ID NO: 247671 - DNA, 30 bp, Artificial Sequence
  Synthetic oligonucleotide
gacattgtgtcacttttctctgtgcgtgga

SEQ ID NO: 247672 - DNA, 30 bp, Artificial Sequence
  Synthetic oligonucleotide
caggggtatcagaagacttgttttcgtgga

SEQ ID NO: 247673 - DNA, 30 bp, Artificial Sequence
  Synthetic oligonucleotide
cgccaagatagctaaactaggtaaggtgga

SEQ ID NO: 247674 - DNA, 30 bp, Artificial Sequence
  Synthetic oligonucleotide
gcctgtctcgaaacgacctctacaggtgga

SEQ ID NO: 247675 - DNA, 30 bp, Artificial Sequence
  Synthetic oligonucleotide
atccgcccgataggggttttgtgtggtgga

SEQ ID NO: 247676 - DNA, 30 bp, Artificial Sequence
  Synthetic oligonucleotide
tacaacagtacgccattagccacatgtgga

SEQ ID NO: 247677 - DNA, 30 bp, Artificial Sequence
  Synthetic oligonucleotide
taccaagcaactgtgcgggcgggatgtgga

SEQ ID NO: 247678 - DNA, 30 bp, Artificial Sequence
  Synthetic oligonucleotide
ccgataaactagagctaatatgtatgtgga

SEQ ID NO: 247679 - DNA, 30 bp, Artificial Sequence
  Synthetic oligonucleotide
gtgggacaagtatgttctagactctgtgga

SEQ ID NO: 247680 - DNA, 30 bp, Artificial Sequence
  Synthetic oligonucleotide
ataccaagcaaatttcagggtacgtgtgga

SEQ ID NO: 247681 - DNA, 30 bp, Artificial Sequence
  Synthetic oligonucleotide
gatggtgaatgccgccttatagattgtgga

SEQ ID NO: 247682 - DNA, 30 bp, Artificial Sequence
  Synthetic oligonucleotide
agtggattggggaggttggttccttgtgga

SEQ ID NO: 247683 - DNA, 30 bp, Artificial Sequence
  Synthetic oligonucleotide
gagatcattggatgaccagggatttgtgga

SEQ ID NO: 247684 - DNA, 30 bp, Artificial Sequence
  Synthetic oligonucleotide
ggagacaagtctaaataatttcaaattgga

SEQ ID NO: 247685 - DNA, 30 bp, Artificial Sequence
  Synthetic oligonucleotide
catcaacaggcgggcaatacggaaattgga

SEQ ID NO: 247686 - DNA, 30 bp, Artificial Sequence
  Synthetic oligonucleotide
caaccatatgagtttcacaggttaattgga

SEQ ID NO: 247687 - DNA, 30 bp, Artificial Sequence
  Synthetic oligonucleotide
cctgatcagactgtgcccgtacacattgga

SEQ ID NO: 247688 - DNA, 30 bp, Artificial Sequence
  Synthetic oligonucleotide
actgccgactgttgggtaaagtacattgga

SEQ ID NO: 247689 - DNA, 31 bp, Artificial Sequence
  Synthetic oligonucleotide
ggcaaaatcaccaaggccattaagcattgga

SEQ ID NO: 247690 - DNA, 30 bp, Artificial Sequence
  Synthetic oligonucleotide
gacgactggcatcagaggagaaatattgga

SEQ ID NO: 247691 - DNA, 30 bp, Artificial Sequence
  Synthetic oligonucleotide
gatttaagcgcttgtcccacagttattgga

SEQ ID NO: 247692 - DNA, 30 bp, Artificial Sequence
  Synthetic oligonucleotide
tgcacgcatacgaactggctggttattgga

SEQ ID NO: 247693 - DNA, 30 bp, Artificial Sequence
  Synthetic oligonucleotide
gcattggaggtgagccatgtcgaccttgga

SEQ ID NO: 247694 - DNA, 30 bp, Artificial Sequence
  Synthetic oligonucleotide
aatgtaagtacacctagtatacgccttgga

SEQ ID NO: 247695 - DNA, 30 bp, Artificial Sequence
  Synthetic oligonucleotide
tagaagcagtaatatatataataatttgga

SEQ ID NO: 247696 - DNA, 30 bp, Artificial Sequence
  Synthetic oligonucleotide
tgcgtaaactaaattgcgaattcttttgga

SEQ ID NO: 247697 - DNA, 30 bp, Artificial Sequence
  Synthetic oligonucleotide
gcccagtccaaaccacgcacgtaaaaatga

SEQ ID NO: 247698 - DNA, 30 bp, Artificial Sequence
  Synthetic oligonucleotide
tgttcaccgtactatagcaagtgacaatga

SEQ ID NO: 247699 - DNA, 30 bp, Artificial Sequence
  Synthetic oligonucleotide
caagcaggcgttacgacactaatacaatga

SEQ ID NO: 247700 - DNA, 30 bp, Artificial Sequence
  Synthetic oligonucleotide
tgcatagatgtgaagagcagagaccaatga

SEQ ID NO: 247701 - DNA, 30 bp, Artificial Sequence
  Synthetic oligonucleotide
atatggctggtaaattaggcgcgccaatga

SEQ ID NO: 247702 - DNA, 30 bp, Artificial Sequence
  Synthetic oligonucleotide
tgggaccctagtttcaagcacgagcaatga

SEQ ID NO: 247703 - DNA, 30 bp, Artificial Sequence
  Synthetic oligonucleotide
gctgttagactaacgtgtaacggagaatga

SEQ ID NO: 247704 - DNA, 30 bp, Artificial Sequence
  Synthetic oligonucleotide
agggaacagtatttacttcaacacgaatga

SEQ ID NO: 247705 - DNA, 30 bp, Artificial Sequence
  Synthetic oligonucleotide
ctgtggtataccgtgagtaacgtcgaatga

SEQ ID NO: 247706 - DNA, 30 bp, Artificial Sequence
  Synthetic oligonucleotide
actccaacataggtcacaacttgggaatga

SEQ ID NO: 247707 - DNA, 30 bp, Artificial Sequence
  Synthetic oligonucleotide
gtcgttacgatccctacggccactgaatga

SEQ ID NO: 247708 - DNA, 30 bp, Artificial Sequence
  Synthetic oligonucleotide
tgtagtatttagaggatatgctgtgaatga

SEQ ID NO: 247709 - DNA, 30 bp, Artificial Sequence
  Synthetic oligonucleotide
gtaagatacgaagttatgcagtgtgaatga

SEQ ID NO: 247710 - DNA, 30 bp, Artificial Sequence
  Synthetic oligonucleotide
agtctctttagtgcagcgaagattgaatga

SEQ ID NO: 247711 - DNA, 30 bp, Artificial Sequence
  Synthetic oligonucleotide
acagccgaatggtcgactgcttttgaatga

SEQ ID NO: 247712 - DNA, 30 bp, Artificial Sequence
  Synthetic oligonucleotide
acccaggtgcatgggcagtttgaataatga

SEQ ID NO: 247713 - DNA, 30 bp, Artificial Sequence
  Synthetic oligonucleotide
ggcgccgaaatcccggggagattataatga

SEQ ID NO: 247714 - DNA, 30 bp, Artificial Sequence
  Synthetic oligonucleotide
ggttatacgtctaataatctgggctaatga

SEQ ID NO: 247715 - DNA, 30 bp, Artificial Sequence
  Synthetic oligonucleotide
atcattcgctgttatcgttggctgtaatga

SEQ ID NO: 247716 - DNA, 30 bp, Artificial Sequence
  Synthetic oligonucleotide
aatgagtaatggacgtgggatcgttaatga

SEQ ID NO: 247717 - DNA, 30 bp, Artificial Sequence
  Synthetic oligonucleotide
ctgcgtggatcgagcgatttagacacatga

SEQ ID NO: 247718 - DNA, 30 bp, Artificial Sequence
  Synthetic oligonucleotide
acagcggttgagctatggtgccgcacatga

SEQ ID NO: 247719 - DNA, 30 bp, Artificial Sequence
  Synthetic oligonucleotide
tctcatacctggtcgtacacttaaccatga

SEQ ID NO: 247720 - DNA, 30 bp, Artificial Sequence
  Synthetic oligonucleotide
taccgttttcagagtcgcgcaaagccatga

SEQ ID NO: 247721 - DNA, 30 bp, Artificial Sequence
  Synthetic oligonucleotide
attcaggatcggtaggaaaatagagcatga

SEQ ID NO: 247722 - DNA, 30 bp, Artificial Sequence
  Synthetic oligonucleotide
gatagagcttccagtagcattagagcatga

SEQ ID NO: 247723 - DNA, 30 bp, Artificial Sequence
  Synthetic oligonucleotide
cgggcaatgttcacgaggcacggagcatga

SEQ ID NO: 247724 - DNA, 30 bp, Artificial Sequence
  Synthetic oligonucleotide
ggtggggggcaggcctatcgactagcatga

SEQ ID NO: 247725 - DNA, 30 bp, Artificial Sequence
  Synthetic oligonucleotide
atctcctctaaccagtgtcggcaggcatga

SEQ ID NO: 247726 - DNA, 30 bp, Artificial Sequence
  Synthetic oligonucleotide
ggccttcggaagaattgggttctggcatga

SEQ ID NO: 247727 - DNA, 30 bp, Artificial Sequence
  Synthetic oligonucleotide
gtggaaatagtaattataacgcctgcatga

SEQ ID NO: 247728 - DNA, 30 bp, Artificial Sequence
  Synthetic oligonucleotide
ttatgcgagtgtcccatcccacaatcatga

SEQ ID NO: 247729 - DNA, 30 bp, Artificial Sequence
  Synthetic oligonucleotide
ggatggcacctcattgcatagtcatcatga

SEQ ID NO: 247730 - DNA, 30 bp, Artificial Sequence
  Synthetic oligonucleotide
gcatgaaccacacccacagacggatcatga

SEQ ID NO: 247731 - DNA, 30 bp, Artificial Sequence
  Synthetic oligonucleotide
tggacaacagtatctcgccggggatcatga

SEQ ID NO: 247732 - DNA, 30 bp, Artificial Sequence
  Synthetic oligonucleotide
ggtacccgacacatagaatcaagctcatga

SEQ ID NO: 247733 - DNA, 30 bp, Artificial Sequence
  Synthetic oligonucleotide
cgatcagcactggagtatagggtctcatga

SEQ ID NO: 247734 - DNA, 30 bp, Artificial Sequence
  Synthetic oligonucleotide
ctagaggacaagtgcacgttttaaagatga

SEQ ID NO: 247735 - DNA, 30 bp, Artificial Sequence
  Synthetic oligonucleotide
gctgggcaccgctgacggggaccaagatga

SEQ ID NO: 247736 - DNA, 30 bp, Artificial Sequence
  Synthetic oligonucleotide
cagtgatgctggataaagcacgcaagatga

SEQ ID NO: 247737 - DNA, 30 bp, Artificial Sequence
  Synthetic oligonucleotide
tcggttctagttcgaggagtgtcaagatga

SEQ ID NO: 247738 - DNA, 30 bp, Artificial Sequence
  Synthetic oligonucleotide
agctggctacgcttgagtgtggagagatga

SEQ ID NO: 247739 - DNA, 30 bp, Artificial Sequence
  Synthetic oligonucleotide
taggttggcgaataagaatacggtagatga

SEQ ID NO: 247740 - DNA, 30 bp, Artificial Sequence
  Synthetic oligonucleotide
gtctttctgacgcaatggaggtaaggatga

SEQ ID NO: 247741 - DNA, 30 bp, Artificial Sequence
  Synthetic oligonucleotide
tattagcgcattgttgttggctcaggatga

SEQ ID NO: 247742 - DNA, 30 bp, Artificial Sequence
  Synthetic oligonucleotide
tctggcctcatgcagtaggaatgaggatga

SEQ ID NO: 247743 - DNA, 30 bp, Artificial Sequence
  Synthetic oligonucleotide
ggttgtattaatctctgacagaacggatga

SEQ ID NO: 247744 - DNA, 30 bp, Artificial Sequence
  Synthetic oligonucleotide
tcgttcatcggcgtcgagacggagggatga

SEQ ID NO: 247745 - DNA, 30 bp, Artificial Sequence
  Synthetic oligonucleotide
caatcgcccgaccacttcaccccgggatga

SEQ ID NO: 247746 - DNA, 30 bp, Artificial Sequence
  Synthetic oligonucleotide
gaccttggcgcatgtacgcgagggggatga

SEQ ID NO: 247747 - DNA, 30 bp, Artificial Sequence
  Synthetic oligonucleotide
cttcacgggttacgatcacgtactggatga

SEQ ID NO: 247748 - DNA, 30 bp, Artificial Sequence
  Synthetic oligonucleotide
gcagccaggtcctgaaagaaatttggatga

SEQ ID NO: 247749 - DNA, 30 bp, Artificial Sequence
  Synthetic oligonucleotide
ttaaaaaaaataataccaaaaaactgatga

SEQ ID NO: 247750 - DNA, 30 bp, Artificial Sequence
  Synthetic oligonucleotide
cggatgtcacgacatcgcagctcctgatga

SEQ ID NO: 247751 - DNA, 30 bp, Artificial Sequence
  Synthetic oligonucleotide
cggcttcctcccggatcactgctctgatga

SEQ ID NO: 247752 - DNA, 30 bp, Artificial Sequence
  Synthetic oligonucleotide
cttggacatcgcccttatcgttcgtgatga

SEQ ID NO: 247753 - DNA, 29 bp, Artificial Sequence
  Synthetic oligonucleotide
caatgctctctgcaatgcttgtgtgatga

SEQ ID NO: 247754 - DNA, 30 bp, Artificial Sequence
  Synthetic oligonucleotide
gcagtttatggtgacagcatgggttgatga

SEQ ID NO: 247755 - DNA, 30 bp, Artificial Sequence
  Synthetic oligonucleotide
gtagagttggcccgtgtccgaataatatga

SEQ ID NO: 247756 - DNA, 30 bp, Artificial Sequence
  Synthetic oligonucleotide
tccatgaaccggaagagctgctacatatga

SEQ ID NO: 247757 - DNA, 30 bp, Artificial Sequence
  Synthetic oligonucleotide
gcgggcgctcacaagcctcgaagcatatga

SEQ ID NO: 247758 - DNA, 30 bp, Artificial Sequence
  Synthetic oligonucleotide
ggcccaatcgttagatgaatagatatatga

SEQ ID NO: 247759 - DNA, 30 bp, Artificial Sequence
  Synthetic oligonucleotide
tgtcaattcctttgtgactaacaactatga

SEQ ID NO: 247760 - DNA, 30 bp, Artificial Sequence
  Synthetic oligonucleotide
gaaatgctgcaagtcgtcagatcactatga

SEQ ID NO: 247761 - DNA, 30 bp, Artificial Sequence
  Synthetic oligonucleotide
ttgcttaaagtgggaatagtatcactatga

SEQ ID NO: 247762 - DNA, 30 bp, Artificial Sequence
  Synthetic oligonucleotide
tgtagtcggtcgatagaaaaatgactatga

SEQ ID NO: 247763 - DNA, 30 bp, Artificial Sequence
  Synthetic oligonucleotide
ggggattttgttcttggcagcaagctatga

SEQ ID NO: 247764 - DNA, 30 bp, Artificial Sequence
  Synthetic oligonucleotide
tcgtgggtttaaaagcatagggagctatga

SEQ ID NO: 247765 - DNA, 30 bp, Artificial Sequence
  Synthetic oligonucleotide
gatcacaaatggtatattgtaatgctatga

SEQ ID NO: 247766 - DNA, 30 bp, Artificial Sequence
  Synthetic oligonucleotide
ccttaaacagccttataatctatgctatga

SEQ ID NO: 247767 - DNA, 30 bp, Artificial Sequence
  Synthetic oligonucleotide
cagtgaccacttgcaacctggcttctatga

SEQ ID NO: 247768 - DNA, 30 bp, Artificial Sequence
  Synthetic oligonucleotide
aacgcattagtaacgtgggcgctcgtatga

SEQ ID NO: 247769 - DNA, 31 bp, Artificial Sequence
  Synthetic oligonucleotide
gtaaatgacctaggtactcaaagaggtatga

SEQ ID NO: 247770 - DNA, 30 bp, Artificial Sequence
  Synthetic oligonucleotide
aaggcagtgttccgttgataggaggtatga

SEQ ID NO: 247771 - DNA, 30 bp, Artificial Sequence
  Synthetic oligonucleotide
gcgagtacaccactgacttgtagggtatga

SEQ ID NO: 247772 - DNA, 30 bp, Artificial Sequence
  Synthetic oligonucleotide
ttttgagttttagcgggccggctggtatga

SEQ ID NO: 247773 - DNA, 30 bp, Artificial Sequence
  Synthetic oligonucleotide
ggcacagatcatctcaagtgtgctgtatga

SEQ ID NO: 247774 - DNA, 30 bp, Artificial Sequence
  Synthetic oligonucleotide
agttgacagaacagcaatttgagtgtatga

SEQ ID NO: 247775 - DNA, 30 bp, Artificial Sequence
  Synthetic oligonucleotide
atctaatttcacaggcggatagtattatga

SEQ ID NO: 247776 - DNA, 30 bp, Artificial Sequence
  Synthetic oligonucleotide
ccggggcgggtactagcatcgcagttatga

SEQ ID NO: 247777 - DNA, 30 bp, Artificial Sequence
  Synthetic oligonucleotide
cgtacgtcagggggagcgcctcggttatga

SEQ ID NO: 247778 - DNA, 30 bp, Artificial Sequence
  Synthetic oligonucleotide
tccgtaattgtattcgagcgaaaaaactga

SEQ ID NO: 247779 - DNA, 30 bp, Artificial Sequence
  Synthetic oligonucleotide
gcacaacgcacaaatggtttgaaaaactga

SEQ ID NO: 247780 - DNA, 30 bp, Artificial Sequence
  Synthetic oligonucleotide
ccgatacaggtaccgctgtaggccaactga

SEQ ID NO: 247781 - DNA, 30 bp, Artificial Sequence
  Synthetic oligonucleotide
tactttagctgaagatgtgttgccaactga

SEQ ID NO: 247782 - DNA, 30 bp, Artificial Sequence
  Synthetic oligonucleotide
taagagtggcttgttctcctgggcaactga

SEQ ID NO: 247783 - DNA, 30 bp, Artificial Sequence
  Synthetic oligonucleotide
gcggatcctaacttggcatcggataactga

SEQ ID NO: 247784 - DNA, 30 bp, Artificial Sequence
  Synthetic oligonucleotide
tgaaaccttcacgtggggcagtttaactga

SEQ ID NO: 247785 - DNA, 30 bp, Artificial Sequence
  Synthetic oligonucleotide
acttgaagacacgtggacccctcccactga

SEQ ID NO: 247786 - DNA, 30 bp, Artificial Sequence
  Synthetic oligonucleotide
acgggatagcgcaaaatcaggaatcactga

SEQ ID NO: 247787 - DNA, 30 bp, Artificial Sequence
  Synthetic oligonucleotide
gctctgagaccggcgccctaacgcgactga

SEQ ID NO: 247788 - DNA, 30 bp, Artificial Sequence
  Synthetic oligonucleotide
gtgatcaaatatagcgtcctagaggactga

SEQ ID NO: 247789 - DNA, 30 bp, Artificial Sequence
  Synthetic oligonucleotide
ctcccagagtcctggattgtttaggactga

SEQ ID NO: 247790 - DNA, 30 bp, Artificial Sequence
  Synthetic oligonucleotide
agggttcatgaggggatctcgaatgactga

SEQ ID NO: 247791 - DNA, 30 bp, Artificial Sequence
  Synthetic oligonucleotide
agatccgaggcggagctggaagaatactga

SEQ ID NO: 247792 - DNA, 30 bp, Artificial Sequence
  Synthetic oligonucleotide
aggatttgggtaaggttttaatgatactga

SEQ ID NO: 247793 - DNA, 30 bp, Artificial Sequence
  Synthetic oligonucleotide
tagtccctgctgaggatatgagcctactga

SEQ ID NO: 247794 - DNA, 30 bp, Artificial Sequence
  Synthetic oligonucleotide
cggtctacctagtttacatggaggtactga

SEQ ID NO: 247795 - DNA, 30 bp, Artificial Sequence
  Synthetic oligonucleotide
aatgggtacatggacagttcacattactga

SEQ ID NO: 247796 - DNA, 30 bp, Artificial Sequence
  Synthetic oligonucleotide
actacgttctaaagcgccggggcaacctga

SEQ ID NO: 247797 - DNA, 30 bp, Artificial Sequence
  Synthetic oligonucleotide
tgagctccgctcatccgtcgattcacctga

SEQ ID NO: 247798 - DNA, 30 bp, Artificial Sequence
  Synthetic oligonucleotide
gttagcacttggcctggtatggagacctga

SEQ ID NO: 247799 - DNA, 30 bp, Artificial Sequence
  Synthetic oligonucleotide
accgggtcttagccaggttgcccgacctga

SEQ ID NO: 247800 - DNA, 30 bp, Artificial Sequence
  Synthetic oligonucleotide
tctttaccgcatcacccgcgcaaaccctga

SEQ ID NO: 247801 - DNA, 30 bp, Artificial Sequence
  Synthetic oligonucleotide
atagggcgggaacttccagaaggcccctga

SEQ ID NO: 247802 - DNA, 30 bp, Artificial Sequence
  Synthetic oligonucleotide
ggtaagtaggcggtcaaggagaaagcctga

SEQ ID NO: 247803 - DNA, 30 bp, Artificial Sequence
  Synthetic oligonucleotide
tagtgggaaaggtgccacttttaatcctga

SEQ ID NO: 247804 - DNA, 30 bp, Artificial Sequence
  Synthetic oligonucleotide
gcattgctgatcagagcgatggcgtcctga

SEQ ID NO: 247805 - DNA, 30 bp, Artificial Sequence
  Synthetic oligonucleotide
ttgaggcactccacccccttatggtcctga

SEQ ID NO: 247806 - DNA, 30 bp, Artificial Sequence
  Synthetic oligonucleotide
gtttgacagtaggtactgacgagttcctga

SEQ ID NO: 247807 - DNA, 30 bp, Artificial Sequence
  Synthetic oligonucleotide
ccttagtgtcatggaacttagcgttcctga

SEQ ID NO: 247808 - DNA, 30 bp, Artificial Sequence
  Synthetic oligonucleotide
gtccagttgaggttaaacgtctcaagctga

SEQ ID NO: 247809 - DNA, 30 bp, Artificial Sequence
  Synthetic oligonucleotide
attaagagctccgatcatgcgataagctga

SEQ ID NO: 247810 - DNA, 30 bp, Artificial Sequence
  Synthetic oligonucleotide
aacaactcagtggtcgtcattaccagctga

SEQ ID NO: 247811 - DNA, 30 bp, Artificial Sequence
  Synthetic oligonucleotide
gccctgcgctcggcgggcgaacccagctga

SEQ ID NO: 247812 - DNA, 30 bp, Artificial Sequence
  Synthetic oligonucleotide
aacgcttgcgaaaaagctcttagcagctga

SEQ ID NO: 247813 - DNA, 30 bp, Artificial Sequence
  Synthetic oligonucleotide
ccgccttaacacgggtccataacgagctga

SEQ ID NO: 247814 - DNA, 30 bp, Artificial Sequence
  Synthetic oligonucleotide
ccaagatttcaggaagcttcatctagctga

SEQ ID NO: 247815 - DNA, 30 bp, Artificial Sequence
  Synthetic oligonucleotide
tggaggaagctatggaatgaacgccgctga

SEQ ID NO: 247816 - DNA, 30 bp, Artificial Sequence
  Synthetic oligonucleotide
gaaggcaaaatgcgcgggctatcaggctga

SEQ ID NO: 247817 - DNA, 30 bp, Artificial Sequence
  Synthetic oligonucleotide
ttaaaacaactatgtaggaattcaggctga

SEQ ID NO: 247818 - DNA, 30 bp, Artificial Sequence
  Synthetic oligonucleotide
gatagtttcgcgcttatgtctaacggctga

SEQ ID NO: 247819 - DNA, 30 bp, Artificial Sequence
  Synthetic oligonucleotide
gcgcaattttcttgacacaactacggctga

SEQ ID NO: 247820 - DNA, 30 bp, Artificial Sequence
  Synthetic oligonucleotide
atatcatagaacggcacgagagggggctga

SEQ ID NO: 247821 - DNA, 30 bp, Artificial Sequence
  Synthetic oligonucleotide
gatgcaaatatggcggggtgtgggggctga

SEQ ID NO: 247822 - DNA, 30 bp, Artificial Sequence
  Synthetic oligonucleotide
acgattattcaagtacatgttgggggctga

SEQ ID NO: 247823 - DNA, 30 bp, Artificial Sequence
  Synthetic oligonucleotide
atcccaatagagcgctacaggaaatgctga

SEQ ID NO: 247824 - DNA, 30 bp, Artificial Sequence
  Synthetic oligonucleotide
acgcgcctcgctgttgcacaccaatgctga

SEQ ID NO: 247825 - DNA, 30 bp, Artificial Sequence
  Synthetic oligonucleotide
ctgttgaggcgagaatctaggatatgctga

SEQ ID NO: 247826 - DNA, 30 bp, Artificial Sequence
  Synthetic oligonucleotide
agtcgaccctggtgcctgcatatatgctga

SEQ ID NO: 247827 - DNA, 30 bp, Artificial Sequence
  Synthetic oligonucleotide
tattgatcggggaggcctaaacgctgctga

SEQ ID NO: 247828 - DNA, 30 bp, Artificial Sequence
  Synthetic oligonucleotide
aacggggccgggtatttacgtctgtgctga

SEQ ID NO: 247829 - DNA, 30 bp, Artificial Sequence
  Synthetic oligonucleotide
agtgtccccgaaggagttttcttgtgctga

SEQ ID NO: 247830 - DNA, 30 bp, Artificial Sequence
  Synthetic oligonucleotide
atacactcggatagctcaagactttgctga

SEQ ID NO: 247831 - DNA, 30 bp, Artificial Sequence
  Synthetic oligonucleotide
ggtcgggagtcttagtctttcacaatctga

SEQ ID NO: 247832 - DNA, 30 bp, Artificial Sequence
  Synthetic oligonucleotide
gtcggttaaccagaagaacccaccatctga

SEQ ID NO: 247833 - DNA, 31 bp, Artificial Sequence
  Synthetic oligonucleotide
gtcgtgcagtggctttggtacgtgcatctga

SEQ ID NO: 247834 - DNA, 30 bp, Artificial Sequence
  Synthetic oligonucleotide
acaacaagttatccgttgacccagatctga

SEQ ID NO: 247835 - DNA, 30 bp, Artificial Sequence
  Synthetic oligonucleotide
cagtcctgtcaagcacccacgttgatctga

SEQ ID NO: 247836 - DNA, 30 bp, Artificial Sequence
  Synthetic oligonucleotide
actgggtcgaagaagaccattgatatctga

SEQ ID NO: 247837 - DNA, 30 bp, Artificial Sequence
  Synthetic oligonucleotide
gataagggtgagaggtttcatcgtatctga

SEQ ID NO: 247838 - DNA, 30 bp, Artificial Sequence
  Synthetic oligonucleotide
cactcaagggttgcgcagtctaacctctga

SEQ ID NO: 247839 - DNA, 30 bp, Artificial Sequence
  Synthetic oligonucleotide
aaagacggaaattaagaccacggcgtctga

SEQ ID NO: 247840 - DNA, 30 bp, Artificial Sequence
  Synthetic oligonucleotide
ccagtcgtcgtcctatgcccctgcgtctga

SEQ ID NO: 247841 - DNA, 30 bp, Artificial Sequence
  Synthetic oligonucleotide
tgctcgggaatgcggtcgcgcttggtctga

SEQ ID NO: 247842 - DNA, 30 bp, Artificial Sequence
  Synthetic oligonucleotide
gtaagtggaatttctaacaggaatgtctga

SEQ ID NO: 247843 - DNA, 30 bp, Artificial Sequence
  Synthetic oligonucleotide
cgaccgggggtgcgttgggaccatgtctga

SEQ ID NO: 247844 - DNA, 30 bp, Artificial Sequence
  Synthetic oligonucleotide
ttacaatgcgagtgagacagggatgtctga

SEQ ID NO: 247845 - DNA, 30 bp, Artificial Sequence
  Synthetic oligonucleotide
gggctcgccgaacatgcatcaacattctga

SEQ ID NO: 247846 - DNA, 30 bp, Artificial Sequence
  Synthetic oligonucleotide
cctaaaaaaattgtaattaatgcattctga

SEQ ID NO: 247847 - DNA, 30 bp, Artificial Sequence
  Synthetic oligonucleotide
cttcctgcacaagtaaaagtcagcttctga

SEQ ID NO: 247848 - DNA, 30 bp, Artificial Sequence
  Synthetic oligonucleotide
gtggttgggtcatggtgtgtcctcttctga

SEQ ID NO: 247849 - DNA, 30 bp, Artificial Sequence
  Synthetic oligonucleotide
gagcatcagggaagaagccaggatttctga

SEQ ID NO: 247850 - DNA, 30 bp, Artificial Sequence
  Synthetic oligonucleotide
ggttatgacggaggtcaggagacaaagtga

SEQ ID NO: 247851 - DNA, 30 bp, Artificial Sequence
  Synthetic oligonucleotide
cgattctgcgcccagtagacgacaaagtga

SEQ ID NO: 247852 - DNA, 30 bp, Artificial Sequence
  Synthetic oligonucleotide
aactgtaatttttgtctaaacagaaagtga

SEQ ID NO: 247853 - DNA, 30 bp, Artificial Sequence
  Synthetic oligonucleotide
gcaagcatgggcgctcaaatccgaaagtga

SEQ ID NO: 247854 - DNA, 30 bp, Artificial Sequence
  Synthetic oligonucleotide
tccagactaaatccacgagatctcaagtga

SEQ ID NO: 247855 - DNA, 30 bp, Artificial Sequence
  Synthetic oligonucleotide
aacaggtacgttaatggactggcgaagtga

SEQ ID NO: 247856 - DNA, 30 bp, Artificial Sequence
  Synthetic oligonucleotide
ggagtagggcattttccggctaggaagtga

SEQ ID NO: 247857 - DNA, 30 bp, Artificial Sequence
  Synthetic oligonucleotide
gcggatgctgttgtgccactctggaagtga

SEQ ID NO: 247858 - DNA, 30 bp, Artificial Sequence
  Synthetic oligonucleotide
taaggggttcctaataatgagctgaagtga

SEQ ID NO: 247859 - DNA, 30 bp, Artificial Sequence
  Synthetic oligonucleotide
ttgaggtcacatctaagacactcacagtga

SEQ ID NO: 247860 - DNA, 30 bp, Artificial Sequence
  Synthetic oligonucleotide
tgtaaggttgtgtcagtgccagaccagtga

SEQ ID NO: 247861 - DNA, 30 bp, Artificial Sequence
  Synthetic oligonucleotide
atccgttgcggtgtaagtcatactcagtga

SEQ ID NO: 247862 - DNA, 30 bp, Artificial Sequence
  Synthetic oligonucleotide
gaaaaaggggaatttaagtatggtcagtga

SEQ ID NO: 247863 - DNA, 30 bp, Artificial Sequence
  Synthetic oligonucleotide
agtttgatatggggggattgtcttcagtga

SEQ ID NO: 247864 - DNA, 30 bp, Artificial Sequence
  Synthetic oligonucleotide
gtcaccgctctcaagtaaaccaaatagtga

SEQ ID NO: 247865 - DNA, 30 bp, Artificial Sequence
  Synthetic oligonucleotide
tggtgttaccggggattggggtcgtagtga

SEQ ID NO: 247866 - DNA, 30 bp, Artificial Sequence
  Synthetic oligonucleotide
ggctccacgtgcgtctggtcagcttagtga

SEQ ID NO: 247867 - DNA, 30 bp, Artificial Sequence
  Synthetic oligonucleotide
tatttgcgggcggagtggaaggaaacgtga

SEQ ID NO: 247868 - DNA, 30 bp, Artificial Sequence
  Synthetic oligonucleotide
tttacacgtaactagatctaagacacgtga

SEQ ID NO: 247869 - DNA, 30 bp, Artificial Sequence
  Synthetic oligonucleotide
gggagatgaggcggtgttctacgcacgtga

SEQ ID NO: 247870 - DNA, 30 bp, Artificial Sequence
  Synthetic oligonucleotide
cgagctagtgcttgccgtgaaatcacgtga

SEQ ID NO: 247871 - DNA, 30 bp, Artificial Sequence
  Synthetic oligonucleotide
atccccaagtaaagagtcgtcccgacgtga

SEQ ID NO: 247872 - DNA, 30 bp, Artificial Sequence
  Synthetic oligonucleotide
aattgtcaatacgaggagtaagcgacgtga

SEQ ID NO: 247873 - DNA, 29 bp, Artificial Sequence
  Synthetic oligonucleotide
ttaaacgtaggagatcattgaggacgtga

SEQ ID NO: 247874 - DNA, 30 bp, Artificial Sequence
  Synthetic oligonucleotide
cgatattgatcccgttgaggggggacgtga

SEQ ID NO: 247875 - DNA, 30 bp, Artificial Sequence
  Synthetic oligonucleotide
ttctcggggcccaaacgaaagtgtacgtga

SEQ ID NO: 247876 - DNA, 30 bp, Artificial Sequence
  Synthetic oligonucleotide
ctttagagtcaaaggcgtgtaaaggcgtga

SEQ ID NO: 247877 - DNA, 30 bp, Artificial Sequence
  Synthetic oligonucleotide
tacaaggctcactcggttacgtgggcgtga

SEQ ID NO: 247878 - DNA, 30 bp, Artificial Sequence
  Synthetic oligonucleotide
tcgttaggtcgcataagcatgttggcgtga

SEQ ID NO: 247879 - DNA, 30 bp, Artificial Sequence
  Synthetic oligonucleotide
cgatggagattcacagtagggaatgcgtga

SEQ ID NO: 247880 - DNA, 30 bp, Artificial Sequence
  Synthetic oligonucleotide
ccccattgactacaagtgttttatgcgtga

SEQ ID NO: 247881 - DNA, 30 bp, Artificial Sequence
  Synthetic oligonucleotide
cgggcagcacttatgtcaggaagtgcgtga

SEQ ID NO: 247882 - DNA, 30 bp, Artificial Sequence
  Synthetic oligonucleotide
catcaccgagcaagcacacatagtgcgtga

SEQ ID NO: 247883 - DNA, 30 bp, Artificial Sequence
  Synthetic oligonucleotide
ggttcacgaagggtgctacaaggtgcgtga

SEQ ID NO: 247884 - DNA, 30 bp, Artificial Sequence
  Synthetic oligonucleotide
caacgacgttaccatgagctctttgcgtga

SEQ ID NO: 247885 - DNA, 30 bp, Artificial Sequence
  Synthetic oligonucleotide
gcgtcatcgggttccacgggaacatcgtga

SEQ ID NO: 247886 - DNA, 29 bp, Artificial Sequence
  Synthetic oligonucleotide
gtcaatcctgtgaacccacgatatcgtga

SEQ ID NO: 247887 - DNA, 30 bp, Artificial Sequence
  Synthetic oligonucleotide
cagtgttacaaagtcacgtatccctcgtga

SEQ ID NO: 247888 - DNA, 30 bp, Artificial Sequence
  Synthetic oligonucleotide
atcgcgcttcttggaggactggtctcgtga

SEQ ID NO: 247889 - DNA, 30 bp, Artificial Sequence
  Synthetic oligonucleotide
tctgcggcgactatcggataaagttcgtga

SEQ ID NO: 247890 - DNA, 30 bp, Artificial Sequence
  Synthetic oligonucleotide
tggtgggtcatggtcagatgtagaaggtga

SEQ ID NO: 247891 - DNA, 30 bp, Artificial Sequence
  Synthetic oligonucleotide
accaatcgtaagcccctcataggcaggtga

SEQ ID NO: 247892 - DNA, 30 bp, Artificial Sequence
  Synthetic oligonucleotide
catcagtcacgcaagttgccacagaggtga

SEQ ID NO: 247893 - DNA, 30 bp, Artificial Sequence
  Synthetic oligonucleotide
gagtgggtggggaagcgtaactggaggtga

SEQ ID NO: 247894 - DNA, 30 bp, Artificial Sequence
  Synthetic oligonucleotide
gcggatgtattcggatcacccaataggtga

SEQ ID NO: 247895 - DNA, 30 bp, Artificial Sequence
  Synthetic oligonucleotide
tagggacgctcgtatatcgggtataggtga

SEQ ID NO: 247896 - DNA, 30 bp, Artificial Sequence
  Synthetic oligonucleotide
acacaatgcgagtgccgatcctgacggtga

SEQ ID NO: 247897 - DNA, 30 bp, Artificial Sequence
  Synthetic oligonucleotide
atcgtctggttcacgtacacgtgacggtga

SEQ ID NO: 247898 - DNA, 30 bp, Artificial Sequence
  Synthetic oligonucleotide
gctgaagttggctttacctgggcgcggtga

SEQ ID NO: 247899 - DNA, 30 bp, Artificial Sequence
  Synthetic oligonucleotide
tctgaacacacgcgaggccactctcggtga

SEQ ID NO: 247900 - DNA, 30 bp, Artificial Sequence
  Synthetic oligonucleotide
ggttcatttcgatgtagaatttctcggtga

SEQ ID NO: 247901 - DNA, 30 bp, Artificial Sequence
  Synthetic oligonucleotide
gtaggtgcgaattttgtaccatgtcggtga

SEQ ID NO: 247902 - DNA, 30 bp, Artificial Sequence
  Synthetic oligonucleotide
gtttaatgagtctagtaacacggcgggtga

SEQ ID NO: 247903 - DNA, 30 bp, Artificial Sequence
  Synthetic oligonucleotide
tgacatacccggacgaaggcattggggtga

SEQ ID NO: 247904 - DNA, 30 bp, Artificial Sequence
  Synthetic oligonucleotide
ggctcggaggaaatcttttatcgctggtga

SEQ ID NO: 247905 - DNA, 30 bp, Artificial Sequence
  Synthetic oligonucleotide
agcctcagggatcccctagaggtctggtga

SEQ ID NO: 247906 - DNA, 30 bp, Artificial Sequence
  Synthetic oligonucleotide
ggtcattcggtttgaagcccggtgtggtga

SEQ ID NO: 247907 - DNA, 30 bp, Artificial Sequence
  Synthetic oligonucleotide
ctatattatcgtacttgcgctggttggtga

SEQ ID NO: 247908 - DNA, 30 bp, Artificial Sequence
  Synthetic oligonucleotide
gtgtgctatgcgttttccagcgaaatgtga

SEQ ID NO: 247909 - DNA, 30 bp, Artificial Sequence
  Synthetic oligonucleotide
tgtgaatcacatgcgagctcgataatgtga

SEQ ID NO: 247910 - DNA, 30 bp, Artificial Sequence
  Synthetic oligonucleotide
gccattggatggcgtgctttactgatgtga

SEQ ID NO: 247911 - DNA, 30 bp, Artificial Sequence
  Synthetic oligonucleotide
gggtctctgcgttccgtcactgctatgtga

SEQ ID NO: 247912 - DNA, 30 bp, Artificial Sequence
  Synthetic oligonucleotide
ggctttgagtttacaaactaggttatgtga

SEQ ID NO: 247913 - DNA, 30 bp, Artificial Sequence
  Synthetic oligonucleotide
attttattggatggcgggcataaactgtga

SEQ ID NO: 247914 - DNA, 30 bp, Artificial Sequence
  Synthetic oligonucleotide
aagtgctcggtaatacaccagctactgtga

SEQ ID NO: 247915 - DNA, 30 bp, Artificial Sequence
  Synthetic oligonucleotide
aaggatttacagtggcggatacggctgtga

SEQ ID NO: 247916 - DNA, 30 bp, Artificial Sequence
  Synthetic oligonucleotide
caaggaattgtccgtctgggcaatctgtga

SEQ ID NO: 247917 - DNA, 30 bp, Artificial Sequence
  Synthetic oligonucleotide
cacggatattatacgtcctagtttctgtga

SEQ ID NO: 247918 - DNA, 30 bp, Artificial Sequence
  Synthetic oligonucleotide
ttggacagtgattcgatagtaatagtgtga

SEQ ID NO: 247919 - DNA, 30 bp, Artificial Sequence
  Synthetic oligonucleotide
gtgatatgggtctatgctgttattgtgtga

SEQ ID NO: 247920 - DNA, 30 bp, Artificial Sequence
  Synthetic oligonucleotide
gtgggaggaaggcggcgaacgcttgtgtga

SEQ ID NO: 247921 - DNA, 30 bp, Artificial Sequence
  Synthetic oligonucleotide
cgacttcggtagataaaacgaaaattgtga

SEQ ID NO: 247922 - DNA, 30 bp, Artificial Sequence
  Synthetic oligonucleotide
gccacgatgagaacctgcgactcattgtga

SEQ ID NO: 247923 - DNA, 30 bp, Artificial Sequence
  Synthetic oligonucleotide
cctcaactcaatactccttgctacttgtga

SEQ ID NO: 247924 - DNA, 30 bp, Artificial Sequence
  Synthetic oligonucleotide
gaggctgttgttattttatcacagttgtga

SEQ ID NO: 247925 - DNA, 30 bp, Artificial Sequence
  Synthetic oligonucleotide
gcgtaaagaaccgagggctaccagttgtga

SEQ ID NO: 247926 - DNA, 30 bp, Artificial Sequence
  Synthetic oligonucleotide
ggatcaagcaataaactgaatccgttgtga

SEQ ID NO: 247927 - DNA, 30 bp, Artificial Sequence
  Synthetic oligonucleotide
tttagcatgagcggcttaatggctttgtga

SEQ ID NO: 247928 - DNA, 30 bp, Artificial Sequence
  Synthetic oligonucleotide
cactacgcgtcagacttaggaaaaaattga

SEQ ID NO: 247929 - DNA, 30 bp, Artificial Sequence
  Synthetic oligonucleotide
aaatagccaagtagttcgtaaggaaattga

SEQ ID NO: 247930 - DNA, 30 bp, Artificial Sequence
  Synthetic oligonucleotide
gtcattgaaccgtttccatggaataattga

SEQ ID NO: 247931 - DNA, 30 bp, Artificial Sequence
  Synthetic oligonucleotide
gggacatgctggaccgtcgtctataattga

SEQ ID NO: 247932 - DNA, 30 bp, Artificial Sequence
  Synthetic oligonucleotide
ccatgtgggcgattatgtcttattaattga

SEQ ID NO: 247933 - DNA, 30 bp, Artificial Sequence
  Synthetic oligonucleotide
gtatgggtaacggcctcgattcggcattga

SEQ ID NO: 247934 - DNA, 30 bp, Artificial Sequence
  Synthetic oligonucleotide
catcgccgcaatttatcctggaatcattga

SEQ ID NO: 247935 - DNA, 30 bp, Artificial Sequence
  Synthetic oligonucleotide
acacgcgtctgcacccaactgaaagattga

SEQ ID NO: 247936 - DNA, 30 bp, Artificial Sequence
  Synthetic oligonucleotide
ggattttccgcgctgagtaggaacgattga

SEQ ID NO: 247937 - DNA, 30 bp, Artificial Sequence
  Synthetic oligonucleotide
aagtggtagaacaggctcaaggacgattga

SEQ ID NO: 247938 - DNA, 30 bp, Artificial Sequence
  Synthetic oligonucleotide
tacctcgtcgcataccgacgcccggattga

SEQ ID NO: 247939 - DNA, 30 bp, Artificial Sequence
  Synthetic oligonucleotide
ctacctggccagattgatttgttggattga

SEQ ID NO: 247940 - DNA, 30 bp, Artificial Sequence
  Synthetic oligonucleotide
ctgggttttcaaactggtaaacatgattga

SEQ ID NO: 247941 - DNA, 30 bp, Artificial Sequence
  Synthetic oligonucleotide
agggttgtggagttccgaactcaatattga

SEQ ID NO: 247942 - DNA, 30 bp, Artificial Sequence
  Synthetic oligonucleotide
attagtagcgagttctgttgcctatattga

SEQ ID NO: 247943 - DNA, 30 bp, Artificial Sequence
  Synthetic oligonucleotide
taaaggtgagaaacttgtttgggctattga

SEQ ID NO: 247944 - DNA, 30 bp, Artificial Sequence
  Synthetic oligonucleotide
tcgtatggccggggacattcacagtattga

SEQ ID NO: 247945 - DNA, 30 bp, Artificial Sequence
  Synthetic oligonucleotide
tcaaccgactttagttaggattagtattga

SEQ ID NO: 247946 - DNA, 30 bp, Artificial Sequence
  Synthetic oligonucleotide
agcatatccgacgtaaggatcaattattga

SEQ ID NO: 247947 - DNA, 30 bp, Artificial Sequence
  Synthetic oligonucleotide
ctgactcggccgagttttccgtcttattga

SEQ ID NO: 247948 - DNA, 30 bp, Artificial Sequence
  Synthetic oligonucleotide
tagcaggcggcactctaacgtttttattga

SEQ ID NO: 247949 - DNA, 30 bp, Artificial Sequence
  Synthetic oligonucleotide
tagggttggaaaatgtttgagggaacttga

SEQ ID NO: 247950 - DNA, 30 bp, Artificial Sequence
  Synthetic oligonucleotide
tcggtggcgattggacgcggaaagacttga

SEQ ID NO: 247951 - DNA, 30 bp, Artificial Sequence
  Synthetic oligonucleotide
agctgcataaaggcgacaccggagacttga

SEQ ID NO: 247952 - DNA, 30 bp, Artificial Sequence
  Synthetic oligonucleotide
aatcacaccagataaaaacgagggacttga

SEQ ID NO: 247953 - DNA, 30 bp, Artificial Sequence
  Synthetic oligonucleotide
agtcacatgtaacacttatcactgacttga

SEQ ID NO: 247954 - DNA, 30 bp, Artificial Sequence
  Synthetic oligonucleotide
acgattatccagcaacataacgtgacttga

SEQ ID NO: 247955 - DNA, 30 bp, Artificial Sequence
  Synthetic oligonucleotide
ggggacgttaccggtcacccatgaccttga

SEQ ID NO: 247956 - DNA, 30 bp, Artificial Sequence
  Synthetic oligonucleotide
cgtatagtaacttggcaagcgtacccttga

SEQ ID NO: 247957 - DNA, 30 bp, Artificial Sequence
  Synthetic oligonucleotide
ccgatagggggctccaagacgtagccttga

SEQ ID NO: 247958 - DNA, 30 bp, Artificial Sequence
  Synthetic oligonucleotide
cacggtcttcgtgtatatgcgcatccttga

SEQ ID NO: 247959 - DNA, 30 bp, Artificial Sequence
  Synthetic oligonucleotide
ccgattgttcgccaggagtatggagcttga

SEQ ID NO: 247960 - DNA, 30 bp, Artificial Sequence
  Synthetic oligonucleotide
acaggggagctattaacgtagtgagcttga

SEQ ID NO: 247961 - DNA, 30 bp, Artificial Sequence
  Synthetic oligonucleotide
agtctaaatttgtcaacacaagttgcttga

SEQ ID NO: 247962 - DNA, 30 bp, Artificial Sequence
  Synthetic oligonucleotide
tgttattgagcaagtatggaagcatcttga

SEQ ID NO: 247963 - DNA, 30 bp, Artificial Sequence
  Synthetic oligonucleotide
tagggactagttcggcatgagagctcttga

SEQ ID NO: 247964 - DNA, 30 bp, Artificial Sequence
  Synthetic oligonucleotide
tccgtttcgaacattttgctccattcttga

SEQ ID NO: 247965 - DNA, 30 bp, Artificial Sequence
  Synthetic oligonucleotide
catgctcgcatgagcgcatcttattcttga

SEQ ID NO: 247966 - DNA, 30 bp, Artificial Sequence
  Synthetic oligonucleotide
acaactccagtgtcggaaggtatttcttga

SEQ ID NO: 247967 - DNA, 30 bp, Artificial Sequence
  Synthetic oligonucleotide
gtagatattgggcgaaccaagataagttga

SEQ ID NO: 247968 - DNA, 30 bp, Artificial Sequence
  Synthetic oligonucleotide
tagacacgtaagctaaggagcagcagttga

SEQ ID NO: 247969 - DNA, 30 bp, Artificial Sequence
  Synthetic oligonucleotide
gtgtcccataggatcatcattccgagttga

SEQ ID NO: 247970 - DNA, 30 bp, Artificial Sequence
  Synthetic oligonucleotide
gccctcgaaattgcatcgtttaggagttga

SEQ ID NO: 247971 - DNA, 30 bp, Artificial Sequence
  Synthetic oligonucleotide
atagcgggggactttaggagtaatagttga

SEQ ID NO: 247972 - DNA, 30 bp, Artificial Sequence
  Synthetic oligonucleotide
taaatcactcattttatgctatgacgttga

SEQ ID NO: 247973 - DNA, 30 bp, Artificial Sequence
  Synthetic oligonucleotide
actgaccgtagtgtcttgcacatacgttga

SEQ ID NO: 247974 - DNA, 30 bp, Artificial Sequence
  Synthetic oligonucleotide
gcagaaacgttagtcggggacatccgttga

SEQ ID NO: 247975 - DNA, 30 bp, Artificial Sequence
  Synthetic oligonucleotide
tcgctgaagcgaagctaccagttccgttga

SEQ ID NO: 247976 - DNA, 30 bp, Artificial Sequence
  Synthetic oligonucleotide
accatttgcgcgataggattgacgcgttga

SEQ ID NO: 247977 - DNA, 30 bp, Artificial Sequence
  Synthetic oligonucleotide
gaggttgcttggcccagggtgtggcgttga

SEQ ID NO: 247978 - DNA, 30 bp, Artificial Sequence
  Synthetic oligonucleotide
ccgaccctcctcgcgaacgtttcaggttga

SEQ ID NO: 247979 - DNA, 30 bp, Artificial Sequence
  Synthetic oligonucleotide
cggtaacgtgtcacacggggtaagggttga

SEQ ID NO: 247980 - DNA, 30 bp, Artificial Sequence
  Synthetic oligonucleotide
ggtaagacacgtaaaagaacgtagggttga

SEQ ID NO: 247981 - DNA, 30 bp, Artificial Sequence
  Synthetic oligonucleotide
gtcggaccggtaacccagggggatggttga

SEQ ID NO: 247982 - DNA, 30 bp, Artificial Sequence
  Synthetic oligonucleotide
gctatagttgtcagaccatgaagtggttga

SEQ ID NO: 247983 - DNA, 30 bp, Artificial Sequence
  Synthetic oligonucleotide
gtgatgcgtttgctaaaggacagctgttga

SEQ ID NO: 247984 - DNA, 30 bp, Artificial Sequence
  Synthetic oligonucleotide
cagtgaagaaggtcgtaacgcctgtgttga

SEQ ID NO: 247985 - DNA, 30 bp, Artificial Sequence
  Synthetic oligonucleotide
gtcaactcacttataacttgtctaatttga

SEQ ID NO: 247986 - DNA, 30 bp, Artificial Sequence
  Synthetic oligonucleotide
cggacgcggtcgggtgcgggtgcgatttga

SEQ ID NO: 247987 - DNA, 30 bp, Artificial Sequence
  Synthetic oligonucleotide
ggccatacatagcctgcgatgcggatttga

SEQ ID NO: 247988 - DNA, 31 bp, Artificial Sequence
  Synthetic oligonucleotide
actgcttaatcttgctagtgcgtatatttga

SEQ ID NO: 247989 - DNA, 30 bp, Artificial Sequence
  Synthetic oligonucleotide
aggttcgatttggtatcaggtactatttga

SEQ ID NO: 247990 - DNA, 30 bp, Artificial Sequence
  Synthetic oligonucleotide
gcgagtaactccagtctggctggtatttga

SEQ ID NO: 247991 - DNA, 30 bp, Artificial Sequence
  Synthetic oligonucleotide
aattggacggtagcgtccggcatactttga

SEQ ID NO: 247992 - DNA, 30 bp, Artificial Sequence
  Synthetic oligonucleotide
acttgatctccgaattaggaacatctttga

SEQ ID NO: 247993 - DNA, 30 bp, Artificial Sequence
  Synthetic oligonucleotide
ggagaggatagtttgcacggaagtctttga

SEQ ID NO: 247994 - DNA, 30 bp, Artificial Sequence
  Synthetic oligonucleotide
gaccctgagccgaatgcagtgaaagtttga

SEQ ID NO: 247995 - DNA, 30 bp, Artificial Sequence
  Synthetic oligonucleotide
tggattggcactcgacaacacctagtttga

SEQ ID NO: 247996 - DNA, 30 bp, Artificial Sequence
  Synthetic oligonucleotide
tcacatccttgaggattaagactcgtttga

SEQ ID NO: 247997 - DNA, 30 bp, Artificial Sequence
  Synthetic oligonucleotide
ttacataaattaagtaccgagaaggtttga

SEQ ID NO: 247998 - DNA, 30 bp, Artificial Sequence
  Synthetic oligonucleotide
tgggacggcactcgagaagtcgtggtttga

SEQ ID NO: 247999 - DNA, 30 bp, Artificial Sequence
  Synthetic oligonucleotide
ggaggatgactcagcaaacttgtggtttga

SEQ ID NO: 248000 - DNA, 30 bp, Artificial Sequence
  Synthetic oligonucleotide
gcggcgggccggaaaacttatgctgtttga

SEQ ID NO: 248001 - DNA, 30 bp, Artificial Sequence
  Synthetic oligonucleotide
agagcaagttccctgtaggagcgcttttga

SEQ ID NO: 248002 - DNA, 30 bp, Artificial Sequence
  Synthetic oligonucleotide
gctttacctcagtactagatctggttttga

SEQ ID NO: 248003 - DNA, 30 bp, Artificial Sequence
  Synthetic oligonucleotide
ttagcaccgcgagtatacgtacctttttga

SEQ ID NO: 248004 - DNA, 30 bp, Artificial Sequence
  Synthetic oligonucleotide
caacgaatacaggtgacgagctaaaaaata

SEQ ID NO: 248005 - DNA, 30 bp, Artificial Sequence
  Synthetic oligonucleotide
gcaatactggttggagacggaataaaaata

SEQ ID NO: 248006 - DNA, 30 bp, Artificial Sequence
  Synthetic oligonucleotide
ctccaaatagggaaagcaacagtaaaaata

SEQ ID NO: 248007 - DNA, 30 bp, Artificial Sequence
  Synthetic oligonucleotide
gtaattcacgttagaaaaggctccaaaata

SEQ ID NO: 248008 - DNA, 30 bp, Artificial Sequence
  Synthetic oligonucleotide
cagtgtgcagttggctcacggccgaaaata

SEQ ID NO: 248009 - DNA, 30 bp, Artificial Sequence
  Synthetic oligonucleotide
cggctaaagcctccaggaaattggaaaata

SEQ ID NO: 248010 - DNA, 30 bp, Artificial Sequence
  Synthetic oligonucleotide
aaaagaagggaattgaccacatcacaaata

SEQ ID NO: 248011 - DNA, 30 bp, Artificial Sequence
  Synthetic oligonucleotide
gcttacttgacagattacgaagaccaaata

SEQ ID NO: 248012 - DNA, 30 bp, Artificial Sequence
  Synthetic oligonucleotide
cgcggtttaacgcgcgcgccaacccaaata

SEQ ID NO: 248013 - DNA, 30 bp, Artificial Sequence
  Synthetic oligonucleotide
gggacctgtaccttcttgttttgccaaata

SEQ ID NO: 248014 - DNA, 30 bp, Artificial Sequence
  Synthetic oligonucleotide
cgtcatggtgctgaaaccattttccaaata

SEQ ID NO: 248015 - DNA, 30 bp, Artificial Sequence
  Synthetic oligonucleotide
cacttggtatcctcaagatcggggcaaata

SEQ ID NO: 248016 - DNA, 30 bp, Artificial Sequence
  Synthetic oligonucleotide
gcgttcgagaactgataatgctctcaaata

SEQ ID NO: 248017 - DNA, 30 bp, Artificial Sequence
  Synthetic oligonucleotide
ctaggagcccaggcggtccgtaaagaaata

SEQ ID NO: 248018 - DNA, 30 bp, Artificial Sequence
  Synthetic oligonucleotide
tgcagtgccggaatcgatagaagagaaata

SEQ ID NO: 248019 - DNA, 30 bp, Artificial Sequence
  Synthetic oligonucleotide
ttcggaccgggcaaaacacatcgggaaata

SEQ ID NO: 248020 - DNA, 30 bp, Artificial Sequence
  Synthetic oligonucleotide
tgactctgaagagctgatagaggggaaata

SEQ ID NO: 248021 - DNA, 30 bp, Artificial Sequence
  Synthetic oligonucleotide
gttccggccatgaataatttgtcgtaaata

SEQ ID NO: 248022 - DNA, 30 bp, Artificial Sequence
  Synthetic oligonucleotide
cgggggatacaccccgagtaaaggtaaata

SEQ ID NO: 248023 - DNA, 30 bp, Artificial Sequence
  Synthetic oligonucleotide
gtccaggcctatatgcatagagggtaaata

SEQ ID NO: 248024 - DNA, 30 bp, Artificial Sequence
  Synthetic oligonucleotide
agtgtgccacaccatgtaaacgcttaaata

SEQ ID NO: 248025 - DNA, 30 bp, Artificial Sequence
  Synthetic oligonucleotide
gtcgttcgcgaaaaagttcggagttaaata

SEQ ID NO: 248026 - DNA, 30 bp, Artificial Sequence
  Synthetic oligonucleotide
gggtgtatgctgaaaccttacacaacaata

SEQ ID NO: 248027 - DNA, 30 bp, Artificial Sequence
  Synthetic oligonucleotide
tttaaacgacgcgagtaagagacaacaata

SEQ ID NO: 248028 - DNA, 30 bp, Artificial Sequence
  Synthetic oligonucleotide
tgctccctcgggccaagaaagaacacaata

SEQ ID NO: 248029 - DNA, 30 bp, Artificial Sequence
  Synthetic oligonucleotide
atcactataaatcgtgtgaactagacaata

SEQ ID NO: 248030 - DNA, 30 bp, Artificial Sequence
  Synthetic oligonucleotide
gtaatagctaaatacggtagacgaccaata

SEQ ID NO: 248031 - DNA, 30 bp, Artificial Sequence
  Synthetic oligonucleotide
cccagagtcagtagaaaaaggctgccaata

SEQ ID NO: 248032 - DNA, 30 bp, Artificial Sequence
  Synthetic oligonucleotide
gtaaatacgcaaccgtcgagaccagcaata

SEQ ID NO: 248033 - DNA, 30 bp, Artificial Sequence
  Synthetic oligonucleotide
catcaaggcgtgtgtgggaatatggcaata

SEQ ID NO: 248034 - DNA, 30 bp, Artificial Sequence
  Synthetic oligonucleotide
ggcaaacatacggatataggcggatcaata

SEQ ID NO: 248035 - DNA, 30 bp, Artificial Sequence
  Synthetic oligonucleotide
tgcagatgtactcttgaccggatatcaata

SEQ ID NO: 248036 - DNA, 30 bp, Artificial Sequence
  Synthetic oligonucleotide
ccgctcaggtgtacaatgtgacagtcaata

SEQ ID NO: 248037 - DNA, 30 bp, Artificial Sequence
  Synthetic oligonucleotide
ggaggtggttgttagttgatcttgtcaata

SEQ ID NO: 248038 - DNA, 30 bp, Artificial Sequence
  Synthetic oligonucleotide
ccttgtctaggcttgcgcgtcgtttcaata

SEQ ID NO: 248039 - DNA, 30 bp, Artificial Sequence
  Synthetic oligonucleotide
ccgtgccgacataacgtgtctcttagaata

SEQ ID NO: 248040 - DNA, 30 bp, Artificial Sequence
  Synthetic oligonucleotide
gcgttgctgatagaacggtctgttagaata

SEQ ID NO: 248041 - DNA, 30 bp, Artificial Sequence
  Synthetic oligonucleotide
cggttagaagccgtgatgatttagcgaata

SEQ ID NO: 248042 - DNA, 30 bp, Artificial Sequence
  Synthetic oligonucleotide
gaagcggctcatctagtagggacgcgaata

SEQ ID NO: 248043 - DNA, 30 bp, Artificial Sequence
  Synthetic oligonucleotide
ctgatgaagagttagggccaatcgcgaata

SEQ ID NO: 248044 - DNA, 30 bp, Artificial Sequence
  Synthetic oligonucleotide
atatcgtaaagaatacttcttagtcgaata

SEQ ID NO: 248045 - DNA, 30 bp, Artificial Sequence
  Synthetic oligonucleotide
ctcccccgttcctatccagccggcggaata

SEQ ID NO: 248046 - DNA, 30 bp, Artificial Sequence
  Synthetic oligonucleotide
aaacatgaatacggcagtttctgcggaata

SEQ ID NO: 248047 - DNA, 30 bp, Artificial Sequence
  Synthetic oligonucleotide
ccccagcagtggggttaacctatcggaata

SEQ ID NO: 248048 - DNA, 30 bp, Artificial Sequence
  Synthetic oligonucleotide
tagtaagtggtatacctacaattcggaata

SEQ ID NO: 248049 - DNA, 30 bp, Artificial Sequence
  Synthetic oligonucleotide
aactaaacttctacaagctatgagggaata

SEQ ID NO: 248050 - DNA, 30 bp, Artificial Sequence
  Synthetic oligonucleotide
agtacctacgctctgatcggtcggggaata

SEQ ID NO: 248051 - DNA, 30 bp, Artificial Sequence
  Synthetic oligonucleotide
gctcaatcttcgtgcgggtctactggaata

SEQ ID NO: 248052 - DNA, 30 bp, Artificial Sequence
  Synthetic oligonucleotide
gtgataaagggtcttatataacgtggaata

SEQ ID NO: 248053 - DNA, 30 bp, Artificial Sequence
  Synthetic oligonucleotide
attatgaaagtgactagggggcgtggaata

SEQ ID NO: 248054 - DNA, 30 bp, Artificial Sequence
  Synthetic oligonucleotide
tagtaaggcctggggtgagagacatgaata

SEQ ID NO: 248055 - DNA, 30 bp, Artificial Sequence
  Synthetic oligonucleotide
agtaaatattatgcataaattggatgaata

SEQ ID NO: 248056 - DNA, 30 bp, Artificial Sequence
  Synthetic oligonucleotide
acaggtatgcgtatataacatgtatgaata

SEQ ID NO: 248057 - DNA, 30 bp, Artificial Sequence
  Synthetic oligonucleotide
tgggtaggcacgaagggtgggagctgaata

SEQ ID NO: 248058 - DNA, 30 bp, Artificial Sequence
  Synthetic oligonucleotide
catagtaagattcccttcgagggctgaata

SEQ ID NO: 248059 - DNA, 30 bp, Artificial Sequence
  Synthetic oligonucleotide
gtagggcgtatagtaaaaatcgggtgaata

SEQ ID NO: 248060 - DNA, 30 bp, Artificial Sequence
  Synthetic oligonucleotide
gcatgtccagcaattcccttgctgtgaata

SEQ ID NO: 248061 - DNA, 30 bp, Artificial Sequence
  Synthetic oligonucleotide
taagttggactaagtgagaggctttgaata

SEQ ID NO: 248062 - DNA, 30 bp, Artificial Sequence
  Synthetic oligonucleotide
tgtggagaatacagaatgagtataataata

SEQ ID NO: 248063 - DNA, 30 bp, Artificial Sequence
  Synthetic oligonucleotide
agacggagtcatgccgccggtaacataata

SEQ ID NO: 248064 - DNA, 30 bp, Artificial Sequence
  Synthetic oligonucleotide
acagtacccagtgaccgacagcccataata

SEQ ID NO: 248065 - DNA, 30 bp, Artificial Sequence
  Synthetic oligonucleotide
cagctcgattgtgcctagtgttctataata

SEQ ID NO: 248066 - DNA, 30 bp, Artificial Sequence
  Synthetic oligonucleotide
tctgtacagaggggtgatgtgattataata

SEQ ID NO: 248067 - DNA, 30 bp, Artificial Sequence
  Synthetic oligonucleotide
cacacccccaaatgcgaatgagttataata

SEQ ID NO: 248068 - DNA, 30 bp, Artificial Sequence
  Synthetic oligonucleotide
ctcagagtatttagggacagtaaactaata

SEQ ID NO: 248069 - DNA, 30 bp, Artificial Sequence
  Synthetic oligonucleotide
cgatttagctagcattcgcaacagctaata

SEQ ID NO: 248070 - DNA, 30 bp, Artificial Sequence
  Synthetic oligonucleotide
gcagttcgaaaatccgcatgtaggctaata

SEQ ID NO: 248071 - DNA, 30 bp, Artificial Sequence
  Synthetic oligonucleotide
gcaccacccagcagactcggcccagtaata

SEQ ID NO: 248072 - DNA, 30 bp, Artificial Sequence
  Synthetic oligonucleotide
tcacgcgttaagcttacataggcagtaata

SEQ ID NO: 248073 - DNA, 30 bp, Artificial Sequence
  Synthetic oligonucleotide
cagacactggtctagttatttcgagtaata

SEQ ID NO: 248074 - DNA, 30 bp, Artificial Sequence
  Synthetic oligonucleotide
agggagtttggaatcctaacattagtaata

SEQ ID NO: 248075 - DNA, 30 bp, Artificial Sequence
  Synthetic oligonucleotide
ggcgaaatagcgaggttttcctacgtaata

SEQ ID NO: 248076 - DNA, 30 bp, Artificial Sequence
  Synthetic oligonucleotide
ggctgtcgagacaggtttccgcccgtaata

SEQ ID NO: 248077 - DNA, 30 bp, Artificial Sequence
  Synthetic oligonucleotide
ggatattagatgtcgttggccacggtaata

SEQ ID NO: 248078 - DNA, 30 bp, Artificial Sequence
  Synthetic oligonucleotide
ctgtcctgaaatcaatcttctggggtaata

SEQ ID NO: 248079 - DNA, 30 bp, Artificial Sequence
  Synthetic oligonucleotide
ttgcgttgaccgtaaactaagcgtgtaata

SEQ ID NO: 248080 - DNA, 30 bp, Artificial Sequence
  Synthetic oligonucleotide
caaatgttataattatccaggtgtgtaata

SEQ ID NO: 248081 - DNA, 30 bp, Artificial Sequence
  Synthetic oligonucleotide
tataatggcgaggaaacgtaggttgtaata

SEQ ID NO: 248082 - DNA, 30 bp, Artificial Sequence
  Synthetic oligonucleotide
gcaagatataatgatcgcgagtttgtaata

SEQ ID NO: 248083 - DNA, 30 bp, Artificial Sequence
  Synthetic oligonucleotide
cactcacgcggaaaacatctcggcttaata

SEQ ID NO: 248084 - DNA, 30 bp, Artificial Sequence
  Synthetic oligonucleotide
cagtgcgtcgtggtcggggcttcgttaata

SEQ ID NO: 248085 - DNA, 30 bp, Artificial Sequence
  Synthetic oligonucleotide
cagcagtgctgaggctactgtaggttaata

SEQ ID NO: 248086 - DNA, 30 bp, Artificial Sequence
  Synthetic oligonucleotide
aaccgaagtcctcacattagatctttaata

SEQ ID NO: 248087 - DNA, 30 bp, Artificial Sequence
  Synthetic oligonucleotide
cgatcatatatacgtgcgctgcttttaata

SEQ ID NO: 248088 - DNA, 30 bp, Artificial Sequence
  Synthetic oligonucleotide
tattgtaggctactggagggaagacacata

SEQ ID NO: 248089 - DNA, 30 bp, Artificial Sequence
  Synthetic oligonucleotide
gccgtcgagtactggtaaggatagcacata

SEQ ID NO: 248090 - DNA, 30 bp, Artificial Sequence
  Synthetic oligonucleotide
ctcggggtatacgggccatgagcgcacata

SEQ ID NO: 248091 - DNA, 30 bp, Artificial Sequence
  Synthetic oligonucleotide
cgtagtccgccgagcagattgattcacata

SEQ ID NO: 248092 - DNA, 30 bp, Artificial Sequence
  Synthetic oligonucleotide
taacaatcccgcgtggacatgttagacata

SEQ ID NO: 248093 - DNA, 30 bp, Artificial Sequence
  Synthetic oligonucleotide
tagtgaagggatttttatagcgaggacata

SEQ ID NO: 248094 - DNA, 30 bp, Artificial Sequence
  Synthetic oligonucleotide
aatgccggtactatgtaaataattgacata

SEQ ID NO: 248095 - DNA, 30 bp, Artificial Sequence
  Synthetic oligonucleotide
gagagaagattccttctgtaaacctacata

SEQ ID NO: 248096 - DNA, 30 bp, Artificial Sequence
  Synthetic oligonucleotide
gttcacagagacaaggtcgacggctacata

SEQ ID NO: 248097 - DNA, 30 bp, Artificial Sequence
  Synthetic oligonucleotide
aattaggcgataataatgcggaagtacata

SEQ ID NO: 248098 - DNA, 30 bp, Artificial Sequence
  Synthetic oligonucleotide
actatgtactgatgacaatggcggtacata

SEQ ID NO: 248099 - DNA, 30 bp, Artificial Sequence
  Synthetic oligonucleotide
attcgatgctatggaaaccatgaaaccata

SEQ ID NO: 248100 - DNA, 30 bp, Artificial Sequence
  Synthetic oligonucleotide
gacatagaaattgcaaacccggcaaccata

SEQ ID NO: 248101 - DNA, 30 bp, Artificial Sequence
  Synthetic oligonucleotide
atgtacgggatctaagagaagatcaccata

SEQ ID NO: 248102 - DNA, 30 bp, Artificial Sequence
  Synthetic oligonucleotide
gtactctgtcccgcgggtcggctcaccata

SEQ ID NO: 248103 - DNA, 30 bp, Artificial Sequence
  Synthetic oligonucleotide
gagtctcgtgggaagaccgcgtggaccata

SEQ ID NO: 248104 - DNA, 30 bp, Artificial Sequence
  Synthetic oligonucleotide
gggcggacgtggctctgtggtacacccata

SEQ ID NO: 248105 - DNA, 30 bp, Artificial Sequence
  Synthetic oligonucleotide
cttcgtgtgcaaaccgagataatacccata

SEQ ID NO: 248106 - DNA, 30 bp, Artificial Sequence
  Synthetic oligonucleotide
gcgtgcactcgtcttcaaccgtagcccata

SEQ ID NO: 248107 - DNA, 30 bp, Artificial Sequence
  Synthetic oligonucleotide
tttgtaaatcaccgcgcttgaatgcccata

SEQ ID NO: 248108 - DNA, 30 bp, Artificial Sequence
  Synthetic oligonucleotide
gcaaaagtggatagtatagtagtgcccata

SEQ ID NO: 248109 - DNA, 30 bp, Artificial Sequence
  Synthetic oligonucleotide
ccgcggtgaacctcgagatgtactcccata

SEQ ID NO: 248110 - DNA, 30 bp, Artificial Sequence
  Synthetic oligonucleotide
gttgaaatgggtgatacaggcaaagccata

SEQ ID NO: 248111 - DNA, 30 bp, Artificial Sequence
  Synthetic oligonucleotide
ggtactatactaattttacagcacgccata

SEQ ID NO: 248112 - DNA, 30 bp, Artificial Sequence
  Synthetic oligonucleotide
ggataggtataccaccaccgtggcgccata

SEQ ID NO: 248113 - DNA, 30 bp, Artificial Sequence
  Synthetic oligonucleotide
actatgccggttcaagaaagccaggccata

SEQ ID NO: 248114 - DNA, 30 bp, Artificial Sequence
  Synthetic oligonucleotide
gggggatataatcgcttgaattatgccata

SEQ ID NO: 248115 - DNA, 30 bp, Artificial Sequence
  Synthetic oligonucleotide
ccatctattttgttagcaagaactgccata

SEQ ID NO: 248116 - DNA, 30 bp, Artificial Sequence
  Synthetic oligonucleotide
agctccgtcatgtctacgatcactgccata

SEQ ID NO: 248117 - DNA, 30 bp, Artificial Sequence
  Synthetic oligonucleotide
acttcgaagcgggccaatgcgttctccata

SEQ ID NO: 248118 - DNA, 30 bp, Artificial Sequence
  Synthetic oligonucleotide
gtgataatggttacaagtacgtggtccata

SEQ ID NO: 248119 - DNA, 30 bp, Artificial Sequence
  Synthetic oligonucleotide
cacagctcttcggactcgtggaacagcata

SEQ ID NO: 248120 - DNA, 30 bp, Artificial Sequence
  Synthetic oligonucleotide
tcctcataggcccggtcctcctcgagcata

SEQ ID NO: 248121 - DNA, 30 bp, Artificial Sequence
  Synthetic oligonucleotide
cttggtcctgagaaaagatttaatagcata

SEQ ID NO: 248122 - DNA, 30 bp, Artificial Sequence
  Synthetic oligonucleotide
catgagagtggcactccgagccgacgcata

SEQ ID NO: 248123 - DNA, 30 bp, Artificial Sequence
  Synthetic oligonucleotide
caatctgaaagccagcgccacggccgcata

SEQ ID NO: 248124 - DNA, 30 bp, Artificial Sequence
  Synthetic oligonucleotide
ggatttggttgaaccttgagtacgcgcata

SEQ ID NO: 248125 - DNA, 30 bp, Artificial Sequence
  Synthetic oligonucleotide
ttccatggatgcactcggaaacggcgcata

SEQ ID NO: 248126 - DNA, 30 bp, Artificial Sequence
  Synthetic oligonucleotide
cgctttctgaggcctcagcccagtcgcata

SEQ ID NO: 248127 - DNA, 30 bp, Artificial Sequence
  Synthetic oligonucleotide
gatctacgtaggctcgcaacgcgtcgcata

SEQ ID NO: 248128 - DNA, 30 bp, Artificial Sequence
  Synthetic oligonucleotide
gcattcagattgctttgactttcaggcata

SEQ ID NO: 248129 - DNA, 30 bp, Artificial Sequence
  Synthetic oligonucleotide
cgcgcggggcaaataacgcttctaggcata

SEQ ID NO: 248130 - DNA, 30 bp, Artificial Sequence
  Synthetic oligonucleotide
tgtaattgcactataaccggggtaggcata

SEQ ID NO: 248131 - DNA, 30 bp, Artificial Sequence
  Synthetic oligonucleotide
agtagtaaacgaatctttaagaacggcata

SEQ ID NO: 248132 - DNA, 30 bp, Artificial Sequence
  Synthetic oligonucleotide
gatgaagcagtgagcattgtctagggcata

SEQ ID NO: 248133 - DNA, 30 bp, Artificial Sequence
  Synthetic oligonucleotide
ttaggctatgctttcattatgacgggcata

SEQ ID NO: 248134 - DNA, 30 bp, Artificial Sequence
  Synthetic oligonucleotide
gaggcctctggcgcgatcaacgggggcata

SEQ ID NO: 248135 - DNA, 30 bp, Artificial Sequence
  Synthetic oligonucleotide
cgtttatttaaatcaaccagaatgggcata

SEQ ID NO: 248136 - DNA, 30 bp, Artificial Sequence
  Synthetic oligonucleotide
taagtaggatattgggtacagtaatgcata

SEQ ID NO: 248137 - DNA, 30 bp, Artificial Sequence
  Synthetic oligonucleotide
gagatcgggtttcgatcgcgctgatgcata

SEQ ID NO: 248138 - DNA, 30 bp, Artificial Sequence
  Synthetic oligonucleotide
ggttagtgctgcaaaccgcaaatatgcata

SEQ ID NO: 248139 - DNA, 30 bp, Artificial Sequence
  Synthetic oligonucleotide
cagtgacatgtaaattcaatgccctgcata

SEQ ID NO: 248140 - DNA, 30 bp, Artificial Sequence
  Synthetic oligonucleotide
acgtggctatcgtaactctgcagttgcata

SEQ ID NO: 248141 - DNA, 30 bp, Artificial Sequence
  Synthetic oligonucleotide
gcacagacagcgatatggccgggttgcata

SEQ ID NO: 248142 - DNA, 30 bp, Artificial Sequence
  Synthetic oligonucleotide
gtgcaatccaaacgtacccgtgtaatcata

SEQ ID NO: 248143 - DNA, 30 bp, Artificial Sequence
  Synthetic oligonucleotide
tgtaggggtttcgattatgtgcgcatcata

SEQ ID NO: 248144 - DNA, 30 bp, Artificial Sequence
  Synthetic oligonucleotide
gacattgcatcaactgtagagatcatcata

SEQ ID NO: 248145 - DNA, 30 bp, Artificial Sequence
  Synthetic oligonucleotide
gtgttactactgactttaatcaagatcata

SEQ ID NO: 248146 - DNA, 30 bp, Artificial Sequence
  Synthetic oligonucleotide
ggcacccaaaatctaaatgacgggatcata

SEQ ID NO: 248147 - DNA, 30 bp, Artificial Sequence
  Synthetic oligonucleotide
tgtatacgtagggtcagttacggtatcata

SEQ ID NO: 248148 - DNA, 30 bp, Artificial Sequence
  Synthetic oligonucleotide
ggtccaacagaccaataggtattcctcata

SEQ ID NO: 248149 - DNA, 30 bp, Artificial Sequence
  Synthetic oligonucleotide
acaagcggatgtatggagcaaacgctcata

SEQ ID NO: 248150 - DNA, 30 bp, Artificial Sequence
  Synthetic oligonucleotide
gaattactcaggggataggatgggctcata

SEQ ID NO: 248151 - DNA, 30 bp, Artificial Sequence
  Synthetic oligonucleotide
gtaatcgttaagggtaagatcactctcata

SEQ ID NO: 248152 - DNA, 30 bp, Artificial Sequence
  Synthetic oligonucleotide
gaaaaatctcgcatggtagaacccgtcata

SEQ ID NO: 248153 - DNA, 30 bp, Artificial Sequence
  Synthetic oligonucleotide
tgtgaatgtctaaaatgaaagcgcgtcata

SEQ ID NO: 248154 - DNA, 30 bp, Artificial Sequence
  Synthetic oligonucleotide
cttgtcattcggtgggattatgtcgtcata

SEQ ID NO: 248155 - DNA, 30 bp, Artificial Sequence
  Synthetic oligonucleotide
ctaaagctctgaacctcacaatttgtcata

SEQ ID NO: 248156 - DNA, 30 bp, Artificial Sequence
  Synthetic oligonucleotide
gacaagtgacttgatagttttcaattcata

SEQ ID NO: 248157 - DNA, 30 bp, Artificial Sequence
  Synthetic oligonucleotide
cgagattagtttcaaagctctgcattcata

SEQ ID NO: 248158 - DNA, 30 bp, Artificial Sequence
  Synthetic oligonucleotide
tagctacaaaactcatgtattcgattcata

SEQ ID NO: 248159 - DNA, 30 bp, Artificial Sequence
  Synthetic oligonucleotide
gaatgtacgtctacacaatcacgcttcata

SEQ ID NO: 248160 - DNA, 30 bp, Artificial Sequence
  Synthetic oligonucleotide
cgatgctgtaaaagaagattctgcttcata

SEQ ID NO: 248161 - DNA, 30 bp, Artificial Sequence
  Synthetic oligonucleotide
gccgagagttcaagcttcagcttcttcata

SEQ ID NO: 248162 - DNA, 30 bp, Artificial Sequence
  Synthetic oligonucleotide
ccgcaatgagagttctcctggcagttcata

SEQ ID NO: 248163 - DNA, 30 bp, Artificial Sequence
  Synthetic oligonucleotide
tgaggatttcggaacaactaggcgttcata

SEQ ID NO: 248164 - DNA, 30 bp, Artificial Sequence
  Synthetic oligonucleotide
gatgataaaggttgcaattggcatttcata

SEQ ID NO: 248165 - DNA, 30 bp, Artificial Sequence
  Synthetic oligonucleotide
atggagtaggcgcgcaccgggtatttcata

SEQ ID NO: 248166 - DNA, 30 bp, Artificial Sequence
  Synthetic oligonucleotide
agaagagttgagacttgaatcagtttcata

SEQ ID NO: 248167 - DNA, 30 bp, Artificial Sequence
  Synthetic oligonucleotide
tgctctattcagggctcggtgccaaagata

SEQ ID NO: 248168 - DNA, 30 bp, Artificial Sequence
  Synthetic oligonucleotide
cagtgccttctaggcacagattcaaagata

SEQ ID NO: 248169 - DNA, 30 bp, Artificial Sequence
  Synthetic oligonucleotide
ggggcctatcacatttcaaggtgaaagata

SEQ ID NO: 248170 - DNA, 30 bp, Artificial Sequence
  Synthetic oligonucleotide
tcagaacgacaacacgcgggcgtaaagata

SEQ ID NO: 248171 - DNA, 26 bp, Artificial Sequence
  Synthetic oligonucleotide
ggcacgttggtctacagacgaagata

SEQ ID NO: 248172 - DNA, 30 bp, Artificial Sequence
  Synthetic oligonucleotide
tgcataccgtatcatatggttacacagata

SEQ ID NO: 248173 - DNA, 30 bp, Artificial Sequence
  Synthetic oligonucleotide
cctccgcacctggtctagctgcgacagata

SEQ ID NO: 248174 - DNA, 30 bp, Artificial Sequence
  Synthetic oligonucleotide
tcattgaggctaattatcgatacccagata

SEQ ID NO: 248175 - DNA, 30 bp, Artificial Sequence
  Synthetic oligonucleotide
actgcaaaggctcataaacaatcccagata

SEQ ID NO: 248176 - DNA, 30 bp, Artificial Sequence
  Synthetic oligonucleotide
agagagaaatgtaaatgcaggacgcagata

SEQ ID NO: 248177 - DNA, 30 bp, Artificial Sequence
  Synthetic oligonucleotide
aatagcgcgtagagggtaattcttcagata

SEQ ID NO: 248178 - DNA, 30 bp, Artificial Sequence
  Synthetic oligonucleotide
tttcgtacttagcacgttatacaagagata

SEQ ID NO: 248179 - DNA, 30 bp, Artificial Sequence
  Synthetic oligonucleotide
acgtagtaaacttattagggagctgagata

SEQ ID NO: 248180 - DNA, 30 bp, Artificial Sequence
  Synthetic oligonucleotide
gacggactcttcaatcgtcaaacatagata

SEQ ID NO: 248181 - DNA, 30 bp, Artificial Sequence
  Synthetic oligonucleotide
ccgcatgctcgtgaactacttatctagata

SEQ ID NO: 248182 - DNA, 30 bp, Artificial Sequence
  Synthetic oligonucleotide
acttggatacacagttgataagtctagata

SEQ ID NO: 248183 - DNA, 30 bp, Artificial Sequence
  Synthetic oligonucleotide
gcgtgccacgctgtctctatctggtagata

SEQ ID NO: 248184 - DNA, 30 bp, Artificial Sequence
  Synthetic oligonucleotide
ttacggatcgtgaatgaccgcatgtagata

SEQ ID NO: 248185 - DNA, 30 bp, Artificial Sequence
  Synthetic oligonucleotide
ttaacaattgtgcatagagaagtgtagata

SEQ ID NO: 248186 - DNA, 30 bp, Artificial Sequence
  Synthetic oligonucleotide
acgtccctccctgatggctggtcttagata

SEQ ID NO: 248187 - DNA, 30 bp, Artificial Sequence
  Synthetic oligonucleotide
gctaaggggaaaatatcttcaagttagata

SEQ ID NO: 248188 - DNA, 30 bp, Artificial Sequence
  Synthetic oligonucleotide
cgccacccacgaccagcttacataacgata

SEQ ID NO: 248189 - DNA, 30 bp, Artificial Sequence
  Synthetic oligonucleotide
gatggtataaatcgaagtgcagacacgata

SEQ ID NO: 248190 - DNA, 30 bp, Artificial Sequence
  Synthetic oligonucleotide
gacagcgatacgtaccgtggtctcacgata

SEQ ID NO: 248191 - DNA, 30 bp, Artificial Sequence
  Synthetic oligonucleotide
tgcgatccggtatcggctctgagtacgata

SEQ ID NO: 248192 - DNA, 30 bp, Artificial Sequence
  Synthetic oligonucleotide
ggaccgctatgggtatgctggagaccgata

SEQ ID NO: 248193 - DNA, 30 bp, Artificial Sequence
  Synthetic oligonucleotide
atagcctgagggactcgccgtataccgata

SEQ ID NO: 248194 - DNA, 30 bp, Artificial Sequence
  Synthetic oligonucleotide
ggttcattaaattcaagagcagcgccgata

SEQ ID NO: 248195 - DNA, 30 bp, Artificial Sequence
  Synthetic oligonucleotide
aacaggggggccttccgcccatacgcgata

SEQ ID NO: 248196 - DNA, 30 bp, Artificial Sequence
  Synthetic oligonucleotide
taactttggacgtcttcgagcctggcgata

SEQ ID NO: 248197 - DNA, 30 bp, Artificial Sequence
  Synthetic oligonucleotide
ttctgtcgtttaaacgcggggaatgcgata

SEQ ID NO: 248198 - DNA, 30 bp, Artificial Sequence
  Synthetic oligonucleotide
atgtgttgacatatcacttacctctcgata

SEQ ID NO: 248199 - DNA, 30 bp, Artificial Sequence
  Synthetic oligonucleotide
atcctactccgtaggaatccggcgtcgata

SEQ ID NO: 248200 - DNA, 30 bp, Artificial Sequence
  Synthetic oligonucleotide
ggtaattagggatgtgcatgtaaaaggata

SEQ ID NO: 248201 - DNA, 30 bp, Artificial Sequence
  Synthetic oligonucleotide
tggcgtatcatggggtgaggacgaaggata

SEQ ID NO: 248202 - DNA, 30 bp, Artificial Sequence
  Synthetic oligonucleotide
cggcatccccatgatcgttggggaaggata

SEQ ID NO: 248203 - DNA, 30 bp, Artificial Sequence
  Synthetic oligonucleotide
atcgacgaggacctgatccctgtaaggata

SEQ ID NO: 248204 - DNA, 30 bp, Artificial Sequence
  Synthetic oligonucleotide
cgcttaacacattccatccaacgcaggata

SEQ ID NO: 248205 - DNA, 30 bp, Artificial Sequence
  Synthetic oligonucleotide
gacttgcttcgacgatacagcctgaggata

SEQ ID NO: 248206 - DNA, 30 bp, Artificial Sequence
  Synthetic oligonucleotide
tgtgggcaccattatttgccgttgaggata

SEQ ID NO: 248207 - DNA, 30 bp, Artificial Sequence
  Synthetic oligonucleotide
ggtccccgaacactagtatccactaggata

SEQ ID NO: 248208 - DNA, 30 bp, Artificial Sequence
  Synthetic oligonucleotide
ccgggtagcgataggtattccggtaggata

SEQ ID NO: 248209 - DNA, 30 bp, Artificial Sequence
  Synthetic oligonucleotide
gcaaagccgtaatacaaccgaattaggata

SEQ ID NO: 248210 - DNA, 30 bp, Artificial Sequence
  Synthetic oligonucleotide
gaagacagagtactggactggtcacggata

SEQ ID NO: 248211 - DNA, 30 bp, Artificial Sequence
  Synthetic oligonucleotide
ctggtaccagcccgatccggaaaccggata

SEQ ID NO: 248212 - DNA, 30 bp, Artificial Sequence
  Synthetic oligonucleotide
taaacattcgcatcgcctattcagcggata

SEQ ID NO: 248213 - DNA, 30 bp, Artificial Sequence
  Synthetic oligonucleotide
accaacatccgaagtcaggacgatcggata

SEQ ID NO: 248214 - DNA, 30 bp, Artificial Sequence
  Synthetic oligonucleotide
aatgaggcaaattcaaagcatgttcggata

SEQ ID NO: 248215 - DNA, 30 bp, Artificial Sequence
  Synthetic oligonucleotide
tatgattgggtagaatgcatagcagggata

SEQ ID NO: 248216 - DNA, 30 bp, Artificial Sequence
  Synthetic oligonucleotide
ataatttgagttgacgcccaagtcgggata

SEQ ID NO: 248217 - DNA, 30 bp, Artificial Sequence
  Synthetic oligonucleotide
tagtataagtggggagaggagtcggggata

SEQ ID NO: 248218 - DNA, 30 bp, Artificial Sequence
  Synthetic oligonucleotide
ttctgggcgggtccgtaaacttcggggata

SEQ ID NO: 248219 - DNA, 30 bp, Artificial Sequence
  Synthetic oligonucleotide
gtagttccctggtaatctaaagtggggata

SEQ ID NO: 248220 - DNA, 30 bp, Artificial Sequence
  Synthetic oligonucleotide
tagattcgtcgttctgtggtcttggggata

SEQ ID NO: 248221 - DNA, 30 bp, Artificial Sequence
  Synthetic oligonucleotide
agtcatagtgggaccgtgtcccgtgggata

SEQ ID NO: 248222 - DNA, 30 bp, Artificial Sequence
  Synthetic oligonucleotide
gatatctatatcccggagagaggatggata

SEQ ID NO: 248223 - DNA, 30 bp, Artificial Sequence
  Synthetic oligonucleotide
aatagtcataataggttgccccgctggata

SEQ ID NO: 248224 - DNA, 30 bp, Artificial Sequence
  Synthetic oligonucleotide
caaatcaaaaaggggaaaaggcgctggata

SEQ ID NO: 248225 - DNA, 30 bp, Artificial Sequence
  Synthetic oligonucleotide
taaagcacggttataaaggcacagtggata

SEQ ID NO: 248226 - DNA, 30 bp, Artificial Sequence
  Synthetic oligonucleotide
agctatcaaattgaactcccactgtggata

SEQ ID NO: 248227 - DNA, 30 bp, Artificial Sequence
  Synthetic oligonucleotide
ccagtgtataggccctgggtactgtggata

SEQ ID NO: 248228 - DNA, 30 bp, Artificial Sequence
  Synthetic oligonucleotide
tgaagaattcagcttagttggtccatgata

SEQ ID NO: 248229 - DNA, 30 bp, Artificial Sequence
  Synthetic oligonucleotide
cgtgaacgcctgccaattttagcgatgata

SEQ ID NO: 248230 - DNA, 30 bp, Artificial Sequence
  Synthetic oligonucleotide
cacggttggggttacctgtcaatgatgata

SEQ ID NO: 248231 - DNA, 30 bp, Artificial Sequence
  Synthetic oligonucleotide
cgggtccactgcgcaattgacttgatgata

SEQ ID NO: 248232 - DNA, 30 bp, Artificial Sequence
  Synthetic oligonucleotide
atgaacaacgctggaccatcctatatgata

SEQ ID NO: 248233 - DNA, 30 bp, Artificial Sequence
  Synthetic oligonucleotide
agcgggcaagcgtacattccgtatatgata

SEQ ID NO: 248234 - DNA, 30 bp, Artificial Sequence
  Synthetic oligonucleotide
ttcctaatcgaggaggaattgcctatgata

SEQ ID NO: 248235 - DNA, 30 bp, Artificial Sequence
  Synthetic oligonucleotide
cattgacacgtagcacgccatctactgata

SEQ ID NO: 248236 - DNA, 30 bp, Artificial Sequence
  Synthetic oligonucleotide
caaggaaggaggatttcacgagacctgata

SEQ ID NO: 248237 - DNA, 30 bp, Artificial Sequence
  Synthetic oligonucleotide
gggatcaggaactgataagattacctgata

SEQ ID NO: 248238 - DNA, 30 bp, Artificial Sequence
  Synthetic oligonucleotide
ctattgggagaccttcccctcgtcctgata

SEQ ID NO: 248239 - DNA, 30 bp, Artificial Sequence
  Synthetic oligonucleotide
aggcctgtcgccaggagttttgcgctgata

SEQ ID NO: 248240 - DNA, 30 bp, Artificial Sequence
  Synthetic oligonucleotide
tgtgaactgccattaatatcgttgctgata

SEQ ID NO: 248241 - DNA, 30 bp, Artificial Sequence
  Synthetic oligonucleotide
ctcgggccaggcagtatagggaaagtgata

SEQ ID NO: 248242 - DNA, 30 bp, Artificial Sequence
  Synthetic oligonucleotide
tcgcaatccgctaatgattaaaaggtgata

SEQ ID NO: 248243 - DNA, 30 bp, Artificial Sequence
  Synthetic oligonucleotide
ggcaccccactaagatgctccgtggtgata

SEQ ID NO: 248244 - DNA, 30 bp, Artificial Sequence
  Synthetic oligonucleotide
ggaaaacccataggatataggcgtgtgata

SEQ ID NO: 248245 - DNA, 30 bp, Artificial Sequence
  Synthetic oligonucleotide
cctgaggtcaaagcgtctggctagttgata

SEQ ID NO: 248246 - DNA, 30 bp, Artificial Sequence
  Synthetic oligonucleotide
atcccttgttagactttcgcccttttgata

SEQ ID NO: 248247 - DNA, 30 bp, Artificial Sequence
  Synthetic oligonucleotide
gggtgagttagtaggaacgtttgaaatata

SEQ ID NO: 248248 - DNA, 30 bp, Artificial Sequence
  Synthetic oligonucleotide
gaaaagcaaataatgaatgtgttaaatata

SEQ ID NO: 248249 - DNA, 30 bp, Artificial Sequence
  Synthetic oligonucleotide
gctaacttaacatcattttactagaatata

SEQ ID NO: 248250 - DNA, 30 bp, Artificial Sequence
  Synthetic oligonucleotide
gcatgatgcagcgaaggcgctacgaatata

SEQ ID NO: 248251 - DNA, 30 bp, Artificial Sequence
  Synthetic oligonucleotide
tgagctggtccccaactcggcgcgaatata

SEQ ID NO: 248252 - DNA, 30 bp, Artificial Sequence
  Synthetic oligonucleotide
tccgaacacgagttgctcagcgggaatata

SEQ ID NO: 248253 - DNA, 30 bp, Artificial Sequence
  Synthetic oligonucleotide
ggtcttgctccgttcatgtttgttaatata

SEQ ID NO: 248254 - DNA, 30 bp, Artificial Sequence
  Synthetic oligonucleotide
gacggtcgtcgtcgggattagacacatata

SEQ ID NO: 248255 - DNA, 30 bp, Artificial Sequence
  Synthetic oligonucleotide
gggtcgcatgggtccttcgagccacatata

SEQ ID NO: 248256 - DNA, 30 bp, Artificial Sequence
  Synthetic oligonucleotide
atccactgattgaataatagcctacatata

SEQ ID NO: 248257 - DNA, 30 bp, Artificial Sequence
  Synthetic oligonucleotide
agcagtatcggacttaagacaccccatata

SEQ ID NO: 248258 - DNA, 30 bp, Artificial Sequence
  Synthetic oligonucleotide
atatcgggggtgccagacagtatgcatata

SEQ ID NO: 248259 - DNA, 30 bp, Artificial Sequence
  Synthetic oligonucleotide
agcttcggtactgctggttatgtgcatata

SEQ ID NO: 248260 - DNA, 30 bp, Artificial Sequence
  Synthetic oligonucleotide
aggaagtgtagagaattagtacaagatata

SEQ ID NO: 248261 - DNA, 30 bp, Artificial Sequence
  Synthetic oligonucleotide
tatgcaataaagcaatattcgtcagatata

SEQ ID NO: 248262 - DNA, 30 bp, Artificial Sequence
  Synthetic oligonucleotide
aagacaccgtggatggtaggccgagatata

SEQ ID NO: 248263 - DNA, 30 bp, Artificial Sequence
  Synthetic oligonucleotide
aagaagcgcgtgctaagatggggagatata

SEQ ID NO: 248264 - DNA, 30 bp, Artificial Sequence
  Synthetic oligonucleotide
gagagagtttagccaaaggattgcgatata

SEQ ID NO: 248265 - DNA, 30 bp, Artificial Sequence
  Synthetic oligonucleotide
gccactctgaaggtgggaacgttcgatata

SEQ ID NO: 248266 - DNA, 30 bp, Artificial Sequence
  Synthetic oligonucleotide
tcactaatgagcaattggttatcggatata

SEQ ID NO: 248267 - DNA, 30 bp, Artificial Sequence
  Synthetic oligonucleotide
ccaaccacgctgagttgtaagcgggatata

SEQ ID NO: 248268 - DNA, 30 bp, Artificial Sequence
  Synthetic oligonucleotide
ccaagctagtacgttgggctcggggatata

SEQ ID NO: 248269 - DNA, 30 bp, Artificial Sequence
  Synthetic oligonucleotide
tgatcaaagcgtgaagcgatttctgatata

SEQ ID NO: 248270 - DNA, 30 bp, Artificial Sequence
  Synthetic oligonucleotide
tataggggatgatgacaaatgcgtgatata

SEQ ID NO: 248271 - DNA, 30 bp, Artificial Sequence
  Synthetic oligonucleotide
tcagcatggccacgtcatacgtttgatata

SEQ ID NO: 248272 - DNA, 30 bp, Artificial Sequence
  Synthetic oligonucleotide
tagacactcgggcgagtatcagactatata

SEQ ID NO: 248273 - DNA, 30 bp, Artificial Sequence
  Synthetic oligonucleotide
taggcggataggcttcgcgtgtattatata

SEQ ID NO: 248274 - DNA, 30 bp, Artificial Sequence
  Synthetic oligonucleotide
atgttaggtcctgagggtgggtcttatata

SEQ ID NO: 248275 - DNA, 30 bp, Artificial Sequence
  Synthetic oligonucleotide
aggtggaagcagcacctcagaaaaactata

SEQ ID NO: 248276 - DNA, 30 bp, Artificial Sequence
  Synthetic oligonucleotide
tgtatgcattcgcatcacgtccgaactata

SEQ ID NO: 248277 - DNA, 30 bp, Artificial Sequence
  Synthetic oligonucleotide
agtctagagcatacctgcaccaagactata

SEQ ID NO: 248278 - DNA, 30 bp, Artificial Sequence
  Synthetic oligonucleotide
gaagaaatggaggctttaagatcgactata

SEQ ID NO: 248279 - DNA, 30 bp, Artificial Sequence
  Synthetic oligonucleotide
tgtgaaggtgcacttcagccaagtactata

SEQ ID NO: 248280 - DNA, 30 bp, Artificial Sequence
  Synthetic oligonucleotide
tatcttgagtgcagtttgcaatttactata

SEQ ID NO: 248281 - DNA, 30 bp, Artificial Sequence
  Synthetic oligonucleotide
cacaaggcgtaaggtcggcggtagcctata

SEQ ID NO: 248282 - DNA, 30 bp, Artificial Sequence
  Synthetic oligonucleotide
ccgcacgagtctcggaacctgaacgctata

SEQ ID NO: 248283 - DNA, 30 bp, Artificial Sequence
  Synthetic oligonucleotide
atgggtccagatctcagagagcccgctata

SEQ ID NO: 248284 - DNA, 30 bp, Artificial Sequence
  Synthetic oligonucleotide
aacctacgtagatgagatcatgaggctata

SEQ ID NO: 248285 - DNA, 30 bp, Artificial Sequence
  Synthetic oligonucleotide
ttcacgtgcgtaaatatgttttcggctata

SEQ ID NO: 248286 - DNA, 30 bp, Artificial Sequence
  Synthetic oligonucleotide
ccaaagacctataaagtacgagctgctata

SEQ ID NO: 248287 - DNA, 30 bp, Artificial Sequence
  Synthetic oligonucleotide
gaaacgagccccagagatggctgatctata

SEQ ID NO: 248288 - DNA, 29 bp, Artificial Sequence
  Synthetic oligonucleotide
tagcgtcaggagagaggttcagctctata

SEQ ID NO: 248289 - DNA, 30 bp, Artificial Sequence
  Synthetic oligonucleotide
caatcctaaaagtcgttccgccgctctata

SEQ ID NO: 248290 - DNA, 30 bp, Artificial Sequence
  Synthetic oligonucleotide
gcctaaggccttattcccgacctctctata

SEQ ID NO: 248291 - DNA, 30 bp, Artificial Sequence
  Synthetic oligonucleotide
ccaaccagcttatttccgtctgtctctata

SEQ ID NO: 248292 - DNA, 30 bp, Artificial Sequence
  Synthetic oligonucleotide
gtgaaggtatggcaacgcaatgagtctata

SEQ ID NO: 248293 - DNA, 30 bp, Artificial Sequence
  Synthetic oligonucleotide
agtaaatgagtgcgaatacacgattctata

SEQ ID NO: 248294 - DNA, 30 bp, Artificial Sequence
  Synthetic oligonucleotide
ggtttgatggtcgttgagggatgttctata

SEQ ID NO: 248295 - DNA, 30 bp, Artificial Sequence
  Synthetic oligonucleotide
ctattgcgctggcgctcataagaaagtata

SEQ ID NO: 248296 - DNA, 30 bp, Artificial Sequence
  Synthetic oligonucleotide
gggatcataatcctcccggcgtgaagtata

SEQ ID NO: 248297 - DNA, 30 bp, Artificial Sequence
  Synthetic oligonucleotide
cgaattgatcggggttaacgttgaagtata

SEQ ID NO: 248298 - DNA, 30 bp, Artificial Sequence
  Synthetic oligonucleotide
caacggtcgccagtagtaaaggacagtata

SEQ ID NO: 248299 - DNA, 30 bp, Artificial Sequence
  Synthetic oligonucleotide
ggcaacattaggcattttttcaggagtata

SEQ ID NO: 248300 - DNA, 30 bp, Artificial Sequence
  Synthetic oligonucleotide
tttgctccgagaaattagaacgtgagtata

SEQ ID NO: 248301 - DNA, 30 bp, Artificial Sequence
  Synthetic oligonucleotide
taagaaccgaaggacggtagtttgagtata

SEQ ID NO: 248302 - DNA, 30 bp, Artificial Sequence
  Synthetic oligonucleotide
aagggagtgggagcaacagcacatagtata

SEQ ID NO: 248303 - DNA, 30 bp, Artificial Sequence
  Synthetic oligonucleotide
tcacggtcggctgtataattagatagtata

SEQ ID NO: 248304 - DNA, 30 bp, Artificial Sequence
  Synthetic oligonucleotide
aaaggggataagacagtcatacgtagtata

SEQ ID NO: 248305 - DNA, 30 bp, Artificial Sequence
  Synthetic oligonucleotide
gtcctggggcactggcgtcttaggcgtata

SEQ ID NO: 248306 - DNA, 30 bp, Artificial Sequence
  Synthetic oligonucleotide
gacaaatagtgtgactcatgtatgcgtata

SEQ ID NO: 248307 - DNA, 30 bp, Artificial Sequence
  Synthetic oligonucleotide
cacataacagatcagatctgaaatcgtata

SEQ ID NO: 248308 - DNA, 30 bp, Artificial Sequence
  Synthetic oligonucleotide
gttccaagagaactacactgggctcgtata

SEQ ID NO: 248309 - DNA, 30 bp, Artificial Sequence
  Synthetic oligonucleotide
ttgtatacaatatgagcaaattgaggtata

SEQ ID NO: 248310 - DNA, 30 bp, Artificial Sequence
  Synthetic oligonucleotide
gctacaggattaatacataagacgggtata

SEQ ID NO: 248311 - DNA, 30 bp, Artificial Sequence
  Synthetic oligonucleotide
tggcagggtggtaagttactgtggggtata

SEQ ID NO: 248312 - DNA, 30 bp, Artificial Sequence
  Synthetic oligonucleotide
agatctacgtttcggaagatgtatggtata

SEQ ID NO: 248313 - DNA, 30 bp, Artificial Sequence
  Synthetic oligonucleotide
acagggcccagattacgctccgctggtata

SEQ ID NO: 248314 - DNA, 30 bp, Artificial Sequence
  Synthetic oligonucleotide
acggcccgatcgtagcctcgggttggtata

SEQ ID NO: 248315 - DNA, 30 bp, Artificial Sequence
  Synthetic oligonucleotide
gtaatagggtcagtggagcttgaatgtata

SEQ ID NO: 248316 - DNA, 30 bp, Artificial Sequence
  Synthetic oligonucleotide
tcgcaggtcaattcacctgcagattgtata

SEQ ID NO: 248317 - DNA, 30 bp, Artificial Sequence
  Synthetic oligonucleotide
aggctgcggaatacaagtatggtttgtata

SEQ ID NO: 248318 - DNA, 30 bp, Artificial Sequence
  Synthetic oligonucleotide
ggccgaggtgcacggatcgattcaattata

SEQ ID NO: 248319 - DNA, 30 bp, Artificial Sequence
  Synthetic oligonucleotide
ggagcttagaaatagtgaatgagaattata

SEQ ID NO: 248320 - DNA, 30 bp, Artificial Sequence
  Synthetic oligonucleotide
aactggctccctgtgatgtacggcattata

SEQ ID NO: 248321 - DNA, 29 bp, Artificial Sequence
  Synthetic oligonucleotide
tccctggatacgttgggccattcattata

SEQ ID NO: 248322 - DNA, 30 bp, Artificial Sequence
  Synthetic oligonucleotide
taggcgtggaagtaagtttcttagattata

SEQ ID NO: 248323 - DNA, 30 bp, Artificial Sequence
  Synthetic oligonucleotide
gactataaatagaaggtatagctgattata

SEQ ID NO: 248324 - DNA, 30 bp, Artificial Sequence
  Synthetic oligonucleotide
gatggacgagaccccgtaacctatattata

SEQ ID NO: 248325 - DNA, 30 bp, Artificial Sequence
  Synthetic oligonucleotide
atccattcgatgatggtgtagtgtattata

SEQ ID NO: 248326 - DNA, 30 bp, Artificial Sequence
  Synthetic oligonucleotide
aagtaaagacaagatagtcaagaccttata

SEQ ID NO: 248327 - DNA, 30 bp, Artificial Sequence
  Synthetic oligonucleotide
acctgataagcgtaaagttccgcccttata

SEQ ID NO: 248328 - DNA, 30 bp, Artificial Sequence
  Synthetic oligonucleotide
ttcgtcaacgcccgtgggtctcgccttata

SEQ ID NO: 248329 - DNA, 30 bp, Artificial Sequence
  Synthetic oligonucleotide
tataagtagggctagggttccaggcttata

SEQ ID NO: 248330 - DNA, 30 bp, Artificial Sequence
  Synthetic oligonucleotide
aaatcgccccttcggcctgcccggcttata

SEQ ID NO: 248331 - DNA, 30 bp, Artificial Sequence
  Synthetic oligonucleotide
catacgacgcacgaacacgagattcttata

SEQ ID NO: 248332 - DNA, 30 bp, Artificial Sequence
  Synthetic oligonucleotide
gtagggcgctgcattatgaaggcggttata

SEQ ID NO: 248333 - DNA, 30 bp, Artificial Sequence
  Synthetic oligonucleotide
tcttcgggaacgggcaacacctcggttata

SEQ ID NO: 248334 - DNA, 30 bp, Artificial Sequence
  Synthetic oligonucleotide
aacggtgaagcggcagagttgtgggttata

SEQ ID NO: 248335 - DNA, 30 bp, Artificial Sequence
  Synthetic oligonucleotide
gatgaggctatagtagcatttgaatttata

SEQ ID NO: 248336 - DNA, 30 bp, Artificial Sequence
  Synthetic oligonucleotide
ctttagtaggggtgatgaaactcatttata

SEQ ID NO: 248337 - DNA, 30 bp, Artificial Sequence
  Synthetic oligonucleotide
gtgattatcgaatctatgcataactttata

SEQ ID NO: 248338 - DNA, 30 bp, Artificial Sequence
  Synthetic oligonucleotide
cttaaggtcagatgcgcgaaaacgtttata

SEQ ID NO: 248339 - DNA, 30 bp, Artificial Sequence
  Synthetic oligonucleotide
ggtggtcatccgacgagttcggtgtttata

SEQ ID NO: 248340 - DNA, 30 bp, Artificial Sequence
  Synthetic oligonucleotide
ttagcggtcttattcgccgtggtgtttata

SEQ ID NO: 248341 - DNA, 30 bp, Artificial Sequence
  Synthetic oligonucleotide
acacgcgaagcagtttcgacaatttttata

SEQ ID NO: 248342 - DNA, 30 bp, Artificial Sequence
  Synthetic oligonucleotide
agtgttactgattatgaggtacgaaaacta

SEQ ID NO: 248343 - DNA, 30 bp, Artificial Sequence
  Synthetic oligonucleotide
atgcaggaaattgccatcatctacaaacta

SEQ ID NO: 248344 - DNA, 30 bp, Artificial Sequence
  Synthetic oligonucleotide
tatgtacgataggaaccacccgccaaacta

SEQ ID NO: 248345 - DNA, 31 bp, Artificial Sequence
  Synthetic oligonucleotide
tgggttggctatccacgtaacaagcaaacta

SEQ ID NO: 248346 - DNA, 30 bp, Artificial Sequence
  Synthetic oligonucleotide
ggagagtctgtgatatattggagcaaacta

SEQ ID NO: 248347 - DNA, 30 bp, Artificial Sequence
  Synthetic oligonucleotide
gcaacgtcgcctagtcaacgagcgaaacta

SEQ ID NO: 248348 - DNA, 30 bp, Artificial Sequence
  Synthetic oligonucleotide
tatgtgcggtgccacaaaagcaataaacta

SEQ ID NO: 248349 - DNA, 30 bp, Artificial Sequence
  Synthetic oligonucleotide
ggttacaaggtaggtagccatactaaacta

SEQ ID NO: 248350 - DNA, 30 bp, Artificial Sequence
  Synthetic oligonucleotide
aaggaaccgtaagccagttttaaacaacta

SEQ ID NO: 248351 - DNA, 30 bp, Artificial Sequence
  Synthetic oligonucleotide
gctggaggcatgggaaaccaaccacaacta

SEQ ID NO: 248352 - DNA, 30 bp, Artificial Sequence
  Synthetic oligonucleotide
ggctaggcctttagctggaaccggcaacta

SEQ ID NO: 248353 - DNA, 30 bp, Artificial Sequence
  Synthetic oligonucleotide
tagggagaatatgttccgaatcggcaacta

SEQ ID NO: 248354 - DNA, 30 bp, Artificial Sequence
  Synthetic oligonucleotide
tagggccgtattaaaaactcataagaacta

SEQ ID NO: 248355 - DNA, 30 bp, Artificial Sequence
  Synthetic oligonucleotide
ctggtcgagcaattagcacccgcagaacta

SEQ ID NO: 248356 - DNA, 30 bp, Artificial Sequence
  Synthetic oligonucleotide
ttcccatcaaatacaacgaattgagaacta

SEQ ID NO: 248357 - DNA, 30 bp, Artificial Sequence
  Synthetic oligonucleotide
tctcaggtggcttgaggatacaaggaacta

SEQ ID NO: 248358 - DNA, 30 bp, Artificial Sequence
  Synthetic oligonucleotide
gaacttgaacgtaaggaacgcgttgaacta

SEQ ID NO: 248359 - DNA, 30 bp, Artificial Sequence
  Synthetic oligonucleotide
gccagaatacaaccgtcacgtaaataacta

SEQ ID NO: 248360 - DNA, 30 bp, Artificial Sequence
  Synthetic oligonucleotide
tcacgattggccgtcatattccaataacta

SEQ ID NO: 248361 - DNA, 30 bp, Artificial Sequence
  Synthetic oligonucleotide
gcagactgctgagggttttgcggataacta

SEQ ID NO: 248362 - DNA, 30 bp, Artificial Sequence
  Synthetic oligonucleotide
ccgtcggtttaccacctgcgaaagtaacta

SEQ ID NO: 248363 - DNA, 30 bp, Artificial Sequence
  Synthetic oligonucleotide
caatggcgtccgttattgtcaggcacacta

SEQ ID NO: 248364 - DNA, 30 bp, Artificial Sequence
  Synthetic oligonucleotide
gcgggggttttaatagctagcctcacacta

SEQ ID NO: 248365 - DNA, 30 bp, Artificial Sequence
  Synthetic oligonucleotide
cgacacggctcaagcagctgatagacacta

SEQ ID NO: 248366 - DNA, 30 bp, Artificial Sequence
  Synthetic oligonucleotide
acttacgtacgggggtccgggaggacacta

SEQ ID NO: 248367 - DNA, 30 bp, Artificial Sequence
  Synthetic oligonucleotide
attagttcgttaaacctgaaggtgacacta

SEQ ID NO: 248368 - DNA, 30 bp, Artificial Sequence
  Synthetic oligonucleotide
gggacccctgttacggctagctttacacta

SEQ ID NO: 248369 - DNA, 30 bp, Artificial Sequence
  Synthetic oligonucleotide
gtaaaccagcgatctgcatacacaccacta

SEQ ID NO: 248370 - DNA, 30 bp, Artificial Sequence
  Synthetic oligonucleotide
tcattatcttgatgtactcggataccacta

SEQ ID NO: 248371 - DNA, 30 bp, Artificial Sequence
  Synthetic oligonucleotide
gttactgttcacacggctacgcatccacta

SEQ ID NO: 248372 - DNA, 30 bp, Artificial Sequence
  Synthetic oligonucleotide
gactggtggtgagtatactcctaagcacta

SEQ ID NO: 248373 - DNA, 30 bp, Artificial Sequence
  Synthetic oligonucleotide
ggtagtgcatctataaccatgtaagcacta

SEQ ID NO: 248374 - DNA, 30 bp, Artificial Sequence
  Synthetic oligonucleotide
ctaagaaggtaccttgttcgaacagcacta

SEQ ID NO: 248375 - DNA, 30 bp, Artificial Sequence
  Synthetic oligonucleotide
cgggctgattcgctaacgtcgacagcacta

SEQ ID NO: 248376 - DNA, 30 bp, Artificial Sequence
  Synthetic oligonucleotide
cctaatccatctcgtagaaaagcagcacta

SEQ ID NO: 248377 - DNA, 30 bp, Artificial Sequence
  Synthetic oligonucleotide
aaagagcataatgatgtgggtcgagcacta

SEQ ID NO: 248378 - DNA, 30 bp, Artificial Sequence
  Synthetic oligonucleotide
acttggcagggctatagaacgctagcacta

SEQ ID NO: 248379 - DNA, 30 bp, Artificial Sequence
  Synthetic oligonucleotide
atatttgccgaactaacaagggcggcacta

SEQ ID NO: 248380 - DNA, 30 bp, Artificial Sequence
  Synthetic oligonucleotide
acgcgattagagcacatcgacgatgcacta

SEQ ID NO: 248381 - DNA, 30 bp, Artificial Sequence
  Synthetic oligonucleotide
taggagtgctaaaggcccagaacatcacta

SEQ ID NO: 248382 - DNA, 30 bp, Artificial Sequence
  Synthetic oligonucleotide
gcattaatcgtcttttttctatgctcacta

SEQ ID NO: 248383 - DNA, 30 bp, Artificial Sequence
  Synthetic oligonucleotide
ctgcaaatcgaaaaagtaacggtctcacta

SEQ ID NO: 248384 - DNA, 30 bp, Artificial Sequence
  Synthetic oligonucleotide
cgatactcgtacaggatattttattcacta

SEQ ID NO: 248385 - DNA, 30 bp, Artificial Sequence
  Synthetic oligonucleotide
ttcgcccagaccaacagttcgaaaagacta

SEQ ID NO: 248386 - DNA, 30 bp, Artificial Sequence
  Synthetic oligonucleotide
attgtgtgattcccgatacacagcagacta

SEQ ID NO: 248387 - DNA, 30 bp, Artificial Sequence
  Synthetic oligonucleotide
tagctcaggtgcgaaaagactgtgagacta

SEQ ID NO: 248388 - DNA, 30 bp, Artificial Sequence
  Synthetic oligonucleotide
tcagcacagatttaaggtcggtatagacta

SEQ ID NO: 248389 - DNA, 31 bp, Artificial Sequence
  Synthetic oligonucleotide
agttctcaaacccgccgaaacttaacgacta

SEQ ID NO: 248390 - DNA, 30 bp, Artificial Sequence
  Synthetic oligonucleotide
ggccaccgccttcagcgccttcgacgacta

SEQ ID NO: 248391 - DNA, 30 bp, Artificial Sequence
  Synthetic oligonucleotide
ccgggcactatagtgccagacatacgacta

SEQ ID NO: 248392 - DNA, 30 bp, Artificial Sequence
  Synthetic oligonucleotide
atgacgcattgaggttaacaggtacgacta

SEQ ID NO: 248393 - DNA, 30 bp, Artificial Sequence
  Synthetic oligonucleotide
ctgggcaataaaggtttccgattccgacta

SEQ ID NO: 248394 - DNA, 30 bp, Artificial Sequence
  Synthetic oligonucleotide
ttcatgtgcgttgattacttagagcgacta

SEQ ID NO: 248395 - DNA, 30 bp, Artificial Sequence
  Synthetic oligonucleotide
aataagttaataaatgtgtaattgcgacta

SEQ ID NO: 248396 - DNA, 30 bp, Artificial Sequence
  Synthetic oligonucleotide
cccgacgtcactattaacacggagggacta

SEQ ID NO: 248397 - DNA, 30 bp, Artificial Sequence
  Synthetic oligonucleotide
aggttacatcactatatcccgcctggacta

SEQ ID NO: 248398 - DNA, 30 bp, Artificial Sequence
  Synthetic oligonucleotide
ccgagggttcaacacggcgctcgtggacta

SEQ ID NO: 248399 - DNA, 30 bp, Artificial Sequence
  Synthetic oligonucleotide
ggagtcacacttgtgggcacccttggacta

SEQ ID NO: 248400 - DNA, 30 bp, Artificial Sequence
  Synthetic oligonucleotide
gatgaggaatggctatcaacgtttggacta

SEQ ID NO: 248401 - DNA, 30 bp, Artificial Sequence
  Synthetic oligonucleotide
cgggcgtcttgtccatatatgcactgacta

SEQ ID NO: 248402 - DNA, 30 bp, Artificial Sequence
  Synthetic oligonucleotide
cttggagatatcgcgatcaagcagtgacta

SEQ ID NO: 248403 - DNA, 30 bp, Artificial Sequence
  Synthetic oligonucleotide
tatgcctccgggaattgtaccgtgtgacta

SEQ ID NO: 248404 - DNA, 30 bp, Artificial Sequence
  Synthetic oligonucleotide
gttactatagctgtgatgattgcttgacta

SEQ ID NO: 248405 - DNA, 30 bp, Artificial Sequence
  Synthetic oligonucleotide
ctaggttcgtttttttcagaagcgatacta

SEQ ID NO: 248406 - DNA, 30 bp, Artificial Sequence
  Synthetic oligonucleotide
tcccaggtcttatagtgcgaacggatacta

SEQ ID NO: 248407 - DNA, 30 bp, Artificial Sequence
  Synthetic oligonucleotide
ttttcatcactaatcggaagagctatacta

SEQ ID NO: 248408 - DNA, 30 bp, Artificial Sequence
  Synthetic oligonucleotide
ggacggcatgcacgtaaagtagcactacta

SEQ ID NO: 248409 - DNA, 30 bp, Artificial Sequence
  Synthetic oligonucleotide
cgttatccaattggtattaatttcctacta

SEQ ID NO: 248410 - DNA, 30 bp, Artificial Sequence
  Synthetic oligonucleotide
gctgacgagccattaggccatttgctacta

SEQ ID NO: 248411 - DNA, 30 bp, Artificial Sequence
  Synthetic oligonucleotide
aacttatgcgccaggttagactctctacta

SEQ ID NO: 248412 - DNA, 30 bp, Artificial Sequence
  Synthetic oligonucleotide
tccgagtctccgcccgtaaaataagtacta

SEQ ID NO: 248413 - DNA, 30 bp, Artificial Sequence
  Synthetic oligonucleotide
aagatctatgtaagtatttcgccagtacta

SEQ ID NO: 248414 - DNA, 30 bp, Artificial Sequence
  Synthetic oligonucleotide
aggtgcggccatttcgttagactagtacta

SEQ ID NO: 248415 - DNA, 30 bp, Artificial Sequence
  Synthetic oligonucleotide
ttacaatccatgtgacacgtattggtacta

SEQ ID NO: 248416 - DNA, 30 bp, Artificial Sequence
  Synthetic oligonucleotide
actgtgcgtcggggacagttcactgtacta

SEQ ID NO: 248417 - DNA, 30 bp, Artificial Sequence
  Synthetic oligonucleotide
tcaggtgcgaactgcggctatattgtacta

SEQ ID NO: 248418 - DNA, 30 bp, Artificial Sequence
  Synthetic oligonucleotide
gataagacgtacggctttcagcaattacta

SEQ ID NO: 248419 - DNA, 30 bp, Artificial Sequence
  Synthetic oligonucleotide
ttcgcaacatcaacagggggtcgattacta

SEQ ID NO: 248420 - DNA, 30 bp, Artificial Sequence
  Synthetic oligonucleotide
aaagtgtatttttggtacagatgattacta

SEQ ID NO: 248421 - DNA, 30 bp, Artificial Sequence
  Synthetic oligonucleotide
ccgttccttcagaatacggttaacttacta

SEQ ID NO: 248422 - DNA, 30 bp, Artificial Sequence
  Synthetic oligonucleotide
aatatgaatgatgagtgcagagcgttacta

SEQ ID NO: 248423 - DNA, 30 bp, Artificial Sequence
  Synthetic oligonucleotide
ctacggatacggtgaaggattactttacta

SEQ ID NO: 248424 - DNA, 30 bp, Artificial Sequence
  Synthetic oligonucleotide
ctacagggttcaggaacgcactgtttacta

SEQ ID NO: 248425 - DNA, 30 bp, Artificial Sequence
  Synthetic oligonucleotide
taacgacccagattagagagccaaaaccta

SEQ ID NO: 248426 - DNA, 30 bp, Artificial Sequence
  Synthetic oligonucleotide
atctgcggtgtaaatgccgatttaaaccta

SEQ ID NO: 248427 - DNA, 30 bp, Artificial Sequence
  Synthetic oligonucleotide
gatcagtactgccgatcagttaacaaccta

SEQ ID NO: 248428 - DNA, 30 bp, Artificial Sequence
  Synthetic oligonucleotide
ccgtcgcggtatccacatcgcttcaaccta

SEQ ID NO: 248429 - DNA, 30 bp, Artificial Sequence
  Synthetic oligonucleotide
tatttgtgaacctctgcggacaagaaccta

SEQ ID NO: 248430 - DNA, 30 bp, Artificial Sequence
  Synthetic oligonucleotide
gggcgcgttactgaggtccatcggaaccta

SEQ ID NO: 248431 - DNA, 30 bp, Artificial Sequence
  Synthetic oligonucleotide
agaaccgtagatcgcggatttcctaaccta

SEQ ID NO: 248432 - DNA, 30 bp, Artificial Sequence
  Synthetic oligonucleotide
gtcatgccccggtataggggatctaaccta

SEQ ID NO: 248433 - DNA, 30 bp, Artificial Sequence
  Synthetic oligonucleotide
atggaaagctttatactaatactacaccta

SEQ ID NO: 248434 - DNA, 30 bp, Artificial Sequence
  Synthetic oligonucleotide
taccgagacgcaagacgtcggacgcaccta

SEQ ID NO: 248435 - DNA, 30 bp, Artificial Sequence
  Synthetic oligonucleotide
cgggacggcccaggtataaattggcaccta

SEQ ID NO: 248436 - DNA, 30 bp, Artificial Sequence
  Synthetic oligonucleotide
acttcacccggagtaacggattaggaccta

SEQ ID NO: 248437 - DNA, 30 bp, Artificial Sequence
  Synthetic oligonucleotide
acccaacaaatataaaggacctgggaccta

SEQ ID NO: 248438 - DNA, 30 bp, Artificial Sequence
  Synthetic oligonucleotide
agctcggtcaagcttcgatttatggaccta

SEQ ID NO: 248439 - DNA, 30 bp, Artificial Sequence
  Synthetic oligonucleotide
gcaaagtttagccaatactatgtataccta

SEQ ID NO: 248440 - DNA, 30 bp, Artificial Sequence
  Synthetic oligonucleotide
agcagcgctggccttttatctcagtaccta

SEQ ID NO: 248441 - DNA, 30 bp, Artificial Sequence
  Synthetic oligonucleotide
gcagggaaactacggacatttgcgtaccta

SEQ ID NO: 248442 - DNA, 30 bp, Artificial Sequence
  Synthetic oligonucleotide
cacagtgttgacaggtagttgtcttaccta

SEQ ID NO: 248443 - DNA, 30 bp, Artificial Sequence
  Synthetic oligonucleotide
tagggatcttgttataaggtatgttaccta

SEQ ID NO: 248444 - DNA, 30 bp, Artificial Sequence
  Synthetic oligonucleotide
taggggaccccagttttagggtgttaccta

SEQ ID NO: 248445 - DNA, 30 bp, Artificial Sequence
  Synthetic oligonucleotide
gtaatcgctgggcccgctaggccaacccta

SEQ ID NO: 248446 - DNA, 30 bp, Artificial Sequence
  Synthetic oligonucleotide
tcggaaccaaacctctccaaaataacccta

SEQ ID NO: 248447 - DNA, 30 bp, Artificial Sequence
  Synthetic oligonucleotide
gtgtcagcctctcatcgccaagacacccta

SEQ ID NO: 248448 - DNA, 30 bp, Artificial Sequence
  Synthetic oligonucleotide
atacatatgactttaaagtgtcgcacccta

SEQ ID NO: 248449 - DNA, 30 bp, Artificial Sequence
  Synthetic oligonucleotide
acgtcagtgcgttttctacgcggcacccta

SEQ ID NO: 248450 - DNA, 30 bp, Artificial Sequence
  Synthetic oligonucleotide
gagcacgtcgataccgatttccagacccta

SEQ ID NO: 248451 - DNA, 30 bp, Artificial Sequence
  Synthetic oligonucleotide
cggtgggtgttcctgccctcaccgacccta

SEQ ID NO: 248452 - DNA, 30 bp, Artificial Sequence
  Synthetic oligonucleotide
cctggatcggaatcttgccagaggacccta

SEQ ID NO: 248453 - DNA, 30 bp, Artificial Sequence
  Synthetic oligonucleotide
cctggcttcggtatccggggtctgacccta

SEQ ID NO: 248454 - DNA, 30 bp, Artificial Sequence
  Synthetic oligonucleotide
tggcatgatatagcgtcgggtagcccccta

SEQ ID NO: 248455 - DNA, 30 bp, Artificial Sequence
  Synthetic oligonucleotide
ctggccatgatatcagtcggccaagcccta

SEQ ID NO: 248456 - DNA, 30 bp, Artificial Sequence
  Synthetic oligonucleotide
caaacaaacgtggacacagatcccgcccta

SEQ ID NO: 248457 - DNA, 30 bp, Artificial Sequence
  Synthetic oligonucleotide
aagcgtgtctaatacctgtcatgatcccta

SEQ ID NO: 248458 - DNA, 30 bp, Artificial Sequence
  Synthetic oligonucleotide
gctgtcatggtattcccgtcatcctcccta

SEQ ID NO: 248459 - DNA, 30 bp, Artificial Sequence
  Synthetic oligonucleotide
ttagacagaggtccatgaccattaagccta

SEQ ID NO: 248460 - DNA, 30 bp, Artificial Sequence
  Synthetic oligonucleotide
gaagggcggaatgcgggtactttcagccta

SEQ ID NO: 248461 - DNA, 30 bp, Artificial Sequence
  Synthetic oligonucleotide
ctgcgtggggtctgaacacagcagagccta

SEQ ID NO: 248462 - DNA, 30 bp, Artificial Sequence
  Synthetic oligonucleotide
cgtctctattttagcatttcatatagccta

SEQ ID NO: 248463 - DNA, 30 bp, Artificial Sequence
  Synthetic oligonucleotide
cggttcatgattagcgcgatttttagccta

SEQ ID NO: 248464 - DNA, 30 bp, Artificial Sequence
  Synthetic oligonucleotide
aggacatatccctacgtgcaactacgccta

SEQ ID NO: 248465 - DNA, 30 bp, Artificial Sequence
  Synthetic oligonucleotide
tctgcactgataagacatcgtcgccgccta

SEQ ID NO: 248466 - DNA, 30 bp, Artificial Sequence
  Synthetic oligonucleotide
ccccgcgtcggactagccagcgacggccta

SEQ ID NO: 248467 - DNA, 30 bp, Artificial Sequence
  Synthetic oligonucleotide
ttaggatccgtatcccatacaaccggccta

SEQ ID NO: 248468 - DNA, 30 bp, Artificial Sequence
  Synthetic oligonucleotide
cacttcacacaatcagtacctaagggccta

SEQ ID NO: 248469 - DNA, 29 bp, Artificial Sequence
  Synthetic oligonucleotide
tcaggtgctggtaccatagtaatggccta

SEQ ID NO: 248470 - DNA, 30 bp, Artificial Sequence
  Synthetic oligonucleotide
tggcgttctcgttggtctaaaggtggccta

SEQ ID NO: 248471 - DNA, 30 bp, Artificial Sequence
  Synthetic oligonucleotide
ctgagtgacaggtaggggaagtactgccta

SEQ ID NO: 248472 - DNA, 30 bp, Artificial Sequence
  Synthetic oligonucleotide
ttccgaagttcggtgaggtcgtactgccta

SEQ ID NO: 248473 - DNA, 31 bp, Artificial Sequence
  Synthetic oligonucleotide
gcatatgatgctttggacgagctcctgccta

SEQ ID NO: 248474 - DNA, 30 bp, Artificial Sequence
  Synthetic oligonucleotide
gaaggaatgcggttcgttaatatctgccta

SEQ ID NO: 248475 - DNA, 30 bp, Artificial Sequence
  Synthetic oligonucleotide
caaaacttgacatacttgggcacgtgccta

SEQ ID NO: 248476 - DNA, 30 bp, Artificial Sequence
  Synthetic oligonucleotide
actaatgtcattgcgggatataattgccta

SEQ ID NO: 248477 - DNA, 30 bp, Artificial Sequence
  Synthetic oligonucleotide
acgcagatcgatataacgactacaatccta

SEQ ID NO: 248478 - DNA, 30 bp, Artificial Sequence
  Synthetic oligonucleotide
tgcaaggccttgggataaattacaatccta

SEQ ID NO: 248479 - DNA, 30 bp, Artificial Sequence
  Synthetic oligonucleotide
cgatagggaggtagcacgtacataatccta

SEQ ID NO: 248480 - DNA, 30 bp, Artificial Sequence
  Synthetic oligonucleotide
cctatagggaggtacagattgtgcatccta

SEQ ID NO: 248481 - DNA, 30 bp, Artificial Sequence
  Synthetic oligonucleotide
gcgtcaacaggatctttgaacccgatccta

SEQ ID NO: 248482 - DNA, 30 bp, Artificial Sequence
  Synthetic oligonucleotide
caagaatcaattatgtgagtgctgatccta

SEQ ID NO: 248483 - DNA, 30 bp, Artificial Sequence
  Synthetic oligonucleotide
cgtccacccagcgctgtaagagtgatccta

SEQ ID NO: 248484 - DNA, 30 bp, Artificial Sequence
  Synthetic oligonucleotide
tagtcgggtctcaggggtttcgctctccta

SEQ ID NO: 248485 - DNA, 30 bp, Artificial Sequence
  Synthetic oligonucleotide
tcttcgtccgaaaaagtagacaacgtccta

SEQ ID NO: 248486 - DNA, 30 bp, Artificial Sequence
  Synthetic oligonucleotide
taattatcgcctatgtgtacgcgtgtccta

SEQ ID NO: 248487 - DNA, 30 bp, Artificial Sequence
  Synthetic oligonucleotide
ggtaaagtgcgacgtgttctatttgtccta

SEQ ID NO: 248488 - DNA, 30 bp, Artificial Sequence
  Synthetic oligonucleotide
tcaggctttcgatggaactgttttgtccta

SEQ ID NO: 248489 - DNA, 30 bp, Artificial Sequence
  Synthetic oligonucleotide
cgaacctggattgagcacaagcaattccta

SEQ ID NO: 248490 - DNA, 30 bp, Artificial Sequence
  Synthetic oligonucleotide
agggcagtcagcccgcacgcttcattccta

SEQ ID NO: 248491 - DNA, 30 bp, Artificial Sequence
  Synthetic oligonucleotide
ggctagaatagtaaactcatggtcttccta

SEQ ID NO: 248492 - DNA, 30 bp, Artificial Sequence
  Synthetic oligonucleotide
ttcggtgagcataaaccagcgatgttccta

SEQ ID NO: 248493 - DNA, 30 bp, Artificial Sequence
  Synthetic oligonucleotide
tactggatcgttcacaatcctgttttccta

SEQ ID NO: 248494 - DNA, 30 bp, Artificial Sequence
  Synthetic oligonucleotide
ttcacataaactccatggtgacaaaagcta

SEQ ID NO: 248495 - DNA, 30 bp, Artificial Sequence
  Synthetic oligonucleotide
atagagatcacacggatgactataaagcta

SEQ ID NO: 248496 - DNA, 30 bp, Artificial Sequence
  Synthetic oligonucleotide
gtaaatttgccgagtcaaggcgccaagcta

SEQ ID NO: 248497 - DNA, 30 bp, Artificial Sequence
  Synthetic oligonucleotide
gtatgcttcgatagctgaatgcgcaagcta

SEQ ID NO: 248498 - DNA, 30 bp, Artificial Sequence
  Synthetic oligonucleotide
atgtcggcgcaaccagagaatagtaagcta

SEQ ID NO: 248499 - DNA, 30 bp, Artificial Sequence
  Synthetic oligonucleotide
tgggcggacatcgctagggtaccacagcta

SEQ ID NO: 248500 - DNA, 30 bp, Artificial Sequence
  Synthetic oligonucleotide
ctgcccgcggggggtagcgtacaccagcta

SEQ ID NO: 248501 - DNA, 30 bp, Artificial Sequence
  Synthetic oligonucleotide
taagcggcaatgtgaactggctaccagcta

SEQ ID NO: 248502 - DNA, 30 bp, Artificial Sequence
  Synthetic oligonucleotide
gaagttagaggtgatataacgtggcagcta

SEQ ID NO: 248503 - DNA, 30 bp, Artificial Sequence
  Synthetic oligonucleotide
cgtggggcatatagtcgaagtgtgcagcta

SEQ ID NO: 248504 - DNA, 30 bp, Artificial Sequence
  Synthetic oligonucleotide
atcaaggcacatgacaggaaaactcagcta

SEQ ID NO: 248505 - DNA, 30 bp, Artificial Sequence
  Synthetic oligonucleotide
gatcagtataacgcattttacaacgagcta

SEQ ID NO: 248506 - DNA, 30 bp, Artificial Sequence
  Synthetic oligonucleotide
tcgatcccctacattcgccagtgcgagcta

SEQ ID NO: 248507 - DNA, 30 bp, Artificial Sequence
  Synthetic oligonucleotide
tattacacggattcatgggtttaggagcta

SEQ ID NO: 248508 - DNA, 30 bp, Artificial Sequence
  Synthetic oligonucleotide
cagtagggattaaacactgcttctgagcta

SEQ ID NO: 248509 - DNA, 30 bp, Artificial Sequence
  Synthetic oligonucleotide
aaaaaatcctctacactggaaattgagcta

SEQ ID NO: 248510 - DNA, 30 bp, Artificial Sequence
  Synthetic oligonucleotide
ggagttcctcagttctccatcggatagcta

SEQ ID NO: 248511 - DNA, 30 bp, Artificial Sequence
  Synthetic oligonucleotide
ttcactggcttatctgcagacgactagcta

SEQ ID NO: 248512 - DNA, 29 bp, Artificial Sequence
  Synthetic oligonucleotide
cagtgtgtaaaaggtactcatcgtagcta

SEQ ID NO: 248513 - DNA, 30 bp, Artificial Sequence
  Synthetic oligonucleotide
acctgacagacccctccggcaaggtagcta

SEQ ID NO: 248514 - DNA, 30 bp, Artificial Sequence
  Synthetic oligonucleotide
tgcgggaagcagcccaataggatttagcta

SEQ ID NO: 248515 - DNA, 30 bp, Artificial Sequence
  Synthetic oligonucleotide
aatgagggtgtctggagcttcccaacgcta

SEQ ID NO: 248516 - DNA, 30 bp, Artificial Sequence
  Synthetic oligonucleotide
tgagccactggacactcgcagataacgcta

SEQ ID NO: 248517 - DNA, 30 bp, Artificial Sequence
  Synthetic oligonucleotide
cagatgacacagtgcccaaggctcacgcta

SEQ ID NO: 248518 - DNA, 30 bp, Artificial Sequence
  Synthetic oligonucleotide
gttactcggatggccaaccgtttcacgcta

SEQ ID NO: 248519 - DNA, 30 bp, Artificial Sequence
  Synthetic oligonucleotide
ggtacgggccatctcgtaatgtggacgcta

SEQ ID NO: 248520 - DNA, 30 bp, Artificial Sequence
  Synthetic oligonucleotide
ggtcggcattattacttatacactacgcta

SEQ ID NO: 248521 - DNA, 30 bp, Artificial Sequence
  Synthetic oligonucleotide
tccgttagatccggttgcgagagtacgcta

SEQ ID NO: 248522 - DNA, 30 bp, Artificial Sequence
  Synthetic oligonucleotide
aaaataagatgctagtaagtacttacgcta

SEQ ID NO: 248523 - DNA, 30 bp, Artificial Sequence
  Synthetic oligonucleotide
aataactagagcgataagcaatacccgcta

SEQ ID NO: 248524 - DNA, 30 bp, Artificial Sequence
  Synthetic oligonucleotide
aacagccagcttgcatgtcgacgtccgcta

SEQ ID NO: 248525 - DNA, 30 bp, Artificial Sequence
  Synthetic oligonucleotide
tggaaatcgttctaaagcttctccgcgcta

SEQ ID NO: 248526 - DNA, 30 bp, Artificial Sequence
  Synthetic oligonucleotide
gagtgaaatgggatacgataacaggcgcta

SEQ ID NO: 248527 - DNA, 30 bp, Artificial Sequence
  Synthetic oligonucleotide
tcatggtaaaatagctgtaacctggcgcta

SEQ ID NO: 248528 - DNA, 30 bp, Artificial Sequence
  Synthetic oligonucleotide
ccaagtagcgtgtggcctaactatgcgcta

SEQ ID NO: 248529 - DNA, 30 bp, Artificial Sequence
  Synthetic oligonucleotide
tctgacaacgtcggcgactagagtgcgcta

SEQ ID NO: 248530 - DNA, 30 bp, Artificial Sequence
  Synthetic oligonucleotide
tcacgatttgttcgatgtttagaatcgcta

SEQ ID NO: 248531 - DNA, 30 bp, Artificial Sequence
  Synthetic oligonucleotide
aagctacgtcttatgcctgatgcatcgcta

SEQ ID NO: 248532 - DNA, 30 bp, Artificial Sequence
  Synthetic oligonucleotide
tgttagtgcatctcatcggctgcatcgcta

SEQ ID NO: 248533 - DNA, 30 bp, Artificial Sequence
  Synthetic oligonucleotide
gaagtagatggcttatttgtgagatcgcta

SEQ ID NO: 248534 - DNA, 30 bp, Artificial Sequence
  Synthetic oligonucleotide
ttttgggtacgaaactccgcaatatcgcta

SEQ ID NO: 248535 - DNA, 30 bp, Artificial Sequence
  Synthetic oligonucleotide
tctcgcgtatcacggagttgcatatcgcta

SEQ ID NO: 248536 - DNA, 30 bp, Artificial Sequence
  Synthetic oligonucleotide
taataagcaggtcacgtgggtcactcgcta

SEQ ID NO: 248537 - DNA, 30 bp, Artificial Sequence
  Synthetic oligonucleotide
gagctaaggagatcaagtcggaaaaggcta

SEQ ID NO: 248538 - DNA, 30 bp, Artificial Sequence
  Synthetic oligonucleotide
gagccgttcagagtcagggttccaaggcta

SEQ ID NO: 248539 - DNA, 30 bp, Artificial Sequence
  Synthetic oligonucleotide
tgcaattgtacgtgaacagtgagcaggcta

SEQ ID NO: 248540 - DNA, 30 bp, Artificial Sequence
  Synthetic oligonucleotide
aatagagtgctaagttctttgagcaggcta

SEQ ID NO: 248541 - DNA, 30 bp, Artificial Sequence
  Synthetic oligonucleotide
cgggatttaataataagaatctagaggcta

SEQ ID NO: 248542 - DNA, 30 bp, Artificial Sequence
  Synthetic oligonucleotide
aataaaaggccagctacaatggcgaggcta

SEQ ID NO: 248543 - DNA, 30 bp, Artificial Sequence
  Synthetic oligonucleotide
ttgaattccgtctgataaagaattaggcta

SEQ ID NO: 248544 - DNA, 30 bp, Artificial Sequence
  Synthetic oligonucleotide
taatgcgaataaagggctggacaagggcta

SEQ ID NO: 248545 - DNA, 30 bp, Artificial Sequence
  Synthetic oligonucleotide
ttctgctacggcgagaccggcccagggcta

SEQ ID NO: 248546 - DNA, 30 bp, Artificial Sequence
  Synthetic oligonucleotide
aatcgcaaaattccgcttaggggagggcta

SEQ ID NO: 248547 - DNA, 30 bp, Artificial Sequence
  Synthetic oligonucleotide
acaattgttggcaaaagtgccctagggcta

SEQ ID NO: 248548 - DNA, 30 bp, Artificial Sequence
  Synthetic oligonucleotide
taaataggagtgaacgatgtgtccgggcta

SEQ ID NO: 248549 - DNA, 30 bp, Artificial Sequence
  Synthetic oligonucleotide
gaagcttaagcaatagtcgagctcgggcta

SEQ ID NO: 248550 - DNA, 30 bp, Artificial Sequence
  Synthetic oligonucleotide
ccaggtattccacttggggttgcatggcta

SEQ ID NO: 248551 - DNA, 30 bp, Artificial Sequence
  Synthetic oligonucleotide
aaaagtaaattccagcaaaagaactggcta

SEQ ID NO: 248552 - DNA, 30 bp, Artificial Sequence
  Synthetic oligonucleotide
aacgactggatgggtgtgtggaattggcta

SEQ ID NO: 248553 - DNA, 30 bp, Artificial Sequence
  Synthetic oligonucleotide
ctggattggaccgaactgaaccgttggcta

SEQ ID NO: 248554 - DNA, 30 bp, Artificial Sequence
  Synthetic oligonucleotide
agcgcagcaagggagtggtttggttggcta

SEQ ID NO: 248555 - DNA, 30 bp, Artificial Sequence
  Synthetic oligonucleotide
agagcacatttatgaaaagaactaatgcta

SEQ ID NO: 248556 - DNA, 30 bp, Artificial Sequence
  Synthetic oligonucleotide
gtttcgacctctgatgacagtgacatgcta

SEQ ID NO: 248557 - DNA, 30 bp, Artificial Sequence
  Synthetic oligonucleotide
tgacgtaccgtaagggagttccccatgcta

SEQ ID NO: 248558 - DNA, 30 bp, Artificial Sequence
  Synthetic oligonucleotide
ttgacgcggtaagatcggaatatactgcta

SEQ ID NO: 248559 - DNA, 30 bp, Artificial Sequence
  Synthetic oligonucleotide
tgcatctggcttttatgagaaatgctgcta

SEQ ID NO: 248560 - DNA, 30 bp, Artificial Sequence
  Synthetic oligonucleotide
gagctgtgtcgccagcgtactgctctgcta

SEQ ID NO: 248561 - DNA, 30 bp, Artificial Sequence
  Synthetic oligonucleotide
agtagccgaccgccaccctggaaagtgcta

SEQ ID NO: 248562 - DNA, 30 bp, Artificial Sequence
  Synthetic oligonucleotide
ctcaaacgaagagcgcgcagcttagtgcta

SEQ ID NO: 248563 - DNA, 30 bp, Artificial Sequence
  Synthetic oligonucleotide
ccggatgtctatcattcaagggacgtgcta

SEQ ID NO: 248564 - DNA, 30 bp, Artificial Sequence
  Synthetic oligonucleotide
taggaaaggaggtcaactttagccgtgcta

SEQ ID NO: 248565 - DNA, 30 bp, Artificial Sequence
  Synthetic oligonucleotide
gggcgtggccggcctttcgacaaggtgcta

SEQ ID NO: 248566 - DNA, 30 bp, Artificial Sequence
  Synthetic oligonucleotide
gcggtggtcttatcgagtcacgctgtgcta

SEQ ID NO: 248567 - DNA, 30 bp, Artificial Sequence
  Synthetic oligonucleotide
tctccatctgactagtatcatattgtgcta

SEQ ID NO: 248568 - DNA, 30 bp, Artificial Sequence
  Synthetic oligonucleotide
accgagcaaaatcaatggggaccattgcta

SEQ ID NO: 248569 - DNA, 30 bp, Artificial Sequence
  Synthetic oligonucleotide
accaggctcccgtcgtctggggccttgcta

SEQ ID NO: 248570 - DNA, 31 bp, Artificial Sequence
  Synthetic oligonucleotide
ctggagaattcacatagagttatagttgcta

SEQ ID NO: 248571 - DNA, 30 bp, Artificial Sequence
  Synthetic oligonucleotide
gctcacgctggtagtaatgaaactttgcta

SEQ ID NO: 248572 - DNA, 30 bp, Artificial Sequence
  Synthetic oligonucleotide
gaacggcttgactagagccgataaaatcta

SEQ ID NO: 248573 - DNA, 30 bp, Artificial Sequence
  Synthetic oligonucleotide
ttttcagtaagaactccacgtttaaatcta

SEQ ID NO: 248574 - DNA, 30 bp, Artificial Sequence
  Synthetic oligonucleotide
atgagaacgagctaaaagcccggtaatcta

SEQ ID NO: 248575 - DNA, 30 bp, Artificial Sequence
  Synthetic oligonucleotide
ctggctattgtatagcagaatctacatcta

SEQ ID NO: 248576 - DNA, 30 bp, Artificial Sequence
  Synthetic oligonucleotide
gactcccgagatgtcaaacatcgtcatcta

SEQ ID NO: 248577 - DNA, 30 bp, Artificial Sequence
  Synthetic oligonucleotide
tggcgtgtgcagcgtcacagtgaagatcta

SEQ ID NO: 248578 - DNA, 30 bp, Artificial Sequence
  Synthetic oligonucleotide
ggtaaagactcaagatcgtgagtagatcta

SEQ ID NO: 248579 - DNA, 30 bp, Artificial Sequence
  Synthetic oligonucleotide
tttggaggagaacgtaacaatgcggatcta

SEQ ID NO: 248580 - DNA, 30 bp, Artificial Sequence
  Synthetic oligonucleotide
tacacgctaggcaactcggatggtgatcta

SEQ ID NO: 248581 - DNA, 30 bp, Artificial Sequence
  Synthetic oligonucleotide
agctcaataggcagagtctcgattgatcta

SEQ ID NO: 248582 - DNA, 30 bp, Artificial Sequence
  Synthetic oligonucleotide
gaagcaacgttcgtccaaaggaaatatcta

SEQ ID NO: 248583 - DNA, 30 bp, Artificial Sequence
  Synthetic oligonucleotide
cgtgttatgctgctcgaacgttcatatcta

SEQ ID NO: 248584 - DNA, 30 bp, Artificial Sequence
  Synthetic oligonucleotide
gagacatgggaaggggcgtgtgactatcta

SEQ ID NO: 248585 - DNA, 30 bp, Artificial Sequence
  Synthetic oligonucleotide
aacgaaaagagatactccttctgctatcta

SEQ ID NO: 248586 - DNA, 30 bp, Artificial Sequence
  Synthetic oligonucleotide
caggaccgggtgttaaaacgttattatcta

SEQ ID NO: 248587 - DNA, 30 bp, Artificial Sequence
  Synthetic oligonucleotide
tcgacccacggtaaactggcccagactcta

SEQ ID NO: 248588 - DNA, 30 bp, Artificial Sequence
  Synthetic oligonucleotide
ctcagtattatttacgagcgagatactcta

SEQ ID NO: 248589 - DNA, 30 bp, Artificial Sequence
  Synthetic oligonucleotide
atagctcagggatcggcttgttggcctcta

SEQ ID NO: 248590 - DNA, 30 bp, Artificial Sequence
  Synthetic oligonucleotide
tgtgaaggaactattccaggggtgcctcta

SEQ ID NO: 248591 - DNA, 30 bp, Artificial Sequence
  Synthetic oligonucleotide
aagtccatctagccacaacaatatcctcta

SEQ ID NO: 248592 - DNA, 30 bp, Artificial Sequence
  Synthetic oligonucleotide
tcagtcttagtggaagccaatcgggctcta

SEQ ID NO: 248593 - DNA, 30 bp, Artificial Sequence
  Synthetic oligonucleotide
ttatcgttacaatcaaggttacttgctcta

SEQ ID NO: 248594 - DNA, 30 bp, Artificial Sequence
  Synthetic oligonucleotide
aactcttggcaacgggggccttaatctcta

SEQ ID NO: 248595 - DNA, 30 bp, Artificial Sequence
  Synthetic oligonucleotide
cgcctggactaccaaaaaaaacggtctcta

SEQ ID NO: 248596 - DNA, 30 bp, Artificial Sequence
  Synthetic oligonucleotide
ctcatgtacacgggttaaaacatgtctcta

SEQ ID NO: 248597 - DNA, 30 bp, Artificial Sequence
  Synthetic oligonucleotide
gtccgctagactctccaatcttgttctcta

SEQ ID NO: 248598 - DNA, 30 bp, Artificial Sequence
  Synthetic oligonucleotide
aatacataaaggaccaggagtcaaagtcta

SEQ ID NO: 248599 - DNA, 30 bp, Artificial Sequence
  Synthetic oligonucleotide
gggagctggcgggtgaccaaccacagtcta

SEQ ID NO: 248600 - DNA, 30 bp, Artificial Sequence
  Synthetic oligonucleotide
tagcaaacccctgctactggagacagtcta

SEQ ID NO: 248601 - DNA, 30 bp, Artificial Sequence
  Synthetic oligonucleotide
cgtaaccaactaagggacactgccagtcta

SEQ ID NO: 248602 - DNA, 30 bp, Artificial Sequence
  Synthetic oligonucleotide
cgatacagctttgaaagggactccagtcta

SEQ ID NO: 248603 - DNA, 30 bp, Artificial Sequence
  Synthetic oligonucleotide
actcaagagcaatatgtcctggtcagtcta

SEQ ID NO: 248604 - DNA, 30 bp, Artificial Sequence
  Synthetic oligonucleotide
cgtcctgtgcagtaagtaaataagagtcta

SEQ ID NO: 248605 - DNA, 30 bp, Artificial Sequence
  Synthetic oligonucleotide
aaggggagggcggtgggagcatagagtcta

SEQ ID NO: 248606 - DNA, 30 bp, Artificial Sequence
  Synthetic oligonucleotide
tgtgcagtcttggaaatggtttcacgtcta

SEQ ID NO: 248607 - DNA, 30 bp, Artificial Sequence
  Synthetic oligonucleotide
aaatataagaacattgccatgatacgtcta

SEQ ID NO: 248608 - DNA, 30 bp, Artificial Sequence
  Synthetic oligonucleotide
aagtctcggtgatgatagcccgaccgtcta

SEQ ID NO: 248609 - DNA, 30 bp, Artificial Sequence
  Synthetic oligonucleotide
tttgctcgtaatgagtatatcccccgtcta

SEQ ID NO: 248610 - DNA, 30 bp, Artificial Sequence
  Synthetic oligonucleotide
ccacgccgaggctgcaatggaacaggtcta

SEQ ID NO: 248611 - DNA, 30 bp, Artificial Sequence
  Synthetic oligonucleotide
atagattcagctcagttgggaagaggtcta

SEQ ID NO: 248612 - DNA, 30 bp, Artificial Sequence
  Synthetic oligonucleotide
gacggttactttgccgcaggacgaggtcta

SEQ ID NO: 248613 - DNA, 30 bp, Artificial Sequence
  Synthetic oligonucleotide
cctaaccaggtaatctaagcaatgggtcta

SEQ ID NO: 248614 - DNA, 30 bp, Artificial Sequence
  Synthetic oligonucleotide
tacatgcgcccaagtggggtcgttggtcta

SEQ ID NO: 248615 - DNA, 30 bp, Artificial Sequence
  Synthetic oligonucleotide
tatttaggggcgtgatgaacgggatgtcta

SEQ ID NO: 248616 - DNA, 30 bp, Artificial Sequence
  Synthetic oligonucleotide
tgcacagctgtcttgtatcaagtatgtcta

SEQ ID NO: 248617 - DNA, 30 bp, Artificial Sequence
  Synthetic oligonucleotide
ggaagtcagttcacgcaatgcctctgtcta

SEQ ID NO: 248618 - DNA, 30 bp, Artificial Sequence
  Synthetic oligonucleotide
aatacacatgagggtaactaagtctgtcta

SEQ ID NO: 248619 - DNA, 30 bp, Artificial Sequence
  Synthetic oligonucleotide
atagggagtaatgtaatctggcagtgtcta

SEQ ID NO: 248620 - DNA, 30 bp, Artificial Sequence
  Synthetic oligonucleotide
cgtacagatgtcgtactgtgcgcttgtcta

SEQ ID NO: 248621 - DNA, 30 bp, Artificial Sequence
  Synthetic oligonucleotide
ttccggtcgaggagaattttaccaattcta

SEQ ID NO: 248622 - DNA, 30 bp, Artificial Sequence
  Synthetic oligonucleotide
aggaacattaaattggcgatccggattcta

SEQ ID NO: 248623 - DNA, 30 bp, Artificial Sequence
  Synthetic oligonucleotide
gccgaggtctcataatgtattcaacttcta

SEQ ID NO: 248624 - DNA, 30 bp, Artificial Sequence
  Synthetic oligonucleotide
ctttcatcggaagggcggggagcacttcta

SEQ ID NO: 248625 - DNA, 30 bp, Artificial Sequence
  Synthetic oligonucleotide
ggtaaagctaatcagtggcagaaagttcta

SEQ ID NO: 248626 - DNA, 30 bp, Artificial Sequence
  Synthetic oligonucleotide
cacccaccgagtaatcactcgacagttcta

SEQ ID NO: 248627 - DNA, 30 bp, Artificial Sequence
  Synthetic oligonucleotide
gtctcaggcctcggtttgtgggcagttcta

SEQ ID NO: 248628 - DNA, 30 bp, Artificial Sequence
  Synthetic oligonucleotide
taacaaaggggactgtgggttggcgttcta

SEQ ID NO: 248629 - DNA, 30 bp, Artificial Sequence
  Synthetic oligonucleotide
tctggcctaacctccacaggagtcgttcta

SEQ ID NO: 248630 - DNA, 30 bp, Artificial Sequence
  Synthetic oligonucleotide
agttgagcgtataggaagggtaaggttcta

SEQ ID NO: 248631 - DNA, 30 bp, Artificial Sequence
  Synthetic oligonucleotide
taggcttcggaaatcagttttggggttcta

SEQ ID NO: 248632 - DNA, 30 bp, Artificial Sequence
  Synthetic oligonucleotide
tggtccaggaatggacaagctaaatttcta

SEQ ID NO: 248633 - DNA, 30 bp, Artificial Sequence
  Synthetic oligonucleotide
acgctctaatccccgaatacagtctttcta

SEQ ID NO: 248634 - DNA, 30 bp, Artificial Sequence
  Synthetic oligonucleotide
aaatagtagatagcgtaacaggcaaaagta

SEQ ID NO: 248635 - DNA, 30 bp, Artificial Sequence
  Synthetic oligonucleotide
tcttgttaaacagtgacgtctcgaaaagta

SEQ ID NO: 248636 - DNA, 30 bp, Artificial Sequence
  Synthetic oligonucleotide
ccggttaaggacattaaagtacgcaaagta

SEQ ID NO: 248637 - DNA, 30 bp, Artificial Sequence
  Synthetic oligonucleotide
tgtgcccttagacgggactgttcgaaagta

SEQ ID NO: 248638 - DNA, 30 bp, Artificial Sequence
  Synthetic oligonucleotide
aaatcagcagagttaatgtttaataaagta

SEQ ID NO: 248639 - DNA, 30 bp, Artificial Sequence
  Synthetic oligonucleotide
gcctgggggcagagtctccgttataaagta

SEQ ID NO: 248640 - DNA, 30 bp, Artificial Sequence
  Synthetic oligonucleotide
cgtaagctttggtaaatcgcaccacaagta

SEQ ID NO: 248641 - DNA, 30 bp, Artificial Sequence
  Synthetic oligonucleotide
cgagtgagggcagcaccatactcacaagta

SEQ ID NO: 248642 - DNA, 30 bp, Artificial Sequence
  Synthetic oligonucleotide
cactgtgacaacagtggttcactacaagta

SEQ ID NO: 248643 - DNA, 30 bp, Artificial Sequence
  Synthetic oligonucleotide
atatgagtatcacgttaaaatgcccaagta

SEQ ID NO: 248644 - DNA, 30 bp, Artificial Sequence
  Synthetic oligonucleotide
gtaattcgcactgcatttcaaaagcaagta

SEQ ID NO: 248645 - DNA, 30 bp, Artificial Sequence
  Synthetic oligonucleotide
aaaaagattacgaacccactcagtcaagta

SEQ ID NO: 248646 - DNA, 30 bp, Artificial Sequence
  Synthetic oligonucleotide
caagtcgagctattgacggtgagagaagta

SEQ ID NO: 248647 - DNA, 30 bp, Artificial Sequence
  Synthetic oligonucleotide
aggcccccaattgacaacgctgtagaagta

SEQ ID NO: 248648 - DNA, 30 bp, Artificial Sequence
  Synthetic oligonucleotide
atatgagtgcccataggtttcaccgaagta

SEQ ID NO: 248649 - DNA, 30 bp, Artificial Sequence
  Synthetic oligonucleotide
aaattcaccggtgtcgtaggttgtgaagta

SEQ ID NO: 248650 - DNA, 30 bp, Artificial Sequence
  Synthetic oligonucleotide
cttttgcgagtgtcagcgaagcttgaagta

SEQ ID NO: 248651 - DNA, 30 bp, Artificial Sequence
  Synthetic oligonucleotide
gaaaataacgtcagtgcagctgtataagta

SEQ ID NO: 248652 - DNA, 30 bp, Artificial Sequence
  Synthetic oligonucleotide
tacagttagtgctcatgttacgtctaagta

SEQ ID NO: 248653 - DNA, 30 bp, Artificial Sequence
  Synthetic oligonucleotide
cgtcgcagtgtttttgtattacagtaagta

SEQ ID NO: 248654 - DNA, 30 bp, Artificial Sequence
  Synthetic oligonucleotide
tcaagctttccatatcggtgtatgtaagta

SEQ ID NO: 248655 - DNA, 30 bp, Artificial Sequence
  Synthetic oligonucleotide
ggccgtcgcggtttcacacctgcttaagta

SEQ ID NO: 248656 - DNA, 30 bp, Artificial Sequence
  Synthetic oligonucleotide
gttaatttagaatgagatcagcaaacagta

SEQ ID NO: 248657 - DNA, 30 bp, Artificial Sequence
  Synthetic oligonucleotide
caagtctaaccaaaggtctgtcgaacagta

SEQ ID NO: 248658 - DNA, 30 bp, Artificial Sequence
  Synthetic oligonucleotide
gggcactacgcaacgtcgaagatcacagta

SEQ ID NO: 248659 - DNA, 30 bp, Artificial Sequence
  Synthetic oligonucleotide
taggacgagtcttccaggaatcagacagta

SEQ ID NO: 248660 - DNA, 30 bp, Artificial Sequence
  Synthetic oligonucleotide
gttcactttgggcaagtagtcaatacagta

SEQ ID NO: 248661 - DNA, 30 bp, Artificial Sequence
  Synthetic oligonucleotide
tgagtccgtttgactggcgagagtacagta

SEQ ID NO: 248662 - DNA, 30 bp, Artificial Sequence
  Synthetic oligonucleotide
tgcaaattacgcgtttaatctgaaccagta

SEQ ID NO: 248663 - DNA, 30 bp, Artificial Sequence
  Synthetic oligonucleotide
caaactccaggtatagagacgtaaccagta

SEQ ID NO: 248664 - DNA, 30 bp, Artificial Sequence
  Synthetic oligonucleotide
ccgtattaggccctggtgagaccaccagta

SEQ ID NO: 248665 - DNA, 30 bp, Artificial Sequence
  Synthetic oligonucleotide
gcttatttcgtggagattaatccaccagta

SEQ ID NO: 248666 - DNA, 30 bp, Artificial Sequence
  Synthetic oligonucleotide
gcggacggtcaggccggttgtgcaccagta

SEQ ID NO: 248667 - DNA, 30 bp, Artificial Sequence
  Synthetic oligonucleotide
gctctgctaaatgggcctgactcaccagta

SEQ ID NO: 248668 - DNA, 30 bp, Artificial Sequence
  Synthetic oligonucleotide
atattgatagttggaaacgtgggaccagta

SEQ ID NO: 248669 - DNA, 30 bp, Artificial Sequence
  Synthetic oligonucleotide
gacccttcgatcaaacgactcgtaccagta

SEQ ID NO: 248670 - DNA, 30 bp, Artificial Sequence
  Synthetic oligonucleotide
atgcggcgggatcggaagcatttcccagta

SEQ ID NO: 248671 - DNA, 30 bp, Artificial Sequence
  Synthetic oligonucleotide
ctcagttgccttatataacgaaagccagta

SEQ ID NO: 248672 - DNA, 30 bp, Artificial Sequence
  Synthetic oligonucleotide
acgaccggaggatttttatattatccagta

SEQ ID NO: 248673 - DNA, 30 bp, Artificial Sequence
  Synthetic oligonucleotide
tcttggcacaaggagacgttggctccagta

SEQ ID NO: 248674 - DNA, 30 bp, Artificial Sequence
  Synthetic oligonucleotide
cggcgtccaataagatgccattcggcagta

SEQ ID NO: 248675 - DNA, 30 bp, Artificial Sequence
  Synthetic oligonucleotide
gtttgaaagaattcggaggagcgggcagta

SEQ ID NO: 248676 - DNA, 30 bp, Artificial Sequence
  Synthetic oligonucleotide
ttgaataggcagtgtgtaaggggatcagta

SEQ ID NO: 248677 - DNA, 30 bp, Artificial Sequence
  Synthetic oligonucleotide
gagtagatagtacattatcctccctcagta

SEQ ID NO: 248678 - DNA, 30 bp, Artificial Sequence
  Synthetic oligonucleotide
aatgtcttgcccaactggataatctcagta

SEQ ID NO: 248679 - DNA, 30 bp, Artificial Sequence
  Synthetic oligonucleotide
gttttggccgtggagattaaatcgtcagta

SEQ ID NO: 248680 - DNA, 30 bp, Artificial Sequence
  Synthetic oligonucleotide
aggtaacgagggtccttagatcggtcagta

SEQ ID NO: 248681 - DNA, 30 bp, Artificial Sequence
  Synthetic oligonucleotide
agcctggcccgatccttcatattgtcagta

SEQ ID NO: 248682 - DNA, 25 bp, Artificial Sequence
  Synthetic oligonucleotide
gacgtatagagtataagtttcagta

SEQ ID NO: 248683 - DNA, 30 bp, Artificial Sequence
  Synthetic oligonucleotide
tgaagctttcaggaatacattacaagagta

SEQ ID NO: 248684 - DNA, 30 bp, Artificial Sequence
  Synthetic oligonucleotide
gaacgtgttgtaccatgtcgtagaagagta

SEQ ID NO: 248685 - DNA, 30 bp, Artificial Sequence
  Synthetic oligonucleotide
atcacggctagtcggttaatccggagagta

SEQ ID NO: 248686 - DNA, 30 bp, Artificial Sequence
  Synthetic oligonucleotide
atgacgtagccgttcggagggtatagagta

SEQ ID NO: 248687 - DNA, 30 bp, Artificial Sequence
  Synthetic oligonucleotide
gaatcgggcaaggatttgcttcgtagagta

SEQ ID NO: 248688 - DNA, 30 bp, Artificial Sequence
  Synthetic oligonucleotide
aataacaagtttggacctcacggtagagta

SEQ ID NO: 248689 - DNA, 30 bp, Artificial Sequence
  Synthetic oligonucleotide
taacgggtaaccgacagattccgacgagta

SEQ ID NO: 248690 - DNA, 30 bp, Artificial Sequence
  Synthetic oligonucleotide
ttgtcattaggatctaggtaagaccgagta

SEQ ID NO: 248691 - DNA, 30 bp, Artificial Sequence
  Synthetic oligonucleotide
gcaggcatggcgtcgtaggcatcccgagta

SEQ ID NO: 248692 - DNA, 30 bp, Artificial Sequence
  Synthetic oligonucleotide
accacccctttcaaacgttagttccgagta

SEQ ID NO: 248693 - DNA, 30 bp, Artificial Sequence
  Synthetic oligonucleotide
tctcggtaaggaattaaaccatagcgagta

SEQ ID NO: 248694 - DNA, 30 bp, Artificial Sequence
  Synthetic oligonucleotide
ggtgaaacccggccctattaatcgcgagta

SEQ ID NO: 248695 - DNA, 30 bp, Artificial Sequence
  Synthetic oligonucleotide
tctggtaagtagtgtaatagtgatcgagta

SEQ ID NO: 248696 - DNA, 30 bp, Artificial Sequence
  Synthetic oligonucleotide
aggaatggtccatgtctttaatgtcgagta

SEQ ID NO: 248697 - DNA, 30 bp, Artificial Sequence
  Synthetic oligonucleotide
caggcgcgcgtggattaatagattcgagta

SEQ ID NO: 248698 - DNA, 30 bp, Artificial Sequence
  Synthetic oligonucleotide
atgagttgaaaactagtattaatcggagta

SEQ ID NO: 248699 - DNA, 30 bp, Artificial Sequence
  Synthetic oligonucleotide
acggagtactaaaagctattagtcggagta

SEQ ID NO: 248700 - DNA, 30 bp, Artificial Sequence
  Synthetic oligonucleotide
ggggaatcacgcggaggttgcaagggagta

SEQ ID NO: 248701 - DNA, 30 bp, Artificial Sequence
  Synthetic oligonucleotide
aaagctcaattgacatgctataagggagta

SEQ ID NO: 248702 - DNA, 30 bp, Artificial Sequence
  Synthetic oligonucleotide
taaggttgacgggcgaccggaccgggagta

SEQ ID NO: 248703 - DNA, 30 bp, Artificial Sequence
  Synthetic oligonucleotide
taacacacgcggcagccgttaccgggagta

SEQ ID NO: 248704 - DNA, 30 bp, Artificial Sequence
  Synthetic oligonucleotide
aatgtaacggtaagcgactgttcgggagta

SEQ ID NO: 248705 - DNA, 30 bp, Artificial Sequence
  Synthetic oligonucleotide
ccacgtttgcccgaagttcaggatggagta

SEQ ID NO: 248706 - DNA, 30 bp, Artificial Sequence
  Synthetic oligonucleotide
gttacgctcagccacaaggggacatgagta

SEQ ID NO: 248707 - DNA, 30 bp, Artificial Sequence
  Synthetic oligonucleotide
ttatgtgtagccatccacgaatactgagta

SEQ ID NO: 248708 - DNA, 30 bp, Artificial Sequence
  Synthetic oligonucleotide
actgaataaacgtagcaacaggcgtgagta

SEQ ID NO: 248709 - DNA, 30 bp, Artificial Sequence
  Synthetic oligonucleotide
atcgtctcagggtagtacggcccttgagta

SEQ ID NO: 248710 - DNA, 30 bp, Artificial Sequence
  Synthetic oligonucleotide
gtctaatcggggatgcacaatataatagta

SEQ ID NO: 248711 - DNA, 30 bp, Artificial Sequence
  Synthetic oligonucleotide
cctgggtgcaacttgatcactttaatagta

SEQ ID NO: 248712 - DNA, 30 bp, Artificial Sequence
  Synthetic oligonucleotide
aagacctccgttcggatagtggccatagta

SEQ ID NO: 248713 - DNA, 30 bp, Artificial Sequence
  Synthetic oligonucleotide
tcgtagcctatcaccggccgccatatagta

SEQ ID NO: 248714 - DNA, 30 bp, Artificial Sequence
  Synthetic oligonucleotide
gcataatgcggagaatttaccactatagta

SEQ ID NO: 248715 - DNA, 30 bp, Artificial Sequence
  Synthetic oligonucleotide
tgtacacggtagggcgggagaagtatagta

SEQ ID NO: 248716 - DNA, 30 bp, Artificial Sequence
  Synthetic oligonucleotide
gttccttgggggggttaggtcccactagta

SEQ ID NO: 248717 - DNA, 30 bp, Artificial Sequence
  Synthetic oligonucleotide
cgtgaaatccccctaatatctggcctagta

SEQ ID NO: 248718 - DNA, 30 bp, Artificial Sequence
  Synthetic oligonucleotide
tagaattgcataggggatggtaaagtagta

SEQ ID NO: 248719 - DNA, 30 bp, Artificial Sequence
  Synthetic oligonucleotide
aatgcaggtgtcactcgttcgtccgtagta

SEQ ID NO: 248720 - DNA, 30 bp, Artificial Sequence
  Synthetic oligonucleotide
aagcgacggatcttctgtcttacggtagta

SEQ ID NO: 248721 - DNA, 30 bp, Artificial Sequence
  Synthetic oligonucleotide
tctggtttgagaccccgctttcgggtagta

SEQ ID NO: 248722 - DNA, 30 bp, Artificial Sequence
  Synthetic oligonucleotide
tgttagtttgatcaaagctcagcattagta

SEQ ID NO: 248723 - DNA, 30 bp, Artificial Sequence
  Synthetic oligonucleotide
gcgctgtggactcgtccccctttattagta

SEQ ID NO: 248724 - DNA, 30 bp, Artificial Sequence
  Synthetic oligonucleotide
tacctattgcacggtcgttctcacttagta

SEQ ID NO: 248725 - DNA, 30 bp, Artificial Sequence
  Synthetic oligonucleotide
ttgaccgcggtaagaattgacagtttagta

SEQ ID NO: 248726 - DNA, 30 bp, Artificial Sequence
  Synthetic oligonucleotide
acatgaaagtcttgacgacatcaaaacgta

SEQ ID NO: 248727 - DNA, 30 bp, Artificial Sequence
  Synthetic oligonucleotide
aaacgtcatatgggcccaaatacaaacgta

SEQ ID NO: 248728 - DNA, 30 bp, Artificial Sequence
  Synthetic oligonucleotide
tggcattgtagcttgaagaactcaaacgta

SEQ ID NO: 248729 - DNA, 30 bp, Artificial Sequence
  Synthetic oligonucleotide
agtggactccggcttacgagagggaacgta

SEQ ID NO: 248730 - DNA, 30 bp, Artificial Sequence
  Synthetic oligonucleotide
ccagggtcgcgtgcaatatccgaccacgta

SEQ ID NO: 248731 - DNA, 30 bp, Artificial Sequence
  Synthetic oligonucleotide
gaggtggcaaccagtgtggtcaggcacgta

SEQ ID NO: 248732 - DNA, 30 bp, Artificial Sequence
  Synthetic oligonucleotide
gcaccaaggaacctccgatctgtgcacgta

SEQ ID NO: 248733 - DNA, 30 bp, Artificial Sequence
  Synthetic oligonucleotide
aacgtaggaacatacttgcagggagacgta

SEQ ID NO: 248734 - DNA, 30 bp, Artificial Sequence
  Synthetic oligonucleotide
gcttcccggttagcccatcacggggacgta

SEQ ID NO: 248735 - DNA, 30 bp, Artificial Sequence
  Synthetic oligonucleotide
attacaattgcgcaactctcatgggacgta

SEQ ID NO: 248736 - DNA, 30 bp, Artificial Sequence
  Synthetic oligonucleotide
tcatacatacttggccaccaactggacgta

SEQ ID NO: 248737 - DNA, 30 bp, Artificial Sequence
  Synthetic oligonucleotide
aaattaggtagtcgggaggggctatacgta

SEQ ID NO: 248738 - DNA, 30 bp, Artificial Sequence
  Synthetic oligonucleotide
gtttaagacacgtgaataataagctacgta

SEQ ID NO: 248739 - DNA, 30 bp, Artificial Sequence
  Synthetic oligonucleotide
cgagctctcacgcgtgttataaattacgta

SEQ ID NO: 248740 - DNA, 30 bp, Artificial Sequence
  Synthetic oligonucleotide
tggtcaaaacatgctccatctccttacgta

SEQ ID NO: 248741 - DNA, 30 bp, Artificial Sequence
  Synthetic oligonucleotide
gtacggtgccatggccgtgctcgttacgta

SEQ ID NO: 248742 - DNA, 30 bp, Artificial Sequence
  Synthetic oligonucleotide
gcacgaaatgctagtacagtcatttacgta

SEQ ID NO: 248743 - DNA, 30 bp, Artificial Sequence
  Synthetic oligonucleotide
tagtttatctcgagcccaagtctttacgta

SEQ ID NO: 248744 - DNA, 30 bp, Artificial Sequence
  Synthetic oligonucleotide
aagccgccgtgatcacattcggtttacgta

SEQ ID NO: 248745 - DNA, 30 bp, Artificial Sequence
  Synthetic oligonucleotide
gcacatgaaaagtatcccttgataaccgta

SEQ ID NO: 248746 - DNA, 30 bp, Artificial Sequence
  Synthetic oligonucleotide
tggctaataaatagagtcacaacgaccgta

SEQ ID NO: 248747 - DNA, 30 bp, Artificial Sequence
  Synthetic oligonucleotide
tgttcacaaagccacgaggtggtgaccgta

SEQ ID NO: 248748 - DNA, 30 bp, Artificial Sequence
  Synthetic oligonucleotide
ggacttgtggtgctggaggttagtcccgta

SEQ ID NO: 248749 - DNA, 30 bp, Artificial Sequence
  Synthetic oligonucleotide
acggtgcgtaataaaggatcaggtcccgta

SEQ ID NO: 248750 - DNA, 30 bp, Artificial Sequence
  Synthetic oligonucleotide
accacgatgtccttagacatgattcccgta

SEQ ID NO: 248751 - DNA, 30 bp, Artificial Sequence
  Synthetic oligonucleotide
tggctgacgagcgtgacttccggggccgta

SEQ ID NO: 248752 - DNA, 30 bp, Artificial Sequence
  Synthetic oligonucleotide
ggggttggcatggtcaattcgtgtgccgta

SEQ ID NO: 248753 - DNA, 30 bp, Artificial Sequence
  Synthetic oligonucleotide
gaaaaagggaacgtgggaaatggatccgta

SEQ ID NO: 248754 - DNA, 30 bp, Artificial Sequence
  Synthetic oligonucleotide
ggaagccactgcggaaggttccactccgta

SEQ ID NO: 248755 - DNA, 30 bp, Artificial Sequence
  Synthetic oligonucleotide
cccactcacaactgcctgctatgctccgta

SEQ ID NO: 248756 - DNA, 30 bp, Artificial Sequence
  Synthetic oligonucleotide
gcgtcgtgcccggagatgtacgcgtccgta

SEQ ID NO: 248757 - DNA, 30 bp, Artificial Sequence
  Synthetic oligonucleotide
ccgcggtacgaggtccaagatgggtccgta

SEQ ID NO: 248758 - DNA, 30 bp, Artificial Sequence
  Synthetic oligonucleotide
acactctcgctcggattaacacgaagcgta

SEQ ID NO: 248759 - DNA, 30 bp, Artificial Sequence
  Synthetic oligonucleotide
accttatgggagtccggcactccgagcgta

SEQ ID NO: 248760 - DNA, 30 bp, Artificial Sequence
  Synthetic oligonucleotide
tttgaggtaattggccttcatcggagcgta

SEQ ID NO: 248761 - DNA, 30 bp, Artificial Sequence
  Synthetic oligonucleotide
gcacgcgtgcatgtctaagctatgagcgta

SEQ ID NO: 248762 - DNA, 30 bp, Artificial Sequence
  Synthetic oligonucleotide
gaatgtcgagtcgatgttctagtgagcgta

SEQ ID NO: 248763 - DNA, 30 bp, Artificial Sequence
  Synthetic oligonucleotide
ctagtaagaaacctctacgtttaacgcgta

SEQ ID NO: 248764 - DNA, 30 bp, Artificial Sequence
  Synthetic oligonucleotide
tgcggatatgttacgaagccaggacgcgta

SEQ ID NO: 248765 - DNA, 30 bp, Artificial Sequence
  Synthetic oligonucleotide
aggaacaagccatctgcaactgtacgcgta

SEQ ID NO: 248766 - DNA, 30 bp, Artificial Sequence
  Synthetic oligonucleotide
taacatcaaggctttcgaaaccagcgcgta

SEQ ID NO: 248767 - DNA, 30 bp, Artificial Sequence
  Synthetic oligonucleotide
aggttgatgtagtcctattgactgcgcgta

SEQ ID NO: 248768 - DNA, 30 bp, Artificial Sequence
  Synthetic oligonucleotide
atgcaggtactgctttctgcggatcgcgta

SEQ ID NO: 248769 - DNA, 30 bp, Artificial Sequence
  Synthetic oligonucleotide
ctatctcacacaaatcttaaaattcgcgta

SEQ ID NO: 248770 - DNA, 30 bp, Artificial Sequence
  Synthetic oligonucleotide
tgaagcttgaacaaatacagaattcgcgta

SEQ ID NO: 248771 - DNA, 30 bp, Artificial Sequence
  Synthetic oligonucleotide
actaaagggggttaaaaggccagaggcgta

SEQ ID NO: 248772 - DNA, 30 bp, Artificial Sequence
  Synthetic oligonucleotide
gctccggcgaacatctcctactacggcgta

SEQ ID NO: 248773 - DNA, 30 bp, Artificial Sequence
  Synthetic oligonucleotide
tctcggtcagccaataactaaagtggcgta

SEQ ID NO: 248774 - DNA, 30 bp, Artificial Sequence
  Synthetic oligonucleotide
tattatgaagcatgagcaatcattggcgta

SEQ ID NO: 248775 - DNA, 30 bp, Artificial Sequence
  Synthetic oligonucleotide
agggaaggctgggcctaaccatttggcgta

SEQ ID NO: 248776 - DNA, 30 bp, Artificial Sequence
  Synthetic oligonucleotide
ggtgccgctagctagcagttacgatgcgta

SEQ ID NO: 248777 - DNA, 30 bp, Artificial Sequence
  Synthetic oligonucleotide
gtgattacggaacatctaaatgcctgcgta

SEQ ID NO: 248778 - DNA, 30 bp, Artificial Sequence
  Synthetic oligonucleotide
tggtgatagcttatttatcgaatgtgcgta

SEQ ID NO: 248779 - DNA, 30 bp, Artificial Sequence
  Synthetic oligonucleotide
tactccgtaacttgaaccggtatgtgcgta

SEQ ID NO: 248780 - DNA, 30 bp, Artificial Sequence
  Synthetic oligonucleotide
ttgtcctgccggttggtctcaagttgcgta

SEQ ID NO: 248781 - DNA, 30 bp, Artificial Sequence
  Synthetic oligonucleotide
ttgatgcatgttatctatgggggttgcgta

SEQ ID NO: 248782 - DNA, 30 bp, Artificial Sequence
  Synthetic oligonucleotide
caagggaaagagatcggacttatttgcgta

SEQ ID NO: 248783 - DNA, 30 bp, Artificial Sequence
  Synthetic oligonucleotide
ctttactagtgttcttctgcgctaatcgta

SEQ ID NO: 248784 - DNA, 30 bp, Artificial Sequence
  Synthetic oligonucleotide
atcctacgtgaacgcgtgtaggacatcgta

SEQ ID NO: 248785 - DNA, 30 bp, Artificial Sequence
  Synthetic oligonucleotide
acacagggaatgactgtgcggtgcatcgta

SEQ ID NO: 248786 - DNA, 30 bp, Artificial Sequence
  Synthetic oligonucleotide
gtagcattccggagtaattcggagatcgta

SEQ ID NO: 248787 - DNA, 30 bp, Artificial Sequence
  Synthetic oligonucleotide
atatcatcgggttgttgcattcggatcgta

SEQ ID NO: 248788 - DNA, 30 bp, Artificial Sequence
  Synthetic oligonucleotide
ctagaagtactatggaagctgtcagtcgta

SEQ ID NO: 248789 - DNA, 30 bp, Artificial Sequence
  Synthetic oligonucleotide
aagaaagaaccagtcctcagataggtcgta

SEQ ID NO: 248790 - DNA, 30 bp, Artificial Sequence
  Synthetic oligonucleotide
cactcgcttgtcttcgccgcaccggtcgta

SEQ ID NO: 248791 - DNA, 30 bp, Artificial Sequence
  Synthetic oligonucleotide
cactaactagtgtcgactagcgcattcgta

SEQ ID NO: 248792 - DNA, 30 bp, Artificial Sequence
  Synthetic oligonucleotide
gcctcattcaagcatcacagcgccttcgta

SEQ ID NO: 248793 - DNA, 30 bp, Artificial Sequence
  Synthetic oligonucleotide
tgtcgtatcttatttattagatagttcgta

SEQ ID NO: 248794 - DNA, 30 bp, Artificial Sequence
  Synthetic oligonucleotide
gtatctcatcggataacttagccgttcgta

SEQ ID NO: 248795 - DNA, 30 bp, Artificial Sequence
  Synthetic oligonucleotide
gtgcgaagcgcaccaggaagacctttcgta

SEQ ID NO: 248796 - DNA, 30 bp, Artificial Sequence
  Synthetic oligonucleotide
gtaatcagataatacggattgggtttcgta

SEQ ID NO: 248797 - DNA, 30 bp, Artificial Sequence
  Synthetic oligonucleotide
ttcatcccctacggctaccgtattttcgta

SEQ ID NO: 248798 - DNA, 30 bp, Artificial Sequence
  Synthetic oligonucleotide
acgttttcaacaaccacaagataaaaggta

SEQ ID NO: 248799 - DNA, 30 bp, Artificial Sequence
  Synthetic oligonucleotide
tggacccgatttggtacttccggaaaggta

SEQ ID NO: 248800 - DNA, 30 bp, Artificial Sequence
  Synthetic oligonucleotide
gtcaaagactacgcatagaaaaacaaggta

SEQ ID NO: 248801 - DNA, 30 bp, Artificial Sequence
  Synthetic oligonucleotide
gcactagcgagccactggatactgaaggta

SEQ ID NO: 248802 - DNA, 30 bp, Artificial Sequence
  Synthetic oligonucleotide
gtaactctccttattgaaggtgtgaaggta

SEQ ID NO: 248803 - DNA, 30 bp, Artificial Sequence
  Synthetic oligonucleotide
gagcggtctgtatatggcgtttgtaaggta

SEQ ID NO: 248804 - DNA, 30 bp, Artificial Sequence
  Synthetic oligonucleotide
agtattgcagatatcgagaatcaccaggta

SEQ ID NO: 248805 - DNA, 30 bp, Artificial Sequence
  Synthetic oligonucleotide
cgagctatgtattgggactcgggtcaggta

SEQ ID NO: 248806 - DNA, 30 bp, Artificial Sequence
  Synthetic oligonucleotide
aaacaattggagtgtatacagtcagaggta

SEQ ID NO: 248807 - DNA, 30 bp, Artificial Sequence
  Synthetic oligonucleotide
ttgatgacttgacacgtgtatggagaggta

SEQ ID NO: 248808 - DNA, 30 bp, Artificial Sequence
  Synthetic oligonucleotide
gagagctaaattctgttggttatagaggta

SEQ ID NO: 248809 - DNA, 30 bp, Artificial Sequence
  Synthetic oligonucleotide
ttctcgtatgaaccttgcccttgcgaggta

SEQ ID NO: 248810 - DNA, 30 bp, Artificial Sequence
  Synthetic oligonucleotide
ctaatcggctgttcaccctaattcgaggta

SEQ ID NO: 248811 - DNA, 30 bp, Artificial Sequence
  Synthetic oligonucleotide
aaacggggacaaaagctacaaccggaggta

SEQ ID NO: 248812 - DNA, 30 bp, Artificial Sequence
  Synthetic oligonucleotide
tcgttgggcggtatgtaaacacgggaggta

SEQ ID NO: 248813 - DNA, 30 bp, Artificial Sequence
  Synthetic oligonucleotide
tccagaactggcatcaccccgggggaggta

SEQ ID NO: 248814 - DNA, 30 bp, Artificial Sequence
  Synthetic oligonucleotide
tacggtttaataaagcagtagtgggaggta

SEQ ID NO: 248815 - DNA, 30 bp, Artificial Sequence
  Synthetic oligonucleotide
cagtcatactatgctagttatcgtgaggta

SEQ ID NO: 248816 - DNA, 30 bp, Artificial Sequence
  Synthetic oligonucleotide
tgtctcgctggcggaaacactgttgaggta

SEQ ID NO: 248817 - DNA, 30 bp, Artificial Sequence
  Synthetic oligonucleotide
ttaactaggaatctgcacatgtgataggta

SEQ ID NO: 248818 - DNA, 30 bp, Artificial Sequence
  Synthetic oligonucleotide
cctgatggacccaggtcggtactataggta

SEQ ID NO: 248819 - DNA, 30 bp, Artificial Sequence
  Synthetic oligonucleotide
caattacatccctgaaatcagctataggta

SEQ ID NO: 248820 - DNA, 30 bp, Artificial Sequence
  Synthetic oligonucleotide
gcattagcgttagtctcgtcagagtaggta

SEQ ID NO: 248821 - DNA, 30 bp, Artificial Sequence
  Synthetic oligonucleotide
atgagacagagcaatggcctgcattaggta

SEQ ID NO: 248822 - DNA, 30 bp, Artificial Sequence
  Synthetic oligonucleotide
gcttacagtgagtcaagtacctgttaggta

SEQ ID NO: 248823 - DNA, 30 bp, Artificial Sequence
  Synthetic oligonucleotide
tctacacaatgtcaccctagcgtcacggta

SEQ ID NO: 248824 - DNA, 30 bp, Artificial Sequence
  Synthetic oligonucleotide
gcatgatgcggatcaatgaggcagacggta

SEQ ID NO: 248825 - DNA, 30 bp, Artificial Sequence
  Synthetic oligonucleotide
tgtagatggcatgtcctgcaagggacggta

SEQ ID NO: 248826 - DNA, 30 bp, Artificial Sequence
  Synthetic oligonucleotide
atcgggattgagttaaataaaaatacggta

SEQ ID NO: 248827 - DNA, 30 bp, Artificial Sequence
  Synthetic oligonucleotide
taggtatacgctctaacagcaataccggta

SEQ ID NO: 248828 - DNA, 30 bp, Artificial Sequence
  Synthetic oligonucleotide
gcatttaccaattgcatagaacacccggta

SEQ ID NO: 248829 - DNA, 30 bp, Artificial Sequence
  Synthetic oligonucleotide
agggattgaaccaactctgcttagccggta

SEQ ID NO: 248830 - DNA, 30 bp, Artificial Sequence
  Synthetic oligonucleotide
gaacggacatcattgtttaactcgccggta

SEQ ID NO: 248831 - DNA, 30 bp, Artificial Sequence
  Synthetic oligonucleotide
gacacatactactacaaggagcggccggta

SEQ ID NO: 248832 - DNA, 35 bp, Artificial Sequence
  Synthetic oligonucleotide
tgcaagaaattttgtcactatggtaatatccggta

SEQ ID NO: 248833 - DNA, 30 bp, Artificial Sequence
  Synthetic oligonucleotide
tcatcgcgccggtacgaagctcttccggta

SEQ ID NO: 248834 - DNA, 30 bp, Artificial Sequence
  Synthetic oligonucleotide
ttccaatcgtgcacgagattaccagcggta

SEQ ID NO: 248835 - DNA, 30 bp, Artificial Sequence
  Synthetic oligonucleotide
actagcgagccacccttgaataccgcggta

SEQ ID NO: 248836 - DNA, 30 bp, Artificial Sequence
  Synthetic oligonucleotide
aacgccaaaggtcctgattttgcggcggta

SEQ ID NO: 248837 - DNA, 30 bp, Artificial Sequence
  Synthetic oligonucleotide
aactagtagcttcgagccggtgcatcggta

SEQ ID NO: 248838 - DNA, 30 bp, Artificial Sequence
  Synthetic oligonucleotide
tttatcgggcaagatgttgagttatcggta

SEQ ID NO: 248839 - DNA, 30 bp, Artificial Sequence
  Synthetic oligonucleotide
ttacggtgtgcaataagccatcagtcggta

SEQ ID NO: 248840 - DNA, 30 bp, Artificial Sequence
  Synthetic oligonucleotide
gaaataagccaggcttagaacgcgtcggta

SEQ ID NO: 248841 - DNA, 30 bp, Artificial Sequence
  Synthetic oligonucleotide
atgttagagagtgtgtaggtaatgtcggta

SEQ ID NO: 248842 - DNA, 30 bp, Artificial Sequence
  Synthetic oligonucleotide
actacgccaccttgaggcatgatgtcggta

SEQ ID NO: 248843 - DNA, 30 bp, Artificial Sequence
  Synthetic oligonucleotide
ttgatccaatgctagctacgtttgtcggta

SEQ ID NO: 248844 - DNA, 30 bp, Artificial Sequence
  Synthetic oligonucleotide
ttggtgatcgccaatagctctacttcggta

SEQ ID NO: 248845 - DNA, 30 bp, Artificial Sequence
  Synthetic oligonucleotide
tttcagcataataagatgggccaaagggta

SEQ ID NO: 248846 - DNA, 30 bp, Artificial Sequence
  Synthetic oligonucleotide
gcgggctcattgccactccttctaagggta

SEQ ID NO: 248847 - DNA, 30 bp, Artificial Sequence
  Synthetic oligonucleotide
gctagagttcgctcatagatgtacagggta

SEQ ID NO: 248848 - DNA, 30 bp, Artificial Sequence
  Synthetic oligonucleotide
agcttaatccggacgatgaatttcagggta

SEQ ID NO: 248849 - DNA, 30 bp, Artificial Sequence
  Synthetic oligonucleotide
tgggagcggaaattaagtgtgcagagggta

SEQ ID NO: 248850 - DNA, 30 bp, Artificial Sequence
  Synthetic oligonucleotide
ggatgtctactatgtagaggtttgagggta

SEQ ID NO: 248851 - DNA, 30 bp, Artificial Sequence
  Synthetic oligonucleotide
tctcactctctggagtcacgttaccgggta

SEQ ID NO: 248852 - DNA, 30 bp, Artificial Sequence
  Synthetic oligonucleotide
gggagttagaggtcaaaagcgctgcgggta

SEQ ID NO: 248853 - DNA, 30 bp, Artificial Sequence
  Synthetic oligonucleotide
tgcggagcatgtctccgaaccttgcgggta

SEQ ID NO: 248854 - DNA, 30 bp, Artificial Sequence
  Synthetic oligonucleotide
tcacagaaccatcgtagcgggcttcgggta

SEQ ID NO: 248855 - DNA, 30 bp, Artificial Sequence
  Synthetic oligonucleotide
tctgagataggtcttacccagaaaggggta

SEQ ID NO: 248856 - DNA, 30 bp, Artificial Sequence
  Synthetic oligonucleotide
tggctgtaagtggaggggaattcaggggta

SEQ ID NO: 248857 - DNA, 30 bp, Artificial Sequence
  Synthetic oligonucleotide
gtcaagcgcttagccgaccaacgcggggta

SEQ ID NO: 248858 - DNA, 30 bp, Artificial Sequence
  Synthetic oligonucleotide
gaaagaaactgctcagggcggggcggggta

SEQ ID NO: 248859 - DNA, 30 bp, Artificial Sequence
  Synthetic oligonucleotide
tgtaacgcacgggtcctgaagaagggggta

SEQ ID NO: 248860 - DNA, 30 bp, Artificial Sequence
  Synthetic oligonucleotide
cgattattgtgtggcccatgttagggggta

SEQ ID NO: 248861 - DNA, 30 bp, Artificial Sequence
  Synthetic oligonucleotide
actgaaggtaggggagacccttatggggta

SEQ ID NO: 248862 - DNA, 30 bp, Artificial Sequence
  Synthetic oligonucleotide
aactaaaacatagctcagctctctggggta

SEQ ID NO: 248863 - DNA, 30 bp, Artificial Sequence
  Synthetic oligonucleotide
aatagacttaaacgaccaaagggtggggta

SEQ ID NO: 248864 - DNA, 30 bp, Artificial Sequence
  Synthetic oligonucleotide
gtgacggtctggacgaagcgtggtggggta

SEQ ID NO: 248865 - DNA, 30 bp, Artificial Sequence
  Synthetic oligonucleotide
cacttaacaattgcggattattgatgggta

SEQ ID NO: 248866 - DNA, 30 bp, Artificial Sequence
  Synthetic oligonucleotide
atagatttattacgagagagtccctgggta

SEQ ID NO: 248867 - DNA, 30 bp, Artificial Sequence
  Synthetic oligonucleotide
tcgttgtccgtacgagaaacctagtgggta

SEQ ID NO: 248868 - DNA, 30 bp, Artificial Sequence
  Synthetic oligonucleotide
acgaatactttcacgtcaggagtgtgggta

SEQ ID NO: 248869 - DNA, 30 bp, Artificial Sequence
  Synthetic oligonucleotide
gggtgttgcctagatacgcgacaaatggta

SEQ ID NO: 248870 - DNA, 30 bp, Artificial Sequence
  Synthetic oligonucleotide
ctcgaacgtaagccctgccttacaatggta

SEQ ID NO: 248871 - DNA, 30 bp, Artificial Sequence
  Synthetic oligonucleotide
cactacgtggctctctctgcaagaatggta

SEQ ID NO: 248872 - DNA, 30 bp, Artificial Sequence
  Synthetic oligonucleotide
gaaagagaattccatcgccaggagatggta

SEQ ID NO: 248873 - DNA, 30 bp, Artificial Sequence
  Synthetic oligonucleotide
caaatcataagacttgtataagggatggta

SEQ ID NO: 248874 - DNA, 30 bp, Artificial Sequence
  Synthetic oligonucleotide
gattaacgaaggatcgcatcagatatggta

SEQ ID NO: 248875 - DNA, 30 bp, Artificial Sequence
  Synthetic oligonucleotide
gcggtattgggatatcacttatttatggta

SEQ ID NO: 248876 - DNA, 30 bp, Artificial Sequence
  Synthetic oligonucleotide
tgatgcgtggtcttggttcatggtctggta

SEQ ID NO: 248877 - DNA, 30 bp, Artificial Sequence
  Synthetic oligonucleotide
cgccgtacagcggtctttaggaatgtggta

SEQ ID NO: 248878 - DNA, 30 bp, Artificial Sequence
  Synthetic oligonucleotide
cgtcaccgagtcatattttagtcattggta

SEQ ID NO: 248879 - DNA, 30 bp, Artificial Sequence
  Synthetic oligonucleotide
ggccagaattattcagtgtgttgattggta

SEQ ID NO: 248880 - DNA, 30 bp, Artificial Sequence
  Synthetic oligonucleotide
agtaagtgcactcagctgtgagccttggta

SEQ ID NO: 248881 - DNA, 30 bp, Artificial Sequence
  Synthetic oligonucleotide
ggatccatgccctgacagtgtcgcttggta

SEQ ID NO: 248882 - DNA, 30 bp, Artificial Sequence
  Synthetic oligonucleotide
acaagtgcaggcattgtctatcagttggta

SEQ ID NO: 248883 - DNA, 30 bp, Artificial Sequence
  Synthetic oligonucleotide
cgggaataccgagataataaaggtttggta

SEQ ID NO: 248884 - DNA, 30 bp, Artificial Sequence
  Synthetic oligonucleotide
gttcgtagaggaggattaactggtttggta

SEQ ID NO: 248885 - DNA, 30 bp, Artificial Sequence
  Synthetic oligonucleotide
cttcaccgatacaccaacatcattttggta

SEQ ID NO: 248886 - DNA, 30 bp, Artificial Sequence
  Synthetic oligonucleotide
aaggtaatgagctgacttgttgttttggta

SEQ ID NO: 248887 - DNA, 30 bp, Artificial Sequence
  Synthetic oligonucleotide
aggtcatactgccttgaaataggaaatgta

SEQ ID NO: 248888 - DNA, 30 bp, Artificial Sequence
  Synthetic oligonucleotide
tcctagtccgtcctatttcattacaatgta

SEQ ID NO: 248889 - DNA, 30 bp, Artificial Sequence
  Synthetic oligonucleotide
acatttagcccacctgccttggaccatgta

SEQ ID NO: 248890 - DNA, 30 bp, Artificial Sequence
  Synthetic oligonucleotide
gtacccgcaaggacccaacttgagcatgta

SEQ ID NO: 248891 - DNA, 30 bp, Artificial Sequence
  Synthetic oligonucleotide
gtggtcgtatagcgaccgtagggtcatgta

SEQ ID NO: 248892 - DNA, 30 bp, Artificial Sequence
  Synthetic oligonucleotide
acggcgcggctttgttctgggccagatgta

SEQ ID NO: 248893 - DNA, 30 bp, Artificial Sequence
  Synthetic oligonucleotide
agtgtgtggctatgtattgaaggagatgta

SEQ ID NO: 248894 - DNA, 30 bp, Artificial Sequence
  Synthetic oligonucleotide
gaagtgatcagtagcatgcgtaaggatgta

SEQ ID NO: 248895 - DNA, 30 bp, Artificial Sequence
  Synthetic oligonucleotide
ccattttaggggagtgagagctcggatgta

SEQ ID NO: 248896 - DNA, 30 bp, Artificial Sequence
  Synthetic oligonucleotide
tacattaaaaccgcgaaatatagggatgta

SEQ ID NO: 248897 - DNA, 30 bp, Artificial Sequence
  Synthetic oligonucleotide
tacctcagtcagagtcgcgacattgatgta

SEQ ID NO: 248898 - DNA, 30 bp, Artificial Sequence
  Synthetic oligonucleotide
gggcgaaaggctctcgaggataaatatgta

SEQ ID NO: 248899 - DNA, 30 bp, Artificial Sequence
  Synthetic oligonucleotide
gagcttaaagcacgggccatagtatatgta

SEQ ID NO: 248900 - DNA, 30 bp, Artificial Sequence
  Synthetic oligonucleotide
gaggcgaagcgggactggctgtggtatgta

SEQ ID NO: 248901 - DNA, 30 bp, Artificial Sequence
  Synthetic oligonucleotide
tacgagtcgtggatgggtgtacgcactgta

SEQ ID NO: 248902 - DNA, 30 bp, Artificial Sequence
  Synthetic oligonucleotide
tagttctttggcagaaaagagtggactgta

SEQ ID NO: 248903 - DNA, 30 bp, Artificial Sequence
  Synthetic oligonucleotide
agtcctggcccatcagagttcatgactgta

SEQ ID NO: 248904 - DNA, 30 bp, Artificial Sequence
  Synthetic oligonucleotide
caaccgctctttcgccaactacctactgta

SEQ ID NO: 248905 - DNA, 30 bp, Artificial Sequence
  Synthetic oligonucleotide
taggcctcggcgtgcggaagagtccctgta

SEQ ID NO: 248906 - DNA, 30 bp, Artificial Sequence
  Synthetic oligonucleotide
aaggatcgtacaggggcctctcggcctgta

SEQ ID NO: 248907 - DNA, 30 bp, Artificial Sequence
  Synthetic oligonucleotide
ataagatatagatcacacattcggcctgta

SEQ ID NO: 248908 - DNA, 30 bp, Artificial Sequence
  Synthetic oligonucleotide
attgtctaaagcttatgctcgttgcctgta

SEQ ID NO: 248909 - DNA, 30 bp, Artificial Sequence
  Synthetic oligonucleotide
cgtgcggcctatggagctccggttcctgta

SEQ ID NO: 248910 - DNA, 30 bp, Artificial Sequence
  Synthetic oligonucleotide
gagaccgaatagtgtcgtgccaaagctgta

SEQ ID NO: 248911 - DNA, 30 bp, Artificial Sequence
  Synthetic oligonucleotide
cgcgtgtaccaggggttttcggcagctgta

SEQ ID NO: 248912 - DNA, 30 bp, Artificial Sequence
  Synthetic oligonucleotide
gacccttggatctaggaaactgacgctgta

SEQ ID NO: 248913 - DNA, 30 bp, Artificial Sequence
  Synthetic oligonucleotide
gagggtttatggggctaagctcgcgctgta

SEQ ID NO: 248914 - DNA, 30 bp, Artificial Sequence
  Synthetic oligonucleotide
tccagtcttcgggttaatatacatgctgta

SEQ ID NO: 248915 - DNA, 30 bp, Artificial Sequence
  Synthetic oligonucleotide
aggacactttttcgctccccgctatctgta

SEQ ID NO: 248916 - DNA, 30 bp, Artificial Sequence
  Synthetic oligonucleotide
atgggtattaatggagtataaaactctgta

SEQ ID NO: 248917 - DNA, 30 bp, Artificial Sequence
  Synthetic oligonucleotide
ggtgtggaggactgacatcggcactctgta

SEQ ID NO: 248918 - DNA, 30 bp, Artificial Sequence
  Synthetic oligonucleotide
gctatcatcgagcagatagtgcgctctgta

SEQ ID NO: 248919 - DNA, 30 bp, Artificial Sequence
  Synthetic oligonucleotide
gtgttgcttagcgcacgagacggctctgta

SEQ ID NO: 248920 - DNA, 30 bp, Artificial Sequence
  Synthetic oligonucleotide
ccgagcgatcaggtagtttgtgcgtctgta

SEQ ID NO: 248921 - DNA, 30 bp, Artificial Sequence
  Synthetic oligonucleotide
ggagaccgaacgtagcaggctgattctgta

SEQ ID NO: 248922 - DNA, 30 bp, Artificial Sequence
  Synthetic oligonucleotide
ggtggattagcgaagtacgaggcttctgta

SEQ ID NO: 248923 - DNA, 30 bp, Artificial Sequence
  Synthetic oligonucleotide
cgaaggtgagttcactcggtaatttctgta

SEQ ID NO: 248924 - DNA, 31 bp, Artificial Sequence
  Synthetic oligonucleotide
acagagagtcagagccgaaagggtttctgta

SEQ ID NO: 248925 - DNA, 30 bp, Artificial Sequence
  Synthetic oligonucleotide
tagagctgctggggtagacccttttctgta

SEQ ID NO: 248926 - DNA, 30 bp, Artificial Sequence
  Synthetic oligonucleotide
tgttgttagttggcagggtgttgcagtgta

SEQ ID NO: 248927 - DNA, 30 bp, Artificial Sequence
  Synthetic oligonucleotide
acccaacggctgcttgttggtccgagtgta

SEQ ID NO: 248928 - DNA, 30 bp, Artificial Sequence
  Synthetic oligonucleotide
ccgttactatgtatttgattatcgagtgta

SEQ ID NO: 248929 - DNA, 30 bp, Artificial Sequence
  Synthetic oligonucleotide
tgccgtatcgcaataggccgctggagtgta

SEQ ID NO: 248930 - DNA, 30 bp, Artificial Sequence
  Synthetic oligonucleotide
catggtagacatcgctatgtttatagtgta

SEQ ID NO: 248931 - DNA, 31 bp, Artificial Sequence
  Synthetic oligonucleotide
acgtacggttaataggatgtcccctagtgta

SEQ ID NO: 248932 - DNA, 30 bp, Artificial Sequence
  Synthetic oligonucleotide
tgccgctatgacggcaaaccttgtagtgta

SEQ ID NO: 248933 - DNA, 30 bp, Artificial Sequence
  Synthetic oligonucleotide
aagagcgctttaaatcagacgggccgtgta

SEQ ID NO: 248934 - DNA, 30 bp, Artificial Sequence
  Synthetic oligonucleotide
ttacgttaacagacacacagcgttcgtgta

SEQ ID NO: 248935 - DNA, 30 bp, Artificial Sequence
  Synthetic oligonucleotide
ctgatagtgccagaaccggcaacaggtgta

SEQ ID NO: 248936 - DNA, 30 bp, Artificial Sequence
  Synthetic oligonucleotide
cgctaacaatgcaaaggtctgccaggtgta

SEQ ID NO: 248937 - DNA, 30 bp, Artificial Sequence
  Synthetic oligonucleotide
tttggctggtggtctctctcattaggtgta

SEQ ID NO: 248938 - DNA, 30 bp, Artificial Sequence
  Synthetic oligonucleotide
gtctcaacggtacctgttgtaacgggtgta

SEQ ID NO: 248939 - DNA, 30 bp, Artificial Sequence
  Synthetic oligonucleotide
ttccggtagggtaggtgaaatacgggtgta

SEQ ID NO: 248940 - DNA, 30 bp, Artificial Sequence
  Synthetic oligonucleotide
gacacgtgtgactggatccgcatgggtgta

SEQ ID NO: 248941 - DNA, 30 bp, Artificial Sequence
  Synthetic oligonucleotide
tctccaatcagctgaatggatttgggtgta

SEQ ID NO: 248942 - DNA, 30 bp, Artificial Sequence
  Synthetic oligonucleotide
agccagcagtgttacttctttacatgtgta

SEQ ID NO: 248943 - DNA, 30 bp, Artificial Sequence
  Synthetic oligonucleotide
tcctgggttcaaacggaatccccatgtgta

SEQ ID NO: 248944 - DNA, 30 bp, Artificial Sequence
  Synthetic oligonucleotide
acagtggataaaatatgcgtatcgtgtgta

SEQ ID NO: 248945 - DNA, 30 bp, Artificial Sequence
  Synthetic oligonucleotide
atcactcgaaggtaacacgtggtgtgtgta

SEQ ID NO: 248946 - DNA, 30 bp, Artificial Sequence
  Synthetic oligonucleotide
attaggaagaaaatcagccaagcaattgta

SEQ ID NO: 248947 - DNA, 30 bp, Artificial Sequence
  Synthetic oligonucleotide
gtgcatcaacaatatttcatcggaattgta

SEQ ID NO: 248948 - DNA, 30 bp, Artificial Sequence
  Synthetic oligonucleotide
ttagttgtggtatggccaaacaatattgta

SEQ ID NO: 248949 - DNA, 30 bp, Artificial Sequence
  Synthetic oligonucleotide
agcttgatgtctacgatcacggttattgta

SEQ ID NO: 248950 - DNA, 30 bp, Artificial Sequence
  Synthetic oligonucleotide
ccagcatggcagaaacgtgtgtttattgta

SEQ ID NO: 248951 - DNA, 30 bp, Artificial Sequence
  Synthetic oligonucleotide
catatgacggccccagggcagatacttgta

SEQ ID NO: 248952 - DNA, 30 bp, Artificial Sequence
  Synthetic oligonucleotide
ggcgaattctctcactcggcaccgcttgta

SEQ ID NO: 248953 - DNA, 30 bp, Artificial Sequence
  Synthetic oligonucleotide
ccctgtgcacgggtcggtctcgttcttgta

SEQ ID NO: 248954 - DNA, 30 bp, Artificial Sequence
  Synthetic oligonucleotide
cgcgtttggtacagtcagcaaggagttgta

SEQ ID NO: 248955 - DNA, 30 bp, Artificial Sequence
  Synthetic oligonucleotide
ggttcattacataggtggactcacgttgta

SEQ ID NO: 248956 - DNA, 30 bp, Artificial Sequence
  Synthetic oligonucleotide
tcgactcaagggcgtcccacagacgttgta

SEQ ID NO: 248957 - DNA, 30 bp, Artificial Sequence
  Synthetic oligonucleotide
agtgctatgtaaccactcttcaccgttgta

SEQ ID NO: 248958 - DNA, 30 bp, Artificial Sequence
  Synthetic oligonucleotide
gcggtcgtggataatagacgtaccgttgta

SEQ ID NO: 248959 - DNA, 30 bp, Artificial Sequence
  Synthetic oligonucleotide
ttacacaccctattgagtaaagaggttgta

SEQ ID NO: 248960 - DNA, 30 bp, Artificial Sequence
  Synthetic oligonucleotide
tagaaaccggtttggacgttcagggttgta

SEQ ID NO: 248961 - DNA, 30 bp, Artificial Sequence
  Synthetic oligonucleotide
gtacgctatgcatggaaacttgtctttgta

SEQ ID NO: 248962 - DNA, 30 bp, Artificial Sequence
  Synthetic oligonucleotide
tgcgcggcaacataccctaactcgtttgta

SEQ ID NO: 248963 - DNA, 30 bp, Artificial Sequence
  Synthetic oligonucleotide
cgttcgatggcaatcgtctgcatgtttgta

SEQ ID NO: 248964 - DNA, 30 bp, Artificial Sequence
  Synthetic oligonucleotide
aggacattcgccctccacgtcagttttgta

SEQ ID NO: 248965 - DNA, 30 bp, Artificial Sequence
  Synthetic oligonucleotide
taactgtagttacatctaaatagttttgta

SEQ ID NO: 248966 - DNA, 30 bp, Artificial Sequence
  Synthetic oligonucleotide
tccacatcagcaactaagtagcaaaaatta

SEQ ID NO: 248967 - DNA, 30 bp, Artificial Sequence
  Synthetic oligonucleotide
caggcactgctttgccgccatgcgaaatta

SEQ ID NO: 248968 - DNA, 30 bp, Artificial Sequence
  Synthetic oligonucleotide
aagcactaaataacaatccgagataaatta

SEQ ID NO: 248969 - DNA, 30 bp, Artificial Sequence
  Synthetic oligonucleotide
agagcgcatagaaggggctttggtaaatta

SEQ ID NO: 248970 - DNA, 30 bp, Artificial Sequence
  Synthetic oligonucleotide
aagaaatagtgattaactgcaaaacaatta

SEQ ID NO: 248971 - DNA, 30 bp, Artificial Sequence
  Synthetic oligonucleotide
tctatagcgctggcatcctgtgaccaatta

SEQ ID NO: 248972 - DNA, 30 bp, Artificial Sequence
  Synthetic oligonucleotide
tctttactaagcagtcgagcagcccaatta

SEQ ID NO: 248973 - DNA, 30 bp, Artificial Sequence
  Synthetic oligonucleotide
taaccctgaaggtagcgcgatacgcaatta

SEQ ID NO: 248974 - DNA, 30 bp, Artificial Sequence
  Synthetic oligonucleotide
cagtgccattagcaacgtaaatggcaatta

SEQ ID NO: 248975 - DNA, 30 bp, Artificial Sequence
  Synthetic oligonucleotide
tttcaggggccgtactaccgtttgcaatta

SEQ ID NO: 248976 - DNA, 30 bp, Artificial Sequence
  Synthetic oligonucleotide
gacgccatggggacgtacgtgcatcaatta

SEQ ID NO: 248977 - DNA, 30 bp, Artificial Sequence
  Synthetic oligonucleotide
aggataagtgagcccataagctctcaatta

SEQ ID NO: 248978 - DNA, 30 bp, Artificial Sequence
  Synthetic oligonucleotide
tctaatatctaaactagatcattcgaatta

SEQ ID NO: 248979 - DNA, 30 bp, Artificial Sequence
  Synthetic oligonucleotide
cttcatgtgggttaagatgtatgggaatta

SEQ ID NO: 248980 - DNA, 30 bp, Artificial Sequence
  Synthetic oligonucleotide
tgtcaccttgggggtataaggagtgaatta

SEQ ID NO: 248981 - DNA, 30 bp, Artificial Sequence
  Synthetic oligonucleotide
cctcaccgcgaacaacactggcgtgaatta

SEQ ID NO: 248982 - DNA, 30 bp, Artificial Sequence
  Synthetic oligonucleotide
gttatcaattgttgttgatcgaaataatta

SEQ ID NO: 248983 - DNA, 30 bp, Artificial Sequence
  Synthetic oligonucleotide
tgggaagttctttagttttagacataatta

SEQ ID NO: 248984 - DNA, 30 bp, Artificial Sequence
  Synthetic oligonucleotide
catcgcttgtgttgacggaggagctaatta

SEQ ID NO: 248985 - DNA, 30 bp, Artificial Sequence
  Synthetic oligonucleotide
atcacagattgaaaatcatcttcgtaatta

SEQ ID NO: 248986 - DNA, 30 bp, Artificial Sequence
  Synthetic oligonucleotide
agccaacgagagtactatacaaggtaatta

SEQ ID NO: 248987 - DNA, 30 bp, Artificial Sequence
  Synthetic oligonucleotide
ggtcaaccggtgtgaacacgtatgtaatta

SEQ ID NO: 248988 - DNA, 30 bp, Artificial Sequence
  Synthetic oligonucleotide
ggccgaagcctgtcctggaagttgtaatta

SEQ ID NO: 248989 - DNA, 30 bp, Artificial Sequence
  Synthetic oligonucleotide
aaggtccagggtcaggaaggcaattaatta

SEQ ID NO: 248990 - DNA, 30 bp, Artificial Sequence
  Synthetic oligonucleotide
cacggctagcagcagctgtcaacttaatta

SEQ ID NO: 248991 - DNA, 30 bp, Artificial Sequence
  Synthetic oligonucleotide
gccgagcgaggaccaaagtaggtttaatta

SEQ ID NO: 248992 - DNA, 30 bp, Artificial Sequence
  Synthetic oligonucleotide
acgactcgataaatcgagtatgtttaatta

SEQ ID NO: 248993 - DNA, 30 bp, Artificial Sequence
  Synthetic oligonucleotide
ggttgtcggtcaaattgaggcctaacatta

SEQ ID NO: 248994 - DNA, 30 bp, Artificial Sequence
  Synthetic oligonucleotide
tagcagagatggtaaggtaccaggacatta

SEQ ID NO: 248995 - DNA, 30 bp, Artificial Sequence
  Synthetic oligonucleotide
tggagtgtcatctcttcaaatactacatta

SEQ ID NO: 248996 - DNA, 30 bp, Artificial Sequence
  Synthetic oligonucleotide
ccttgtcggttgacgatgagcagtacatta

SEQ ID NO: 248997 - DNA, 30 bp, Artificial Sequence
  Synthetic oligonucleotide
ctggtgtatcctttagaggagtaaccatta

SEQ ID NO: 248998 - DNA, 30 bp, Artificial Sequence
  Synthetic oligonucleotide
ccagcgctgtgtgggacagcgtcaccatta

SEQ ID NO: 248999 - DNA, 30 bp, Artificial Sequence
  Synthetic oligonucleotide
taatcacgcccgatggtccaaagaccatta

SEQ ID NO: 249000 - DNA, 30 bp, Artificial Sequence
  Synthetic oligonucleotide
agtagatcagccaaaactggaagcccatta

SEQ ID NO: 249001 - DNA, 30 bp, Artificial Sequence
  Synthetic oligonucleotide
aggatgtcttaagcccttggccatccatta

SEQ ID NO: 249002 - DNA, 30 bp, Artificial Sequence
  Synthetic oligonucleotide
cccggttaaacgtgaggggcaggtccatta

SEQ ID NO: 249003 - DNA, 30 bp, Artificial Sequence
  Synthetic oligonucleotide
atcaaatggttgaatcgaggctgtccatta

SEQ ID NO: 249004 - DNA, 30 bp, Artificial Sequence
  Synthetic oligonucleotide
tagagcaccagaaatgaagcgtttccatta

SEQ ID NO: 249005 - DNA, 30 bp, Artificial Sequence
  Synthetic oligonucleotide
tgttgccacacctcgtcaatcctcgcatta

SEQ ID NO: 249006 - DNA, 31 bp, Artificial Sequence
  Synthetic oligonucleotide
tagcgcacatacatattaaggctaggcatta

SEQ ID NO: 249007 - DNA, 30 bp, Artificial Sequence
  Synthetic oligonucleotide
ttatgaataggatggatcttgagggcatta

SEQ ID NO: 249008 - DNA, 30 bp, Artificial Sequence
  Synthetic oligonucleotide
cttgtgctagtaagtcccgcaccctcatta

SEQ ID NO: 249009 - DNA, 30 bp, Artificial Sequence
  Synthetic oligonucleotide
ttgggctgaagtaacgagcgtgcgtcatta

SEQ ID NO: 249010 - DNA, 30 bp, Artificial Sequence
  Synthetic oligonucleotide
cactcgtctgtctgcgaagcaaggtcatta

SEQ ID NO: 249011 - DNA, 30 bp, Artificial Sequence
  Synthetic oligonucleotide
cacaaattccgcgtatataccatgtcatta

SEQ ID NO: 249012 - DNA, 30 bp, Artificial Sequence
  Synthetic oligonucleotide
ctgtgattcaaagaaattaaggattcatta

SEQ ID NO: 249013 - DNA, 30 bp, Artificial Sequence
  Synthetic oligonucleotide
gcagtgacccgaacatcttatggttcatta

SEQ ID NO: 249014 - DNA, 30 bp, Artificial Sequence
  Synthetic oligonucleotide
tgccagttcgggcagccgaacagcagatta

SEQ ID NO: 249015 - DNA, 30 bp, Artificial Sequence
  Synthetic oligonucleotide
tcgtcgtaaacaaagaaatttgggagatta

SEQ ID NO: 249016 - DNA, 30 bp, Artificial Sequence
  Synthetic oligonucleotide
tggggggaaaggcacgtgccaactagatta

SEQ ID NO: 249017 - DNA, 30 bp, Artificial Sequence
  Synthetic oligonucleotide
ggccatatgtgtgtcagtcatcttagatta

SEQ ID NO: 249018 - DNA, 30 bp, Artificial Sequence
  Synthetic oligonucleotide
tgcagtgcgtttggcggacaatttagatta

SEQ ID NO: 249019 - DNA, 30 bp, Artificial Sequence
  Synthetic oligonucleotide
aaggctggtcttttgacaatattccgatta

SEQ ID NO: 249020 - DNA, 30 bp, Artificial Sequence
  Synthetic oligonucleotide
agattgaaattagcgaccataaagcgatta

SEQ ID NO: 249021 - DNA, 30 bp, Artificial Sequence
  Synthetic oligonucleotide
caagcctggatcccaaactgcccaggatta

SEQ ID NO: 249022 - DNA, 30 bp, Artificial Sequence
  Synthetic oligonucleotide
agcgagacaatgcagcgtagtttaggatta

SEQ ID NO: 249023 - DNA, 30 bp, Artificial Sequence
  Synthetic oligonucleotide
atactctggagtcgcaccagtgtcggatta

SEQ ID NO: 249024 - DNA, 30 bp, Artificial Sequence
  Synthetic oligonucleotide
gcggaatcgctcacacagagcttcggatta

SEQ ID NO: 249025 - DNA, 30 bp, Artificial Sequence
  Synthetic oligonucleotide
cgttttgtgcggcacgctaaggggggatta

SEQ ID NO: 249026 - DNA, 30 bp, Artificial Sequence
  Synthetic oligonucleotide
cacgattaaccactctgtccatggggatta

SEQ ID NO: 249027 - DNA, 30 bp, Artificial Sequence
  Synthetic oligonucleotide
gacagatatccgccgttcgtgactggatta

SEQ ID NO: 249028 - DNA, 30 bp, Artificial Sequence
  Synthetic oligonucleotide
tctatggtacaacccgatctagttggatta

SEQ ID NO: 249029 - DNA, 30 bp, Artificial Sequence
  Synthetic oligonucleotide
gcaaccggtgttttgatatggaaatgatta

SEQ ID NO: 249030 - DNA, 30 bp, Artificial Sequence
  Synthetic oligonucleotide
cacgatcatcctagtttgcttaaatgatta

SEQ ID NO: 249031 - DNA, 30 bp, Artificial Sequence
  Synthetic oligonucleotide
agaatccagaagactgatcccaagtgatta

SEQ ID NO: 249032 - DNA, 30 bp, Artificial Sequence
  Synthetic oligonucleotide
cgcccgcgtagttccagtcaccgttgatta

SEQ ID NO: 249033 - DNA, 30 bp, Artificial Sequence
  Synthetic oligonucleotide
gcgtgaatgatccatatatcgcgttgatta

SEQ ID NO: 249034 - DNA, 30 bp, Artificial Sequence
  Synthetic oligonucleotide
aagtaggtacggggacgcccgatttgatta

SEQ ID NO: 249035 - DNA, 30 bp, Artificial Sequence
  Synthetic oligonucleotide
aaacctagctaagatgagtggttttgatta

SEQ ID NO: 249036 - DNA, 30 bp, Artificial Sequence
  Synthetic oligonucleotide
gttcggtgatctcatctcacataaatatta

SEQ ID NO: 249037 - DNA, 30 bp, Artificial Sequence
  Synthetic oligonucleotide
tatcgcagtagcagtgcgaccacaatatta

SEQ ID NO: 249038 - DNA, 30 bp, Artificial Sequence
  Synthetic oligonucleotide
gtgctgcgtagatgcacgttgagaatatta

SEQ ID NO: 249039 - DNA, 30 bp, Artificial Sequence
  Synthetic oligonucleotide
tgattgtcacctgcattcgaccgaatatta

SEQ ID NO: 249040 - DNA, 30 bp, Artificial Sequence
  Synthetic oligonucleotide
ccccactggaagaaccccgacatcatatta

SEQ ID NO: 249041 - DNA, 30 bp, Artificial Sequence
  Synthetic oligonucleotide
ttaactcgaggctcccaccaacggatatta

SEQ ID NO: 249042 - DNA, 30 bp, Artificial Sequence
  Synthetic oligonucleotide
gcggactgtgtttgacctgcctggatatta

SEQ ID NO: 249043 - DNA, 30 bp, Artificial Sequence
  Synthetic oligonucleotide
atggtgatcgtccaagcacccgatatatta

SEQ ID NO: 249044 - DNA, 30 bp, Artificial Sequence
  Synthetic oligonucleotide
cgatttgtgaagagtcgcgtggttatatta

SEQ ID NO: 249045 - DNA, 31 bp, Artificial Sequence
  Synthetic oligonucleotide
agggccaggggcagtcgaatctcggctatta

SEQ ID NO: 249046 - DNA, 30 bp, Artificial Sequence
  Synthetic oligonucleotide
gtaccctaatcaatgcgatcccctctatta

SEQ ID NO: 249047 - DNA, 30 bp, Artificial Sequence
  Synthetic oligonucleotide
ggttgggcgaggcacttccagtttctatta

SEQ ID NO: 249048 - DNA, 30 bp, Artificial Sequence
  Synthetic oligonucleotide
gagggcctgggatatgtacaagcagtatta

SEQ ID NO: 249049 - DNA, 30 bp, Artificial Sequence
  Synthetic oligonucleotide
atgtgagcagggagacgcatttcagtatta

SEQ ID NO: 249050 - DNA, 30 bp, Artificial Sequence
  Synthetic oligonucleotide
caaattgaatatggtcgaccgagcgtatta

SEQ ID NO: 249051 - DNA, 31 bp, Artificial Sequence
  Synthetic oligonucleotide
ctgtcgccaaagtgtatgggggtgggtatta

SEQ ID NO: 249052 - DNA, 30 bp, Artificial Sequence
  Synthetic oligonucleotide
ccttaaccaatttcaattactttggtatta

SEQ ID NO: 249053 - DNA, 30 bp, Artificial Sequence
  Synthetic oligonucleotide
attagatatttacacggttgaactgtatta

SEQ ID NO: 249054 - DNA, 30 bp, Artificial Sequence
  Synthetic oligonucleotide
caccatgaagccagcgtccgtagtgtatta

SEQ ID NO: 249055 - DNA, 30 bp, Artificial Sequence
  Synthetic oligonucleotide
ccgcatgttaattacagcatcaaattatta

SEQ ID NO: 249056 - DNA, 31 bp, Artificial Sequence
  Synthetic oligonucleotide
agaaccaatatggaactgttccctattatta

SEQ ID NO: 249057 - DNA, 30 bp, Artificial Sequence
  Synthetic oligonucleotide
taaaggactcaatatccaggggagttatta

SEQ ID NO: 249058 - DNA, 30 bp, Artificial Sequence
  Synthetic oligonucleotide
ccatcaccccagaatagctttccgttatta

SEQ ID NO: 249059 - DNA, 30 bp, Artificial Sequence
  Synthetic oligonucleotide
tggaagtccgtcttagttcaacctttatta

SEQ ID NO: 249060 - DNA, 30 bp, Artificial Sequence
  Synthetic oligonucleotide
gtatcattaagacttgcggaaataaactta

SEQ ID NO: 249061 - DNA, 30 bp, Artificial Sequence
  Synthetic oligonucleotide
gggggttattgcgagttggacagcaactta

SEQ ID NO: 249062 - DNA, 30 bp, Artificial Sequence
  Synthetic oligonucleotide
tatcggccgtaagttcaaagttggaactta

SEQ ID NO: 249063 - DNA, 30 bp, Artificial Sequence
  Synthetic oligonucleotide
tgacgagttacctgggctgtactgaactta

SEQ ID NO: 249064 - DNA, 30 bp, Artificial Sequence
  Synthetic oligonucleotide
catagaatcgttaagaggttataacactta

SEQ ID NO: 249065 - DNA, 30 bp, Artificial Sequence
  Synthetic oligonucleotide
ccgttgtcatatgaagtcaaatcacactta

SEQ ID NO: 249066 - DNA, 30 bp, Artificial Sequence
  Synthetic oligonucleotide
aagctgtgagatatgcatcaactacactta

SEQ ID NO: 249067 - DNA, 30 bp, Artificial Sequence
  Synthetic oligonucleotide
ggggcggggggctctcaatgccgccactta

SEQ ID NO: 249068 - DNA, 30 bp, Artificial Sequence
  Synthetic oligonucleotide
cgtgttcgttttgcccgacctaagcactta

SEQ ID NO: 249069 - DNA, 31 bp, Artificial Sequence
  Synthetic oligonucleotide
gcaactaaagttggactgttgcgagcactta

SEQ ID NO: 249070 - DNA, 30 bp, Artificial Sequence
  Synthetic oligonucleotide
ttcgacaaggacaccggctcaacgcactta

SEQ ID NO: 249071 - DNA, 30 bp, Artificial Sequence
  Synthetic oligonucleotide
aatcgtcataagttcgcaaaaaatcactta

SEQ ID NO: 249072 - DNA, 30 bp, Artificial Sequence
  Synthetic oligonucleotide
cagctggacgtacttcaatcatttcactta

SEQ ID NO: 249073 - DNA, 30 bp, Artificial Sequence
  Synthetic oligonucleotide
ggatgcggtttaggctctggcaaagactta

SEQ ID NO: 249074 - DNA, 30 bp, Artificial Sequence
  Synthetic oligonucleotide
agtaaatcgacagaacttgttccagactta

SEQ ID NO: 249075 - DNA, 30 bp, Artificial Sequence
  Synthetic oligonucleotide
tatgtcgagtctgtcaattcgcacgactta

SEQ ID NO: 249076 - DNA, 30 bp, Artificial Sequence
  Synthetic oligonucleotide
acaatagacgatgtacctgtcgccgactta

SEQ ID NO: 249077 - DNA, 30 bp, Artificial Sequence
  Synthetic oligonucleotide
acaacatggaatgggtgtactggcgactta

SEQ ID NO: 249078 - DNA, 30 bp, Artificial Sequence
  Synthetic oligonucleotide
cgtttacatcaatctataacggaggactta

SEQ ID NO: 249079 - DNA, 30 bp, Artificial Sequence
  Synthetic oligonucleotide
caaggcttatctcggaacaccgcggactta

SEQ ID NO: 249080 - DNA, 30 bp, Artificial Sequence
  Synthetic oligonucleotide
gagccttgctaggtgggttaagtggactta

SEQ ID NO: 249081 - DNA, 30 bp, Artificial Sequence
  Synthetic oligonucleotide
gcgaaaaagtatgctcggtgaggtgactta

SEQ ID NO: 249082 - DNA, 30 bp, Artificial Sequence
  Synthetic oligonucleotide
accttcaccgagttgcctggggcatactta

SEQ ID NO: 249083 - DNA, 30 bp, Artificial Sequence
  Synthetic oligonucleotide
tacttattggaataataagtcgtatactta

SEQ ID NO: 249084 - DNA, 30 bp, Artificial Sequence
  Synthetic oligonucleotide
tgcttcaaacaagttcttgtgcgctactta

SEQ ID NO: 249085 - DNA, 30 bp, Artificial Sequence
  Synthetic oligonucleotide
cggaccaacaataagttaggagggtactta

SEQ ID NO: 249086 - DNA, 30 bp, Artificial Sequence
  Synthetic oligonucleotide
taggtcgacgatcgtcttggggggtactta

SEQ ID NO: 249087 - DNA, 30 bp, Artificial Sequence
  Synthetic oligonucleotide
caaactcaaagtgaaagctaaatgtactta

SEQ ID NO: 249088 - DNA, 30 bp, Artificial Sequence
  Synthetic oligonucleotide
taggttcacatacatgagctaggttactta

SEQ ID NO: 249089 - DNA, 30 bp, Artificial Sequence
  Synthetic oligonucleotide
ctaaatgatatgaacagtgttagaacctta

SEQ ID NO: 249090 - DNA, 30 bp, Artificial Sequence
  Synthetic oligonucleotide
ccaccattagctcgccgagcgggaacctta

SEQ ID NO: 249091 - DNA, 30 bp, Artificial Sequence
  Synthetic oligonucleotide
ttcatagagtaacggtaagttgagacctta

SEQ ID NO: 249092 - DNA, 30 bp, Artificial Sequence
  Synthetic oligonucleotide
tgctgctagaggaggactttacggacctta

SEQ ID NO: 249093 - DNA, 30 bp, Artificial Sequence
  Synthetic oligonucleotide
atgtcacgcagagtacctagtgtgacctta

SEQ ID NO: 249094 - DNA, 30 bp, Artificial Sequence
  Synthetic oligonucleotide
ggccgcaggtctgggggagccgctacctta

SEQ ID NO: 249095 - DNA, 30 bp, Artificial Sequence
  Synthetic oligonucleotide
gcggggttcagggcagaatggtgtacctta

SEQ ID NO: 249096 - DNA, 30 bp, Artificial Sequence
  Synthetic oligonucleotide
taaacgttcaaagtatgttataaaccctta

SEQ ID NO: 249097 - DNA, 30 bp, Artificial Sequence
  Synthetic oligonucleotide
cgtgtggcgctcacttaaaatgtaccctta

SEQ ID NO: 249098 - DNA, 27 bp, Artificial Sequence
  Synthetic oligonucleotide
cgatgattcgggggatagtccccctta

SEQ ID NO: 249099 - DNA, 30 bp, Artificial Sequence
  Synthetic oligonucleotide
tggtggtacatgcaccggtatggtccctta

SEQ ID NO: 249100 - DNA, 30 bp, Artificial Sequence
  Synthetic oligonucleotide
caattatataccatcccggaatgtccctta

SEQ ID NO: 249101 - DNA, 30 bp, Artificial Sequence
  Synthetic oligonucleotide
acaggtacgtgaacgaaaggttgtccctta

SEQ ID NO: 249102 - DNA, 30 bp, Artificial Sequence
  Synthetic oligonucleotide
atcaggcggtagaaaagtgtcagagcctta

SEQ ID NO: 249103 - DNA, 30 bp, Artificial Sequence
  Synthetic oligonucleotide
gtttaaacatagaggggttcctgagcctta

SEQ ID NO: 249104 - DNA, 30 bp, Artificial Sequence
  Synthetic oligonucleotide
gtaggtcataaaactgtgtgtctcgcctta

SEQ ID NO: 249105 - DNA, 30 bp, Artificial Sequence
  Synthetic oligonucleotide
ctccgtaaaaggtcggctactatggcctta

SEQ ID NO: 249106 - DNA, 30 bp, Artificial Sequence
  Synthetic oligonucleotide
atagcggagatcggcaacgacttggcctta

SEQ ID NO: 249107 - DNA, 30 bp, Artificial Sequence
  Synthetic oligonucleotide
tccgatgaggatctaaggtcataatcctta

SEQ ID NO: 249108 - DNA, 30 bp, Artificial Sequence
  Synthetic oligonucleotide
gtccttaagacatgtatcgaatcctcctta

SEQ ID NO: 249109 - DNA, 30 bp, Artificial Sequence
  Synthetic oligonucleotide
ccattcgggagggtaagcagccagtcctta

SEQ ID NO: 249110 - DNA, 30 bp, Artificial Sequence
  Synthetic oligonucleotide
tagttgatagtaagagggaactgcagctta

SEQ ID NO: 249111 - DNA, 30 bp, Artificial Sequence
  Synthetic oligonucleotide
ccgccaccacgaatgttgtggaggagctta

SEQ ID NO: 249112 - DNA, 29 bp, Artificial Sequence
  Synthetic oligonucleotide
gacaggaaagcctaatcaaattgagctta

SEQ ID NO: 249113 - DNA, 30 bp, Artificial Sequence
  Synthetic oligonucleotide
taaaaatgagaacacagtatacttagctta

SEQ ID NO: 249114 - DNA, 30 bp, Artificial Sequence
  Synthetic oligonucleotide
agatgctagttatgggcactctaacgctta

SEQ ID NO: 249115 - DNA, 30 bp, Artificial Sequence
  Synthetic oligonucleotide
cggggggcaaggaggaatcagtcccgctta

SEQ ID NO: 249116 - DNA, 30 bp, Artificial Sequence
  Synthetic oligonucleotide
caagtctggggggcacgtttattccgctta

SEQ ID NO: 249117 - DNA, 30 bp, Artificial Sequence
  Synthetic oligonucleotide
aataaagggaggattgatactgtgcgctta

SEQ ID NO: 249118 - DNA, 30 bp, Artificial Sequence
  Synthetic oligonucleotide
gtgaggcccaggctcggcgggattcgctta

SEQ ID NO: 249119 - DNA, 30 bp, Artificial Sequence
  Synthetic oligonucleotide
gcgatagagtattggaatctccaaggctta

SEQ ID NO: 249120 - DNA, 30 bp, Artificial Sequence
  Synthetic oligonucleotide
tgccctggaaaattcacagtctgaggctta

SEQ ID NO: 249121 - DNA, 30 bp, Artificial Sequence
  Synthetic oligonucleotide
gatcaaggtaagcgcgtacacgtaggctta

SEQ ID NO: 249122 - DNA, 30 bp, Artificial Sequence
  Synthetic oligonucleotide
agcggaagatcataactctgcgtaggctta

SEQ ID NO: 249123 - DNA, 30 bp, Artificial Sequence
  Synthetic oligonucleotide
cttaccctcaggcctacctcacccggctta

SEQ ID NO: 249124 - DNA, 30 bp, Artificial Sequence
  Synthetic oligonucleotide
atgttacaataaacgggggaatccggctta

SEQ ID NO: 249125 - DNA, 30 bp, Artificial Sequence
  Synthetic oligonucleotide
gtaactgtaacgaagaggtcctccggctta

SEQ ID NO: 249126 - DNA, 30 bp, Artificial Sequence
  Synthetic oligonucleotide
tagtggtgcgtgcaagggcaccagggctta

SEQ ID NO: 249127 - DNA, 30 bp, Artificial Sequence
  Synthetic oligonucleotide
gtagctaagttggctttttgggagggctta

SEQ ID NO: 249128 - DNA, 30 bp, Artificial Sequence
  Synthetic oligonucleotide
ggatgttcagagtcatggaaagggggctta

SEQ ID NO: 249129 - DNA, 30 bp, Artificial Sequence
  Synthetic oligonucleotide
gctggtaataccagcaaggtgctgggctta

SEQ ID NO: 249130 - DNA, 30 bp, Artificial Sequence
  Synthetic oligonucleotide
tgtgtagtgtcccggttcccgtctggctta

SEQ ID NO: 249131 - DNA, 30 bp, Artificial Sequence
  Synthetic oligonucleotide
atggtgctgtgtgcttgctgaagtggctta

SEQ ID NO: 249132 - DNA, 30 bp, Artificial Sequence
  Synthetic oligonucleotide
tctggatgttactggcatggatttggctta

SEQ ID NO: 249133 - DNA, 30 bp, Artificial Sequence
  Synthetic oligonucleotide
gaaagccgtaccatgtcagaaccatgctta

SEQ ID NO: 249134 - DNA, 30 bp, Artificial Sequence
  Synthetic oligonucleotide
accaaatgggacatgagatggctctgctta

SEQ ID NO: 249135 - DNA, 30 bp, Artificial Sequence
  Synthetic oligonucleotide
gcacgaagcctcgacctcataccgtgctta

SEQ ID NO: 249136 - DNA, 30 bp, Artificial Sequence
  Synthetic oligonucleotide
gtgaaggataccggcgttgagctttgctta

SEQ ID NO: 249137 - DNA, 30 bp, Artificial Sequence
  Synthetic oligonucleotide
gtctggaagatcctattgcgtacaatctta

SEQ ID NO: 249138 - DNA, 30 bp, Artificial Sequence
  Synthetic oligonucleotide
gaggcgttgcgcctgggcaaggtaatctta

SEQ ID NO: 249139 - DNA, 30 bp, Artificial Sequence
  Synthetic oligonucleotide
gcagttcgggatggtaaccacagcatctta

SEQ ID NO: 249140 - DNA, 30 bp, Artificial Sequence
  Synthetic oligonucleotide
cgtgatggtgaggacgttaggactatctta

SEQ ID NO: 249141 - DNA, 30 bp, Artificial Sequence
  Synthetic oligonucleotide
ccttcaaagtggtatttcacaggtatctta

SEQ ID NO: 249142 - DNA, 30 bp, Artificial Sequence
  Synthetic oligonucleotide
gatcccgagataacgaggaatggtatctta

SEQ ID NO: 249143 - DNA, 30 bp, Artificial Sequence
  Synthetic oligonucleotide
aagaaggggagtgttccatagtagctctta

SEQ ID NO: 249144 - DNA, 30 bp, Artificial Sequence
  Synthetic oligonucleotide
tcccatactggggacttacggctgctctta

SEQ ID NO: 249145 - DNA, 30 bp, Artificial Sequence
  Synthetic oligonucleotide
gaagtatagttgcaatctacgtgtctctta

SEQ ID NO: 249146 - DNA, 30 bp, Artificial Sequence
  Synthetic oligonucleotide
tctatggagtggtgcacaattcaagtctta

SEQ ID NO: 249147 - DNA, 30 bp, Artificial Sequence
  Synthetic oligonucleotide
gctaagtctgcgactggcggactagtctta

SEQ ID NO: 249148 - DNA, 30 bp, Artificial Sequence
  Synthetic oligonucleotide
aagactttgcggcacctggcggaggtctta

SEQ ID NO: 249149 - DNA, 30 bp, Artificial Sequence
  Synthetic oligonucleotide
gataagtggagccagtcactatcggtctta

SEQ ID NO: 249150 - DNA, 30 bp, Artificial Sequence
  Synthetic oligonucleotide
gatgctacacagagagacatgcatgtctta

SEQ ID NO: 249151 - DNA, 30 bp, Artificial Sequence
  Synthetic oligonucleotide
gacgtttactgaattatataaactgtctta

SEQ ID NO: 249152 - DNA, 30 bp, Artificial Sequence
  Synthetic oligonucleotide
ggaatgaacttggtagggaacggtgtctta

SEQ ID NO: 249153 - DNA, 30 bp, Artificial Sequence
  Synthetic oligonucleotide
tcctacatgttcattttccactacttctta

SEQ ID NO: 249154 - DNA, 29 bp, Artificial Sequence
  Synthetic oligonucleotide
gttacactagagcttgatgtcagttctta

SEQ ID NO: 249155 - DNA, 30 bp, Artificial Sequence
  Synthetic oligonucleotide
atacgtatggattctagagtagggttctta

SEQ ID NO: 249156 - DNA, 30 bp, Artificial Sequence
  Synthetic oligonucleotide
taggttttgcgccgattggacactttctta

SEQ ID NO: 249157 - DNA, 30 bp, Artificial Sequence
  Synthetic oligonucleotide
atgatacagaaggctaaatgacgtttctta

SEQ ID NO: 249158 - DNA, 30 bp, Artificial Sequence
  Synthetic oligonucleotide
acacacgtcattccgtgcagtccaaagtta

SEQ ID NO: 249159 - DNA, 30 bp, Artificial Sequence
  Synthetic oligonucleotide
acagcagtcaacatgatgtcctcaaagtta

SEQ ID NO: 249160 - DNA, 30 bp, Artificial Sequence
  Synthetic oligonucleotide
ttccgtcgtaatcggtggaccagaaagtta

SEQ ID NO: 249161 - DNA, 30 bp, Artificial Sequence
  Synthetic oligonucleotide
aattacagacctaggaccggcagaaagtta

SEQ ID NO: 249162 - DNA, 30 bp, Artificial Sequence
  Synthetic oligonucleotide
gtgaacaggtagtaagtttaatggaagtta

SEQ ID NO: 249163 - DNA, 30 bp, Artificial Sequence
  Synthetic oligonucleotide
gaaaataagggctatatgacaagtaagtta

SEQ ID NO: 249164 - DNA, 30 bp, Artificial Sequence
  Synthetic oligonucleotide
ggtctaggacatagcaagattatacagtta

SEQ ID NO: 249165 - DNA, 30 bp, Artificial Sequence
  Synthetic oligonucleotide
ttggggtccaagtctctacgatcccagtta

SEQ ID NO: 249166 - DNA, 30 bp, Artificial Sequence
  Synthetic oligonucleotide
tatcgtattccggttagaatattccagtta

SEQ ID NO: 249167 - DNA, 30 bp, Artificial Sequence
  Synthetic oligonucleotide
aacgataacgataggtcccgcaagcagtta

SEQ ID NO: 249168 - DNA, 30 bp, Artificial Sequence
  Synthetic oligonucleotide
aacttgcattcgggggcaacaatgcagtta

SEQ ID NO: 249169 - DNA, 30 bp, Artificial Sequence
  Synthetic oligonucleotide
ctagaggcacagccacatactgatcagtta

SEQ ID NO: 249170 - DNA, 30 bp, Artificial Sequence
  Synthetic oligonucleotide
ccatgagctaaagggggacctagtcagtta

SEQ ID NO: 249171 - DNA, 30 bp, Artificial Sequence
  Synthetic oligonucleotide
atcttgggtgatatgcccgcacgagagtta

SEQ ID NO: 249172 - DNA, 30 bp, Artificial Sequence
  Synthetic oligonucleotide
ttgactcagattcgacaggcggacgagtta

SEQ ID NO: 249173 - DNA, 30 bp, Artificial Sequence
  Synthetic oligonucleotide
atgcttagataactagtgacggccgagtta

SEQ ID NO: 249174 - DNA, 30 bp, Artificial Sequence
  Synthetic oligonucleotide
gggttaagccactggtaagagtactagtta

SEQ ID NO: 249175 - DNA, 30 bp, Artificial Sequence
  Synthetic oligonucleotide
gaaaacgagaagatcaaacggtcctagtta

SEQ ID NO: 249176 - DNA, 30 bp, Artificial Sequence
  Synthetic oligonucleotide
gagtcccataacggagtgtccgagtagtta

SEQ ID NO: 249177 - DNA, 30 bp, Artificial Sequence
  Synthetic oligonucleotide
gcggaaattgttaaggaaagatcgtagtta

SEQ ID NO: 249178 - DNA, 30 bp, Artificial Sequence
  Synthetic oligonucleotide
tgcatagggggcctcggtacaaggtagtta

SEQ ID NO: 249179 - DNA, 30 bp, Artificial Sequence
  Synthetic oligonucleotide
atacggcttcacaagatatgtcaaacgtta

SEQ ID NO: 249180 - DNA, 30 bp, Artificial Sequence
  Synthetic oligonucleotide
ctcaggtactagacttcaaacattacgtta

SEQ ID NO: 249181 - DNA, 30 bp, Artificial Sequence
  Synthetic oligonucleotide
ttcgtaatatgtcacccagacctaccgtta

SEQ ID NO: 249182 - DNA, 30 bp, Artificial Sequence
  Synthetic oligonucleotide
aggtcatcaaccccatgattccacccgtta

SEQ ID NO: 249183 - DNA, 30 bp, Artificial Sequence
  Synthetic oligonucleotide
gacgtaacgacaacaccgtgcctcccgtta

SEQ ID NO: 249184 - DNA, 30 bp, Artificial Sequence
  Synthetic oligonucleotide
ctactggtccaaccttcactcgtcccgtta

SEQ ID NO: 249185 - DNA, 30 bp, Artificial Sequence
  Synthetic oligonucleotide
ttgacaatccttctgctggtattcccgtta

SEQ ID NO: 249186 - DNA, 30 bp, Artificial Sequence
  Synthetic oligonucleotide
gggtatgaatgtactacttagggtccgtta

SEQ ID NO: 249187 - DNA, 30 bp, Artificial Sequence
  Synthetic oligonucleotide
tacgctttgcgtatcgcctgcattccgtta

SEQ ID NO: 249188 - DNA, 30 bp, Artificial Sequence
  Synthetic oligonucleotide
gcatggaaacgaacgcaacgacttccgtta

SEQ ID NO: 249189 - DNA, 30 bp, Artificial Sequence
  Synthetic oligonucleotide
tcagaccaataccgttccaagatagcgtta

SEQ ID NO: 249190 - DNA, 30 bp, Artificial Sequence
  Synthetic oligonucleotide
acagaagatgaatgtggatggcgcgcgtta

SEQ ID NO: 249191 - DNA, 30 bp, Artificial Sequence
  Synthetic oligonucleotide
ctagccggggaaacgtataccgtggcgtta

SEQ ID NO: 249192 - DNA, 30 bp, Artificial Sequence
  Synthetic oligonucleotide
cgtaccgttctacacttgtaatttgcgtta

SEQ ID NO: 249193 - DNA, 30 bp, Artificial Sequence
  Synthetic oligonucleotide
tagggctcaagccgtctgaggtttgcgtta

SEQ ID NO: 249194 - DNA, 30 bp, Artificial Sequence
  Synthetic oligonucleotide
atggagtgcatgaagtttagagaatcgtta

SEQ ID NO: 249195 - DNA, 30 bp, Artificial Sequence
  Synthetic oligonucleotide
gcattgcacagcttgagtcaatcatcgtta

SEQ ID NO: 249196 - DNA, 30 bp, Artificial Sequence
  Synthetic oligonucleotide
cgacccctttgcggtacttgatcctcgtta

SEQ ID NO: 249197 - DNA, 30 bp, Artificial Sequence
  Synthetic oligonucleotide
aagtgcagcgcccagccaaccccgtcgtta

SEQ ID NO: 249198 - DNA, 30 bp, Artificial Sequence
  Synthetic oligonucleotide
gggtttagtatcaccgcaacagcgtcgtta

SEQ ID NO: 249199 - DNA, 30 bp, Artificial Sequence
  Synthetic oligonucleotide
tccccaagaattcccctatgaatgtcgtta

SEQ ID NO: 249200 - DNA, 30 bp, Artificial Sequence
  Synthetic oligonucleotide
aaacggccaaacgatcaatacttaaggtta

SEQ ID NO: 249201 - DNA, 30 bp, Artificial Sequence
  Synthetic oligonucleotide
attagctcagtcctaataggatacaggtta

SEQ ID NO: 249202 - DNA, 30 bp, Artificial Sequence
  Synthetic oligonucleotide
acttcggtttaacacaaagcggtacggtta

SEQ ID NO: 249203 - DNA, 30 bp, Artificial Sequence
  Synthetic oligonucleotide
ccctttcattcggtcccatgattacggtta

SEQ ID NO: 249204 - DNA, 30 bp, Artificial Sequence
  Synthetic oligonucleotide
cctatcgagtactgcccaacccttcggtta

SEQ ID NO: 249205 - DNA, 30 bp, Artificial Sequence
  Synthetic oligonucleotide
cagtgcttggagatatgggtctaagggtta

SEQ ID NO: 249206 - DNA, 30 bp, Artificial Sequence
  Synthetic oligonucleotide
atacggactccattacaacctccagggtta

SEQ ID NO: 249207 - DNA, 30 bp, Artificial Sequence
  Synthetic oligonucleotide
atcattaggctcgacaatatacgagggtta

SEQ ID NO: 249208 - DNA, 30 bp, Artificial Sequence
  Synthetic oligonucleotide
ggagtttaggaacaataacaaaccgggtta

SEQ ID NO: 249209 - DNA, 36 bp, Artificial Sequence
  Synthetic oligonucleotide
tatagtaggcaggcagtgatgggtggttgcgggtta

SEQ ID NO: 249210 - DNA, 30 bp, Artificial Sequence
  Synthetic oligonucleotide
ggctaaaattcatcattgttcatcgggtta

SEQ ID NO: 249211 - DNA, 30 bp, Artificial Sequence
  Synthetic oligonucleotide
tccaggatctcacttccttgcccatggtta

SEQ ID NO: 249212 - DNA, 30 bp, Artificial Sequence
  Synthetic oligonucleotide
gcatgccatcgagcctacattcgctggtta

SEQ ID NO: 249213 - DNA, 30 bp, Artificial Sequence
  Synthetic oligonucleotide
gttgtctacgctgttcaggatacgtggtta

SEQ ID NO: 249214 - DNA, 30 bp, Artificial Sequence
  Synthetic oligonucleotide
catcatgagagttccaagggaaggtggtta

SEQ ID NO: 249215 - DNA, 30 bp, Artificial Sequence
  Synthetic oligonucleotide
ggtggacggcacggcgatgacaggtggtta

SEQ ID NO: 249216 - DNA, 30 bp, Artificial Sequence
  Synthetic oligonucleotide
accgtgggggtttcacactttacttggtta

SEQ ID NO: 249217 - DNA, 30 bp, Artificial Sequence
  Synthetic oligonucleotide
catagtctaggaataatctaactcatgtta

SEQ ID NO: 249218 - DNA, 30 bp, Artificial Sequence
  Synthetic oligonucleotide
attgcaaatgtcggtagtatggtcatgtta

SEQ ID NO: 249219 - DNA, 30 bp, Artificial Sequence
  Synthetic oligonucleotide
caaaatatgctcggggatataaagatgtta

SEQ ID NO: 249220 - DNA, 30 bp, Artificial Sequence
  Synthetic oligonucleotide
gcacgaagcagccaactcaacgggatgtta

SEQ ID NO: 249221 - DNA, 30 bp, Artificial Sequence
  Synthetic oligonucleotide
acaggactcattattgcaactctgatgtta

SEQ ID NO: 249222 - DNA, 30 bp, Artificial Sequence
  Synthetic oligonucleotide
cacctagatggtaacgcttttagtatgtta

SEQ ID NO: 249223 - DNA, 30 bp, Artificial Sequence
  Synthetic oligonucleotide
gggaataacttcatccttgccattatgtta

SEQ ID NO: 249224 - DNA, 30 bp, Artificial Sequence
  Synthetic oligonucleotide
gacagagggtgatcgtgtctattcctgtta

SEQ ID NO: 249225 - DNA, 30 bp, Artificial Sequence
  Synthetic oligonucleotide
actgggactgcaatatgtggccctctgtta

SEQ ID NO: 249226 - DNA, 30 bp, Artificial Sequence
  Synthetic oligonucleotide
ggaactccgtggctgaaataaagtctgtta

SEQ ID NO: 249227 - DNA, 30 bp, Artificial Sequence
  Synthetic oligonucleotide
tccagtatggaacttactttaaaagtgtta

SEQ ID NO: 249228 - DNA, 30 bp, Artificial Sequence
  Synthetic oligonucleotide
ggcgaccagttaataatggatatagtgtta

SEQ ID NO: 249229 - DNA, 30 bp, Artificial Sequence
  Synthetic oligonucleotide
acccgtctgggcgagtcttggatcgtgtta

SEQ ID NO: 249230 - DNA, 30 bp, Artificial Sequence
  Synthetic oligonucleotide
ttctgacctgccggggcgaggaatgtgtta

SEQ ID NO: 249231 - DNA, 30 bp, Artificial Sequence
  Synthetic oligonucleotide
acgtcttcagtaggaattcaagccttgtta

SEQ ID NO: 249232 - DNA, 30 bp, Artificial Sequence
  Synthetic oligonucleotide
agggccgcggtgattgaacttcgtttgtta

SEQ ID NO: 249233 - DNA, 30 bp, Artificial Sequence
  Synthetic oligonucleotide
cacacagtctcagccagaggaacaaattta

SEQ ID NO: 249234 - DNA, 30 bp, Artificial Sequence
  Synthetic oligonucleotide
aacatagctgtgtaacacgtctcaaattta

SEQ ID NO: 249235 - DNA, 30 bp, Artificial Sequence
  Synthetic oligonucleotide
tgtccagccaacctaccagcgagtaattta

SEQ ID NO: 249236 - DNA, 30 bp, Artificial Sequence
  Synthetic oligonucleotide
acacgagatacactctcaaggagtaattta

SEQ ID NO: 249237 - DNA, 30 bp, Artificial Sequence
  Synthetic oligonucleotide
gcacctatgaatgcgttaagtagtaattta

SEQ ID NO: 249238 - DNA, 30 bp, Artificial Sequence
  Synthetic oligonucleotide
agcagtatcgtgaggggcaaacgacattta

SEQ ID NO: 249239 - DNA, 30 bp, Artificial Sequence
  Synthetic oligonucleotide
acataaccttggaagaactcatagcattta

SEQ ID NO: 249240 - DNA, 30 bp, Artificial Sequence
  Synthetic oligonucleotide
accgagacgttgcggttggtcgtgcattta

SEQ ID NO: 249241 - DNA, 30 bp, Artificial Sequence
  Synthetic oligonucleotide
atccatccgaacacgtaatatattcattta

SEQ ID NO: 249242 - DNA, 30 bp, Artificial Sequence
  Synthetic oligonucleotide
cgggttgtactcgtcccgaacgttcattta

SEQ ID NO: 249243 - DNA, 30 bp, Artificial Sequence
  Synthetic oligonucleotide
gtatgggagtgctactaatagcaagattta

SEQ ID NO: 249244 - DNA, 30 bp, Artificial Sequence
  Synthetic oligonucleotide
ccgccatggaactgccttaccccagattta

SEQ ID NO: 249245 - DNA, 30 bp, Artificial Sequence
  Synthetic oligonucleotide
ctttgacacgaggaacatccgatagattta

SEQ ID NO: 249246 - DNA, 30 bp, Artificial Sequence
  Synthetic oligonucleotide
ggtagctcgggacctgttccttgcgattta

SEQ ID NO: 249247 - DNA, 30 bp, Artificial Sequence
  Synthetic oligonucleotide
acttgcgcgtcatgtatttacctcgattta

SEQ ID NO: 249248 - DNA, 30 bp, Artificial Sequence
  Synthetic oligonucleotide
ctagttcctgaggggagtcgagaggattta

SEQ ID NO: 249249 - DNA, 30 bp, Artificial Sequence
  Synthetic oligonucleotide
cgctttgtacagacgaacctagaggattta

SEQ ID NO: 249250 - DNA, 30 bp, Artificial Sequence
  Synthetic oligonucleotide
acgaaacggggggagtagcgttaggattta

SEQ ID NO: 249251 - DNA, 30 bp, Artificial Sequence
  Synthetic oligonucleotide
agaccacaaacaattgttaggtttgattta

SEQ ID NO: 249252 - DNA, 30 bp, Artificial Sequence
  Synthetic oligonucleotide
aaagtgccgtaggacttcgggctttattta

SEQ ID NO: 249253 - DNA, 30 bp, Artificial Sequence
  Synthetic oligonucleotide
tggaagaccgggctatcgctcgtttattta

SEQ ID NO: 249254 - DNA, 30 bp, Artificial Sequence
  Synthetic oligonucleotide
acagattttaggattcaaactgtgacttta

SEQ ID NO: 249255 - DNA, 30 bp, Artificial Sequence
  Synthetic oligonucleotide
caagttcgagaaaatgactaatctacttta

SEQ ID NO: 249256 - DNA, 30 bp, Artificial Sequence
  Synthetic oligonucleotide
gaggtcaggcaagctcatggtgatccttta

SEQ ID NO: 249257 - DNA, 30 bp, Artificial Sequence
  Synthetic oligonucleotide
cggttcaaaatcgaagaatagtatccttta

SEQ ID NO: 249258 - DNA, 31 bp, Artificial Sequence
  Synthetic oligonucleotide
accttgaatcagggagaggtgggtcgcttta

SEQ ID NO: 249259 - DNA, 31 bp, Artificial Sequence
  Synthetic oligonucleotide
ctaccgatggttcatcgaaaggcgggcttta

SEQ ID NO: 249260 - DNA, 30 bp, Artificial Sequence
  Synthetic oligonucleotide
agaatggtgatgagaatctcaacatcttta

SEQ ID NO: 249261 - DNA, 30 bp, Artificial Sequence
  Synthetic oligonucleotide
aggcgagccgtaaacggttttggctcttta

SEQ ID NO: 249262 - DNA, 30 bp, Artificial Sequence
  Synthetic oligonucleotide
ggagtatattctgaagttgcaacgtcttta

SEQ ID NO: 249263 - DNA, 30 bp, Artificial Sequence
  Synthetic oligonucleotide
ggaaagggactcgaccctaacatgtcttta

SEQ ID NO: 249264 - DNA, 30 bp, Artificial Sequence
  Synthetic oligonucleotide
ctattggcggaagaatggaggcattcttta

SEQ ID NO: 249265 - DNA, 30 bp, Artificial Sequence
  Synthetic oligonucleotide
caaaataccagaatcatctggtccagttta

SEQ ID NO: 249266 - DNA, 30 bp, Artificial Sequence
  Synthetic oligonucleotide
gcaattcaggccgctcgagtacagagttta

SEQ ID NO: 249267 - DNA, 30 bp, Artificial Sequence
  Synthetic oligonucleotide
ttacgccaacgaccaaccaactgacgttta

SEQ ID NO: 249268 - DNA, 30 bp, Artificial Sequence
  Synthetic oligonucleotide
cgtcggaggtgacctcaagcgttacgttta

SEQ ID NO: 249269 - DNA, 30 bp, Artificial Sequence
  Synthetic oligonucleotide
atgtagagcatgttctggtgccttcgttta

SEQ ID NO: 249270 - DNA, 30 bp, Artificial Sequence
  Synthetic oligonucleotide
cttcgagtcactgtgcgcatgtaaggttta

SEQ ID NO: 249271 - DNA, 30 bp, Artificial Sequence
  Synthetic oligonucleotide
tcactggtgcgctggagtgatccaggttta

SEQ ID NO: 249272 - DNA, 30 bp, Artificial Sequence
  Synthetic oligonucleotide
tctgggcttctcctagtaggagcaggttta

SEQ ID NO: 249273 - DNA, 30 bp, Artificial Sequence
  Synthetic oligonucleotide
tgatcggacggttgcgaaagactaggttta

SEQ ID NO: 249274 - DNA, 30 bp, Artificial Sequence
  Synthetic oligonucleotide
gtcattgggtcctccgaaacttccggttta

SEQ ID NO: 249275 - DNA, 30 bp, Artificial Sequence
  Synthetic oligonucleotide
ggaccctacagtggttgtatctgcggttta

SEQ ID NO: 249276 - DNA, 30 bp, Artificial Sequence
  Synthetic oligonucleotide
tagttctgttgaagatatcggtgtggttta

SEQ ID NO: 249277 - DNA, 30 bp, Artificial Sequence
  Synthetic oligonucleotide
cggtccactctgggccgatttcaatgttta

SEQ ID NO: 249278 - DNA, 30 bp, Artificial Sequence
  Synthetic oligonucleotide
cgtgtatttacatacttcgatttatgttta

SEQ ID NO: 249279 - DNA, 30 bp, Artificial Sequence
  Synthetic oligonucleotide
atgggcatctatttctgaggattgtgttta

SEQ ID NO: 249280 - DNA, 30 bp, Artificial Sequence
  Synthetic oligonucleotide
atcctcgacccaaaccgtcctaattgttta

SEQ ID NO: 249281 - DNA, 30 bp, Artificial Sequence
  Synthetic oligonucleotide
caactgtccgtaaccatatcgggaatttta

SEQ ID NO: 249282 - DNA, 30 bp, Artificial Sequence
  Synthetic oligonucleotide
gttaggggtgcatatagccgaaacatttta

SEQ ID NO: 249283 - DNA, 30 bp, Artificial Sequence
  Synthetic oligonucleotide
cttaaagaacggttaagacctggcatttta

SEQ ID NO: 249284 - DNA, 30 bp, Artificial Sequence
  Synthetic oligonucleotide
ggaaagactctgggcacactgaagatttta

SEQ ID NO: 249285 - DNA, 30 bp, Artificial Sequence
  Synthetic oligonucleotide
ggtcgtcattctattacatagcggatttta

SEQ ID NO: 249286 - DNA, 30 bp, Artificial Sequence
  Synthetic oligonucleotide
tggtcctcttactgagcggcctgtatttta

SEQ ID NO: 249287 - DNA, 30 bp, Artificial Sequence
  Synthetic oligonucleotide
cgttggcccattgcaacagggtgtatttta

SEQ ID NO: 249288 - DNA, 30 bp, Artificial Sequence
  Synthetic oligonucleotide
tcgtaatgcgatggtagtggttttatttta

SEQ ID NO: 249289 - DNA, 30 bp, Artificial Sequence
  Synthetic oligonucleotide
atgctgtctgttgtgacgtcacacctttta

SEQ ID NO: 249290 - DNA, 30 bp, Artificial Sequence
  Synthetic oligonucleotide
gagctgcatgctacctagccgtccctttta

SEQ ID NO: 249291 - DNA, 30 bp, Artificial Sequence
  Synthetic oligonucleotide
cgcgtcaagagcgtgtctagggtcctttta

SEQ ID NO: 249292 - DNA, 30 bp, Artificial Sequence
  Synthetic oligonucleotide
ggtgaatggcgcagaacgcactaagtttta

SEQ ID NO: 249293 - DNA, 30 bp, Artificial Sequence
  Synthetic oligonucleotide
agacggggagtttcgtgagcctgagtttta

SEQ ID NO: 249294 - DNA, 30 bp, Artificial Sequence
  Synthetic oligonucleotide
aggcctgcgtaggcaaaaggtgtcgtttta

SEQ ID NO: 249295 - DNA, 30 bp, Artificial Sequence
  Synthetic oligonucleotide
aggcatgaaaggggcggacgtcgggtttta

SEQ ID NO: 249296 - DNA, 30 bp, Artificial Sequence
  Synthetic oligonucleotide
ccgttcctggcaatcgaatgttatgtttta

SEQ ID NO: 249297 - DNA, 30 bp, Artificial Sequence
  Synthetic oligonucleotide
ggtttctgcgccaacgtaaggggattttta

SEQ ID NO: 249298 - DNA, 30 bp, Artificial Sequence
  Synthetic oligonucleotide
tcagtgtctcgccaagagtggtggttttta

SEQ ID NO: 249299 - DNA, 30 bp, Artificial Sequence
  Synthetic oligonucleotide
gctatgctgtcgagtcggaacctgttttta

SEQ ID NO: 249300 - DNA, 30 bp, Artificial Sequence
  Synthetic oligonucleotide
atggatgcctactattatctggctttttta

SEQ ID NO: 249301 - DNA, 30 bp, Artificial Sequence
  Synthetic oligonucleotide
cgacgactaggacgttgcgcgccaaaaaac

SEQ ID NO: 249302 - DNA, 30 bp, Artificial Sequence
  Synthetic oligonucleotide
gtgtattcacaggtcccacggctcaaaaac

SEQ ID NO: 249303 - DNA, 30 bp, Artificial Sequence
  Synthetic oligonucleotide
ctgaaagttagaggcgtggtattcaaaaac

SEQ ID NO: 249304 - DNA, 30 bp, Artificial Sequence
  Synthetic oligonucleotide
gcttctaagtcaggcatccgatggaaaaac

SEQ ID NO: 249305 - DNA, 30 bp, Artificial Sequence
  Synthetic oligonucleotide
tcaaggggaggttatcggccaaaacaaaac

SEQ ID NO: 249306 - DNA, 30 bp, Artificial Sequence
  Synthetic oligonucleotide
cctgatagggctgatgcacgtctacaaaac

SEQ ID NO: 249307 - DNA, 30 bp, Artificial Sequence
  Synthetic oligonucleotide
ctggtacccaagttttaactgtcccaaaac

SEQ ID NO: 249308 - DNA, 30 bp, Artificial Sequence
  Synthetic oligonucleotide
ttcaatgactaaagagtgtcaacgcaaaac

SEQ ID NO: 249309 - DNA, 30 bp, Artificial Sequence
  Synthetic oligonucleotide
atcaggtgaatttgtgttggtgtgcaaaac

SEQ ID NO: 249310 - DNA, 31 bp, Artificial Sequence
  Synthetic oligonucleotide
caaaccaccttaaaacctcactcatcaaaac

SEQ ID NO: 249311 - DNA, 30 bp, Artificial Sequence
  Synthetic oligonucleotide
tctacataggaaccagtggacgatcaaaac

SEQ ID NO: 249312 - DNA, 30 bp, Artificial Sequence
  Synthetic oligonucleotide
tcaaggaacacatcccagaatgaagaaaac

SEQ ID NO: 249313 - DNA, 30 bp, Artificial Sequence
  Synthetic oligonucleotide
cctaagaaacaggagaagcccgcagaaaac

SEQ ID NO: 249314 - DNA, 30 bp, Artificial Sequence
  Synthetic oligonucleotide
cacgcgagcttccttccaccccccgaaaac

SEQ ID NO: 249315 - DNA, 30 bp, Artificial Sequence
  Synthetic oligonucleotide
aggaaccaccagttgagcaattgcgaaaac

SEQ ID NO: 249316 - DNA, 30 bp, Artificial Sequence
  Synthetic oligonucleotide
ctcagcaatcaaacggtctgcgaggaaaac

SEQ ID NO: 249317 - DNA, 30 bp, Artificial Sequence
  Synthetic oligonucleotide
ttccatggagagcattggatggaggaaaac

SEQ ID NO: 249318 - DNA, 30 bp, Artificial Sequence
  Synthetic oligonucleotide
catgatcgtgcagtacaaagatgggaaaac

SEQ ID NO: 249319 - DNA, 30 bp, Artificial Sequence
  Synthetic oligonucleotide
cgtgaagaggtccattctgggtgggaaaac

SEQ ID NO: 249320 - DNA, 30 bp, Artificial Sequence
  Synthetic oligonucleotide
catcaacgcaggaaatgattaggtgaaaac

SEQ ID NO: 249321 - DNA, 30 bp, Artificial Sequence
  Synthetic oligonucleotide
ggagccgcgtccgtgggatcagtctaaaac

SEQ ID NO: 249322 - DNA, 30 bp, Artificial Sequence
  Synthetic oligonucleotide
agatttagttcgttcagagggaagtaaaac

SEQ ID NO: 249323 - DNA, 30 bp, Artificial Sequence
  Synthetic oligonucleotide
ctaaagcaacatttagtatccacgtaaaac

SEQ ID NO: 249324 - DNA, 30 bp, Artificial Sequence
  Synthetic oligonucleotide
cgagcagggcagctagggaagttttaaaac

SEQ ID NO: 249325 - DNA, 30 bp, Artificial Sequence
  Synthetic oligonucleotide
aaaaattgccaatggaaatttgaaacaaac

SEQ ID NO: 249326 - DNA, 30 bp, Artificial Sequence
  Synthetic oligonucleotide
ggcctgcgcaatagtggggtatcgacaaac

SEQ ID NO: 249327 - DNA, 30 bp, Artificial Sequence
  Synthetic oligonucleotide
taaccatgcgggtgcctctgacggacaaac

SEQ ID NO: 249328 - DNA, 30 bp, Artificial Sequence
  Synthetic oligonucleotide
atcggatcgagctatgcaatcaatacaaac

SEQ ID NO: 249329 - DNA, 30 bp, Artificial Sequence
  Synthetic oligonucleotide
atctgataacagtgcacctgttcaccaaac

SEQ ID NO: 249330 - DNA, 30 bp, Artificial Sequence
  Synthetic oligonucleotide
gattaacaaagagtcgggcgcggaccaaac

SEQ ID NO: 249331 - DNA, 30 bp, Artificial Sequence
  Synthetic oligonucleotide
ccacatgctatgcaggtggttataccaaac

SEQ ID NO: 249332 - DNA, 30 bp, Artificial Sequence
  Synthetic oligonucleotide
taaaaaagggttaaagcgcctcgcccaaac

SEQ ID NO: 249333 - DNA, 30 bp, Artificial Sequence
  Synthetic oligonucleotide
gcgaccttgaccgcgggggaagtcccaaac

SEQ ID NO: 249334 - DNA, 30 bp, Artificial Sequence
  Synthetic oligonucleotide
agtcatttttttctaagaactgaagcaaac

SEQ ID NO: 249335 - DNA, 30 bp, Artificial Sequence
  Synthetic oligonucleotide
tgcggcgaatgctcctgcgcaagcgcaaac

SEQ ID NO: 249336 - DNA, 30 bp, Artificial Sequence
  Synthetic oligonucleotide
gtttctaacctggaaacctagagcgcaaac

SEQ ID NO: 249337 - DNA, 30 bp, Artificial Sequence
  Synthetic oligonucleotide
ttgacacgaggctcgaaaaggtgcgcaaac

SEQ ID NO: 249338 - DNA, 30 bp, Artificial Sequence
  Synthetic oligonucleotide
ttaacgcggcacacagagttgtaggcaaac

SEQ ID NO: 249339 - DNA, 30 bp, Artificial Sequence
  Synthetic oligonucleotide
tctttcgaccattggtgatcctcggcaaac

SEQ ID NO: 249340 - DNA, 30 bp, Artificial Sequence
  Synthetic oligonucleotide
gacggctcactaaccctccagggggcaaac

SEQ ID NO: 249341 - DNA, 30 bp, Artificial Sequence
  Synthetic oligonucleotide
catgtataccaatccggcacagaatcaaac

SEQ ID NO: 249342 - DNA, 30 bp, Artificial Sequence
  Synthetic oligonucleotide
cttataggatacttattgtgacgatcaaac

SEQ ID NO: 249343 - DNA, 30 bp, Artificial Sequence
  Synthetic oligonucleotide
tttggggatggtttgagtgccaagtcaaac

SEQ ID NO: 249344 - DNA, 29 bp, Artificial Sequence
  Synthetic oligonucleotide
attgggcgacggaaactccgaggtcaaac

SEQ ID NO: 249345 - DNA, 30 bp, Artificial Sequence
  Synthetic oligonucleotide
gtgacattaacgtacgcgctagtaagaaac

SEQ ID NO: 249346 - DNA, 30 bp, Artificial Sequence
  Synthetic oligonucleotide
acaacatatctccttggaggtcacagaaac

SEQ ID NO: 249347 - DNA, 30 bp, Artificial Sequence
  Synthetic oligonucleotide
tcgacgttgcaacgagcactttacagaaac

SEQ ID NO: 249348 - DNA, 30 bp, Artificial Sequence
  Synthetic oligonucleotide
gtatgcgggaacattctcccaaccagaaac

SEQ ID NO: 249349 - DNA, 30 bp, Artificial Sequence
  Synthetic oligonucleotide
gatttacaactctaacatgagaccagaaac

SEQ ID NO: 249350 - DNA, 30 bp, Artificial Sequence
  Synthetic oligonucleotide
ccgataacttcgtggtggcatgagagaaac

SEQ ID NO: 249351 - DNA, 30 bp, Artificial Sequence
  Synthetic oligonucleotide
gccagactcggcacgatagctgggagaaac

SEQ ID NO: 249352 - DNA, 30 bp, Artificial Sequence
  Synthetic oligonucleotide
attaggaaaggtgccactgatactagaaac

SEQ ID NO: 249353 - DNA, 30 bp, Artificial Sequence
  Synthetic oligonucleotide
aggccgcagaaacaaagtagatctagaaac

SEQ ID NO: 249354 - DNA, 30 bp, Artificial Sequence
  Synthetic oligonucleotide
ttgttgacacgtagctattgacgacgaaac

SEQ ID NO: 249355 - DNA, 30 bp, Artificial Sequence
  Synthetic oligonucleotide
ttacataatgagcttaaatagtagcgaaac

SEQ ID NO: 249356 - DNA, 30 bp, Artificial Sequence
  Synthetic oligonucleotide
tggccttcggtctatcccaaggatcgaaac

SEQ ID NO: 249357 - DNA, 30 bp, Artificial Sequence
  Synthetic oligonucleotide
cacataaccgcacgatcgggatcaggaaac

SEQ ID NO: 249358 - DNA, 30 bp, Artificial Sequence
  Synthetic oligonucleotide
ggtagaatgaagggagctcattcaggaaac

SEQ ID NO: 249359 - DNA, 30 bp, Artificial Sequence
  Synthetic oligonucleotide
ggcttgtcgattttgaagggcatcggaaac

SEQ ID NO: 249360 - DNA, 30 bp, Artificial Sequence
  Synthetic oligonucleotide
ccacctaagggttacagattggagggaaac

SEQ ID NO: 249361 - DNA, 30 bp, Artificial Sequence
  Synthetic oligonucleotide
gcatatcctattgaataacctaggggaaac

SEQ ID NO: 249362 - DNA, 30 bp, Artificial Sequence
  Synthetic oligonucleotide
ttggtcgaacctaaaatccaaaagtgaaac

SEQ ID NO: 249363 - DNA, 30 bp, Artificial Sequence
  Synthetic oligonucleotide
agagtacgagatgccgagcagaagtgaaac

SEQ ID NO: 249364 - DNA, 30 bp, Artificial Sequence
  Synthetic oligonucleotide
gatagtaaggagcatcatcgtccgtgaaac

SEQ ID NO: 249365 - DNA, 30 bp, Artificial Sequence
  Synthetic oligonucleotide
tcggttcgcgagaattaataaggaataaac

SEQ ID NO: 249366 - DNA, 30 bp, Artificial Sequence
  Synthetic oligonucleotide
tggtgttaacatagagtatgcggaataaac

SEQ ID NO: 249367 - DNA, 30 bp, Artificial Sequence
  Synthetic oligonucleotide
atggggccgacgctgttctcatgactaaac

SEQ ID NO: 249368 - DNA, 30 bp, Artificial Sequence
  Synthetic oligonucleotide
taattagaggcctggtctcgggacctaaac

SEQ ID NO: 249369 - DNA, 30 bp, Artificial Sequence
  Synthetic oligonucleotide
acactgcgtcgagggccatgccgtctaaac

SEQ ID NO: 249370 - DNA, 30 bp, Artificial Sequence
  Synthetic oligonucleotide
gcgggagaacagcagactggtcttctaaac

SEQ ID NO: 249371 - DNA, 30 bp, Artificial Sequence
  Synthetic oligonucleotide
aaagacccgtaccgcaaaaatacagtaaac

SEQ ID NO: 249372 - DNA, 30 bp, Artificial Sequence
  Synthetic oligonucleotide
gacaacgaggacgaattatatttagtaaac

SEQ ID NO: 249373 - DNA, 30 bp, Artificial Sequence
  Synthetic oligonucleotide
gacaagttacgaacagctgttactgtaaac

SEQ ID NO: 249374 - DNA, 30 bp, Artificial Sequence
  Synthetic oligonucleotide
tgaccatgacactgggctttccgtgtaaac

SEQ ID NO: 249375 - DNA, 30 bp, Artificial Sequence
  Synthetic oligonucleotide
ttaaactgggatccaggcattgagttaaac

SEQ ID NO: 249376 - DNA, 30 bp, Artificial Sequence
  Synthetic oligonucleotide
cagtggcgaatttcgggtcactggttaaac

SEQ ID NO: 249377 - DNA, 30 bp, Artificial Sequence
  Synthetic oligonucleotide
ttggtatcagaaaggctgagttgtttaaac

SEQ ID NO: 249378 - DNA, 30 bp, Artificial Sequence
  Synthetic oligonucleotide
gaaggacttcacgttggacgttgaaacaac

SEQ ID NO: 249379 - DNA, 30 bp, Artificial Sequence
  Synthetic oligonucleotide
ttgtgcccctgggcggtggtagtcaacaac

SEQ ID NO: 249380 - DNA, 30 bp, Artificial Sequence
  Synthetic oligonucleotide
gatgaggtatcctgtttcctatcgaacaac

SEQ ID NO: 249381 - DNA, 30 bp, Artificial Sequence
  Synthetic oligonucleotide
gtcattgccgcttctcgtctatggaacaac

SEQ ID NO: 249382 - DNA, 30 bp, Artificial Sequence
  Synthetic oligonucleotide
gttacccaaggttcaatcgcctggaacaac

SEQ ID NO: 249383 - DNA, 30 bp, Artificial Sequence
  Synthetic oligonucleotide
cgccagtacagaatgaacaattggaacaac

SEQ ID NO: 249384 - DNA, 30 bp, Artificial Sequence
  Synthetic oligonucleotide
ggggagcacggtgaagtgggacaccacaac

SEQ ID NO: 249385 - DNA, 30 bp, Artificial Sequence
  Synthetic oligonucleotide
ggtgttagttcccatgagcagtaccacaac

SEQ ID NO: 249386 - DNA, 30 bp, Artificial Sequence
  Synthetic oligonucleotide
gcctcatggtagtaacttccagtccacaac

SEQ ID NO: 249387 - DNA, 30 bp, Artificial Sequence
  Synthetic oligonucleotide
tgcgtatgagttcatctctgtcatcacaac

SEQ ID NO: 249388 - DNA, 30 bp, Artificial Sequence
  Synthetic oligonucleotide
gtcggcacaattggagatatcttagacaac

SEQ ID NO: 249389 - DNA, 30 bp, Artificial Sequence
  Synthetic oligonucleotide
aagacctgccaaaagtcgaagaaggacaac

SEQ ID NO: 249390 - DNA, 30 bp, Artificial Sequence
  Synthetic oligonucleotide
caaggcaatattttgtttacatgggacaac

SEQ ID NO: 249391 - DNA, 30 bp, Artificial Sequence
  Synthetic oligonucleotide
cagggcttccttgaaagaagcctggacaac

SEQ ID NO: 249392 - DNA, 30 bp, Artificial Sequence
  Synthetic oligonucleotide
gtgacaattctacgtgtgggtgaatacaac

SEQ ID NO: 249393 - DNA, 30 bp, Artificial Sequence
  Synthetic oligonucleotide
tgtggataggacactctaattgcctacaac

SEQ ID NO: 249394 - DNA, 30 bp, Artificial Sequence
  Synthetic oligonucleotide
acgaacgtatggatccactatccgtacaac

SEQ ID NO: 249395 - DNA, 30 bp, Artificial Sequence
  Synthetic oligonucleotide
catttattatttaagcaagcctcgtacaac

SEQ ID NO: 249396 - DNA, 30 bp, Artificial Sequence
  Synthetic oligonucleotide
ctacattagtacaattaacgccaaaccaac

SEQ ID NO: 249397 - DNA, 30 bp, Artificial Sequence
  Synthetic oligonucleotide
atgtagcattaacagtcaccgagaaccaac

SEQ ID NO: 249398 - DNA, 30 bp, Artificial Sequence
  Synthetic oligonucleotide
tcgaatttatccgctagtttgcgaaccaac

SEQ ID NO: 249399 - DNA, 30 bp, Artificial Sequence
  Synthetic oligonucleotide
gggtatctaggtacccctgagggaaccaac

SEQ ID NO: 249400 - DNA, 30 bp, Artificial Sequence
  Synthetic oligonucleotide
actggtttatcgactacgggcttaaccaac

SEQ ID NO: 249401 - DNA, 30 bp, Artificial Sequence
  Synthetic oligonucleotide
ctaacttaaatagcgactcgtcgcaccaac

SEQ ID NO: 249402 - DNA, 30 bp, Artificial Sequence
  Synthetic oligonucleotide
agcgtcgagagtatatggatttgcaccaac

SEQ ID NO: 249403 - DNA, 30 bp, Artificial Sequence
  Synthetic oligonucleotide
gatggggaagactccgacagattgaccaac

SEQ ID NO: 249404 - DNA, 30 bp, Artificial Sequence
  Synthetic oligonucleotide
ttcagcacgggcttgtatcggaaccccaac

SEQ ID NO: 249405 - DNA, 30 bp, Artificial Sequence
  Synthetic oligonucleotide
tttccacgagagcggaatgcctcccccaac

SEQ ID NO: 249406 - DNA, 30 bp, Artificial Sequence
  Synthetic oligonucleotide
agagttatagactgagcgaattggcccaac

SEQ ID NO: 249407 - DNA, 30 bp, Artificial Sequence
  Synthetic oligonucleotide
tccgcctcgatacagaggattccagccaac

SEQ ID NO: 249408 - DNA, 30 bp, Artificial Sequence
  Synthetic oligonucleotide
gtgtgcgcatgaataaaactccgcgccaac

SEQ ID NO: 249409 - DNA, 30 bp, Artificial Sequence
  Synthetic oligonucleotide
tagtacttctacattccccaaaaggccaac

SEQ ID NO: 249410 - DNA, 30 bp, Artificial Sequence
  Synthetic oligonucleotide
cggtacaaagctttagaacgttaggccaac

SEQ ID NO: 249411 - DNA, 30 bp, Artificial Sequence
  Synthetic oligonucleotide
tgtatggaatcacaattactccctgccaac

SEQ ID NO: 249412 - DNA, 30 bp, Artificial Sequence
  Synthetic oligonucleotide
gtgtgttgaaaaagcacatccattgccaac

SEQ ID NO: 249413 - DNA, 30 bp, Artificial Sequence
  Synthetic oligonucleotide
tattaagacgtcgagcgtctttcatccaac

SEQ ID NO: 249414 - DNA, 30 bp, Artificial Sequence
  Synthetic oligonucleotide
agggtgcttcctctatactcatgaagcaac

SEQ ID NO: 249415 - DNA, 30 bp, Artificial Sequence
  Synthetic oligonucleotide
cacttcggtgtgctgggatatacgagcaac

SEQ ID NO: 249416 - DNA, 30 bp, Artificial Sequence
  Synthetic oligonucleotide
cgggattcatgacaagcgagcgggagcaac

SEQ ID NO: 249417 - DNA, 30 bp, Artificial Sequence
  Synthetic oligonucleotide
tacttgcgtcagcaagccacgattagcaac

SEQ ID NO: 249418 - DNA, 30 bp, Artificial Sequence
  Synthetic oligonucleotide
gagaacgggcaaaccagatttgtacgcaac

SEQ ID NO: 249419 - DNA, 30 bp, Artificial Sequence
  Synthetic oligonucleotide
atcagatgttagtgcacgagtcaccgcaac

SEQ ID NO: 249420 - DNA, 30 bp, Artificial Sequence
  Synthetic oligonucleotide
agccacttaccagcggaacagctgcgcaac

SEQ ID NO: 249421 - DNA, 30 bp, Artificial Sequence
  Synthetic oligonucleotide
agtggcctgggccgctggttgccaggcaac

SEQ ID NO: 249422 - DNA, 30 bp, Artificial Sequence
  Synthetic oligonucleotide
gcaaaaacgctaaagttcaatttaggcaac

SEQ ID NO: 249423 - DNA, 30 bp, Artificial Sequence
  Synthetic oligonucleotide
ctcttggtcagggatcgttaatacggcaac

SEQ ID NO: 249424 - DNA, 30 bp, Artificial Sequence
  Synthetic oligonucleotide
aagtaatcgcctacagacctcaccggcaac

SEQ ID NO: 249425 - DNA, 30 bp, Artificial Sequence
  Synthetic oligonucleotide
gtccatcctgggcaaggatctatcggcaac

SEQ ID NO: 249426 - DNA, 30 bp, Artificial Sequence
  Synthetic oligonucleotide
ggagcagtcggcacgactgctacatgcaac

SEQ ID NO: 249427 - DNA, 30 bp, Artificial Sequence
  Synthetic oligonucleotide
atcaggttggcgtgaatcgttgcatgcaac

SEQ ID NO: 249428 - DNA, 30 bp, Artificial Sequence
  Synthetic oligonucleotide
atcggaacgtgtgagtgcatcggatgcaac
